United States Patent Application Publication US 2021/0199660 A1 - sequence listing, part 27

SEQ ID NO: 378754 - DNA, 120 bp, Artificial Sequence
  ENSG00000143355_72 (sequence is synthesized)
caggcagaggtcctggttccactgatcctccagtagtcagtggctccagggacgcgctcctgaccctccggggagctgctgggggtgtctctttcttggaagggatggaaggggggccga

SEQ ID NO: 378755 - DNA, 120 bp, Artificial Sequence
  ENSG00000143355_73 (sequence is synthesized)
gaagacactgtttctcacacgtgtaggggttaactggaaactggcttcacccacatttttttgttgttgttcagtcctaacccagcgcagccgtttctgcgcctgatctcagcggacgca

SEQ ID NO: 378756 - DNA, 120 bp, Artificial Sequence
  ENSG00000143355_74 (sequence is synthesized)
gtgcgggacttctccctttatttctgcagagctgagggcaggcggcgcaacaaatctcaggtaaaagagcatcagatttcagaagagctgtattctagacttggcgcaggcccctttggg

SEQ ID NO: 378757 - DNA, 120 bp, Artificial Sequence
  ENSG00000143355_75 (sequence is synthesized)
gtgcaaccaccattacggcgtgatccactccttttcctctaagaatgctgaacggtaccactctagaggcagtcctaacccagcgcagccgtttctgcgcctgatctcagcggacgcagt

SEQ ID NO: 378758 - DNA, 120 bp, Artificial Sequence
  ENSG00000143355_76 (sequence is synthesized)
ttctgcagagctgagggcaggcggcgcaacaaatctcagccatgctctttcacgggatctccggaggccacatccaaggcatcatggaggagatggagcgcagatccaagactgaggccc

SEQ ID NO: 378759 - DNA, 120 bp, Artificial Sequence
  ENSG00000143355_77 (sequence is synthesized)
tcatcctctcacttctttttttctttccttcttccctctctccctctctccctggcttttctcccgtcatctttctagctttggccacagttcccggtcgggctcccccgggcggaggga

SEQ ID NO: 378760 - DNA, 120 bp, Artificial Sequence
  ENSG00000143355_78 (sequence is synthesized)
agcgggtctgcggccgggcggctcttgtgaggtatctaggatgtgccaggacacaggcaccgcagtcctgggaaaggcggcgggaagtagtggggaacgcaggctgacgaaggggacgga

SEQ ID NO: 378761 - DNA, 120 bp, Artificial Sequence
  ENSG00000143355_79 (sequence is synthesized)
aggaacagagagcggccggcgcgtcctcctctctgggtaaagccgcgttggttcctgccgcagcgctgtgcttcggactcctagggggcctctggccgtttgaatgaatcgacaatatca

SEQ ID NO: 378762 - DNA, 120 bp, Artificial Sequence
  ENSG00000143355_80 (sequence is synthesized)
gagtattgtggacactttttaatggggccggggaggggccgccgctgccgagaactgagggcgacagaacaatcccacctcttgtgaggagcaggtctgccattctgcttgtcagttctc

SEQ ID NO: 378763 - DNA, 120 bp, Artificial Sequence
  ENSG00000143355_81 (sequence is synthesized)
accttcccctcctccacggcaaagagtccctttcacacccttctgagtgtgcgggtgcgcccagttttacaagtcctctgtcctgccagggtagtgggagaagcacgcgatggggctagc

SEQ ID NO: 378764 - DNA, 120 bp, Artificial Sequence
  ENSG00000143355_82 (sequence is synthesized)
gcccagtcctgcgggggcaggcgccaagctcccgggagtccgcaagtcgcttcctatattggcaagcttcaaatgagacattagaatctccggcaaccttccttcaaacctgaaccgggg

SEQ ID NO: 378765 - DNA, 120 bp, Artificial Sequence
  ENSG00000143355_83 (sequence is synthesized)
aagagaataagccgccctatggccaaggcgcaattgcgtacccgtgtgtacaggtccatgccctgtcccctacactctaattttctcaaagaaaattgttttgccaaaagtaaccctgag

SEQ ID NO: 378766 - DNA, 120 bp, Artificial Sequence
  ENSG00000143355_84 (sequence is synthesized)
ggagcccaggtggccttagtctctgggcctgatgaccggacctgtggagtagattccgacgcgactgggtcatttccagttctctagacgctcggggcttgggacccctaaccgagagaa

SEQ ID NO: 378767 - DNA, 120 bp, Artificial Sequence
  ENSG00000143355_85 (sequence is synthesized)
tctcagggtttctggcatcccgactcagtccctctaaggagacagcactacgtttagcgccaggacccggcgggtgtcatgtgtagggggaaatcaaataaaacatacggaggagcgcgg

SEQ ID NO: 378768 - DNA, 120 bp, Artificial Sequence
  ENSG00000143355_86 (sequence is synthesized)
cacccagtcgaaacgcatgaactttataaccaacccttaaacaagctaatcaaccaccactgtttctactatccataataataaagtcatgtcctcttaataaagaaaactaattactta

SEQ ID NO: 378769 - DNA, 120 bp, Artificial Sequence
  ENSG00000143363_0 (sequence is synthesized)
gcccgcttacgcagttcctcccggggtcggaggccgattcgccgtgtggcgggttcgagtcccgcctcctgactctggcctctagtccctgagtcccgggcgggctgcattcgtcgggga

SEQ ID NO: 378770 - DNA, 120 bp, Artificial Sequence
  ENSG00000143363_1 (sequence is synthesized)
aacctctcctcgaccaggggcacctctactcgaccaggggcgacggcgtactttgggcttcatcatggaggactacctgcagggttgtcgagctgctctgcaggagtcccgacctctaca

SEQ ID NO: 378771 - DNA, 120 bp, Artificial Sequence
  ENSG00000143363_2 (sequence is synthesized)
tgttgtgctgggaaatgaagcctgtgatttggactccacagtgtctgctcttgccctggctttttacctagcaaagacaactgaggctgaggaagtctttgtgccagttttaaatataaa

SEQ ID NO: 378772 - DNA, 120 bp, Artificial Sequence
  ENSG00000143363_3 (sequence is synthesized)
acgttctgaactacctctgcgaggtgacattgtcttctttcttcagaaggttcatattccagagagtatcttgatttttcgggatgagattgacctccatgcattataccaggctggcca

SEQ ID NO: 378773 - DNA, 120 bp, Artificial Sequence
  ENSG00000143363_4 (sequence is synthesized)
actcaccctcatccttgtcgaccatcatatcttatccaaaagtgacacagccctagaggaggcagtagcagaggtgctagaccatcgacccatcgagccgaaacactgccctccctgcca

SEQ ID NO: 378774 - DNA, 120 bp, Artificial Sequence
  ENSG00000143363_5 (sequence is synthesized)
tgtttcagttgagctggtggggtcctgtgctaccctggtgaccgagagaatcctgcagggggcaccagagatcttggacaggcaaactgcagcccttctgcatggaaccatcatcctgga

SEQ ID NO: 378775 - DNA, 120 bp, Artificial Sequence
  ENSG00000143363_6 (sequence is synthesized)
ctgtgtcaacatggaccttaaaattggaaaggcaaccccaaaggacagcaaatatgtggagaaactagaggcccttttcccagacctacccaagagaaatgatatatttgattccctaca

SEQ ID NO: 378776 - DNA, 120 bp, Artificial Sequence
  ENSG00000143363_7 (sequence is synthesized)
aaaggcaaagtttgatgtatcaggactgaccactgagcagatgctgagaaaagaccagaagactatctatagacaaggcgtcaaggtggccattagtgcaatatatatggatttggaggc

SEQ ID NO: 378777 - DNA, 120 bp, Artificial Sequence
  ENSG00000143363_8 (sequence is synthesized)
ctttctgcagaggtctaacctccttgcagatctccatgctttctgccaggctcacagctatgatgtcctggttgccatgactatctttttcaacactcacaatgagccagtgcggcagtt

SEQ ID NO: 378778 - DNA, 120 bp, Artificial Sequence
  ENSG00000143363_9 (sequence is synthesized)
ggctattttctgtccccatgtggcactccaaacaacgatctgtgaagtcctggaacgctcccactctccacccctgaagctgacccctgcctcaagtacccaccctaacctccatgccta

SEQ ID NO: 378779 - DNA, 120 bp, Artificial Sequence
  ENSG00000143363_10 (sequence is synthesized)
tcttcaaggcaacacccaggtctctcgaaagaaacttctgcccctgctccaggaagccctgtcagcatattttgactccatgaagatcccttcaggacagcctgagacagcagatgtgtc

SEQ ID NO: 378780 - DNA, 120 bp, Artificial Sequence
  ENSG00000143363_11 (sequence is synthesized)
cagggagcaagtggacaaggaattggacagggcaagtaactccctgatttctggcctgagtcaagatgaggaggaccctccgctgcccccgacgcccatgaacagcttggtggatgagtg

SEQ ID NO: 378781 - DNA, 120 bp, Artificial Sequence
  ENSG00000143363_12 (sequence is synthesized)
ctctctgctgaggccgtcttcgagaagtgcagtcagatctcactgtcacagtctaccacagcctccctgtccaagaagtgactgttgagaggcgaggaggtagtgggtgaggctacctga

SEQ ID NO: 378782 - DNA, 120 bp, Artificial Sequence
  ENSG00000143363_13 (sequence is synthesized)
ctcacttcaaatgcatgttttgagatgtttggagattcagcaattctgtcttcattgctccaggatctggtatactgttctcataaaactgagaggagaaaaaaagtgaaagaaagcagc

SEQ ID NO: 378783 - DNA, 120 bp, Artificial Sequence
  ENSG00000143363_14 (sequence is synthesized)
tgctttaagaatggttttccaccttttccccctaatctctaccaatcagacacattttattatttaaatctgcacctctctctattttatttgccaggggcacgatgtgacatatctgca

SEQ ID NO: 378784 - DNA, 120 bp, Artificial Sequence
  ENSG00000143363_15 (sequence is synthesized)
gtcccagcacagtgggacaaaaagaatttagaccccaaaagtgtcctcggcatggatcttgaacagaaccagtatctgtcatggaactgaacattcatcgatggtctccatgtattcatt

SEQ ID NO: 378785 - DNA, 120 bp, Artificial Sequence
  ENSG00000143363_16 (sequence is synthesized)
tattcacttgttcattcaagtatttattgaatacctgcctcaagctagagagaaaagagagtgcgctttggaaatttattccagttttcagcctacagcagattatcagctcggtgactt

SEQ ID NO: 378786 - DNA, 120 bp, Artificial Sequence
  ENSG00000143363_17 (sequence is synthesized)
ttctttctgccaccatttaggtgatggtgtttgattcagagatggctgaatttctattcttagcttattgtgactgtttcagatctagtttgggaacagattagaggccattgtcttctg

SEQ ID NO: 378787 - DNA, 120 bp, Artificial Sequence
  ENSG00000143363_18 (sequence is synthesized)
tcctgatcaggtggcctggctgtttctttggatccctctgtcccagagccacccagaaccctgactcttgagaatcaagaaaacacccagaaaggccttaatgacctcataggcactctt

SEQ ID NO: 378788 - DNA, 120 bp, Artificial Sequence
  ENSG00000143363_19 (sequence is synthesized)
ccaaaaagacaacagaactggaatgagaggcctgggtctgtctcctgccttagcaggcctatcaatttcttgtcaatctctttttttccttgctcacattaaaaggaagcatggagttct

SEQ ID NO: 378789 - DNA, 120 bp, Artificial Sequence
  ENSG00000143363_20 (sequence is synthesized)
aatgctcccataaactatgtattttggcaagacacttcactactccaggtctcactttccccatctgtaaaacagggtttggactaggtgttccctggtattctgtgatctgcctcttgc

SEQ ID NO: 378790 - DNA, 120 bp, Artificial Sequence
  ENSG00000143363_21 (sequence is synthesized)
tgccattctttctctcctctgcttctctgtatttttcttctgttatccctgggggtgctcaggttcacttgattgtctgtatttctgtgtggttgtagcaaggactcagcctcatgtagc

SEQ ID NO: 378791 - DNA, 120 bp, Artificial Sequence
  ENSG00000143363_22 (sequence is synthesized)
acgaataggggtgtggttcatggcgtgttgacccagcagagcactccctcccactaacttgttctgcatgtgtagagtctccccattttttttaacgcaaccctttcccctttttcctac

SEQ ID NO: 378792 - DNA, 120 bp, Artificial Sequence
  ENSG00000143363_23 (sequence is synthesized)
cccacagctctgttccatgtaagttgccaacagtttcactgaacagtggggtatgtgatggttttggcatgacatcttcagtatgagggggacagtttgacttcactttgagggtgtgat

SEQ ID NO: 378793 - DNA, 120 bp, Artificial Sequence
  ENSG00000143363_24 (sequence is synthesized)
gtctgtagctatgtggaaggtaaaaatagtggtgtgatcatgaaccaaaggaatttatgttttgtaacttgggtactttattttgcattttgttatactattaaataattttttcctgtt

SEQ ID NO: 378794 - DNA, 120 bp, Artificial Sequence
  ENSG00000143365_0 (sequence is synthesized)
agccagggcagccaggacggcaccaagggagctgccccatggacagggccccacagagacagcaccgagcctcacgggagctgctggctgcaaagaagacccacacctcacaaattgaag

SEQ ID NO: 378795 - DNA, 120 bp, Artificial Sequence
  ENSG00000143365_1 (sequence is synthesized)
tgatcccttgcaaaatctgtggggacaagtcgtctgggatccactacggggttatcacctgtgaggggtgcaagggcttcttccgccggagccagcgctgtaacgcggcctactcctgca

SEQ ID NO: 378796 - DNA, 120 bp, Artificial Sequence
  ENSG00000143365_2 (sequence is synthesized)
cccgtcagcagaactgccccatcgaccgcaccagccgaaaccgatgccagcactgccgcctgcagaaatgcctggcgctgggcatgtcccgagatgctgtcaagttcggccgcatgtcca

SEQ ID NO: 378797 - DNA, 120 bp, Artificial Sequence
  ENSG00000143365_3 (sequence is synthesized)
agaagcagagggacagcctgcatgcagaagtgcagaaacagctgcagcagcggcaacagcagcaacaggaaccagtggtcaagacccctccagcaggggcccaaggagcagataccctca

SEQ ID NO: 378798 - DNA, 120 bp, Artificial Sequence
  ENSG00000143365_4 (sequence is synthesized)
cctacaccttggggctcccagacgggcagctgcccctgggctcctcgcctgacctgcctgaggcttctgcctgtccccctggcctcctgaaagcctcaggctctgggccctcatattcca

SEQ ID NO: 378799 - DNA, 120 bp, Artificial Sequence
  ENSG00000143365_5 (sequence is synthesized)
acaacttggccaaggcagggctcaatggggcctcatgccaccttgaatacagccctgagcggggcaaggctgagggcagagagagcttctatagcacaggcagccagctgacccctgacc

SEQ ID NO: 378800 - DNA, 120 bp, Artificial Sequence
  ENSG00000143365_6 (sequence is synthesized)
gatgtggacttcgttttgaggaacacaggcatcctgggcttggggaactgggacagggcccagacagctacggcagccccagtttccgcagcacaccggaggcaccctatgcctccctga

SEQ ID NO: 378801 - DNA, 120 bp, Artificial Sequence
  ENSG00000143365_7 (sequence is synthesized)
cagagatagagcacctggtgcagagcgtctgcaagtcctacagggagacatgccagctgcggctggaggacctgctgcggcagcgctccaacatcttctcccgggaggaagtgactggct

SEQ ID NO: 378802 - DNA, 120 bp, Artificial Sequence
  ENSG00000143365_8 (sequence is synthesized)
accagaggaagtccatgtgggagatgtgggaacggtgtgcccaccacctcaccgaggccattcagtacgtggtggagttcgccaagaggctctcaggctttatggagctctgccagaatg

SEQ ID NO: 378803 - DNA, 120 bp, Artificial Sequence
  ENSG00000143365_9 (sequence is synthesized)
accagattgtgcttctcaaagcaggagcaatggaagtggtgctggttaggatgtgccgggcctacaatgctgacaaccgcacggtcttttttgaaggcaaatacggtggcatggagctgt

SEQ ID NO: 378804 - DNA, 120 bp, Artificial Sequence
  ENSG00000143365_10 (sequence is synthesized)
tccgagccttgggctgcagcgagctcatcagctccatctttgacttctcccactccctaagtgccttgcacttttccgaggatgagattgccctctacacagcccttgttctcatcaatg

SEQ ID NO: 378805 - DNA, 120 bp, Artificial Sequence
  ENSG00000143365_11 (sequence is synthesized)
cccatcggccagggctccaagagaaaaggaaagtagaacagctgcagtacaatctggagctggcctttcatcatcatctctgcaagactcatcgccaaagcatcctggcaaagctgccac

SEQ ID NO: 378806 - DNA, 120 bp, Artificial Sequence
  ENSG00000143365_12 (sequence is synthesized)
agcactgaaaccgagtcacctgtggggctgtccaagtgacctggaagagggactccttgcctctccctatggcctgctggcccacctccctggaccccgttccaccctcacccttttcct

SEQ ID NO: 378807 - DNA, 120 bp, Artificial Sequence
  ENSG00000143365_13 (sequence is synthesized)
ttcccatgaaccctggagggtggtccccaccagctctttggaagtgagcagatgctgcggctggctttctgtcagcaggccggcctggcagtgggacaatcgccagagggtggggctggc

SEQ ID NO: 378808 - DNA, 120 bp, Artificial Sequence
  ENSG00000143365_14 (sequence is synthesized)
agaacaccatctccagcctcagctttgacctgtctcatttcccatattccttcacacccagcttctggaaggcatggggtggctgggatttaaggacttctgggggaccaagacatcctc

SEQ ID NO: 378809 - DNA, 120 bp, Artificial Sequence
  ENSG00000143365_15 (sequence is synthesized)
aagaaaacaggggcatccagggctccctggatgaatagaatgcaattcattcagaagctcagaagctaagaataagcctttgaaatacctcattgcatttccctttgggcttcggcttgg

SEQ ID NO: 378810 - DNA, 120 bp, Artificial Sequence
  ENSG00000143365_16 (sequence is synthesized)
ggagatggatcaagctcagagactggcagtgagagcccagaaggacctgtataaaatgaatctggagctttacattttctgcctctgccttcctcccagctcagcaaggaagtatttggg

SEQ ID NO: 378811 - DNA, 120 bp, Artificial Sequence
  ENSG00000143365_17 (sequence is synthesized)
caccctaccctttacctggggtctaaccaaaaatggatgggatgaggatgagaggctggagataattgttttatgggatttgggtgtgggactagggtacaatgaaggccaagagcatct

SEQ ID NO: 378812 - DNA, 120 bp, Artificial Sequence
  ENSG00000143365_18 (sequence is synthesized)
cagacatagagttaaaactcaaacctcttatgtgcactttaaagatagactttaggggctggcacaaatctgatcagagacacatatccatacacaggtgaaacacatacagactcaaca

SEQ ID NO: 378813 - DNA, 120 bp, Artificial Sequence
  ENSG00000143365_19 (sequence is synthesized)
gcaatcatgcagttccagagacacatgaacctgacacaatctctcttatccttgaggccacagcttggaggagcctagaggcctcaggggaaagtcccaatcctgagggaccctcccaaa

SEQ ID NO: 378814 - DNA, 120 bp, Artificial Sequence
  ENSG00000143365_20 (sequence is synthesized)
catttccatggtgctccagtccactgatcttgggtctggggtgatccaaataccaccccagctccagctgtcttctaccactagaagacccaagagaagcagaagtcgctcgcactggtc

SEQ ID NO: 378815 - DNA, 120 bp, Artificial Sequence
  ENSG00000143365_21 (sequence is synthesized)
agtcggaaggcaagatcagatcctggaggactttcctggcctgcccgccagccctgctcttgttgtggagaaggaagcagatgtgatcacatcaccccgtcattgggcaccgctgactcc

SEQ ID NO: 378816 - DNA, 120 bp, Artificial Sequence
  ENSG00000143365_22 (sequence is synthesized)
agcatggaggacaccagggagcagggcctgggcctgtttccccagctgtgatcttgcccagaacctctcttggcttcataaacagctgtgaaccctcccctgagggattaacagcaatga

SEQ ID NO: 378817 - DNA, 120 bp, Artificial Sequence
  ENSG00000143365_23 (sequence is synthesized)
tgggcagtcgtggagttgggggggttgggggtgggattgtgtcctctaaggggacgggttcatctgagtaaacataaaccccaacttgtgccattctttataaaatgattttaaaggcaa

SEQ ID NO: 378818 - DNA, 120 bp, Artificial Sequence
  ENSG00000143365_24 (sequence is synthesized)
agtccagaagcactgggggagagagctaggtgcagagcttcaggctgaggcgctgctgagagggcctcgccccgcctctgccgccagctgcaccccactcctggaccaccccctgctgag

SEQ ID NO: 378819 - DNA, 120 bp, Artificial Sequence
  ENSG00000143365_25 (sequence is synthesized)
acagagacagcaccgagcctcacgggagaatgtggggcactgggccatcagcagggaaggacagaatgtcaggccgtccttggccccacccatggtccaagtcaggaaccccctcagagc

SEQ ID NO: 378820 - DNA, 120 bp, Artificial Sequence
  ENSG00000143365_26 (sequence is synthesized)
aggatcgcagggccacaggcttggtcagctgtgagcatggaggaggaaagtttgagggccagagccaccaagctccagggccacctggtggaggaagaactggctgcctggagctgctgg

SEQ ID NO: 378821 - DNA, 120 bp, Artificial Sequence
  ENSG00000143365_27 (sequence is synthesized)
gcatgtcccgagatggtgaggccaagtcgacagccccctggggttttcctggtgtctccagaggggcagcctggcctgctgagctagacaaggcttaacctgcaagacggcccatcctct

SEQ ID NO: 378822 - DNA, 120 bp, Artificial Sequence
  ENSG00000143365_28 (sequence is synthesized)
ggtctcctctccattcctccccgttacaaccccttgtctcctcccctccagggatggatgggtcacccccatcaaagttctttggagtccccaactttaggctttgctagaacaaacatc

SEQ ID NO: 378823 - DNA, 120 bp, Artificial Sequence
  ENSG00000143365_29 (sequence is synthesized)
gccctcctccctcccctgggccctgctccctgccctcctgggcagccagggcagccaggacggcaccaagggagctgccccatggacagggccccacagagacagcaccgagcctcacgg

SEQ ID NO: 378824 - DNA, 120 bp, Artificial Sequence
  ENSG00000143365_30 (sequence is synthesized)
gggaacgtatcccacccccaccgggagagttcagagatggctacctgcgcacgactgggtcctggggcagggcgggacatcacagacacaggctggccaacaagcatgtgcacacctttt

SEQ ID NO: 378825 - DNA, 120 bp, Artificial Sequence
  ENSG00000143365_31 (sequence is synthesized)
atgtacagttgcgaatgtgtgtatctgtctacaccccagcagatggatgagcgcttttccttagttcttgcctattaaaattgtacctggccttcatcctacctcctctaccatgcagac

SEQ ID NO: 378826 - DNA, 120 bp, Artificial Sequence
  ENSG00000143365_32 (sequence is synthesized)
cttggtgcaccctccttcctcctcttccatcaacaataacaataatcagaaccctgattaccatttgttaaacaccccttctctgccaggcattgtgctaaacgctttatgtaaattatc

SEQ ID NO: 378827 - DNA, 120 bp, Artificial Sequence
  ENSG00000143365_33 (sequence is synthesized)
ctcagcccctaccacaaccaacctatgagggtggcatttattcctacttttaacagacagaaactgagcctagaggggttaataggtttcctcaaagtcacaaagtggtggaaccaaagt

SEQ ID NO: 378828 - DNA, 120 bp, Artificial Sequence
  ENSG00000143365_34 (sequence is synthesized)
caaattcagattcatcaggctccaaagtttatgctgccttttcgatcacactctcataccacctgctctaaacacactcgtttggcacttcacatttgcttctccaggttattgagacct

SEQ ID NO: 378829 - DNA, 120 bp, Artificial Sequence
  ENSG00000143365_35 (sequence is synthesized)
tgggcataacctttgtgggggaaggggcagctgtatgtcctgttcacctcaacgagatataccttgttggagggcaaagctgtatctcatactttttggattccctcacaacagctaact

SEQ ID NO: 378830 - DNA, 120 bp, Artificial Sequence
  ENSG00000143365_36 (sequence is synthesized)
cggtgtcagcagccggtaggtgctcagtgtgtgggactcactggcaggaatctgtgcatttgtgctaagaccaggcttttgaaaatgctagttgagaacataggagttcagagcctaccc

SEQ ID NO: 378831 - DNA, 120 bp, Artificial Sequence
  ENSG00000143365_37 (sequence is synthesized)
gcaggcctggggacaaggggacagagccaagtggagggaggtggcttaaggaaatcagggggacagagtcagatcctggctttgcttgacactgtccctgcatcttctctccccactgcc

SEQ ID NO: 378832 - DNA, 120 bp, Artificial Sequence
  ENSG00000143365_38 (sequence is synthesized)
caggagcaatggaagtggtgctggttaggatgtgccgggcctacaatgctgacaaccgcacggtcttttttgaaggcaaatacggtggcatggagctgttccgagccttgggtgaggggc

SEQ ID NO: 378833 - DNA, 120 bp, Artificial Sequence
  ENSG00000143365_39 (sequence is synthesized)
agggagaaatgagagggaagattctgatgccaaccccaggcaaagctttgtgacccagggcaccctcttttcagggcgaattgccccctctgctctaaacacaataagggcggtgtcctc

SEQ ID NO: 378834 - DNA, 120 bp, Artificial Sequence
  ENSG00000143365_40 (sequence is synthesized)
gggcaccatcgctccagccactctctcacttttctcatttccactccatcaggctgcagcgagctcatcagctccatctttgacttctcccactccctaagtgccttgcacttttccgag

SEQ ID NO: 378835 - DNA, 120 bp, Artificial Sequence
  ENSG00000143365_41 (sequence is synthesized)
gatgagattgccctctacacagcccttgttctcatcaatgcccgtgagtgttgctgggcttgggtgaaggacattcaggtggcaggggcatggcagatattgaagaagagtctagacctt

SEQ ID NO: 378836 - DNA, 120 bp, Artificial Sequence
  ENSG00000143365_42 (sequence is synthesized)
cagatgtagttaaatctgggaaattgctttaaatagcagaatgagccctactcagtattgctataaaataaaatgagttaaaataaagattcagaggactctcagagagggacaagagca

SEQ ID NO: 378837 - DNA, 120 bp, Artificial Sequence
  ENSG00000143365_43 (sequence is synthesized)
ctgacagaaatgtgtctgattgttagtctatggcagtgatttcattgtagcacacatcagaatcacctggggagctttaaaaactattgctgcctgggtcccacttccagagattccagt

SEQ ID NO: 378838 - DNA, 120 bp, Artificial Sequence
  ENSG00000143365_44 (sequence is synthesized)
gtacatgtgctccatgacttatgatggggttatgtcccaataaacctatcgtaagttgaaaatatggtaagttgaaattgcatttaacacgcctaacttactgaacaccatagcttagcc

SEQ ID NO: 378839 - DNA, 88 bp, Artificial Sequence
  ENSG00000143365_45 (sequence is synthesized)
acgcctaacttactgaacaccatagtgcttacattagcctacagtctggcaaaagcatataacacaaagcctattttataataaagtg

SEQ ID NO: 378840 - DNA, 120 bp, Artificial Sequence
  ENSG00000143365_46 (sequence is synthesized)
tctaaaagtgaacagcaggatggttgcatgggtattcaaagtatggtttctactgaatgcaagtggctttctcaccaacataaaatcaaaaaatagtaagtcaactcatcataagactgg

SEQ ID NO: 378841 - DNA, 120 bp, Artificial Sequence
  ENSG00000143365_47 (sequence is synthesized)
gaccatctgtaattgataaggggtgcactgaattttaacagccacccccaggccaccaagattaagaatcactgctctgtgtgaactaattttaaggctgtatgcctataataggaagac

SEQ ID NO: 378842 - DNA, 120 bp, Artificial Sequence
  ENSG00000143365_48 (sequence is synthesized)
tctggatatcctatccactcccctggcatggagtagctgggctgagccagatgaatactaaatattcagagaacctagggaagtgggtcaagctgctaacctgagtttgcagatcgagac

SEQ ID NO: 378843 - DNA, 120 bp, Artificial Sequence
  ENSG00000143365_49 (sequence is synthesized)
tatcagtcttctggctctgccagtgagtggacacctaaatatgcccttcaaactagaagataaaaactttaaagatgacttctggatattttatagaatcagggcaaaagttagtcacag

SEQ ID NO: 378844 - DNA, 120 bp, Artificial Sequence
  ENSG00000143365_50 (sequence is synthesized)
attgctgcaagccccctggtgcaggcctgggcaccttcaggaaggccacctcctatcaggagcccttttcgtacatgggggagctcttttccaactcttgttacccctatgacagaatcc

SEQ ID NO: 378845 - DNA, 120 bp, Artificial Sequence
  ENSG00000143365_51 (sequence is synthesized)
tagtgcctagcattgaatgagctatgtggaatatcaggttaccagggagaaggtagcttggagtcaggagatcagaaattctcatacctttcatctcttcccagttttccttgtagacag

SEQ ID NO: 378846 - DNA, 120 bp, Artificial Sequence
  ENSG00000143365_52 (sequence is synthesized)
ctagccaagcccaacgtccagagcttaccattatcaaaccaaggcacacacatgcacgcgctcagcttagaagacctctatccagcacagatgtccacaaagatacacccttttgttggg

SEQ ID NO: 378847 - DNA, 120 bp, Artificial Sequence
  ENSG00000143367_0 (sequence is synthesized)
agttggagccagacagcggggtggacaagtggcgtgtgtgctgcgaccccgagggaagatgaacgggacgcggaactggtgtaccctggtggacgtgcacccagaggaccaggcggcggg

SEQ ID NO: 378848 - DNA, 120 bp, Artificial Sequence
  ENSG00000143367_1 (sequence is synthesized)
cagcgtggacattctcaggctgactctccagggtgaactgacaggagatgaacttgaacacatagcccagaaggcgggcaggaagacctatgccatggtgtccagccactcagctggtca

SEQ ID NO: 378849 - DNA, 120 bp, Artificial Sequence
  ENSG00000143367_2 (sequence is synthesized)
ttctctggcttcagaactggtggagtcccatgatggacatgaggagatcattaaggtgtacttgaaggggaggtctggagacaagatgattcacgagaagaatattaaccagctgaagag

SEQ ID NO: 378850 - DNA, 120 bp, Artificial Sequence
  ENSG00000143367_3 (sequence is synthesized)
tgaggtccagtacatccaggaggccaggaactgcctacagaagctccgggaggatataagtagcaagcttgacaggaacctaggagattctctccatcgacaggagatacaggtggtgct

SEQ ID NO: 378851 - DNA, 120 bp, Artificial Sequence
  ENSG00000143367_4 (sequence is synthesized)
agaaaagccaaatggctttagtcagagtcccacagccctgtacagcagcccacctgaggtggacacctgtataaatgaggatgttgagagcttgaggaagacggtgcaggacttgctggc

SEQ ID NO: 378852 - DNA, 120 bp, Artificial Sequence
  ENSG00000143367_5 (sequence is synthesized)
caagcttcaggaggccaagcggcaacaccagtcagactgtgtggcttttgaggtcacactcagccggtaccagagggaagcagaacaaagtaatgtggcccttcagagagaggaggacag

SEQ ID NO: 378853 - DNA, 120 bp, Artificial Sequence
  ENSG00000143367_6 (sequence is synthesized)
agtggagcagaaagaggcagaagtcggagagctgcagaggcgcttgctagggatggagacggagcatcaggccttactggcgaaagtgagggaaggggaggtggccctagaggaacttcg

SEQ ID NO: 378854 - DNA, 120 bp, Artificial Sequence
  ENSG00000143367_7 (sequence is synthesized)
gagcaacaatgctgactgccaagcagaacgagaaaaggctgctaccctggaaaaggaagtggccgggttgcgggagaagatccaccacttggatgacatgctcaagagccagcagcggaa

SEQ ID NO: 378855 - DNA, 120 bp, Artificial Sequence
  ENSG00000143367_8 (sequence is synthesized)
agtccggcaaatgatagagcagctccagaattcaaaagctgtgatccagtcaaaggacgccaccatccaggagctcaaggagaaaatcgcctatctggaggcagagaatttagagatgca

SEQ ID NO: 378856 - DNA, 120 bp, Artificial Sequence
  ENSG00000143367_9 (sequence is synthesized)
tgaccggatggaacacctgatagaaaaacaaatcagtcatggcaacttcagcacccaggcccgggccaagacagagaacccgggcagtattaggatatccaagccgcctagcccgaagcc

SEQ ID NO: 378857 - DNA, 120 bp, Artificial Sequence
  ENSG00000143367_10 (sequence is synthesized)
catgcctgtcatccgagtggtggaaacctgagctgcctggagatggttgctgccattgctgctgcctctgcctcggagaagcccactgcccctgttggctgttaacactgcctttgactt

SEQ ID NO: 378858 - DNA, 120 bp, Artificial Sequence
  ENSG00000143367_11 (sequence is synthesized)
cctgactgtcccctggctgcacccaggacttcgggctcctgtgtctcaccattcccaagcccctggccactctaagctgggcagacggagcacgagcacctattcaaggcactgcagccc

SEQ ID NO: 378859 - DNA, 120 bp, Artificial Sequence
  ENSG00000143367_12 (sequence is synthesized)
ctgtgccataagccaggccttcatcagattgggagaggtgacaagatttgcctcagccctaaaagctggagacacagatgtccagagtgattggagaatgtcctgggggaatgaagttcc

SEQ ID NO: 378860 - DNA, 120 bp, Artificial Sequence
  ENSG00000143367_13 (sequence is synthesized)
ttccacaaacacagctcagttcttagcaacaaactgtttgtttttctacttgctccatctgcagcctacgctgccctggcctcctgcagacagatagtggggttacctggcaaggcctgg

SEQ ID NO: 378861 - DNA, 120 bp, Artificial Sequence
  ENSG00000143367_14 (sequence is synthesized)
tgagagccagtgaacctaagctttgactgggtggccttgtctttctggggaggagggaatgtacattcagggagtagccttttgcggaaaaattctctagggctacagacagtcatgtgt

SEQ ID NO: 378862 - DNA, 120 bp, Artificial Sequence
  ENSG00000143367_15 (sequence is synthesized)
gacttctctctgctgtgaaaactcccagagtctctttagggattttccctaaggtgtaccaccaggcacacctcagtcttcttgacccagagcctgaaaactgttttcactgggttccac

SEQ ID NO: 378863 - DNA, 120 bp, Artificial Sequence
  ENSG00000143367_16 (sequence is synthesized)
cagtcccagcaaaatcctctttgtatttattttgctaagttattggtggttttgcttacatctcatgattgatataataccaaagttctatagccttctcttgcagtatttggatttgct

SEQ ID NO: 378864 - DNA, 120 bp, Artificial Sequence
  ENSG00000143367_17 (sequence is synthesized)
tgaaaccgggaaaactgttcccattaggcttgttaatgtcagagtgacactattatgaatctttctctccctttcctctgcctgtttcttctctctttctccttcaaacttgctctgcag

SEQ ID NO: 378865 - DNA, 120 bp, Artificial Sequence
  ENSG00000143367_18 (sequence is synthesized)
ctaaggaaggtgagtctactttccctgaggctttggggtcagagtatatgttgtttggagaaagagggcaatcaggactcttctgggacccagatgagttcttcactagcccttctgaac

SEQ ID NO: 378866 - DNA, 120 bp, Artificial Sequence
  ENSG00000143367_19 (sequence is synthesized)
gggacccagatgagttcttcactagcccttctgaaccccttgctccataattggtcttttatcctggctctgaatgaccctgcaggtcatcatggttttctttttttattgttttttttt

SEQ ID NO: 378867 - DNA, 120 bp, Artificial Sequence
  ENSG00000143367_20 (sequence is synthesized)
gcgcccggcccatggtgtttttctttagggctcttcctacaaccttgagaagtagataggcatcagagtatggtactataggaatcagaaaaattcaaaacaaatgtggattaagtgttt

SEQ ID NO: 378868 - DNA, 120 bp, Artificial Sequence
  ENSG00000143367_21 (sequence is synthesized)
aggctctatgtggctcacgcagccagaatccttaagtctgtgtgtttctgtgtctcaagactgggctcacattctggctttgtccataacaatgctctgggatttcagggagttccctca

SEQ ID NO: 378869 - DNA, 120 bp, Artificial Sequence
  ENSG00000143367_22 (sequence is synthesized)
tttgtaaaatgagggggtcagagcaggtgatatccatgtttcttccctttctgatattgttgtctgtggcatattctttgtatggcgaatttaataaattatattaatgtgtctctttga

SEQ ID NO: 378870 - DNA, 120 bp, Artificial Sequence
  ENSG00000143367_23 (sequence is synthesized)
cagttggagccagacagcggggtggacaagtggcgtgtgtgctgcgaccccgagggaagatgaacgggacgcggaactggtgtaccctggtggacgtgcacccagaggaccaggcggcgg

SEQ ID NO: 378871 - DNA, 120 bp, Artificial Sequence
  ENSG00000143367_24 (sequence is synthesized)
ttttctcatggaacgctagaaatcttttcttctttcgcttcgttccttcttcctcttctcctttcttcattccttcctttttctccctccctttctttttctctctccctccccctccct

SEQ ID NO: 378872 - DNA, 120 bp, Artificial Sequence
  ENSG00000143367_25 (sequence is synthesized)
ttcaccttcctctccctctccctgtccttctctttctaagatttgagtgttaggagaataatgtttcaaagttggttgctttcatctgttttaactaccaattttatttttctttgaaca

SEQ ID NO: 378873 - DNA, 120 bp, Artificial Sequence
  ENSG00000143367_26 (sequence is synthesized)
tgtgccaggcagtctcatttaccaattacccagtgtgtgctaaatctagcatccctgccaggaatggagaaaatagaggtgatgctggcttctctggagcactcacaatctggttaggac

SEQ ID NO: 378874 - DNA, 120 bp, Artificial Sequence
  ENSG00000143367_27 (sequence is synthesized)
tctccagccgatgagcacttacatttacacatgtcagcttaaacataagtacacctgctcctgaaacactgtacagaaattgaacttatataaattaaatatcatcagttgttagcaaac

SEQ ID NO: 378875 - DNA, 120 bp, Artificial Sequence
  ENSG00000143367_28 (sequence is synthesized)
ctcttatctataaggattctgtgatcaagcttcttataataatagaattttgtaaagcagacaatcacctgtaaatccacacttctcataagctgatcttgcttagtttgggtgatacct

SEQ ID NO: 378876 - DNA, 120 bp, Artificial Sequence
  ENSG00000143368_0 (sequence is synthesized)
agaaggcggaaccgctgctgggagacggcgggatctctttcgccatggctgccgggccgatctccgagcggaatcaggatgccactgtgtacgtggggggcctggatgagaaggttagtg

SEQ ID NO: 378877 - DNA, 120 bp, Artificial Sequence
  ENSG00000143368_1 (sequence is synthesized)
aaccgctgctgtgggaactgtttctccaggctggaccagtagtcaacacccacatgccaaaggatagagtcactggccagcaccaaggctatggctttgtggaattcttgagtgaggaag

SEQ ID NO: 378878 - DNA, 120 bp, Artificial Sequence
  ENSG00000143368_2 (sequence is synthesized)
atgctgactatgccattaagatcatgaacatgatcaaactctatgggaagccaatacgggtgaacaaagcatcagctcacaacaaaaacctggatgtaggggccaacattttcattggga

SEQ ID NO: 378879 - DNA, 120 bp, Artificial Sequence
  ENSG00000143368_3 (sequence is synthesized)
acctggaccctgagattgatgagaagttgctttatgatactttcagcgcctttggggtcatcttacaaacccccaaaattatgcgggaccctgacacaggcaactccaaaggttatgcct

SEQ ID NO: 378880 - DNA, 120 bp, Artificial Sequence
  ENSG00000143368_4 (sequence is synthesized)
ttattaattttgcttcatttgatgcttcggatgcagcaattgaagccatgaatgggcagtacctctgtaaccgtcctatcaccgtatcttatgccttcaagaaggactccaagggtgagc

SEQ ID NO: 378881 - DNA, 120 bp, Artificial Sequence
  ENSG00000143368_5 (sequence is synthesized)
gccatggctcagcagccgaacgacttctggcagctcagaacccgctctcccaggctgatcgccctcatcagctgtttgcagatgcacctcctccaccctctgctcccaatcctgtggtat

SEQ ID NO: 378882 - DNA, 120 bp, Artificial Sequence
  ENSG00000143368_6 (sequence is synthesized)
atgcccccaccacctatgcctcctggggctgcaggacatggccccccatcggcaggaaccccaggggcaggacatcctggtcatggacactcacatcctcacccattcccaccgggtggg

SEQ ID NO: 378883 - DNA, 120 bp, Artificial Sequence
  ENSG00000143368_7 (sequence is synthesized)
atgccccatccagggatgtctcagatgcagcttgcacaccatggccctcatggcttaggacatccccacgctggacccccaggctctgggggccagccaccgccccgaccaccacctgga

SEQ ID NO: 378884 - DNA, 120 bp, Artificial Sequence
  ENSG00000143368_8 (sequence is synthesized)
atgcctcatcctggacctcctccaatgggcatgcccccccgagggcctccattcggatctcccatgggtcacccaggtcctatgcctccgcatggtatgcgtggacctcctccactgatg

SEQ ID NO: 378885 - DNA, 120 bp, Artificial Sequence
  ENSG00000143368_9 (sequence is synthesized)
cccccccatggatacactggccctccacgacccccaccctatggctaccagcgggggcctctccctccacccagacccactccccggccaccagttccccctcgaggcccacttcgaggc

SEQ ID NO: 378886 - DNA, 120 bp, Artificial Sequence
  ENSG00000143368_10 (sequence is synthesized)
cctctccctcagtaaattcacattttccttcctcctgttacattttcccaatatcttttctattccttggaccaatcagagatgctgtagctccttggggcaaaggtactaatccctttc

SEQ ID NO: 378887 - DNA, 120 bp, Artificial Sequence
  ENSG00000143368_11 (sequence is synthesized)
agcacccccactccattcccctttttaatgtaactttttccacaggaggtatttcttttttatgttggtcctgagtattttgcaaatgcacagagaaaataaaactaaactccttgttta

SEQ ID NO: 378888 - DNA, 120 bp, Artificial Sequence
  ENSG00000143368_12 (sequence is synthesized)
ttgggggcggggtggccgggtgctggctgaggcctctgggtgtgatacttaagtccggtcccctgctgacttctcactcaaaaaatcaaaaaaacccactcacaatactaaattagactt

SEQ ID NO: 378889 - DNA, 120 bp, Artificial Sequence
  ENSG00000143369_0 (sequence is synthesized)
aaccgtaacagccaccagacaagcttcagtggccggcccttcacatccagacttgcctgagaggacccacctctgagtgtccagtggtcagttgccccaggatggggaccacagccagag

SEQ ID NO: 378890 - DNA, 120 bp, Artificial Sequence
  ENSG00000143369_1 (sequence is synthesized)
cagccttggtcttgacctatttggctgttgcttctgctgcctctgagggaggcttcacggctacaggacagaggcagctgaggccagagcactttcaagaagttggctacgcagctcccc

SEQ ID NO: 378891 - DNA, 120 bp, Artificial Sequence
  ENSG00000143369_2 (sequence is synthesized)
cctccccacccctatcccgaagcctccccatggatcaccctgactcctctcagcatggccctccctttgagggacagagtcaagtgcagccccctccctctcaggaggccacccctctcc

SEQ ID NO: 378892 - DNA, 120 bp, Artificial Sequence
  ENSG00000143369_3 (sequence is synthesized)
aacaggaaaagctgctacctgcccaactccctgctgaaaaggaagtgggtccccctctccctcaggaagctgtccccctccaaaaagagctgccctctctccagcaccccaatgaacaga

SEQ ID NO: 378893 - DNA, 120 bp, Artificial Sequence
  ENSG00000143369_4 (sequence is synthesized)
aggaaggaacgccagctccatttggggaccagagccatccagaacctgagtcctggaatgcagcccagcactgccaacaggaccggtcccaagggggctggggccaccggctggatggct

SEQ ID NO: 378894 - DNA, 120 bp, Artificial Sequence
  ENSG00000143369_5 (sequence is synthesized)
tcccccctgggcggccttctccagacaatctgaaccaaatctgccttcctaaccgtcagcatgtggtatatggtccctggaacctaccacagtccagctactcccacctcactcgccagg

SEQ ID NO: 378895 - DNA, 120 bp, Artificial Sequence
  ENSG00000143369_6 (sequence is synthesized)
gtgagaccctcaatttcctggagattggatattcccgctgctgccactgccgcagccacacaaaccgcctagagtgtgccaaacttgtgtgggaggaagcaatgagccgattctgtgagg

SEQ ID NO: 378896 - DNA, 120 bp, Artificial Sequence
  ENSG00000143369_7 (sequence is synthesized)
ccgagttctcggtcaagacccgaccccactggtgctgcacgcggcagggggaggctcggttctcctgcttccaggaggaagctccccagccacactaccagctccgggcctgccccagcc

SEQ ID NO: 378897 - DNA, 120 bp, Artificial Sequence
  ENSG00000143369_8 (sequence is synthesized)
ctgatatttcctcgggtcttgagctgcctttccctcctggggtgcccacattggacaatatcaagaacatctgccacctgaggcgcttccgctctgtgccacgcaacctgccagctactg

SEQ ID NO: 378898 - DNA, 120 bp, Artificial Sequence
  ENSG00000143369_9 (sequence is synthesized)
accccctacaaagggagctgctggcactgatccagctggagagggagttccagcgctgctgccgccaggggaacaatcacacctgtacatggaaggcctgggaggatacccttgacaaat

SEQ ID NO: 378899 - DNA, 120 bp, Artificial Sequence
  ENSG00000143369_10 (sequence is synthesized)
actgtgaccgggagtatgctgtgaagacccaccaccacttgtgttgccgccaccctcccagccctactcgggatgagtgctttgcccgtcgggctccttaccccaactatgaccgggaca

SEQ ID NO: 378900 - DNA, 120 bp, Artificial Sequence
  ENSG00000143369_11 (sequence is synthesized)
tcttgaccattgacatcggtcgagtcacccccaacctcatgggccacctctgtggaaaccaaagagttctcaccaagcataaacatattcctgggctgatccacaacatgactgcccgct

SEQ ID NO: 378901 - DNA, 120 bp, Artificial Sequence
  ENSG00000143369_12 (sequence is synthesized)
gctgtgacctgccatttccagaacaggcctgctgtgcagaggaggagaaattaaccttcatcaatgatctgtgtggtccccgacgtaacatctggcgagaccctgccctctgctgttacc

SEQ ID NO: 378902 - DNA, 120 bp, Artificial Sequence
  ENSG00000143369_13 (sequence is synthesized)
tgagtcctggggatgaacaggtcaactgcttcaacatcaattatctgaggaacgtggctctagtgtctggagacactgagaacgccaagggccagggggagcagggctcaactggaggaa

SEQ ID NO: 378903 - DNA, 120 bp, Artificial Sequence
  ENSG00000143369_14 (sequence is synthesized)
caaatatcagctccacctctgagcccaaggaagaatgagtcaccccagagccctagagggtcagatggggggaaccccaccctgccccacccatctgaacactcattacactaaacacct

SEQ ID NO: 378904 - DNA, 120 bp, Artificial Sequence
  ENSG00000143369_15 (sequence is synthesized)
cttggatttggtgtcctcattgtctatctaatgtctcacccgcagtgttttaagtggatcttggtgccctggcccaggagggcactggcgttttcagacacaccacagacaaacacaccc

SEQ ID NO: 378905 - DNA, 120 bp, Artificial Sequence
  ENSG00000143369_16 (sequence is synthesized)
tcctaagcctgcttgtatttccttcagtgcctggcccctgaggcccacggccctgcccccttcactgagcagatgttcacaggctgtgggatgcgaccataactaaacagcttgacgtca

SEQ ID NO: 378906 - DNA, 120 bp, Artificial Sequence
  ENSG00000143369_17 (sequence is synthesized)
ctcctcagtgaccctccaggtttctaatctggcctatatcccacttttcaggtggaaaggagggaagaggccctcgcccccactcccagccctggctaggagaaagggtgggctgctcac

SEQ ID NO: 378907 - DNA, 120 bp, Artificial Sequence
  ENSG00000143369_18 (sequence is synthesized)
ccctctcttctttacccacctttacctcatggccttcccccagagcatgggcttcggggcagacaagacggtgggctctgccactcaccagttgtataaccttgggtaagttacatactt

SEQ ID NO: 378908 - DNA, 120 bp, Artificial Sequence
  ENSG00000143369_19 (sequence is synthesized)
ctccaagcctttgtttcttcatctgtaaaattgaggatatacctgttttagaaagttatgtgattagatgtgcaaaaatagcatctattttcacttgcttctctgctgagttcttctttg

SEQ ID NO: 378909 - DNA, 120 bp, Artificial Sequence
  ENSG00000143369_20 (sequence is synthesized)
tgcatgtaaactagccaggctttctctgctagagatggccatcccaacatggcttttgcttactccttctacccagtagacccacctcttccatatcaggaggagataatcatccattcc

SEQ ID NO: 378910 - DNA, 120 bp, Artificial Sequence
  ENSG00000143369_21 (sequence is synthesized)
tgaaaaggaaggtgagcgcttgcccaccctccctcacctctatcccactatggatcctgttgacaccaggctgatccctgctccttggtgccctcacccctatcttgcagtgggtccccc

SEQ ID NO: 378911 - DNA, 120 bp, Artificial Sequence
  ENSG00000143369_22 (sequence is synthesized)
cctcctgccttagtgctcaggaccctggggagaggagcaggaagcccgagccttgagaagcaggaggaggtgggggcaggctgtgagctgacacctttcacacctcgcttctcttttcct

SEQ ID NO: 378912 - DNA, 120 bp, Artificial Sequence
  ENSG00000143369_23 (sequence is synthesized)
ttcagttattttaaaaggaagagccacaaattgttctttctcatttccactatatcctcccaaccctttctcctccaccccagattctttcaatcctcccagctcatccagcctttgtgg

SEQ ID NO: 378913 - DNA, 120 bp, Artificial Sequence
  ENSG00000143369_24 (sequence is synthesized)
taagggttagagcactaggcctgggtctggaggaacctcaggtcccgttcactggccctaccctgggcctccccaatgtgccaggggagcagaggacaaccactgtctcttctttatctg

SEQ ID NO: 378914 - DNA, 120 bp, Artificial Sequence
  ENSG00000143373_0 (sequence is synthesized)
ggccgcggggagggcggcggtggctgcagcggctggagcggggtagagaccgccgggtctcggcccgcaccaggagcggaacaacctttcagatctgtgtggaccccagaagatccgtga

SEQ ID NO: 378915 - DNA, 120 bp, Artificial Sequence
  ENSG00000143373_1 (sequence is synthesized)
agaatatgaattgattccatgcggacatgaatgagtccttaaacctagaacatcatgtacatcatcctccttaataatagtattgattatttggttctatgctggggaccggaggggatg

SEQ ID NO: 378916 - DNA, 120 bp, Artificial Sequence
  ENSG00000143373_2 (sequence is synthesized)
agatggtttccaccagaatgctcactgagctctattacccttccctgttccctgtattttttttttttttctgagacagtcttgctctgtcgcccaggtgggagtgcagtggcacgatct

SEQ ID NO: 378917 - DNA, 83 bp, Artificial Sequence
  ENSG00000143373_3 (sequence is synthesized)
acaggcgtgagccaccatgcccagccccctatatttcttttttttgagacagggtctcgctcttgaaacctcaacctcatggg

SEQ ID NO: 378918 - DNA, 71 bp, Artificial Sequence
  ENSG00000143373_4 (sequence is synthesized)
ttcaggcgattctcctgcctcagcctcctttgtagctgcgattacaggcatgtgccaccacacctgtctag

SEQ ID NO: 378919 - DNA, 120 bp, Artificial Sequence
  ENSG00000143373_5 (sequence is synthesized)
attacaagcatgagccaccgcacctggccccttccctgtatttctaagaactctcttttcccctgctttctctggattttggagcccaccaaggtctgggatctgccgatatgggggata

SEQ ID NO: 378920 - DNA, 120 bp, Artificial Sequence
  ENSG00000143373_6 (sequence is synthesized)
atctgccgatatgggggatatgaagacccctgattttgatgacctccttgctgcctttgacatccctgacattgatgcgaatgaagccatccattctgggccagaagaaaatgaggggcc

SEQ ID NO: 378921 - DNA, 120 bp, Artificial Sequence
  ENSG00000143373_7 (sequence is synthesized)
tggaggcccagggaagccagaaccaggtgtaggaagtgaatctgaagacacagcagcagcctctgctggggatggccctggagttccagcccaggcctctgaccatggcctgccaccgcc

SEQ ID NO: 378922 - DNA, 120 bp, Artificial Sequence
  ENSG00000143373_8 (sequence is synthesized)
agacatttctgtagtcagtgtcattgtcaagaacactgtgtgtcccgagcagtctgaggccctggctggaggctcagcaggagacggggcccaggctgctggggtaactaaagaagggcc

SEQ ID NO: 378923 - DNA, 120 bp, Artificial Sequence
  ENSG00000143373_9 (sequence is synthesized)
tgtggggcctcatcgaatgcagaatggttttgggagccctgaaccttccctcccaggaactccccactctcctgctcctcccagtgggggcacctggaaagaaaaaggcatggaaggcaa

SEQ ID NO: 378924 - DNA, 120 bp, Artificial Sequence
  ENSG00000143373_10 (sequence is synthesized)
aactcccttggacctgtttgctcattttggccctgagccaggggaccactcagatccgctgcctccctctgcaccctctcccactcgggagggggctctgaccccgcctcctttcccctc

SEQ ID NO: 378925 - DNA, 120 bp, Artificial Sequence
  ENSG00000143373_11 (sequence is synthesized)
ttcctttgagctggcccaggagaatggcccaggcatgcagccacctgtttcttccccaccattgggggccttgaagcaggagagctgcagcccccatcatccccaggtcctagcccaaca

SEQ ID NO: 378926 - DNA, 120 bp, Artificial Sequence
  ENSG00000143373_12 (sequence is synthesized)
aggctcaggctccagccctaaggccacggacatccctgccagtgcctcgcctcccccagttgctggggtgcccttcttcaagcagtctccagggcaccagagccctcttgcctcccccaa

SEQ ID NO: 378927 - DNA, 120 bp, Artificial Sequence
  ENSG00000143373_13 (sequence is synthesized)
agtgcccgtctgtcagcccttgaaggaagaagatgatgatgaggggccagtggacaagtcttccccaggaagtccccagagtccctctagtggggccgaggctgcagatgaggacagcaa

SEQ ID NO: 378928 - DNA, 120 bp, Artificial Sequence
  ENSG00000143373_14 (sequence is synthesized)
tgactcccctgcctccagctcctctaggcctcttaaggtgcggatcaagaccattaaaacatcctgcgggaatatcacaaggactgtaactcaggtcccctcagatcctgatccacctgc

SEQ ID NO: 378929 - DNA, 120 bp, Artificial Sequence
  ENSG00000143373_15 (sequence is synthesized)
ccccttggctgagggggccttcttggctgaggctagcctcttgaagctgtcccctgcaacacctacttctgagggtccaaaggtggtgagcgtacagttgggtgatggtacaaggctgaa

SEQ ID NO: 378930 - DNA, 120 bp, Artificial Sequence
  ENSG00000143373_16 (sequence is synthesized)
aggcactgtgctgcctgtggccaccatccagaacgccagtactgccatgctgatggcagccagtgtggctcgcaaggctgtggtgctgcctggggggactgccaccagccctaagatgat

SEQ ID NO: 378931 - DNA, 120 bp, Artificial Sequence
  ENSG00000143373_17 (sequence is synthesized)
tgctaagaacgtgctaggcctggtgccccaagccctgcctaaggctgacgggcgggcagggctggggactgggggacagaaggtgaatggtgcctcggtggtgatggtgcaaccttcaaa

SEQ ID NO: 378932 - DNA, 120 bp, Artificial Sequence
  ENSG00000143373_18 (sequence is synthesized)
gacagctactgggccaagtacagggggcggcacagtgatatcacggacccagtccagcctggtggaggccttcaacaagatcctcaacagcaagaacctgctccctgcctataggccaaa

SEQ ID NO: 378933 - DNA, 120 bp, Artificial Sequence
  ENSG00000143373_19 (sequence is synthesized)
cctgagcccaccagctgaggctgggctggccctgcctcccaccggctaccgctgcctggagtgtggggatgccttctcattggagaagagcctggcacggcactatgaccgtcggagcat

SEQ ID NO: 378934 - DNA, 120 bp, Artificial Sequence
  ENSG00000143373_20 (sequence is synthesized)
tcgtcatgcagtgctcacatttggtcatgaggcctgtagcccttgaccagatggtggggcagccggacatcacaccgctgctgcctgtagctgtcccacctgtctctggacctctggcct

SEQ ID NO: 378935 - DNA, 120 bp, Artificial Sequence
  ENSG00000143373_21 (sequence is synthesized)
tgcctgccttgggcaagggtgagggggccatcacctcctctgccattactacagttgctgctgaggcccctgtcctgccgctctccacagagccgcctgctgccccggccacctctgctt

SEQ ID NO: 378936 - DNA, 120 bp, Artificial Sequence
  ENSG00000143373_22 (sequence is synthesized)
acacatgctttcgctgcctggagtgcaaggaacagtgccgggacaaggctggcatggcagctcacttccagcagctcggcccccctgcccctggggccaccagcaatgtgtgcccaacct

SEQ ID NO: 378937 - DNA, 120 bp, Artificial Sequence
  ENSG00000143373_23 (sequence is synthesized)
gccccatgatgctccccaatcgctgcagcttcagcgcccaccagcgcatgcataagaatcgacccccccatgtctgtcctgagtgtgggggcaacttcctgcaagccaattttcagaccc

SEQ ID NO: 378938 - DNA, 120 bp, Artificial Sequence
  ENSG00000143373_24 (sequence is synthesized)
atctccgggaggcctgtctgcacgtctctcgccgtgtaggatacaggtgccccagctgttcagtggtgtttgggggtgtgaactccatcaagtcccacatccagacgtcgcactgcgagg

SEQ ID NO: 378939 - DNA, 120 bp, Artificial Sequence
  ENSG00000143373_25 (sequence is synthesized)
ttttccacaagtgccccatctgccccatggccttcaagtctgggccaagtgcccatgcccacctctactcccagcatcccagcttccaaactcagcaggccaagctgatctacaagtgcg

SEQ ID NO: 378940 - DNA, 120 bp, Artificial Sequence
  ENSG00000143373_26 (sequence is synthesized)
ccatgtgcgacacagtcttcactcacaaacccctcctctcctcacacttcgaccagcacttgctgccccagcgtgtcagtgtctttaagtgcccgtcttgtcctctgctctttgcccaaa

SEQ ID NO: 378941 - DNA, 120 bp, Artificial Sequence
  ENSG00000143373_27 (sequence is synthesized)
aaaggaccatgctggaacatctcaagaacacccatcagtctgggcgcttggaggagactgctgggaaaggggccgggggtgccctgctgacccccaagactgagcctgaggagctggctg

SEQ ID NO: 378942 - DNA, 120 bp, Artificial Sequence
  ENSG00000143373_28 (sequence is synthesized)
tttctcagggaggggcagcccctgctactgaggagtcgtcttcatcttcagaagaggaggaagtacccagctcccctgagcccccccgtccagccaaacggcctcggcgggaactaggga

SEQ ID NO: 378943 - DNA, 120 bp, Artificial Sequence
  ENSG00000143373_29 (sequence is synthesized)
gcaaaggcctcaagggtgggggtggggggcctggaggctggacctgtggcctgtgtcactcctggttccctgagcgtgatgaatacgtggcccacatgaagaaggagcatggcaagtcag

SEQ ID NO: 378944 - DNA, 120 bp, Artificial Sequence
  ENSG00000143373_30 (sequence is synthesized)
tgaaaaagttcccctgtcgcctgtgtgagcgctccttctgctccgcccccagcctgaggcgccatgtcagagttaatcacgagggcatcaagcgagtttacccctgcaggtattgcacag

SEQ ID NO: 378945 - DNA, 120 bp, Artificial Sequence
  ENSG00000143373_31 (sequence is synthesized)
agggaaaacgcaccttcagcagccgcctgatcctagagaaacatgtccaggtccggcacggcttgcagcttggggcccagtcccctggccgggggaccaccttggctcggggttccagtg

SEQ ID NO: 378946 - DNA, 120 bp, Artificial Sequence
  ENSG00000143373_32 (sequence is synthesized)
ccagagcccaggggccaggtcggaaacgccgccagtcttctgactcttgcagtgaggagcctgacagcacgacaccgccagccaagtcccccaggggcggacctggatctggaggccatg

SEQ ID NO: 378947 - DNA, 120 bp, Artificial Sequence
  ENSG00000143373_33 (sequence is synthesized)
gccctctgcgctaccggagcagcagctccacagaacagagcctcatgatggggttgagggtggaggatggtgcccagcagtgcctcgactgtggcttgtgctttgcctcccctggctccc

SEQ ID NO: 378948 - DNA, 120 bp, Artificial Sequence
  ENSG00000143373_34 (sequence is synthesized)
tgagccgacaccgtttcatcagccacaagaagagacggggtgtgggtaaagccagtgccctggggctgggggatggggaggaagaggcccctccatcaaggtctgaccccgatggtggag

SEQ ID NO: 378949 - DNA, 120 bp, Artificial Sequence
  ENSG00000143373_35 (sequence is synthesized)
actcacccctgcctgcttctggaggcccactgacctgtaaggtctgtggcaagagctgcgacagccctctaaacctcaagacccacttccgcacgcatggcatggcgttcatcagggctc

SEQ ID NO: 378950 - DNA, 120 bp, Artificial Sequence
  ENSG00000143373_36 (sequence is synthesized)
ggcagggggctgttggggacaactagtctccaaggcctgggactgaccagccccttcctcttggagcctggttttccctactgctgcctgatccctcggctggggagttttcattaacat

SEQ ID NO: 378951 - DNA, 120 bp, Artificial Sequence
  ENSG00000143373_37 (sequence is synthesized)
taatattttgttaattcctgtctctccaacctgaagaagaagagcatttgaggattattctagttatttgcaacctccctttgggtttggccctggagtcctagtagagtggaccctcca

SEQ ID NO: 378952 - DNA, 120 bp, Artificial Sequence
  ENSG00000143373_38 (sequence is synthesized)
ttcctcctttctgagcccaacactaattaattttatgctcctgctgcagaacccccagtgtgggcctgggggtgggaggatgggacttaggtatgcctgctagacaggttcagggaagga

SEQ ID NO: 378953 - DNA, 120 bp, Artificial Sequence
  ENSG00000143373_39 (sequence is synthesized)
ctgatgggggtgtcatggatggacacacctctccacaattccttcaggcatggactggaactttcctcctctaggccgggccctgccctagtgcccacccccgcccccgcccccgcccaa

SEQ ID NO: 378954 - DNA, 120 bp, Artificial Sequence
  ENSG00000143373_40 (sequence is synthesized)
ccccaactcactggcactcaagccccctacccctgcagtgcctttcacttctttttttccccagaaatccggggcgggggggtggggggttggtagggatgagtcctgtcaagggggcca

SEQ ID NO: 378955 - DNA, 120 bp, Artificial Sequence
  ENSG00000143373_41 (sequence is synthesized)
caggagaggaggggacaggctctcaggaatcctttattcttgtagtaataataatactaacaaacagttggggaactagggagaaaaccagaccattaaaactgtttgtggtcgaatctc

SEQ ID NO: 378956 - DNA, 120 bp, Artificial Sequence
  ENSG00000143373_42 (sequence is synthesized)
atgtggagttgaagcgggtgagagaacatggaaggcccgcccttctcagggaagaggtggtagtgaccaagacaggcagggaaaaagcaaacttctatgtagtgccttttgtatcttgga

SEQ ID NO: 378957 - DNA, 120 bp, Artificial Sequence
  ENSG00000143373_43 (sequence is synthesized)
cactgaggcatccgttcatacctcatcacccatctccccctgcactcccccagaaaacctggaaatgacacaagtggctaactaaggactttatttcaaacaaaaattaaaaataaaaaa

SEQ ID NO: 378958 - DNA, 120 bp, Artificial Sequence
  ENSG00000143373_44 (sequence is synthesized)
gttacgctgtcgcccaggagctgaaccgcgcgaggaccccatccatcagattatatggcgatttagacggtgggaagaccgcaaggaaatggtcagcggatgacgtaatgtttggggtgg

SEQ ID NO: 378959 - DNA, 120 bp, Artificial Sequence
  ENSG00000143373_45 (sequence is synthesized)
cgtcccattctgtaacttctgtacggcatcagtgacacgggtttagcttgaaacagcgcaaaaggacctacacttctgtgctccactccgactcaatgcggttctgctctcagtgcccac

SEQ ID NO: 378960 - DNA, 120 bp, Artificial Sequence
  ENSG00000143373_46 (sequence is synthesized)
cacacagaagctgggttccttacattcgcgaaagtgaactgcagcttcaagcttcgagcggccagtagggagcgaggggcggagacgcacctgggtgctcccccttccagtaggcaagct

SEQ ID NO: 378961 - DNA, 120 bp, Artificial Sequence
  ENSG00000143374_0 (sequence is synthesized)
gtttgaggatgtaggcactggtgtgaaggaacatggccctgtatcagaggtggcggtgtctccggctccaaggtttacaggcttgcaggctacacacggcagttgtgtcgacccctccac

SEQ ID NO: 378962 - DNA, 120 bp, Artificial Sequence
  ENSG00000143374_1 (sequence is synthesized)
gctggttggcagagcggcttggcctttttgaggagctgtgggctgctcaggtaaagagattagcaagcatggcacagaaggaaccccggactattaagatatcacttcctggaggccaga

SEQ ID NO: 378963 - DNA, 120 bp, Artificial Sequence
  ENSG00000143374_2 (sequence is synthesized)
aaattgatgctgtggcatggaacacaaccccctaccaactagcccggcagatcagttcaacactggcagatactgcagtggctgctcaagtgaatggagaaccttatgatctggagcggc

SEQ ID NO: 378964 - DNA, 120 bp, Artificial Sequence
  ENSG00000143374_3 (sequence is synthesized)
ccttggagacagattctgacctcagatttctgacattcgattccccagaggggaaagcagtgttctggcactccagcacccatgtcctgggggcagcagctgaacaattcctaggtgctg

SEQ ID NO: 378965 - DNA, 120 bp, Artificial Sequence
  ENSG00000143374_4 (sequence is synthesized)
ttctctgcagaggtccaagtacagaatatggcttttaccatgatttcttcctgggaaaggagaggacaatccggggctcagagctgcctgttttggagcggatttgccaggaacttacag

SEQ ID NO: 378966 - DNA, 120 bp, Artificial Sequence
  ENSG00000143374_5 (sequence is synthesized)
ctgctgctcgacccttccggaggctagaggcttcacgggatcagcttcgccagttgttcaaggataacccctttaagcttcacttgattgaggagaaagtgacaggtccaacagcaacag

SEQ ID NO: 378967 - DNA, 120 bp, Artificial Sequence
  ENSG00000143374_6 (sequence is synthesized)
tatatgggtgtggcacattggttgacctttgccagggcccccaccttcggcatactggacagattggaggactgaagctgctatcgaactcatcatccttatggaggtcttcaggggccc

SEQ ID NO: 378968 - DNA, 120 bp, Artificial Sequence
  ENSG00000143374_7 (sequence is synthesized)
cagagacactgcagagagtgtcagggatttccttccccacaacagaattgctgagggtctgggaagcatggagggaggaagcagaattgcgggaccaccggcgcattgggaaggaacagg

SEQ ID NO: 378969 - DNA, 120 bp, Artificial Sequence
  ENSG00000143374_8 (sequence is synthesized)
agctcttcttcttccatgaactgagccctgggagctgcttcttcctgccacgagggacaagggtgtataatgcactagtggcgtttatcagggctgagtatgcccatcgtggtttctccg

SEQ ID NO: 378970 - DNA, 120 bp, Artificial Sequence
  ENSG00000143374_9 (sequence is synthesized)
aggtgaaaactcccacactgttttctacgaagctctgggaacagtcagggcactgggagcattatcaggaagacatgtttgccgtgcagcccccaggctctgacaggcctcccagctccc

SEQ ID NO: 378971 - DNA, 120 bp, Artificial Sequence
  ENSG00000143374_10 (sequence is synthesized)
agagtgacgattctaccaggcatatcacagatacactcgccctcaagcctatgaactgccctgcacactgcctgatgttcgcccaccggcccagatcctggcgggaactgcccctgcgac

SEQ ID NO: 378972 - DNA, 120 bp, Artificial Sequence
  ENSG00000143374_11 (sequence is synthesized)
ctcacatcttctgtacaacagatcagctggaagcagagatccaaagctgtcttgatttcctccgttccgtctatgccgttcttggcttctccttccgcctggcactgtccacccggccat

SEQ ID NO: 378973 - DNA, 120 bp, Artificial Sequence
  ENSG00000143374_12 (sequence is synthesized)
ctggcttcctgggggacccttgcctttgggaccaggccgaacaggtccttaaacaggccctgaaggaatttggagaaccctgggacctcaactctggagatggtgccttctatggaccta

SEQ ID NO: 378974 - DNA, 120 bp, Artificial Sequence
  ENSG00000143374_13 (sequence is synthesized)
agattgacgtgcacctccacgatgccctgggccggccacatcagtgtgggacaattcagcttgacttccaactgcccctgagatttgacctccagtataaggggcaggcgggtgccctgg

SEQ ID NO: 378975 - DNA, 120 bp, Artificial Sequence
  ENSG00000143374_14 (sequence is synthesized)
agcgtccagtcctcattcaccgagcagtgctcggttctgtggaaagactgttgggagtgctggcagaaagctgcggggggaaatggccactgtggctgtccccgttccaggtggtggtca

SEQ ID NO: 378976 - DNA, 120 bp, Artificial Sequence
  ENSG00000143374_15 (sequence is synthesized)
tccctgtggggagtgagcaagaggaatacgccaaagaggcacagcagagcctgcgggctgcaggactggtcagtgacctggatgcagactctggactgaccctcagccggagaatccgcc

SEQ ID NO: 378977 - DNA, 120 bp, Artificial Sequence
  ENSG00000143374_16 (sequence is synthesized)
gggcccagcttgcccactacaattttcagtttgtggttggccagaaagagcaaagtaagagaacagtgaacattcggactcgagataatcgtcgccttggggagtgggacttgcctgagg

SEQ ID NO: 378978 - DNA, 120 bp, Artificial Sequence
  ENSG00000143374_17 (sequence is synthesized)
ctgtgcagcgactggtggagctacagaacacgagggtcccaaatgccgaagaaattttctgagcctttgtacatagatgaggcaaaaacctgcgagtgccatcagcctccctcacatggg

SEQ ID NO: 378979 - DNA, 120 bp, Artificial Sequence
  ENSG00000143374_18 (sequence is synthesized)
agaccccaacccagctgacaatgtggagcccccagaacttcagaactgtgtggaggcacatgtctgctctcctgaaaagagacttggtttggggaccccacaaaaggagggaagctgtag

SEQ ID NO: 378980 - DNA, 81 bp, Artificial Sequence
  ENSG00000143374_19 (sequence is synthesized)
gacttggtttggggaccccacaaaaggagggaagctgtagctgtttggatgtgaggagaatgaaactacaaaaaaaaataa

SEQ ID NO: 378981 - DNA, 120 bp, Artificial Sequence
  ENSG00000143374_20 (sequence is synthesized)
cgacccttccggaggctagaggcttcacgggatcagcttcgccagttgttcaaggtgtggcacattggttgacctttgccagggcccccaccttcggcatactggacagattggaggact

SEQ ID NO: 378982 - DNA, 120 bp, Artificial Sequence
  ENSG00000143374_21 (sequence is synthesized)
ttccccagaggggaaagcagtaagtttctttcttatcaggaatacagtgactactaaaccaagagatattgaagcaggaaattctaacattttattcttttgccgcagtttctccatttg

SEQ ID NO: 378983 - DNA, 120 bp, Artificial Sequence
  ENSG00000143374_22 (sequence is synthesized)
cagttgggagggagacctaccacagactgtcttgactatttctggttaggaaacttatggtgaaagtttttaacttagcttcgatctattaagcaaacatttgtgctagtgagagggaga

SEQ ID NO: 378984 - DNA, 120 bp, Artificial Sequence
  ENSG00000143374_23 (sequence is synthesized)
acaaccccctaccaactagcccggcagatcaggtaacaggcccatcctgtaactaccaggattatccttctgcccctttactttctcttcacttgagcaggggaagaaaacttggtctgc

SEQ ID NO: 378985 - DNA, 120 bp, Artificial Sequence
  ENSG00000143374_24 (sequence is synthesized)
gcttgtttctgttccgtccccattaagatagcctttcctgaagattttgtttttgttttttgttgttgttcttttatacagacggggtctctccatgttgcccaggctagtcttgaactc

SEQ ID NO: 378986 - DNA, 120 bp, Artificial Sequence
  ENSG00000143374_25 (sequence is synthesized)
ctgggattacaggcatgagccaccaaacccggcctgagatttgttttatctgtattagtttctgcatcagagtctctgtcctttcattggggaaagaaatgaaagcttctgttgctctgg

SEQ ID NO: 378987 - DNA, 120 bp, Artificial Sequence
  ENSG00000143374_26 (sequence is synthesized)
aaagaaatgaaagcttctgttgctctggtaactcatttcacctttgcaagtttacagttgctgagagatgagcaactttctccccactgtggattgtaaccctgtctgttttaaatcatt

SEQ ID NO: 378988 - DNA, 120 bp, Artificial Sequence
  ENSG00000143374_27 (sequence is synthesized)
aatttactttttaataattgatacataataattgaacatatgaatgggtatatgtgatattttgatatatgcatacaatatgtaatgatcaaatcagggtgttcaggatatctgttaccc

SEQ ID NO: 378989 - DNA, 120 bp, Artificial Sequence
  ENSG00000143374_28 (sequence is synthesized)
agattgacgtgcacctccacgatgccctgggccggccacatcagtgtgggacaattcagcttgacttccaactgcccctgagatttgacctccagtataaggggccactgtggctgtccc

SEQ ID NO: 378990 - DNA, 120 bp, Artificial Sequence
  ENSG00000143374_29 (sequence is synthesized)
cttggcctcccaaagttctgggattatagacatgagccaccgcgccctgccagggaattgatttttatctgccattgccctctctcagtaggacagttcctttctcttcacctcttctgt

SEQ ID NO: 378991 - DNA, 120 bp, Artificial Sequence
  ENSG00000143375_0 (sequence is synthesized)
agggagctccgaggacgagggggagggccggagctgcgcgtgctgctttgcccgagcccgagcccgagcccgagcccgagcccgagcccgagcccgaacgcaagcctgggagcgcggagc

SEQ ID NO: 378992 - DNA, 120 bp, Artificial Sequence
  ENSG00000143375_1 (sequence is synthesized)
ccggctagggactcctcctatttatggagcaggcacccaacatggctgagccccggggccccgtagaccatggagtccagattcgcttcatcacagagccagtgagtggtgcagagatgg

SEQ ID NO: 378993 - DNA, 120 bp, Artificial Sequence
  ENSG00000143375_2 (sequence is synthesized)
gcactctacgtcgaggtggacgacgcccagctaaggatgcaagagccagtacctacggggttgctgtgcgtgtgcagggaatcgctgggcagccctttgtggtgctcaacagtggggaga

SEQ ID NO: 378994 - DNA, 120 bp, Artificial Sequence
  ENSG00000143375_3 (sequence is synthesized)
aaggcggtgactcctttggggtccaaatcaagggggccaatgaccaaggggcctcaggagctctgagctcagatttggaactccctgagaacccctactctcaggtcaagggatttcctg

SEQ ID NO: 378995 - DNA, 120 bp, Artificial Sequence
  ENSG00000143375_4 (sequence is synthesized)
ccccctcgcagagcagcacatctgatgaggagcctggggcctactggaatggaaagctactccgttcccactcccaggcctcactggcaggccctggcccagtggatcctagtaacagaa

SEQ ID NO: 378996 - DNA, 120 bp, Artificial Sequence
  ENSG00000143375_5 (sequence is synthesized)
gcaacagcatgctggagctagccccgaaagtggcttccccaggtagcaccattgacactgctcccctgtcttcagtggactcactcatcaacaagtttgacagtcaacttggaggccagg

SEQ ID NO: 378997 - DNA, 120 bp, Artificial Sequence
  ENSG00000143375_6 (sequence is synthesized)
cccggggtcggactggccgccgaacacggatgctaccccctgaacagcgcaaacggagcaagagcctggacagccgcctcccacgggacacctttgaggaacgggagcgccagtccacca

SEQ ID NO: 378998 - DNA, 120 bp, Artificial Sequence
  ENSG00000143375_7 (sequence is synthesized)
accactggacctctagcacaaaatatgacaaccatgtgggcacttcgaagcagccagcccagagccagaacctgagtcctctcagtggctttagccgttctcgtcagactcaggactggg

SEQ ID NO: 378999 - DNA, 120 bp, Artificial Sequence
  ENSG00000143375_8 (sequence is synthesized)
tccttcagagttttgaggagccgcggaggagtgcacaggaccccaccatgctgcagttcaaatcaactccagacctccttcgagaccagcaggaggcagccccaccaggcagtgtggacc

SEQ ID NO: 379000 - DNA, 120 bp, Artificial Sequence
  ENSG00000143375_9 (sequence is synthesized)
atatgaaggccaccatctatggcatcctgagggagggaagctcagaaagtgaaacctctgtgaggaggaaggttagtttggtgctggagaagatgcagcctctagtgatggtttcttctg

SEQ ID NO: 379001 - DNA, 120 bp, Artificial Sequence
  ENSG00000143375_10 (sequence is synthesized)
gttctactaaggccgtggcagggcagggtgagcttacccgaaaagtggaggagctacagcgaaagctggatgaagaggtgaagaagcggcagaagctagagccatcccaagttgggctgg

SEQ ID NO: 379002 - DNA, 120 bp, Artificial Sequence
  ENSG00000143375_11 (sequence is synthesized)
agcggcagctggaggagaaaacagaagagtgcagccgactgcaggagctgctggagaggaggaagggggaggcccagcagagcaacaaggagctccagaacatgaagcgcctcttggacc

SEQ ID NO: 379003 - DNA, 120 bp, Artificial Sequence
  ENSG00000143375_12 (sequence is synthesized)
agggtgaagatttacgacatgggctggagacccaggtgatggagctgcagaacaagctgaaacatgtccagggtcctgagcctgctaaggaggtgttactgaaggacctgttagagaccc

SEQ ID NO: 379004 - DNA, 120 bp, Artificial Sequence
  ENSG00000143375_13 (sequence is synthesized)
gggaacttctggaagaggtcttggaggggaaacagcgagtagaggagcagctgaggctgcgggagcgggagttgacagccctgaagggggccctgaaagaggaggtagcctcccgtgacc

SEQ ID NO: 379005 - DNA, 120 bp, Artificial Sequence
  ENSG00000143375_14 (sequence is synthesized)
aggaggtggaacatgtccggcagcagtaccagcgagacacagagcagctccgcaggagcatgcaagatgcaacccaggaccatgcagtgctggaggccgagaggcagaagatgtcagccc

SEQ ID NO: 379006 - DNA, 120 bp, Artificial Sequence
  ENSG00000143375_15 (sequence is synthesized)
ttgtgcgagggctgcagagggagctggaggagacttcagaggagacagggcattggcagagtatgttccagaagaacaaggaggatcttagagccaccaagcaggaactcctgcagctgc

SEQ ID NO: 379007 - DNA, 120 bp, Artificial Sequence
  ENSG00000143375_16 (sequence is synthesized)
gaatggagaaggaggagatggaagaggagcttggagagaagatagaggtcttgcagagggaattagagcaggcccgagctagtgctggagatactcgccaggttgaggtgctcaagaagg

SEQ ID NO: 379008 - DNA, 120 bp, Artificial Sequence
  ENSG00000143375_17 (sequence is synthesized)
agctgctccggacacaggaggagcttaaggaactgcaggcagaacggcagagccaggaggtggctgggcgacaccgggaccgggagttggagaagcagctggcggtcctgagggtcgagg

SEQ ID NO: 379009 - DNA, 120 bp, Artificial Sequence
  ENSG00000143375_18 (sequence is synthesized)
ctgatcgaggtcgggagctggaagaacagaacctccagctacaaaagaccctccagcaactgcgacaggactgtgaagaggcttccaaggctaagatggtggccgaggcagaggcaacag

SEQ ID NO: 379010 - DNA, 120 bp, Artificial Sequence
  ENSG00000143375_19 (sequence is synthesized)
tgctggggcagcggcgggccgcagtggagacgacgcttcgggagacccaggaggaaaatgacgaattccgccggcgcatcctgggtttggagcagcagctgaaggagactcgaggtctgg

SEQ ID NO: 379011 - DNA, 120 bp, Artificial Sequence
  ENSG00000143375_20 (sequence is synthesized)
tggatggtggggaagcggtggaggcacgactacgggacaagctgcagcggctggaggcagagaaacagcagctggaggaggccctgaatgcgtcccaggaagaggaggggagtctggcag

SEQ ID NO: 379012 - DNA, 120 bp, Artificial Sequence
  ENSG00000143375_21 (sequence is synthesized)
gcaggagcagcagacactgaaccgggccctggaggaggaagggaagcagcgggaggtgctccggcgaggcaaggctgagctggaggagcagaagcgtttgctggacaggactgtggaccg

SEQ ID NO: 379013 - DNA, 120 bp, Artificial Sequence
  ENSG00000143375_22 (sequence is synthesized)
actgaacaaggagttggagaagatcggggaggactctaagcaagccctgcagcagctccaggcccagctggaggattataaggaaaaggcccggcgggaggtggcagatgcccagcgcca

SEQ ID NO: 379014 - DNA, 120 bp, Artificial Sequence
  ENSG00000143375_23 (sequence is synthesized)
ggccaaggattgggccagtgaggctgagaagacctctggaggactgagccgacttcaggatgagatccagaggctgcggcaggccctgcaggcatcccaggctgagcgggacacagcccg

SEQ ID NO: 379015 - DNA, 120 bp, Artificial Sequence
  ENSG00000143375_24 (sequence is synthesized)
gctggacaaagagctactggcccagcgactgcaggggctggagcaagaggcagagaacaagaagcgttcccaggacgacagggcccggcagctgaagggtctcgaggaaaaagtctcacg

SEQ ID NO: 379016 - DNA, 120 bp, Artificial Sequence
  ENSG00000143375_25 (sequence is synthesized)
gctggaaacagagttagatgaggagaagaacaccgtggagctgctaacagatcgggtgaatcgtggccgggaccaggtggatcagctgaggacagagctcatgcaggaaaggtctgctcg

SEQ ID NO: 379017 - DNA, 120 bp, Artificial Sequence
  ENSG00000143375_26 (sequence is synthesized)
gcaggacctggagtgtgacaaaatctccttggagagacagaacaaggacctgaagacccggttggccagctcagaaggcttccagaagcctagtgccagcctctctcagcttgagtccca

SEQ ID NO: 379018 - DNA, 120 bp, Artificial Sequence
  ENSG00000143375_27 (sequence is synthesized)
gaatcagttgttgcaggagcggctacaggctgaagagagggagaagacagttctgcagtctaccaatcgaaaactggagcggaaagttaaagaactatccatccagattgaagacgagcg

SEQ ID NO: 379019 - DNA, 120 bp, Artificial Sequence
  ENSG00000143375_28 (sequence is synthesized)
gcagcatgtcaatgaccagaaagaccagctaagcctgagggtgaaggctttgaagcgtcaggtggatgaagcagaagaggaaattgagcgactggacggcctgaggaagaaggcccagcg

SEQ ID NO: 379020 - DNA, 120 bp, Artificial Sequence
  ENSG00000143375_29 (sequence is synthesized)
tgaggtggaggagcagcatgaggtcaatgaacagctccaggcccggatcaagtctctggagaaggactcctggcgcaaagcttcccgctcagctgctgagtcagctctcaaaaacgaagg

SEQ ID NO: 379021 - DNA, 120 bp, Artificial Sequence
  ENSG00000143375_30 (sequence is synthesized)
gctgagctcagatgaggaattcgacagtgtctacgatccctcgtccattgcatcactgcttacggagagcaacctacagaccagctcctgttagctcgtggtcctcaaggactcagaaac

SEQ ID NO: 379022 - DNA, 120 bp, Artificial Sequence
  ENSG00000143375_31 (sequence is synthesized)
caggctcgaggcctatcccagcaagtgctgctctgctctgcccaccctgggttctgcattcctatgggtgacccaattattcagacctaagacagggaggggtcagagtgatggtgataa

SEQ ID NO: 379023 - DNA, 120 bp, Artificial Sequence
  ENSG00000143375_32 (sequence is synthesized)
aaaaaaaaaatcatcagcaataagctgatagatggactttccactgtaggagtggacatttcaagccaactgagccttttcctcaagtgccgacacctccctcatctctcttatagtgga

SEQ ID NO: 379024 - DNA, 120 bp, Artificial Sequence
  ENSG00000143375_33 (sequence is synthesized)
aggatggtcagcattaggctgatggggactgagaaggataggaagggatagaaattgccatgtgtataaagctttattctttagcccttaaccctaaggctcagggaaataccctatgtt

SEQ ID NO: 379025 - DNA, 120 bp, Artificial Sequence
  ENSG00000143375_34 (sequence is synthesized)
attgtgctccctggattcctgcaactcattttccttccactctggagcagggtgaggggaatgttatgggtaacagacatgcaggcatggctctacccatttctttgcacaagtatgggg

SEQ ID NO: 379026 - DNA, 120 bp, Artificial Sequence
  ENSG00000143375_35 (sequence is synthesized)
cccatgtggtagtccccatacccctccagttcctatatttttgtcttcttcctttcccctctttgccattcctaccttgcatttttcctgtcagtgccttagccaaggcaaggagataag

SEQ ID NO: 379027 - DNA, 120 bp, Artificial Sequence
  ENSG00000143375_36 (sequence is synthesized)
gatgctcttcttgctttttatatctgcacattcatacctctccaaagaccagcttttccccagccagggccctcagccttccctgctgccccagtgattgattgagagagctgttggggt

SEQ ID NO: 379028 - DNA, 120 bp, Artificial Sequence
  ENSG00000143375_37 (sequence is synthesized)
ttctctgccaatgacccctgggagagggactttggtagggtcatgataaagtggcgggggtctggtcctgctcagggttttcatccttcctcctctccctcctctgtgactgtggatatg

SEQ ID NO: 379029 - DNA, 120 bp, Artificial Sequence
  ENSG00000143375_38 (sequence is synthesized)
gttataaggtggttgcacctgggagccctgacaactggctgcacaaattccaaaagtaaaggtgtcagtccctgtggccttccttggggcttctctgaccacatgtgcccaacttcaata

SEQ ID NO: 379030 - DNA, 120 bp, Artificial Sequence
  ENSG00000143375_39 (sequence is synthesized)
agagaaccaagggaccctcattttctgaggtgcttggctctgattcagggctttgcaaggggttagaagctgactgtaaaaatgggaagaggcaacggaagacatttatttctcctttgg

SEQ ID NO: 379031 - DNA, 120 bp, Artificial Sequence
  ENSG00000143375_40 (sequence is synthesized)
attttggggagaaccaagccctggtagggaagaggtaagggggatgattcacctccatatttcctaagcaggttgtatagggagccggtggcaggaggaaggctgttttcacaaatgact

SEQ ID NO: 379032 - DNA, 120 bp, Artificial Sequence
  ENSG00000143375_41 (sequence is synthesized)
tgtaatgtcgtgattaaaaaaattcctatattcttctgcaaatcaaacgttctttcccaatccaatccagccttggttttattttaaattaaatattaaaattacacatttatattgaaa

SEQ ID NO: 379033 - DNA, 85 bp, Artificial Sequence
  ENSG00000143375_42 (sequence is synthesized)
cccgagcccgagcccgaacgcaagcctgggagcgcggagcccggctaggacagagtcttactctattgcccaagcttcaacctcc

SEQ ID NO: 379034 - DNA, 120 bp, Artificial Sequence
  ENSG00000143375_43 (sequence is synthesized)
agggcactgaggtgtgacctgtggaaaaagggtgggacttccaagcctctttctgtactagcggtcaaaaccgacagcccacagttgatgagttttgtttggctgcagtattttcaacaa

SEQ ID NO: 379035 - DNA, 120 bp, Artificial Sequence
  ENSG00000143375_44 (sequence is synthesized)
ctttgaatcaattgccaatgtttagaaatttatagaggtcacctaaaaatttggatttctagtttcttttgtatttggcagatatggtaatactgagtgtcttgtcctgagtctgcatgg

SEQ ID NO: 379036 - DNA, 120 bp, Artificial Sequence
  ENSG00000143375_45 (sequence is synthesized)
caacagttggctggagctgagcagtgggtttcccctttagagtgaacagtattcttcagtttgctatatttgataataataatagcagcagcaaacatattgtgctgtgtgataggcact

SEQ ID NO: 379037 - DNA, 120 bp, Artificial Sequence
  ENSG00000143375_46 (sequence is synthesized)
taagacttaatcctcagaataactctgtggggtaggtagtcttgttttctccattttacagatgaaggaaactgaggcacagagagatgaacttgtccatggtctactgccaggaagtgg

SEQ ID NO: 379038 - DNA, 120 bp, Artificial Sequence
  ENSG00000143375_47 (sequence is synthesized)
taaatctgattttcagactggacagtctggtcccatgtacatactcttagcctctacgtggtactgcctccagtacctcagtttctgagtctcttcacctcagccttggcccaggtactt

SEQ ID NO: 379039 - DNA, 120 bp, Artificial Sequence
  ENSG00000143375_48 (sequence is synthesized)
gggtttctctctcttttcccattagagaaataaggttttccaatgaagagtagattctggggtttgcctttctgtcaaagggccgtcaccagagcatggccccgacctgcccatgatgcc

SEQ ID NO: 379040 - DNA, 120 bp, Artificial Sequence
  ENSG00000143375_49 (sequence is synthesized)
acatctggtcagtagagggcgctggctccatagtggctctgggtccaggcaagtaccaaaaggttactgggatgtgcaagagagaaaagtctgttaatgctggagtttgagaggctcctg

SEQ ID NO: 379041 - DNA, 120 bp, Artificial Sequence
  ENSG00000143375_50 (sequence is synthesized)
gcggctacaggctgaagagaggtgacataagcctatccttcctcccttcctccctccttttcttcctccctccctcttggcttttctcctctgtggctccctccatcttccacctcagat

SEQ ID NO: 379042 - DNA, 120 bp, Artificial Sequence
  ENSG00000143375_51 (sequence is synthesized)
atggccagcctggcctgatctttagggaacactttctcctgatagagagcaaagagtgttgcagaaattctgaaatgtgaatgacgtcactctccctcattctttgaatctgccctggat

SEQ ID NO: 379043 - DNA, 120 bp, Artificial Sequence
  ENSG00000143375_52 (sequence is synthesized)
cctgcccagtctaatggtggagctcatggctgagaggagtccttggggacagtagggggccaagttaggattcccttagaaatggggacactcatagacattcttctacctcaccttagg

SEQ ID NO: 379044 - DNA, 80 bp, Artificial Sequence
  ENSG00000143376_0 (sequence is synthesized)
ccggcggatcgggcgcgcgcgtcgggggtcgtccggctgccaggcagggcgagcacgcgccgggaggccttggaggcgta

SEQ ID NO: 379045 - DNA, 120 bp, Artificial Sequence
  ENSG00000143376_1 (sequence is synthesized)
gggggcgggggtacggctcgcctgctcgcaagatggcggacgaggacggggaagggattcatccctcagcccctcacaggaacggaggtggcggcggcggcggggggtctgggctccact

SEQ ID NO: 379046 - DNA, 120 bp, Artificial Sequence
  ENSG00000143376_2 (sequence is synthesized)
gcgccgggaacggcggcgggggaggcggcggcccgcgggtcgtgcgcatcgtcaagtccgagtccggctacggcttcaacgtgcggggccaagtgagcgagggcgggcaactgcggagca

SEQ ID NO: 379047 - DNA, 120 bp, Artificial Sequence
  ENSG00000143376_3 (sequence is synthesized)
tcaacggggagctgtacgcgccgctgcagcatgtgagcgccgtgctgcccgggggggcggccgatcgggccggggtgcgcaagggggaccgcatcctggaggtgaaccacgtgaatgttg

SEQ ID NO: 379048 - DNA, 120 bp, Artificial Sequence
  ENSG00000143376_4 (sequence is synthesized)
agggggcgacacacaagcaggtggtggacctgattcgagcaggcgagaaggaattgatcttgacagtgttatctgtacctcctcatgaggcagataacctagatcccagtgacgactcgt

SEQ ID NO: 379049 - DNA, 120 bp, Artificial Sequence
  ENSG00000143376_5 (sequence is synthesized)
tgggacaatcattttatgattacacagaaaagcaagcagtgcccatatcggtccccagatacaaacatgtggagcagaatggtgagaagtttgtggtatataatgtttacatggcaggga

SEQ ID NO: 379050 - DNA, 120 bp, Artificial Sequence
  ENSG00000143376_6 (sequence is synthesized)
ggcagctgtgttctaagcggtaccgggagtttgctatcctacaccagaacctgaagagagagtttgccaactttacatttcctcgactcccagggaagtggccattttcattatcagaac

SEQ ID NO: 379051 - DNA, 120 bp, Artificial Sequence
  ENSG00000143376_7 (sequence is synthesized)
aacaattagatgcccgacgtcggggattggaagaatatctagaaaaagtgtgttcaatacgagtaattggtgagagtgacatcatgcaggaattcctatcagaatccgatgagaactaca

SEQ ID NO: 379052 - DNA, 120 bp, Artificial Sequence
  ENSG00000143376_8 (sequence is synthesized)
atggtgtgtccgacgtagagctgagagtagcattaccagatggaacaacggttacagtcagggttaaaaagaacagtactacagaccaagtatatcaggctatcgcagcaaaggttggca

SEQ ID NO: 379053 - DNA, 120 bp, Artificial Sequence
  ENSG00000143376_9 (sequence is synthesized)
tggacagtacgacagtgaattactttgccttatttgaagtgatcagtcactcctttgtacgtaaattggcacctaatgagtttcctcacaaactctacattcagaattatacatcagctg

SEQ ID NO: 379054 - DNA, 120 bp, Artificial Sequence
  ENSG00000143376_10 (sequence is synthesized)
tgccaggcacctgcttgaccattcgaaagtggctttttacaacagaagaagaaattctcttaaatgacaatgaccttgctgttacctacttctttcatcaggcagtcgatgatgtgaaga

SEQ ID NO: 379055 - DNA, 120 bp, Artificial Sequence
  ENSG00000143376_11 (sequence is synthesized)
aaggttacatcaaagcagaagaaaagtcctatcaattacagaagctatacgaacaaagaaaaatggtcatgtacctcaacatgctaaggacttgtgagggctacaatgaaatcatctttc

SEQ ID NO: 379056 - DNA, 120 bp, Artificial Sequence
  ENSG00000143376_12 (sequence is synthesized)
cccactgtgcctgtgactccaggaggaaggggcacgttatcacagccatcagcatcacgcactttaaactgcatgcctgcactgaagaaggacagctggagaaccaggtaattgcatttg

SEQ ID NO: 379057 - DNA, 120 bp, Artificial Sequence
  ENSG00000143376_13 (sequence is synthesized)
aatgggatgagatgcagcgatgggacacagatgaagaagggatggccttctgtttcgaatatgcacgaggagagaagaagccccgatgggttaaaatcttcacgccatatttcaattaca

SEQ ID NO: 379058 - DNA, 120 bp, Artificial Sequence
  ENSG00000143376_14 (sequence is synthesized)
tgcatgagtgcttcgagagggtgttctgcgagctcaagtggagaaaagagaacattttccagatggcgaggtcacagcagagagatgtggccacctagcctttccttatccccttccctt

SEQ ID NO: 379059 - DNA, 120 bp, Artificial Sequence
  ENSG00000143376_15 (sequence is synthesized)
cccttcacccccatcctcttactcctttcatgtcccatttcagacagagtaaccattaacaaaaaagaagagaaaaagttaaagtcgttatattcaaaagccctaaactaaatattatta

SEQ ID NO: 379060 - DNA, 120 bp, Artificial Sequence
  ENSG00000143376_16 (sequence is synthesized)
ataaccccctctgaatttcatgtctctggaattgaggtggtagtgaacagcagatcggtcagcaccagaagtcaactgagttaaggcaggaaaagaaataagcccaaccaacttgccaaa

SEQ ID NO: 379061 - DNA, 120 bp, Artificial Sequence
  ENSG00000143376_17 (sequence is synthesized)
ggtatctttgtcctttcacctgggcctcataccaacagcctctccttgtactatatttttaaaactggaactatgaacttcatccatttgcactgttcagacatatatatgtatgtatgt

SEQ ID NO: 379062 - DNA, 120 bp, Artificial Sequence
  ENSG00000143376_18 (sequence is synthesized)
aaaaattatatatacacaaattagctgcacgtatatacatatatatatttctttttaaatttcatattgatggcagtaccttttttagcttgtgtttttacacacctttcactagaatcc

SEQ ID NO: 379063 - DNA, 120 bp, Artificial Sequence
  ENSG00000143376_19 (sequence is synthesized)
atgacctccctcgtgctctctttcttttgaaacaaactttaaaaaggaaaaaaaagcattttacagggaaaaatacctctcctcatgaaggacttgaaaagtttacaacctgcttggatt

SEQ ID NO: 379064 - DNA, 120 bp, Artificial Sequence
  ENSG00000143376_20 (sequence is synthesized)
tttgcccctttttttgtattgagtatagattccggctcatgggttgccatagagtctaggaacaaggagtatagtttctttatcttccaagagggtgctggggaggagaaagaggtgtgt

SEQ ID NO: 379065 - DNA, 120 bp, Artificial Sequence
  ENSG00000143376_21 (sequence is synthesized)
ttctcaaggttaacaggctgtagttctgcagggagagcctgaagtcctggtatgggctcttgattctgtgacaatttttttgatccatctatttctctcactcctggctttctagccaca

SEQ ID NO: 379066 - DNA, 120 bp, Artificial Sequence
  ENSG00000143376_22 (sequence is synthesized)
ttctgcacctccttcctgctttcctagagcctcggtatgctttccctcaaccgaccctggctcaggaggttgatgccatgggaacctgaacctgaaacacttcatggtagtaatttcctg

SEQ ID NO: 379067 - DNA, 120 bp, Artificial Sequence
  ENSG00000143376_23 (sequence is synthesized)
tttttttttttttctgagacagggtcttactctgtcgcccagactggaatgtggtggcatgaacatagctcactgttaccttgaattctgggctcaggtgatccttccgcctcaccctcc

SEQ ID NO: 379068 - DNA, 63 bp, Artificial Sequence
  ENSG00000143376_24 (sequence is synthesized)
gcatgaacatagctcactgttaccttgaattctgggctcaggtgatccttcccttcttaaaat

SEQ ID NO: 379069 - DNA, 79 bp, Artificial Sequence
  ENSG00000143376_25 (sequence is synthesized)
ttccctgccttttttgcagcagggatagtactcaggaccagagttaagctgataccttaggcacacaggttggacttac

SEQ ID NO: 379070 - DNA, 120 bp, Artificial Sequence
  ENSG00000143376_26 (sequence is synthesized)
tttacctcctccattcctgaccaataaccacccataactacggcattctctgtgacttccttaaacagcagtgatgggaagggatccaatagtatcttcaaggccttggggaaacttgca

SEQ ID NO: 379071 - DNA, 120 bp, Artificial Sequence
  ENSG00000143376_27 (sequence is synthesized)
gtgggtcagtggtctgtgccaaccaaacgatagccccatccaagccagctgagaacctaggaaggagtagtaggaatatggttgattagattggatctcccaagttttaattgaaaggag

SEQ ID NO: 379072 - DNA, 120 bp, Artificial Sequence
  ENSG00000143376_28 (sequence is synthesized)
actgaacgaaaacctttctgctttctgtccgttaaagagctcctcatctgatcttgcagctagaccctttgagacttaagagctgcatcccaggatcagaagccagggctaattggggta

SEQ ID NO: 379073 - DNA, 120 bp, Artificial Sequence
  ENSG00000143376_29 (sequence is synthesized)
ggacaatattcccagcccctaagctctgtagataatgcataagaagcaccaagtcaggctcagatgcaactaaaacacatctttgagccttttctttttcccttctcccctttctaaaca

SEQ ID NO: 379074 - DNA, 120 bp, Artificial Sequence
  ENSG00000143376_30 (sequence is synthesized)
aaaaccttcctaggatggcatcttttgctctaactgggagacagtcataattggttgtagtcaattctactaagcagtgttggggtggttggaaagtctcttttttgtaatttgtttttg

SEQ ID NO: 379075 - DNA, 65 bp, Artificial Sequence
  ENSG00000143376_31 (sequence is synthesized)
tggggtggttggaaagtctcttttttgtaatttgtttttgcaaatcattgtgaggccagttcttt

SEQ ID NO: 379076 - DNA, 120 bp, Artificial Sequence
  ENSG00000143376_32 (sequence is synthesized)
ctctttctttcttttgctttccttctttcatctcttttttgtaatttgttgttgcaaatcattgtgaggccacttttctttccccttccttccttcctttttttctgttttttttttttt

SEQ ID NO: 379077 - DNA, 86 bp, Artificial Sequence
  ENSG00000143376_33 (sequence is synthesized)
cactaattttttgtatttttggtagggcggggtttcaccatgatggccaggttggttttgaactcctgacctcaagtaatctgccc

SEQ ID NO: 379078 - DNA, 120 bp, Artificial Sequence
  ENSG00000143376_34 (sequence is synthesized)
caggagtgagccactgcgcctggcccacttttctttctttccttcttattttgttatgctggcagccatttgcccctgcatggtatgggatcaaagaggacagcctttcctccctcacct

SEQ ID NO: 379079 - DNA, 120 bp, Artificial Sequence
  ENSG00000143376_35 (sequence is synthesized)
accttctccaaatctaggtgaaatcacagagtacaaaacgtgagaatgctgaatgtgtaaagttgcagagggatccctaatttgaagactttgacacagaactaacttcttttgacttaa

SEQ ID NO: 379080 - DNA, 120 bp, Artificial Sequence
  ENSG00000143376_36 (sequence is synthesized)
atgaatttaaaatgagccaaaggaccctgaaaagaagacatgttgatttcccactcctagatgctaaagagacttggcaccagctttgttcaaactgtaaaaatagcaatttgcccctac

SEQ ID NO: 379081 - DNA, 120 bp, Artificial Sequence
  ENSG00000143376_37 (sequence is synthesized)
tcgctcagagtgggacagtagtgaacagagctgggattccatgcgacagcttgaatgctgaccttcagacatgagacatagggatttggaggccccttagaatgggtagatggtgttatg

SEQ ID NO: 379082 - DNA, 120 bp, Artificial Sequence
  ENSG00000143376_38 (sequence is synthesized)
ttccctttctggcatagcattcacttggtgctttggagattaggtgagggccctataggtagttggcctgttggcagaatttatttaggaacagcccttttgaaagtgtcccagtaacaa

SEQ ID NO: 379083 - DNA, 120 bp, Artificial Sequence
  ENSG00000143376_39 (sequence is synthesized)
cgcacccagctgcagcaaggaggtggggaaggagggcaccccaaaggacagcgccttcttctcttccacccatgcacggccttgggtgatggaggcgggttccctgtggctgcgtggatc

SEQ ID NO: 379084 - DNA, 120 bp, Artificial Sequence
  ENSG00000143376_40 (sequence is synthesized)
ccataggatcaagcccttctttgcatgaagcagtgttgtgactcttctctctccccttcctctgcacttcctttctgtaatccctactgttcttcttagtcccagcttctgcccagggag

SEQ ID NO: 379085 - DNA, 120 bp, Artificial Sequence
  ENSG00000143376_41 (sequence is synthesized)
gcttctacccagacttcttttgcaatttgtccctgggaagagggggtctcccagtgcccccagcttcatcccagcagaaccagcaggatcctcctggtctctcactggccttcctccaca

SEQ ID NO: 379086 - DNA, 120 bp, Artificial Sequence
  ENSG00000143376_42 (sequence is synthesized)
cttggtttctatcctcaggggtagaagctcagagctttttatggcccaggagaaaatgtagaccctgagaaacctgtccctgcagaaaggttcccttgggccatgctttgggccctctgc

SEQ ID NO: 379087 - DNA, 120 bp, Artificial Sequence
  ENSG00000143376_43 (sequence is synthesized)
tctttatatgtttattctattctccatttttccaccccgtccttaccctaggcctaaacacaggtacagatatgtgcatgctcagggcagctcctaggcctggactgagctctcaggggg

SEQ ID NO: 379088 - DNA, 120 bp, Artificial Sequence
  ENSG00000143376_44 (sequence is synthesized)
gaattagataaatattccaacatcctcatgcctggcccatttagtttcatcctttagttacccaggccagtagctttgggttatcccttcctgtagctccaaacccagcacttggagcag

SEQ ID NO: 379089 - DNA, 120 bp, Artificial Sequence
  ENSG00000143376_45 (sequence is synthesized)
caaaatagggcactgacaggagatgaaactctctcctatctcagaatttgccaacttctgggctgggctcctaggaggtagttttcttgaaggggactgcatcctagttgacctgaattt

SEQ ID NO: 379090 - DNA, 120 bp, Artificial Sequence
  ENSG00000143376_46 (sequence is synthesized)
tccagaccaggagggactgctgtgctctcccttctcgccatcatactgtttggctagattcattcagcagtagaagctgtttgatctgttgaccccagcatactgctgtttcttcaccag

SEQ ID NO: 379091 - DNA, 120 bp, Artificial Sequence
  ENSG00000143376_47 (sequence is synthesized)
cttcattgtgtcacagtagcttcctttgggaggatgatgtgatagaacactcagagagagggagggagaagagagatagtgggtatgcttctctagctccccatcttccaggtccacctc

SEQ ID NO: 379092 - DNA, 120 bp, Artificial Sequence
  ENSG00000143376_48 (sequence is synthesized)
ttgacttcctgttcccctaaacctgagcacatcacgccaggcctctttgctgccaggacagcatcagctcactcctcagcaataatctagggtatgtgggaaggtcagggctgtggtaag

SEQ ID NO: 379093 - DNA, 120 bp, Artificial Sequence
  ENSG00000143376_49 (sequence is synthesized)
gaatagaatcaaagaggggagtgatacggggtgggggcacttggccgcctgctaaacttggacattaattttatatcatgacccccttttaagccagtgagctgggcttcagtttttccc

SEQ ID NO: 379094 - DNA, 120 bp, Artificial Sequence
  ENSG00000143376_50 (sequence is synthesized)
aggccatgcacatttaatttatttcagagaaactctaattgtattttcactgcagtatcttgtattttttatttgtgatttaagaaatgtgaagagaaaatacacagacacaataatggc

SEQ ID NO: 379095 - DNA, 120 bp, Artificial Sequence
  ENSG00000143376_51 (sequence is synthesized)
taacattgtttctttcattccttgttctagagctaaccactctaaaattgtttggtaatgtcacttagtgtaattaattgtaacatattcttttaaataaattgatttattgatcaaaca

SEQ ID NO: 379096 - DNA, 120 bp, Artificial Sequence
  ENSG00000143376_52 (sequence is synthesized)
ttcttccagcaaggttggcctctggatggtgaacgggctgtgcaaaaaagccctgcttcttcccttgtctagagggtggacattggctacaggctcttccatctctcatgacttcatgga

SEQ ID NO: 379097 - DNA, 120 bp, Artificial Sequence
  ENSG00000143376_53 (sequence is synthesized)
ccctcctctgccagttttttaaatcagatcaccctccatgttgttcctgacccacaggggaagctgtcctcagttgtagccgtcttgactggatgagtcctggcagtctttctaggcgaa

SEQ ID NO: 379098 - DNA, 120 bp, Artificial Sequence
  ENSG00000143376_54 (sequence is synthesized)
ccaagaatgtttgtgtgagggaaggtgtttgctgttgctttactgctgtctgtatgtgccagtgctggaacagaatttggaagattctgaataattagttacttattctcaaagaaaatc

SEQ ID NO: 379099 - DNA, 120 bp, Artificial Sequence
  ENSG00000143376_55 (sequence is synthesized)
tttgaaagaatcaggaggtcaagtcaagaacatgaaaatttatattttagtacagtagaaagaacattgggctctgggaattttatctgggttttctcctggcttttttttccctctgtg

SEQ ID NO: 379100 - DNA, 120 bp, Artificial Sequence
  ENSG00000143376_56 (sequence is synthesized)
taattttgggtaaatcagcctccctagctttcagttttctcttctgtgaaacaggaagactgaaccacgtaattaatatccaaggtcccttccggctctaaaaggctatgattctagatg

SEQ ID NO: 379101 - DNA, 120 bp, Artificial Sequence
  ENSG00000143376_57 (sequence is synthesized)
agaagttatatcaagaaagatgtggccaatcagattgagtcatccaggcatacctttttagcttctgtttgtggagttgtctccagataagaggagatgtgccttcccaataactctttt

SEQ ID NO: 379102 - DNA, 120 bp, Artificial Sequence
  ENSG00000143376_58 (sequence is synthesized)
ttggggaaagtaactgggacttagtttgtttttttgttttttttttcagctaaatgcataaatggagagagagatagagctagtagttgtcttgagatccgaacctgtttgaatcctgga

SEQ ID NO: 379103 - DNA, 120 bp, Artificial Sequence
  ENSG00000143376_59 (sequence is synthesized)
gcccccagattcatcctgtttttgctttaggcctgactggaattggcaatttcctatcccacttggctcgtagttaccactagaaggagctagagaatagtggatgaaccaggcctgggt

SEQ ID NO: 379104 - DNA, 120 bp, Artificial Sequence
  ENSG00000143376_60 (sequence is synthesized)
tttatggtacttgtcagggtttttctctagactgagtttggaagatgggatgactggggacaggagttcaaaggcacagtcctgagatgcctgctcttgagaagttagtgagtgtcacca

SEQ ID NO: 379105 - DNA, 120 bp, Artificial Sequence
  ENSG00000143376_61 (sequence is synthesized)
ccttttttttcagttcaattacatgcatgagtgcttcgagagggtgttctgcgagctcaagtggagaaaagaggtaattctgaacagtccttgaattgaccttttcatctttttgtttct

SEQ ID NO: 379106 - DNA, 120 bp, Artificial Sequence
  ENSG00000143376_62 (sequence is synthesized)
caaataaatatttttcctttagtatttcaattttatatttggtttattcctgattaatctttccctaccactacctctttaccccatgttctgttgttctgcttgttaataggtcacaca

SEQ ID NO: 379107 - DNA, 120 bp, Artificial Sequence
  ENSG00000143376_63 (sequence is synthesized)
agactgcaaagttatatttacggaacttttatttctccctctggttatgtttaatatttttagcaagctacatctttgtattttctattatttctttgttctgatcatatttagatgaat

SEQ ID NO: 379108 - DNA, 120 bp, Artificial Sequence
  ENSG00000143376_64 (sequence is synthesized)
gtttgtcatgccttaaaatcttatataccagacatggtttgctgcctcattattgcctgctactgatgatttaaacttaaaactgatgatttaaacttaaaactttgatacgtctttgac

SEQ ID NO: 379109 - DNA, 120 bp, Artificial Sequence
  ENSG00000143376_65 (sequence is synthesized)
ctgtggatgtggatggtgaaacatttgtttgtctaggaaggcagggaaatgacacagatctcctcaataagatagctcatcttctggctcagggaagagacctttccttgctacattata

SEQ ID NO: 379110 - DNA, 120 bp, Artificial Sequence
  ENSG00000143376_66 (sequence is synthesized)
aagttatattatttggtagctgttcagtaggtttttctctaaaatactggcttatagaataacagttttacgtgatatgtagtcattctgtttccttgtaactaactgacctagttgaat

SEQ ID NO: 379111 - DNA, 120 bp, Artificial Sequence
  ENSG00000143376_67 (sequence is synthesized)
attttaaaaacttttgtagggagccttatcgtgaagagaaaccattttccccatagaaggtagtggaacttctttatctgtttttagctttttctaacatggactggcctctctgaacaa

SEQ ID NO: 379112 - DNA, 120 bp, Artificial Sequence
  ENSG00000143376_68 (sequence is synthesized)
agcccttgggaaatgagaaagggtacaatttttaaaaatcaaacgaagtaaagtcaccagtttaatttaccattctcatgagagtgtcaggaaattaactttcttaaatttagaggatta

SEQ ID NO: 379113 - DNA, 120 bp, Artificial Sequence
  ENSG00000143376_69 (sequence is synthesized)
cctacttctttcatcagattccagcagcatctcttcatttcccactattgaagatgagacaccagctgtctttccttctccattcctaccatatacccatacctttttcatctctcccat

SEQ ID NO: 379114 - DNA, 120 bp, Artificial Sequence
  ENSG00000143376_70 (sequence is synthesized)
ccccttaatatagtcaaattataatatttgtaaggtcaatatgcagtgtttacaatattatgactgtaaatagtgagatttacaacagagccatataataaacactgtctttacttttca

SEQ ID NO: 379115 - DNA, 120 bp, Artificial Sequence
  ENSG00000143376_71 (sequence is synthesized)
cactttctctttgaaaccatccctgatgagttttcatcaatttttcattccaccaaaaacttttgcaattagttccattcagtgatcacatgttgctatctcattctctaatttttgtac

SEQ ID NO: 379116 - DNA, 120 bp, Artificial Sequence
  ENSG00000143376_72 (sequence is synthesized)
atataatcagatagtcgctttatatttttagcttacaagagtgtgagctacctgtaggtaagagctaaatcttgaccatctttatattcccagtgccttaccacagcatcaagcatgttg

SEQ ID NO: 379117 - DNA, 120 bp, Artificial Sequence
  ENSG00000143376_73 (sequence is synthesized)
taggtgcttaataaatattaattgaatagaagaatgaatatttaatgccaatatagtagtgtgttatccactacttattttatatgtatatgccttgttttcccactagattataaattt

SEQ ID NO: 379118 - DNA, 120 bp, Artificial Sequence
  ENSG00000143376_74 (sequence is synthesized)
cttacaggcaagggcttacaataaatcaatgcttatgattgtttcaggcaatgagtagtacttttttaaaagtggtaaatgaaaatggacttggtctgaaataattttctctcgtaaaaa

SEQ ID NO: 379119 - DNA, 120 bp, Artificial Sequence
  ENSG00000143376_75 (sequence is synthesized)
taaatgttagctactattgttattattaatgtgaaagtactttgccctccttaaaagaaaggtacggtaaatatcccaggttgtagtagttgtgattaacgcctcctttttttttggaga

SEQ ID NO: 379120 - DNA, 120 bp, Artificial Sequence
  ENSG00000143376_76 (sequence is synthesized)
ctgatactaagttttgttttctaatactatgagaaagaaacatttacctagagaagagcttgaagacaaggggagatcccactcattagaactgtctctaacaatcagaccaagcatatc

SEQ ID NO: 379121 - DNA, 120 bp, Artificial Sequence
  ENSG00000143376_77 (sequence is synthesized)
ccattaaactcaggtcataagcatgtctgatcactgttgattctttttcctcttttgtaagtataggttataactagcaatgaatcggaagatgctttcatgaggttcttttaaatctga

SEQ ID NO: 379122 - DNA, 120 bp, Artificial Sequence
  ENSG00000143376_78 (sequence is synthesized)
aaattcatatattccaataaaacaggcttaaaaatgggatgttctatttagccacatgttgttttagtgtactttataggatttttgtaaagattcttaagcgtagctttctgttttcag

SEQ ID NO: 379123 - DNA, 120 bp, Artificial Sequence
  ENSG00000143376_79 (sequence is synthesized)
aagttaggaagatatgtgttggttaaaagccttgttttaatgcatacatttaagtttctgtgtgaataaatttcctcttccaaggaaattttattgtgtggtgacaggaaatttatattt

SEQ ID NO: 379124 - DNA, 120 bp, Artificial Sequence
  ENSG00000143376_80 (sequence is synthesized)
tattttataaaagctagggatggtggtcacattggttgcattgagactacaaaggggagagagtctgagggctctctctgaatgacatagatttcctacagtttatgggtctcttccatg

SEQ ID NO: 379125 - DNA, 120 bp, Artificial Sequence
  ENSG00000143376_81 (sequence is synthesized)
tcatatatatttatacagggctaaggccaaaattgatatagataatattggttgattagaccttccttatcccagaaagggggagagtttggtagatttaggttgccttgctatctcagg

SEQ ID NO: 379126 - DNA, 120 bp, Artificial Sequence
  ENSG00000143376_82 (sequence is synthesized)
tccaggtagaataactttgattcccctaaagcagccatctccctaatattttttttcttcccaactcacagcagtgtaactagacagatgtaaattatgttacaaaggattactaaggta

SEQ ID NO: 379127 - DNA, 120 bp, Artificial Sequence
  ENSG00000143376_83 (sequence is synthesized)
ccaggacatctggattctaaccttattttttttctaagctttagtttcactttctataaaatggaaaatattaaatctgtcttttgtagtgttataaagccaagtaaacattgagagagg

SEQ ID NO: 379128 - DNA, 87 bp, Artificial Sequence
  ENSG00000143376_84 (sequence is synthesized)
gcttgagcccaattgccatctctaaaaaaattttaaaaattagccaagcatggtgacacatgcaggcggtccaagctaggaggctga

SEQ ID NO: 379129 - DNA, 120 bp, Artificial Sequence
  ENSG00000143376_85 (sequence is synthesized)
gcatggtgacacatgcaggcggtccaagctaggaggctgaggtaggaggatcagttgagcctaggaggttaaggctacagtgagctatgattgtgctacaacactctagcctgggcaaca

SEQ ID NO: 379130 - DNA, 120 bp, Artificial Sequence
  ENSG00000143376_86 (sequence is synthesized)
gctggagtgcaatggtgtgatcatagttcactgcatcctctacctcttgggctcaggtgatcctgccaccttagcctcccaagtagctagaactacaggtgctcaccaccaggtccagct

SEQ ID NO: 379131 - DNA, 120 bp, Artificial Sequence
  ENSG00000143376_87 (sequence is synthesized)
ccttagcctcccaagtagctagaactacaggtgctcaccaccaggtccagctaatttttacttttttaaaaaaatagagacaggatcttgcagtgttgcccaggctggtcttgaactcct

SEQ ID NO: 379132 - DNA, 120 bp, Artificial Sequence
  ENSG00000143376_88 (sequence is synthesized)
ggtgtgagccactgtgcccagatatatttttcttttgaatacagctgtttattgattgtgtttttgtaccttgctgtacaaaaattgctgtattttgttaaacttttatgtctttgccat

SEQ ID NO: 379133 - DNA, 86 bp, Artificial Sequence
  ENSG00000143376_89 (sequence is synthesized)
aaaattgctgtattttgttaaacttttatgtctttgccattttaatagatatttactctgttccattgtttttgtttttatcttag

SEQ ID NO: 379134 - DNA, 84 bp, Artificial Sequence
  ENSG00000143376_90 (sequence is synthesized)
cccagctaatttttgtattttttgtacagacagggttttgccatatcggccaggctcatgcctcctaaagtgctgagattacag

SEQ ID NO: 379135 - DNA, 120 bp, Artificial Sequence
  ENSG00000143376_91 (sequence is synthesized)
acaggtgtgagccaccacgcccggccaggaattttgttttagagaagttttaacatttagtataacaatgtttatctatcttttccattgtgatttctactaacattttctttcctcaat

SEQ ID NO: 379136 - DNA, 120 bp, Artificial Sequence
  ENSG00000143376_92 (sequence is synthesized)
caatataagaggacaatagcacacttatatttagtgtgcttttgtcacaatattttatttttaatatttaatgctttaatttacccaaggtttattgtggtgtgtagtatgaatgaatgg

SEQ ID NO: 379137 - DNA, 120 bp, Artificial Sequence
  ENSG00000143376_93 (sequence is synthesized)
ttggtctaagttaaattttcttggtattgctatccacatagcacatcaggatacattaaatgattcatttctaatacattatgcttaacttgtctttcattaaatttatatctgtctggt

SEQ ID NO: 379138 - DNA, 120 bp, Artificial Sequence
  ENSG00000143376_94 (sequence is synthesized)
gtgtgtgtgtgtgtgtgtatatatatggcctatgtttagcatctctctgctcttaatctgtatttctatttttgactcagtattcccttttgattattgtttctatataatatattttaa

SEQ ID NO: 379139 - DNA, 120 bp, Artificial Sequence
  ENSG00000143376_95 (sequence is synthesized)
tatctggtaaggctaagccttccttttttaaaagtcttgatattctttcccattttatgttttctaataatttttaacccatttcataacactttataaagtatctatcctattactatt

SEQ ID NO: 379140 - DNA, 120 bp, Artificial Sequence
  ENSG00000143376_96 (sequence is synthesized)
ccaactggaattttgttaaatttatagtttactgaagaagaatcaccattttaattaaatgttgtattataataatagatgcataaagtatctattttattcaagttgacttttgtttcc

SEQ ID NO: 379141 - DNA, 120 bp, Artificial Sequence
  ENSG00000143376_97 (sequence is synthesized)
tcaaaaaaagttacgtggttttatgttttatcaatgcccccttaaattaatcaccaaggattttatatttttattgctattatgaatggaatattttatctttgtatttttggagtagaa

SEQ ID NO: 379142 - DNA, 120 bp, Artificial Sequence
  ENSG00000143376_98 (sequence is synthesized)
aaatcattagctaggagtcagaatatctgattcaagtataagctctacattgggtaaatcctttgcataacattgctgagatctgttttctcatctgttaaaggggaacagtggtgtgtc

SEQ ID NO: 379143 - DNA, 120 bp, Artificial Sequence
  ENSG00000143376_99 (sequence is synthesized)
tcataggtgggtttgtttattttattttaaatgtattttttatttaaaaaattgagaaggtatctcgctatgttgcccaggctggccttgaattcctggcttcaagcaatccccccacct

SEQ ID NO: 379144 - DNA, 120 bp, Artificial Sequence
  ENSG00000143376_100 (sequence is synthesized)
tgacctcccaaagcactgagattacaggcatgaaccaccacacctggctgcttttttttaatgcttatcaaaatttaagtgagggcagagcatgtgaaattgctttttgaagtataaaac

SEQ ID NO: 379145 - DNA, 120 bp, Artificial Sequence
  ENSG00000143376_101 (sequence is synthesized)
tagaagacaaaagtatttaagtatttagaaaagttaatgtttttggagcagtatcttatatccagcaacttttctgaactttcctattgcctcaaatgatttctaaacagctttattgag

SEQ ID NO: 379146 - DNA, 120 bp, Artificial Sequence
  ENSG00000143376_102 (sequence is synthesized)
agtttacatacaataaactgtacatatttaaagtatacaatttgataattttttaaatttctaagccatttttagtgtatagttcaatagtgttaagtatattcacaatgttgtgtaaca

SEQ ID NO: 379147 - DNA, 120 bp, Artificial Sequence
  ENSG00000143376_103 (sequence is synthesized)
aacagatctccagaattcttttttttaaaggaggggacagaatctcagtctgccacccaggctggagtgcagtgctgcggtcatagctcaccataatcttgaacgtctgacctcaaacga

SEQ ID NO: 379148 - DNA, 120 bp, Artificial Sequence
  ENSG00000143376_104 (sequence is synthesized)
cctcagcctcccaaagtgttgggattaccaggcgtgagccactgctcctggcccagaactcttttaatcttgcaaaagattaaaactgaaactctgtacccatcaaacaactccccgttt

SEQ ID NO: 379149 - DNA, 120 bp, Artificial Sequence
  ENSG00000143376_105 (sequence is synthesized)
ccccgttttcctctcccccttggcaactaccattctactttttgtttctatgaatttgactactttagatatttaatgtaagtgtaattatacactatttgcctttgttataactggctt

SEQ ID NO: 379150 - DNA, 120 bp, Artificial Sequence
  ENSG00000143376_106 (sequence is synthesized)
cccacatttaatttatccattgatccatggacagttgggtttctttcatttcttggttattgtgaataatgctgctgtgaacatgggtgtgcagatatcttgttgagatccttttttcaa

SEQ ID NO: 379151 - DNA, 120 bp, Artificial Sequence
  ENSG00000143376_107 (sequence is synthesized)
tatacccagaagtgggattactgaatcatatggcagttctattttcaacttcttgaggaactgctatactattttccatagtgactgcaccatctcaaatgacttatttttttgttttgt

SEQ ID NO: 379152 - DNA, 120 bp, Artificial Sequence
  ENSG00000143376_108 (sequence is synthesized)
tttttattttttggagacagagtcttgctgtgtctcccaggctggagtgcagtgggatgatctcggctcactccaacccgtgcctcctgggttccaatgactcttatgcctcagcctttt

SEQ ID NO: 379153 - DNA, 74 bp, Artificial Sequence
  ENSG00000143376_109 (sequence is synthesized)
tgcctcctgggttccaatgactcttatgcctcagcctttttgaagtataaaactagctggcactacagttgcat

SEQ ID NO: 379154 - DNA, 120 bp, Artificial Sequence
  ENSG00000143376_110 (sequence is synthesized)
acaggcatgagccaccgcacctggccacaaacactgtgcctggcagctgttttttgatggactaagtaaacaactgtatcttttgaaaagtatattaaatttctcttacttaatttcaat

SEQ ID NO: 379155 - DNA, 120 bp, Artificial Sequence
  ENSG00000143376_111 (sequence is synthesized)
ttttgaaaagtatattaaatttctcttacttaatttcaattatttttgtatcatattttgatggtaggaatatttaacgaatttcacagttctaaaatgttatcaattataagatgcacc

SEQ ID NO: 379156 - DNA, 120 bp, Artificial Sequence
  ENSG00000143376_112 (sequence is synthesized)
attattttatgtattgataagagaaaaaagctgtcagttaaactgatacatcattgattgtaagatacatcccaatttcagaaatgttaaaatatgaaataatgtattcatttaaattga

SEQ ID NO: 379157 - DNA, 120 bp, Artificial Sequence
  ENSG00000143376_113 (sequence is synthesized)
tgagatattatatgttagttgctaatggtaataatgaaccttttccttaaaaattaataaggtagaaattaatcatttatatttaaattctggctaaacctagcaaagtgtacacacatt

SEQ ID NO: 379158 - DNA, 120 bp, Artificial Sequence
  ENSG00000143376_114 (sequence is synthesized)
taagctgctgtttcctgaaagctcacaaaagtagcagtattggaattttaaaaagcgtaaacttgcaaggacaaagagaacaagggaggataccacagcaaatgacaaccgttgacagtt

SEQ ID NO: 379159 - DNA, 120 bp, Artificial Sequence
  ENSG00000143376_115 (sequence is synthesized)
tttagaaaatgaatgtctaagtaaaagagttttgatatttggttattgtggaggaaaaattggtgataggtacatgggaagttacaaacaaaaacacgaggcatttaacctcagaggaaa

SEQ ID NO: 379160 - DNA, 120 bp, Artificial Sequence
  ENSG00000143376_116 (sequence is synthesized)
taaaaaattttgcaagaaaggaagtcatagcatagtatatagcttagttgtgaatagtgtttacatatttataataatgcagttattgagtatttaattttttattgagaagttggggga

SEQ ID NO: 379161 - DNA, 120 bp, Artificial Sequence
  ENSG00000143376_117 (sequence is synthesized)
agaggaagtgggagtgtttgggtgctacaagagagttaaaaccaaatattttcaacacagtaagtcaacagtgtctaaaattggtaagtcaagaattgtcaatgtaagcatgccatttag

SEQ ID NO: 379162 - DNA, 120 bp, Artificial Sequence
  ENSG00000143376_118 (sequence is synthesized)
aattatggagggattatcacaagaaattgcttaaagtgcctaaaagtagttgcttttgtggaatgacgctctgggatcagaggctgctgtttttattaggagccttttagtactatatgt

SEQ ID NO: 379163 - DNA, 120 bp, Artificial Sequence
  ENSG00000143376_119 (sequence is synthesized)
tttgtttttttaaattatatacatcttttactttaattaaaaaaatttaagaagaaaaggaaactagggtggtgatatttatgttttccacttagtcagtcaagcagtgtaatctttttt

SEQ ID NO: 379164 - DNA, 120 bp, Artificial Sequence
  ENSG00000143376_120 (sequence is synthesized)
tggagtgcagtggcatgatctgggctcacggagatgtaacctccgtcttccgggttcaagtgattctcttacctcagactcccgagttgctgggattacctgctccctcctccacatccg

SEQ ID NO: 379165 - DNA, 120 bp, Artificial Sequence
  ENSG00000143376_121 (sequence is synthesized)
ggttcaagtgattctcttacctcagactcccgagttgctgggattacctgctccctcctccacatccggctaatttttgtattttagtagaaatggggtttcaacatgttggccaggctg

SEQ ID NO: 379166 - DNA, 120 bp, Artificial Sequence
  ENSG00000143376_122 (sequence is synthesized)
gaaatcgttctcattttttataaattttaattgtaatttccgcaaccttctgttgcctcttgtaaaacagtaggtttgcaaaagggatagttttttgaaaatctgccttatagagaaatc

SEQ ID NO: 379167 - DNA, 120 bp, Artificial Sequence
  ENSG00000143376_123 (sequence is synthesized)
cattccttcttactcatctcgtgccatctacccttatccttgacattcttaactccatggtgtccactcattctgtttcctcacctcttccacctcaagaaatggttggttttaacctgg

SEQ ID NO: 379168 - DNA, 120 bp, Artificial Sequence
  ENSG00000143376_124 (sequence is synthesized)
gagagttgattgaaaaaaaaaaaaagaaatagttgctcacctaggccagtgtttggagacagtatacctttcctctgtcctttctgtaaatagatgctttcttgtttcattaatgtccta

SEQ ID NO: 379169 - DNA, 120 bp, Artificial Sequence
  ENSG00000143376_125 (sequence is synthesized)
cttgtttcattaatgtcctacatactgtttcctagtattcctagtattgtctgacaatatattctttttttttccttgagatggagttttgatcgtcacccaggctggagtgcagtggcg

SEQ ID NO: 379170 - DNA, 120 bp, Artificial Sequence
  ENSG00000143379_0 (sequence is synthesized)
ctcccttatcccttcgctttcgctcttttccgtcgaggccgacccctgagttgtgagtctggggtctggttggtgaaaaagagcccttgaagctggaagacgggagaggacaaaagcatg

SEQ ID NO: 379171 - DNA, 120 bp, Artificial Sequence
  ENSG00000143379_1 (sequence is synthesized)
tcttcccttcctgggtgcattggtttggatgcagcaacagctacagtggagtctgaagagattgcagagctgcaacaggcagtggttgaggaactgggtatctctatggaggaacttcgg

SEQ ID NO: 379172 - DNA, 120 bp, Artificial Sequence
  ENSG00000143379_2 (sequence is synthesized)
catttcatcgatgaggaactggagaagatggattgtgtacagcaacgcaagaagcagctagcagagttagagacatgggtaatacagaaagaatctgaggtggctcacgttgaccaactc

SEQ ID NO: 379173 - DNA, 120 bp, Artificial Sequence
  ENSG00000143379_3 (sequence is synthesized)
tttgatgatgcatccagggcagtgactaattgtgagtctttggtgaaggacttctactccaagctgggactacaataccgggacagtagctctgaggacgaatcttcccggcctacagaa

SEQ ID NO: 379174 - DNA, 120 bp, Artificial Sequence
  ENSG00000143379_4 (sequence is synthesized)
ataattgagattcctgatgaagatgatgatgtcctcagtattgattcaggtgatgctgggagcagaactccaaaagaccagaagctccgtgaagctatggctgccttaagaaagtcagct

SEQ ID NO: 379175 - DNA, 120 bp, Artificial Sequence
  ENSG00000143379_5 (sequence is synthesized)
caagatgttcagaagttcatggatgctgtcaacaagaagagcagttcccaggatctgcataaaggaaccttgagtcagatgtctggagaactaagcaaagatggtgacctgatagtcagc

SEQ ID NO: 379176 - DNA, 120 bp, Artificial Sequence
  ENSG00000143379_6 (sequence is synthesized)
atgcgaattctgggcaagaagagaactaagacttggcacaaaggcacccttattgccatccagacagttgggccagggaagaaatacaaggtgaaatttgacaacaaaggaaagagtcta

SEQ ID NO: 379177 - DNA, 120 bp, Artificial Sequence
  ENSG00000143379_7 (sequence is synthesized)
ctgtcggggaaccatattgcctatgattaccaccctcctgctgacaagctgtatgtgggcagtcgggtggtcgccaaatacaaagatgggaatcaggtctggctctatgctggcattgta

SEQ ID NO: 379178 - DNA, 120 bp, Artificial Sequence
  ENSG00000143379_8 (sequence is synthesized)
gctgagacaccaaacgtcaaaaacaagctcaggtttctcattttctttgatgatggctatgcttcctatgtcacacagtcggaactgtatcccatttgccggccactgaaaaagacttgg

SEQ ID NO: 379179 - DNA, 120 bp, Artificial Sequence
  ENSG00000143379_9 (sequence is synthesized)
gaggacatagaagacatctcctgccgtgacttcatagaggagtatgtcactgcctaccccaaccgccccatggtactgctcaagagtggccagcttatcaagactgagtgggaaggcacg

SEQ ID NO: 379180 - DNA, 120 bp, Artificial Sequence
  ENSG00000143379_10 (sequence is synthesized)
tggtggaagtcccgagttgaggaggtggatggcagcctagtcaggatcctcttcctggatgacaaaagatgtgagtggatctatcgaggctctacacggctggagcccatgttcagcatg

SEQ ID NO: 379181 - DNA, 120 bp, Artificial Sequence
  ENSG00000143379_11 (sequence is synthesized)
aaaacatcctcagcctctgcactggagaagaagcaaggacagctcaggacacgtccaaatatgggtgctgtgaggagcaaaggccctgttgtccagtacacacaggatctgaccggtact

SEQ ID NO: 379182 - DNA, 120 bp, Artificial Sequence
  ENSG00000143379_12 (sequence is synthesized)
ggaacccagttcaagccagtggaacccccacagcctacagctccacctgccccacctttcccacctgctccacctctatccccccaagcaggtgacagtgacttggaaagccagcttgcc

SEQ ID NO: 379183 - DNA, 120 bp, Artificial Sequence
  ENSG00000143379_13 (sequence is synthesized)
cagtcacggaagcaggtagccaaaaagagcacgtcctttcgaccaggatctgtgggctctggtcattcctcccctacatctcctgcactcagtgaaaatgtctctggtgggaaacctggg

SEQ ID NO: 379184 - DNA, 120 bp, Artificial Sequence
  ENSG00000143379_14 (sequence is synthesized)
atcaaccagacatatagatcacctttaggctccacagcctctgccccagcaccctcagcactcccggcccctccagcacccccagtcttccatggcatgctggagcgggccccagcagag

SEQ ID NO: 379185 - DNA, 120 bp, Artificial Sequence
  ENSG00000143379_15 (sequence is synthesized)
ccctcctaccgtgctcccatggagaagcttttctacttacctcatgtctgcagctatacctgtctgtctcgagtcagacctatgaggaatgagcagtaccggggcaagaaccctctgctg

SEQ ID NO: 379186 - DNA, 120 bp, Artificial Sequence
  ENSG00000143379_16 (sequence is synthesized)
gtcccgttactatatgacttccggcggatgacagcccggcgtcgagttaaccgcaagatgggctttcatgttatctataagacaccttgtggtctctgccttcggacaatgcaggagata

SEQ ID NO: 379187 - DNA, 120 bp, Artificial Sequence
  ENSG00000143379_17 (sequence is synthesized)
gaacgctaccttttcgagactggctgtgacttcctcttcctggagatgttctgtttggatccatatgttcttgtggaccgaaagtttcagccctataagcctttttactatattttggac

SEQ ID NO: 379188 - DNA, 120 bp, Artificial Sequence
  ENSG00000143379_18 (sequence is synthesized)
cacaacccctccaccccaggtggcctacagcaaggaacgtatcccgggcaagggtgttttcattaacacaggccctgaatttctggttggctgtgactgcaaggatgggtgtcgggacaa

SEQ ID NO: 379189 - DNA, 120 bp, Artificial Sequence
  ENSG00000143379_19 (sequence is synthesized)
gtccaagtgtgcctgccatcaactaactatccaggctacagcctgtaccccaggaggccaaatcaaccctaactctggctaccagtacaagagactagaagagtgtctacccacaggggt

SEQ ID NO: 379190 - DNA, 120 bp, Artificial Sequence
  ENSG00000143379_20 (sequence is synthesized)
atatgagtgtaacaaacgctgcaaatgtgacccaaacatgtgcacaaaccggttggtgcaacatggactacaagttcggctacagctattcaagacacagaacaagggctggggtatccg

SEQ ID NO: 379191 - DNA, 120 bp, Artificial Sequence
  ENSG00000143379_21 (sequence is synthesized)
ctgcttggatgacattgccaaaggctcttttgtttgtatttatgcaggcaaaatcctgacagatgactttgcagacaaggagggtctggaaatgggtgatgagtactttgcaaatctgga

SEQ ID NO: 379192 - DNA, 120 bp, Artificial Sequence
  ENSG00000143379_22 (sequence is synthesized)
ccatatcgagagcgtggagaacttcaaagaaggatatgagagtgatgccccctgttcctctgacagcagtggtgtagacttgaaggaccaggaagatggcaacagcggtacagaggaccc

SEQ ID NO: 379193 - DNA, 120 bp, Artificial Sequence
  ENSG00000143379_23 (sequence is synthesized)
tgaagagtccaatgatgatagctcagatgataacttctgtaaggatgaggacttcagcaccagttcagtgtggcggagctatgctacccggaggcagacccggggccagaaagagaacgg

SEQ ID NO: 379194 - DNA, 120 bp, Artificial Sequence
  ENSG00000143379_24 (sequence is synthesized)
actctctgagacaacttccaaggactcccaccccccagatcttggacccccacatattcctgttcctccctcaatccctgtaggtggctgcaatccaccttcctccgaagagacacccaa

SEQ ID NO: 379195 - DNA, 120 bp, Artificial Sequence
  ENSG00000143379_25 (sequence is synthesized)
gaacaaggtggcctcatggttgagctgcaatagtgtcagtgaaggtggttttgctgactctgatagccattcatccttcaagactaatgaaggtggggagggccgggctgggggaagccg

SEQ ID NO: 379196 - DNA, 120 bp, Artificial Sequence
  ENSG00000143379_26 (sequence is synthesized)
aatggaggctgagaaggcctccacctcaggactaggcatcaaggatgagggagacatcaaacaggccaagaaagaggacactgacgaccgaaacaagatgtcagtagttactgaaagctc

SEQ ID NO: 379197 - DNA, 120 bp, Artificial Sequence
  ENSG00000143379_27 (sequence is synthesized)
tcgaaattacggttacaatccttctcctgtgaagcctgaaggacttcgccgcccacctagtaagactagtatgcatcaaagccgaagactcatggcttctgctcagtccaaccctgatga

SEQ ID NO: 379198 - DNA, 120 bp, Artificial Sequence
  ENSG00000143379_28 (sequence is synthesized)
tgtcctgacactgtccagcagcacagaaagtgagggggaaagtgggaccagccgaaagcccactgctggtcagacttcggctacagcggttgacagtgatgatatccagaccatatcctc

SEQ ID NO: 379199 - DNA, 120 bp, Artificial Sequence
  ENSG00000143379_29 (sequence is synthesized)
tggctctgaaggggatgactttgaggacaagaagaacatgactggtccaatgaagcgtcaagtggcagtaaaatcaacccgaggctttgctcttaaatcaacccatgggattgcaattaa

SEQ ID NO: 379200 - DNA, 120 bp, Artificial Sequence
  ENSG00000143379_30 (sequence is synthesized)
atcaaccaacatggcctctgtggacaagggggagagcgcacctgttcgtaagaacacacgccaattctatgatggcgaggagtcttgctacatcattgatgccaagcttgaaggcaacct

SEQ ID NO: 379201 - DNA, 120 bp, Artificial Sequence
  ENSG00000143379_31 (sequence is synthesized)
gggccgctacctcaaccacagttgcagccccaacctgtttgtccagaatgtcttcgtggatacccatgatcttcgcttcccctgggtggccttctttgccagcaaaatccgggctgggac

SEQ ID NO: 379202 - DNA, 120 bp, Artificial Sequence
  ENSG00000143379_32 (sequence is synthesized)
agaacttacttgggactacaactacgaggtgggcagtgtggaaggcaaggagctactctgttgctgtggggccattgaatgcagaggacgtcttctttagaggacagccttcttcccaac

SEQ ID NO: 379203 - DNA, 120 bp, Artificial Sequence
  ENSG00000143379_33 (sequence is synthesized)
ccttcttgaactgtcgtttcctcaggaactgggtcttcctgattgttgaaccctgacccgaagtctctgggctagctactccccccagctcctagttgatagaaatgggggttctggacc

SEQ ID NO: 379204 - DNA, 120 bp, Artificial Sequence
  ENSG00000143379_34 (sequence is synthesized)
agatgatcccttccaatgtggtgctagcaggcaggatcccttctccacctccaaaggccctaaagggtggggagagatcaccactctaacctcggcctgacatccctcccatcccatatt

SEQ ID NO: 379205 - DNA, 120 bp, Artificial Sequence
  ENSG00000143379_35 (sequence is synthesized)
tgtccaagtgttcctgcttctaacagactttgttcttagaatggagcctgtgtatctactatctccagtttgtattatttcttgaaagtcttttaacaatatgataaaactaagattgtg

SEQ ID NO: 379206 - DNA, 120 bp, Artificial Sequence
  ENSG00000143379_36 (sequence is synthesized)
ccgctacctcaacgtgagacccctctccccacctctagatgctggattatcccatggtcctcagatttcttttaacatactctataagcccttttcttgttataaactcttgatctcaaa

SEQ ID NO: 379207 - DNA, 120 bp, Artificial Sequence
  ENSG00000143379_37 (sequence is synthesized)
agaactccatggaaaatagaaggaaatctctccattgggagatgtttttagagaataattgttcatgacattgaaccaagcattttattttatgttttgagacggagtctcgctctgtca

SEQ ID NO: 379208 - DNA, 70 bp, Artificial Sequence
  ENSG00000143379_38 (sequence is synthesized)
agagtgcagtggacacctccccctcccgagtagctggaattataggcatccgccaccacacccagctaat

SEQ ID NO: 379209 - DNA, 120 bp, Artificial Sequence
  ENSG00000143379_39 (sequence is synthesized)
gaactgggtttgcgaatgggtaggacgcacccctagaatgggtagcacgggggtgggctggtgtgtgggcagaggaaaatggaggcgctgaaaatcagattttctttaaccgtttgatta

SEQ ID NO: 379210 - DNA, 120 bp, Artificial Sequence
  ENSG00000143379_40 (sequence is synthesized)
atccacttgcctggtggtagagggtggacaagtatctgattaattacaaaatgaaagatttataagtgattttttaatgttaaatgctgtttcaagttattcacatcattgtttccttct

SEQ ID NO: 379211 - DNA, 120 bp, Artificial Sequence
  ENSG00000143379_41 (sequence is synthesized)
actaaagtagagaaacaagaattgattttaagtatctctttgatgattatgctgctttccacattacagatggtgaaactgtccctggttgatgtaatcctgctcgtggtgttttccatg

SEQ ID NO: 379212 - DNA, 120 bp, Artificial Sequence
  ENSG00000143379_42 (sequence is synthesized)
agcattaagccccatcactgagaaggcttaaaggctccagccagggagtgtagtgaggatttctgtcaagttgcagagtggtttacccaccccactttagaatgtgtacctgtcactggc

SEQ ID NO: 379213 - DNA, 120 bp, Artificial Sequence
  ENSG00000143379_43 (sequence is synthesized)
tgatgttatctgtggaggtcatttgaagtctgattattggacttgttacccgaggctgtgaaagcatttaacccttcacttgttcttttccaggacactgacgaccgaaacaagatgtca

SEQ ID NO: 379214 - DNA, 120 bp, Artificial Sequence
  ENSG00000143379_44 (sequence is synthesized)
ggacaagaagaacatgactggtagcctggaaaaattttgggaatggtgggaagaaatagtaagaaacttgggatagagcattttttaaggaagctaaagaagtagtgggtaaaaattcag

SEQ ID NO: 379215 - DNA, 120 bp, Artificial Sequence
  ENSG00000143379_45 (sequence is synthesized)
atcctaagaattggagcatctctgggagggctttctgactccaagctaaactattgtttgacacatcctctctcatttccatttttttactctttcccctcagctcctttgtctagcaga

SEQ ID NO: 379216 - DNA, 120 bp, Artificial Sequence
  ENSG00000143379_46 (sequence is synthesized)
tctaattatgcttgaaaaaaaaacctgctacttaggatctttgagttccagcttattggtgtttctcagctgcaatgttgggagagaaataggggtagaatgtccattcatgatagaatg

SEQ ID NO: 379217 - DNA, 120 bp, Artificial Sequence
  ENSG00000143379_47 (sequence is synthesized)
gatgtcctcagtattgattcaggtaagggatgagctttggataggagagtctcaggactgaagttgaaacactggaagatgagcaaatagaagataatagaagagaggagaaaccattgt

SEQ ID NO: 379218 - DNA, 120 bp, Artificial Sequence
  ENSG00000143379_48 (sequence is synthesized)
cactaactccatatttctaactgcctgagttggctattaaagaaaaaaatgcaacattgttagtatcatagatgttccctatgtgctacaccctgattgtattactttgctttcctcatt

SEQ ID NO: 379219 - DNA, 120 bp, Artificial Sequence
  ENSG00000143379_49 (sequence is synthesized)
ctgtgtaacccctattttggggtattccatcaaagagtggaattgccaggacttatagtgagtgtatgttctgttattagaatataaaaaatacagttggtttttgtgtattgatcttgt

SEQ ID NO: 379220 - DNA, 120 bp, Artificial Sequence
  ENSG00000143379_50 (sequence is synthesized)
tattttctttcatccagcatctaatcttcctcttgccaccgccctttcctgccaaaccgtgggtaacagcaaggacttaaaggagcccttcccatttacttctcttacttcttaccctcc

SEQ ID NO: 379221 - DNA, 120 bp, Artificial Sequence
  ENSG00000143379_51 (sequence is synthesized)
tgcttccccaggatgtcctgacactgtccagcagcacagaaagtgagggggaaagtgggaccagccgaaagcccactgctggtcagacttcggctacagcggttgacagtgatgatatcc

SEQ ID NO: 379222 - DNA, 120 bp, Artificial Sequence
  ENSG00000143379_52 (sequence is synthesized)
gtttgcttccgggcgtttcttttgcttccccttccctctttcacgcttcctcccctccccctcctcccttatcccttcgctttcgctcttttccgtcgaggccgacccctgagttaggac

SEQ ID NO: 379223 - DNA, 120 bp, Artificial Sequence
  ENSG00000143379_53 (sequence is synthesized)
tggcagcctagtcaggatcctcttcctggtactgttcttctctacaattttggaggcagaggttggtggggggggaacttaagaagcagtaatgaggatggttttatagctattccatag

SEQ ID NO: 379224 - DNA, 120 bp, Artificial Sequence
  ENSG00000143379_54 (sequence is synthesized)
ccttcctctttcttatcctcgtatgtgttctcactgtttttggtcaaattttactttgccctttttgttgttcctctgcaggtcattgttgaaaataaattatctgaattataatacgaa

SEQ ID NO: 379225 - DNA, 120 bp, Artificial Sequence
  ENSG00000143382_0 (sequence is synthesized)
ggagttgcggccgaggcggccgtgaccggagcgcggctcaggggccccagtggccgccgcggagcgaggttgcctggagagagcgcctgggcgcagaagggttaacgggccaccgggggc

SEQ ID NO: 379226 - DNA, 120 bp, Artificial Sequence
  ENSG00000143382_1 (sequence is synthesized)
tcgcagagcaggagggtgctctcggacggtgtgtcccccactgcactcctgaacttggaggacagggtcgccgcgagggacgcagagagcaccctccacgcccagatgcctgcgtagttt

SEQ ID NO: 379227 - DNA, 120 bp, Artificial Sequence
  ENSG00000143382_2 (sequence is synthesized)
ttgtgaccagtccgctcctgcctccccctggggcagtagagggggagcgatggagaactggactggcaggccctggctgtatctgctgctgcttctgtccctccctcagctctgcttgga

SEQ ID NO: 379228 - DNA, 120 bp, Artificial Sequence
  ENSG00000143382_3 (sequence is synthesized)
tcaggaggtgttgtccggacactctcttcagacacctacagaggagggccagggccccgaaggtgtctggggaccttgggtccagtgggcctcttgctcccagccctgcggggtgggggt

SEQ ID NO: 379229 - DNA, 120 bp, Artificial Sequence
  ENSG00000143382_4 (sequence is synthesized)
gcagcgcaggagccggacatgtcagctccctacagtgcagctccacccgagtctgcccctccctccccggcccccaagacatccagaagccctcctcccccggggccagggtcccagacc

SEQ ID NO: 379230 - DNA, 120 bp, Artificial Sequence
  ENSG00000143382_5 (sequence is synthesized)
ccagacttctccagaaaccctccccttgtacaggacacagtctcggggaaggggtggcccacttcgaggtcccgcttcccacctagggagagaggagacccaggagattcgagcggccag

SEQ ID NO: 379231 - DNA, 120 bp, Artificial Sequence
  ENSG00000143382_6 (sequence is synthesized)
gaggtcccggcttcgagaccccatcaagccaggaatgttcggttatgggagagtgccctttgcattgccactgcaccggaaccgcaggcaccctcggagcccacccagatctgagctgtc

SEQ ID NO: 379232 - DNA, 120 bp, Artificial Sequence
  ENSG00000143382_7 (sequence is synthesized)
cctgatctcttctagaggggaagaggctattccgtcccctactccaagagcagagccattctccgcaaacggcagcccccaaactgagctccctcccacagaactgtctgtccacacccc

SEQ ID NO: 379233 - DNA, 120 bp, Artificial Sequence
  ENSG00000143382_8 (sequence is synthesized)
atccccccaagcagaacctctaagccctgaaactgctcagacagaggtggcccccagaaccaggcctgcccccctacggcatcaccccagagcccaggcctctggcacagagcccccctc

SEQ ID NO: 379234 - DNA, 120 bp, Artificial Sequence
  ENSG00000143382_9 (sequence is synthesized)
acccacgcactccttaggagaaggtggcttcttccgtgcatcccctcagccacgaaggccaagttcccagggttgggccagtccccaggtagcagggagacgccctgatccttttccttc

SEQ ID NO: 379235 - DNA, 120 bp, Artificial Sequence
  ENSG00000143382_10 (sequence is synthesized)
ggtccctcggggccgaggccagcagggccaagggccttggggaacgggggggactcctcacgggccccgcctggagcctgaccctcagcacccgggcgcctggctgcccctgctgagcaa

SEQ ID NO: 379236 - DNA, 120 bp, Artificial Sequence
  ENSG00000143382_11 (sequence is synthesized)
cggcccccatgccagctccctctggagcctctttgctcccagtagccctattccaagatgttctggggagagtgaacagctaagagcctgcagccaagcgccctgcccccctgagcagcc

SEQ ID NO: 379237 - DNA, 120 bp, Artificial Sequence
  ENSG00000143382_12 (sequence is synthesized)
agacccccgggccctgcagtgcgcagcctttaactcccaggaattcatgggccagctgtatcagtgggagcccttcactgaagtccagggctcccagcgctgtgaactgaactgccggcc

SEQ ID NO: 379238 - DNA, 120 bp, Artificial Sequence
  ENSG00000143382_13 (sequence is synthesized)
ccgtggcttccgcttctatgtccgtcacactgaaaaggtccaggatgggaccctgtgtcagcctggagcccctgacatctgtgtggctggacgctgtctgagccccggctgtgatgggat

SEQ ID NO: 379239 - DNA, 120 bp, Artificial Sequence
  ENSG00000143382_14 (sequence is synthesized)
ccttggctctggcaggcgtcctgatggctgtggagtctgtgggggtgatgattctacctgtcgccttgtttcggggaacctcactgaccgagggggccccctgggctatcagaagatctt

SEQ ID NO: 379240 - DNA, 120 bp, Artificial Sequence
  ENSG00000143382_15 (sequence is synthesized)
gtggattccagcgggagccttgcggctccagattgcccagctccggcctagctccaactacctggcacttcgtggccctgggggccggtccatcatcaatgggaactgggctgtggatcc

SEQ ID NO: 379241 - DNA, 120 bp, Artificial Sequence
  ENSG00000143382_16 (sequence is synthesized)
ccctgggtcctacagggccggcgggaccgtctttcgatataaccgtcctcccagggaggagggcaaaggggagagtctgtcggctgaaggccccaccacccagcctgtggatgtctatat

SEQ ID NO: 379242 - DNA, 120 bp, Artificial Sequence
  ENSG00000143382_17 (sequence is synthesized)
cacctcctccaatccttgagaaccccaccccagagccccctgtcccccagcttcagccggagattctgagggtggagcccccacttgctccggcaccccgcccagcccggaccccaggca

SEQ ID NO: 379243 - DNA, 120 bp, Artificial Sequence
  ENSG00000143382_18 (sequence is synthesized)
ccctccagcgtcaggtgcggatcccccagatgcccgccccgccccatcccaggacacccctggggtctccagctgcgtactggaaacgagtgggacactctgcatgctcagcgtcctgcg

SEQ ID NO: 379244 - DNA, 120 bp, Artificial Sequence
  ENSG00000143382_19 (sequence is synthesized)
ggaaaggtgtctggcgccccattttcctctgcatctcccgtgagtcgggagaggaactggatgaacgcagctgtgccgcgggtgccaggcccccagcctcccctgaaccctgccacggca

SEQ ID NO: 379245 - DNA, 120 bp, Artificial Sequence
  ENSG00000143382_20 (sequence is synthesized)
ccccatgccccccatactgggaggctggcgagtggacatcctgcagccgctcctgtggccccggcacccagcaccgccagctgcagtgccggcaggaatttggggggggtggctcctcgg

SEQ ID NO: 379246 - DNA, 120 bp, Artificial Sequence
  ENSG00000143382_21 (sequence is synthesized)
tgcccccggagcgctgtggacatctcccccggcccaacatcacccagtcttgccagctgcgcctctgtggccattgggaagttggctctccttggagccagtgctccgtgcggtgcggcc

SEQ ID NO: 379247 - DNA, 120 bp, Artificial Sequence
  ENSG00000143382_22 (sequence is synthesized)
ggggccagagaagccggcaggttcgctgtgttgggaacaatggtgatgaagtgagcgagcaggagtgtgcgtcaggccccccgcagccccccagcagagaggcctgtgacatggggccct

SEQ ID NO: 379248 - DNA, 120 bp, Artificial Sequence
  ENSG00000143382_23 (sequence is synthesized)
gtactactgcctggttccacagcgactggagctccaagtgctcagccgagtgtgggacgggaatccagcggcgctctgtggtctgccttgggagtggggcagccctcgggccaggccagg

SEQ ID NO: 379249 - DNA, 120 bp, Artificial Sequence
  ENSG00000143382_24 (sequence is synthesized)
gggaagcaggagcaggaactgggcagagctgtccaacaggaagccggccccctgacatgcgcgcctgcagcctggggccctgtgagagaacttggcgctggtacacagggccctggggtg

SEQ ID NO: 379250 - DNA, 120 bp, Artificial Sequence
  ENSG00000143382_25 (sequence is synthesized)
agtgctcctccgaatgtggctctggcacacagcgtagagacatcatctgtgtatccaaactggggacggagttcaacgtgacttctccgagcaactgttctcacctccccaggccccctg

SEQ ID NO: 379251 - DNA, 120 bp, Artificial Sequence
  ENSG00000143382_26 (sequence is synthesized)
ccctgcagccctgtcaagggcaggcctgccaggaccgatggttttccacgccctggagcccatgttctcgctcctgccaagggggaacgcagacacgggaggtccagtgcctgagcacca

SEQ ID NO: 379252 - DNA, 120 bp, Artificial Sequence
  ENSG00000143382_27 (sequence is synthesized)
accagaccctcagcacccgatgccctcctcaactgcggccctccaggaagcgcccctgtaacagccaaccctgcagccagcgccctgatgatcaatgcaaggacagctctccacattgcc

SEQ ID NO: 379253 - DNA, 120 bp, Artificial Sequence
  ENSG00000143382_28 (sequence is synthesized)
ccctggtggtacaggcccggctctgcgtctacccctactacacagccacctgttgccgctcttgcgcacatgtcctggagcggtctccccaggatccctcctgaaaggggtccggggcac

SEQ ID NO: 379254 - DNA, 120 bp, Artificial Sequence
  ENSG00000143382_29 (sequence is synthesized)
cttcacggttttctgtgccaccatcggtcacccattgatcggcccactctgaaccccctggctctccagcctgtcccagtctcagcagggatgtcctccaggtgacagagggtggcaagg

SEQ ID NO: 379255 - DNA, 120 bp, Artificial Sequence
  ENSG00000143382_30 (sequence is synthesized)
tgactgacacaaagtgactttcagggctgtggtcaggcccatgtggtggtgtgatgggtgtgtgcacatatgcctcaggtgtgcttttgggactgcatggatatgtgtgtgctcaaacgt

SEQ ID NO: 379256 - DNA, 120 bp, Artificial Sequence
  ENSG00000143382_31 (sequence is synthesized)
gtatcacttttcaaaaagaggttacacagactgagaaggacaagacctgtttccttgagactttcctaggtggaaaggaaagcaagtctgcagttccttgctaatctgagctacttagag

SEQ ID NO: 379257 - DNA, 120 bp, Artificial Sequence
  ENSG00000143382_32 (sequence is synthesized)
tgtggtctccccaccaactccagttttgtgccctaagcctcatttctcatgttcagacctcacatcttctaagccgccctgtgtctctgaccccttctcatttgcctagtatctctgccc

SEQ ID NO: 379258 - DNA, 120 bp, Artificial Sequence
  ENSG00000143382_33 (sequence is synthesized)
ctgcctccctaattagctagggctggggtcagccactgccaatcctgccttactcaggaaggcaggaggaaagagactgcctctccagagcaaggcccagctgggcagagggtgaaaaag

SEQ ID NO: 379259 - DNA, 120 bp, Artificial Sequence
  ENSG00000143382_34 (sequence is synthesized)
agaaatgtgagcatccgctcccccaccaccccgcccagcccctagccccactccctgcctcctgaaatggttcccacccagaactaatttattttttattaaagatggtcatgacaaatg

SEQ ID NO: 379260 - DNA, 120 bp, Artificial Sequence
  ENSG00000143382_35 (sequence is synthesized)
gaggatcctaaagggatggaccagtttcaccccctcctccatattctctgagctgtcctcccagccccaagctctctggacactggagaggtaaccaccaggcttctgtccctgcagaga

SEQ ID NO: 379261 - DNA, 120 bp, Artificial Sequence
  ENSG00000143382_36 (sequence is synthesized)
cacagcgactggagctccaaggtgagcccggaacccccagccatatcctgcatcctgggtaaccacgcccaggacacctcagcctttccagcatagctcaataaacttgtattgatcaag

SEQ ID NO: 379262 - DNA, 120 bp, Artificial Sequence
  ENSG00000143382_37 (sequence is synthesized)
acttggaggacagggtcgccgcgagggacgcaggtgggtgcccttgatccagctcagcccgatggcagaagaggttgacaaaaaagaaagacacctgttggggtggcctgccagacccag

SEQ ID NO: 379263 - DNA, 120 bp, Artificial Sequence
  ENSG00000143382_38 (sequence is synthesized)
gagtggagggctctgagggcccgggaattcggactcaggacagggattctccatggctaggcccagaaacacagggtccaaccactctccagcagggagacctgggggtgaaggggtgag

SEQ ID NO: 379264 - DNA, 120 bp, Artificial Sequence
  ENSG00000143382_39 (sequence is synthesized)
ccctgcgcaggtctctgttccttggtcttcactgggcagtgtggagaggtgtggccaggaggagcccgcgtttgtccagaccagggtctactctggcaccagagtgaccacctctgacct

SEQ ID NO: 379265 - DNA, 120 bp, Artificial Sequence
  ENSG00000143382_40 (sequence is synthesized)
ctcctttcctcgtcctgggccgggaacgacaccaaatgagggacatggaaagggctggagtaacaagagtcaggcagagcctgaagacttgggtggaacatgggcccttctctggagatc

SEQ ID NO: 379266 - DNA, 120 bp, Artificial Sequence
  ENSG00000143382_41 (sequence is synthesized)
ctggcctcccccgttcagtcagggtggagttgctgaccttagtggccggcccagccaggggaaggagtggccatcggcaacccccaccccaaccccaatccctgaggcgcccgctctggc

SEQ ID NO: 379267 - DNA, 120 bp, Artificial Sequence
  ENSG00000143382_42 (sequence is synthesized)
tcagccactctgacccctccctcaaattccgaaccctaggtctcagggagggcagtggggctgagtgtctgcccccaggcacattcctacccttctcttggtcattttctgccccagagc

SEQ ID NO: 379268 - DNA, 120 bp, Artificial Sequence
  ENSG00000143382_43 (sequence is synthesized)
ccctggattcctctcccgggtgcctttcagatccaacagaaacagattttttttttcctggaaagcagaactaagagtgggatgaggagcaggggtgggaaggactcaaagtgagaagaa

SEQ ID NO: 379269 - DNA, 120 bp, Artificial Sequence
  ENSG00000143382_44 (sequence is synthesized)
gggggcaaagagagtcaggcttggtggctggggtggcttccaagcctcacttctccagtgttcaaagctgaacttcagatggacttcccggctcttcagaatgagaggcctgtggctggg

SEQ ID NO: 379270 - DNA, 120 bp, Artificial Sequence
  ENSG00000143382_45 (sequence is synthesized)
gcatgaggcagccccggctgcacctctccttcccgcttccccagctggtagagacgcacaggaaacaagccctcactgaaccaactccagatgctggcacccagagtgggtgttacattg

SEQ ID NO: 379271 - DNA, 120 bp, Artificial Sequence
  ENSG00000143382_46 (sequence is synthesized)
ccggcttcttctctagagattaaaccgtcaacccatttagcttatcccttggccaaaaagtgtatgagatgtgcctggatgttccctaaagagcttatctaagaagggaagagaaagccg

SEQ ID NO: 379272 - DNA, 120 bp, Artificial Sequence
  ENSG00000143382_47 (sequence is synthesized)
ggaggcaagtaggacagagagatgactggggaaggtcttgtgtctggaagacccaaggaaggggcttctggtgggtcctcagagagagtgtctggcgcatcctcagtggagccttcctcc

SEQ ID NO: 379273 - DNA, 120 bp, Artificial Sequence
  ENSG00000143382_48 (sequence is synthesized)
tggcgcatcctcagtggagccttcctcctctactttctaggcacctctgggagggcaggagtgggagcagatgacaaccattttagaaggagccctctggctgggtgcggtggctcacac

SEQ ID NO: 379274 - DNA, 120 bp, Artificial Sequence
  ENSG00000143382_49 (sequence is synthesized)
ggcaggagaagcgcttgaggcctggagttcaagaccagcctgtgcaatttagctggatcccatctccaccaaaaaataccaaaattagctgggtgtggtggtgcacgcatgtagtcccac

SEQ ID NO: 379275 - DNA, 120 bp, Artificial Sequence
  ENSG00000143382_50 (sequence is synthesized)
ctactcaggaggctgaggaaggagagcctgtgagtttgaggctgcaatgagctttggtggcaccactgccctccagcctggatgacagagtgagatctccatctcaaaaaaaaaaaaaaa

SEQ ID NO: 379276 - DNA, 120 bp, Artificial Sequence
  ENSG00000143382_51 (sequence is synthesized)
cagggtttcatatggacccccaatatagaagtcagataagggactgaaccagggactgggggcccagggccctagggctcagcctcctcctcagcccacgaagccatgtgactgctgggc

SEQ ID NO: 379277 - DNA, 120 bp, Artificial Sequence
  ENSG00000143384_0 (sequence is synthesized)
acttctcacttccgcttccttccagtaaggagtcggggtcttccccagttttctcagccaggcggcggcggcgactggcaatgtttggcctcaaaagaaacgcggtaatcggactcaacc

SEQ ID NO: 379278 - DNA, 120 bp, Artificial Sequence
  ENSG00000143384_1 (sequence is synthesized)
tctactgtgggggggccggcttgggggccggcagcggcggcgccacccgcccgggagggcgacttttggctacggagaaggaggcctcggcccggcgagagatagggggaggggaggccg

SEQ ID NO: 379279 - DNA, 120 bp, Artificial Sequence
  ENSG00000143384_2 (sequence is synthesized)
gcgcggtgattggcggaagcgccggcgcaagccccccgtccaccctcacgccagactcccggagggtcgcgcggccgccgcccattggcgccgaggtccccgacgtcaccgcgacccccg

SEQ ID NO: 379280 - DNA, 120 bp, Artificial Sequence
  ENSG00000143384_3 (sequence is synthesized)
cgaggctgcttttcttcgcgcccacccgccgcgcggcgccgcttgaggagatggaagccccggccgctgacgccatcatgtcgcccgaagaggagctggacgggtacgagccggagcctc

SEQ ID NO: 379281 - DNA, 120 bp, Artificial Sequence
  ENSG00000143384_4 (sequence is synthesized)
tcgggaagcggccggctgtcctgccgctgctggagttggtcggggaatctggtaataacaccagtacggacgggtcactaccctcgacgccgccgccagcagaggaggaggaggacgagt

SEQ ID NO: 379282 - DNA, 120 bp, Artificial Sequence
  ENSG00000143384_5 (sequence is synthesized)
tgtaccggcagtcgctggagattatctctcggtaccttcgggagcaggccaccggcgccaaggacacaaagccaatgggcaggtctggggccaccagcaggaaggcgctggagaccttac

SEQ ID NO: 379283 - DNA, 120 bp, Artificial Sequence
  ENSG00000143384_6 (sequence is synthesized)
gacgggttggggatggcgtgcagcgcaaccacgagacggccttccaaggcatgcttcggaaactggacatcaaaaacgaagacgatgtgaaatcgttgtctcgagtgatgatccatgttt

SEQ ID NO: 379284 - DNA, 120 bp, Artificial Sequence
  ENSG00000143384_7 (sequence is synthesized)
tcagcgacggcgtaacaaactggggcaggattgtgactctcatttcttttggtgcctttgtggctaaacacttgaagaccataaaccaagaaagctgcatcgaaccattagcagaaagta

SEQ ID NO: 379285 - DNA, 120 bp, Artificial Sequence
  ENSG00000143384_8 (sequence is synthesized)
tcacagacgttctcgtaaggacaaaacgggactggctagttaaacaaagaggctgggatgggtttgtggagttcttccatgtagaggacctagaaggtggcatcaggaatgtgctgctgg

SEQ ID NO: 379286 - DNA, 120 bp, Artificial Sequence
  ENSG00000143384_9 (sequence is synthesized)
cttttgcaggtgttgctggagtaggagctggtttggcatatctaataagatagccttactgtaagtgcaatagttgacttttaaccaaccaccaccaccaccaaaaccagtttatgcagt

SEQ ID NO: 379287 - DNA, 120 bp, Artificial Sequence
  ENSG00000143384_10 (sequence is synthesized)
tggactccaagctgtaacttcctagagttgcaccctagcaacctagccagaaaagcaagtggcaagaggattatggctaacaagaataaatacatgggaagagtgctccccattgattga

SEQ ID NO: 379288 - DNA, 120 bp, Artificial Sequence
  ENSG00000143384_11 (sequence is synthesized)
agagtcactgtctgaaagaagcaaagttcagtttcagcaacaaacaaactttgtttgggaagctatggaggaggacttttagatttagtgaagatggtagggtggaaagacttaatttcc

SEQ ID NO: 379289 - DNA, 120 bp, Artificial Sequence
  ENSG00000143384_12 (sequence is synthesized)
ttgttgagaacaggaaagtggccagtagccaggcaagtcatagaattgattacccgccgaattcattaatttactgtagtgttaagagaagcactaagaatgccagtgacctgtgtaaaa

SEQ ID NO: 379290 - DNA, 120 bp, Artificial Sequence
  ENSG00000143384_13 (sequence is synthesized)
gttacaagtaatagaactatgactgtaagcctcagtactgtacaagggaagcttttcctctctctaattagctttcccagtatacttcttagaaagtccaagtgttcaggacttttatac

SEQ ID NO: 379291 - DNA, 120 bp, Artificial Sequence
  ENSG00000143384_14 (sequence is synthesized)
ctgttatactttggcttggtttccatgattcttactttattagcctagtttatcaccaataatacttgacggaaggctcagtaattagttatgaatatggatatcctcaattcttaagac

SEQ ID NO: 379292 - DNA, 120 bp, Artificial Sequence
  ENSG00000143384_15 (sequence is synthesized)
agcttgtaaatgtatttgtaaaaattgtatatatttttacagaaagtctatttctttgaaacgaaggaagtatcgaatttacattagtttttttcatacccttttgaactttgcaacttc

SEQ ID NO: 379293 - DNA, 120 bp, Artificial Sequence
  ENSG00000143384_16 (sequence is synthesized)
gtggaacaaatctgataactatgcaggtttaaattttcttatctgattttggtaagtattccttaggtttttctttgaaaacctgggattgagaggttgatgaatggaaattctttcact

SEQ ID NO: 379294 - DNA, 120 bp, Artificial Sequence
  ENSG00000143384_17 (sequence is synthesized)
acctgggattgagaggttgatgaatggaaattctttcacttcattatatgcaagttttcaataattaggtctaagtggagttttaaggttactgatgacttacaaataatgggctctgat

SEQ ID NO: 379295 - DNA, 120 bp, Artificial Sequence
  ENSG00000143384_18 (sequence is synthesized)
taactggtgaaatttaaagtgaattcatgggctcatctttaaagcttttactaaaagattttcagctgaatggaactcattagctgtgtgcatataaaaagatcacatcaggtggatgga

SEQ ID NO: 379296 - DNA, 120 bp, Artificial Sequence
  ENSG00000143384_19 (sequence is synthesized)
gagacatttgatcccttgtttgcttaataaattataaaatgatggcttggaaaagcaggctagtctaaccatggtgctattattaggcttgcttgttacacacacaggtctaagcctagt

SEQ ID NO: 379297 - DNA, 120 bp, Artificial Sequence
  ENSG00000143384_20 (sequence is synthesized)
atgtcaataaagcaaatacttactgttttgtttctattaatgattcccaaaccttgttgcaagtttttgcattggcatctttggatttcagtcttgatgtttgttctatcagacttaacc

SEQ ID NO: 379298 - DNA, 120 bp, Artificial Sequence
  ENSG00000143384_21 (sequence is synthesized)
ttttatttcctgtccttccttgaaattgctgattgttctgctccctctacagatatttatatcaattcctacagctttcccctgccatccctgaactctttctagcccttttagattttg

SEQ ID NO: 379299 - DNA, 120 bp, Artificial Sequence
  ENSG00000143384_22 (sequence is synthesized)
gcactgtgaaacccctgctggaaacctgagtgaccctccctccccaccaagagtccacagacctttcatctttcacgaacttgatcctgttagcaggtggtaataccatgggtgctgtga

SEQ ID NO: 379300 - DNA, 120 bp, Artificial Sequence
  ENSG00000143384_23 (sequence is synthesized)
cactaacagtcattgagaggtgggaggaagtcccttttccttggactggtatcttttcaactattgttttatcctgtctttgggggcaatgtgtcaaaagtcccctcaggaattttcaga

SEQ ID NO: 379301 - DNA, 120 bp, Artificial Sequence
  ENSG00000143384_24 (sequence is synthesized)
ggaaagaacattttatgaggctttctctaaagtttcctttgtataggagtatgctcacttaaatttacagaaagaggtgagctgtgttaaacctcagagtttaaaagctactgataaact

SEQ ID NO: 379302 - DNA, 120 bp, Artificial Sequence
  ENSG00000143384_25 (sequence is synthesized)
gaagaaagtgtctatattggaactagggtcatttgaaagcttcagtctcggaacatgacctttagtctgtggactccatttaaaaataggtatgaataagatgactaagaatgtaatggg

SEQ ID NO: 379303 - DNA, 120 bp, Artificial Sequence
  ENSG00000143384_26 (sequence is synthesized)
gaagaactgccctgcctgcccatctcagagccataaggtcatctttgctagagctatttttacctatgtatttatcgttcttgatcataagccgcttatttatatcatgtatctctaagg

SEQ ID NO: 379304 - DNA, 120 bp, Artificial Sequence
  ENSG00000143384_27 (sequence is synthesized)
acctaaaagcactttatgtagtttttaattaatcttaagatctggttacggtaactaaaaaagcctgtctgccaaatccagtggaaacaagtgcatagatgtgaattggtttttaggggc

SEQ ID NO: 379305 - DNA, 120 bp, Artificial Sequence
  ENSG00000143384_28 (sequence is synthesized)
cccacttcccaattcattaggtatgactgtggaaatacagacaaggatcttagttgatattttgggcttggggcagtgagggcttaggacaccccaagtggtttgggaaaggaggagggg

SEQ ID NO: 379306 - DNA, 120 bp, Artificial Sequence
  ENSG00000143384_29 (sequence is synthesized)
agtggtgggtttatagggggaggaggaggcaggtggtctaagtgctgactggctacgtagttcgggcaaatcctccaaaagggaaagggaggatttgcttagaaggatggcgctcccagt

SEQ ID NO: 379307 - DNA, 120 bp, Artificial Sequence
  ENSG00000143384_30 (sequence is synthesized)
gactactttttgacttctgtttgtcttacgcttctctcagggaaaaacatgcagtcctctagtgtttcatgtacattctgtggggggtgaacaccttggttctggttaaacagctgtact

SEQ ID NO: 379308 - DNA, 120 bp, Artificial Sequence
  ENSG00000143384_31 (sequence is synthesized)
tttgatagctgtgccaggaagggttaggaccaactacaaattaatgttggttgtcaaatgtagtgtgtttccctaactttctgtttttcctgagaaaaaaaaataaatcttttattcaaa

SEQ ID NO: 379309 - DNA, 120 bp, Artificial Sequence
  ENSG00000143384_32 (sequence is synthesized)
gcgcaaccctccggaagctgccgcccctttccccttttatgggaatactttttttaaaaaaaaagagttcgctggcgccaccccgtaggactggccgccctaaaaccgtgataaaggagc

SEQ ID NO: 379310 - DNA, 120 bp, Artificial Sequence
  ENSG00000143384_33 (sequence is synthesized)
ccaagggtgggttggaaaccgaaacgagtcagtgttgaaacgtgtctcatcctattcctgaagccagaatattctggccatgagtcattgtttccgcccatcttgattcttttggaaatg

SEQ ID NO: 379311 - DNA, 120 bp, Artificial Sequence
  ENSG00000143384_34 (sequence is synthesized)
gcagctcttgttcaaagaccggaaagggtgggatgtcaatttcaagtggggtcaacctgagttctgtaaatcccagtagcgattttcccgccgcgggtgggcaggcgaatcttgcgccgg

SEQ ID NO: 379312 - DNA, 120 bp, Artificial Sequence
  ENSG00000143387_0 (sequence is synthesized)
acactttgctgccgaaacgaagccagacaacagatttccatcagcaggatgtgggggctcaaggttctgctgctacctgtggtgagctttgctctgtaccctgaggagatactggacacc

SEQ ID NO: 379313 - DNA, 120 bp, Artificial Sequence
  ENSG00000143387_1 (sequence is synthesized)
cactgggagctatggaagaagacccacaggaagcaatataacaacaaggtggatgaaatctctcggcgtttaatttgggaaaaaaacctgaagtatatttccatccataaccttgaggct

SEQ ID NO: 379314 - DNA, 120 bp, Artificial Sequence
  ENSG00000143387_2 (sequence is synthesized)
tctcttggtgtccatacatatgaactggctatgaaccacctgggggacatgaccagtgaagaggtggttcagaagatgactggactcaaagtacccctgtctcattcccgcagtaatgac

SEQ ID NO: 379315 - DNA, 120 bp, Artificial Sequence
  ENSG00000143387_3 (sequence is synthesized)
accctttatatcccagaatgggaaggtagagccccagactctgtcgactatcgaaagaaaggatatgttactcctgtcaaaaatcagggtcagtgtggttcctgttgggcttttagctct

SEQ ID NO: 379316 - DNA, 120 bp, Artificial Sequence
  ENSG00000143387_4 (sequence is synthesized)
gtgggtgccctggagggccaactcaagaagaaaactggcaaactcttaaatctgagtccccagaacctagtggattgtgtgtctgagaatgatggctgtggagggggctacatgaccaat

SEQ ID NO: 379317 - DNA, 120 bp, Artificial Sequence
  ENSG00000143387_5 (sequence is synthesized)
gccttccaatatgtgcagaagaaccggggtattgactctgaagatgcctacccatatgtgggacaggaagagagttgtatgtacaacccaacaggcaaggcagctaaatgcagagggtac

SEQ ID NO: 379318 - DNA, 120 bp, Artificial Sequence
  ENSG00000143387_6 (sequence is synthesized)
gccattgatgcaagcctgacctccttccagttttacagcaaaggtgtgtattatgatgaaagctgcaatagcgataatctgaaccatgcagttttggcagtgggatatggaatccagaag

SEQ ID NO: 379319 - DNA, 120 bp, Artificial Sequence
  ENSG00000143387_7 (sequence is synthesized)
ggaaacaagcactggataattaaaaacagctggggagaaaactggggaaacaaaggatatatcctcatggctcgaaataagaacaacgcctgtggcattgccaacctggccagcttcccc

SEQ ID NO: 379320 - DNA, 120 bp, Artificial Sequence
  ENSG00000143387_8 (sequence is synthesized)
aagatgtgactccagccagccaaatccatcctgctcttccatttcttccacgatggtgcagtgtaacgatgcactttggaagggagttggtgtgctatttttgaagcagatgtggtgata

SEQ ID NO: 379321 - DNA, 120 bp, Artificial Sequence
  ENSG00000143387_9 (sequence is synthesized)
ctgagattgtctgttcagtttccccatttgtttgtgcttcaaatgatccttcctactttgcttctctccacccatgacctttttcactgtggccatcaggactttccctgacagctgtgt

SEQ ID NO: 379322 - DNA, 120 bp, Artificial Sequence
  ENSG00000143387_10 (sequence is synthesized)
actcttaggctaagagatgtgactacagcctgcccctgactgtgttgtcccagggctgatgctgtacaggtacaggctggagattttcacataggttagattctcattcacgggactagt

SEQ ID NO: 379323 - DNA, 120 bp, Artificial Sequence
  ENSG00000143387_11 (sequence is synthesized)
tagctttaagcaccctagaggactagggtaatctgacttctcacttcctaagttcccttctatatcctcaaggtagaaatgtctatgttttctactccaattcataaatctattcataag

SEQ ID NO: 379324 - DNA, 120 bp, Artificial Sequence
  ENSG00000143387_12 (sequence is synthesized)
tctttggtacaagtttacatgataaaaagaaatgtgatttgtcttcccttctttgcacttttgaaataaagtatttatctcctgtctacagtttaataaatagcatctagtacacattca

SEQ ID NO: 379325 - DNA, 120 bp, Artificial Sequence
  ENSG00000143387_13 (sequence is synthesized)
gctttgctctgtaccctgaggagatactggacacccactgggagctatggaagaagacccacaggaagcaatataacaacaagaccagtgaagaggtggttcagaagatgactggactca

SEQ ID NO: 379326 - DNA, 120 bp, Artificial Sequence
  ENSG00000143387_14 (sequence is synthesized)
ggaagaagaaatgcataaggagaatgaggagatatacaatgtctcagaaaacaggaaacattgtcctattttcccttgtcctcttctgacaagatctgggaaagtaccagaatttaggca

SEQ ID NO: 379327 - DNA, 120 bp, Artificial Sequence
  ENSG00000143390_0 (sequence is synthesized)
ccaggaccttggggctgggctggagtgaaggtggctacgagttttccagatttaggagacttcagaaaggtggggcagatagaatggagatggcaaagatctctttgggcatatatgggc

SEQ ID NO: 379328 - DNA, 120 bp, Artificial Sequence
  ENSG00000143390_1 (sequence is synthesized)
ctggcgaagtaatggaataatttctaattttcggagaaggcaagtgccctcatgccgggatggcagaagatgagcctgatgctaagagccccaagactgggggaagggcccccccaggtg

SEQ ID NO: 379329 - DNA, 120 bp, Artificial Sequence
  ENSG00000143390_2 (sequence is synthesized)
gtgctgaggctggggaacctaccacccttcttcagaggctccgaggtaccatttccaaggccgtgcagaacaaagtagaggggatcctgcaagatgtacagaaattttctgacaatgaca

SEQ ID NO: 379330 - DNA, 120 bp, Artificial Sequence
  ENSG00000143390_3 (sequence is synthesized)
agctgtatctctaccttcagctcccctcaggacccaccactggagacaaaagctcagagccaagtacactgagcaatgaggagtacatgtatgcctataggtggatccgcaaccacctgg

SEQ ID NO: 379331 - DNA, 120 bp, Artificial Sequence
  ENSG00000143390_4 (sequence is synthesized)
aagagcacactgacacctgtctgccaaagcaaagtgtttatgatgcctatcggaagtactgtgagagtcttgcctgttgccgcccactcagcacagccaactttggcaagatcatcagag

SEQ ID NO: 379332 - DNA, 120 bp, Artificial Sequence
  ENSG00000143390_5 (sequence is synthesized)
agatcttccctgacatcaaagctcgaaggcttggtggccggggccagtccaaatattgctacagtggcataaggaggaagaccttggtgtctatgccacccctgcctggacttgacctaa

SEQ ID NO: 379333 - DNA, 120 bp, Artificial Sequence
  ENSG00000143390_6 (sequence is synthesized)
agggttctgagagtccagaaatgggcccagaagtaaccccagcacctcgagatgaactggtggaggcagcgtgtgccctgacctgtgactgggcagagcggatcctgaaacggtccttca

SEQ ID NO: 379334 - DNA, 120 bp, Artificial Sequence
  ENSG00000143390_7 (sequence is synthesized)
gttccatcgttgaggtcgcccgcttcctgctacagcagcatctcatctctgcccgatctgcacatgcccatgtgcttaaggccatggggctcgctgaagaggacgaacatgcacctcggg

SEQ ID NO: 379335 - DNA, 120 bp, Artificial Sequence
  ENSG00000143390_8 (sequence is synthesized)
aacggtcatctaaaccaaagaatggtttagagaacccagagggtggagcccacaagaagccagagagactggcccagcctcctaaggatctggaagcccgaactggggccggtcctctcg

SEQ ID NO: 379336 - DNA, 120 bp, Artificial Sequence
  ENSG00000143390_9 (sequence is synthesized)
cacgtggagagcggaagaagagtgtagttgagagctcggccccaggagccaataacctgcaggttaatgccctagtggctcggctgcctctgctccttccccgggcccctcgctcactaa

SEQ ID NO: 379337 - DNA, 120 bp, Artificial Sequence
  ENSG00000143390_10 (sequence is synthesized)
ttccgccaatcccagtctctccacctattctggcccccaggctttcttcaggtgccctgaaagtggctacactgcctctgtctagtagggccggggcacccccagcagctgtgcccatca

SEQ ID NO: 379338 - DNA, 120 bp, Artificial Sequence
  ENSG00000143390_11 (sequence is synthesized)
ttaacatgatcttaccaactgttcctgctttgcctggacctggacctgggcctgggcgagctccacctgggggactcactcagccccggggcacagagaacagagaggtaggcataggtg

SEQ ID NO: 379339 - DNA, 120 bp, Artificial Sequence
  ENSG00000143390_12 (sequence is synthesized)
gtgaccaaggaccacatgacaagggtgtcaagaggacagctgaagtacctgtgagtgaggccagtgggcaggctccaccagctaaagcagcaaagcaggatatagaggatacagcaagtg

SEQ ID NO: 379340 - DNA, 120 bp, Artificial Sequence
  ENSG00000143390_13 (sequence is synthesized)
atgccaaaaggaaacgggggcgccctcgaaaaaagtcaggtggaagtggggaaaggaattctacccctctcaagtcagcagctgccatggaatctgcccagtcctcaaggttaccatggg

SEQ ID NO: 379341 - DNA, 120 bp, Artificial Sequence
  ENSG00000143390_14 (sequence is synthesized)
gtcagggagatggtactgtttccaaaggaggaaggggccccggttcccagcataccaaagaagcagaagataaaattcccttggtcccctcaaaagtgagtgtcatcaagggcagcagaa

SEQ ID NO: 379342 - DNA, 120 bp, Artificial Sequence
  ENSG00000143390_15 (sequence is synthesized)
gccaaaaggaggcttttcctttggcaaagggagaggtagacactgcaccacagggtaataaagacttaaaggagcatgtgcttcaaagttccttatcccaggagcataaagacccaaaag

SEQ ID NO: 379343 - DNA, 120 bp, Artificial Sequence
  ENSG00000143390_16 (sequence is synthesized)
caacacccccatgatacaggtctgtggggaagagtgtttatatccctacgttaactttgcctagtagaggcccttctttgcacttgcttctcatttggctattcttttcctaaggaagtc

SEQ ID NO: 379344 - DNA, 120 bp, Artificial Sequence
  ENSG00000143390_17 (sequence is synthesized)
cattctcctctgtacagacagctgagtcacccagtctacttagtacctggttgctgcctctgaccttttcagcttgataccctgggctttagtgtaaccaataaatctgtagtgacctta

SEQ ID NO: 379345 - DNA, 120 bp, Artificial Sequence
  ENSG00000143390_18 (sequence is synthesized)
cctgtattccctgtgctatcctgtgggaaggtaggaatgggctaagtatgatgaatatataggttagggatcttttggttttaaatcacagaaaacctaattcaaactggcttaaaataa

SEQ ID NO: 379346 - DNA, 120 bp, Artificial Sequence
  ENSG00000143390_19 (sequence is synthesized)
aaaggatttattggttcatgtaactagaaagtccataggtagtgctggctccaggtgaagacttgacccagtagttcagtatgtctctaaataccggactgacttttttctcactgttgc

SEQ ID NO: 379347 - DNA, 120 bp, Artificial Sequence
  ENSG00000143390_20 (sequence is synthesized)
atcttctgtaggaccatttaagtctgggccacttaatggctgccagcattcctaagattacacttttccccatttatgtccaatcagaaaaagaaggcatctttgtaccagaaatctcag

SEQ ID NO: 379348 - DNA, 120 bp, Artificial Sequence
  ENSG00000143390_21 (sequence is synthesized)
caaaagccctaatattcacactgattaggcctgggtcacatgtccaccctgaccaatcactgtggccaggaggatgatacatgctaatttgcttattctatatcatggacaacacctttg

SEQ ID NO: 379349 - DNA, 120 bp, Artificial Sequence
  ENSG00000143390_22 (sequence is synthesized)
gggaaaagggtgggggtcagcctccccaaaatcacatggattccccaagtggaaactaggagcagggagttgcttgggtggccgctaacaccaggctactcttattttagcttgctaagt

SEQ ID NO: 379350 - DNA, 120 bp, Artificial Sequence
  ENSG00000143390_23 (sequence is synthesized)
tgagatcagctagacctgctttcttttctcctcagtcttgcatttccctcaatacaagctgtagcctctttcctcgtttctagtctcagaaggaaggagagggaagccattctcctctag

SEQ ID NO: 379351 - DNA, 120 bp, Artificial Sequence
  ENSG00000143390_24 (sequence is synthesized)
ggactcttcagtctcatttagatgatagtccctttttttctacctccatattagagatggagctccttccttttcctgtttcttaatttttgtcttctcattcctgcttccctctcaccc

SEQ ID NO: 379352 - DNA, 120 bp, Artificial Sequence
  ENSG00000143390_25 (sequence is synthesized)
tattgccagttccaccaactagagtgaaagacttcctagccatttcattaaatctattctgtatccaccaggtggcagcatcttgtcatacgtgtcaggacttaggactgcggggtttag

SEQ ID NO: 379353 - DNA, 120 bp, Artificial Sequence
  ENSG00000143390_26 (sequence is synthesized)
gttagatgtcacggaaaaagctagttctgtggtcaggcggcaccaatgagaaaggaatgcagaccctccagatgtatccttgggaaaagcagtaaaccaactaatatttattgaagacct

SEQ ID NO: 379354 - DNA, 120 bp, Artificial Sequence
  ENSG00000143390_27 (sequence is synthesized)
actttgtcctctacatagggtagcttctgtcagggaatcttggttcttcccaagaaacactgattttctttcagggagacttcatgtgttcatttatttccaccacagcagattttaaga

SEQ ID NO: 379355 - DNA, 120 bp, Artificial Sequence
  ENSG00000143390_28 (sequence is synthesized)
acagcagattttaagaaattataatatgtaatatttgatatctataaagagtatatctaacgtgaataaattatgaagcatactaatgagtacctatgacccataacacatatacattaa

SEQ ID NO: 379356 - DNA, 120 bp, Artificial Sequence
  ENSG00000143390_29 (sequence is synthesized)
agcagcgggggaagtcgtggcgagattaagtaatgagaacttgggcccagttttttttccaagcctagaagggcagaatatgttcgtatcctttctgacctcccaggcatatgcaatgtt

SEQ ID NO: 379357 - DNA, 120 bp, Artificial Sequence
  ENSG00000143390_30 (sequence is synthesized)
aaggtaggtttgatagtagttttagatggcagaggttctgattcttagagaaaggttcactgggaaggggtgaggtgaataggaatactcgtaaatgctgtccttgatgaagaggaaagg

SEQ ID NO: 379358 - DNA, 120 bp, Artificial Sequence
  ENSG00000143390_31 (sequence is synthesized)
tgaagagcttcctgccttgataaagcctgccttcttaaagggttcctcacacttgatccctagggactcttcgagcctacccatggcctccttctctgagtatcttcccactctgctccc

SEQ ID NO: 379359 - DNA, 120 bp, Artificial Sequence
  ENSG00000143390_32 (sequence is synthesized)
ggattgtaggcgtgagccaccgtgcccggccttgtcaaataatttctaaggtcctttttcagtctgacaccctcaagatgtacagaaattttctgacaatgacaagctgtatctctacct

SEQ ID NO: 379360 - DNA, 120 bp, Artificial Sequence
  ENSG00000143390_33 (sequence is synthesized)
caaagctcgaaggcttggtggccggggccagtccaagtatccttgactagagaggttgggggtggaggacctgggaggaagacttaggatgtggagagcaaggagtggaacagcttaact

SEQ ID NO: 379361 - DNA, 120 bp, Artificial Sequence
  ENSG00000143393_0 (sequence is synthesized)
cgcagccggggcctggtgcagcctccgcggccgctgtcagggaagcgcaggcggccaatggaacccgggagcggtcgctgctgctgaggcggcagtgtcggcagtccaaccgcgactgcc

SEQ ID NO: 379362 - DNA, 120 bp, Artificial Sequence
  ENSG00000143393_1 (sequence is synthesized)
cgcaccccctccgcgggggtcccccagaggatcaactaaaccttgaactaagaagaaaaatgtgttgtgagcagggggagcctcagctgcctcaggccgttcaggacagaagggtgtttc

SEQ ID NO: 379363 - DNA, 120 bp, Artificial Sequence
  ENSG00000143393_2 (sequence is synthesized)
tgaaggccggagcaagttttgaagaagtccctatcagattacacttggttgactactccggagcagccactaagagggatgaacaggcctgcgtggaaattgaatgagattagttgagtc

SEQ ID NO: 379364 - DNA, 120 bp, Artificial Sequence
  ENSG00000143393_3 (sequence is synthesized)
cacgctccatgagaatgctgaacaccatccaaagcagcaaattgagattccttgatttggggaagaggtttgggaggaacccttcaataattggcatgggacaagaggggacccagtcca

SEQ ID NO: 379365 - DNA, 120 bp, Artificial Sequence
  ENSG00000143393_4 (sequence is synthesized)
agtgtatttgggactcgcagtagggaggaacaattcagagagagcttggaagctcgaagtctggctgtggccatgggagatacagtagtggagcctgcccccttgaagccaacttctgag

SEQ ID NO: 379366 - DNA, 120 bp, Artificial Sequence
  ENSG00000143393_5 (sequence is synthesized)
cccacttctggcccaccagggaataatggggggtccctgctaagtgtcatcacggagggggtcggggaactatcagtgattgaccctgaggtggcccagaaggcctgccaggaggtgttg

SEQ ID NO: 379367 - DNA, 120 bp, Artificial Sequence
  ENSG00000143393_6 (sequence is synthesized)
gagaaagtcaagcttttgcatggaggcgtggcagtctctagcagaggcaccccactggagttggtcaatggggatggtgtggacagtgagatccgttgcctagatgatccacctgcccag

SEQ ID NO: 379368 - DNA, 120 bp, Artificial Sequence
  ENSG00000143393_7 (sequence is synthesized)
atcagggaggaggaagatgagatgggggccgctgtggcctcaggcacagccaaaggagcaagaagacggcggcagaacaactcagctaaacagtcttggctgctgaggctgtttgagtca

SEQ ID NO: 379369 - DNA, 120 bp, Artificial Sequence
  ENSG00000143393_8 (sequence is synthesized)
aaactgtttgacatctccatggccatttcatacctgtataactccaaggagcctggagtacaagcctacattggcaaccggctcttctgctttcgcaacgaggacgtggacttctatctg

SEQ ID NO: 379370 - DNA, 120 bp, Artificial Sequence
  ENSG00000143393_9 (sequence is synthesized)
ccccagttgcttaacatgtacatccacatggatgaggacgtgggtgatgccattaagccctacatagtccaccgttgccgccagagcattaacttttccctccagtgtgccctgttgctt

SEQ ID NO: 379371 - DNA, 120 bp, Artificial Sequence
  ENSG00000143393_10 (sequence is synthesized)
ggggcctattcttcagacatgcacatttccactcaacgacactcccgtgggaccaagctacggaagctgatcctctcagatgagctaaagccagctcacaggaagagggagctgccctcc

SEQ ID NO: 379372 - DNA, 120 bp, Artificial Sequence
  ENSG00000143393_11 (sequence is synthesized)
ttgagcccggcccctgacacagggctgtctccctccaaaaggactcaccagcgctctaagtcagatgccactgccagcataagtctcagcagcaacctgaaacgaacagccagcaaccct

SEQ ID NO: 379373 - DNA, 120 bp, Artificial Sequence
  ENSG00000143393_12 (sequence is synthesized)
aaagtggagaatgaggatgagcctgttcgactggctcctgagagagaattcatcaagtccctgatggcgatcggcaagcggctggccacgctccccaccaaagagcagaaaacacagagg

SEQ ID NO: 379374 - DNA, 120 bp, Artificial Sequence
  ENSG00000143393_13 (sequence is synthesized)
cccacacacaggctgttgtcctcaactccaaggacaaggctccctacctgatttatgtggaagtccttgaatgtgaaaactttgacaccaccagtgtccctgcccggatccccgagaacc

SEQ ID NO: 379375 - DNA, 120 bp, Artificial Sequence
  ENSG00000143393_14 (sequence is synthesized)
gaattcggagtacgaggtccgtagaaaacttgcccgaatgtggtattacccatgagcagcgagctggcagcttcagcactgtgcccaactatgacaacgatgatgaggcctggtcggtgg

SEQ ID NO: 379376 - DNA, 120 bp, Artificial Sequence
  ENSG00000143393_15 (sequence is synthesized)
atgacataggcgagctgcaagtggagctccccgaagtgcataccaacagctgtgacaacatctcccagttctctgtggacagcatcaccagccaggagagcaaggagcctgtgttcattg

SEQ ID NO: 379377 - DNA, 120 bp, Artificial Sequence
  ENSG00000143393_16 (sequence is synthesized)
cagcaggggacatccgccggcgcctttcggaacagctggctcataccccgacagccttcaaacgagacccagaagatccttctgcagttgctctcaaagagccctggcaggagaaagtac

SEQ ID NO: 379378 - DNA, 120 bp, Artificial Sequence
  ENSG00000143393_17 (sequence is synthesized)
ggcggatcagagagggctccccctacggccatctccccaattggcggctcctgtcagtcattgtcaagtgtggggatgaccttcggcaagagcttctggcctttcaggtgttgaagcaac

SEQ ID NO: 379379 - DNA, 120 bp, Artificial Sequence
  ENSG00000143393_18 (sequence is synthesized)
tgcagtccatttgggaacaggagcgagtgcccctttggatcaagccatacaagattcttgtgatttcggctgatagtggcatgattgaaccagtggtcaatgctgtgtccatccatcagg

SEQ ID NO: 379380 - DNA, 120 bp, Artificial Sequence
  ENSG00000143393_19 (sequence is synthesized)
tgaagaaacagtcacagctctccttgctcgattacttcctacaggagcacggcagttacaccactgaggcattcctcagtgcacagcgcaattttgtgcaaagttgtgctgggtactgct

SEQ ID NO: 379381 - DNA, 120 bp, Artificial Sequence
  ENSG00000143393_20 (sequence is synthesized)
tggtctgctacctgctgcaagtcaaggacagacacaatgggaatatccttttggacgcagaaggccacatcatccacatcgactttggcttcatcctctccagctcaccccgaaatctgg

SEQ ID NO: 379382 - DNA, 120 bp, Artificial Sequence
  ENSG00000143393_21 (sequence is synthesized)
gctttgagacgtcagcctttaagctgaccacagagtttgtggatgtgatgggcggcctggatggcgacatgttcaactactataagatgctgatgctgcaagggctgattgccgctcgga

SEQ ID NO: 379383 - DNA, 120 bp, Artificial Sequence
  ENSG00000143393_22 (sequence is synthesized)
aacacatggacaaggtggtgcagatcgtggagatcatgcagcaaggttctcagcttccttgcttccatggctccagcaccattcgaaacctcaaagagaggttccacatgagcatgactg

SEQ ID NO: 379384 - DNA, 120 bp, Artificial Sequence
  ENSG00000143393_23 (sequence is synthesized)
aggagcagctgcagctgctggtggagcagatggtggatggcagtatgcggtctatcaccaccaaactctatgacggcttccagtacctcaccaacggcatcatgtgacacgctcctcagc

SEQ ID NO: 379385 - DNA, 120 bp, Artificial Sequence
  ENSG00000143393_24 (sequence is synthesized)
ccaggagtggtggggggtccagggcaccctccctagagggcccttgtctgagaaaccccaaaccaggaaaccccacctacccaaccatccacccaagggaaatggaaggcaagaaacacg

SEQ ID NO: 379386 - DNA, 120 bp, Artificial Sequence
  ENSG00000143393_25 (sequence is synthesized)
aaggatcatgtggtaactgcgagagcttgctgaggggtgggagagccagctgtggggtccagacttgttggggcttccctgcccctcctggtctgtgtcagtattaccaccagactgact

SEQ ID NO: 379387 - DNA, 120 bp, Artificial Sequence
  ENSG00000143393_26 (sequence is synthesized)
ccaggactcactgccctccagaaaacagaggtgacaaatgtgagggacactggggcctttcttctccttgtaggggtctctcagaggttctttccacaggccatcctcttattccgttct

SEQ ID NO: 379388 - DNA, 120 bp, Artificial Sequence
  ENSG00000143393_27 (sequence is synthesized)
ccccgcccccttttctatttctgaacaggcatgttccaggcagctcacccgactccttagattactatggaatcggtagggtcctgaccgctggggaagcaggaaagcgtatcctgggaa

SEQ ID NO: 379389 - DNA, 120 bp, Artificial Sequence
  ENSG00000143393_28 (sequence is synthesized)
gaaaggcttggcttggactccggagaagaatactacatcgagacctgctggggaattttattttattttattatttttttggtcttggttgtactgagggaggaagaagaggttgtgtgg

SEQ ID NO: 379390 - DNA, 120 bp, Artificial Sequence
  ENSG00000143393_29 (sequence is synthesized)
gctctacccctcccagggacctacccctcccagggaccgacccctggcccaagctccccttgctggcgggcgctgcgtgggccctgcacttgctgaggttccccatcatgggcaaggaag

SEQ ID NO: 379391 - DNA, 120 bp, Artificial Sequence
  ENSG00000143393_30 (sequence is synthesized)
ggaattcccacagccctccagtgtactgagggtactggcctagccatgtggaattccctaccctgactccttccccaaacccagggaaaagagctctcaattttttatttttaatttttg

SEQ ID NO: 379392 - DNA, 120 bp, Artificial Sequence
  ENSG00000143393_31 (sequence is synthesized)
tttgaaataaagtccttagttagccacttgtgtcatttccaggttttctgggggagtgcagggggagatgggtgatgaggtatgaacggatgcctcagtgtccaagatacaaaaggcact

SEQ ID NO: 379393 - DNA, 120 bp, Artificial Sequence
  ENSG00000143393_32 (sequence is synthesized)
acatagaagtttgctttttccctgcctgtcttggtcactaccacctcttccctgagaagggcgggccttccatgttctctcacccgcttcaactccacattgtccaagtcacagaaaaag

SEQ ID NO: 379394 - DNA, 120 bp, Artificial Sequence
  ENSG00000143393_33 (sequence is synthesized)
agaggcctgaatggagattcgaccacaaacagttttaatggtctggttttctccctagttccccaactgtttgttagtattattattactacaagaataaaggattcctgagagcctgtc

SEQ ID NO: 379395 - DNA, 120 bp, Artificial Sequence
  ENSG00000143393_34 (sequence is synthesized)
cttcctctccatctcaatcatctgttgttggcctgtgtctttccctctttcattctgtccttgtttggggccaccaaacttgaggcaatgaaggtgtaggttgagaaattacttgggcta

SEQ ID NO: 379396 - DNA, 120 bp, Artificial Sequence
  ENSG00000143393_35 (sequence is synthesized)
ctaacatttctccagggttctctctgtcccttcgtgtgtagttctcaattacttattactgccctccatggcaaagatgtgaaaaatgaaacaatgtattttaagcagagacagatgtgt

SEQ ID NO: 379397 - DNA, 120 bp, Artificial Sequence
  ENSG00000143393_36 (sequence is synthesized)
tcccatgacattaagtcaggaggcagactaataagaactagggtaaaagggcaaagaaatgaaggatttatgggaggactaagggtttgagtgagcagggtcttcaaggacaagggaaaa

SEQ ID NO: 379398 - DNA, 120 bp, Artificial Sequence
  ENSG00000143393_37 (sequence is synthesized)
tgatgacagaggaagctgcaggggaggtacatcccagctagaagaaataattgaatgtgattaaagcacagactgcactgcatggcagtggagtaggaggtggtaccatgaggcaggtaa

SEQ ID NO: 379399 - DNA, 120 bp, Artificial Sequence
  ENSG00000143393_38 (sequence is synthesized)
cttcccctttaagtcggagccctggagcataagaaagctgatcccacgagactcggttgagggaggggggttcccagagagtttctagctctggtccagtgccttgtttctcctttagga

SEQ ID NO: 379400 - DNA, 120 bp, Artificial Sequence
  ENSG00000143393_39 (sequence is synthesized)
cattcctcctgaccctggtaaggctaagtccagaaggctggggaaggggatagcagcacctgcctccttggcatctttagggagaaaacaggcccatttacagcctcctggtcccttctc

SEQ ID NO: 379401 - DNA, 120 bp, Artificial Sequence
  ENSG00000143393_40 (sequence is synthesized)
acctccccacccctgtccagctctgagtttctcagtctccttccatctgtcttctccattccactatgacctctgattgccctgtcctctgccacccttcagctctgagaagtatttccc

SEQ ID NO: 379402 - DNA, 120 bp, Artificial Sequence
  ENSG00000143398_0 (sequence is synthesized)
ggattttttgcttggctacccggagtgaagcggccgggttgggcgattaacaggccgtggttaggaaggacggagaaggggcgttcgctcctttgggacttttcatgcctcgtttttttt

SEQ ID NO: 379403 - DNA, 120 bp, Artificial Sequence
  ENSG00000143398_1 (sequence is synthesized)
tcagatgtggcttggtctgggcgcaaggtcccagcagccagcttaagcttactcttctgtgaaaggggaaagtatcccctgtggaaagcggttaaacttgtggagggggtgcgggacgtg

SEQ ID NO: 379404 - DNA, 120 bp, Artificial Sequence
  ENSG00000143398_2 (sequence is synthesized)
agttcttccccatgccaggcgaatggtgtggccttgagctggtccaggagccggctcgacgtgtctgagggaggccccggagggggcggggaggtggcccacagaacgcgggttctgtaa

SEQ ID NO: 379405 - DNA, 120 bp, Artificial Sequence
  ENSG00000143398_3 (sequence is synthesized)
agagacgttgggaagattcgattccgagaagaggaagaaccggattgaaagagagccaggccgctgagggggagggggctgctaagatggcgtcggcctcctccgggccgtcgtcttcgg

SEQ ID NO: 379406 - DNA, 120 bp, Artificial Sequence
  ENSG00000143398_4 (sequence is synthesized)
tcggtttttcatcctttgatcccgcggtcccttcctgtaccttgtcctcagcatctggaatcaagagacccatggcatctgaggtgccttatgcctctggcatgcccatcaagaaaatag

SEQ ID NO: 379407 - DNA, 120 bp, Artificial Sequence
  ENSG00000143398_5 (sequence is synthesized)
gccatagaagtgttgattcctcaggagagacaacatataaaaagacaacctcatcagccttgaaaggtgccatccagttaggcattacccacactgtggggagcctgagtaccaaaccag

SEQ ID NO: 379408 - DNA, 120 bp, Artificial Sequence
  ENSG00000143398_6 (sequence is synthesized)
agcgtgatgtcctcatgcaagatttctacgtggttgagagtatcttctttcccagtgaagggagcaacctgacccctgctcatcactacaatgactttcgtttcaagacctatgcacctg

SEQ ID NO: 379409 - DNA, 120 bp, Artificial Sequence
  ENSG00000143398_7 (sequence is synthesized)
ttgccttccgctacttccgggagctatttggtatccggcccgatgattacttgtattccctctgcagtgagccgctgattgaactctgtagctctggagctagtggttccctattctatg

SEQ ID NO: 379410 - DNA, 120 bp, Artificial Sequence
  ENSG00000143398_8 (sequence is synthesized)
tgtccagcgacgatgagttcattattaagacagtccaacataaagaggcggaatttctgcagaagctgcttccaggatactacatgaacctcaaccagaaccctcggactttgctgccta

SEQ ID NO: 379411 - DNA, 120 bp, Artificial Sequence
  ENSG00000143398_9 (sequence is synthesized)
aattctatggactgtactgtgtgcaggcaggtggcaagaacattcggattgtggtgatgaacaatcttttaccaagatcggtaaaaatgcatatcaaatatgacctcaaaggctcaacct

SEQ ID NO: 379412 - DNA, 120 bp, Artificial Sequence
  ENSG00000143398_10 (sequence is synthesized)
acaaacggcgggcttcccagaaagagcgagagaagcctcttcccacatttaaagacctagacttcttacaagacatccctgatggtctttttttggatgctgacatgtacaacgctctct

SEQ ID NO: 379413 - DNA, 120 bp, Artificial Sequence
  ENSG00000143398_11 (sequence is synthesized)
gtaagaccctgcagcgtgactgtttggtgctgcagagcttcaagataatggattacagcctcttgatgtcaatccataatatagatcatgcacaacgagagcccttaagcagtgaaacac

SEQ ID NO: 379414 - DNA, 120 bp, Artificial Sequence
  ENSG00000143398_12 (sequence is synthesized)
agtactcagttgatactcgaagaccggccccccaaaaggctctgtattccacagccatggaatccatccagggagaggctcgacggggtggtaccatggagactgatgaccatatgggtg

SEQ ID NO: 379415 - DNA, 120 bp, Artificial Sequence
  ENSG00000143398_13 (sequence is synthesized)
gcatccctgcccggaatagtaaaggggaaaggcttctgctttatattggcatcattgacattctacagtcttacaggtttgttaagaagttggagcactcttggaaagccctggtacatg

SEQ ID NO: 379416 - DNA, 120 bp, Artificial Sequence
  ENSG00000143398_14 (sequence is synthesized)
acggagacactgtctcagtgcatcgcccaggcttctacgctgaacggttccagcgcttcatgtgcaacacagtatttaagaagattcccttgaagccttctccttccaaaaagtttcggt

SEQ ID NO: 379417 - DNA, 120 bp, Artificial Sequence
  ENSG00000143398_15 (sequence is synthesized)
attacttaccagccatcggtctctggggaacacaaggcacaagtgacaacaaaggcagaagtggagccaggcgttcaccttggtcgtcctgatgttttacctcagactccacctttggag

SEQ ID NO: 379418 - DNA, 120 bp, Artificial Sequence
  ENSG00000143398_16 (sequence is synthesized)
gaaatcagtgagggctcgcctattcctgaccccagtttctcacctctagttggagagactttgcaaatgctaactacaagtacaaccttggaaaagcttgaagttgcagagtcagagttc

SEQ ID NO: 379419 - DNA, 120 bp, Artificial Sequence
  ENSG00000143398_17 (sequence is synthesized)
acccattaagcgcaaagcctcagaagacctggaacaagattctgccatctctgtgatcccaagatgtcagcccttgccccagcaatgctgaattttcttctacttggtcatcaaaaaagg

SEQ ID NO: 379420 - DNA, 120 bp, Artificial Sequence
  ENSG00000143398_18 (sequence is synthesized)
agtgtaatagaagtgaggggagctgctcctccatcttcttcctgaagaagaaccttctctccttcctcttcctcatgaatgggccttagtgcctcagagagttgaggaccgcagcatccc

SEQ ID NO: 379421 - DNA, 120 bp, Artificial Sequence
  ENSG00000143398_19 (sequence is synthesized)
ctccactccagagttgggtggtatggattttcaactggccaaccctttgcctccactattgaatttttttcagacccccattcttcatgctggaaatgggattgctggacttggcagctt

SEQ ID NO: 379422 - DNA, 120 bp, Artificial Sequence
  ENSG00000143398_20 (sequence is synthesized)
tctttcccctcgtctttgactaggaaccggactcttaatttcctcaggacagactagctggcacattatccctaccttagttctttctctctgactcctggaagaatactcctgtaatct

SEQ ID NO: 379423 - DNA, 120 bp, Artificial Sequence
  ENSG00000143398_21 (sequence is synthesized)
ctgtaaaggtttttgggggataagggtgtttaaccacctcccagctttcttcttctttttttttttctgaaaaaaggaaaaagcacacagcacacaatttcaagccattttcagatcaga

SEQ ID NO: 379424 - DNA, 120 bp, Artificial Sequence
  ENSG00000143398_22 (sequence is synthesized)
actccagaagtgttgacaagatgcctattcgtagagttccctcagaagagccatggtgtttatgaagagaagagtagtgattgctctgccagaagcagctcctctttaaactcctcctct

SEQ ID NO: 379425 - DNA, 120 bp, Artificial Sequence
  ENSG00000143398_23 (sequence is synthesized)
cttgatgaatttcttaaggctgaaggaatgaagagagtgggacatggggtaatctttatcccttttgttaaaacaggaggcagccatgggctgggagatcatagcccttcctaggcagaa

SEQ ID NO: 379426 - DNA, 120 bp, Artificial Sequence
  ENSG00000143398_24 (sequence is synthesized)
tcctgttcactgccaggctatagtaattattactattttgcaatttgaaatatattctggttgtttttctaaatgtgaagacttaccaaatgaattttagatcattctccagaggagatt

SEQ ID NO: 379427 - DNA, 120 bp, Artificial Sequence
  ENSG00000143398_25 (sequence is synthesized)
ttttttgctcttctcatcttttccaacagtgttctcctgtttgtggagctaaggtaaagaggggacacttctgtctgtttaacagacagtccatatctgtgaggccagcaaatattttct

SEQ ID NO: 379428 - DNA, 120 bp, Artificial Sequence
  ENSG00000143398_26 (sequence is synthesized)
taaactcatggggagacagcagattcttgccttggtgaggtcattgctgtgccatatgtcctacccccctgtcttcatgcagggaagttggaaatgggggctacatatgccctctcctcc

SEQ ID NO: 379429 - DNA, 120 bp, Artificial Sequence
  ENSG00000143398_27 (sequence is synthesized)
ccgtctacaagagttgtggttttccatctgatccttccactcttgtcaggggaagaagggggcctggtatctcaggcagattgttgaattcctgttctatcccttctctatcccaccctg

SEQ ID NO: 379430 - DNA, 120 bp, Artificial Sequence
  ENSG00000143398_28 (sequence is synthesized)
ccttgataatatgttagcccataccccaaataactgtctatattagacacccccagccagtttctggctgcctgtctttgctgccatgttttttacaagaaggaaagaattcttgctatt

SEQ ID NO: 379431 - DNA, 120 bp, Artificial Sequence
  ENSG00000143398_29 (sequence is synthesized)
tttttttcataatttactatttatgatgtatttaagtgttttattaaggacagagttctgttaggggtgggagggaatatttgagggagggctgggtcttagggaaaggaatggggaagc

SEQ ID NO: 379432 - DNA, 120 bp, Artificial Sequence
  ENSG00000143398_30 (sequence is synthesized)
aacatttttattaagtgttactatttgcctctactttgtattgttcagaaatggcaaatacaatataaaagtgatatatggttttaatgtaataaactttaatgagttatttagacctct

SEQ ID NO: 379433 - DNA, 120 bp, Artificial Sequence
  ENSG00000143398_31 (sequence is synthesized)
cggtttttcatcctttgatcccgcggtcccttcctgtaccttgtcctcagcagcatctggaatcaagagacccatggcatctgaggtcttggaagctagacaggattcttacatctcatt

SEQ ID NO: 379434 - DNA, 120 bp, Artificial Sequence
  ENSG00000143398_32 (sequence is synthesized)
gtcgcgggaaggttgtgataagtccctgatagcctcccgtgcccttttttgacaggtcttcactgattcatgcatcaaatatttactgaactccgtcactgtgcagtgcctaactttgtg

SEQ ID NO: 379435 - DNA, 120 bp, Artificial Sequence
  ENSG00000143398_33 (sequence is synthesized)
taccaattgactgcctactcctgcccagtggctcccttaccccaagagaacagagggcaggacacctctggtagggagctgccaatgccagaggcctctccttccacctacatcccatga

SEQ ID NO: 379436 - DNA, 120 bp, Artificial Sequence
  ENSG00000143398_34 (sequence is synthesized)
gagccatttcttgtcctttgtgttagtctgtcatagtcatttccaagttgctgtttcccccttggctcttcctgcatatgtcaatgaggtgaggaccatttctggggaattgggatttgc

SEQ ID NO: 379437 - DNA, 71 bp, Artificial Sequence
  ENSG00000143398_35 (sequence is synthesized)
attcctgagctcaagtgatcctcctgttattttcgtcttctgttcttagttcagcttctagtttggggaat

SEQ ID NO: 379438 - DNA, 120 bp, Artificial Sequence
  ENSG00000143398_36 (sequence is synthesized)
aaatatggatatttgaataagaaaggggtctagaataaaaatggaatatgcacgaggcctatgtgagtatggagaaggagagagggacatacacagttgctatccaaaaggatctggtat

SEQ ID NO: 379439 - DNA, 120 bp, Artificial Sequence
  ENSG00000143398_37 (sequence is synthesized)
cctaagagggtacctgtagctgggaatgtcctacgtgttaccgcagcatctggaatcaagagacccatggcatctgaggtgccttatgcctctggcatgcccatcaagaaaataggccat

SEQ ID NO: 379440 - DNA, 120 bp, Artificial Sequence
  ENSG00000143398_38 (sequence is synthesized)
gtttatacttatgtttagtttgactcaaactctgatggtttcagtatgcttgacagagatgtgagtgtgtgatacactcttatgattgtttttttttcccccctagcagcatctggaatc

SEQ ID NO: 379441 - DNA, 120 bp, Artificial Sequence
  ENSG00000143398_39 (sequence is synthesized)
gaacagtgagttgcagtctggctacttacttcattagttttcagatggtttatttccttgattttgcctctttccccggcctttataacccttcctcccccatctccccagacataatgt

SEQ ID NO: 379442 - DNA, 120 bp, Artificial Sequence
  ENSG00000143398_40 (sequence is synthesized)
ataccttctgtggaaagctgagtcagtccttggaagcaccagggtagaatatgccatctgtctggctctttgcaaaaacctatgagatgagtcatgttccacatggggatacaactggaa

SEQ ID NO: 379443 - DNA, 120 bp, Artificial Sequence
  ENSG00000143401_0 (sequence is synthesized)
tgtgtgtgtatgtgtgtgtgtatgtgtgtgcgcgcgtgcgtgcgtgtgtgtgcgcgcgctagtgtgtggacaaggaggtgggggcagctgagttagagtcccaactcttggactccattt

SEQ ID NO: 379444 - DNA, 120 bp, Artificial Sequence
  ENSG00000143401_1 (sequence is synthesized)
ggggcagctgagttagagtcccaactcttggactccatttgctattctcttctttctcccccacacctatctggtggtggtagtgggcgtttatatttgcgttccttttcattcatttct

SEQ ID NO: 379445 - DNA, 120 bp, Artificial Sequence
  ENSG00000143401_2 (sequence is synthesized)
aaatctcttaaaaattttgggttgggggtattggggaaggcaggaaagggaaaaggagagtagtagctgaagagcaagaggaggacatggagatgaagaagaagattaacctggagttaa

SEQ ID NO: 379446 - DNA, 120 bp, Artificial Sequence
  ENSG00000143401_3 (sequence is synthesized)
ggaacagatccccggaggaggtgacagagttagtccttgataattgcctgtgtgtcaatggggaaattgaaggcctgaatgatactttcaaagaactagaatttctgagtatggctaatg

SEQ ID NO: 379447 - DNA, 120 bp, Artificial Sequence
  ENSG00000143401_4 (sequence is synthesized)
tggaactaagttcgctggcccggcttcccagcttaaataaacttcgaaaattggagcttagtgataatataatttctggaggcttggaagtcctggcagagaaatgtccaaatcttacct

SEQ ID NO: 379448 - DNA, 120 bp, Artificial Sequence
  ENSG00000143401_5 (sequence is synthesized)
acctcaatctgagtggaaacaaaataaaagatctcagtacagtagaagctctgcaaaatcttaaaaatttgaaaagtcttgacctgtttaactgtgagatcacaaacctggaagattata

SEQ ID NO: 379449 - DNA, 120 bp, Artificial Sequence
  ENSG00000143401_6 (sequence is synthesized)
gagaaagtatttttgaactactgcagcaaatcacatacttagatggatttgatcaggaggataatgaagcgccggactctgaagaggaggatgatgaggatggcgatgaagatgatgaag

SEQ ID NO: 379450 - DNA, 120 bp, Artificial Sequence
  ENSG00000143401_7 (sequence is synthesized)
aggaagaggaaaatgaagctggtccaccggaaggatatgaggaagaggaggaggaagaggaagaggaggatgaggatgaggatgaagatgaagatgaagcaggttcagagttgggagagg

SEQ ID NO: 379451 - DNA, 120 bp, Artificial Sequence
  ENSG00000143401_8 (sequence is synthesized)
gagaagaggaagtgggcctctcatacttaatgaaagaagaaattcaggatgaagaagatgatgatgactatgttgaagaaggggaagaagaggaagaagaggaagaaggaggtcttcgag

SEQ ID NO: 379452 - DNA, 120 bp, Artificial Sequence
  ENSG00000143401_9 (sequence is synthesized)
gggagaagaggaaacgagatgctgaagacgatggagaggaagaagatgactagatcattctaagaccagattctctaatgtttctgggtgtgcaatagagtgatcacatctttgtttctt

SEQ ID NO: 379453 - DNA, 120 bp, Artificial Sequence
  ENSG00000143401_10 (sequence is synthesized)
catgtacgatagctatccctacagaagataatgtgtaactttttataggaaaagtgtggttttactatttttgccttatcattccaaataagaactagtctgttaatgatcatattgtat

SEQ ID NO: 379454 - DNA, 120 bp, Artificial Sequence
  ENSG00000143401_11 (sequence is synthesized)
gtagagaaaaattttcattgactcccattgtggaattccctagcaatttatttagacttaattttttaaattcaagcttactgtattagtcatttttagcccataattaaaacatgatca

SEQ ID NO: 379455 - DNA, 120 bp, Artificial Sequence
  ENSG00000143401_12 (sequence is synthesized)
cttttacacaggtgtagtatggtgcatttcattccttatttataaattaactgaaattacagtttgctataatataaaatgacaatagtctcttgagtggtaagttggttatttttttag

SEQ ID NO: 379456 - DNA, 120 bp, Artificial Sequence
  ENSG00000143401_13 (sequence is synthesized)
taggtgatccaggaatctttagtttgaaggcagttacctttttttttttttttttttgactaagagtgtttggttgcttttttgtcacaagtaacttggaaaatagaagcagaatagtaa

SEQ ID NO: 379457 - DNA, 120 bp, Artificial Sequence
  ENSG00000143401_14 (sequence is synthesized)
cagtaatatggttcatggatttagtggtgactgataagattttatttttgaaggaaaaattgcttatactaagtccagagacatgcaggtgagcccttttgtcaggctgcaaatcatgac

SEQ ID NO: 379458 - DNA, 120 bp, Artificial Sequence
  ENSG00000143401_15 (sequence is synthesized)
atgccgatggttgtttattttgtttttaggtgtgcattctttttcttcttagcaattcctttatgatcaccttcccttcttgtttcactccctcccgctctctcaaaaggaacttgggaa

SEQ ID NO: 379459 - DNA, 120 bp, Artificial Sequence
  ENSG00000143401_16 (sequence is synthesized)
acttgtgaaacccaggaaaacctttagtcttatacctcaactacctttcagtcctgtctgggttttaaataagtgaagtagaagaaattgagtattttctgacataagaatatattatca

SEQ ID NO: 379460 - DNA, 120 bp, Artificial Sequence
  ENSG00000143401_17 (sequence is synthesized)
atacagttttatgcagtaagctctccttaccataaatgtttcttggttgacaacatctaagacaatattagtgggatgaagaaagaaaagcaggggtgcttttggaagcagtgttagtgt

SEQ ID NO: 379461 - DNA, 120 bp, Artificial Sequence
  ENSG00000143401_18 (sequence is synthesized)
tcctcaaaagtcggaacaattgcctgttgatatattaataagacattaaagtcaaattttaatgttggcctctcaaatgatttggataccactctgcaaagtatttctaacctttaattc

SEQ ID NO: 379462 - DNA, 120 bp, Artificial Sequence
  ENSG00000143401_19 (sequence is synthesized)
ccagttttaaaacagatataataatagcatttaattggaatatactaggcagctggaaaagtatttgaaactaaattgacattaaaattaagatttgttttcaagtggatgtccattaaa

SEQ ID NO: 379463 - DNA, 120 bp, Artificial Sequence
  ENSG00000143401_20 (sequence is synthesized)
agtagaaaaatatttgggataagtgagtgtgtgtttccttacatggctactaaataaaatataatgagtatacaagtatatctcctcttttgctatggaggctccatgttcaaggcaatg

SEQ ID NO: 379464 - DNA, 120 bp, Artificial Sequence
  ENSG00000143401_21 (sequence is synthesized)
gctttttaaatcttggctatctaaaattttttccctttgttttgaatatttgtaagtttttaagaagttagtgtcagcaaattaattgaagttatgcttctatactgggacatatttaaa

SEQ ID NO: 379465 - DNA, 120 bp, Artificial Sequence
  ENSG00000143401_22 (sequence is synthesized)
tactgagtatagtactgctgctactgcttctacaatgtaaaatgtatgacttggtgttttaaagtaaaaattatgatgttacttgtggagaaactaaaaatgttgtacaactgaccgaaa

SEQ ID NO: 379466 - DNA, 120 bp, Artificial Sequence
  ENSG00000143401_23 (sequence is synthesized)
gaaaacccttggggataagtttagtgaggggattggaatccccaaaaagataacatttttcttctgcttttaaaaactgaaattccctgttctagttcctaacaattctcattacatact

SEQ ID NO: 379467 - DNA, 120 bp, Artificial Sequence
  ENSG00000143401_24 (sequence is synthesized)
atgccagattacaaaatacttatttttaaaatgaaatctatatattgactttcttatcaatcatcttactgtgcaatcaaaattagagtactttggtttgaaaacaacacttagagcctc

SEQ ID NO: 379468 - DNA, 120 bp, Artificial Sequence
  ENSG00000143401_25 (sequence is synthesized)
cagataacttttaagacttatttagctttgtgggtggtattttcatgcaaataagtaagggtgggttttatattttgtagaagttttcggtcctattttaatgctctttgtatggcagta

SEQ ID NO: 379469 - DNA, 120 bp, Artificial Sequence
  ENSG00000143401_26 (sequence is synthesized)
tgtatatattgtgttaagttcctcaagaatctccttaaaaactttgaagttaatacttttgtgcaactgtgttttgaataaagccatgacagtgttaaaaacaaacaaaaaaatttgcag

SEQ ID NO: 379470 - DNA, 120 bp, Artificial Sequence
  ENSG00000143401_27 (sequence is synthesized)
tactcctgattattcttttattgtttttgactgttccctgtttttttctgtgactgctgtaacttaaagtttttgaaactgaattgcttcaaataaattgaagatttgttataatgatta

SEQ ID NO: 379471 - DNA, 120 bp, Artificial Sequence
  ENSG00000143401_28 (sequence is synthesized)
gtcagtcggagcggcaggtcgcgagagcagggctggtggccagcggggagcctcgcagaggaaagcatcagtcttgctgaaataagcctagaattggaacgtgacagagttagtccttga

SEQ ID NO: 379472 - DNA, 120 bp, Artificial Sequence
  ENSG00000143409_0 (sequence is synthesized)
ggccaagggggcgtggcgtggggcgacgtgggaaacgtagtcccgcaactccgcaatgtccctagcaaccgagggaaggattgttttctgagggatcagtcgttcggtaaacaaatgtct

SEQ ID NO: 379473 - DNA, 120 bp, Artificial Sequence
  ENSG00000143409_1 (sequence is synthesized)
gctgaccgggtcagaaagtcctgatggaaatccaccagcgctgggcaggcccctcctcctccagggagcttgtccttgcctaatttttcttcgtcctgatgagaacaaaaaagagagaga

SEQ ID NO: 379474 - DNA, 120 bp, Artificial Sequence
  ENSG00000143409_2 (sequence is synthesized)
gaagaaaagaaaaaccacaaacttcctttgaaaaccagcttgtagtcagggcccggagcgcatgccatagactcggcgactcaggaatcctgaagactctctgagcgacctggagcacct

SEQ ID NO: 379475 - DNA, 120 bp, Artificial Sequence
  ENSG00000143409_3 (sequence is synthesized)
tggctgtgtccctgcctgccttcaccctcctccagtgcccccagtactgggcgtgagtccggaagtggccacaacccagcctggaccgtcgcttataaagctgtgtaaacctgtataagc

SEQ ID NO: 379476 - DNA, 120 bp, Artificial Sequence
  ENSG00000143409_4 (sequence is synthesized)
tcaggcgttgacagctggaaggcagctggcactggcagcccccttcattgcacctatctcccccatctcattgccacggctgaaccctccttctcaatcttggaacagcacccccttctt

SEQ ID NO: 379477 - DNA, 120 bp, Artificial Sequence
  ENSG00000143409_5 (sequence is synthesized)
taagggaagctgactccacccatgtgttcaatcccaccagtcttccctcccaagtctggaagccccacgacctcttggtctcatctggtcacagcaagttagaggtggaaagagctcagc

SEQ ID NO: 379478 - DNA, 120 bp, Artificial Sequence
  ENSG00000143409_6 (sequence is synthesized)
acggggcccttctgtttacacatatactgcccatagccaggagttactgcacaaacactagccagccttctacactacattccttttccaagacttttctgggttagtttgctttccagc

SEQ ID NO: 379479 - DNA, 120 bp, Artificial Sequence
  ENSG00000143409_7 (sequence is synthesized)
ccactgatttccttcttattggacaggtcactcttttgcatcccaagcctggcttaggcaagtccctgaggttagtaaacaccttcagtgcccctcagccaagtcccttttgaccatgga

SEQ ID NO: 379480 - DNA, 120 bp, Artificial Sequence
  ENSG00000143409_8 (sequence is synthesized)
ataccatcagcctgaggatccagcccctggtaaggccgggactgcagaagcagtcatccctgaaaaccatgaggttctggcaggcccagatgagcaccctcaggacacagatgcaagaga

SEQ ID NO: 379481 - DNA, 120 bp, Artificial Sequence
  ENSG00000143409_9 (sequence is synthesized)
tgctgatggggaggctagagaacgggagccagcagaccaagctttgctgcctagccagtgtggggacaaccttgagtcccctctgcctgaagctagctcagctccaccggggccaaccct

SEQ ID NO: 379482 - DNA, 120 bp, Artificial Sequence
  ENSG00000143409_10 (sequence is synthesized)
tgggacactgcctgaagtagagacaataagggcatgctccatgccccaggagcttcctcagtcccccaggacccgacagcctgagccagatttctactgtgtcaagtggatcccttggaa

SEQ ID NO: 379483 - DNA, 120 bp, Artificial Sequence
  ENSG00000143409_11 (sequence is synthesized)
catcatgaacatcctctttcttcagtggaaggtgaagctccccccgcagaaggaagtgatcacatcggatgagctcatggcccatcttggaaactgcctcctgtccatcaagccccagga

SEQ ID NO: 379484 - DNA, 120 bp, Artificial Sequence
  ENSG00000143409_12 (sequence is synthesized)
gaagtcagagggacttcagcttaattttcagcagaatgtggatgatgcaatgacagtgctgcctaaactggccacaggtctggatgtcaatgtgcgattcacaggcgtctctgattttga

SEQ ID NO: 379485 - DNA, 120 bp, Artificial Sequence
  ENSG00000143409_13 (sequence is synthesized)
gtatacacccgagtgcagtgtctttgacctgctaggcatacctctgtaccatggctggcttgttgatccacagagtcctgaggctgtgcgtgcagttgggaaactgagttacaaccagct

SEQ ID NO: 379486 - DNA, 120 bp, Artificial Sequence
  ENSG00000143409_14 (sequence is synthesized)
ggtggagaggatcatcacctgcaaacactccagtgacaccaacctcgtgacagaaggcctgattgcagagcagttcctggagaccaccgcggcccagctgacctaccacggactgtgtga

SEQ ID NO: 379487 - DNA, 120 bp, Artificial Sequence
  ENSG00000143409_15 (sequence is synthesized)
gctgacagcagctgctaaggagggtgaacttagcgtctttttccgaaacaaccactttagcaccatgactaagcataagagtcacttatacctactggtcactgaccagggctttctaca

SEQ ID NO: 379488 - DNA, 120 bp, Artificial Sequence
  ENSG00000143409_16 (sequence is synthesized)
ggaggagcaagtcgtatgggagagcctgcacaatgtggatggagacagctgcttttgtgactctgactttcacctgagtcattccctgggcaaggggcctggagcagaaggtgggagtgg

SEQ ID NO: 379489 - DNA, 120 bp, Artificial Sequence
  ENSG00000143409_17 (sequence is synthesized)
ctccccagaaacgcagctgcaggtagaccaggactacctgattgctctgtccctgcagcagcaacagccacgaggcccgctggggcttaccgacttggagctggcccagcagcttcagca

SEQ ID NO: 379490 - DNA, 120 bp, Artificial Sequence
  ENSG00000143409_18 (sequence is synthesized)
agaggagtatcaacagcagcaggcagcgcagccagtgcggatgcggacgcgggtcctgtcactgcaggggagaggagccacatctggacgcccagccggggagcgtcggcagaggccgaa

SEQ ID NO: 379491 - DNA, 120 bp, Artificial Sequence
  ENSG00000143409_19 (sequence is synthesized)
gcacgagtcagactgcattctgctgtagctctgccccagtgccaggctggcctgccccttcttccagaggctatggctagttggcttgctcccccgcctccacccctgagatgtgctgga

SEQ ID NO: 379492 - DNA, 120 bp, Artificial Sequence
  ENSG00000143409_20 (sequence is synthesized)
taacttatttatggactgttggggatgagagcaggcaacaaatgccaaggtcagacttggtaatgtccttgacctcacgtgctgctgccttctctgcctcccatccagggcaacactagg

SEQ ID NO: 379493 - DNA, 120 bp, Artificial Sequence
  ENSG00000143409_21 (sequence is synthesized)
attggtgggtttctggttctcaactcccggtccctgaatagtcacacgtatgtacagactgaggctctggggtgaggtccctatccagaatgcatctcttctgcttcccatccctgctgc

SEQ ID NO: 379494 - DNA, 120 bp, Artificial Sequence
  ENSG00000143409_22 (sequence is synthesized)
ctggatgctcctgatcacctaggcaggcctgtctccagttgtttcagagcttaatttgggtttctatctcttatttgtaatgccttcctggggtttggaaataaaacttctggccgggca

SEQ ID NO: 379495 - DNA, 68 bp, Artificial Sequence
  ENSG00000143409_23 (sequence is synthesized)
gggactacaggcatctttggtcaggctagtcttgaattcctgacctcaagtaatccgcctgccttggc

SEQ ID NO: 379496 - DNA, 120 bp, Artificial Sequence
  ENSG00000143409_24 (sequence is synthesized)
cactcccggtttccacctcatgctttgccgggtccagaacacctgttattcctgcactggtctcttcaaggtttcttctctcagagtccttcccctgcctgtccctctcccctggagccc

SEQ ID NO: 379497 - DNA, 120 bp, Artificial Sequence
  ENSG00000143409_25 (sequence is synthesized)
cttcctgtcttcctctccctactctctgtcccaatcctgacaccccttcttctagaatctcttcttgtgctcttccaaggaagttcagtgaccaattgttaaatccgatacaggggagag

SEQ ID NO: 379498 - DNA, 120 bp, Artificial Sequence
  ENSG00000143412_0 (sequence is synthesized)
ctctaccaggccacaccggaggcagtgctcacacaggcaagctaccaggccacaacaacgacacccacctcacctctggcacctctgagcatccacgtacttgcaagaactcttgctcac

SEQ ID NO: 379499 - DNA, 120 bp, Artificial Sequence
  ENSG00000143412_1 (sequence is synthesized)
atcagctaagagattgcacctgctgacctagagattccggcctgtgctcctgtgctgctgagcagggcaaccagtagcaccatgtctgtgactggcgggaagatggcaccgtccctcacc

SEQ ID NO: 379500 - DNA, 120 bp, Artificial Sequence
  ENSG00000143412_2 (sequence is synthesized)
caggagatcctcagccacctgggcctggccagcaagactgcagcgtgggggaccctgggcaccctcaggaccttcttgaacttcagcgtggacaaggatgcgcagaggctactgagggcc

SEQ ID NO: 379501 - DNA, 120 bp, Artificial Sequence
  ENSG00000143412_3 (sequence is synthesized)
attactggccaaggcgtggaccgcagtgccattgtggacgtgctgaccaaccggagcagagagcaaaggcagctcatctcacgaaacttccaggagcgcacccaacaggacctgatgaag

SEQ ID NO: 379502 - DNA, 120 bp, Artificial Sequence
  ENSG00000143412_4 (sequence is synthesized)
tctctacaggcagcactttccggcaacctggagaggattgtgatggctctgctgcagcccacagcccagtttgacgcccaggaattgaggacagctctgaaggcctcagattctgctgtg

SEQ ID NO: 379503 - DNA, 120 bp, Artificial Sequence
  ENSG00000143412_5 (sequence is synthesized)
gacgtggccattgaaattcttgccactcgaaccccaccccagctgcaggagtgcctggcagtctacaaacacaatttccaggtggaggctgtggatgacatcacatctgagaccagtggc

SEQ ID NO: 379504 - DNA, 120 bp, Artificial Sequence
  ENSG00000143412_6 (sequence is synthesized)
ggacctagcagagaggaaacatgggtcccagtcttcacccagcgaaatcctgaacacctcatccgagtgtttgatcagtaccagcggagcactgggcaagagctggaggaggctgtccag

SEQ ID NO: 379505 - DNA, 120 bp, Artificial Sequence
  ENSG00000143412_7 (sequence is synthesized)
aaccgtttccatggagatgctcaggtggctctgctcggcctagcttcggtgatcaagaacacaccgctgtactttgctgacaaacttcatcaagccctccaggaaactgagcccaattac

SEQ ID NO: 379506 - DNA, 120 bp, Artificial Sequence
  ENSG00000143412_8 (sequence is synthesized)
caagtcctgattcgcatccttatctctcgatgtgagactgaccttctgagtatcagagctgagttcaggaagaaatttgggaagtccctctactcttctctccaggatgcagtgaaaggg

SEQ ID NO: 379507 - DNA, 120 bp, Artificial Sequence
  ENSG00000143412_9 (sequence is synthesized)
gattgccagtcagccctcctggccttgtgcagggctgaagacatgtgagacttccctgccccaccccacatgacatccgaggatctgagatttccgtgtttggctgaacctgggagacca

SEQ ID NO: 379508 - DNA, 120 bp, Artificial Sequence
  ENSG00000143412_10 (sequence is synthesized)
gctgggcctccaagtaggataacccctcactgagcaccacattctctagcttcttgttgaggctggaactgtttctttaaaatcccttaattttcccatctcaaaattatatctgtacct

SEQ ID NO: 379509 - DNA, 120 bp, Artificial Sequence
  ENSG00000143412_11 (sequence is synthesized)
gggtcatccagctccttcttgggtgtggggaaatgagttttctttgatagtttctgcctcactcatccctcctgtaccctggccagaacatctcactgatactcgaattcttttggcaaa

SEQ ID NO: 379510 - DNA, 120 bp, Artificial Sequence
  ENSG00000143416_0 (sequence is synthesized)
ggaacagcggcctctgacaccagcacagcaaacccgccgggatcaaagtgtaccagtcggcagcatggctacgaaatgtgggaattgtggacccggctactccacccctctggaggccat

SEQ ID NO: 379511 - DNA, 120 bp, Artificial Sequence
  ENSG00000143416_1 (sequence is synthesized)
gaaaggacccagggaagagatcgtctacctgccctgcatttaccgaaacacaggcactgaggccccagattatctggccactgtggatgttgaccccaagtctccccagtattgccaggt

SEQ ID NO: 379512 - DNA, 120 bp, Artificial Sequence
  ENSG00000143416_2 (sequence is synthesized)
catccaccggctgcccatgcccaacctgaaggacgagctgcatcactcaggatggaacacctgcagcagctgcttcggtgatagcaccaagtcgcgcaccaagctggtgctgcccagtct

SEQ ID NO: 379513 - DNA, 120 bp, Artificial Sequence
  ENSG00000143416_3 (sequence is synthesized)
catctcctctcgcatctatgtggtggacgtgggctctgagccccgggccccaaagctgcacaaggtcattgagcccaaggacatccatgccaagtgcgaactggcctttctccacaccag

SEQ ID NO: 379514 - DNA, 120 bp, Artificial Sequence
  ENSG00000143416_4 (sequence is synthesized)
ccactgcctggccagcggggaagtgatgatcagctccctgggagacgtcaagggcaatggcaaagggggttttgtgctgctggatggggagacgttcgaggtgaaggggacatgggagag

SEQ ID NO: 379515 - DNA, 120 bp, Artificial Sequence
  ENSG00000143416_5 (sequence is synthesized)
acctgggggtgctgcaccgttgggctatgacttctggtaccagcctcgacacaatgtcatgatcagcactgagtgggcagctcccaatgtcttacgagatggcttcaaccccgctgatgt

SEQ ID NO: 379516 - DNA, 120 bp, Artificial Sequence
  ENSG00000143416_6 (sequence is synthesized)
ggaggctggactgtacgggagccacttatatgtatgggactggcagcgccatgagattgtgcagaccctgtctctaaaagatgggcttattcccttggagatccgcttcctgcacaaccc

SEQ ID NO: 379517 - DNA, 120 bp, Artificial Sequence
  ENSG00000143416_7 (sequence is synthesized)
catccagcgcttctacaagaacgagggaggtacatggtcagtggagaaggtgatccaggtgccccccaagaaagtgaagggctggctgctgcccgaaatgccaggcctgatcaccgacat

SEQ ID NO: 379518 - DNA, 120 bp, Artificial Sequence
  ENSG00000143416_8 (sequence is synthesized)
cctgctctccctggacgaccgcttcctctacttcagcaactggctgcatggggacctgaggcagtatgacatctctgacccacagagaccccgcctcacaggacagctcttcctcggagg

SEQ ID NO: 379519 - DNA, 120 bp, Artificial Sequence
  ENSG00000143416_9 (sequence is synthesized)
cagcattgttaagggaggccctgtgcaagtgctggaggacgaggaactaaagtcccagccagagcccctagtggtcaagggaaaacgggtggctggaggccctcagatgatccagctcag

SEQ ID NO: 379520 - DNA, 120 bp, Artificial Sequence
  ENSG00000143416_10 (sequence is synthesized)
cctggatgggaagcgcctctacatcaccacgtcgctgtacagtgcctgggacaagcagttttaccctgatctcatcagggaaggctctgtgatgctgcaggttgatgtagacacagtaaa

SEQ ID NO: 379521 - DNA, 120 bp, Artificial Sequence
  ENSG00000143416_11 (sequence is synthesized)
aggagggctgaagttgaaccccaacttcctggtggacttcgggaaggagccccttggcccagcccttgcccatgagctccgctaccctgggggcgattgtagctctgacatctggatttg

SEQ ID NO: 379522 - DNA, 120 bp, Artificial Sequence
  ENSG00000143416_12 (sequence is synthesized)
aactccaccctcatcacccacactccctattttgggccctcacttccttggggacctggcttcattctgctctctcttggcacccgacccttggcagcatgtaccacacagccaagctga

SEQ ID NO: 379523 - DNA, 120 bp, Artificial Sequence
  ENSG00000143416_13 (sequence is synthesized)
gactgtggcaatgtgttgagtcatatacatttactgaccactgttgcttgttgctcactgtgctgcttttccatgagctcttggaggcaccaagaaataaactcgtaaccctgtccttca

SEQ ID NO: 379524 - DNA, 120 bp, Artificial Sequence
  ENSG00000143416_14 (sequence is synthesized)
aacagcggcctctgacaccagcacagcaaacccgccgggatcaaagtgtaccagtcggcagcatgggtcatgtgtctccagctcttcccagcacaacctcaccctcctcagggctctgag

SEQ ID NO: 379525 - DNA, 120 bp, Artificial Sequence
  ENSG00000143416_15 (sequence is synthesized)
ggggcggagaggacaggccagagcgatgaggctggagtggggacctaggccagccgcactgccgtggcccgctgggatgtgtgctgcagaacgtgcggagggagccttcaccctccagag

SEQ ID NO: 379526 - DNA, 75 bp, Artificial Sequence
  ENSG00000143416_16 (sequence is synthesized)
tgatcagctccctgggagacgtcaagggcaatggcaaagatgggagtctcgccaacctccgcctcactggttcaa

SEQ ID NO: 379527 - DNA, 120 bp, Artificial Sequence
  ENSG00000143416_17 (sequence is synthesized)
gaaaggtaattgcccatggtctgagagccagcgccctactactgattccacagctgggggtggagggacttcagacctagcccccaccctctggcacacccagcacttcccctacctttc

SEQ ID NO: 379528 - DNA, 120 bp, Artificial Sequence
  ENSG00000143416_18 (sequence is synthesized)
cttcttggccctccctggggatgcttgtgcacgctcaacctgggacaaggggagtgctgaaatccagcctgtgccgtgcttccaaaccaaaatgagtccacagggcgcctcttccaaaag

SEQ ID NO: 379529 - DNA, 120 bp, Artificial Sequence
  ENSG00000143416_19 (sequence is synthesized)
gcgtctccaggaacgaaaaaaatgaggctgcatgccctgtctctcttctctcagtgctagggcaacttctgcctgaaccctaactggccgtatttatccattcattcaaaaactacttag

SEQ ID NO: 379530 - DNA, 120 bp, Artificial Sequence
  ENSG00000143416_20 (sequence is synthesized)
tgaatgtctgtgctaggcactgtgctatgttctgggaatgcagtggtgaagcagacacaacccctgcctcaaggggcttgcatggagttagatcctgctggcaagaaggccgggcatcta

SEQ ID NO: 379531 - DNA, 120 bp, Artificial Sequence
  ENSG00000143416_21 (sequence is synthesized)
ttctctccctcccaggtctgggcaacccagatctaacccctagtccccaattctgataggctgacctctctgccagctaacctcaccctccacccctcaatgtagggaggtacatggtca

SEQ ID NO: 379532 - DNA, 120 bp, Artificial Sequence
  ENSG00000143416_22 (sequence is synthesized)
ggggatggggtggatgatctgaagcagctgcaggatgttgagggaggtgcaggaaaagcagacatgtgtgctgtgggacagcacaggcccaggactgtccaggccagggatgggcatgca

SEQ ID NO: 379533 - DNA, 120 bp, Artificial Sequence
  ENSG00000143416_23 (sequence is synthesized)
gagcatgtctgaaaggagagaggggttccagccaggcaagctgctcttcctgcaatgtttgcgcctcccactatggtcctccttatactctgcacctccccatctagctcttcctcggag

SEQ ID NO: 379534 - DNA, 120 bp, Artificial Sequence
  ENSG00000143416_24 (sequence is synthesized)
ctcctcaagaacagccaagggtgcctgggcttcgaccagacaaacacagagctgcacacctactgcaccctcgtgtttacttctcctacgaaatgtgggaattgtggacccggctactcc

SEQ ID NO: 379535 - DNA, 120 bp, Artificial Sequence
  ENSG00000143416_25 (sequence is synthesized)
cgcccgcctcagcctctcaaagggctgggattactggcatgagccactcttcccccagccctggatgcctgaatttaaggaactggcaaatccagcagtggagggggttttgtgctgctg

SEQ ID NO: 379536 - DNA, 120 bp, Artificial Sequence
  ENSG00000143416_26 (sequence is synthesized)
gcacagcaaacccgccgggatcaaagtgtaccagtcggcagcatggctacgaaatgtgggaattgtggacccggctactccacccctctggaggccatgaaaggcactgaggccccagat

SEQ ID NO: 379537 - DNA, 80 bp, Artificial Sequence
  ENSG00000143418_0 (sequence is synthesized)
agcgcaaggtgacgggcgtggacgcggctgtggggccgggagcggagggttggggtctggcctcccgcgccggggcgaag

SEQ ID NO: 379538 - DNA, 120 bp, Artificial Sequence
  ENSG00000143418_1 (sequence is synthesized)
cgcagaggcccgccccgccctcccctcccgtcacgcccagcctcccggcccttgggctgctcgcggcctttttttcccggctgggctcgggctcagctcgactgggctcggcgggcggcg

SEQ ID NO: 379539 - DNA, 120 bp, Artificial Sequence
  ENSG00000143418_2 (sequence is synthesized)
ggagggagggcgagggcgggcgcgggccggcgggcgggcggaagagggaggagaggcgcggggagccaggcctcggggcctcggagcaaccacccgagcagacggagtacacggagcagc

SEQ ID NO: 379540 - DNA, 120 bp, Artificial Sequence
  ENSG00000143418_3 (sequence is synthesized)
ccggccccgccaacgctgccgccggctactccctcttgatgccctcccctttgcccctcactcaggatgctccagaccttgtatgattacttctggtgggaacgtctgtggctgcctgtg

SEQ ID NO: 379541 - DNA, 120 bp, Artificial Sequence
  ENSG00000143418_4 (sequence is synthesized)
aacttgacctgggccgatctagaagaccgagatggacgtgtctacgccaaagcctcagatctctatatcacgctgcccctggccttgctcttcctcatcgttcgatacttctttgagctg

SEQ ID NO: 379542 - DNA, 120 bp, Artificial Sequence
  ENSG00000143418_5 (sequence is synthesized)
tacgtggctacaccactggctgccctcttgaacataaaggagaaaactcggctgcgggcacctcccaacgccaccttggaacatttctacctgaccagtggcaagcagcccaagcaggtg

SEQ ID NO: 379543 - DNA, 120 bp, Artificial Sequence
  ENSG00000143418_6 (sequence is synthesized)
gaagtagagcttttgtcccggcagagcgggctctctggccgccaggtagagcgttggttccgtcgccgccgcaaccaggaccggcccagtctcctcaagaagttccgagaagccagctgg

SEQ ID NO: 379544 - DNA, 120 bp, Artificial Sequence
  ENSG00000143418_7 (sequence is synthesized)
agattcacattttacctgattgccttcattgccggcatggccgtcattgtggataaaccctggttctatgacatgaagaaagtttgggagggatatcccatacagagcactatcccttcc

SEQ ID NO: 379545 - DNA, 120 bp, Artificial Sequence
  ENSG00000143418_8 (sequence is synthesized)
cagtattggtactacatgattgaactttccttctactggtccctgctcttcagcattgcctctgatgtcaagcgaaaggatttcaaggaacagatcatccaccatgtggccaccatcatt

SEQ ID NO: 379546 - DNA, 120 bp, Artificial Sequence
  ENSG00000143418_9 (sequence is synthesized)
ctcatcagcttttcctggtttgccaattacatccgagctgggactctaatcatggctctgcatgactcttccgattacctgctggagtcagccaagatgtttaactacgcgggatggaag

SEQ ID NO: 379547 - DNA, 120 bp, Artificial Sequence
  ENSG00000143418_10 (sequence is synthesized)
gtcttcgccattgtttttatcatcacccgactggtcatcctgcccttctggatcctgcattgcaccctggtgtacccactggagctctatcctgccttctttggctattacttcttcaat

SEQ ID NO: 379548 - DNA, 120 bp, Artificial Sequence
  ENSG00000143418_11 (sequence is synthesized)
tccatgatgggagttctacagctgctgcatatcttctgggcctacctcattttgcgcatggcccacaagttcataactggaaagctggtagaagatgaacgcagtgaccgggaagaaaca

SEQ ID NO: 379549 - DNA, 120 bp, Artificial Sequence
  ENSG00000143418_12 (sequence is synthesized)
gagagctcagagggggaggaggctgcagctgggggaggagcaaagagccggcccctagccaatggccaccccatcctcaataacaaccatcgtaagaatgactgaaccattactccagct

SEQ ID NO: 379550 - DNA, 120 bp, Artificial Sequence
  ENSG00000143418_13 (sequence is synthesized)
gcctcccagattaatgcataaagccaaggaactaccccgctccctgcgctatagggtcactttaagctctggggaaaaaggagaaagtgagaggagagttctctgcatcctccctccttg

SEQ ID NO: 379551 - DNA, 120 bp, Artificial Sequence
  ENSG00000143418_14 (sequence is synthesized)
cttgtcacccagttgcctttaaaccaaattctaaccagcctatccccaggtagggggacgttggttatattctgttagagggggacggtcgtattttcctccctacccgccaagtcatcc

SEQ ID NO: 379552 - DNA, 120 bp, Artificial Sequence
  ENSG00000143418_15 (sequence is synthesized)
tttctactgcttttgaggccctccctcagctctctgtgggtaggggttacaattcacattccttattctgagaatttggccccagctgtttgcctttgactccctgacctccagagccag

SEQ ID NO: 379553 - DNA, 120 bp, Artificial Sequence
  ENSG00000143418_16 (sequence is synthesized)
ggttgtgccttattgtcccatctgtgggcctcattctgccaaagctggaccaaggctaacctttctaagctccctaacttgggccagaaaccaaagctgagcttttaactttctccctct

SEQ ID NO: 379554 - DNA, 120 bp, Artificial Sequence
  ENSG00000143418_17 (sequence is synthesized)
atgacacaaatgaattgagggtaggaggagggtgcacataacccttaccctacctctgccaaaaagtgggggctgtactggggactgctcggatgatctttcttagtgctacttctttca

SEQ ID NO: 379555 - DNA, 120 bp, Artificial Sequence
  ENSG00000143418_18 (sequence is synthesized)
gctgtccctgtagcgacaggtctaagatctgactgcctcctcctttctctggcctcttcccccttccctcttctcttcagctaggctagctggtttggagtagaatggcaactaattcta

SEQ ID NO: 379556 - DNA, 120 bp, Artificial Sequence
  ENSG00000143418_19 (sequence is synthesized)
atttttatttattaaatatttggggttttggttttaaagccagaattacggctagcacctagcatttcagcagagggaccattttagaccaaaatgtactgttaatgggttttttttaaa

SEQ ID NO: 379557 - DNA, 120 bp, Artificial Sequence
  ENSG00000143418_20 (sequence is synthesized)
aattaaaagattaaataaaaaatattaaataaaacatggcaataagtgtcagactattaggaattgagaagggggatcaactaaataaacgaagagagtctttcttatgccttccttgca

SEQ ID NO: 379558 - DNA, 120 bp, Artificial Sequence
  ENSG00000143418_21 (sequence is synthesized)
atctgaagtctaggactgccagggcaacatggtacctttggctttacatttccctggagaagttgggctccaagagacagcagtcaggatgctccagaccttgtatgattacttctggtg

SEQ ID NO: 379559 - DNA, 120 bp, Artificial Sequence
  ENSG00000143418_22 (sequence is synthesized)
caggcatgagccatcacggccggcctaacagtaaatgttaaaactggaaagccaccgtattacagatgaggaaactgatttgcccaaggctacatagccaggatagggatctagagttcg

SEQ ID NO: 379560 - DNA, 120 bp, Artificial Sequence
  ENSG00000143418_23 (sequence is synthesized)
ctaagacacaccctagtgaagagacggtttgtggaatccatggcagagggattagagtgatggaatgaagaacctcaggggctagggggtttgtggagtggggacacccttgcggctggt

SEQ ID NO: 379561 - DNA, 120 bp, Artificial Sequence
  ENSG00000143418_24 (sequence is synthesized)
ctgctggaggtcaggcttcctcaaatctagagaccctggtgcaggttcttctgtccctttggttttctttgggagggaggtgcggggtgggaatttggaggatgacattcctgggaccaa

SEQ ID NO: 379562 - DNA, 120 bp, Artificial Sequence
  ENSG00000143418_25 (sequence is synthesized)
ggaggagggcacagagtcagtgctcctaactggagtgtacatatgaatgtactcgagggagtcaggagcccatgatgatggatgggggctctctatgcagtcagccaagatgtttaacta

SEQ ID NO: 379563 - DNA, 120 bp, Artificial Sequence
  ENSG00000143418_26 (sequence is synthesized)
ggatcatctggtccagaacccccatttctatcaactaggagctggggggagtagctagcccagagacttcgggtcagggttcaacaatcaggaagacccagttcctgaggaaacgacagt

SEQ ID NO: 379564 - DNA, 120 bp, Artificial Sequence
  ENSG00000143418_27 (sequence is synthesized)
tcaagaagggttgggaagaaggctgtcctctaaagaagacgtcctctgcattcaatggccccacagcaacagagtagctccttgccttccacactgcccacctcgtagttgtagtcccaa

SEQ ID NO: 379565 - DNA, 120 bp, Artificial Sequence
  ENSG00000143418_28 (sequence is synthesized)
gctaccagtcatgttcttcttgtcctcaaagtcatccccttcagagccagaggatatggtctggatatcatcactgtcaaccgctgtagccgaagtctgaccagcagtgggctttcggct

SEQ ID NO: 379566 - DNA, 120 bp, Artificial Sequence
  ENSG00000143418_29 (sequence is synthesized)
ggtcccactttccccctcactttctgtgctgctggacagtgtcaggacatcctggggaagcaggagggggtcctctgtaccgctgttgccatcttcctggtccttcaagtctacaccact

SEQ ID NO: 379567 - DNA, 120 bp, Artificial Sequence
  ENSG00000143418_30 (sequence is synthesized)
gctgtcagaggaacagggggcatcactctcatatccttctttgaagttctccacgctctcgatatggtccagatttgcaaagtactcatcacccatttccagaccctccttgtctgcaaa

SEQ ID NO: 379568 - DNA, 120 bp, Artificial Sequence
  ENSG00000143418_31 (sequence is synthesized)
gttctgtcccagcccggattcttctgaagaggaagaaaaggatggtgtgtggcaaagacagcagataacccaggcacttggggttactgaatatgtaggtggagttggatcatgaatgga

SEQ ID NO: 379569 - DNA, 120 bp, Artificial Sequence
  ENSG00000143418_32 (sequence is synthesized)
ggaggggcccttagaacttcagtggtccttgcccctccccagtcatcccctttcctgactccttacttgctggcaaagaaggccacccaggggaagcgaagatcatgggtatccacgaag

SEQ ID NO: 379570 - DNA, 120 bp, Artificial Sequence
  ENSG00000143418_33 (sequence is synthesized)
acattctggacaaacaggttggggctgcaactgtgctgtaggtttaaggacaggatcaaataagaaccagggaaactgaacctggctttgcagggagagtgagagttggaagaaaaatga

SEQ ID NO: 379571 - DNA, 120 bp, Artificial Sequence
  ENSG00000143418_34 (sequence is synthesized)
tgccatctgaccctccccattataatagatgctttgaaagaaagctacctctttaagatcctttgagatcaagagtttataacaagaaaagggcttatagagtatgttaaaagaaatctg

SEQ ID NO: 379572 - DNA, 120 bp, Artificial Sequence
  ENSG00000143418_35 (sequence is synthesized)
aggaccatgggataatccagcatctagaggtggggagaggggtctcacgttgaggtagcggcccaggttgccttcaagcttggcatcaatgatgtagcaagactcctcgccatcatagaa

SEQ ID NO: 379573 - DNA, 120 bp, Artificial Sequence
  ENSG00000143418_36 (sequence is synthesized)
cgggtaaggcgggcgcagcgcctcaagggagcggccggggccggcgggcctggcgccgcggtgtccgcggcagcgccgccctgagccggagaagctttcccgggcaacagctactccctc

SEQ ID NO: 379574 - DNA, 80 bp, Artificial Sequence
  ENSG00000143418_37 (sequence is synthesized)
cgcctcaagggagcggccggggccggcgggcctggcgccgcggtgtccgcggcagcgccgccctgagccggagaagcttt

SEQ ID NO: 379575 - DNA, 120 bp, Artificial Sequence
  ENSG00000143420_0 (sequence is synthesized)
attttgactgagcaaccctagtgacaggagccgaagcagcagcgcaggttgtccccgtttcccctcccccttcccttctccggttgccttcccgggccccttacactccacagtcccggt

SEQ ID NO: 379576 - DNA, 120 bp, Artificial Sequence
  ENSG00000143420_1 (sequence is synthesized)
cccgccatgtcccagaaacaagaagaagagaaccctgcggaggagaccggcgaggagaagcaggacacgcaggagaaagaaggtattctgcctgagagagctgaagaggcaaagctaaag

SEQ ID NO: 379577 - DNA, 120 bp, Artificial Sequence
  ENSG00000143420_2 (sequence is synthesized)
gccaaatacccaagcctaggacaaaagcctggaggctccgacttcctcatgaagagactccagaaagggcaaaagtactttgactcaggagactacaacatggccaaagccaagatgaag

SEQ ID NO: 379578 - DNA, 120 bp, Artificial Sequence
  ENSG00000143420_3 (sequence is synthesized)
aataagcagctgccaagtgcaggaccagacaagaacctggtgactggtgatcacatccccaccccacaggatctgccccagagaaagtcctcgctcgtcaccagcaagcttgcgggtggc

SEQ ID NO: 379579 - DNA, 120 bp, Artificial Sequence
  ENSG00000143420_4 (sequence is synthesized)
caagttgaatgatgctgcccggggctctgccagatcctgagacgcttcccctccctgccccacccgggtcctgtgctggctcctgccccttcctgcttttgcagccaggggtcaggaggt

SEQ ID NO: 379580 - DNA, 120 bp, Artificial Sequence
  ENSG00000143420_5 (sequence is synthesized)
ggctcgggtgtgggctggagaggcagaagccctttcctgttggtgtcccagcacatggagccccttgggctgagcaccaagaccttgaaccttttttgttttaccttttttccaaataac

SEQ ID NO: 379581 - DNA, 120 bp, Artificial Sequence
  ENSG00000143420_6 (sequence is synthesized)
agttgggagaaatatcaatgaaattctgggggtgggggtggggttgaaagggtggggtgggagatatggaggagtatgaattagggcttggagttggtaaaaacattcctgactatcctt

SEQ ID NO: 379582 - DNA, 120 bp, Artificial Sequence
  ENSG00000143420_7 (sequence is synthesized)
cttaaccacgtggctgatgtggggtaggtatgaggggaaggaagtggagtagcctaatgaaaaggggttctagttgagctctgtagataaatgccttgtttcagtgtggttggagacctg

SEQ ID NO: 379583 - DNA, 120 bp, Artificial Sequence
  ENSG00000143420_8 (sequence is synthesized)
ctcctctagttctgcagagctagttgagaactcaacattaatcattttaaaaagtactgtccttgaaatagatttgctgtgggaagaagggcagtgagtgtgggagaaaggagccgtgag

SEQ ID NO: 379584 - DNA, 120 bp, Artificial Sequence
  ENSG00000143420_9 (sequence is synthesized)
cgtggggaaccccacagagcccaaaggactttttcagtattcgaaataaacaaaacaaaaacccatgaaaaaacccaacccagaaatattctgaagcagttggtgtgttttattggggtt

SEQ ID NO: 379585 - DNA, 120 bp, Artificial Sequence
  ENSG00000143420_10 (sequence is synthesized)
tgggagggggaagaaaacaatactgaagacattgttaatgtgagatgcggctgagttccccaataccatcacttaggaaagggagcaggaatgttggcataaaccttgcccatccctttg

SEQ ID NO: 379586 - DNA, 120 bp, Artificial Sequence
  ENSG00000143420_11 (sequence is synthesized)
tttctgtaaccaatgtagaaggtgcatcaacctcagtttgtggctcacaaaatgaggcatttaagatatttgatctaaatggtttcttgacacctaagcctagtccaggtttagcagaaa

SEQ ID NO: 379587 - DNA, 120 bp, Artificial Sequence
  ENSG00000143420_12 (sequence is synthesized)
aggaggcccagtctccttttccctctgtcttccattccttttcaagttcccatgtttgtgagggagaaatgtgacaaaccaaaagaaatatattatttctttgtaataagccaaaagaaa

SEQ ID NO: 379588 - DNA, 120 bp, Artificial Sequence
  ENSG00000143420_13 (sequence is synthesized)
ctcaagtctttctgctggtggccagcaggaggcagagtgatttctttcctcatgatgtgccaatctgcattgctggaaacctgctactgaaagaagttaaaagctgcctgtgaatgtaac

SEQ ID NO: 379589 - DNA, 84 bp, Artificial Sequence
  ENSG00000143420_14 (sequence is synthesized)
ctgctactgaaagaagttaaaagctgcctgtgaatgtaacgtacaaaagaaaggttaccaaaggagaaaaaactccagcgggtg

SEQ ID NO: 379590 - DNA, 120 bp, Artificial Sequence
  ENSG00000143420_15 (sequence is synthesized)
cccttcctcaaccactggacgtttatatattataggcagggatgaaatgggcacctagtcagatcttctcagcttgctagccagaaatgactgtgattctgctgggggctgctgagaagg

SEQ ID NO: 379591 - DNA, 120 bp, Artificial Sequence
  ENSG00000143420_16 (sequence is synthesized)
taatgtaggttgaaaaggggctctaagtttatttatttcgttagattgacacttccacacactccctgtagtccaggtagggcccagaaataggaaaggctaggattggataatgctgca

SEQ ID NO: 379592 - DNA, 120 bp, Artificial Sequence
  ENSG00000143420_17 (sequence is synthesized)
aatgctttttttgtgtgagaaactggagagatgtgatttctccttttgggagagaatgtcccaaaattgattaggctgagccttgggaatagtttggcaggtttaacatcccaaggctaa

SEQ ID NO: 379593 - DNA, 120 bp, Artificial Sequence
  ENSG00000143420_18 (sequence is synthesized)
cctaacgtagttgggaaaggtagattgaatgagacatgttttctgtgcttctaagtgttctgtcccttaggctgctattgcttcatgtttccattatggcaggtttagagaatccttaaa

SEQ ID NO: 379594 - DNA, 120 bp, Artificial Sequence
  ENSG00000143420_19 (sequence is synthesized)
aagaaaaattgacttgcttgcctaaaactacagtgcccccttagcctccattacttagtatctcttacagtttgctctggctctcaaataatataaagattgatgaacattattcacaga

SEQ ID NO: 379595 - DNA, 120 bp, Artificial Sequence
  ENSG00000143420_20 (sequence is synthesized)
aaatgggcaccttctctctctcttccagcatgttgcttttgaaagtatcatgggatagtgggacgagcactggtttaggagtcaagatatctgggttctcactctactcagtcccagcag

SEQ ID NO: 379596 - DNA, 120 bp, Artificial Sequence
  ENSG00000143420_21 (sequence is synthesized)
agctgttgtataaccttgattaagtcatttagcctctctggatttctatttcctcatctgtaaaatagagttaaatgtatgtaagattgattctgattctgaagtcttaactgccagcag

SEQ ID NO: 379597 - DNA, 120 bp, Artificial Sequence
  ENSG00000143420_22 (sequence is synthesized)
cctctgctctgtaatactgggaaagtactacagaggggaaccatttgagggatacatgaggagagagtaaattgaggtttggggattataaattcaggcaagagaaccttatagatatca

SEQ ID NO: 379598 - DNA, 120 bp, Artificial Sequence
  ENSG00000143420_23 (sequence is synthesized)
cagtcttgagggtcaaaaaaaaatacttaggaagctagccatggaagcttcttgcctctgacccagcccactttcccagcctacctctgggccttagctgctaaaaagcttctctggcag

SEQ ID NO: 379599 - DNA, 120 bp, Artificial Sequence
  ENSG00000143420_24 (sequence is synthesized)
cggagctgcaggcctgaggaaacatgctcagtcatgcacatgtgttgacccatgtttcagatgcagtctgatgccaggtatattgttagggaaagaggaagaagggtaaactgagctagc

SEQ ID NO: 379600 - DNA, 120 bp, Artificial Sequence
  ENSG00000143420_25 (sequence is synthesized)
ccctggggctgagtactcctgcagggctggaggaacaggttcttagaagatgattcaccttggaggaagctggggaaagtggttagggagggagaggaggaagactgagaaatctctgca

SEQ ID NO: 379601 - DNA, 120 bp, Artificial Sequence
  ENSG00000143420_26 (sequence is synthesized)
tccccagaactcagcaacccagctcttttatcatgaggagaggtagccatgctgactcatgaacaggtggaggaaaggggttgcaggtgaccagcatcttcaatctagttaccaccagct

SEQ ID NO: 379602 - DNA, 120 bp, Artificial Sequence
  ENSG00000143420_27 (sequence is synthesized)
tggctagaattttattgaacgcaacttgctagttatgacagagaggaccagggtgagaactaatgctcaagagagcaagattctgtaatcctcttgccctctcacatcacaaattctgat

SEQ ID NO: 379603 - DNA, 120 bp, Artificial Sequence
  ENSG00000143420_28 (sequence is synthesized)
atgccaaacatttggcccaatgagaatgactgatagacttgctgatgtgcatgtggggggatgaggtgtgtatatgcctttctcctgactggccattcagtgttcaggctgtcattcaaa

SEQ ID NO: 379604 - DNA, 120 bp, Artificial Sequence
  ENSG00000143420_29 (sequence is synthesized)
ttggataggagaaagttggtgaggaaggaatggagagagcaggatccctggactccctggtccccaaactccttgactgtcacttgtaattgtatataatttttgtgtttcttgctccat

SEQ ID NO: 379605 - DNA, 120 bp, Artificial Sequence
  ENSG00000143420_30 (sequence is synthesized)
ttcctcatgctgtcatccttaaagtccatctgggaaggggaaaatgctgaacaccattgtatagtttcttcaactgtcccagccatgttgtacatagatatgtcatgttattatatatat

SEQ ID NO: 379606 - DNA, 120 bp, Artificial Sequence
  ENSG00000143420_31 (sequence is synthesized)
aaatatatatataattttgtacgttttcttcatctccgatcttctcaaattctgtactttttttcttttctgtctgagctgccttctctatcattcagcttgagtcctcaagactactgg

SEQ ID NO: 379607 - DNA, 120 bp, Artificial Sequence
  ENSG00000143420_32 (sequence is synthesized)
tcacaatgagtctgatttttaggaaggaataggaggagcagggaaatcagaaaaactgttggtctcactctgtctctctacctggtcatcttcaaggctaagaaaacaaacaagctacat

SEQ ID NO: 379608 - DNA, 120 bp, Artificial Sequence
  ENSG00000143420_33 (sequence is synthesized)
tctgtatttgccagtttccacagcatgaagtacatagcttccttagcaaggagtggtcattccaaaatccaaatgcaaattgctttgattaaacctagattattaaatccattcagaaca

SEQ ID NO: 379609 - DNA, 120 bp, Artificial Sequence
  ENSG00000143420_34 (sequence is synthesized)
gaaagacggtgaatggaaaggggatggctggtggtcttgggtgtgatgtgtgttattggtttgtagaggacacgcaggagaaagaaggtattctgcctgagagagctgaagaggcaaagc

SEQ ID NO: 379610 - DNA, 120 bp, Artificial Sequence
  ENSG00000143420_35 (sequence is synthesized)
ggaggctccgacttcctcatgaagagactccagaaaggggattataaatcattacattggagtgtgcttctctgtgcggatgaaatgcaaaagtactttgactcaggagactacaacatg

SEQ ID NO: 379611 - DNA, 72 bp, Artificial Sequence
  ENSG00000143420_36 (sequence is synthesized)
gcccggctaattttgtaatttttttgtagagacggggtttcatcacgttagccaggctggtctcaaactcct

SEQ ID NO: 379612 - DNA, 65 bp, Artificial Sequence
  ENSG00000143420_37 (sequence is synthesized)
ctacggtaaatattgaaagttgctgggtcacagggtatgcacatttaaattttttttttcttttt

SEQ ID NO: 379613 - DNA, 84 bp, Artificial Sequence
  ENSG00000143420_38 (sequence is synthesized)
ctgcacctggcctctctacggtaaatattgaaagttgctgggtcacagggtatgcacatttaaattttttttttctttttaaag

SEQ ID NO: 379614 - DNA, 120 bp, Artificial Sequence
  ENSG00000143420_39 (sequence is synthesized)
gcgggtggttggaaagacggtgaatggaaaggggatggctggtggtcttgggtgtgatgtgtgttattggtttgtagaggtaagtgacccagcaaccgggctggggcccgcagcctcaat

SEQ ID NO: 379615 - DNA, 120 bp, Artificial Sequence
  ENSG00000143420_40 (sequence is synthesized)
acgggcaagggccgccattttgactgagcaaccctagtgacaggagccgaagcagcagcgcaggatctgccccagagaaagtcctcgctcgtcaccagcaagcttgcggggtaacctgag

SEQ ID NO: 379616 - DNA, 120 bp, Artificial Sequence
  ENSG00000143420_41 (sequence is synthesized)
gacaaaagcctggaggctccgacttcctcatgaagagactccagaaaggggtatggggcatagtctcttaccctctttctttggagctaaaggaggttcttcgaatgaagtctgtagagc

SEQ ID NO: 379617 - DNA, 120 bp, Artificial Sequence
  ENSG00000143420_42 (sequence is synthesized)
atcaattccctcctgatttcccatgtaggaaattaaggcctaaattggagcatttgggtgtgtggggaaatgagggaaagatgttagaaactgaaatgcagactgcccccaggcatttgc

SEQ ID NO: 379618 - DNA, 120 bp, Artificial Sequence
  ENSG00000143420_43 (sequence is synthesized)
ctgtttgaatgttggaggttttaggattgtgcactttttaagcattagagataaattttgggatgcatcatttcagaagaagatcaaaccatctctcctacagaaataaatcctcaactt

SEQ ID NO: 379619 - DNA, 120 bp, Artificial Sequence
  ENSG00000143434_0 (sequence is synthesized)
cgcggctggacttggacccagggctctcccgacagcgccctggaacccaaattcaagcaccatccaattcggacgctcatcgcatctcgcctgagcacaaccacggattgcgaactcagc

SEQ ID NO: 379620 - DNA, 120 bp, Artificial Sequence
  ENSG00000143434_1 (sequence is synthesized)
gcagcgcgtggccgctggccgcccgcggcgatctcgatcccgctgacccgaatcctggagcaagtaccccgggcagggaaggggctgcggggaggcggggagggagcaggagggcgcggc

SEQ ID NO: 379621 - DNA, 120 bp, Artificial Sequence
  ENSG00000143434_2 (sequence is synthesized)
cggcggggggcaagcttctgaagcgctaggggaccagggaggtgtcggcgcccggtgtgcctggctgacggagagggtcaacgaaattggggtgcagggaggaaggagggacagtggccg

SEQ ID NO: 379622 - DNA, 120 bp, Artificial Sequence
  ENSG00000143434_3 (sequence is synthesized)
agccccgtaactgtactggtgagagcagagtctgggcacctcgttcaattgggctttcgtcgagtcgcatcccgctggactgggaagcgcgaaaagggattatttgaggcgcgctccgta

SEQ ID NO: 379623 - DNA, 120 bp, Artificial Sequence
  ENSG00000143434_4 (sequence is synthesized)
gagagcgtggaaaacctggccccttgctttcccagcaaggaaactagggctccgagacccacggagaactagaccctcctgacgcccctgaagggatgggaagagggacgcatcgttccg

SEQ ID NO: 379624 - DNA, 120 bp, Artificial Sequence
  ENSG00000143434_5 (sequence is synthesized)
gactttgtgtcacgggtgctcctctgtccttgtgcaagccggaatctgagcaccctctgaagggttggctcgtgcaaagaggcggcgaatggggccctcgagcaacatcggtcccagcgc

SEQ ID NO: 379625 - DNA, 120 bp, Artificial Sequence
  ENSG00000143434_6 (sequence is synthesized)
ctatctccttccttcagcccgctcggcccggggctttgttagactgaggtctcccaaggaggacatccgagctggcaactgcctcctgagcccacggtccccactgagcgccggcctcag

SEQ ID NO: 379626 - DNA, 120 bp, Artificial Sequence
  ENSG00000143434_7 (sequence is synthesized)
gcccgccctcgtcggttctcagcctctggccctgtttccctggcctgggagacccgcctccgctccccaacccccgctcctatcccctcttcgtctgcgcctgcaggcccctccagcccc

SEQ ID NO: 379627 - DNA, 120 bp, Artificial Sequence
  ENSG00000143434_8 (sequence is synthesized)
tcctctcgctaacgtggctctgggacccggtcccggcccagactctgctaccggcccctcctcggagccccggatccggtgagggggagacaggtcgagcccctggccctaggcccacct

SEQ ID NO: 379628 - DNA, 120 bp, Artificial Sequence
  ENSG00000143434_9 (sequence is synthesized)
cttttcgaggctttagacacctggattgtcctggttgggggttgggtgggaaggagggtaggtgctgagtgtggggctaagagctaagagtgggggaaatggcttggagaaaggaaagct

SEQ ID NO: 379629 - DNA, 120 bp, Artificial Sequence
  ENSG00000143434_10 (sequence is synthesized)
ccggttccacaggctccttggcgcgaccctgctccctctgaggaaggtggactggggcgggcgaccagcccaaaggcttcctgctattgtccccagcccagtctccccttctccatccct

SEQ ID NO: 379630 - DNA, 120 bp, Artificial Sequence
  ENSG00000143434_11 (sequence is synthesized)
tccacagctctcctagactctggctgtgaccccagccattccccagaggtggcttcggggccaggagagagaagggctgtttcctcttcccagcaacgggaggatctggaaaggggagag

SEQ ID NO: 379631 - DNA, 120 bp, Artificial Sequence
  ENSG00000143434_12 (sequence is synthesized)
tcggccaggtctctcccatgtgcttcagatggggtgtgtgaagcagctcggattcttccagggcagagtgatcttttctccaggccaggagttgaggagctgaccagatgctgcttccca

SEQ ID NO: 379632 - DNA, 120 bp, Artificial Sequence
  ENSG00000143434_13 (sequence is synthesized)
gaaacagctacaagaagccctcttaaaggtcagaggtttcctatccccctcaagcccccacaggagtcaccaacccagggccggcttatgggtgagggggcaccccctggggcctgagct

SEQ ID NO: 379633 - DNA, 120 bp, Artificial Sequence
  ENSG00000143434_14 (sequence is synthesized)
gccccgcacaggatgccccgtgccccccacttcatgcccttgctgctactgctgctgctgctctcacttccccatactcaggccgcctttccccaggaccccctccctctgttgatctct

SEQ ID NO: 379634 - DNA, 120 bp, Artificial Sequence
  ENSG00000143434_15 (sequence is synthesized)
gaccttcaaggtacttccccattatcctggtttcggggcctggaggatgatgctgtggctgcagaacttgggctggactttcagagattcctgaccttgaaccggaccttgctagtggct

SEQ ID NO: 379635 - DNA, 120 bp, Artificial Sequence
  ENSG00000143434_16 (sequence is synthesized)
gcccgggatcacgttttctccttcgatcttcaagccgaagaagaaggggaggggctggtgcccaacaagtatctaacatggagaagccaagatgtggagaactgtgctgtacggggaaag

SEQ ID NO: 379636 - DNA, 120 bp, Artificial Sequence
  ENSG00000143434_17 (sequence is synthesized)
ctgacggatgagtgctacaactatattcgtgttcttgttccctgggactcccagacgctccttgcctgtggaacgaactcattcagccctgtgtgccgcagctatgggataacttcgctg

SEQ ID NO: 379637 - DNA, 120 bp, Artificial Sequence
  ENSG00000143434_18 (sequence is synthesized)
cagcaggagggtgaggaactgagtgggcaggctcgatgcccctttgatgccacccagtccaacgtggccatctttgcagagggcagcctgtactcagccacagctgcggatttccaggcc

SEQ ID NO: 379638 - DNA, 120 bp, Artificial Sequence
  ENSG00000143434_19 (sequence is synthesized)
agtgatgctgtagtttacagaagccttgggccccagcccccactccgctccgccaagtatgactccaagtggctccgagagccacactttgtccaggccttggagcatggagaccatgtc

SEQ ID NO: 379639 - DNA, 120 bp, Artificial Sequence
  ENSG00000143434_20 (sequence is synthesized)
tacttcttcttccgcgaggtctctgtggaggatgctcggctggggagggtgcagttctcccgcgtagcccgagtatgtaaacgtgacatgggcggctcgcctcgggccttggaccgccac

SEQ ID NO: 379640 - DNA, 120 bp, Artificial Sequence
  ENSG00000143434_21 (sequence is synthesized)
ggccgctctgctctctttggggtcttcaccacccagaccaatagcatccctggctctgccgtctgcgccttctacctggatgagattgagcgtgggtttgagggcaagttcaaggagcag

SEQ ID NO: 379641 - DNA, 120 bp, Artificial Sequence
  ENSG00000143434_22 (sequence is synthesized)
aggagtctggatggggcctggactcctgtgtctgaggacagagttccctcacccaggccaggatcctgtgcaggagtagggggagctgccttgttctcctcttcccgagacctccctgat

SEQ ID NO: 379642 - DNA, 120 bp, Artificial Sequence
  ENSG00000143434_23 (sequence is synthesized)
gatgtcctgaccttcatcaaggctcacccgctgctggaccccgctgtaccacctgtcacccatcagcctctactcactctcactagcagggccctactgacccaagtagctgtggatggc

SEQ ID NO: 379643 - DNA, 120 bp, Artificial Sequence
  ENSG00000143434_24 (sequence is synthesized)
atggctggtccccacagtaacatcacagtcatgttccttggctccaatgatgggacagtgctgaaggtgctgaccccaggtgggcgatccgggggacctgagcccatcctcctggaagag

SEQ ID NO: 379644 - DNA, 120 bp, Artificial Sequence
  ENSG00000143434_25 (sequence is synthesized)
attgatgcctacagccctgcccggtgcagtgggaagcggacagcccaaacagcacgacggatcatagggctggagctggacactgagggtcacaggctttttgtggctttttctggctgt

SEQ ID NO: 379645 - DNA, 120 bp, Artificial Sequence
  ENSG00000143434_26 (sequence is synthesized)
attgtctacctccctctcagccggtgtgcccggcatggggcctgtcagaggagctgtttggcttctcaggacccatactgtggatggcatagctccaggggctgtgtggatatcagggga

SEQ ID NO: 379646 - DNA, 120 bp, Artificial Sequence
  ENSG00000143434_27 (sequence is synthesized)
tctggtgggactgatgtggatcaggctgggaaccaggaatccatggagcatggtgactgccaagatggagctactgggagtcagtctggccctggggattctgcttatggcgtgcgccgg

SEQ ID NO: 379647 - DNA, 120 bp, Artificial Sequence
  ENSG00000143434_28 (sequence is synthesized)
gacctgcccccagcctcggcctcccgctccgtccccatcccactcctcctggccagtgtggccgcagcttttgccctgggcgcctcagtctctggcctcctggtctcctgtgcttgtcgc

SEQ ID NO: 379648 - DNA, 120 bp, Artificial Sequence
  ENSG00000143434_29 (sequence is synthesized)
cgcgcccaccgacgtcggggcaaggacatcgagactccggggctcccgcgccctctctccctccgcagtttggcccggctccacggtgggggcccagagcccccgccgccctccaaggac

SEQ ID NO: 379649 - DNA, 120 bp, Artificial Sequence
  ENSG00000143434_30 (sequence is synthesized)
ggggacgcggtgcagacgccgcagctctacaccaccttcctgccgcctccggagggcgtgcccccgccggagctggcctgcctgcccacccccgagtccacgccggagctgccggtcaag

SEQ ID NO: 379650 - DNA, 120 bp, Artificial Sequence
  ENSG00000143434_31 (sequence is synthesized)
ctgccggtcaagcacctccgcgccgccggggacccctgggagtggaaccagaacaggaacaacgccaaggagggtccgggccgctcacggggcgggcacgcggcgggcgggcccgcgccc

SEQ ID NO: 379651 - DNA, 120 bp, Artificial Sequence
  ENSG00000143434_32 (sequence is synthesized)
aggccaccgccgcccggctgtcccgggcaggccgtggaagtcaccaccctggaggaactgctgcgctacctgcacggcccgcagccgcccagaaagggggccgagccccccgccccttta

SEQ ID NO: 379652 - DNA, 80 bp, Artificial Sequence
  ENSG00000143434_33 (sequence is synthesized)
tgggcggccccagccccaggccccacgagtgcgcctcgccgctgaggctggacgtgccccccgagggcaggtgcgcctct

SEQ ID NO: 379653 - DNA, 120 bp, Artificial Sequence
  ENSG00000143434_34 (sequence is synthesized)
cccgcgctctccgcccccgctccccggctgggcgtcggcggaggccggaggttgcctttctccggccaccgggccccccctgccctgctcactcgagtcccctcgggaggtccctccagg

SEQ ID NO: 379654 - DNA, 120 bp, Artificial Sequence
  ENSG00000143434_35 (sequence is synthesized)
ggtccctccaggtactccgggggtcccgggaagcacctcctgtacctgggccggcccgagggctaccggggccgcgccctgaaaagggtggacgtcgagaagccccagttgtccctgaag

SEQ ID NO: 379655 - DNA, 120 bp, Artificial Sequence
  ENSG00000143434_36 (sequence is synthesized)
cctcccctcgtcgggccctcctcccgccaggccgtcccgaacggcggccgtttcaacttttaaagggagcggcccacggcctccagcgtggggagcgcccgagtcctctcggccacgagc

SEQ ID NO: 379656 - DNA, 120 bp, Artificial Sequence
  ENSG00000143434_37 (sequence is synthesized)
tggacgctcttcaggacgtttcaccgccccctcgccccgcacctccagccttcccgactcgcagagtctcccgaggccccttttcgcctcgggtttatttattgactgtctttccccctg

SEQ ID NO: 379657 - DNA, 120 bp, Artificial Sequence
  ENSG00000143434_38 (sequence is synthesized)
tcctcgacagaagagtgggaggtgagaagcccgtctcctcagtgagccagcatttcagggggagctggcggactcccactccccgctcccttccagccaagctgccttaactcgcccctc

SEQ ID NO: 379658 - DNA, 120 bp, Artificial Sequence
  ENSG00000143434_39 (sequence is synthesized)
ggggctcccccagagactgtgccccgggcgggccgcgcgcgctgtgtccagagtcctcgggccttctgggtctgggacgtgcctctcctactgtgtaggagcctccgcttcccaatacag

SEQ ID NO: 379659 - DNA, 120 bp, Artificial Sequence
  ENSG00000143434_40 (sequence is synthesized)
ccgtgtctgcagccactgcctgacttcactcgggcgggggagggcggcagtcggtcggctcgctctgggcgccctcgctctctgccttcatctgggccctgggctctcccgggtaatggg

SEQ ID NO: 379660 - DNA, 120 bp, Artificial Sequence
  ENSG00000143434_41 (sequence is synthesized)
atggctgcggtcccgccggggggcagtctggaaaggtttcctaaaggagacgagcgaattaacggtgtcgaggtgagccagggccagggggaccccggtaaagtttagttgaggctgggg

SEQ ID NO: 379661 - DNA, 120 bp, Artificial Sequence
  ENSG00000143434_42 (sequence is synthesized)
aaggccctcggagctcgtttccagatcgaggtaagagggactttcttaaaggcctagtctatgggatggggcggcggagggaattttttgagaaataaaatgaagctgcagtgtacgtta

SEQ ID NO: 379662 - DNA, 120 bp, Artificial Sequence
  ENSG00000143434_43 (sequence is synthesized)
attctgaataccctgggagtatcggaaaagggtcggcatcctccagatacccagcatgtagctcagtacttggcacacagtagggtactttttgaacaaataaatcaatgtcctgcatga

SEQ ID NO: 379663 - DNA, 120 bp, Artificial Sequence
  ENSG00000143434_44 (sequence is synthesized)
gatggccacagacaccatcccaggcttggccttttgtccttctctccttctgtggcacagtcaccccatcagttcttcatgaagcttctctttccccccatcttcaccctgtcccttctt

SEQ ID NO: 379664 - DNA, 120 bp, Artificial Sequence
  ENSG00000143434_45 (sequence is synthesized)
catagatggagctactgggagtcagtctggccctggggattctgcttatggtgagtcctcttgtcccaacctcaccttcccttgctcagcccacatacctgagtgtgtgtcctgtagcag

SEQ ID NO: 379665 - DNA, 120 bp, Artificial Sequence
  ENSG00000143434_46 (sequence is synthesized)
cttgggccccagcccccactccgctccgccaaagccacactttgtccaggccttggagcatggagaccatgtctacttcttcttccgcgaggtctctgtggaggatgctcggctggggag

SEQ ID NO: 379666 - DNA, 120 bp, Artificial Sequence
  ENSG00000143434_47 (sequence is synthesized)
cagccccaggccccacgagtgcgcctcgccgctgaggctggacgtgccccccgagggcagggagcggcccacggcctccagcgtggggagcgcccgagtcctctcggccacgagctggac

SEQ ID NO: 379667 - DNA, 120 bp, Artificial Sequence
  ENSG00000143436_0 (sequence is synthesized)
attctgtgcctgtgaacatggcggcgcccgttgtcacggccccgggcagagctctgctgcgggcgggcgctggacggctgcttcggggaggcgtccaggagctactgcggccgcgacatg

SEQ ID NO: 379668 - DNA, 120 bp, Artificial Sequence
  ENSG00000143436_1 (sequence is synthesized)
aagggaacgcccctgacctggcctgcaacttcagcctttctcaaaatcggggcacggtcatcgtggagcgctggtggaaggtaccgctggccggggagggccggaagccgcgcctgcacc

SEQ ID NO: 379669 - DNA, 120 bp, Artificial Sequence
  ENSG00000143436_2 (sequence is synthesized)
ggcgacatcgcgtctataagctggtggaggacacgaagcatcggcccaaagaaaacctggagctcatcctgacgcagtcggtggagaatgttggagtccggggtgacctggtctcagtga

SEQ ID NO: 379670 - DNA, 120 bp, Artificial Sequence
  ENSG00000143436_3 (sequence is synthesized)
agaaatctttaggccggaatcgactccttcctcagggactggctgtatatgcatcccctgaaaacaagaagctgtttgaagaggagaaattgctgagacaagaaggaaaattagagaaga

SEQ ID NO: 379671 - DNA, 120 bp, Artificial Sequence
  ENSG00000143436_4 (sequence is synthesized)
tccagaccaaggcaggtgaggcgacagtgaaatttctaaaaagctgtcgcctggaggtagggatgaagaacaatgtcaaatgggagctgaaccctgaaatagttgcccgccacttcttta

SEQ ID NO: 379672 - DNA, 120 bp, Artificial Sequence
  ENSG00000143436_5 (sequence is synthesized)
cacatacattaaagttaccagaagagcctatcacacggtggggcgagtattggtgtgaggtgacggtaaatgggcttgatactgtgagagtgcctatgtctgtcgtgaactttgagaagc

SEQ ID NO: 379673 - DNA, 120 bp, Artificial Sequence
  ENSG00000143436_6 (sequence is synthesized)
ccaagaccaaaagatataagtactggttagcccagcaagctgccaaggctatggcccccaccagcccccagatctaaatctactctccctccaaggcagcaaagcagaatcgggagcagt

SEQ ID NO: 379674 - DNA, 120 bp, Artificial Sequence
  ENSG00000143436_7 (sequence is synthesized)
ggagcagaaatgtgcaagcaccctgatctcactcccagctctgaccaaatacagaattttagagaacatctgaagacatcagactgcactgcgtatacatgttgaattcttcatttttgc

SEQ ID NO: 379675 - DNA, 120 bp, Artificial Sequence
  ENSG00000143436_8 (sequence is synthesized)
catctttaactgtcatcactggggcagggaagtcctgttccagaagtaccaggctgtagatttgataagctagatgcagtagaccgaaaccatccaaaacctgtttagcttcttcctcca

SEQ ID NO: 379676 - DNA, 120 bp, Artificial Sequence
  ENSG00000143436_9 (sequence is synthesized)
ttggagtttattgggacaaacaggagagccagccattgtctccagtacttgcctcattctcatcatccaaactgaacatttgtatcccaagcagaaataaagagaatatgttctttttaa

SEQ ID NO: 379677 - DNA, 120 bp, Artificial Sequence
  ENSG00000143436_10 (sequence is synthesized)
aggtgaggcggtctcctgattgcagacccaagagtgggagaaaggggaagtgttgtggctgccccacaaaacagacagtgaaatttctaaaaagctgtcgcctggaggtagggatgaaga

SEQ ID NO: 379678 - DNA, 120 bp, Artificial Sequence
  ENSG00000143436_11 (sequence is synthesized)
cgaggcgcttcctctcaggctggtccggtttggcatcagctttttctagcccgtccccctcaactatttgccttgctttttctttgtggaaacaatccaactctatatgtgagaagagga

SEQ ID NO: 379679 - DNA, 120 bp, Artificial Sequence
  ENSG00000143436_12 (sequence is synthesized)
agccataaaaactattgtgattgtgacactggcctccagcattgaaaattaaaacataaaggcagcaacatcattaacagtgtgtggggagaggagcctgacaatttgtgccacagatac

SEQ ID NO: 379680 - DNA, 120 bp, Artificial Sequence
  ENSG00000143436_13 (sequence is synthesized)
tgaaatcctccatgggacgacaactccctctatacaggggatattaaatttatacatcaagttctaaagaaactaattagcagtctcttaaatcttgttcctagtgaatatgaattagca

SEQ ID NO: 379681 - DNA, 120 bp, Artificial Sequence
  ENSG00000143437_0 (sequence is synthesized)
ggggtggcgcggcggcggtggcatctgcggccatggcggcgactactgccaaccccgaaatgacatcagatgtaccatcactgggtccagccattgcctctggaaactctggacctggaa

SEQ ID NO: 379682 - DNA, 120 bp, Artificial Sequence
  ENSG00000143437_1 (sequence is synthesized)
ttcaaggtggaggagccattgtccagagggctattaagcggcgaccagggctggattttgatgatgatggagaagggaacagtaaatttttgaggtgtgatgatgatcagatgtctaacg

SEQ ID NO: 379683 - DNA, 120 bp, Artificial Sequence
  ENSG00000143437_2 (sequence is synthesized)
ataaggagcggtttgccaggtcggatgatgagcagagctctgcggataaagagagacttgccagggaaaatcacagtgaaattgaacggcggcgacggaacaagatgacagcctacatca

SEQ ID NO: 379684 - DNA, 120 bp, Artificial Sequence
  ENSG00000143437_3 (sequence is synthesized)
cagaactgtcagatatggtacccacctgtagtgccctggctcgaaaaccagacaagctaaccatcttacgcatggcagtttctcacatgaagtccttgcggggaactggcaacacatcca

SEQ ID NO: 379685 - DNA, 120 bp, Artificial Sequence
  ENSG00000143437_4 (sequence is synthesized)
ctgatggctcctataagccgtctttcctcactgatcaggaactgaaacatttgatcttggaggcagcagatggctttctgtttattgtctcatgtgagacaggcagggtggtgtatgtgt

SEQ ID NO: 379686 - DNA, 120 bp, Artificial Sequence
  ENSG00000143437_5 (sequence is synthesized)
ctgactccgtgactcctgttttgaaccagccacagtctgaatggtttggcagcacactctatgatcaggtgcacccagatgatgtggataaacttcgtgagcagctttccacttcagaaa

SEQ ID NO: 379687 - DNA, 120 bp, Artificial Sequence
  ENSG00000143437_6 (sequence is synthesized)
atgccctgacagggcgtatcctggatctaaagactggaacagtgaaaaaggaaggtcagcagtcttccatgagaatgtgtatgggctcaaggagatcgtttatttgccgaatgaggtgtg

SEQ ID NO: 379688 - DNA, 120 bp, Artificial Sequence
  ENSG00000143437_7 (sequence is synthesized)
gcagtagctctgtggacccagtttctgtgaataggctgagctttgtgaggaacagatgcaggaatggacttggctctgtaaaggatggggaacctcacttcgtggtggtccactgcacag

SEQ ID NO: 379689 - DNA, 120 bp, Artificial Sequence
  ENSG00000143437_8 (sequence is synthesized)
gctacatcaaggcctggcccccagcaggtgtttccctcccagatgatgacccagaggctggccagggaagcaagttttgcctagtggccattggcagattgcaggtaactagttctccca

SEQ ID NO: 379690 - DNA, 120 bp, Artificial Sequence
  ENSG00000143437_9 (sequence is synthesized)
actgtacagacatgagtaatgtttgtcaaccaacagagttcatctcccgacacaacattgagggtatcttcacttttgtggatcaccgctgtgtggctactgttggctaccagccacagg

SEQ ID NO: 379691 - DNA, 120 bp, Artificial Sequence
  ENSG00000143437_10 (sequence is synthesized)
aactcttaggaaagaatattgtagaattctgtcatcctgaagaccagcagcttctaagagacagcttccaacaggtagtgaaattaaaaggccaagtgctgtctgtcatgttccggttcc

SEQ ID NO: 379692 - DNA, 120 bp, Artificial Sequence
  ENSG00000143437_11 (sequence is synthesized)
ggtctaagaaccaagaatggctctggatgagaaccagctcctttactttccagaacccttactcagatgaaattgagtacatcatctgtaccaacaccaatgtgaagaactctagccaag

SEQ ID NO: 379693 - DNA, 120 bp, Artificial Sequence
  ENSG00000143437_12 (sequence is synthesized)
aaccacggcctacactctccaacacaatccagaggccacaactaggtcccacagctaatttacccctggagatgggctcaggacagctggcacccaggcagcagcaacagcaaacagaat

SEQ ID NO: 379694 - DNA, 120 bp, Artificial Sequence
  ENSG00000143437_13 (sequence is synthesized)
tggacatggtaccaggaagagatggactggccagctacaatcattcccaggtggttcagcctgtgacaaccacaggaccagaacacagcaagccccttgagaagtcagatggtttatttg

SEQ ID NO: 379695 - DNA, 120 bp, Artificial Sequence
  ENSG00000143437_14 (sequence is synthesized)
cccaggatagagatccaagattttcagaaatctatcacaacatcaatgcggatcagagtaaaggcatctcctccagcactgtccctgccacccaacagctattctcccagggcaacacat

SEQ ID NO: 379696 - DNA, 120 bp, Artificial Sequence
  ENSG00000143437_15 (sequence is synthesized)
tccctcctaccccccggccggcagagaatttcaggaatagtggcctagcccctcctgtaaccattgtccagccatcagcttctgcaggacagatgttggcccagatttcccgccactcca

SEQ ID NO: 379697 - DNA, 120 bp, Artificial Sequence
  ENSG00000143437_16 (sequence is synthesized)
accccacccaaggagcaaccccaacttggacccctactacccgctcaggcttttctgcccagcaggtggctacccaggctactgctaagactcgtacttcccagtttggtgtgggcagct

SEQ ID NO: 379698 - DNA, 120 bp, Artificial Sequence
  ENSG00000143437_17 (sequence is synthesized)
ttcagactccatcctccttcagctccatgtccctccctggtgccccaactgcatcgcctggtgctgctgcctaccctagtctcaccaatcgtggatctaactttgctcctgagactggac

SEQ ID NO: 379699 - DNA, 120 bp, Artificial Sequence
  ENSG00000143437_18 (sequence is synthesized)
agactgcaggacaattccagacacggacagcagagggtgtgggtgtctggccacagtggcagggccagcagcctcatcatcgttcaagttctagtgagcaacatgttcaacaaccgccag

SEQ ID NO: 379700 - DNA, 120 bp, Artificial Sequence
  ENSG00000143437_19 (sequence is synthesized)
aggagatgctgtccatgctgggagatcagagcaacagctacaacaatgaagaattccctgatctaactatgtttccccccttttcagaatagaactattggggtgaggataaggggtggg

SEQ ID NO: 379701 - DNA, 120 bp, Artificial Sequence
  ENSG00000143437_20 (sequence is synthesized)
ggagaaaaaatcactgtttgtttttaaaaagcaaatctttctgtaaacagaataaaagttcctctcccttcccttccctcacccctgacatgtaccccctttcccttctggctgttcccc

SEQ ID NO: 379702 - DNA, 120 bp, Artificial Sequence
  ENSG00000143437_21 (sequence is synthesized)
tgctctgttgcctctctaaggtaacatttatagaagaaatggaatgaatctccaaggcttttaggactgtctgaaaatttgaggctgggtgaagttaaaacacctttccttatgtctcct

SEQ ID NO: 379703 - DNA, 120 bp, Artificial Sequence
  ENSG00000143437_22 (sequence is synthesized)
gacctgaaattgtatagtgttgatttgtgctgagatcaagaggcaggttagaagaacctgacatccactgtttgccttggatagtatggcttgtttttggaaagaaattctgaagagagt

SEQ ID NO: 379704 - DNA, 120 bp, Artificial Sequence
  ENSG00000143437_23 (sequence is synthesized)
ggaggagaggagaaatgtcctcatatttgaggaccatgaaacattgtaggtatatatggggctttagcaagtttgagcataggctctttttgctgcctgtgagcagtccctctggaaaga

SEQ ID NO: 379705 - DNA, 120 bp, Artificial Sequence
  ENSG00000143437_24 (sequence is synthesized)
tgtgtatgtgtgtgtgtgtgtgtgtgcgcacacatgcttctgtatttcactctttctccctattagggagttatgcaaaatttgtccccgattttacctttgtctttctgtgtacttttc

SEQ ID NO: 379706 - DNA, 120 bp, Artificial Sequence
  ENSG00000143437_25 (sequence is synthesized)
tttacctttgtctttctgtgtacttttcaaagagtcctaaggagttaaatcttccaggtattttccacttagtattgcagccaaagaatatttaaataaacgtctttgctgcgcttgcat

SEQ ID NO: 379707 - DNA, 120 bp, Artificial Sequence
  ENSG00000143437_26 (sequence is synthesized)
ccatgcccagccaatatacaactgtaaagcaaatatagaaagtcggctgttgatacgattgtctgttatcgaacacattcagtgataaagctgggttactgctgcttttggtgctctcac

SEQ ID NO: 379708 - DNA, 120 bp, Artificial Sequence
  ENSG00000143437_27 (sequence is synthesized)
cttatctggaagatctgcaaacattacctaaataggctggcaagataaacactttctggaacccgagacttggccataaagataatgctgcatttttctgtcagaatcacatatgatgtg

SEQ ID NO: 379709 - DNA, 120 bp, Artificial Sequence
  ENSG00000143437_28 (sequence is synthesized)
tgttctgtagaggttatttctgcatggaaactcaacttcttggattagccgtcccagtgaaaatcctcattgttggagtgtaaaccaaatacgaagccctcttgcaaagtagcctctttc

SEQ ID NO: 379710 - DNA, 120 bp, Artificial Sequence
  ENSG00000143437_29 (sequence is synthesized)
atcccatactcaaaatacccagtttagcaagcaactgagatttaagtctctctggccctaagaggtttttcctctttgctccctccaatcttgagattgggttttgctttagagtgcaag

SEQ ID NO: 379711 - DNA, 120 bp, Artificial Sequence
  ENSG00000143437_30 (sequence is synthesized)
tatcataattccgtatgatagatggggcctggacacccatctcaacagggtcacttggtaattaacaatagccatataaatgcggatacaggttactaccctcaccctttaccttcctca

SEQ ID NO: 379712 - DNA, 120 bp, Artificial Sequence
  ENSG00000143437_31 (sequence is synthesized)
ggtaacagtcgtagataccagcttttttttttttttttttaaattggctttggccagtagctaaagtgcaagactgaattaatgagaagatatattaaatgtagtcataggggactgagg

SEQ ID NO: 379713 - DNA, 120 bp, Artificial Sequence
  ENSG00000143437_32 (sequence is synthesized)
agcaagggtggccttgaagaggccaaaggaatgtccatttgctgagtttcccttccttatgtctccagtctggtgccaggtagtggagtaaaaaaggagacagtttatttttttattcta

SEQ ID NO: 379714 - DNA, 120 bp, Artificial Sequence
  ENSG00000143437_33 (sequence is synthesized)
tgtgcacacttacagtatacatatatatttatatcacaatttacgaaaccaaaaagttgagtttccaatggaacccttgttttttaataatcgactttttaaatgtgatcaggactataa

SEQ ID NO: 379715 - DNA, 120 bp, Artificial Sequence
  ENSG00000143437_34 (sequence is synthesized)
tattgtacagttattatagggcttttggggaaggggaggatagcgagaagatgctctgggggttttgtttttgcttttccttcagggttttatttttgactgttttgttttcttgttggc

SEQ ID NO: 379716 - DNA, 120 bp, Artificial Sequence
  ENSG00000143437_35 (sequence is synthesized)
catttctgtattgctggcatctgtgctaagctttacagtggcaaaaataatgacatgtagcaaagattttcaaacaaaatattttttccttttgtaaaatttcttgtgttgtgtgatctt

SEQ ID NO: 379717 - DNA, 120 bp, Artificial Sequence
  ENSG00000143437_36 (sequence is synthesized)
gattgcggctttatcattcctttccagttcataaacaacaggcacccacaaccagaggaatctatagtttaagctccagacatacaaacataaggcacattgtgtctttaatttcaggaa

SEQ ID NO: 379718 - DNA, 120 bp, Artificial Sequence
  ENSG00000143437_37 (sequence is synthesized)
tcagaaatcatagggttctgatcacattgcacgcctcccccctcacttgtcctcctgatcctgacacattctgagtaacatcagcaggaatgctctgaccatgaggtgggggttttgggg

SEQ ID NO: 379719 - DNA, 120 bp, Artificial Sequence
  ENSG00000143437_38 (sequence is synthesized)
tgggcgttgcctgggttcttgggagagaggggaagagtcgggacttgaaaaccactagggcacatctggatgccttcccccagtatgtccttttctggattaaaatgagtgaaatttaaa

SEQ ID NO: 379720 - DNA, 120 bp, Artificial Sequence
  ENSG00000143437_39 (sequence is synthesized)
ttattttcaatgctgcctttgaacttaagagtgagattcattgatgataattgaagtattttaggcttgaaaaaaaattcatctcctgcttggtcagttctgttataagcaaggagatta

SEQ ID NO: 379721 - DNA, 120 bp, Artificial Sequence
  ENSG00000143437_40 (sequence is synthesized)
gaaatgtacttttgtgtaagatgaaagaaaataggaaaagaaaatgtacaatccttcccttccattattgagcttttattccagttgaggagatagataactcaggctggaaaatgattc

SEQ ID NO: 379722 - DNA, 120 bp, Artificial Sequence
  ENSG00000143437_41 (sequence is synthesized)
agtattggctgtgtcacagaatgtggtttttatgtgaacaaatttatactgaacatatgtattctaagcatttgttgcaaagaaacttagacattgaatgcagttaatttgagaaagatt

SEQ ID NO: 379723 - DNA, 120 bp, Artificial Sequence
  ENSG00000143437_42 (sequence is synthesized)
gcggcggtggcatctgcggccatggcggcgactactgccaaccccgcctgatcttggactcaagattctcctgcctcagaccccgagtagctgggactacagaaatgacatcagatgtac

SEQ ID NO: 379724 - DNA, 120 bp, Artificial Sequence
  ENSG00000143437_43 (sequence is synthesized)
ttatagaaaatgtggaaagtattgaaaaatacaaagagaaggaataaaattctcacactccagatagtctttgttgatgtacagtgtatgtactttcatttttttacctatgcttttaaa

SEQ ID NO: 379725 - DNA, 120 bp, Artificial Sequence
  ENSG00000143437_44 (sequence is synthesized)
aaataccttatatgaatatatacacacattcacaataaccaggttttgaatacctagaaggagttagaacccaacaagatgacccctgtgtcatagaacatggtttctgtttgctgaaac

SEQ ID NO: 379726 - DNA, 120 bp, Artificial Sequence
  ENSG00000143442_0 (sequence is synthesized)
gtatccctccgcggggcgagagggtcggtggggggagtcggcgtctctctcccccgcgccagctcccgtacacggagccgcattccttggcccccccacccccctccctcggggcccccc

SEQ ID NO: 379727 - DNA, 120 bp, Artificial Sequence
  ENSG00000143442_1 (sequence is synthesized)
cgcccccctcgggaaaaaaatccaccccgaatcactcgaacccgagggaggcttcctttcacccttggggagacgagctttcaacggttacctcttcttcgtctccccccaagcccccgt

SEQ ID NO: 379728 - DNA, 120 bp, Artificial Sequence
  ENSG00000143442_2 (sequence is synthesized)
cccctccccctgctcccacccccttctggcgccgggtgtaaggtccctttaaggcgacggcgccttcctcgggtcagactaccggcggcgacgaccacaggagcatggcggacaccgacc

SEQ ID NO: 379729 - DNA, 120 bp, Artificial Sequence
  ENSG00000143442_3 (sequence is synthesized)
tgttcatggaatgtgaggaggaggagttggagccatggcagaaaatcagtgatgtcattgaggactctgtagttgaagattataattcagtggataaaactaccacagtttctgtgagcc

SEQ ID NO: 379730 - DNA, 120 bp, Artificial Sequence
  ENSG00000143442_4 (sequence is synthesized)
agcagccagtctcggctccagtgcccatcgctgcccatgcttctgttgctgggcacctctctacatccaccaccgttagtagcagcggggcacagaacagcgacagtacaaagaagactc

SEQ ID NO: 379731 - DNA, 120 bp, Artificial Sequence
  ENSG00000143442_5 (sequence is synthesized)
ttgtcacactaattgccaacaacaatgctggcaatcctttggtccagcaaggtggacagccactcatcctgacccagaatccagccccaggtctgggcacaatggttactcaaccagtat

SEQ ID NO: 379732 - DNA, 120 bp, Artificial Sequence
  ENSG00000143442_6 (sequence is synthesized)
tgaggcctgttcaggtcatgcagaatgccaatcatgtgactagttcccctgtggcctcacaaccaatatttatcactacgcagggatttcctgtaaggaatgtccggcctgtacaaaatg

SEQ ID NO: 379733 - DNA, 120 bp, Artificial Sequence
  ENSG00000143442_7 (sequence is synthesized)
caatgaatcaggttgggattgtgctgaacgtacagcaaggccaaacggttagaccaattacactagttccagccccaggtacccagtttgttaagccgacagttggagttccacaagtgt

SEQ ID NO: 379734 - DNA, 120 bp, Artificial Sequence
  ENSG00000143442_8 (sequence is synthesized)
tctcccagatgacccctgtgaggccaggctccacaatgcctgtgaggcccaccaccaacaccttcaccaccgtcatcccggccactcttaccattcgaagcaccgtcccacagtcccagt

SEQ ID NO: 379735 - DNA, 120 bp, Artificial Sequence
  ENSG00000143442_9 (sequence is synthesized)
cccagcagaccaagtccactcccagcacttctaccactcccactgccacacagccaacctcactggggcaactagctgttcagtctccaggccagtcaaaccagaccacgaatcccaagc

SEQ ID NO: 379736 - DNA, 120 bp, Artificial Sequence
  ENSG00000143442_10 (sequence is synthesized)
tagctccctccttcccctctccacctgcagtgagcattgccagctttgtcactgtgaagcgacctggtgttacaggcgaaaatagcaatgaagtggccaaattggtgaatacccttaaca

SEQ ID NO: 379737 - DNA, 120 bp, Artificial Sequence
  ENSG00000143442_11 (sequence is synthesized)
ccatcccttccctgggccagagtcctgggccagtggtggtgtccaacaacagctctgctcatggctctcaaagaaccagcggacctgagtcttcaatgaaagtgacctcttccatcccag

SEQ ID NO: 379738 - DNA, 120 bp, Artificial Sequence
  ENSG00000143442_12 (sequence is synthesized)
tatttgacctccaggatggtggacggaaaatatgtccacgatgtaatgctcaatttcgtgttactgaagctttgagaggtcacatgtgttactgttgcccagaaatggttgaataccaga

SEQ ID NO: 379739 - DNA, 120 bp, Artificial Sequence
  ENSG00000143442_13 (sequence is synthesized)
agaaaggaaagtccctggattcagaacccagtgtcccatcagcagcaaagcccccatcccctgagaaaacagctcctgttgcttccacaccctcttctacacctattcctgctctgtcac

SEQ ID NO: 379740 - DNA, 120 bp, Artificial Sequence
  ENSG00000143442_14 (sequence is synthesized)
cgcctaccaaagtaccagaaccaaatgagaacgtgggcgatgccgtccagaccaaactcattatgcttgtagatgacttctactatggacgggatggtggcaaagtagcccagctcacaa

SEQ ID NO: 379741 - DNA, 120 bp, Artificial Sequence
  ENSG00000143442_15 (sequence is synthesized)
atttccctaaggtcgccacatctttccgatgcccacattgtaccaaaaggctaaaaaacaatattcgattcatgaaccatatgaaacaccacgtagaactcgatcagcagaacggtgagg

SEQ ID NO: 379742 - DNA, 120 bp, Artificial Sequence
  ENSG00000143442_16 (sequence is synthesized)
tagatggtcacactatctgccagcactgttaccgccagttttccactcccttccagcttcagtgccacttggaaaatgttcatagtccctatgaatctactaccaagtgcaagatctgtg

SEQ ID NO: 379743 - DNA, 120 bp, Artificial Sequence
  ENSG00000143442_17 (sequence is synthesized)
aatgggcgtttgaaagtgagccactatttctccagcatatgaaggatactcataagcctggagagatgccttatgtttgccaggtgtgtcaatatcgctcctcactctactctgaggtag

SEQ ID NO: 379744 - DNA, 120 bp, Artificial Sequence
  ENSG00000143442_18 (sequence is synthesized)
atgtccattttcggatgatccatgaggatacccggcatctgctctgcccttattgcctgaaggtcttcaaaaatggcaatgcattccaacagcattacatgaggcaccagaagagaaatg

SEQ ID NO: 379745 - DNA, 120 bp, Artificial Sequence
  ENSG00000143442_19 (sequence is synthesized)
tttatcactgcaacaaatgccggctgcagtttctctttgccaaggacaaaattgaacacaagcttcaacaccataaaaccttccgtaaacccaagcagctggagggcttgaaaccaggca

SEQ ID NO: 379746 - DNA, 120 bp, Artificial Sequence
  ENSG00000143442_20 (sequence is synthesized)
ccaaggtgacaatccgggcttcccgagggcagccacgaactgttcctgtatcctctaatgatacacctcccagcgccttgcaggaggcagcaccgctgacctcctcaatggaccctctgc

SEQ ID NO: 379747 - DNA, 120 bp, Artificial Sequence
  ENSG00000143442_21 (sequence is synthesized)
ctgtcttcctttatccccctgtccagcgcagcatccagaagagagctgttaggaaaatgagtgtcatgggccggcagacatgcctggagtgcagcttcgagatcccagacttccctaatc

SEQ ID NO: 379748 - DNA, 120 bp, Artificial Sequence
  ENSG00000143442_22 (sequence is synthesized)
atttccctacttacgtacactgctctctgtgtcgctatagcacctgctgttctcgagcttatgccaaccacatgatcaacaatcatgttccacggaagagccccaagtatttggctttgt

SEQ ID NO: 379749 - DNA, 120 bp, Artificial Sequence
  ENSG00000143442_23 (sequence is synthesized)
ttaaaaattctgtgagtggaatcaagctggcctgcacttcatgtacctttgttacctctgtgggcgatgctatggccaagcatttggtattcaacccctctcacagatccagcagcatcc

SEQ ID NO: 379750 - DNA, 120 bp, Artificial Sequence
  ENSG00000143442_24 (sequence is synthesized)
tgccacggggactcacttggatagctcactcaaggcatggccagactcgtgaccgagtgcatgaccggaacgtgaagaatatgtaccctcctccttccttccccactaacaaagctgcca

SEQ ID NO: 379751 - DNA, 120 bp, Artificial Sequence
  ENSG00000143442_25 (sequence is synthesized)
ctgtgaaatctgcgggggccaccccagctgagcctgaagagctactaactcccttagccccagcactcccatcaccagcctcaactgcaaccccaccaccaacccccactcacccgcagg

SEQ ID NO: 379752 - DNA, 120 bp, Artificial Sequence
  ENSG00000143442_26 (sequence is synthesized)
ctttagcccttccaccgctggctacagagggagccgaatgtctgaatgttgatgatcaggatgaagggagcccagtcacccaagaacctgagctagcatcaggtggtggtggtagtggtg

SEQ ID NO: 379753 - DNA, 120 bp, Artificial Sequence
  ENSG00000143442_27 (sequence is synthesized)
tctatgctgcaatacagaacaggcagctgaacacttccgaaatccccagcgacgtattcgccgttggcttcgacgtttccaggcctcccagggggagaatctagagggcaaatatctgag

SEQ ID NO: 379754 - DNA, 120 bp, Artificial Sequence
  ENSG00000143442_28 (sequence is synthesized)
ctttgaggcagaagagaaactggctgagtgggtgctaacccagcgcgaacaacagctacctgtaaatgaggagaccttgttccagaaggccaccaaaataggacgttctttggaaggggg

SEQ ID NO: 379755 - DNA, 120 bp, Artificial Sequence
  ENSG00000143442_29 (sequence is synthesized)
gtttaagatctcctatgagtgggctgtgcgtttcatgctgcggcaccacctgactccccatgcccggcgagctgtggcccacaccctacctaaggatgtagcagagaatgcaggactctt

SEQ ID NO: 379756 - DNA, 120 bp, Artificial Sequence
  ENSG00000143442_30 (sequence is synthesized)
cattgattttgtacaacggcagattcacaaccaggacttacccttgtctatgattgtggctattgatgagatctctttgttcctggatacagaggtgctgagcagtgatgatcgaaagga

SEQ ID NO: 379757 - DNA, 120 bp, Artificial Sequence
  ENSG00000143442_31 (sequence is synthesized)
gaatgccctgcagacagtgggcacaggggaaccttggtgtgatgtagtcctagccattctggcagatggcactgtccttcccaccctggttttctacagagggcagatggatcagcctgc

SEQ ID NO: 379758 - DNA, 120 bp, Artificial Sequence
  ENSG00000143442_32 (sequence is synthesized)
taacatgccagactccatattgctagaggcaaaggagagtggctacagtgatgacgagatcatggagctgtggtcaactcgagtgtggcagaagcacacagcttgccagcgcagcaaagg

SEQ ID NO: 379759 - DNA, 120 bp, Artificial Sequence
  ENSG00000143442_33 (sequence is synthesized)
catgcttgtgatggactgtcatcgcactcacttgtcagaagaggtactggctatgcttagtgcctctagcactttgcctgcagtggtcccagcaggctgtagctccaaaattcagccatt

SEQ ID NO: 379760 - DNA, 120 bp, Artificial Sequence
  ENSG00000143442_34 (sequence is synthesized)
agatgtatgcatcaaaagaactgtcaagaacttcctgcataaaaaatggaaggaacaggctcgggaaatggcagatactgcatgtgattctgatgtcctgcttcagctggtgcttgtctg

SEQ ID NO: 379761 - DNA, 120 bp, Artificial Sequence
  ENSG00000143442_35 (sequence is synthesized)
gctgggtgaagtgctaggtgtcattggggactgtccagagctagttcagcgctccttcctggtggctagtgttctgcctggccccgatggcaacattaactcacctacaagaaatgctga

SEQ ID NO: 379762 - DNA, 120 bp, Artificial Sequence
  ENSG00000143442_36 (sequence is synthesized)
catgcaggaggagctaattgcctccctagaggagcaactgaagctgagtggggaacattctgagtcttccactccacgacccagatcatctcctgaagagacaattgagcctgaaagtct

SEQ ID NO: 379763 - DNA, 120 bp, Artificial Sequence
  ENSG00000143442_37 (sequence is synthesized)
tcaccagctctttgagggtgaaagtgagaccgagtctttctatggctttgaagaagctgacctagatctgatggagatttgagtgttggggtcatgagggggtgtggagtgagggtggga

SEQ ID NO: 379764 - DNA, 120 bp, Artificial Sequence
  ENSG00000143442_38 (sequence is synthesized)
acatgtgagggagggtaaaggggcttagggaaaagggggcataccaggtggggtatttggtttctattttttaattttataccaccactcccccctgaagttgacttacacttccctgtg

SEQ ID NO: 379765 - DNA, 120 bp, Artificial Sequence
  ENSG00000143442_39 (sequence is synthesized)
gatttgtggattaattaggaaaaccaatagtaatcacgtctgagccaaggagctggcccattggtcattcacttctgctaaaaacaggtttttgtgactttttttttttttaaatttaaa

SEQ ID NO: 379766 - DNA, 120 bp, Artificial Sequence
  ENSG00000143442_40 (sequence is synthesized)
tcactgtgtttggtatttttctgacaaaattaagaaaaagaaaaaaaattatttgtgggcaaatgttaaatttttttgtttccccttttacctcaattgtatcatagtactgggtttttt

SEQ ID NO: 379767 - DNA, 120 bp, Artificial Sequence
  ENSG00000143442_41 (sequence is synthesized)
tgtttgttttattgtgtggccaatgtctttgggcatgatgctatctaatcattgttaatgtgagaacatttctgaagatgggaaagacaaattatgtagctcacaaactggtttattata

SEQ ID NO: 379768 - DNA, 120 bp, Artificial Sequence
  ENSG00000143442_42 (sequence is synthesized)
tatatggataaaaaacttttttcattgtggtcttaacacttttatataaaaatgaaaatggaaaaaaagtcccactgaactctctcttccttctccttttctttccttccctctccagag

SEQ ID NO: 379769 - DNA, 120 bp, Artificial Sequence
  ENSG00000143442_43 (sequence is synthesized)
atgttggtttctacagcaaccctagatataaaattgtggctttaaaaatgcatgaaaccacctttaattatccagaatgaatagatttgtcttttcctcaccaccttccctccaaaacat

SEQ ID NO: 379770 - DNA, 120 bp, Artificial Sequence
  ENSG00000143442_44 (sequence is synthesized)
gacataaacaatattttttgcacttgtgatccttggcccctttccccattctcaacaccatccatccctctggacaaaggatcatacaggtgttattagcaagcaagagatactgaagcg

SEQ ID NO: 379771 - DNA, 120 bp, Artificial Sequence
  ENSG00000143442_45 (sequence is synthesized)
atcaaacagttttagggtggaagccattcccagtttgagtcttcatcctgtaagcccccaggggcagtccctgctttactgaacttcatcctgttagatggagagcatgcctgtttaagg

SEQ ID NO: 379772 - DNA, 120 bp, Artificial Sequence
  ENSG00000143442_46 (sequence is synthesized)
gattactggtcctacagccaggagctaattgttcaagaagtgttgaactttaaaaagacaagaccacttgttgaaatccagcgtgctctgtggctttcccctatttctcttaatacttag

SEQ ID NO: 379773 - DNA, 120 bp, Artificial Sequence
  ENSG00000143442_47 (sequence is synthesized)
ggaagaatctgacaggaagaagcgcacaggggtgtgcacaaagaaaatgacatgaatctttatttttcactgccagcttcaaggaaagaaaattttttctacaatttgcatgagggattt

SEQ ID NO: 379774 - DNA, 120 bp, Artificial Sequence
  ENSG00000143442_48 (sequence is synthesized)
ttttaattgtatgtactcatggttgtaaaccaaaacgtactgtaccgtacagagaaaaggagcaaaaaaccaagtcttctgtttatcctgaggctttccacaatgttcccctcctgtgag

SEQ ID NO: 379775 - DNA, 120 bp, Artificial Sequence
  ENSG00000143442_49 (sequence is synthesized)
ccaaggaggcaaactgcacaagcttgtaaatggttcgtctttaaaatgtacataagtggaacatttaataaaatgaggggaaatggatttataaacttgttttttttctaggtgaccctg

SEQ ID NO: 379776 - DNA, 120 bp, Artificial Sequence
  ENSG00000143442_50 (sequence is synthesized)
tttaataggctttcacagactggggaatgctcaagatgtgatgggcctggtggtacaggtgtgacatttgttaccacccatttctcccaccccaccctgcttttttgtttgtttgttttt

SEQ ID NO: 379777 - DNA, 120 bp, Artificial Sequence
  ENSG00000143442_51 (sequence is synthesized)
tcatcccccagcacactataatatagtgaactggaaaagtcccttccagaaacagcttggccagctttgtgaacctttgacatctgaaaacaaccaaggatccatctgggcttctcttcc

SEQ ID NO: 379778 - DNA, 120 bp, Artificial Sequence
  ENSG00000143442_52 (sequence is synthesized)
ccagctttttgcctgatgccattttattgacagacaatggactttgaagtcagcctttgcctttgagaaagttcaagaactatggttggtcacgtctatctacaacctaatcctactctt

SEQ ID NO: 379779 - DNA, 120 bp, Artificial Sequence
  ENSG00000143442_53 (sequence is synthesized)
tggtagtctctgcagcagccacagccttagcagagctggggttcctgtcttctgcacacgattgactttcttgatgggtaattttttttaagattataccaacagtggatcagctgggtt

SEQ ID NO: 379780 - DNA, 120 bp, Artificial Sequence
  ENSG00000143442_54 (sequence is synthesized)
ttggccaggaagttgtctttgtggactctgcctgcatggcttagtagtagaaggaaatttttttttggttttgttttttataattcagtttaatcaataaacatgtatttattgactgtt

SEQ ID NO: 379781 - DNA, 120 bp, Artificial Sequence
  ENSG00000143442_55 (sequence is synthesized)
actccagcctgggcaacagactgagagaccgtgtctcaaaaaaaacaaaaacaaacaaaaaccatagtgatctctcatgcttgcttacccttttatatacttctcagggagtgtttgact

SEQ ID NO: 379782 - DNA, 120 bp, Artificial Sequence
  ENSG00000143442_56 (sequence is synthesized)
ttgcttacccttttatatacttctcagggagtgtttgactttttcccaaaaggtcagtaatctttttccagtgtcattgtattaatcttatcaattcttctcacttctttcagtgacctc

SEQ ID NO: 379783 - DNA, 120 bp, Artificial Sequence
  ENSG00000143442_57 (sequence is synthesized)
caaggccaaacggttagaccaattacactagttccaggtaaggaaaaatgtctatccatttggaataaactggcatccagaagatttgtttttattgttctaaatatcctaagtcattta

SEQ ID NO: 379784 - DNA, 120 bp, Artificial Sequence
  ENSG00000143442_58 (sequence is synthesized)
gtaagtacatttaaagaaaatctaaaaatataaaaatattaatgatttaagcccaattttaaaaaatctgcttctaacctttggccagggtggtggttttatttatttctgtttagcttt

SEQ ID NO: 379785 - DNA, 120 bp, Artificial Sequence
  ENSG00000143442_59 (sequence is synthesized)
taacctgaaagactctgagcagccagtcattcaaaaacattaataaagtgtttgttgtatcagagctttatactcagaaatagaaaaataaaataaaatacagctgctgtagtttgttct

SEQ ID NO: 379786 - DNA, 120 bp, Artificial Sequence
  ENSG00000143442_60 (sequence is synthesized)
tacagaaactttagtaaggagaaagccacttacaaaaagtgtaactgaatcagctccaagaaattatgtgtgtaattgtgctttggagattagtgaaattgattgattaaagatgggtga

SEQ ID NO: 379787 - DNA, 120 bp, Artificial Sequence
  ENSG00000143442_61 (sequence is synthesized)
gtggaatggattctaatattcaataatagaagttgtaattctgaacccttggaaatggaggaaggctagaggatatgataaaggagtccaaggagcatggcggacaccgacctgttcatg

SEQ ID NO: 379788 - DNA, 120 bp, Artificial Sequence
  ENSG00000143442_62 (sequence is synthesized)
atgtggatatactctagaaaaggagtaaaacttggaaacgctaaaaaaaactgaagggtgaaagctgaatgagaatacctgaaaccaaaccgttaacaaggaatggtagtgaagttaagg

SEQ ID NO: 379789 - DNA, 120 bp, Artificial Sequence
  ENSG00000143442_63 (sequence is synthesized)
ttcagaaaaaggagaaagtgggagggcattccttttctttcttaagcctcaaagcttaatggtctcaagtgtcactgctgtgtttgtcttacatagtctcaattctcttttttagtggaa

SEQ ID NO: 379790 - DNA, 75 bp, Artificial Sequence
  ENSG00000143442_64 (sequence is synthesized)
tatcaatatggtaacattttgatagattctttggtattcttgtttgtgatattaagccatattcacaaaaacttg

SEQ ID NO: 379791 - DNA, 82 bp, Artificial Sequence
  ENSG00000143442_65 (sequence is synthesized)
tccgcctcctgggttcaagcgattctcctccttcagcttcctcatggcggacaccgacctgttcatggaatgtgaggaggag

SEQ ID NO: 379792 - DNA, 120 bp, Artificial Sequence
  ENSG00000143442_66 (sequence is synthesized)
tccagaagagagctgttaggaaaatgtcagcgccttcttctaagtgctgggcgggtggggactgggtggccaggattattcctgatacacagtgcaatctggtagctttttagcagggtt

SEQ ID NO: 379793 - DNA, 120 bp, Artificial Sequence
  ENSG00000143442_67 (sequence is synthesized)
gagatgtgctggacctaattagaaaccttccgacctgaagtttatataaaactgggaaagctggtcactgcgaacagcgtatttgtatgtagtaagttgaatcccagggcactgtctttg

SEQ ID NO: 379794 - DNA, 120 bp, Artificial Sequence
  ENSG00000143442_68 (sequence is synthesized)
agagatcttcaggttgagaatgatgagcatgagggttttcagtggtctagagcaggggtcggcaaatgttttctgtaaagggcctagtagtaaagttgtaggctttgtgcacaatatata

SEQ ID NO: 379795 - DNA, 120 bp, Artificial Sequence
  ENSG00000143442_69 (sequence is synthesized)
gcctctgttgcagctattaactgtgctgttgtggtggggaagcagccacagatacataaacgaatgagcatggctgtgctccactaaaaactatttatggactctgaaatttaagtttca

SEQ ID NO: 379796 - DNA, 120 bp, Artificial Sequence
  ENSG00000143442_70 (sequence is synthesized)
taaaattttcatgtgtcgaaaagttttattcttttatttcaaccatttaaaaataaaaaccgcaaggtatagtggctcacacctcatcccagcattatgggaggccaagacgggaggatc

SEQ ID NO: 379797 - DNA, 120 bp, Artificial Sequence
  ENSG00000143442_71 (sequence is synthesized)
gaccagcctgggcaacatggtgagatcccatctctacaaaaaaaaaaaaaaaaaagattagccaggcgtggtggtgtatgtctgcagtcctcgctactcagaagtctgaggtgagaggat

SEQ ID NO: 379798 - DNA, 120 bp, Artificial Sequence
  ENSG00000143442_72 (sequence is synthesized)
gaagtctgaggtgagaggatggcttgggcttgaacccagaaggttgagcctgcagtgagccatgagcatgccactgcaacagaacgacaccctgtctcaaaaaaagtaaaaacctttaaa

SEQ ID NO: 379799 - DNA, 120 bp, Artificial Sequence
  ENSG00000143442_73 (sequence is synthesized)
acatggtgttgggaaaactagatatccatgtccaaaagaagttggatcttaccttacaataaatacaaaaattaactcaaaatggatcaaagacctaaatgaactaaaactataagactc

SEQ ID NO: 379800 - DNA, 120 bp, Artificial Sequence
  ENSG00000143442_74 (sequence is synthesized)
ttagaaaaattataggacaaaaagcttcatgatactggatttgacagtgattactatttcttggatatgacaccaaaagcatacgcaagaaaagaaaaaatgagtaaattaaattatatc

SEQ ID NO: 379801 - DNA, 120 bp, Artificial Sequence
  ENSG00000143442_75 (sequence is synthesized)
aaaatttaaaacttttgtgcaggacgttgtcaacacagtgaaaagggaagccacagaatgggagaaaatatttgcaaattatgtatctaataaggggttaatatccagaatatataaaga

SEQ ID NO: 379802 - DNA, 120 bp, Artificial Sequence
  ENSG00000143442_76 (sequence is synthesized)
gttaatatccagaatatataaagaatttgtgcagttcaacaacaaaaaaactcccaaacaacctttttaaaaaatagacaaaggactcgctggtcgtggtggttcatgcctgtaatccca

SEQ ID NO: 379803 - DNA, 62 bp, Artificial Sequence
  ENSG00000143442_77 (sequence is synthesized)
agactaccggcggcgacgaccacaggagagacggggtttcaccacatctctggtcatggtca

SEQ ID NO: 379804 - DNA, 120 bp, Artificial Sequence
  ENSG00000143443_0 (sequence is synthesized)
aaacgacccggtgggtctacagcggaagggagggagcgaaggtaggaggcagggcttgcctcactggccaccctcccaaccccaagagcccagccccatggtccccgccgccggcgcgct

SEQ ID NO: 379805 - DNA, 120 bp, Artificial Sequence
  ENSG00000143443_1 (sequence is synthesized)
gctgtgggtcctgctgctgaatctgggtccccgggcggcgggggcccaaggcctgacccagactccgaccgaaatgcagcgggtcagtttacgctttgggggccccatgacccgcagcta

SEQ ID NO: 379806 - DNA, 120 bp, Artificial Sequence
  ENSG00000143443_2 (sequence is synthesized)
ccggagcaccgcccggactggtcttccccggaagacaaggataatcctagaggacgagaatgatgccatggccgacgccgaccgcctggctggaccagcggctgccgagctcttggccgc

SEQ ID NO: 379807 - DNA, 120 bp, Artificial Sequence
  ENSG00000143443_3 (sequence is synthesized)
cacggtgtccaccggctttagccggtcgtccgccattaacgaggaggatgggtcttcagaagagggggttgtgattaatgccggaaaggatagcaccagcagagagcttcccagtgcgac

SEQ ID NO: 379808 - DNA, 120 bp, Artificial Sequence
  ENSG00000143443_4 (sequence is synthesized)
tcccaatacagcggggagttccagcacgaggtttatagccaatagtcaggagcctgaaatcaggctgacttcaagcctgccgcgctcccccgggaggtctactgaggacctgccaggctc

SEQ ID NO: 379809 - DNA, 120 bp, Artificial Sequence
  ENSG00000143443_5 (sequence is synthesized)
gcaggccaccctgagccagtggtccacacctgggtctaccccgagccggtggccgtcaccctcacccacagccatgccatctcctgaggatctgcggctggtgctgatgccctggggccc

SEQ ID NO: 379810 - DNA, 120 bp, Artificial Sequence
  ENSG00000143443_6 (sequence is synthesized)
gtggcactgccactgcaagtcgggcaccatgagccggagccggtctgggaagctgcacggcctttccgggcgccttcgagttggggcgctgagccagctccgcacggagcacaagccttg

SEQ ID NO: 379811 - DNA, 120 bp, Artificial Sequence
  ENSG00000143443_7 (sequence is synthesized)
cacctatcaacaatgtccctgcaaccgacttcgggaagagtgccccctggacacaagtctctgtactgacaccaactgtgcctctcagagcaccaccagtaccaggaccaccactacccc

SEQ ID NO: 379812 - DNA, 120 bp, Artificial Sequence
  ENSG00000143443_8 (sequence is synthesized)
cagcccctgcccagccctggctttttggaaacgggtcaggattggcctggaggatatttggaatagcctctcttcagtgttcacagagatgcaaccaatagacagaaaccagaggtaatg

SEQ ID NO: 379813 - DNA, 120 bp, Artificial Sequence
  ENSG00000143443_9 (sequence is synthesized)
gccacttcatccacatgaggagatgtcagtatctcaacctctcttgccctttcaatcctagcacccactagatatttttagtacagaaaaacaaaactggaaaacacattgtttggtctt

SEQ ID NO: 379814 - DNA, 120 bp, Artificial Sequence
  ENSG00000143443_10 (sequence is synthesized)
gtgtttctttacagaggtacctgagggaggagagacataaatcccttcatccctaagactgaactatgtaactagcagcctctggcttgttttctactccctgtccctcaggataaaatg

SEQ ID NO: 379815 - DNA, 120 bp, Artificial Sequence
  ENSG00000143443_11 (sequence is synthesized)
ttgatattgctcattttcctcatttccaacattgttttaaaacaagtacttcttttacaggcttgaaaaatctcaaataaacgctaagaaaagggagtaggaagaacaaggagttgagcc

SEQ ID NO: 379816 - DNA, 120 bp, Artificial Sequence
  ENSG00000143443_12 (sequence is synthesized)
cttgaaagatgacagtggtcttcttgccttcatgcttggccctctctcctcaaaagggcaatgttggtacaaaattccatctcagccactttcgaggagttatcttcattagctatatcc

SEQ ID NO: 379817 - DNA, 120 bp, Artificial Sequence
  ENSG00000143443_13 (sequence is synthesized)
atcctttaatccaacacacacctgcaatgattactgtgcaactattttgcttaattttttatttgaaaaaatgtatttaaaagtccaacaactttttaatataaattacgactctcaaac

SEQ ID NO: 379818 - DNA, 120 bp, Artificial Sequence
  ENSG00000143443_14 (sequence is synthesized)
ccattcccatcactttattagtgatggtagcatacatattagagaaggtagctaaaggcaagagagcaccaaaggaaaaagactgtccaaagaacaggtattagaatgaggccgaagatc

SEQ ID NO: 379819 - DNA, 120 bp, Artificial Sequence
  ENSG00000143443_15 (sequence is synthesized)
acggtgaccagagatttctaggagtctctaacctttccaccctatcctgttaaccctttagatctctagtataacactcaggctactgaggtattttagagcaacaagctgggttacttt

SEQ ID NO: 379820 - DNA, 120 bp, Artificial Sequence
  ENSG00000143443_16 (sequence is synthesized)
gttactttcagagcaaccagcttgactggaactgagagtaaattgggaatgtatgaccaatcttagaccctgaaaaatggcagaaaatacatggaaatttgaaaaaaaaaaaaaaaaaaa

SEQ ID NO: 379821 - DNA, 90 bp, Artificial Sequence
  ENSG00000143443_17 (sequence is synthesized)
tcttcagtgttcacagagatgcaaccaggtctctcatcactcaggctggagtgtggtggcgcagtcacaactcactgcaccctccatctt

SEQ ID NO: 379822 - DNA, 120 bp, Artificial Sequence
  ENSG00000143443_18 (sequence is synthesized)
tcatccacatgaggagatgaaccacttctccagagggcaagaatggaggagggggacctgtccatcatagcaacatgcaaacacaagcaaaacactgaataaagaattgtttggagatta

SEQ ID NO: 379823 - DNA, 120 bp, Artificial Sequence
  ENSG00000143450_0 (sequence is synthesized)
gttgcctaaacctctgccacccacctgtgaacttcactttgccacagggaggcactgaactgaaaaactgccttgtaagaggtgtcgcccctctgtctactccctttcttatatcaagag

SEQ ID NO: 379824 - DNA, 120 bp, Artificial Sequence
  ENSG00000143450_1 (sequence is synthesized)
gggaaaaacacgtaactacctctacccgatctggtcaccatacgcctattacctttactgttacaagtaccggatcactctccgggagaagatgctgcctcgttgttataaaagcatcac

SEQ ID NO: 379825 - DNA, 120 bp, Artificial Sequence
  ENSG00000143450_2 (sequence is synthesized)
ttataaggaagaggaggacttgacactccagccccgttcctgcctccagtgctccgagtccctagtaggcctccaggagggcaaaagcaccgagcagggtaaccacgaccagcttaaaga

SEQ ID NO: 379826 - DNA, 120 bp, Artificial Sequence
  ENSG00000143450_3 (sequence is synthesized)
accaggacccagtacagttagactttcacttccgccttacctcccagacctctgcccattggcacggccttctctgtgaccgtcgactcttcctggatatcccatatcaggccttggatc

SEQ ID NO: 379827 - DNA, 120 bp, Artificial Sequence
  ENSG00000143450_4 (sequence is synthesized)
aaggcaaccgggaaagtttgactgcaaccctggagtacgtggaagagaagacaaatgtggactctgtgtttgtgaacttccagaatgatcggaacgacagaggtgccctgctgcgggcct

SEQ ID NO: 379828 - DNA, 120 bp, Artificial Sequence
  ENSG00000143450_5 (sequence is synthesized)
tcagctacatgggctttgaggtggtcagaccagatcaccctgccctccctcccttggacaatgtcatctttatggtgtatccccttgaaagggatgttggccacctgcccagtgagcctc

SEQ ID NO: 379829 - DNA, 120 bp, Artificial Sequence
  ENSG00000143450_6 (sequence is synthesized)
cttgaacatgcttattccaacgctttgaggggctggaagccttgacacatggaatcaggggcccgggatgtgattcaggacactttccatcctaggaataaagggtagtgcaatcatcaa

SEQ ID NO: 379830 - DNA, 120 bp, Artificial Sequence
  ENSG00000143450_7 (sequence is synthesized)
agcttaaagaactgtattcggctctccccatcaatgcccaccttgcttcaacggacacacccccatctgcctgaggtctgatttgaagactagaggagcatttttactccttttccaggc

SEQ ID NO: 379831 - DNA, 120 bp, Artificial Sequence
  ENSG00000143450_8 (sequence is synthesized)
aagcaaggcaaatagttgagggggacgggctagaaaaagctgatgccaaaccggaccagcctgagaggaagcgcctcggcccgggccttactctccaccgactgcgtcaggatgagctcc

SEQ ID NO: 379832 - DNA, 120 bp, Artificial Sequence
  ENSG00000143450_9 (sequence is synthesized)
aggttttctttgggccgatgcttcgtgtcctccaccagcttatagacgcgatgtcgccggtgcaggcgcggcttccggccctccccggccagcggtaccttccaccagcgctccacgatg

SEQ ID NO: 379833 - DNA, 120 bp, Artificial Sequence
  ENSG00000143450_10 (sequence is synthesized)
gaaagtatggggagcgggccggggaacagatggcaccgcggcttgcctatttttgctttttggcagaggtgacggacgcctagaattactgactgataatggaatgagtgttaggtggac

SEQ ID NO: 379834 - DNA, 120 bp, Artificial Sequence
  ENSG00000143450_11 (sequence is synthesized)
tgacgccggaaaagacgctcttcctcttgaaagtgtgggctttgctgtagctccagttgctgggctaacttttaattctaacgttctgtgatgactggatactgaccggagaatgaatga

SEQ ID NO: 379835 - DNA, 120 bp, Artificial Sequence
  ENSG00000143450_12 (sequence is synthesized)
tgctctcacttttccttacttcaaatctacctaaaagtggtaaaggatgggatcccttggaaaactctgccagctccaggaggagcctgacccttaatcattatactgcagtatttaagc

SEQ ID NO: 379836 - DNA, 120 bp, Artificial Sequence
  ENSG00000143450_13 (sequence is synthesized)
taataaaggagaattctaaatcacaagctatgtaaaccgtagaaaaaaaagcaactatggtaaggccgcgacagttccctctggggagggtctcagtactggacagaagaccataaaaac

SEQ ID NO: 379837 - DNA, 120 bp, Artificial Sequence
  ENSG00000143450_14 (sequence is synthesized)
tggatgaaagaaggtccatttggcagagattatggaaagactggcccttaaacatactgaccagtcctccttcctcctaaatacactacttggcctcctggacaccggtcttcttcagtc

SEQ ID NO: 379838 - DNA, 120 bp, Artificial Sequence
  ENSG00000143450_15 (sequence is synthesized)
tcgtttgctgatttctccttttctccccgcttcttagaatgccctcgggactccgtttttgaacctttactcttctcagtatacactcactgttgatctcatccagtctcgtggcttaca

SEQ ID NO: 379839 - DNA, 120 bp, Artificial Sequence
  ENSG00000143450_16 (sequence is synthesized)
ataccatttataagccaatgactcccaaatttctagttccatcctagacatctcccaaactcgtctcaaatattcaactgtttattcgtcattttcctcttacgtatccaaaggacacct

SEQ ID NO: 379840 - DNA, 120 bp, Artificial Sequence
  ENSG00000143450_17 (sequence is synthesized)
caaagttaactgtcccaaactaatttatttattcccccctcgcccccaaaactgccccatctgcagcctttttcctctcagttgacagaaactccattctttccattctaactcttttct

SEQ ID NO: 379841 - DNA, 120 bp, Artificial Sequence
  ENSG00000143450_18 (sequence is synthesized)
ctcatactccatcaggaaatcctgtgggttctacctttaaattacagatagtccctgacttggatttacaatttttgagtttgtgatggtgtgaaagtgatgtgcactcagtaggacatc

SEQ ID NO: 379842 - DNA, 120 bp, Artificial Sequence
  ENSG00000143450_19 (sequence is synthesized)
ataaaataggctttgtgttagatgattttacccaactgtcggataagttgtctgagcatgtttaagataggctaggctaagctatggtgtttggtaggtgtattatatgcattttcaact

SEQ ID NO: 379843 - DNA, 120 bp, Artificial Sequence
  ENSG00000143450_20 (sequence is synthesized)
gtttggtaggtgtattatatgcattttcaacttatgatactttcaacatacgatgggtttatcaggacataaccctattttaagtcaaggagcacttgtatttccagaatccagccactt

SEQ ID NO: 379844 - DNA, 120 bp, Artificial Sequence
  ENSG00000143450_21 (sequence is synthesized)
gtcaccacctccaatgctctaccttggaataagacactactttctcctggattactgcaatagtcccctaaaagatatcccttaattctctacagtttataattctatgtagcttattta

SEQ ID NO: 379845 - DNA, 120 bp, Artificial Sequence
  ENSG00000143450_22 (sequence is synthesized)
tagcagccagaatgatctttttaaagcataagtcagatcatgtcattcttccacccaaaactttgtaatgacttcctcctttactcaaggtaaaagaaaaaggccatcagatggtctaca

SEQ ID NO: 379846 - DNA, 120 bp, Artificial Sequence
  ENSG00000143450_23 (sequence is synthesized)
aggccatacatactctgaccccattagctcctctctaatttacactgctccacccacagtggcctccttgtttcttgaaaacaccaggcacgtttcctgctcagggcttttgcactggct

SEQ ID NO: 379847 - DNA, 120 bp, Artificial Sequence
  ENSG00000143450_24 (sequence is synthesized)
gcttttgcgttggatgctcttatcctcagatgctggcttggttaacaacctcacatcctccaagtgtttaattaaatgtcagtttttttcagtgagagatcaccctatttcttactgtaa

SEQ ID NO: 379848 - DNA, 120 bp, Artificial Sequence
  ENSG00000143450_25 (sequence is synthesized)
taccttctaacatactaaacaatttactatgtttattttctaggtttgtcctctcacttttagaagatacgttccatagggcagggatttgttttgttcactgatgtatcatctcaagca

SEQ ID NO: 379849 - DNA, 120 bp, Artificial Sequence
  ENSG00000143450_26 (sequence is synthesized)
cctagaatagtgcctggctaatagtagaccctcaataaatatttgttgaatggataaatatgcagaggtctcaaagtggcagtcccagaaccaaattttgcttacaatgttgttttttta

SEQ ID NO: 379850 - DNA, 62 bp, Artificial Sequence
  ENSG00000143450_27 (sequence is synthesized)
agtcccagaaccaaattttgcttacaatgttgtttttttatcaacaattttttagtagttga

SEQ ID NO: 379851 - DNA, 85 bp, Artificial Sequence
  ENSG00000143450_28 (sequence is synthesized)
agccagtagtcgatattttttaaaattggtgagatttactacaaaactgtctttccagtttctgttcaaaaatcatacgatacag

SEQ ID NO: 379852 - DNA, 120 bp, Artificial Sequence
  ENSG00000143450_29 (sequence is synthesized)
actgtctttccagtttctgttcaaaaatcatacgatacagcaccatcaagtctgcattcttgcatggaactggatggaattgagttgtgtggacttcctttagataacgtgtgagctttc

SEQ ID NO: 379853 - DNA, 120 bp, Artificial Sequence
  ENSG00000143450_30 (sequence is synthesized)
ctattttgctacagccctaccctgccactccactaatttccataagctgtctaggcccctgaaggggcctagacaattagtttgcaattcctaccctacaaggatcctgggttattaagg

SEQ ID NO: 379854 - DNA, 120 bp, Artificial Sequence
  ENSG00000143450_31 (sequence is synthesized)
gtagggatgataataaaaatactcaactggtatgaactgggaaccaactaatcaggtcaccactggatcagagccttggaagagtcagataccaactctttacttgctggattttggggg

SEQ ID NO: 379855 - DNA, 120 bp, Artificial Sequence
  ENSG00000143450_32 (sequence is synthesized)
aaggggagtgtccacagaggagcagggtgggtgggcacaagtgctcaggcagggcttttggccaaccagtacagaagtcttcaagttctattttttaatcattcatacagccataacatg

SEQ ID NO: 379856 - DNA, 120 bp, Artificial Sequence
  ENSG00000143450_33 (sequence is synthesized)
catactagtcgaatatgagccttggataagggattagggtagataagcagcagagtggagtcctgaggtgacataagggctgaccccttatccatgtcatagtgcccactgggtcacaat

SEQ ID NO: 379857 - DNA, 120 bp, Artificial Sequence
  ENSG00000143450_34 (sequence is synthesized)
ccacgaccagcttaaagaactgtattcggtaagtggactgtgagctagtgctgtgacagggcaacccttttcttgcataccttgcagaggagggacattagcaagttggaagatgaatta

SEQ ID NO: 379858 - DNA, 120 bp, Artificial Sequence
  ENSG00000143450_35 (sequence is synthesized)
cagaggtagatggaatcttggaacgcatgtgtaaaagctacttgctatatagacaagcattctggcccacagactgtaaaatcaaggtcatacagatggtagtgaaaatcaggattggga

SEQ ID NO: 379859 - DNA, 120 bp, Artificial Sequence
  ENSG00000143452_0 (sequence is synthesized)
gaccgttgaaggaaagcgcatgcgcgtcgggcacagcgcgtgcagcctcgtgcagctcttctggtctccggcgcccgcccctcagacgtaatgttgaattaaagaaaatactttatcaga

SEQ ID NO: 379860 - DNA, 120 bp, Artificial Sequence
  ENSG00000143452_1 (sequence is synthesized)
agaagatggccactgcccagttgcagaggactcccatgagtgcactggtatttcccaataagatatcaactgaacaccagtctttggtgttagtgaagaggcttctagcagtttcagtat

SEQ ID NO: 379861 - DNA, 120 bp, Artificial Sequence
  ENSG00000143452_2 (sequence is synthesized)
cctgtatcacgtatttgaggggaatattcccagaatgcgcttatggaacaagatatctagatgatctttgtgtcaaaatactgagagaagataaaaattgcccaggatctacacagttag

SEQ ID NO: 379862 - DNA, 120 bp, Artificial Sequence
  ENSG00000143452_3 (sequence is synthesized)
tgaaatggatgctaggatgttatgatgctttacagaaaaaatatctaaggatggttgttctagctgtatacacaaacccagaagatcctcagacaatttcagaatgttaccaattcaaat

SEQ ID NO: 379863 - DNA, 120 bp, Artificial Sequence
  ENSG00000143452_4 (sequence is synthesized)
tcaaatacaccaataatggaccactcatggacttcataagtaaaaaccaaagcaacgaatctagcatgttgtctactgacaccaagaaagcaagcattctcctcattcgcaagatttata

SEQ ID NO: 379864 - DNA, 120 bp, Artificial Sequence
  ENSG00000143452_5 (sequence is synthesized)
tcctaatgcaaaatctggggcctttacctaatgatgtttgtttgaccatgaaacttttttactatgatgaagttacacccccagattaccagcctcccggttttaaggatggtgattgtg

SEQ ID NO: 379865 - DNA, 120 bp, Artificial Sequence
  ENSG00000143452_6 (sequence is synthesized)
aaggagttatatttgaaggggaacctatgtatttaaatgtgggagaagtctcaacaccttttcacatcttcaaagtaaaagtgaccactgagagagaacgaatggaaaatattgactcaa

SEQ ID NO: 379866 - DNA, 120 bp, Artificial Sequence
  ENSG00000143452_7 (sequence is synthesized)
gaaactaaaatggaagaacaggaaaaaaaccctgcatcttctgaacttgaagaaccaagtttagtttgtgaggaagatgaaattatgaggtctaaagaaagtccagatctttctatttct

SEQ ID NO: 379867 - DNA, 120 bp, Artificial Sequence
  ENSG00000143452_8 (sequence is synthesized)
cattctcaggttgagcagttagtcaataaaacatctgaacttgatatgtctgaaagcaaaacaagaagtggaaaagtctttcagaataaaatggcaaatggaaatcaaccagtaaaatct

SEQ ID NO: 379868 - DNA, 120 bp, Artificial Sequence
  ENSG00000143452_9 (sequence is synthesized)
tccaaagaaaatcggaagagaagtcaacatgaatctgggagaatagtcctccatcactttgattcttctagtcaagagtcagtgccaaaaaggagaaagtttagtgaaccaaaggaacat

SEQ ID NO: 379869 - DNA, 120 bp, Artificial Sequence
  ENSG00000143452_10 (sequence is synthesized)
atataaaaattatttttgttctgcaggcttgcagagttcttctcaccatttaaactgaaggaccctatattatatttccctaactctgaagatgtatatgtagtttaaagcagtttgtac

SEQ ID NO: 379870 - DNA, 120 bp, Artificial Sequence
  ENSG00000143452_11 (sequence is synthesized)
actaaaactaagtttttggctgactgtcatattgtggtccttaatcttgagataaatccaatagaacttttgaataaaagcaaaagtacaaatgtcataattgattcggtaataagtaaa

SEQ ID NO: 379871 - DNA, 120 bp, Artificial Sequence
  ENSG00000143452_12 (sequence is synthesized)
atttcaaaattgattttgttcattacctacttaatatttcctttaaatatatactaactgttaaggccctctaatgccatttttctaaacagtaatgtttactttggtattaaaatttgg

SEQ ID NO: 379872 - DNA, 120 bp, Artificial Sequence
  ENSG00000143452_13 (sequence is synthesized)
tatggattcactttttacttatgttaaaattataccatttaactggctcttttgtcattgtgctgttattaaaacaatgttcttcaatattttgacataatgtattaacattttaatata

SEQ ID NO: 379873 - DNA, 120 bp, Artificial Sequence
  ENSG00000143452_14 (sequence is synthesized)
taatgtacaatttaagaattggtgctttacctttactatgcttttttttacaggacaaaaagactgatttttaaagtatggcattttttgcagcataaataaaatattgttcagtacgta

SEQ ID NO: 379874 - DNA, 120 bp, Artificial Sequence
  ENSG00000143452_15 (sequence is synthesized)
tcccagaatgcgcttatggaacaagatatctagatggatgctaggatgttatgatgctttacagaaaaaatatgtatacacaaacccagaagatcctcagacaatttcagaatgttacca

SEQ ID NO: 379875 - DNA, 120 bp, Artificial Sequence
  ENSG00000143452_16 (sequence is synthesized)
tatgtaagtcttgcaatctctttatccttttttttctacagtttatgatctacaaatataactggagttatgatgtagtaaaacattcatttgaactaacttgagtgtaggtcagtctga

SEQ ID NO: 379876 - DNA, 120 bp, Artificial Sequence
  ENSG00000143452_17 (sequence is synthesized)
attactgaaaagcctaaacatttgaatattttaaagactaatcatcaactcatttaaagataatggaattaacactaaacaaatttttccaagctagtttttttaacacttatttgtatt

SEQ ID NO: 379877 - DNA, 120 bp, Artificial Sequence
  ENSG00000143452_18 (sequence is synthesized)
aataacacgtgttaacttacaaaaaagttaatgaattaaagagtcttttcaaatagtttattcattagtttcacatgccttctacaagcttgtttatactaataatttaataaattattt

SEQ ID NO: 379878 - DNA, 120 bp, Artificial Sequence
  ENSG00000143452_19 (sequence is synthesized)
agtcaacatgaatctgggagaatacagccctactgaagattatacattttgcaagtacatactttcagcagccattggaagatgttaataataaattttactctacttttaagaaaccca

SEQ ID NO: 379879 - DNA, 120 bp, Artificial Sequence
  ENSG00000143457_0 (sequence is synthesized)
gtgttattccttctctgcatcgaaggatcaggaagtttgtgctctctgcgtggctaagtttttcacctactaggacgggggtggggtggggagaacaggtgtccttctaaaatacagcac

SEQ ID NO: 379880 - DNA, 120 bp, Artificial Sequence
  ENSG00000143457_1 (sequence is synthesized)
aagctacagcctgcgtccagccataacccaggagtaacatcagaaacaggtgagaatgaccactttaactcaccgggcccgtcgcactgaaataagcaagaactctgaaaagaagatgga

SEQ ID NO: 379881 - DNA, 120 bp, Artificial Sequence
  ENSG00000143457_2 (sequence is synthesized)
aagtgaggaagacagtaattgggagaaaagtccagacaatgaagattctggagactctaaggatatccgccttactcttatggaagaagtattgcttctgggactaaaagataaagaggg

SEQ ID NO: 379882 - DNA, 120 bp, Artificial Sequence
  ENSG00000143457_3 (sequence is synthesized)
gtacacatctttctggaatgactgcatatcatcaggcctgcgagggggcatcctgatagagctggccatgcggggtcgaatctatctggaacccccgaccatgcgtaagaagcgactact

SEQ ID NO: 379883 - DNA, 120 bp, Artificial Sequence
  ENSG00000143457_4 (sequence is synthesized)
agacagaaaggtactgctaaagtcagacagcccaacaggtgatgttttactggatgaaactctgaaacacatcaaagcaactgaacccacagaaactgtccaaacatggatagagctact

SEQ ID NO: 379884 - DNA, 120 bp, Artificial Sequence
  ENSG00000143457_5 (sequence is synthesized)
cactggtgagacctggaaccccttcaaattacagtaccagctgagaaatgtacgagagcgcatcgcaaagaacctagtagagaaaggtattctaaccactgagaagcagaatttcctgct

SEQ ID NO: 379885 - DNA, 120 bp, Artificial Sequence
  ENSG00000143457_6 (sequence is synthesized)
atttgacatgactactcatccagtgaccaatacaacagagaaacagcgactagtgaaaaaacttcaagatagtgtactagagcggtgggtaaatgaccctcagcgtatggacaagcgaac

SEQ ID NO: 379886 - DNA, 120 bp, Artificial Sequence
  ENSG00000143457_7 (sequence is synthesized)
actagcactcctggtgctagcccactcctctgatgtgctagagaatgtcttctcctctctgacagatgacaagtatgatgtggcaatgaatcgagccaaggacttagtagaactggaccc

SEQ ID NO: 379887 - DNA, 120 bp, Artificial Sequence
  ENSG00000143457_8 (sequence is synthesized)
tgaagtggaagggacaaagcctagtgccacagaaatgatctgggctgtgctggcagccttcaataaatcttaaagccggcaggtggatttctccttttcccctgctggctggtgactgtc

SEQ ID NO: 379888 - DNA, 120 bp, Artificial Sequence
  ENSG00000143457_9 (sequence is synthesized)
agagaccccatcactgagttttgtgtgatgagatgttttcatcatttttgtttccttttcttgaatcagacttgtgatttggggagagcaacttcagggcttctccatagaccttgacca

SEQ ID NO: 379889 - DNA, 120 bp, Artificial Sequence
  ENSG00000143457_10 (sequence is synthesized)
ttataagcagaccttatttctccctacacttccactccataggtaaataaactgggtgaagccacacacacccaatgaacattttctcccatttggtggtttagtttcacccagtgtgct

SEQ ID NO: 379890 - DNA, 120 bp, Artificial Sequence
  ENSG00000143457_11 (sequence is synthesized)
tttggataagcagaaatatctaaatgggattttgagttctccagctatagaatgtgaatgagataaaaagtgaactatctattatatttttctgagtttgttttctatcataaatacatg

SEQ ID NO: 379891 - DNA, 120 bp, Artificial Sequence
  ENSG00000143457_12 (sequence is synthesized)
ttttcacagcctttgtctctcagactctgctaaataatgtagcttattgaaataactgtcgctgaataaggagcaatgagaaacaaaactaatttttggagcagatggtctctggaattg

SEQ ID NO: 379892 - DNA, 120 bp, Artificial Sequence
  ENSG00000143457_13 (sequence is synthesized)
tcctgctagtgattttctcatctttccttttctaacctaatgagaatgtcccagattcaattacctggatgtcaaagtcctagagccagaaatatattctctcatccctcttagcattct

SEQ ID NO: 379893 - DNA, 120 bp, Artificial Sequence
  ENSG00000143457_14 (sequence is synthesized)
cttgctccctcattcactagggcaaatgtctaaatgaagaaaagtctctctcaacacctcgttcatgcaatcagcattagaatttgtaaggaaggaaggggggtggcatgaaaatttcca

SEQ ID NO: 379894 - DNA, 120 bp, Artificial Sequence
  ENSG00000143457_15 (sequence is synthesized)
ttcttggggtatatgactgtcctgtttcccccaggccactttttttttttttttcttttgagacagggtcttgctcttgcccaggcaggagtacagtagtgcaatcacagctgactgcag

SEQ ID NO: 379895 - DNA, 120 bp, Artificial Sequence
  ENSG00000143457_16 (sequence is synthesized)
ccttgacctccagggctcaaggatcctcctgcctcagtctcccaactaagtgggactacaggcacgtgccaccatactcagcttttttttgtttgttttagacaagagtctcgctttgtt

SEQ ID NO: 379896 - DNA, 89 bp, Artificial Sequence
  ENSG00000143457_17 (sequence is synthesized)
tggcttgagccactgcacccacccctccagactactttaaatgtctctgctctgactgaattgaaggaattgtaagtttcagttgctga

SEQ ID NO: 379897 - DNA, 120 bp, Artificial Sequence
  ENSG00000143457_18 (sequence is synthesized)
ctctgactgaattgaaggaattgtaagtttcagttgctgaatatatcagtatatctgaactccagatctttttatttcctatttttggcttcctacataaattaataaagtctgtctata

SEQ ID NO: 379898 - DNA, 120 bp, Artificial Sequence
  ENSG00000143457_19 (sequence is synthesized)
tttaaggtttctgggagtagttttgtctatatttaatccatagatgtgctcctagtcatcagtcttatttcagtaaaaccatctttctggccaaatctctaacacgttttttacttcagt

SEQ ID NO: 379899 - DNA, 120 bp, Artificial Sequence
  ENSG00000143457_20 (sequence is synthesized)
agtgagggcaatgagaagctttattaagaaagatcctatttaaagggctaatttggtattgaaagcatgctgatataaagtccagtatttgaggatataaagaggatgtgcactgagctg

SEQ ID NO: 379900 - DNA, 120 bp, Artificial Sequence
  ENSG00000143457_21 (sequence is synthesized)
tgctgatgttcagcatttattatactttaatgggatagtgcttcttgaccattatagaacaacaaactgtcaaagggttaatacagatgacccagacctgacattaaatcctcttgatta

SEQ ID NO: 379901 - DNA, 120 bp, Artificial Sequence
  ENSG00000143457_22 (sequence is synthesized)
gaaataattaaatgaattatttattcatttctctcctctgccaaatctacttagccccacaaaaatgccccagctcagttaacatttttttgtttttcactttaggtatctcttaggcaa

SEQ ID NO: 379902 - DNA, 120 bp, Artificial Sequence
  ENSG00000143457_23 (sequence is synthesized)
atagagatataaattgtaataggaaacagtctctaaatgtgaggctgaatacagcttcagtctggctctctaataggacaaaagccagtccatgtgttgtctctaactgatttagctttt

SEQ ID NO: 379903 - DNA, 120 bp, Artificial Sequence
  ENSG00000143457_24 (sequence is synthesized)
tcttttctttgaacaattcggcatgaattgaaaccaggttttcctgtggaaagttatagcttgattgggagatagaagttgaattgagttctttcttgcaactcttagtgtttattttta

SEQ ID NO: 379904 - DNA, 120 bp, Artificial Sequence
  ENSG00000143457_25 (sequence is synthesized)
tatctcagtaagacgaggataccttcagtttgaatctgcataatgttcactgccaaactccttctcatttaatgcttatggccttcacatttctgtataataaagatcaattatcagctc

SEQ ID NO: 379905 - DNA, 120 bp, Artificial Sequence
  ENSG00000143457_26 (sequence is synthesized)
tatctcaaagactattaaatattggaatgttttaggaagtaacctaatggaatatatttaataataaattggtcttagaattgtgctctaaccatctggaagatggaggagttgggacag

SEQ ID NO: 379906 - DNA, 120 bp, Artificial Sequence
  ENSG00000143458_0 (sequence is synthesized)
gccattttgttgcctctgtttctccacgagggggggttaaaggcccccaaaacatgcacacatgaaaagggcaaaaagtaaccgtccttgacagggagtcttaactagagaaggaaacgg

SEQ ID NO: 379907 - DNA, 120 bp, Artificial Sequence
  ENSG00000143458_1 (sequence is synthesized)
gactaaactggcgggctccgtggaagcgtggccggcagcgtcccggacgaggagatgtctttggtggacttgggaaagaggttgctagaagcagcaagaaaaggccaagatgatgaagtg

SEQ ID NO: 379908 - DNA, 120 bp, Artificial Sequence
  ENSG00000143458_2 (sequence is synthesized)
agaacgttgatggcaaatggcgccccattcaccacagactggcttggaacatcacccctccaccttgcagctcaatatggtcattattccacagcagaagtactccttcgagcaggtgtt

SEQ ID NO: 379909 - DNA, 120 bp, Artificial Sequence
  ENSG00000143458_3 (sequence is synthesized)
agcagggatgcccggactaaagtagacaggacccccttgcacatggctgcagccgatggacatgcgcacatcgtggaactgcttgttcggaatggtgcagatgtgaatgccaaggacatg

SEQ ID NO: 379910 - DNA, 120 bp, Artificial Sequence
  ENSG00000143458_4 (sequence is synthesized)
ctgaagatgacagctttgcattgggccacagagcgccaccatcgagatgtcgtagagttacttatcaaatatggagctgatgtccatgctttcagcaaatttgataaatcagcctttgac

SEQ ID NO: 379911 - DNA, 120 bp, Artificial Sequence
  ENSG00000143458_5 (sequence is synthesized)
atagctctggagaaaaacaatgctgagattttggtcatcctccaggaagcaatgcagaatcaggtgaatgttaatccagagagagccaaccctgtgactgaccctgtgagtatggctgct

SEQ ID NO: 379912 - DNA, 120 bp, Artificial Sequence
  ENSG00000143458_6 (sequence is synthesized)
ccattcatcttcacgtcgggtgaggttgttaacctcgcaagccttatttcttcaaccaacaccaaaacaacctcaggtgacccccatgcctcaacagtacagttttcaaattctaccacc

SEQ ID NO: 379913 - DNA, 120 bp, Artificial Sequence
  ENSG00000143458_7 (sequence is synthesized)
tcagtgctggctacccttgcagctcttgctgaggcatcagtccccctctccaactcacacagagccacagccaatacagaggaaattatagaaggaaattccgttgactcatcaatccag

SEQ ID NO: 379914 - DNA, 120 bp, Artificial Sequence
  ENSG00000143458_8 (sequence is synthesized)
caagtaatggggagtggaggccagagggtcatcaccatagtgactgatggagtccctctgggtaatatccaaacttcaatccctactggaggcattggccagccatttattgtaactgtg

SEQ ID NO: 379915 - DNA, 120 bp, Artificial Sequence
  ENSG00000143458_9 (sequence is synthesized)
caagatggacagcaagttctaactgtacctgctggtaaggttgcagaggagactgtaattaaagaggaagaagaagagaagttgccactaacaaagaaaccaaggataggagagaagaca

SEQ ID NO: 379916 - DNA, 120 bp, Artificial Sequence
  ENSG00000143458_10 (sequence is synthesized)
aacagtgtggaggaaagcaaggaaggcaatgaaagagagctactacagcaacaactccaggaggccaatcgaagagcccaggaataccgacaccagctcctaaagaaagagcaggaagca

SEQ ID NO: 379917 - DNA, 120 bp, Artificial Sequence
  ENSG00000143458_11 (sequence is synthesized)
gaacagtaccgtcttaagctggaggccatagcccgacagcagcccaatggagttgatttcaccatggttgaagaggtggctgaggtagatgctgtagtagtcacagagggggagttggaa

SEQ ID NO: 379918 - DNA, 120 bp, Artificial Sequence
  ENSG00000143458_12 (sequence is synthesized)
gagagagagacaaaagtgactgggtcagcagggaccacagagcctcacactagagtttccatggcaactgtttcatcttaatatgcaagggccacaatttgcactgtgttcatattaatc

SEQ ID NO: 379919 - DNA, 120 bp, Artificial Sequence
  ENSG00000143458_13 (sequence is synthesized)
ctcttttaaaaaaggaaatatacagaagacaaacattgtataaaaactaagagtgtctttaagaagaaaactatagcagggtacaatgcttgggctcaggaagtttctctgtgcaactag

SEQ ID NO: 379920 - DNA, 120 bp, Artificial Sequence
  ENSG00000143458_14 (sequence is synthesized)
aaaattcaaagccatatttagggaacattttttctgaggggccaaaagaataaaggaccaaatttcttagctcatatcattgctttaaacatagaagtaaaagaatactgcatgttgtgg

SEQ ID NO: 379921 - DNA, 120 bp, Artificial Sequence
  ENSG00000143458_15 (sequence is synthesized)
gttgattttttttttttaaataactgactttctcacaaaagattttaagataacatttctaatatatatgcaccaatatatatgcctttaataattataccatcaagtgacctgaaaatg

SEQ ID NO: 379922 - DNA, 120 bp, Artificial Sequence
  ENSG00000143458_16 (sequence is synthesized)
ccccttagatttatgatgcgtatctgttggaaaaaccaattggaagggaagttagacaagctttggggaagagaaaaggaatatagtccatttccaaaggagcaggaactcccaacctta

SEQ ID NO: 379923 - DNA, 120 bp, Artificial Sequence
  ENSG00000143458_17 (sequence is synthesized)
tccaaaggagcaggaactcccaaccttaagttaatttcactgaagagaattttccctttttttttttttttttgagacacggtctgactctgtcacccaggctagagtacagtggtgcaa

SEQ ID NO: 379924 - DNA, 120 bp, Artificial Sequence
  ENSG00000143458_18 (sequence is synthesized)
gggcgcagcctcctgagtagctgggaggacaggcatatgccaccacatcactgagaagaaatttttgattgtctgacagatacttatccattatgtgtctatagttcagatgcttgtgta

SEQ ID NO: 379925 - DNA, 120 bp, Artificial Sequence
  ENSG00000143458_19 (sequence is synthesized)
ctcacacctgtaatcccaacactttgggacgttgaaatgggagaattgcttgagtccaggagtttgagatgcgcctgggcaacatagaaacctgtgtctacaaaaaatttaaaaattagc

SEQ ID NO: 379926 - DNA, 90 bp, Artificial Sequence
  ENSG00000143458_20 (sequence is synthesized)
agtccaggagtttgagatgcgcctgggcaacatagaaacctgtgtctacaaaaaatttaaaaattagccaagtatggtgacaggcaccta

SEQ ID NO: 379927 - DNA, 120 bp, Artificial Sequence
  ENSG00000143458_21 (sequence is synthesized)
ttggaggtcaaaactgcagtgagccatggttgcaccactgctctccaggcttgagtgacagagcaagactgtatctcaaaggaaaaaggaaactaggccaggcgtggtggctcacgcctg

SEQ ID NO: 379928 - DNA, 62 bp, Artificial Sequence
  ENSG00000143458_22 (sequence is synthesized)
gaggcagaggcaggcggatcacaaggtcaagagattaagatcaagtggcacacgcctgtagt

SEQ ID NO: 379929 - DNA, 76 bp, Artificial Sequence
  ENSG00000143458_23 (sequence is synthesized)
attgaaatagagtttttaaaaactgaactggaaagccgaggcgagcggatcacctgaggccaggagttccagacca

SEQ ID NO: 379930 - DNA, 63 bp, Artificial Sequence
  ENSG00000143458_24 (sequence is synthesized)
ggaaattgaaatagagtttttaaaaactgaactggaaagccgaggcgagcggatcacctgagg

SEQ ID NO: 379931 - DNA, 67 bp, Artificial Sequence
  ENSG00000143458_25 (sequence is synthesized)
tactaaaaatacaaaaattcacctggcgaggtggcaggcacctggaatcccagctactcgggaggct

SEQ ID NO: 379932 - DNA, 88 bp, Artificial Sequence
  ENSG00000143458_26 (sequence is synthesized)
aatacaaaaattcacctggcgaggtggcaggcaggtagaatcacttgaacccaggtgacagaggttgcagtgatccaagatcatgcca

SEQ ID NO: 379933 - DNA, 120 bp, Artificial Sequence
  ENSG00000143458_27 (sequence is synthesized)
ctccaacctgggcaacaagagtgaaactcaattaaaaaaaaaatagaaaagaaagaaaacttgtttatgtgggaggagtatatataaaaccaaaatccaggctgtgtttccacagtgctg

SEQ ID NO: 379934 - DNA, 120 bp, Artificial Sequence
  ENSG00000143458_28 (sequence is synthesized)
gctgtgtttccacagtgctgggaagtggccagaaaaaggcttataggggctatgaaactctggtcttgacatataaactttgctctgactggatttcataaaattacagtgaggagggta

SEQ ID NO: 379935 - DNA, 120 bp, Artificial Sequence
  ENSG00000143458_29 (sequence is synthesized)
tgctctgactggatttcataaaattacagtgaggagggtagtctcttgtcagaaaaacttgtttccaaacatttatgtaatgtcaagctcagtctctcttttttttttttttttttttga

SEQ ID NO: 379936 - DNA, 120 bp, Artificial Sequence
  ENSG00000143458_30 (sequence is synthesized)
ttaggacatattgtgcttttctgtggagcttatatcttatcctcttatgtgcaacaaaaagggggtcggaggtaaatgctgatgatgttgtttagttttatttccttttgatctggcatg

SEQ ID NO: 379937 - DNA, 120 bp, Artificial Sequence
  ENSG00000143458_31 (sequence is synthesized)
agtaaattgctctgtttccttaagcttgggtctgttacagagctttgtgccttatagggtgctcagtgtgtgttgacaaagggaataagaactgtcagtgccataaagaaccaaagattc

SEQ ID NO: 379938 - DNA, 120 bp, Artificial Sequence
  ENSG00000143458_32 (sequence is synthesized)
aaagattctggctactttgtcttcttcctttctctcccactatgcctacacttcctctgcccagacacttttggaaagtgtttaactgctgggttttctttttctttttctttttttttt

SEQ ID NO: 379939 - DNA, 120 bp, Artificial Sequence
  ENSG00000143458_33 (sequence is synthesized)
ggattataggcgtgagccactgcgcctgaccacctacctgctgggttttctttgtatgtcagcatggagtttttcccaaagaaagggaatatggatggagagagagaggttatgaacagg

SEQ ID NO: 379940 - DNA, 120 bp, Artificial Sequence
  ENSG00000143458_34 (sequence is synthesized)
caggttatgttacagaggttattgcctttgaaactgggccctcatcattctagacttgcttgctttgttataaattagaagaaaccagagggagatgtgccaagtaaacattcgaatgac

SEQ ID NO: 379941 - DNA, 120 bp, Artificial Sequence
  ENSG00000143458_35 (sequence is synthesized)
tgtttagaatatggttttcttaattagcagtcatggggaaaacatgcatttttaatttggaaaaaacctgacagttaacatggttctgtttaccttgattagtgaagtaatttgctgcag

SEQ ID NO: 379942 - DNA, 120 bp, Artificial Sequence
  ENSG00000143458_36 (sequence is synthesized)
tgttacagaggagcagaatcacttgggtctcaaaatagactgaaaatttaactccccaaaccaaatttaacaaacagaattggttattagagatttataggcaaaaatatcagtttggaa

SEQ ID NO: 379943 - DNA, 120 bp, Artificial Sequence
  ENSG00000143458_37 (sequence is synthesized)
attaaccttggctactggccaccttagctaggttttctccacagatctgttttctccacagatctgagtacttaacacttcccagatgattggagaatattctgggctgttggggatgac

SEQ ID NO: 379944 - DNA, 120 bp, Artificial Sequence
  ENSG00000143458_38 (sequence is synthesized)
aggaaaatgtgagggggagtagcctaggtaagggtgatgatgaaattgttctatctgctgtcaaataatcttttcctgtttgcaatgtttttattttttctgagtccctttgggaaccag

SEQ ID NO: 379945 - DNA, 120 bp, Artificial Sequence
  ENSG00000143458_39 (sequence is synthesized)
gtgctaacaagaagctgttatgtgtgggatttcggagccttactttaacgatagaggaaccaagtatcattttagatatcttttatttatgttctcggtgcatatgttgactttaatccc

SEQ ID NO: 379946 - DNA, 120 bp, Artificial Sequence
  ENSG00000143458_40 (sequence is synthesized)
tcttcccccacacctcgcccattaaggggaaggaggttaactctgcagatgatattcaggcccaaccagctcactctctggggtggctactgactaaaggcagagaatgtccatccaaca

SEQ ID NO: 379947 - DNA, 120 bp, Artificial Sequence
  ENSG00000143458_41 (sequence is synthesized)
tgcccttctgactatacagtcaccacttttttgggggaattctttagcagatcttattgttctttctgcagaagctatcattcctacctccccaacccccaaaatctctaatacaggcca

SEQ ID NO: 379948 - DNA, 120 bp, Artificial Sequence
  ENSG00000143458_42 (sequence is synthesized)
agtcattttttatgatgggtctctgagatagggcagtttgttagaggagaggctagggtagagagggagagaatggaggtatctgaaaataagtaagaaaaaggcattgatttttattta

SEQ ID NO: 379949 - DNA, 120 bp, Artificial Sequence
  ENSG00000143458_43 (sequence is synthesized)
ctcggaacggtcctcttggcatcccagataagggaaataggatttgatctccaattgtattgccatggagagaatggcaggtgaggatgctttgaagtagttagaaattaaatattgaat

SEQ ID NO: 379950 - DNA, 120 bp, Artificial Sequence
  ENSG00000143458_44 (sequence is synthesized)
acattaatggcaataccatttcatgactttgcatatctttctggattagtcatggaagttggggaaatattgcttagatcttctgggttagaggattccaactgtttattggcaaggttg

SEQ ID NO: 379951 - DNA, 65 bp, Artificial Sequence
  ENSG00000143458_45 (sequence is synthesized)
ttctgggttagaggattccaactgtttattggcaaggttggattattaagaatcaaatagcagac

SEQ ID NO: 379952 - DNA, 67 bp, Artificial Sequence
  ENSG00000143458_46 (sequence is synthesized)
ctgtctctaccaaaatacaaaaattagttgggcatgatggcatcaaaaggtggagtttacagtgagc

SEQ ID NO: 379953 - DNA, 120 bp, Artificial Sequence
  ENSG00000143458_47 (sequence is synthesized)
gaaagaaagaaaaaacagacaaatggatcagaattggtgcttgagcaagagaaacttcgagcttaggatggttgtctactttaaaataaagctgctggccgggcacagtggctcacgcct

SEQ ID NO: 379954 - DNA, 80 bp, Artificial Sequence
  ENSG00000143458_48 (sequence is synthesized)
cagagcttgcagtgagctgagatcgccccactgcaacagatcgcctgggcaacagaatgagactcgtaaagctgctggcc

SEQ ID NO: 379955 - DNA, 66 bp, Artificial Sequence
  ENSG00000143458_49 (sequence is synthesized)
tcacttgaggccaggccagccatcatcatactggtgagaaaaaaaaaaaaaaaaaagaggccgggc

SEQ ID NO: 379956 - DNA, 120 bp, Artificial Sequence
  ENSG00000143458_50 (sequence is synthesized)
tttctcaccagtatgatgatgaccattttaagaaagcttgtgtggctctctcctatcattacagacctccagagctggaaaatttgatgcatttactgaactcttcctgaaagtttaata

SEQ ID NO: 379957 - DNA, 120 bp, Artificial Sequence
  ENSG00000143458_51 (sequence is synthesized)
tggagtgggaatcagtttttgtcctaatttattagagaaggcttcctcttctctactccttgtgcaaacccatctctggatagctagaaaaggaacttcagaatggactatatgtgatga

SEQ ID NO: 379958 - DNA, 120 bp, Artificial Sequence
  ENSG00000143458_52 (sequence is synthesized)
ccacctgtatgcactctaggctcttatctgtctctattttatgtggtgactatatctcagaagtactaccccttctgagtagtactattatttcctatgccaattttttttaagtctctg

SEQ ID NO: 379959 - DNA, 120 bp, Artificial Sequence
  ENSG00000143458_53 (sequence is synthesized)
atgctgccctttttaaatttttgtcttattttttagcctctttagtattagggggtgaggtgacattcctagactctacagtagcagtttggcatgttagtgacaggaaattgtgattcc

SEQ ID NO: 379960 - DNA, 120 bp, Artificial Sequence
  ENSG00000143458_54 (sequence is synthesized)
ctatctccccctcctcctaccttttctgcttttgtgattccattgttcctatctcattgaggctttcccaggcattcgaatttagttagtaggtcatttctaatctctgggccttgtctt

SEQ ID NO: 379961 - DNA, 120 bp, Artificial Sequence
  ENSG00000143458_55 (sequence is synthesized)
ttctctctccgttcccctccttccctaccacatattttttgtttattctgaggtggtttgtttctgaaagttaatctaggtcaccttctatatcctgtgctttctagttggctttagaca

SEQ ID NO: 379962 - DNA, 120 bp, Artificial Sequence
  ENSG00000143458_56 (sequence is synthesized)
tcttgttctagcaacaatgatggtagcagctctctccctgaccttgccccatgtgctgtccttctgtcaaggccatttgtgtgtgtactgcggcaggtgtgtgtgtggggggatgcgccc

SEQ ID NO: 379963 - DNA, 120 bp, Artificial Sequence
  ENSG00000143458_57 (sequence is synthesized)
agactgttctcacaatgtcctcagtttttcaggttgtctgacagctttatgtacagcgtatttttagaaaaacttaaatatacttctttatttagggttttattctgatgagcaagtttg

SEQ ID NO: 379964 - DNA, 120 bp, Artificial Sequence
  ENSG00000143458_58 (sequence is synthesized)
tgtgtatatgtgtgtatgagcatttgtatgtatatatacttatacagatctatattatatatacagtttttgtactatcatttaaaataaaaatgtttctcaataaaatgtcaaagccga

SEQ ID NO: 379965 - DNA, 120 bp, Artificial Sequence
  ENSG00000143458_59 (sequence is synthesized)
agtcctgcctagcatgcctcggtgacgcacttttccacctcagaagtgcctcagcagaaaggcgatgaacctcgggggtgcatcatctttctgttagaatgggagcatgagttttctgat

SEQ ID NO: 379966 - DNA, 120 bp, Artificial Sequence
  ENSG00000143458_60 (sequence is synthesized)
tgctcagtcacccaggctggagtgcagtgatcatagctcatcgcatccttgaactcctgggcttaagctatcctcccgccttagcctcctgaatagctaggaccacagatgtctttggtg

SEQ ID NO: 379967 - DNA, 120 bp, Artificial Sequence
  ENSG00000143469_0 (sequence is synthesized)
atggcgagcgcatcatggcgattgaaggtggagagagaacctgtggagtacatgaacttatctgtattagaaaagtatctccagaggcagttggatttttgtcagctgttggggtgttta

SEQ ID NO: 379968 - DNA, 120 bp, Artificial Sequence
  ENSG00000143469_1 (sequence is synthesized)
ttatcttgatgctgctcctttttctctatattaataagaagttctgttttgaaaatgttggcgggtttccagatcttggttcagaatacagtacaaggaagaattcacaagataaaattt

SEQ ID NO: 379969 - DNA, 120 bp, Artificial Sequence
  ENSG00000143469_2 (sequence is synthesized)
ataattcctacatggacaaagatgagcatggttcatcctctgaaagtgaagatgaagcgctgggtaaatatcatgaggccttatccagaacacacaattccagactaccactggcagatt

SEQ ID NO: 379970 - DNA, 120 bp, Artificial Sequence
  ENSG00000143469_3 (sequence is synthesized)
ctagacaaaggaactatgcttgggaaacaaggcagaaatacagtcctctatcggcagagtatgatggatacagtagtgaagcatcaatagatgaaggaaactgcattcagagaatgagaa

SEQ ID NO: 379971 - DNA, 120 bp, Artificial Sequence
  ENSG00000143469_4 (sequence is synthesized)
gaacacccccgctggatgaattgcagccaccaccatatcaggatgacagtggttctccccatctgtcatgtacaccctcagaaattggggacagtaaatgtgaattttcccactgcagca

SEQ ID NO: 379972 - DNA, 120 bp, Artificial Sequence
  ENSG00000143469_5 (sequence is synthesized)
acagtccaagatgctcatataacaagtgcccaagtgaaggaagcacaggtcatgaaatagaaagttttcataataaaggatatgaagaagatgttccaagtgacagcactgcagtcctga

SEQ ID NO: 379973 - DNA, 120 bp, Artificial Sequence
  ENSG00000143469_6 (sequence is synthesized)
gccctgaagatatgtcagctcaaggatcatcttcgcagcttcctaaaccttttgatcctgagccagaagctaaatatggcacactggatgtgacttttgactatgactcacaagaacaga

SEQ ID NO: 379974 - DNA, 120 bp, Artificial Sequence
  ENSG00000143469_7 (sequence is synthesized)
agcttctggtaacagtgacagctgtcacagacatcccaacatataacaggacaggtggcaactcatggcaagtacaccttgttcttctacctataaagaaacagagagcaaaaaccagca

SEQ ID NO: 379975 - DNA, 120 bp, Artificial Sequence
  ENSG00000143469_8 (sequence is synthesized)
tccagagaggaccatgccctgtcttcacagaaacatttaaatttaatcatgttgaatctgagatgattggaaattatgcagttcggtttagactgtatggtgtacatcgcatgaaaaaag

SEQ ID NO: 379976 - DNA, 120 bp, Artificial Sequence
  ENSG00000143469_9 (sequence is synthesized)
aaaagattgtgggggaaaagattttttatttaacaaaattgaatcttcaagggaaaatgtcattgcctgtgatattggaaccttcttacaatcattctggctgtgactcccaaatgagcg

SEQ ID NO: 379977 - DNA, 120 bp, Artificial Sequence
  ENSG00000143469_10 (sequence is synthesized)
tgtcagaaatgtcgtgtagtgaaagtacatcctcatgtcagtctcttgaacatggctcagttccagaaattcttattggcctgctttataatgccacaactggaagactatcagcagaag

SEQ ID NO: 379978 - DNA, 120 bp, Artificial Sequence
  ENSG00000143469_11 (sequence is synthesized)
tgataaaaggcagccacttcaaaaatttggcagcaaacagaccacccaatacatatgttaagttaactctactgaattccatgggtcaagagatgtccaaatgcaagacatccatccgca

SEQ ID NO: 379979 - DNA, 120 bp, Artificial Sequence
  ENSG00000143469_12 (sequence is synthesized)
gtgtataacaaacgcagcatgaaaagaaaagagatgataggctggatttctttaggtctcaacagctctggagaagaagaactcaatcactggactgaaatgaaagagtcaaaaggacag

SEQ ID NO: 379980 - DNA, 120 bp, Artificial Sequence
  ENSG00000143469_13 (sequence is synthesized)
caagtatgtagatggcatgcgttgctagagtcatgatgaatagaataagcaagcagttaccatcaaaggcagcatatttccaattccaacattactgtttctaccaagtcccattagaag

SEQ ID NO: 379981 - DNA, 120 bp, Artificial Sequence
  ENSG00000143469_14 (sequence is synthesized)
agctgttctttgaagaatcatattcaaccttctaccaaaatgctttaagttctatggaaagaacgtctcatactgacataaatgaagaaaatatgtgtatctagtagagcttgtttagga

SEQ ID NO: 379982 - DNA, 120 bp, Artificial Sequence
  ENSG00000143469_15 (sequence is synthesized)
aactgagaaacgtacactatcattgctaaactaacagtcctccagaaatttaataagatgtttttgatttgaagttaattttaatttagcaaaagagccagtcattttatgaaaaatcaa

SEQ ID NO: 379983 - DNA, 120 bp, Artificial Sequence
  ENSG00000143469_16 (sequence is synthesized)
aattataagtgattttaaaaaccagaattttagttgcaatacaattttaatatcaccctacatattatttataaaacatagtttgactggccagtccctggtgtttgtaatgttctttaa

SEQ ID NO: 379984 - DNA, 120 bp, Artificial Sequence
  ENSG00000143469_17 (sequence is synthesized)
tatgaaaaagtagttctccaactctatcataagtcatatctaatggtgaagggtttcagtcacattgaaaattgttttatttcaggcatgttccctttgtgcacttaggttcattgtgcc

SEQ ID NO: 379985 - DNA, 120 bp, Artificial Sequence
  ENSG00000143469_18 (sequence is synthesized)
tcagttcctctcaaaagcactaaatctaagtgcaaacaagtattcattttcatacaggaatttttttaatatgttatttttttaaaagttcatttttcatttgcctccgctttcgcctga

SEQ ID NO: 379986 - DNA, 120 bp, Artificial Sequence
  ENSG00000143469_19 (sequence is synthesized)
tccaaagagaccaagtcactgtactggtcccttgcaagtcttctagacaggttgtactgtagaactacgtaactttctgttgaaagcacttcctgtattcttgtattccaatgtaggaag

SEQ ID NO: 379987 - DNA, 120 bp, Artificial Sequence
  ENSG00000143469_20 (sequence is synthesized)
ctaatagagcaggactttactttcaaatttctttcagtgattgactcttcaaaattgcagtagtgtgaaaatacattttttacaaactgaaaatacagtagataagctgtcgaaaatgga

SEQ ID NO: 379988 - DNA, 120 bp, Artificial Sequence
  ENSG00000143469_21 (sequence is synthesized)
aaacaattcaattttaattttctgctctgagtatttagtaaccaacactgcgtaaagcaggtagcattcaaaataagaaactgttctctctctaaatcttcactcttacttcaatttata

SEQ ID NO: 379989 - DNA, 120 bp, Artificial Sequence
  ENSG00000143469_22 (sequence is synthesized)
tttgtgatatgaagactatccagttctcagtttgaattggaacatcatgttaaaaacagttatgagattccttatgaagtttctagtaacttgtaactagactttatgaaattaacagat

SEQ ID NO: 379990 - DNA, 120 bp, Artificial Sequence
  ENSG00000143469_23 (sequence is synthesized)
aaagttcttcaacgtgatgtcatcttgtgcctttcatgtaagttaaatttgctcatacagcttgaacgttgtatttgcaaaattaagccttcgatttttataaatgtaaagattcctcag

SEQ ID NO: 379991 - DNA, 120 bp, Artificial Sequence
  ENSG00000143469_24 (sequence is synthesized)
ataatagctgtggagtgagaaaaaatgtcataacgtttaaaccaagtggtttgattttttttttccggaagaatctttacttcaacatatttctttcaatgcataatgtatttacagaaa

SEQ ID NO: 379992 - DNA, 120 bp, Artificial Sequence
  ENSG00000143469_25 (sequence is synthesized)
gattaaaagctacaatgtgaattgctaatattgagctgacgaatagcaacatttaagtaaatgttaaattcaagttccaaagtggttgatattttcagaagagaaaattccattattgca

SEQ ID NO: 379993 - DNA, 120 bp, Artificial Sequence
  ENSG00000143469_26 (sequence is synthesized)
ccttttaggaacaaggaattagaaaatggcatttttcagaaatttccaacagaatctgccttcagtgtcctctctagtagacacaatcagtagtgctgtagaggatttgaccactgctgt

SEQ ID NO: 379994 - DNA, 120 bp, Artificial Sequence
  ENSG00000143469_27 (sequence is synthesized)
tggggaggtcagctatgctttaactgactcagttgctgagcaggtaacaagtatgatgagtggctttcgcccagaagaggaaagctctgtagcagaagaagctgtagacacttctaaaca

SEQ ID NO: 379995 - DNA, 120 bp, Artificial Sequence
  ENSG00000143469_28 (sequence is synthesized)
aaaaaatgccgggttaacagaagtctccaaaaacactaattgtcagaaaacacaagccaatttagagcatagagcaaagcaaataaatacttgtaaaacttcactaaagcaagatcaagg

SEQ ID NO: 379996 - DNA, 120 bp, Artificial Sequence
  ENSG00000143469_29 (sequence is synthesized)
aatacatgaagaaagagtatttaaacatgttaatgataggcaacaaactctatcagaatatcaagacactggtaatactggtgattcttctttgaaaggctacatgaataatggtgggat

SEQ ID NO: 379997 - DNA, 120 bp, Artificial Sequence
  ENSG00000143469_30 (sequence is synthesized)
atcagttatcagacagaatacaagggctggatctatttgtcaagaacttgaaagtactgacagatgtaaaacaattggagtaggaatttccaataatggtaagaatgatttaaaggaggt

SEQ ID NO: 379998 - DNA, 120 bp, Artificial Sequence
  ENSG00000143469_31 (sequence is synthesized)
aggatatcaagaaatgaaaggaaatcagaagaatgccaacggaataaacaaattgtatgagcaaaagaaatatgttggtacagataattgtaaaaaggaggaatattctaaatctcgaca

SEQ ID NO: 379999 - DNA, 120 bp, Artificial Sequence
  ENSG00000143469_32 (sequence is synthesized)
tgtatatttgggaagagatcaagagaatatggggcatttcaataaatgtaaacatcttcccgatttagggcattcagatcatttaaagaaagctgaaaaatgtgttaaaagtaaagcatc

SEQ ID NO: 380000 - DNA, 120 bp, Artificial Sequence
  ENSG00000143469_33 (sequence is synthesized)
caaagggaatgagtgttcaggaaatgaatgttctttaaaagatattttgacaagcaataggcatatgacacagaaatctattataaaagaagacatacatccagcaccatcaactaattc

SEQ ID NO: 380001 - DNA, 120 bp, Artificial Sequence
  ENSG00000143469_34 (sequence is synthesized)
taaagataagttatctgggaaaattgaagaacaaataaattcaacgaaatactgtaaagtgaacgaagacataaaaccaaagaaaactgaggccatttctgccaagaaaggaacagcaaa

SEQ ID NO: 380002 - DNA, 120 bp, Artificial Sequence
  ENSG00000143469_35 (sequence is synthesized)
taactttttaatggcaaggcactttcatttgtttttatatttaggaactctaatcaggaatattataagctgttttctttttaattttgcttcttacctaatatatcattttatgcatat

SEQ ID NO: 380003 - DNA, 120 bp, Artificial Sequence
  ENSG00000143469_36 (sequence is synthesized)
actttatcagagtatgttttatatatattaaaaatagtttcttttttctccttctcatttctagttaaaatagacaaaaacatactatttaccagttactaaaaagcagtatatcattgc

SEQ ID NO: 380004 - DNA, 120 bp, Artificial Sequence
  ENSG00000143469_37 (sequence is synthesized)
ttctagtcccaactaagtactatatattattgtaaactagaacttgttattaccataataacaaaacaatgcgtagatattacttcagcttggctgtactgaaaggccttaaaagaaacc

SEQ ID NO: 380005 - DNA, 120 bp, Artificial Sequence
  ENSG00000143469_38 (sequence is synthesized)
caaaaagaccgtgaacttctgtatttttttagtttaaaaaatggcagctctatgcattcatacacatgaattataagaaaaaatacaaatgctatattggatgacatgaggtttgagaat

SEQ ID NO: 380006 - DNA, 120 bp, Artificial Sequence
  ENSG00000143469_39 (sequence is synthesized)
gtgtgttacagggctgcattaaagggaaaaatccatcttttattgttacatcaatgagctttttccaggatttttcaaataaacaagtaagagttagaacctgaatcaaatggcaaaata

SEQ ID NO: 380007 - DNA, 120 bp, Artificial Sequence
  ENSG00000143469_40 (sequence is synthesized)
tctcatttaagtgttttcagcaacagtatgaaaaaagacttgaagaggggatgtagattttactgagaaattggacttaggcatttgaagctataatgaactttttagactttgaaacaa

SEQ ID NO: 380008 - DNA, 120 bp, Artificial Sequence
  ENSG00000143469_41 (sequence is synthesized)
ctgactgcattgctaacaactgttatcttcctaataaaaagagttatcagtcttatctgtaactgtaacagagcttagtgaaacacattagtaagaccagcttggtgctttcactcttag

SEQ ID NO: 380009 - DNA, 120 bp, Artificial Sequence
  ENSG00000143469_42 (sequence is synthesized)
tgagaaaaagacctaactaattgttatttgttaaatctaccttttttcagactattcccagaattgtgtgtgtgatttgatacatccctagggatttatctggcataagtatcaaatcct

SEQ ID NO: 380010 - DNA, 120 bp, Artificial Sequence
  ENSG00000143469_43 (sequence is synthesized)
tcatggcttaaaaattaataaacagttttttaatatttctggaaagaccctacctccaccccagctgccaagtcctcaaagattataaattatctatatgagtgtatgtatctgtataca

SEQ ID NO: 380011 - DNA, 120 bp, Artificial Sequence
  ENSG00000143469_44 (sequence is synthesized)
cacatgcaccattacacatacaacataaatatgtatatgtatattcatttgtaaaggcaaaggtgccctggctttttcagataactgaatagaaaaacatttcatacatttaggattatt

SEQ ID NO: 380012 - DNA, 120 bp, Artificial Sequence
  ENSG00000143469_45 (sequence is synthesized)
tttctcctctatgtatttactagatattatatttggtttgggttgctttctgctgctgttctccttcacacacagcaaaatatacatttgtttctgtagattgacacaacttataataat

SEQ ID NO: 380013 - DNA, 120 bp, Artificial Sequence
  ENSG00000143469_46 (sequence is synthesized)
tactcccaaaaagttgtctgttcttttagaaaaggattaaataaggctcaggggacccacttcactctactgaatctaatgtacgagacagtactactgcttctttgtgtgcttgaattt

SEQ ID NO: 380014 - DNA, 120 bp, Artificial Sequence
  ENSG00000143469_47 (sequence is synthesized)
gcatgaaagcttaatagcaaaatcttctatctcagtaattatagcaaatagggacctactggtagggagcaggtgttggctcagaaacctgaaaaagacaacccactttcatacagttct

SEQ ID NO: 380015 - DNA, 120 bp, Artificial Sequence
  ENSG00000143469_48 (sequence is synthesized)
attaaaatcccctaagttttctaataaaatgatatagtccaaatatggcaatcgactggcatttatgggagcctctaaacctggaattatggggtttatttttctcccaaatgagctgca

SEQ ID NO: 380016 - DNA, 120 bp, Artificial Sequence
  ENSG00000143469_49 (sequence is synthesized)
aaagataattattgctgcccagtaaacaaaatgtatgtcaaatcagtaaagaatttgtttagcataatattgccttatctttcagaagctttcttctatattcttgtgtcttcagtacaa

SEQ ID NO: 380017 - DNA, 120 bp, Artificial Sequence
  ENSG00000143469_50 (sequence is synthesized)
tccacttttgtttgaaatccatttgcatattatcttactgtgcatttagtgaattctcaataatgttgtatttgctgacaagaataataaattggaccacaattaaaaaaaaagaaaacc

SEQ ID NO: 380018 - DNA, 120 bp, Artificial Sequence
  ENSG00000143469_51 (sequence is synthesized)
caatgagaaaataactacctgattaatatacacatgtttaaatgtaggacctggtaaagcagtttcatccaacctagcgaaaatgcccagggctgtttgttaaatcatttgcttgatacc

SEQ ID NO: 380019 - DNA, 120 bp, Artificial Sequence
  ENSG00000143469_52 (sequence is synthesized)
atcatcattttcatttcacttatcaagtgaatcagaagcataatcaataactgcaaagtaagatagtaccaataggagaaagaggtaaaagaattgagagtgtttgtcaatatgaagatg

SEQ ID NO: 380020 - DNA, 120 bp, Artificial Sequence
  ENSG00000143469_53 (sequence is synthesized)
atactgaatgatatcatagtctttccagtgaaagaaaaaataggctatgggaagatgtaaatttttgatggagtaagaacagtggtcaccaccaagtatttttcaagatccctctccagc

SEQ ID NO: 380021 - DNA, 120 bp, Artificial Sequence
  ENSG00000143469_54 (sequence is synthesized)
tatgaatagaaaggacacaaattcatttgcgtaaaattgccatttgcctacatagactagacaattcacagatttttcacaaagacagttattatatatatagttatttgagttatcact

SEQ ID NO: 380022 - DNA, 120 bp, Artificial Sequence
  ENSG00000143469_55 (sequence is synthesized)
atattatttcacattgatagtttttatttctaattttgtttccattcactgtcctcagttcctctgtggcctacattgaaggtagctgtcagtattattattgtcaaccatatttaatat

SEQ ID NO: 380023 - DNA, 120 bp, Artificial Sequence
  ENSG00000143469_56 (sequence is synthesized)
tgaatacaagtttaagcatgctgcaaagcattttctaacgttaattttaaaacattgtctctgccctccaaagtgatggttaacagctataatttactaagatctagcacaataatttat

SEQ ID NO: 380024 - DNA, 120 bp, Artificial Sequence
  ENSG00000143469_57 (sequence is synthesized)
tacttgcttgattctcaaaacaatactgtgaggtaagtaatgttatcaacattttattgataaagaaactgcagcatgaagaggttaagcagactttcccaaggtcattcggtaagtaag

SEQ ID NO: 380025 - DNA, 120 bp, Artificial Sequence
  ENSG00000143469_58 (sequence is synthesized)
tagtagaactgggattggaacccaggtgtaaattactctaaaacccatgctatgcatgttgcatttgcctccctgtttgaaaaaaaaactacttaggacattatatttatcaataatccc

SEQ ID NO: 380026 - DNA, 120 bp, Artificial Sequence
  ENSG00000143469_59 (sequence is synthesized)
actcaccttgattgaatggcagaactaagggggaaaaaacagctggggaaagagaaaagactagaaaagaagatcagaaattttttttcttctcaggacacaagtggtggtacttttgtg

SEQ ID NO: 380027 - DNA, 120 bp, Artificial Sequence
  ENSG00000143469_60 (sequence is synthesized)
tcattttgtagatgactttgatttgcaaagatttggaattgatttattctaccagtttagcctatacttatattccaaaagcatattaatcagttctgctccttgaccacttttaggaat

SEQ ID NO: 380028 - DNA, 120 bp, Artificial Sequence
  ENSG00000143469_61 (sequence is synthesized)
ccaaggtgttttaattgttacatgacccccttactactctatgaagggcataacctgtgtctagcccatatctcactcatatcagtggtgagacaaaagatttgtcttcctctgtcctct

SEQ ID NO: 380029 - DNA, 120 bp, Artificial Sequence
  ENSG00000143469_62 (sequence is synthesized)
cattgcaatttatttatgttttattctcaattttattaagatttgtcaggaattacagctagtttattacatatgtctctcttccccctaggtaagtagtcaatgccttgttagtatctt

SEQ ID NO: 380030 - DNA, 120 bp, Artificial Sequence
  ENSG00000143469_63 (sequence is synthesized)
tctgtacccctttgcttatagtaggcagacagtaaatattgaattgaactaaattccctgtggaagaagccagtcacactattacatgagtcttagtttttatgaatcttgtgttatgta

SEQ ID NO: 380031 - DNA, 120 bp, Artificial Sequence
  ENSG00000143469_64 (sequence is synthesized)
tggatttatttattccttcagttaatatatatttaagagtactagatatgtgccatgtgttgttgttccaagtgctacagatgcagagataataaattggtcgaagtctttgccctcatg

SEQ ID NO: 380032 - DNA, 120 bp, Artificial Sequence
  ENSG00000143469_65 (sequence is synthesized)
gggcctacattctaaggtaggaagatggccacagaatgggataatttcaggctagtataatgaagcattaagataggggcatgcatagagtaccgtgggatttagtagaagagtgcaaca

SEQ ID NO: 380033 - DNA, 120 bp, Artificial Sequence
  ENSG00000143469_66 (sequence is synthesized)
tggaattcaaaaaaatcttcctggaaaagataatccctgagttgggtcttaaagaacaaatacatgttagactcccatcaaacttgaggacacacgttctttccaagaacaaaatgtaaa

SEQ ID NO: 380034 - DNA, 120 bp, Artificial Sequence
  ENSG00000143469_67 (sequence is synthesized)
aacttgaggacacacgttctttccaagaacaaaatgtaaaataatggtttctaaactgtagtatccttaagaattattttgaaaatttaacttgggccaggcgtggtggcttacgcctgt

SEQ ID NO: 380035 - DNA, 82 bp, Artificial Sequence
  ENSG00000143469_68 (sequence is synthesized)
tgggcaacatagcaaaaccccatctctaccaaaaatttaaaaattagctgagcactaggtgggagaatcgctggagcctggc

SEQ ID NO: 380036 - DNA, 120 bp, Artificial Sequence
  ENSG00000143469_69 (sequence is synthesized)
cagtgagccaagatagcgccactgcacttcagcctgggtgacacagaagaccttgtagaaagggaggaagaaaggagggagagagagaggaagggaggaggagaagggaaggaaggagga

SEQ ID NO: 380037 - DNA, 120 bp, Artificial Sequence
  ENSG00000143469_70 (sequence is synthesized)
gagaggaagggaggaggagaagggaaggaaggaggagacgggaaagaatgaaggagaagggaaagaagggagggaaatttaacttgtattccaaaactccacctccagagattctacttc

SEQ ID NO: 380038 - DNA, 120 bp, Artificial Sequence
  ENSG00000143469_71 (sequence is synthesized)
atttggcctggaagggagcccaataatctacattttattaagctctccaggaaattctgtctgagatctattgatatagaatattaagtgtattacatagtagtattcatgaaatgtttc

SEQ ID NO: 380039 - DNA, 120 bp, Artificial Sequence
  ENSG00000143469_72 (sequence is synthesized)
agtgcctgtagatcagacctttaagtgtgatagtgatagtaatacagagattaagactaggattaatgttattcatctttttcttgtgcttccttaaaaaggaagatatttaatgaaaaa

SEQ ID NO: 380040 - DNA, 120 bp, Artificial Sequence
  ENSG00000143469_73 (sequence is synthesized)
aattaatatttaataatgaatttctgtacattcacattcaacatacatttttcaaagtgtttcttggtataataaatatgttgattttatggcttccaaaaattcctttctatcactgtt

SEQ ID NO: 380041 - DNA, 120 bp, Artificial Sequence
  ENSG00000143469_74 (sequence is synthesized)
caaatatttccttctaagttatctttacaatgatggatataaagtgaagaatggggaggtatttatcaagtaatttctttatcagtatcctaaatgaaataagactgacctttgagcaaa

SEQ ID NO: 380042 - DNA, 120 bp, Artificial Sequence
  ENSG00000143469_75 (sequence is synthesized)
tgtgtagtagcagccataggtgctggcatgtttgcattcttgcatacagtaagatttcttgcttccctttatcatcatctaaatggcttcattgtcatcacactcatcagatgaaatgca

SEQ ID NO: 380043 - DNA, 120 bp, Artificial Sequence
  ENSG00000143469_76 (sequence is synthesized)
gtactggattcttctctaaaagcagtgattctgtgactgctgctctaaactctagttccttgattgttttgttcttaggatcctttgtttcaaatagcaagttaatacagcagcctcagg

SEQ ID NO: 380044 - DNA, 120 bp, Artificial Sequence
  ENSG00000143469_77 (sequence is synthesized)
accttctctttctctcagaataaatgctgtggataaggtacatctgagtttccatttcccctcatttcacatatagccatattttcttctctgatgtaatattttgtattaacacatttt

SEQ ID NO: 380045 - DNA, 120 bp, Artificial Sequence
  ENSG00000143469_78 (sequence is synthesized)
acattttgaagttttcttttcccccacaaagatatgtggttatcccacttaaaaatgagcttatttgaatatgtgaaataatgttgtcattgaattaagctgttttgtgactgctgatgt

SEQ ID NO: 380046 - DNA, 120 bp, Artificial Sequence
  ENSG00000143469_79 (sequence is synthesized)
atcactgtgtttgatttggtgacagcttgaggtctggttaatataatcttaaggtaatcagcttgatagactggaattactagtttattatcaaaaaatgaatgtaaaaatattgctctt

SEQ ID NO: 380047 - DNA, 120 bp, Artificial Sequence
  ENSG00000143469_80 (sequence is synthesized)
ttctctccctgtttagactagtatgtgcctttttaaaaatactccctttcttcttccctgccttttttccccactcttattcatatacactcaaactagataccagagttagttcatcaa

SEQ ID NO: 380048 - DNA, 120 bp, Artificial Sequence
  ENSG00000143469_81 (sequence is synthesized)
agctgaataatacctatcaaaaagtgataccctgacttttttctcttaatcacctgtactggaccatagggaggaccaaataggctttcttggggactacagaaagagcaaagcgtaata

SEQ ID NO: 380049 - DNA, 120 bp, Artificial Sequence
  ENSG00000143469_82 (sequence is synthesized)
ctctttaatcatagcatgtttgttgttgctgtttcggtggtggtggtggtggtggtggtggttgtgtacttaccttgaatagtgtgaagtatcctaaaattatgttgtgtgggctgggag

SEQ ID NO: 380050 - DNA, 120 bp, Artificial Sequence
  ENSG00000143469_83 (sequence is synthesized)
caggaaggaaactgattattcgtctaacaaaggtttggcataattttattgtaaaatttcaactgtttatgacatgaaaatttctaattaattataagaacaaagtcactgtggtggcaa

SEQ ID NO: 380051 - DNA, 120 bp, Artificial Sequence
  ENSG00000143469_84 (sequence is synthesized)
tagttgtacaagatgtttgacattatttctatgtcagtttgatagtctgtgttataaattgtcttattaggacccttcttcaccctcttctttattattctgattatcagtaaatccagt

SEQ ID NO: 380052 - DNA, 120 bp, Artificial Sequence
  ENSG00000143469_85 (sequence is synthesized)
ttgtactgttagacatttgagtttgtcttttaaatattgaagactattttaaaaagaaaaaccataacatctttctgtttattacattaacatgtgatctctcacctgacgatgtgttta

SEQ ID NO: 380053 - DNA, 120 bp, Artificial Sequence
  ENSG00000143469_86 (sequence is synthesized)
cctgacgatgtgtttaaaatgaattaatagataaaatataatactccgttatatactgaaaaaaattttcaaactttgtctatatattcagatattgctagcagttcatattaaatatga

SEQ ID NO: 380054 - DNA, 120 bp, Artificial Sequence
  ENSG00000143469_87 (sequence is synthesized)
gaaaataggaatttttccttatctctgagacttactgcttctctttgccattcacatctggttgaaggtggatggttttgaacctcgtaacgtcacttcactcgtcagtttctgagtgtg

SEQ ID NO: 380055 - DNA, 120 bp, Artificial Sequence
  ENSG00000143469_88 (sequence is synthesized)
ccaacctccttctgacggtttaattttcagtaacaatcaaaccatttattcctcaggggttggtcctcctagtgattcctgtccttaacccccattagtgttgatggaagtaatccataa

SEQ ID NO: 380056 - DNA, 120 bp, Artificial Sequence
  ENSG00000143469_89 (sequence is synthesized)
gcaccaataggagaaaaggcccataaaggatcagtatcccagaaccctgaaataggacggccgcttcagtacccaaatgtcattgcaattctaatggagtagaagccagcttcttggaag

SEQ ID NO: 380057 - DNA, 120 bp, Artificial Sequence
  ENSG00000143469_90 (sequence is synthesized)
tgaagatttgagatcattatgtcatattctctccttttggtgtcctcccttctccctctagcttgcacattctttttattttaaattttacaggaagccttcttttaaaaacctggtttt

SEQ ID NO: 380058 - DNA, 120 bp, Artificial Sequence
  ENSG00000143469_91 (sequence is synthesized)
taaaatttcacatgttgctgtaaccaggtgatttcaaaacccagaaaactgaagtacataccatacagtcataagaagtttgggggcttttttggtttttatgtttttggtgtttttttt

SEQ ID NO: 380059 - DNA, 120 bp, Artificial Sequence
  ENSG00000143469_92 (sequence is synthesized)
ttttttttttttttttttgtagtgtggggagtggggaggaggaaaagggagaaatcgtgcttgttttggttttgggaagtctttttggataaatattgagaatatttatagtattctgta

SEQ ID NO: 380060 - DNA, 120 bp, Artificial Sequence
  ENSG00000143469_93 (sequence is synthesized)
tgtaattatgtgacatttgttgtgtgaggggagaccagagtagctgttgcacatacatcgactctcttaatattgaagcatatttaaacagttgtttgaagcagagctagaaattaatgg

SEQ ID NO: 380061 - DNA, 120 bp, Artificial Sequence
  ENSG00000143469_94 (sequence is synthesized)
tgatacttctaacagcattttgatgttataaatattactttaagtttatcaagagaaaaattccagtagtagcttgcgttataaaattaattgatttattatgtttctgtataattttat

SEQ ID NO: 380062 - DNA, 120 bp, Artificial Sequence
  ENSG00000143469_95 (sequence is synthesized)
tgaaattgcttttttgtggtgaatataatatagtggcaacgattttgaggaatctttaaagctgtttggaagagatggccagcctttggctagatttttactagaattttgaaataagaa

SEQ ID NO: 380063 - DNA, 120 bp, Artificial Sequence
  ENSG00000143469_96 (sequence is synthesized)
agtgtataaatatgttttcagttaaattagccttgaggaagaatagttattatatgagttttaagggtcttgataaatgttgggacctactctaaaactcatgaggttcctcactgatca

SEQ ID NO: 380064 - DNA, 120 bp, Artificial Sequence
  ENSG00000143469_97 (sequence is synthesized)
atactcttgcattgtattttatttctcaaaataatgaaatttttatggaaaagctcaattagtggaatcttttattcaatattcccttactcttctttcttccttccttctttctttcct

SEQ ID NO: 380065 - DNA, 120 bp, Artificial Sequence
  ENSG00000143469_98 (sequence is synthesized)
ttcttccttccctccctccttccttcctagttctttcattttttcaggcaagaagcttccttaataatatagtttctacagagctttcttacttatttttctaataatggatataacagt

SEQ ID NO: 380066 - DNA, 120 bp, Artificial Sequence
  ENSG00000143469_99 (sequence is synthesized)
gtgataaagtttaaatgctccgtgagcaaaactcttatcaaacaactgaagaaatacactgctgattaaccttttccttggtcttgaattgtctccagcatatttgctagtgactaaacc

SEQ ID NO: 380067 - DNA, 120 bp, Artificial Sequence
  ENSG00000143469_100 (sequence is synthesized)
attaatggatcttattagtataaacacatgtctgtgtggttatcaacagtgttgtattattgtcacatttatttacatttttggtcaaaaatataaacatgcgtgtgtgaagcagtctgt

SEQ ID NO: 380068 - DNA, 120 bp, Artificial Sequence
  ENSG00000143469_101 (sequence is synthesized)
tttatagagtgagcatatatgtaatcgttttcatataattgaaaatgtgctgtgtgttgcattttattctcatgtcgacttttctactatgtatacaccgattgtctcggtgcctttttc

SEQ ID NO: 380069 - DNA, 120 bp, Artificial Sequence
  ENSG00000143469_102 (sequence is synthesized)
cttttgtataattgtattacatacagaaattgctgacctctgtgaaaacagtgtaaaaaaagttaaaattattattccgatgagattttaatggcagtttaattttccagagaataaatt

SEQ ID NO: 380070 - DNA, 120 bp, Artificial Sequence
  ENSG00000143469_103 (sequence is synthesized)
ttgtgtgggttaaaagttatttttcttcacctttatgtaaaaaatctgtttacgttttagtactcacatggaatgggtaaacatctgacttcattgatgatgatacataaacatcagtcc

SEQ ID NO: 380071 - DNA, 120 bp, Artificial Sequence
  ENSG00000143469_104 (sequence is synthesized)
taattcttgtcattgacaaataaatgttaatatgactgttacacaaaataaaataatgtcaattacataaggaaatatcaaatggatatatgtacatgttatttagatcttgggtttgaa

SEQ ID NO: 380072 - DNA, 120 bp, Artificial Sequence
  ENSG00000143469_105 (sequence is synthesized)
aggaatctcatctaaatgtgctataaaatattactctcaaaaggtttgggtcatattattttctttaattgtaagtcaaatctggcttccaaagaaaatagacttacaaatgcaaacatt

SEQ ID NO: 380073 - DNA, 120 bp, Artificial Sequence
  ENSG00000143469_106 (sequence is synthesized)
taaaaatattctcctttaaagttcatataaatcacaaattaaactaaatagctttaaaatgatctcagtatcttcagctggaatatgaactgttacctagtttgttctttcacttaatgt

SEQ ID NO: 380074 - DNA, 120 bp, Artificial Sequence
  ENSG00000143469_107 (sequence is synthesized)
gaatttgttgtcattcatatcagtattgctatcctgtttaacaaaataattttctctttgccaatagtagtttgttgatttttaattctttttcattagctagttgtattgtttccctaa

SEQ ID NO: 380075 - DNA, 120 bp, Artificial Sequence
  ENSG00000143469_108 (sequence is synthesized)
gacctggagtttagatatttttcatatttcattaccttgtccattttacttccagcaacaaagatttataacaacagacttaacaagtactattttgcatatgaaaaagaatttaaacgt

SEQ ID NO: 380076 - DNA, 120 bp, Artificial Sequence
  ENSG00000143469_109 (sequence is synthesized)
ttggtgctctaaaactgaaagaaattaaagttgctgcatcatctaatctctgattgtctttgaatccttagttccataaattatccagagccttttttagttaacatttttaaagagggg

SEQ ID NO: 380077 - DNA, 120 bp, Artificial Sequence
  ENSG00000143469_110 (sequence is synthesized)
tggagtacatgaacttatctgtattagaaaagaatctggaatctgagtgcatgctgatctcccattgacttctgttctattactgtaccccatcagagagatgtgaggagttggttgaaa

SEQ ID NO: 380078 - DNA, 120 bp, Artificial Sequence
  ENSG00000143469_111 (sequence is synthesized)
ttcaaatcgggaacatatccaaagaccacaacatcctttgacaccaacaactgtctatgcttccttagaaggagccacctgacaactgggtggttcaacaaagtggccccaggaaagtat

SEQ ID NO: 380079 - DNA, 120 bp, Artificial Sequence
  ENSG00000143469_112 (sequence is synthesized)
atggcgagcgcatcatggcgattgaaggtggagagagaacctgtggagtacatgaacttatctgtattagaaaagatagggtatttctctgtggccaggctggagtacagtggcaccatc

SEQ ID NO: 380080 - DNA, 120 bp, Artificial Sequence
  ENSG00000143469_113 (sequence is synthesized)
ctgggttcaaacgattcttctgcctcagcatcccaagtaactgggactacagtatctccagaggcagttggatttttgtcagctgttggggtgtttattatcttgatgctgctccttttt

SEQ ID NO: 380081 - DNA, 120 bp, Artificial Sequence
  ENSG00000143469_114 (sequence is synthesized)
aggcagccacttcaaaaatttggcagcaaacagaccacccactttccaccccctgttgtcagatggactgttctgttgtctaaaacacttgataggtggacaggtttatataatccgaga

SEQ ID NO: 380082 - DNA, 120 bp, Artificial Sequence
  ENSG00000143473_0 (sequence is synthesized)
ggcgcgaagagggcgcgagggtagcagccagagggagccgccagccctgcctgcggatccccgccgggcgcatggggcgcttcgagccgggactgcgtgcgggccccgaggccagtttcc

SEQ ID NO: 380083 - DNA, 120 bp, Artificial Sequence
  ENSG00000143473_1 (sequence is synthesized)
ctgcgtgcgggccccgaggccagtttcctgctgtcgtaagaagccgcgccaggacgcccgccggaccccgagctgctgggaggatgaccatggctgggggcaggaggggactagtggccc

SEQ ID NO: 380084 - DNA, 120 bp, Artificial Sequence
  ENSG00000143473_2 (sequence is synthesized)
ctcaaaacacgtttctggagaatattgttcggcggtccaatgatactaattttgtgttggggaatgctcagatagtggactggcctattgtgtacagcaatgatggattttgcaagctgt

SEQ ID NO: 380085 - DNA, 120 bp, Artificial Sequence
  ENSG00000143473_3 (sequence is synthesized)
ctggctatcacagggcagaagtgatgcaaaaaagcagcacctgcagttttatgtatggggagctgactgataaagacacgattgaaaaagtgcggcaaacatttgagaactatgagatga

SEQ ID NO: 380086 - DNA, 120 bp, Artificial Sequence
  ENSG00000143473_4 (sequence is synthesized)
attcctttgaaattctgatgtacaagaagaacaggacacctgtgtggttctttgtgaaaattgctccaattcgaaacgaacaggataaagtggttttatttctttgcactttcagtgaca

SEQ ID NO: 380087 - DNA, 120 bp, Artificial Sequence
  ENSG00000143473_5 (sequence is synthesized)
taacagctttcaaacagccaattgaggatgattcatgtaaaggctgggggaagtttgctcggctgacaagagcactgacaagcagcaggggtgtcctgcagcagctggctccaagcgtgc

SEQ ID NO: 380088 - DNA, 120 bp, Artificial Sequence
  ENSG00000143473_6 (sequence is synthesized)
aaaaaggcgagaatgtccacaagcactcccgcctggcagaggtcctacagctgggctcagacatccttccccagtacaagcaagaggcaccaaagactccccctcacatcatcttacatt

SEQ ID NO: 380089 - DNA, 120 bp, Artificial Sequence
  ENSG00000143473_7 (sequence is synthesized)
attgtgtttttaagaccacgtgggattggatcatcttgatcttgaccttctatacagccatcttggtcccttataatgtctccttcaaaaccaggcagaataatgtggcctggctggttg

SEQ ID NO: 380090 - DNA, 120 bp, Artificial Sequence
  ENSG00000143473_8 (sequence is synthesized)
ttgatagcatcgtggatgttatctttttggtggacattgtgctcaattttcataccacctttgttggaccagcaggggaggtgatttctgaccccaaacttatccgcatgaactacctga

SEQ ID NO: 380091 - DNA, 120 bp, Artificial Sequence
  ENSG00000143473_9 (sequence is synthesized)
agacgtggtttgtgattgaccttctgtcctgtttgccatatgatgtcatcaacgcttttgagaacgtggatgaggttagtgcctttatgggtgatccagggaagattggttttgctgatc

SEQ ID NO: 380092 - DNA, 120 bp, Artificial Sequence
  ENSG00000143473_10 (sequence is synthesized)
agattccaccaccactggaggggagagagagtcagggcatcagcagcctgttcagctctctaaaagttgtccggctgctccgtcttgggcgagtggcccgtaagctggaccactacattg

SEQ ID NO: 380093 - DNA, 120 bp, Artificial Sequence
  ENSG00000143473_11 (sequence is synthesized)
aatatggagctgctgtgctggtcctgctggtgtgtgtgtttgggctggctgcacactggatggcctgcatctggtacagcattggggactatgagatctttgacgaggacaccaagacaa

SEQ ID NO: 380094 - DNA, 120 bp, Artificial Sequence
  ENSG00000143473_12 (sequence is synthesized)
tccgcaacaacagctggctgtaccaactagcgatggacattggcaccccttaccagtttaatgggtctggctcagggaagtgggaaggtggtcccagcaagaattctgtctacatctcct

SEQ ID NO: 380095 - DNA, 120 bp, Artificial Sequence
  ENSG00000143473_13 (sequence is synthesized)
cgttgtatttcacaatgaccagcctcaccagtgtgggctttgggaacatcgccccatccacagacattgagaagatctttgcagtggccatcatgatgattggctcacttctctatgcca

SEQ ID NO: 380096 - DNA, 120 bp, Artificial Sequence
  ENSG00000143473_14 (sequence is synthesized)
ccatcttcgggaatgtgacgactattttccaacagatgtatgccaacaccaacagataccatgagatgctcaacagtgttcgggacttcctgaagctctaccaggtgccaaaaggattga

SEQ ID NO: 380097 - DNA, 120 bp, Artificial Sequence
  ENSG00000143473_15 (sequence is synthesized)
gtgagcgagtaatggattatattgtgtccacttggtccatgtccagaggcattgacacagagaaggtcctgcagatctgccccaaggacatgagagccgacatctgcgtgcacctgaacc

SEQ ID NO: 380098 - DNA, 120 bp, Artificial Sequence
  ENSG00000143473_16 (sequence is synthesized)
gcaaggtgttcaaggagcacccggccttccggctggccagtgatggctgcctccgggcactggccatggagttccagacggtgcactgtgccccaggggacctcatctaccatgcaggag

SEQ ID NO: 380099 - DNA, 120 bp, Artificial Sequence
  ENSG00000143473_17 (sequence is synthesized)
agagcgttgacagcctctgctttgtggtttctggctccctggaggtgatccaagatgatgaggtggtggccattctaggaaaaggagacgtgtttggagatgtgttctggaaggaagcca

SEQ ID NO: 380100 - DNA, 120 bp, Artificial Sequence
  ENSG00000143473_18 (sequence is synthesized)
cccttgcccagtcctgtgccaatgttagggccttgacctactgtgatctgcatgtgatcaagcgggatgccctgcagaaagtgctggaattctacacggccttctcccattccttctccc

SEQ ID NO: 380101 - DNA, 120 bp, Artificial Sequence
  ENSG00000143473_19 (sequence is synthesized)
ggaacctgattctgacgtacaacttgaggaagaggattgtgttccggaagatcagcgatgtgaaacgtgaagaggaagaacgcatgaaacgaaagaatgaggcccccctgatcttgcccc

SEQ ID NO: 380102 - DNA, 120 bp, Artificial Sequence
  ENSG00000143473_20 (sequence is synthesized)
cggaccaccctgtccggcgcctcttccagagattccgacagcagaaagaggccaggctggcagctgagagagggggccgggacctggatgacctagatgtggagaagggcaatgtcctta

SEQ ID NO: 380103 - DNA, 120 bp, Artificial Sequence
  ENSG00000143473_21 (sequence is synthesized)
cagagcatgcctccgccaaccacagcctcgtgaaggccagcgtggtcaccgtgcgtgagagtcctgccacgcccgtatccttccaggcagcctccacctccggggtgccagaccacgcaa

SEQ ID NO: 380104 - DNA, 120 bp, Artificial Sequence
  ENSG00000143473_22 (sequence is synthesized)
agctacaggcgccagggtccgagtgcctgggccccaaggggggcgggggcgattgtgccaagcgcaaaagctgggcccgcttcaaagatgcttgcgggaagagtgaggactggaacaagg

SEQ ID NO: 380105 - DNA, 120 bp, Artificial Sequence
  ENSG00000143473_23 (sequence is synthesized)
tgtccaaggctgagtcgatggagacacttcccgagaggacaaaagcgtcaggcgaggccacactgaagaagacagactcgtgtgacagtggcatcaccaagagcgacttgcgcctggaca

SEQ ID NO: 380106 - DNA, 120 bp, Artificial Sequence
  ENSG00000143473_24 (sequence is synthesized)
acgtgggtgaggccaggagtccccaggatcggagtcccatcctggcagaggtcaagcattcgttctaccccatccctgagcagacgctgcaggccacagtcctggaggtgaggcacgagc

SEQ ID NO: 380107 - DNA, 120 bp, Artificial Sequence
  ENSG00000143473_25 (sequence is synthesized)
tgaaggaggacatcaaggccttaaacgccaaaatgaccaatattgagaaacagctctctgagatactcaggatattaacttccagaagatcctctcagtctcctcaggagttgtttgaaa

SEQ ID NO: 380108 - DNA, 120 bp, Artificial Sequence
  ENSG00000143473_26 (sequence is synthesized)
tatcgaggccacagtccccagaatcagagagagacatttttggagccagctgagaggtctatttaaaaaaaaagtcagagacagatacctccaaccctgccgtcaccaccacccctacca

SEQ ID NO: 380109 - DNA, 120 bp, Artificial Sequence
  ENSG00000143473_27 (sequence is synthesized)
catatgtccacatgaccaacaattttcaagtaggcttttcctaacagaaaaagtggggccagtggcttagacgtgctctttctctatctggaaaaagatatgggaagggtagcgtgcccc

SEQ ID NO: 380110 - DNA, 120 bp, Artificial Sequence
  ENSG00000143473_28 (sequence is synthesized)
taccctgcaaggtggcagctgcatctgaaccgtctttgcacaattttggaagaagggacatgctgtctaaagggtattttccttcatttttaattttttactaccatgatatttgtaaaa

SEQ ID NO: 380111 - DNA, 120 bp, Artificial Sequence
  ENSG00000143473_29 (sequence is synthesized)
gattaaaactaccagaacagagcagcagccatctggggactggtgggaaagtgccgagaacctctcatgtatatactatgctgggctcctttgccaagaccccccatggactgcagtggg

SEQ ID NO: 380112 - DNA, 120 bp, Artificial Sequence
  ENSG00000143473_30 (sequence is synthesized)
ccaaggacttcccggcatccccgtccttgtacagcccgtgtctgacgtcaccatgttttcctgtagttgtcatttataactagctcgggacaagcagagcttgagggacaggagggtaga

SEQ ID NO: 380113 - DNA, 120 bp, Artificial Sequence
  ENSG00000143473_31 (sequence is synthesized)
gctcagaaactttctgtctcatggttaaggccagaaaagcagctgcaggtgtggtgcatgcctcccatagacacttgaagctgggaatcctcaggtctccttccccaaaggaggtgaggc

SEQ ID NO: 380114 - DNA, 120 bp, Artificial Sequence
  ENSG00000143473_32 (sequence is synthesized)
aagggtaagagctggagaggggcccttaagatccaggggttctctgcggtgcaacccatagcctgctcctctgggacagttgacagggagggctctggagtgcctggctgagcctctggc

SEQ ID NO: 380115 - DNA, 120 bp, Artificial Sequence
  ENSG00000143473_33 (sequence is synthesized)
tcggcaggaagggtcatgagcccagagttgctttattaacaaagcagacacacagacacacacaacctcagaactgtagcaagtgctatgtttatactttgattctcattgggattgccc

SEQ ID NO: 380116 - DNA, 120 bp, Artificial Sequence
  ENSG00000143473_34 (sequence is synthesized)
tgcagacctttgtattttgttcaccgcacggggtcattataggcacttgggagccatgctgggccttattttaaagccagtctctctatttcctattaaagtcagtaggatttcaagaga

SEQ ID NO: 380117 - DNA, 120 bp, Artificial Sequence
  ENSG00000143473_35 (sequence is synthesized)
aaatggaaaaagactgcaggatcatgattgtactctcttcaggagctggaaagagaatgaagcagtgagtttccagctctctgtaaggtgatggagagaagtggccttggagctgtggct

SEQ ID NO: 380118 - DNA, 120 bp, Artificial Sequence
  ENSG00000143473_36 (sequence is synthesized)
cccagtgatggtcacagaactgcgtatgggccatccaagcccctatgccacgatgctcggggacacttcactgcctcatggtcacctaagtcaggttattcatgtgcttgggcttctctc

SEQ ID NO: 380119 - DNA, 120 bp, Artificial Sequence
  ENSG00000143473_37 (sequence is synthesized)
aatggcatctgagaaaggaaaggagtgaagtctcttccaggcacagtggagctggccggggcatatgccctagagagaggtgtcaggaccccaaatactgacacgcaaggttagaagttc

SEQ ID NO: 380120 - DNA, 120 bp, Artificial Sequence
  ENSG00000143473_38 (sequence is synthesized)
agctctgaaaagtcaacttggagggaatggaattaggagtacaggtgacagcatggacttatccagggagcttacctttgcctgtgttagacggtgaccccattcctggtacctctgccc

SEQ ID NO: 380121 - DNA, 120 bp, Artificial Sequence
  ENSG00000143473_39 (sequence is synthesized)
taccaaagatattcagtgtttctgagagcctccggtctgagactgcccaccaccccaccccaccccacctccttagtcctgcccagtgctcacggcgagtcccagggctgggccctcggt

SEQ ID NO: 380122 - DNA, 120 bp, Artificial Sequence
  ENSG00000143473_40 (sequence is synthesized)
tgtctgtgcaaggcagggctgacctctcctggttcgcagggttggcacagatggccctgggaagacaaggcctgcgagctcaagggagagtcctgctccatgagccctaacctcatatgt

SEQ ID NO: 380123 - DNA, 120 bp, Artificial Sequence
  ENSG00000143473_41 (sequence is synthesized)
agcttctcacatcaggcttacaggggctgcccctggcttctccaggttgcgacataattagatttagcctcagatggcggcatacaagtaagaggaagtctaatttcctaaggccgagtc

SEQ ID NO: 380124 - DNA, 120 bp, Artificial Sequence
  ENSG00000143473_42 (sequence is synthesized)
acaactatctgtgactttgaataaagctgtgaggccttcagcctctttcacttgagaagctgccaaccagtccttgggtaagaggccgtaaaatatctggaatcccatctgttggctgcc

SEQ ID NO: 380125 - DNA, 120 bp, Artificial Sequence
  ENSG00000143473_43 (sequence is synthesized)
ccctaacattctagtctgccatttcttaaacatgctcctcaacctgcttctgaagtttaggacccaccacttttaaggcagggcaggcctctaatcacccccaaaacccagcctcagaag

SEQ ID NO: 380126 - DNA, 120 bp, Artificial Sequence
  ENSG00000143473_44 (sequence is synthesized)
aacctgccactggagacacttttttgcctctcagctctccagggacttgatgacaggcttcttgtctggcacccaacggtcaatgtcaagaggccctgccatttccctccagctctgcct

SEQ ID NO: 380127 - DNA, 120 bp, Artificial Sequence
  ENSG00000143473_45 (sequence is synthesized)
gagggagacggatgtccgtgaaatttctcagacctctgggtatgaggggcaaagatggtataaggctttgaagtccagacatgttcttggggggaatgtagctttaggaatgcactcgtg

SEQ ID NO: 380128 - DNA, 120 bp, Artificial Sequence
  ENSG00000143473_46 (sequence is synthesized)
aatcagcgcaaactgggctcatgactggaagccagctcctgcggcaggaatctgttcatcttgggtcacaggtgcacgtgtgggtgcatgggctttattctcctgtaatcctccctagga

SEQ ID NO: 380129 - DNA, 120 bp, Artificial Sequence
  ENSG00000143473_47 (sequence is synthesized)
tttgagggattttttgctgtaattgttttctttgaaaaaacattgtgtaaatgagccaaacctttctcccttccttttcgcaccatgaacttgaccgcaggctgctttgtgctgactgcc

SEQ ID NO: 380130 - DNA, 120 bp, Artificial Sequence
  ENSG00000143473_48 (sequence is synthesized)
ttcccatgccaggatgccactctgggttcccgagccaggaccatgtgcctcagataccagtgacctgagccttccagtataaaccattatctggtggctggagagagattagggaaacaa

SEQ ID NO: 380131 - DNA, 120 bp, Artificial Sequence
  ENSG00000143473_49 (sequence is synthesized)
aaagttactaggtatgggacagaacatttagacttcagaaaaagtatgccaagagagaacagatttgcccaggatgtatgtttttcctctttgaggagtcggggcatgatatgtggcacc

SEQ ID NO: 380132 - DNA, 120 bp, Artificial Sequence
  ENSG00000143473_50 (sequence is synthesized)
attatctagtaagtgctggttatttgatttctactaaattctttactttgaatgtcattcatattgaagctccatttcccagagaatatcctgacaggctgctttgaagagggtaggtcc

SEQ ID NO: 380133 - DNA, 120 bp, Artificial Sequence
  ENSG00000143473_51 (sequence is synthesized)
tgtccctgtcacttggctgctggttgaacgtgctcctcccggctgatggaggggtgggtttaaggttaactctaagaactaagatggtcaatgaggtggtgtttgttcttggtggggggg

SEQ ID NO: 380134 - DNA, 120 bp, Artificial Sequence
  ENSG00000143473_52 (sequence is synthesized)
cattgactccagcaatgggcgctgccatcccatatacttacaaagggctcctccactggacatgacaagatagccaaaggacggaaacagagacgaccatttggttgagaaaccaaattg

SEQ ID NO: 380135 - DNA, 120 bp, Artificial Sequence
  ENSG00000143473_53 (sequence is synthesized)
tctagtgtacaattaatgcaactcattgcattcatgaatgcaactcattgcattaatgcaatgctacattatgctaataaggttacaacattaatgctacaggatagcccaagtatttaa

SEQ ID NO: 380136 - DNA, 120 bp, Artificial Sequence
  ENSG00000143473_54 (sequence is synthesized)
aaagctgagcccatttagcagccttccagcaaacttttggaaatgcatttcttacttgatttcttcttgttatccaatccctggggactgttttacccacaacctcttcgatccagtgtg

SEQ ID NO: 380137 - DNA, 120 bp, Artificial Sequence
  ENSG00000143473_55 (sequence is synthesized)
ctgctgttggccaaacatcagcccctttcctggaatcctcctctttcaaaagtggggagggctgggcaggggtaaaaatgtactataccaccccatcccattcagcaagcttcctctcca

SEQ ID NO: 380138 - DNA, 120 bp, Artificial Sequence
  ENSG00000143473_56 (sequence is synthesized)
aatccttaaatggaaggtagaagtattatgccaactgtcaagctctttgtccaggcccttgtggggactaaatgaactctttaggaatactaggtataggaagactaggtataggaagat

SEQ ID NO: 380139 - DNA, 120 bp, Artificial Sequence
  ENSG00000143473_57 (sequence is synthesized)
tctcatttccccttgttgcactgaccactatgtctcccatgcatactctgggaaattttaggagccctggtggagatacacgttgctgatgtgcatttgattaataggttttactatgtc

SEQ ID NO: 380140 - DNA, 120 bp, Artificial Sequence
  ENSG00000143473_58 (sequence is synthesized)
ttgcaataaagacgtttagccttaagacccttgaatggaactccagctgtgatagagctgccaatgccccttcctctctcctcccttatcacctagtgttgcttaaagaggaggccattg

SEQ ID NO: 380141 - DNA, 120 bp, Artificial Sequence
  ENSG00000143473_59 (sequence is synthesized)
agggcacacttgatgccccagacagcctccctctgttgctaaatcattgttattgctctatatactgccttctcactcgcttcaattaaaaattaccttcaccagctcctgtgccctcca

SEQ ID NO: 380142 - DNA, 120 bp, Artificial Sequence
  ENSG00000143473_60 (sequence is synthesized)
cctgggggagacttcatgatcctctcagcactgactgcaaacatcagagaaaaaaacattttctcaccaaaggtgttcatgttgagaagttttaatttctaccccctacagctcaaaaga

SEQ ID NO: 380143 - DNA, 120 bp, Artificial Sequence
  ENSG00000143473_61 (sequence is synthesized)
atcaatgtgaatttatctgcagcttaaattcaagtgaaacttcattctcatgcaagcatatcagacttattctggaacctctagaactggacttgaattccctgcaggtgccagactggt

SEQ ID NO: 380144 - DNA, 120 bp, Artificial Sequence
  ENSG00000143473_62 (sequence is synthesized)
gggtgccctccctgcctgccattaaacttttcttacagccactgtccctttatctgtgacttctgagtcatccgacggatccattagttgttcaatgagaagttcacagatcttgtatca

SEQ ID NO: 380145 - DNA, 120 bp, Artificial Sequence
  ENSG00000143473_63 (sequence is synthesized)
ggatataaactgatcttatgttgaaggatgcaccctcccctaatgaatgtattctcttaatattccgatgctgtatttgtgcatcagttggagactgtccacatccgacatttcaccgac

SEQ ID NO: 380146 - DNA, 120 bp, Artificial Sequence
  ENSG00000143473_64 (sequence is synthesized)
acctcaaggacacttctacttatgagcagttcatcattctggggcttctccttatattaatactctttccattgagtcctgccaaatcctttattgggttttctttttcctttgcatctg

SEQ ID NO: 380147 - DNA, 120 bp, Artificial Sequence
  ENSG00000143473_65 (sequence is synthesized)
tcactttgtccaaatgagcatgaataaacaaaagtgtaaatgagctgatactatttttgtggtcagctgaggatgctgccaagaacaccactgtatatctgtggcttgggaatgttaaga

SEQ ID NO: 380148 - DNA, 120 bp, Artificial Sequence
  ENSG00000143473_66 (sequence is synthesized)
ggaacgtgcaggcccttccattgatgatattcccttctcaacatttttaaacaagcacaaatgatatttgtaaaaaaaaaaagttttatttattatggtaataaactattttatacatga

SEQ ID NO: 380149 - DNA, 120 bp, Artificial Sequence
  ENSG00000143473_67 (sequence is synthesized)
gtctgatctcttcaatgttgcaaaacatctctgtgaatatgattcttgtaattagtcaaaaggacgagtaatatagagctaagtaatgaatgccatgttttgggtgccaaatggagttca

SEQ ID NO: 380150 - DNA, 120 bp, Artificial Sequence
  ENSG00000143473_68 (sequence is synthesized)
atgattttaaaaagagggttttttgttttaaaataaaaccatttccctgagaaagcctcagagaggctttctcaaaatgtgctgaggccagtagtatcatactttggcttctcatgttgt

SEQ ID NO: 380151 - DNA, 120 bp, Artificial Sequence
  ENSG00000143473_69 (sequence is synthesized)
ccacactgaagggaaccctattgtatggatatattctgatacatctgctaaaaaccaaactcattatattacggttaatttactatgtttagtcaatggttatattattattctaaataa

SEQ ID NO: 380152 - DNA, 75 bp, Artificial Sequence
  ENSG00000143473_70 (sequence is synthesized)
gctccaagcgtgcaaaaaggcgagaatgtccacaagcactcccgcctggcagagatggagtcttggtctgtcatg

SEQ ID NO: 380153 - DNA, 83 bp, Artificial Sequence
  ENSG00000143473_71 (sequence is synthesized)
ttttcattatgttagccagggtggtctcgaactcccgacttcaagtgatctgctcaccttggcctctcaaagtgctaggatta

SEQ ID NO: 380154 - DNA, 72 bp, Artificial Sequence
  ENSG00000143473_72 (sequence is synthesized)
gggccgaaccatctcttctttatcgccccctttcctctctatctctccctccactaccatctcctctttagc

SEQ ID NO: 380155 - DNA, 120 bp, Artificial Sequence
  ENSG00000143473_73 (sequence is synthesized)
tcatgatgattggctgtaagtatgacagtgctggggtggggttggccatctcttctgttagctggaaacagggaaatggctacagtgccagcaggatcaggagaataataacttaaaaca

SEQ ID NO: 380156 - DNA, 120 bp, Artificial Sequence
  ENSG00000143473_74 (sequence is synthesized)
aggaagagtttttttaagactaggcttacagttaccctgataattaaagcagtatatgcttactgcaaaaaaatttagaaaatacaaaagagtgcaaagtagaaagtaaagactatccat

SEQ ID NO: 380157 - DNA, 120 bp, Artificial Sequence
  ENSG00000143473_75 (sequence is synthesized)
aattctgcttttcagagataactactaatactgttggtgtcttctcttacagactattttctttgcatatctgaatacatatagatttttataaacttaaaatgagatcttgctgcatac

SEQ ID NO: 380158 - DNA, 120 bp, Artificial Sequence
  ENSG00000143473_76 (sequence is synthesized)
gcactttagtaaactactcatagaacagtgaattatggaagtcttttcatgtcaatttttttctttttaataaaaattgtatatatttaaagtatgaaatgagattttgatatagtgaaa

SEQ ID NO: 380159 - DNA, 120 bp, Artificial Sequence
  ENSG00000143473_77 (sequence is synthesized)
cattcctttacatcattaccttttttttggtgaaagcacttgaaatctgctctctcagcaaatttcctgtaggcattacagtattattaactatagccgtcatgctacatgtcctacatg

SEQ ID NO: 380160 - DNA, 120 bp, Artificial Sequence
  ENSG00000143473_78 (sequence is synthesized)
tcaatttgaacatagctgtagcttggcatatagtctaatgtagtatgagaaaaagaatgtatgaaaaatgaatgcaaaacatctcattaattgtattttatattgattatatattgaaat

SEQ ID NO: 380161 - DNA, 120 bp, Artificial Sequence
  ENSG00000143476_0 (sequence is synthesized)
ggagtttggcggccggggcttacagtggcgggagttggaggcgataacgatttgtgttgtgagaggcgcaagctgcgatttctgctgaacttggaggcatttctacgacttttctctcag

SEQ ID NO: 380162 - DNA, 120 bp, Artificial Sequence
  ENSG00000143476_1 (sequence is synthesized)
ctgaggcttttcctccgaccctgatgctcttcaattcggtgctccgccagccccagcttggcgtcctgagaaatggatggtcttcacaataccctcttcaatcccttctgactggttatc

SEQ ID NO: 380163 - DNA, 120 bp, Artificial Sequence
  ENSG00000143476_2 (sequence is synthesized)
agtgcagtggtaatgatgaacacacttcttatggagaaacaggagtcccagttcctccttttggatgtaccttctcttctgctcccaatatggaacatgtactagcagttgccaatgaag

SEQ ID NO: 380164 - DNA, 120 bp, Artificial Sequence
  ENSG00000143476_3 (sequence is synthesized)
aaggctttgttcgattgtataacacagaatcacaaagtttcagaaagaagtgcttcaaagaatggatggctcactggaatgccgtctttgacctggcctgggttcctggtgaacttaaac

SEQ ID NO: 380165 - DNA, 120 bp, Artificial Sequence
  ENSG00000143476_4 (sequence is synthesized)
ttgttacagcagcaggtgatcaaacagccaaattttgggacgtaaaagctggtgagctgattggaacatgcaaaggtcatcaatgcagcctcaagtcagttgccttttctaagtttgaga

SEQ ID NO: 380166 - DNA, 120 bp, Artificial Sequence
  ENSG00000143476_5 (sequence is synthesized)
aagctgtattctgtacgggtggaagagatggcaacattatggtctgggataccaggtgcaacaaaaaagatgggttttataggcaagtgaatcaaatcagtggagctcacaatacctcag

SEQ ID NO: 380167 - DNA, 120 bp, Artificial Sequence
  ENSG00000143476_6 (sequence is synthesized)
acaagcaaaccccttcaaaacccaagaagaaacagaattcaaaaggacttgctccttctgtggatttccagcaaagtgttactgtggtcctctttcaagacgagaataccttagtctcag

SEQ ID NO: 380168 - DNA, 120 bp, Artificial Sequence
  ENSG00000143476_7 (sequence is synthesized)
caggagctgtggatgggataatcaaagtatgggatttacgtaagaattatactgcttatcgacaagaacccatagcatccaagtctttcctgtacccaggtagcagcactcgaaaacttg

SEQ ID NO: 380169 - DNA, 120 bp, Artificial Sequence
  ENSG00000143476_8 (sequence is synthesized)
gatattcaagtctgattttggattccactggctctactttatttgctaattgcacagacgataacatctacatgtttaatatgactgggttgaagacttctccagtggctattttcaatg

SEQ ID NO: 380170 - DNA, 120 bp, Artificial Sequence
  ENSG00000143476_9 (sequence is synthesized)
gacaccagaactctaccttttatgtaaaatccagccttagtccagatgaccagtttttagtcagtggctcaagtgatgaagctgcctacatatggaaggtctccacaccctggcaacctc

SEQ ID NO: 380171 - DNA, 120 bp, Artificial Sequence
  ENSG00000143476_10 (sequence is synthesized)
ctactgtgctcctgggtcattctcaagaggtcacgtctgtgtgctggtgtccatctgacttcacaaagattgctacctgttctgatgacaatacactaaaaatctggcgcttgaatagag

SEQ ID NO: 380172 - DNA, 120 bp, Artificial Sequence
  ENSG00000143476_11 (sequence is synthesized)
gcttagaggagaaaccaggaggtgataaactttccacggtgggttgggcctctcagaagaaaaaagagtcaagacctggcctagtaacagtaacgagtagccagagtactcctgccaaag

SEQ ID NO: 380173 - DNA, 120 bp, Artificial Sequence
  ENSG00000143476_12 (sequence is synthesized)
cccccagggcaaagtgcaatccatccaattcttccccgtcatccgcagcttgtgccccaagctgtgctggagacctccctcttccttcaaatactcctacgttctctattaaaacctctc

SEQ ID NO: 380174 - DNA, 120 bp, Artificial Sequence
  ENSG00000143476_13 (sequence is synthesized)
ctgccaaggcccggtctcccatcaacagaagaggctctgtctcctccgtctctcccaagccaccttcatctttcaagatgtcgattagaaactgggtgacccgaacaccttcctcatcac

SEQ ID NO: 380175 - DNA, 120 bp, Artificial Sequence
  ENSG00000143476_14 (sequence is synthesized)
cacccatcactccacctgcttcggagaccaagatcatgtctccgagaaaagcccttattcctgtgagccagaagtcatcccaagcagaggcttgctctgagtctagaaatagagtaaaga

SEQ ID NO: 380176 - DNA, 120 bp, Artificial Sequence
  ENSG00000143476_15 (sequence is synthesized)
ggaggctagactcaagctgtctggagagtgtgaaacaaaagtgtgtgaagagttgtaactgtgtgactgagcttgatggccaagttgaaaatcttcatttggatctgtgctgccttgctg

SEQ ID NO: 380177 - DNA, 120 bp, Artificial Sequence
  ENSG00000143476_16 (sequence is synthesized)
gtaaccaggaagaccttagtaaggactctctaggtcctaccaaatcaagcaaaattgaaggagctggtaccagtatctcagagcctccgtctcctatcagtccgtatgcttcagaaagct

SEQ ID NO: 380178 - DNA, 120 bp, Artificial Sequence
  ENSG00000143476_17 (sequence is synthesized)
gtggaacgctacctcttcctttgagaccttgtggagaagggtctgaaatggtaggcaaagagaatagttccccagagaataaaaactggttgttggccatggcagccaaacggaaggctg

SEQ ID NO: 380179 - DNA, 120 bp, Artificial Sequence
  ENSG00000143476_18 (sequence is synthesized)
cccagctccatgaggaaaatctgcacatacttccatagaaagtcccaggaggacttctgtggtcctgaacactcaacagaattatagattctaatctgagtgagttactgagctttggtc

SEQ ID NO: 380180 - DNA, 120 bp, Artificial Sequence
  ENSG00000143476_19 (sequence is synthesized)
cactaaaacaagctgagctttggtccactaaaacaagatgaaaaatacaagagtgactctataactctggtctttaagaaagctgccttttcatttttagacaaaatcttttcaacgctg

SEQ ID NO: 380181 - DNA, 120 bp, Artificial Sequence
  ENSG00000143476_20 (sequence is synthesized)
aaatgtacctaatctggttctactaccataatgtatatgcagcttcccgaggatgaatgctgtgtttaaatttcataaagtaaatttgtcactctagcattttgaatgaatagtcttcac

SEQ ID NO: 380182 - DNA, 120 bp, Artificial Sequence
  ENSG00000143476_21 (sequence is synthesized)
tttttaaattattcatcttctctataataatgacatcccagttcatggaggcaaaaaacaagtttcttgttatcctgaaactttctatgctcagtggaaagtatctgccagccacagcat

SEQ ID NO: 380183 - DNA, 120 bp, Artificial Sequence
  ENSG00000143476_22 (sequence is synthesized)
gaggcctgtgaaggctgactgagaaatcctctgctgaagacccctggttctgttctgcctccaacatgtataattttatttgaaatacataatcttttcactatgcttttgtggggtttt

SEQ ID NO: 380184 - DNA, 120 bp, Artificial Sequence
  ENSG00000143476_23 (sequence is synthesized)
ttttaagtatgtgtaaaaatgtgatgctcagataagtacatttatatcagttcagtgttaaaatgcagtctcttgagttaaagtcatctttattttaaatgcagtgataaatgtcaactc

SEQ ID NO: 380185 - DNA, 120 bp, Artificial Sequence
  ENSG00000143476_24 (sequence is synthesized)
ttcggagaaactaggagaacaacaacagaaagctgtgtttgtcttttttctctcaaatatatctcccgtatgagatttcaggtccccatgttttcaccaagcaatctgctatgtcagcca

SEQ ID NO: 380186 - DNA, 120 bp, Artificial Sequence
  ENSG00000143476_25 (sequence is synthesized)
acccaacatcactttctacaggaggttatgatttttgccatttactagaggaagatgttttatgaaatcaatttggggtttgaattcaggtgcagtcatcagttctttaggggctgcaat

SEQ ID NO: 380187 - DNA, 120 bp, Artificial Sequence
  ENSG00000143476_26 (sequence is synthesized)
gttttaaaaaaaataagtcatcagattttaagaaaaaagtgatgatttcttattgatatttttgtaacagaatatagctcttaactgaaaatccagaaccagaaacataaatcttgagtt

SEQ ID NO: 380188 - DNA, 120 bp, Artificial Sequence
  ENSG00000143476_27 (sequence is synthesized)
tcttttcatgtacataaaaagcaatagccttttagtatagatagccctgagccaaaaagtaatagaattttctctagatatttaatacagagagtgtatagactgactctaagttaataa

SEQ ID NO: 380189 - DNA, 120 bp, Artificial Sequence
  ENSG00000143476_28 (sequence is synthesized)
tgtgcaaaatatcttaaacatccctccccttattcaacaattatgtatcagtgatcttgaaccattgttttatatttttcacctttgtaacctcatggaaagaggctttacatactttct

SEQ ID NO: 380190 - DNA, 120 bp, Artificial Sequence
  ENSG00000143476_29 (sequence is synthesized)
atgtactatttacttagaagggagcccccttccagtcatgaaacttcatttgttttatccatatccctgaggactgtgtagactttatgtcagtttttgtcattatttgaaaatctattc

SEQ ID NO: 380191 - DNA, 120 bp, Artificial Sequence
  ENSG00000143476_30 (sequence is synthesized)
tgacaactttttaattcctttgatcttataagttaaagctgtaacaactgaaattgcatggatcaagtaagcatagttttatccagggagaaaaataaaaggaagccatagaattgctct

SEQ ID NO: 380192 - DNA, 120 bp, Artificial Sequence
  ENSG00000143476_31 (sequence is synthesized)
ggtcaaaaccaagcacaccatagccttaactgaatatttaggaaatctgcctaatctgcttatatttggtgtttgttttttgactgttgggctttgggaagatgttatttatgaccaata

SEQ ID NO: 380193 - DNA, 120 bp, Artificial Sequence
  ENSG00000143476_32 (sequence is synthesized)
tctgccagtaacgctgtttatctcacttgctttgaaagccaatgggggaaaaaaatccatgaaaaaaaaaagattgataaagtagatgattttgtttgtatccctacccatctcctggca

SEQ ID NO: 380194 - DNA, 120 bp, Artificial Sequence
  ENSG00000143476_33 (sequence is synthesized)
gccctactgagtgaaattgggatacatttggctgtcagaaattataccgagtctactgggtataacatgtctcacttggaaagctagtacttttaaatgggtgccaaaggtcaactgtaa

SEQ ID NO: 380195 - DNA, 120 bp, Artificial Sequence
  ENSG00000143476_34 (sequence is synthesized)
tgagataattatccctgcctgtgtccatgtcagactttgagctgatcctgaataataaagccttttaccttatctgatgtccttttctgagctttttgcattacctagaagcagtctaca

SEQ ID NO: 380196 - DNA, 120 bp, Artificial Sequence
  ENSG00000143476_35 (sequence is synthesized)
aaaaagaactatagtagtcaagaatcccttctacttgttcattaaaatgtttattcccaaagttataatctatttcaagctgaaagagcttttaataaaaaacatcttgcttggatcaga

SEQ ID NO: 380197 - DNA, 120 bp, Artificial Sequence
  ENSG00000143476_36 (sequence is synthesized)
gttacgcatgcgccctggtcaccccgcggtttgtccgcgcctctgctaccccctgcgcaggcgctcaaggagctcttggactccaggttcccgcggctgggagaaaaggaggcggggatc

SEQ ID NO: 380198 - DNA, 120 bp, Artificial Sequence
  ENSG00000143476_37 (sequence is synthesized)
gtaacaaaagacatactagtagaatgtatatgaagaataaactaaagagtcagctttgttggaaatctggaatgattcctgaaagcaagaaatggatgtacatgatctttaagatattat

SEQ ID NO: 380199 - DNA, 120 bp, Artificial Sequence
  ENSG00000143476_38 (sequence is synthesized)
tttctatatcctgtttattagacaaaataattatccagtcacaaggccttaagacacacctgttttttaatgtattttgaatcttgattgaaatttcttaattcccttcttggtactccc

SEQ ID NO: 380200 - DNA, 120 bp, Artificial Sequence
  ENSG00000143476_39 (sequence is synthesized)
atccatctccacgaagtccgtcatcccagacacccaattccaggagacagagcggaaagaaattgccaagcccgctgcagtctgcaaaggtcttcacaaatcagaatcaactggtaatta

SEQ ID NO: 380201 - DNA, 120 bp, Artificial Sequence
  ENSG00000143479_0 (sequence is synthesized)
acttcccagccggggccagtcgggagcgaaagtgcgctgagctgcagtgtctggtcgagagtacccgtgggagcgtcgcgccgcggaggcagccgtcccggcgtaggtggcgtggccgac

SEQ ID NO: 380202 - DNA, 120 bp, Artificial Sequence
  ENSG00000143479_1 (sequence is synthesized)
cggacccccaactggcgcctctccccgcgcggggtcccgagctaggagatgggaggcacagctcgtgggcctgggcggaaggatgcggggccgcctggggccgggctcccgccccagcag

SEQ ID NO: 380203 - DNA, 120 bp, Artificial Sequence
  ENSG00000143479_2 (sequence is synthesized)
cggaggttgggggatggtgtctatgacaccttcatgatgatagatgaaaccaaatgtcccccctgttcaaatgtactctgcaatccttctgaaccacctccacccagaagactaaatatg

SEQ ID NO: 380204 - DNA, 120 bp, Artificial Sequence
  ENSG00000143479_3 (sequence is synthesized)
accactgagcagtttacaggagatcatactcagcactttttggatggaggtgagatgaaggtagaacagctgtttcaagaatttggcaacagaaaatccaatactattcagtcagatggc

SEQ ID NO: 380205 - DNA, 120 bp, Artificial Sequence
  ENSG00000143479_4 (sequence is synthesized)
atcagtgactctgaaaaatgctctcctactgtttctcagggtaaaagttcagattgcttgaatacagtaaaatccaacagttcatccaaggcacccaaagtggtgcctctgactccagaa

SEQ ID NO: 380206 - DNA, 120 bp, Artificial Sequence
  ENSG00000143479_5 (sequence is synthesized)
caagccctgaagcaatataaacaccacctcactgcctatgagaaactggaaataattaattatccagaaatttactttgtaggtccaaatgccaagaaaagacatggagttattggtggt

SEQ ID NO: 380207 - DNA, 120 bp, Artificial Sequence
  ENSG00000143479_6 (sequence is synthesized)
cccaataatggagggtatgatgatgcagatggggcctatattcatgtacctcgagaccatctagcttatcgatatgaggtgctgaaaattattggcaaggggagttttgggcaggtggcc

SEQ ID NO: 380208 - DNA, 120 bp, Artificial Sequence
  ENSG00000143479_7 (sequence is synthesized)
agggtctatgatcacaaacttcgacagtacgtggccctaaaaatggtgcgcaatgagaagcgctttcatcgtcaagcagctgaggagatccggattttggagcatcttaagaaacaggat

SEQ ID NO: 380209 - DNA, 120 bp, Artificial Sequence
  ENSG00000143479_8 (sequence is synthesized)
aaaactggtagtatgaacgttatccacatgctggaaagtttcacattccggaaccatgtttgcatggcctttgaattgctgagcatagacctttatgagctgattaaaaaaaataagttt

SEQ ID NO: 380210 - DNA, 120 bp, Artificial Sequence
  ENSG00000143479_9 (sequence is synthesized)
cagggttttagcgtccagttggtacgcaagtttgcccagtccatcttgcaatctttggatgccctccacaaaaataagattattcactgcgatctgaagccagaaaacattctcctgaaa

SEQ ID NO: 380211 - DNA, 120 bp, Artificial Sequence
  ENSG00000143479_10 (sequence is synthesized)
caccacgggcgcagttcaaccaaggtcattgactttgggtccagctgtttcgagtaccagaagctctacacatatatccagtctcggttctacagagctccagaaatcatcttaggaagc

SEQ ID NO: 380212 - DNA, 120 bp, Artificial Sequence
  ENSG00000143479_11 (sequence is synthesized)
cgctacagcacaccaattgacatatggagttttggctgcatccttgcagaacttttaacaggacagcctctcttccctggagaggatgaaggagaccagttggcctgcatgatggagctt

SEQ ID NO: 380213 - DNA, 120 bp, Artificial Sequence
  ENSG00000143479_12 (sequence is synthesized)
ctagggatgccaccaccaaaacttctggagcaatccaaacgtgccaagtactttattaattccaagggcataccccgctactgctctgtgactacccaggcagatgggagggttgtgctt

SEQ ID NO: 380214 - DNA, 120 bp, Artificial Sequence
  ENSG00000143479_13 (sequence is synthesized)
gtggggggtcgctcacgtaggggtaaaaagcggggtcccccaggcagcaaagactgggggacagcactgaaagggtgtgatgactacttgtttatagagttcttgaaaaggtgtcttcac

SEQ ID NO: 380215 - DNA, 120 bp, Artificial Sequence
  ENSG00000143479_14 (sequence is synthesized)
tgggacccctctgcccgcttgaccccagctcaagcattaagacacccttggattagcaagtctgtccccagacctctcaccaccatagacaaggtgtcagggaaacgggtagttaatcct

SEQ ID NO: 380216 - DNA, 120 bp, Artificial Sequence
  ENSG00000143479_15 (sequence is synthesized)
gcaagtgctttccagggattgggttctaagctgcctccagttgttggaatagccaataagcttaaagctaacttaatgtcagaaaccaatggtagtatacccctatgcagtgtattgcca

SEQ ID NO: 380217 - DNA, 120 bp, Artificial Sequence
  ENSG00000143479_16 (sequence is synthesized)
aaactgattagctagtggacagagatatgcccagagatgcatatgtgtatatttttatgatcttacaaacctgcaaatggaaaaaatgcaagcccattggtggatgtttttgttagagta

SEQ ID NO: 380218 - DNA, 120 bp, Artificial Sequence
  ENSG00000143479_17 (sequence is synthesized)
gactttttttaaacaagacaaaacatttttatatgattataaaagaattcttcaagggctaattacctaaccagcttgtattggccatctggaatatgcattaaatgactttttataggt

SEQ ID NO: 380219 - DNA, 120 bp, Artificial Sequence
  ENSG00000143479_18 (sequence is synthesized)
caatgcatctttgttattatcgtcagatgtatttcaactgatgtattatactattggtttaaatctctttctctcaagatagaaggtgtagcaaaagtatcccaactactcctcgcttct

SEQ ID NO: 380220 - DNA, 120 bp, Artificial Sequence
  ENSG00000143479_19 (sequence is synthesized)
agtgtccctcggcatctgttctggaggggtaatttgggatgtggtgttagttgtggctgagagccagtgctaggtcccttgccccactaggccattctctaggctcattctaggtgaaag

SEQ ID NO: 380221 - DNA, 120 bp, Artificial Sequence
  ENSG00000143479_20 (sequence is synthesized)
agctcacagcagactgtggggtgggggagcaccaggaagctgttggtgacctggacaactggtgtccctggttttcagtgactcgctcctcttcccttcagttctctgatgtttggtgtt

SEQ ID NO: 380222 - DNA, 120 bp, Artificial Sequence
  ENSG00000143479_21 (sequence is synthesized)
attattttatgttgttattttgcctctgatttgtttcctagtcactcaaagcattttacagaagccttaccactttactaaataaccctgtaaggtactgatttaaaaactgagtcatat

SEQ ID NO: 380223 - DNA, 120 bp, Artificial Sequence
  ENSG00000143479_22 (sequence is synthesized)
gcatccctcctcctttcctctcccatgcccaaggaagataaaacagcttctctgccacaattgacccagagtggtaaagatagagaatcagcatgaaaactgcagttccccagctttgtg

SEQ ID NO: 380224 - DNA, 120 bp, Artificial Sequence
  ENSG00000143479_23 (sequence is synthesized)
gtactccacggaccagcctccttgctgcattttcatagaatctcttccttataaaagtaatcactctcggataaaccttactacagtttaaaaatgcttccctcttctctttacagctac

SEQ ID NO: 380225 - DNA, 120 bp, Artificial Sequence
  ENSG00000143479_24 (sequence is synthesized)
ctgccacttcaatgtgccacatttttccccccactttcacgttaagcttaatgctattccctagatctgagtgaacttcagttagaagaagaaaactaaaaatccagaaactggtgataa

SEQ ID NO: 380226 - DNA, 120 bp, Artificial Sequence
  ENSG00000143479_25 (sequence is synthesized)
tcaagttttccctttttatgtttcttaattttattctcttcaacagcttttctttttctctgctaagatttaaacagtgagggctgataataaaactaattgttaagccagtgtcctact

SEQ ID NO: 380227 - DNA, 120 bp, Artificial Sequence
  ENSG00000143479_26 (sequence is synthesized)
tacaagggtggagacgggacagaagctaactcactgctactgggttttgtttgttgtttcctgtcccttgctctatttctgtcctcttccagaacaaaagtatgctcaagttctatccta

SEQ ID NO: 380228 - DNA, 66 bp, Artificial Sequence
  ENSG00000143479_27 (sequence is synthesized)
gtcctcttccagaacaaaagtatgctcaagttctatcctaaatgtgtgctcttggctgggtacctt

SEQ ID NO: 380229 - DNA, 120 bp, Artificial Sequence
  ENSG00000143479_28 (sequence is synthesized)
ctaggcaacagagtgagactctgtctaaaaaacaaaccaaaaaaagtgtgttctttaaagtagaatatttgctttttacaatatagttctcagaatgatccagttccatttattattcta

SEQ ID NO: 380230 - DNA, 120 bp, Artificial Sequence
  ENSG00000143479_29 (sequence is synthesized)
tctagaatgtggtgcaaactcaatgacattggaagagactctttttgttgggcagtgtaggaacaagaaaagaaaataaaaatgccatgagtatattatttaaggaacttttgttttatc

SEQ ID NO: 380231 - DNA, 120 bp, Artificial Sequence
  ENSG00000143479_30 (sequence is synthesized)
caaaagtagtcatgattgctgtagcataggctgtgaaaaatgagagagtgcaaatctctctcatttaaatgtccacagtggctttagtctcccaagtacaagggccagatggcagagaac

SEQ ID NO: 380232 - DNA, 120 bp, Artificial Sequence
  ENSG00000143479_31 (sequence is synthesized)
agcttaaactgagccttcagcctcattaataggaggaagtcttggtacttttggtgactaagaaactggattatttaaaaccttaattatctcctttactcctggtttacagaaggcaat

SEQ ID NO: 380233 - DNA, 120 bp, Artificial Sequence
  ENSG00000143479_32 (sequence is synthesized)
aaattagtctggttattggttttcttgtctgatagtggcatcttgatctcttcagatgtcacactaaatgctgctcataacccatcctcctcttctttattcatcactgccttcttcaag

SEQ ID NO: 380234 - DNA, 120 bp, Artificial Sequence
  ENSG00000143479_33 (sequence is synthesized)
ggaggtcttgaaactgcctcatctacctcatgatctgctagtcgagatagtgactctttggaagttggtagtccaatgtctgcttccccgcattaaccacattgcgtaggtttgggaatt

SEQ ID NO: 380235 - DNA, 120 bp, Artificial Sequence
  ENSG00000143479_34 (sequence is synthesized)
ttgcaggtgctaaatcatcatggccaggaagatgaaacaccttgagaaatgggaacatctcttcactgtgttcttggatcagccttctttcaactaccaagaaatggatgatttctctgc

SEQ ID NO: 380236 - DNA, 120 bp, Artificial Sequence
  ENSG00000143479_35 (sequence is synthesized)
caactccaggaagtagtacagcatgattgaatccttcttcagtgaatcttttcattgtaacttagggtgtaaaagctcatatctactcaaaaaactcaaatctactctttcagtagatat

SEQ ID NO: 380237 - DNA, 120 bp, Artificial Sequence
  ENSG00000143479_36 (sequence is synthesized)
gagcttacattgacttatgaatggttttcctgtaggcccaacagtgtcatgaccctccagttgaaacaaagcatgagttatttttatatcgagtccttgaactgctagccaggtagatgt

SEQ ID NO: 380238 - DNA, 120 bp, Artificial Sequence
  ENSG00000143479_37 (sequence is synthesized)
ttccttgaagtccagagcaggatccaagtcagatgaaggaggtggcacacctggcttaactgcagatcagggagcattgaacctctacaatttgctgcattggatttctgcatgggtttc

SEQ ID NO: 380239 - DNA, 120 bp, Artificial Sequence
  ENSG00000143479_38 (sequence is synthesized)
tcactgaatagtaaattagagaaaatgctacttttactattttgcattttatatcaacattagcagcctgttcccactcaggtgctgtccaaggcacatgtttccttgggatgtttggac

SEQ ID NO: 380240 - DNA, 120 bp, Artificial Sequence
  ENSG00000143479_39 (sequence is synthesized)
agaatgatctggcttgatgtatttcttgggctctggtaccacatcatagagttggttaaatgtagccagcagcagtgtcaagacagctgacactgtcttccaagagtgaatgcattggcc

SEQ ID NO: 380241 - DNA, 120 bp, Artificial Sequence
  ENSG00000143479_40 (sequence is synthesized)
tttggaactgctgctaaagccatgtgtggggtggcgagcacatctttaggtggcagcaaggctatatctgattgacacagatctgaagtctctaacaccatattgctgttgtcctgaatt

SEQ ID NO: 380242 - DNA, 120 bp, Artificial Sequence
  ENSG00000143479_41 (sequence is synthesized)
ttctaacttggagaaatttaaggatctcctgcattatctaggcagagcatatgttgaggttgttttgccagttgttatcagtgttgaagaactgctcctgtaagcaaactgttaaaagca

SEQ ID NO: 380243 - DNA, 120 bp, Artificial Sequence
  ENSG00000143479_42 (sequence is synthesized)
ttactaccccatatgcatctgatgtacactgtgttttggtgtttgtgtttttagtgagagttctagccagtactgtgcctgaacttgggagagaaaggggcctgtggctgaggttggtgc

SEQ ID NO: 380244 - DNA, 120 bp, Artificial Sequence
  ENSG00000143479_43 (sequence is synthesized)
gtgctctatttctgtgtatcgaatggactacaaggttactgaaactgggctaagggaaagtgtatagacaactcattacactgtagacagattttagaaagctacaggaaggcaaatgga

SEQ ID NO: 380245 - DNA, 120 bp, Artificial Sequence
  ENSG00000143479_44 (sequence is synthesized)
tgtttctgcctcaatttggcaaccgagagagtgatgcagagcagagtcattgaagttggcatacctgtcttctgcaggccaattcaagtttgaggagagtgggctgcttaaaaacatggt

SEQ ID NO: 380246 - DNA, 120 bp, Artificial Sequence
  ENSG00000143479_45 (sequence is synthesized)
gctcgtccacatggatttgaggaagtttatggttgggtttcaagcttagggacaagttgtggtttttagaggcagtaactctatgccaccttattggccactgttaaaagtttcacttgg

SEQ ID NO: 380247 - DNA, 120 bp, Artificial Sequence
  ENSG00000143479_46 (sequence is synthesized)
atccctgcccagccatagcaatgagtgactgaattggatcagagttagtacagaaattcagactgtctcttcctcagttactggattgttctttagccatttttcttctagtcatttcag

SEQ ID NO: 380248 - DNA, 120 bp, Artificial Sequence
  ENSG00000143479_47 (sequence is synthesized)
tcaaactggttaggttaggtgacttactgagttctaaattgacaaattttaatttccaagttgtttctgacacggtgagagttgggttagaatttttatttcattccccaagtcattttt

SEQ ID NO: 380249 - DNA, 82 bp, Artificial Sequence
  ENSG00000143479_48 (sequence is synthesized)
gtctcgctctgtcgtccaggctggagtgaagtggcgcagtgttgttctcaacctccagagtaactgggactacagtcacgtg

SEQ ID NO: 380250 - DNA, 120 bp, Artificial Sequence
  ENSG00000143479_49 (sequence is synthesized)
acctccagagtaactgggactacagtcacgtgctaccatgcctggctaattttttgtatatctgtagagagggggtttcaccatgttgctcgggctggtcttgaactcctgggctcaagt

SEQ ID NO: 380251 - DNA, 120 bp, Artificial Sequence
  ENSG00000143479_50 (sequence is synthesized)
tcaaagtgctgggattataggtgtgagcgaccgtgcccagcctcattttttctttcaatatggaaaattggctaatccacctaatacctgctcatcttctagtattctatcctaccatct

SEQ ID NO: 380252 - DNA, 120 bp, Artificial Sequence
  ENSG00000143479_51 (sequence is synthesized)
agtattctatcctaccatctaccctcagagttattgatgtactctttcatcatgtgctatcatgatttctccttagattagaaagtaagcttcaaatgggagtgtgtcttcatattgttc

SEQ ID NO: 380253 - DNA, 120 bp, Artificial Sequence
  ENSG00000143479_52 (sequence is synthesized)
tgaattaacagattttgatgcccgctgatcatgtgcagatgatggaagctcatttccttccatgaaccaggagcatgctcgcctcttcttttaagttgacccacacaatctctgatgtct

SEQ ID NO: 380254 - DNA, 120 bp, Artificial Sequence
  ENSG00000143479_53 (sequence is synthesized)
tctttttgggaaagggtaatgagataaggattaaggacattttcttctggtccagtgttagatacagttaccttgataataatgaaaaaaaaatgaataccaccaaaacctaactatgat

SEQ ID NO: 380255 - DNA, 120 bp, Artificial Sequence
  ENSG00000143479_54 (sequence is synthesized)
gtaaggattctgcttctgccccacaggggctctgaaagagtctagcctggatcttctttcccagaggaagtttgacttatgaccatattagtatgctttattccttggtgtttaagggag

SEQ ID NO: 380256 - DNA, 120 bp, Artificial Sequence
  ENSG00000143479_55 (sequence is synthesized)
ttggggcagacaggttagctggctaatgtcattacaatttagtttttgtgacaatctgttaagaagggggcttattgcataatcaaaaaagaacaataaaaaaataaaaatttctactgt

SEQ ID NO: 380257 - DNA, 120 bp, Artificial Sequence
  ENSG00000143479_56 (sequence is synthesized)
gaaactatttcaatctgtagcagctggtcatgttaaaacactttctgttttgcttaattcgtaactaggcataattaaagttaaatgctaaattttaggtagcagctgataaatggttct

SEQ ID NO: 380258 - DNA, 120 bp, Artificial Sequence
  ENSG00000143479_57 (sequence is synthesized)
aagctttcctgacagaatactcctactactttggtgaatcatggaaaactctttctcctttatttttaattatttcttttccatctgttattgatgtcatcaacacggaagttggaaagg

SEQ ID NO: 380259 - DNA, 120 bp, Artificial Sequence
  ENSG00000143479_58 (sequence is synthesized)
tgacaatgattgttctagactgcctctgtaatgctttttctcctctgagaattaaaaatacatacttacaccttgagccaggtagaattgccagaacatgttttcctccgtgtcttcggt

SEQ ID NO: 380260 - DNA, 120 bp, Artificial Sequence
  ENSG00000143479_59 (sequence is synthesized)
ctagatgaccaatctgtagaacgctataacttactatgcgtagagcagcggcaggcattcatgctatggaaaacctggagtcagtacaaataaggagtaagaaaaggccagggattggca

SEQ ID NO: 380261 - DNA, 120 bp, Artificial Sequence
  ENSG00000143479_60 (sequence is synthesized)
aatcaaagaagagttctcttctgccagggattagcctcctagttttaaatatatttttaatatccccattttaacatactccattttcaccttcaacctatccttcctgaagcccaaact

SEQ ID NO: 380262 - DNA, 120 bp, Artificial Sequence
  ENSG00000143479_61 (sequence is synthesized)
tttaaagaatttacttccagacctggccttcagcctaatatgattagggtgtttttctgagtgtctgtcaaattatgctggctaatttcaatgagaaaagattttagagtcacagtgaac

SEQ ID NO: 380263 - DNA, 120 bp, Artificial Sequence
  ENSG00000143479_62 (sequence is synthesized)
ccatccataaaaggactaaaagctctctctggtccctgagatccacaacccctgagagaagccagaactacaaatgcatcgtctagactttgaagaagcagggtatgattcttaatatag

SEQ ID NO: 380264 - DNA, 120 bp, Artificial Sequence
  ENSG00000143479_63 (sequence is synthesized)
cccacccatcgctaagtcaagcctagactctaatatttttctataacaggagaagcctccctgactggagactagagtctcacatcttctgccaccacatgaatagactaaaaagaaagg

SEQ ID NO: 380265 - DNA, 120 bp, Artificial Sequence
  ENSG00000143479_64 (sequence is synthesized)
agagtcccacatcaggccaagtggtgacctgtggctatttcagctcagaatgtcagcctctgaagcatcaggtttgaatgactttggtgtcatgggattctgtccattgtccgtttgagt

SEQ ID NO: 380266 - DNA, 120 bp, Artificial Sequence
  ENSG00000143479_65 (sequence is synthesized)
ctgctgacatgcttcctctggaaagtgcagtttggcatggatgagtcagtggttttttattttggggtgttttttaaaaaataaaaatgaattgctttgagaattttttagcatcctgat

SEQ ID NO: 380267 - DNA, 120 bp, Artificial Sequence
  ENSG00000143479_66 (sequence is synthesized)
ggcgctggcaagcgaagcttgggggtggggaggaggtagagtgagccctcagtaggagggacgagggcaggggtctgactgcctccccgggaccgcccccacctcctctctatcagggcc

SEQ ID NO: 380268 - DNA, 120 bp, Artificial Sequence
  ENSG00000143479_67 (sequence is synthesized)
ccctccccccatccctgtctcaccgggcgcgggggacggggctagagcggagttagagcaagaagaatttccacccctggattccctctgaaaccctagatcggggtatatgttaaggga

SEQ ID NO: 380269 - DNA, 120 bp, Artificial Sequence
  ENSG00000143479_68 (sequence is synthesized)
ttacgaaaatctaggactttttgtggggctttttattaaagggggggagcccgggagcaataccttggaaagaagccctgttgcttagagcggataaccaacggctgaactcttggggtt

SEQ ID NO: 380270 - DNA, 120 bp, Artificial Sequence
  ENSG00000143479_69 (sequence is synthesized)
tgctgtgaggggtgcggtctagcttcgaatgtacagtggtggagccacagtgttaaagaacagagaagtgatccttaatcatttagaattttgcctccaccatccaccagaaaatgaagt

SEQ ID NO: 380271 - DNA, 120 bp, Artificial Sequence
  ENSG00000143479_70 (sequence is synthesized)
cttgctgcctctgaaaaggcagaaggaagttattctctttctagctttgtggagaaaagcaggtgatacctcaacaccaagccatagggagcttccagtgactctgcaaagaaaaaaaag

SEQ ID NO: 380272 - DNA, 120 bp, Artificial Sequence
  ENSG00000143479_71 (sequence is synthesized)
accaactcagactccagagcagccccaccagagcctgagcagttggagccttccaccttcccacccctgcgttcctcttgtccttgggcatctcctgtgtgtgcttcggggaggtgatag

SEQ ID NO: 380273 - DNA, 120 bp, Artificial Sequence
  ENSG00000143479_72 (sequence is synthesized)
cagtgctatagaagtagtggagtgaagatgttttcctatccccgtggccttagatagtgtctttgtctttgaagagtcaggggcatctggggagctgtctaaccgtatctatcctgtaga

SEQ ID NO: 380274 - DNA, 120 bp, Artificial Sequence
  ENSG00000143479_73 (sequence is synthesized)
ctcgggaggaagctgctggctgctgtagacagaagagaatccctgtgcttcgggctcctaggaaggtgtctgccatcctctctgtgccactgttatctgtcttcttccccatcagataac

SEQ ID NO: 380275 - DNA, 120 bp, Artificial Sequence
  ENSG00000143479_74 (sequence is synthesized)
catgtctctccttggtccacagagccctacctgccccaggaaaggacagtgttgggagggtaactcccacccctcactcctccccctcattcctgcctccacaagcatcttctgggaaag

SEQ ID NO: 380276 - DNA, 120 bp, Artificial Sequence
  ENSG00000143479_75 (sequence is synthesized)
gtgaatgagggaagagacatttgcacttgtcccttacctacctaagttctatccccagtggccacttctgggggtgttgtcttctctctggagttttgggggacctattagggggcatgt

SEQ ID NO: 380277 - DNA, 120 bp, Artificial Sequence
  ENSG00000143479_76 (sequence is synthesized)
gtggccataggtcaagcctcattctctaactggccttaccaagacttaagctgaggttttgtgttcacctgtctgggttgcttgccatttctcaaatgttctgccagtcagaggtgggag

SEQ ID NO: 380278 - DNA, 120 bp, Artificial Sequence
  ENSG00000143479_77 (sequence is synthesized)
gaggtcggcaggaatgtacttggtcatctcgaaccccatcagaatgtgtgtggaggcctcctggcagcttctatgcagggtccagctagatccctgggcttttcctgagatacacggggc

SEQ ID NO: 380279 - DNA, 120 bp, Artificial Sequence
  ENSG00000143479_78 (sequence is synthesized)
taacccacttcttacggattaatttttccacatcggaaatcagaagccattccccagggcctccccttcagtttcattatctcctttgactctgcccacaacctttgaaaaggtctcgct

SEQ ID NO: 380280 - DNA, 120 bp, Artificial Sequence
  ENSG00000143479_79 (sequence is synthesized)
gttcttcccacggagagagaggtgcaaggcttgctcagcctcacacagccaatccgtggcaaaggatggcgggaattcaggtggccccaatctcaacccatcctcttcccaccctgtatc

SEQ ID NO: 380281 - DNA, 120 bp, Artificial Sequence
  ENSG00000143479_80 (sequence is synthesized)
ctttttagtttatttacaggaaaacatgttcaaaggtataattactaaagtgctcctggttacacaataatacgtctttactgaaaaacaataaattaatgagaaaagagatgcaaaaaa

SEQ ID NO: 380282 - DNA, 120 bp, Artificial Sequence
  ENSG00000143486_0 (sequence is synthesized)
ccttttcgcggccgggccccagcatggctgcccccacggctgagggcctggcagctgctgcgccctcgctttcttgacattccctggcttctgtgctctcttccccaggccaccccagca

SEQ ID NO: 380283 - DNA, 120 bp, Artificial Sequence
  ENSG00000143486_1 (sequence is synthesized)
gacatgtttgccaaggcctttcgggtcaagtccaacacggccatcaaggggtcggacaggagaaagcttcgagctgatgtgacaactgctttccccacccttggaactgatcaagtctct

SEQ ID NO: 380284 - DNA, 120 bp, Artificial Sequence
  ENSG00000143486_2 (sequence is synthesized)
gagttagtacctggaaaggaggagctcaacattgtgaagttgtatgctcacaaaggggatgcagtgactgtgtacgtgagtggtggtaaccccatcctctttgaactggagaaaaatctg

SEQ ID NO: 380285 - DNA, 120 bp, Artificial Sequence
  ENSG00000143486_3 (sequence is synthesized)
tatccaacagtgtacacgctgtggtcctatcctgatcttctgccaacctttacaacatggcctctggtgctcgagaaactggtagggggagcagatttgatgctgcctggactggtgatg

SEQ ID NO: 380286 - DNA, 120 bp, Artificial Sequence
  ENSG00000143486_4 (sequence is synthesized)
ccccctgctggtctgcctcaggtacagaagggcgacctctgtgccatttctttggtggggaacagagcccctgtagccattggagttgcagccatgtccacagctgagatgctcacgtca

SEQ ID NO: 380287 - DNA, 120 bp, Artificial Sequence
  ENSG00000143486_5 (sequence is synthesized)
ggcctgaagggaaggggcttctctgtgctccacacttaccaggaccacttgtggcggtctggaaacaagtcctctccaccttccattgctccactggccctggattcagcagatctcagt

SEQ ID NO: 380288 - DNA, 120 bp, Artificial Sequence
  ENSG00000143486_6 (sequence is synthesized)
gaagagaaggggtctgtccagatggactccaccctgcagggagacatgaggcacatgaccctggagggggaagaggagaatggggaggttcaccaggcacgtgaagacaagtctctctca

SEQ ID NO: 380289 - DNA, 120 bp, Artificial Sequence
  ENSG00000143486_7 (sequence is synthesized)
gaagccccagaagacaccagcaccaggggcctgaaccaagactccacagatagcaaaacgcttcaagaacaaatggatgagctgttacagcaatgcttcttacatgccttgaagtgccga

SEQ ID NO: 380290 - DNA, 120 bp, Artificial Sequence
  ENSG00000143486_8 (sequence is synthesized)
agaagtcaagctacaaaaagctctctaagttcctgcagcaaatgcagcaggagcagattatacaggtgaaggagctgagcaaaggggtggagagcattgtggctgtggactggaaacacc

SEQ ID NO: 380291 - DNA, 120 bp, Artificial Sequence
  ENSG00000143486_9 (sequence is synthesized)
cgaggattacatctttcgtcatacccgagccctccccgacctcccagactatccaggagggtagcagggaacagccctatcaccctccagatataaaacccctctactgtgtcccagcca

SEQ ID NO: 380292 - DNA, 120 bp, Artificial Sequence
  ENSG00000143486_10 (sequence is synthesized)
gcatgaccctgctcttccaggagtctggccacaagaaggggagctttctggagggcagtgaggtccgaacgatcgtcattaactacgccaagaaaaatgacctggttgatgcagacaaca

SEQ ID NO: 380293 - DNA, 120 bp, Artificial Sequence
  ENSG00000143486_11 (sequence is synthesized)
aaaatcttgtgagattggatcccatcctatgtgactgcatcttagagaaaaatgaacagcatacagtcatgaagcttccatgggacagtcttctgaccaggtgtttggaaaaattacagc

SEQ ID NO: 380294 - DNA, 120 bp, Artificial Sequence
  ENSG00000143486_12 (sequence is synthesized)
ctgcctatcaagtgacccttcccggacaagagcccattgtgaagaaagggagaatctgtccaattgacatcaccctagcacaaagagcgtctaataaaaaggtgaccgtggtccggaact

SEQ ID NO: 380295 - DNA, 120 bp, Artificial Sequence
  ENSG00000143486_13 (sequence is synthesized)
tggaggcctatggtctggacccatactcagtggctgccatccttcagcagcgatgccaggctagcaccaccgtcaatcctgcccctggggccaaggacagccttcaggtgcagatccagg

SEQ ID NO: 380296 - DNA, 120 bp, Artificial Sequence
  ENSG00000143486_14 (sequence is synthesized)
gaaaccaggtccaccacctcggctggctattgcttgaagagtatcagctccctcgaaaacacatccaaggtctagaaaaggccctcaaacctggcaagaagaagtgacagactcttttgt

SEQ ID NO: 380297 - DNA, 120 bp, Artificial Sequence
  ENSG00000143486_15 (sequence is synthesized)
ctcacgtggtggatccggtggaaatccaagctctgggctggtaatttttatgagcattttcagcttttgcaaatacaaaatataattctttacaaaaataaatttttattctaatctaaa

SEQ ID NO: 380298 - DNA, 120 bp, Artificial Sequence
  ENSG00000143486_16 (sequence is synthesized)
agagcgtctaataaaaagataacaaaactgaggctgagtttaagaaacatgcctgtggtcccctgctagtaagaagctaagtaggaactggaatcaaatccatctaaggcccatgctctt

SEQ ID NO: 380299 - DNA, 120 bp, Artificial Sequence
  ENSG00000143486_17 (sequence is synthesized)
ctcaattcaccatgtagccaccatgggacggcatcttttgctgaaggggccggcctgccacacccataatgatcactgaaactctgtgctgcggggctgggatgagcagctgttaaacca

SEQ ID NO: 380300 - DNA, 120 bp, Artificial Sequence
  ENSG00000143486_18 (sequence is synthesized)
tgttgcagaccacccaagggcaagcagctctggccatctcccacttgccggagaaattaaaacgtttttgtggacctctaaagtcgtgtgtgcctgtggcacgatgcctgctgtgcctca

SEQ ID NO: 380301 - DNA, 120 bp, Artificial Sequence
  ENSG00000143486_19 (sequence is synthesized)
tggagaagtgaccatactttccagctgttcagtcccagaccaccctgaaccagagtactgcagagttaattaaggatggacggtgggtaggtgagtgagtggatcccaataccccatccc

SEQ ID NO: 380302 - DNA, 120 bp, Artificial Sequence
  ENSG00000143486_20 (sequence is synthesized)
aggccaactctctcctaagctctctcagttctttcaggccaatttagagagtattcctttgcaaatgatatatgccataagggattgatatgcagaatatataaactaccacaatacaaa

SEQ ID NO: 380303 - DNA, 120 bp, Artificial Sequence
  ENSG00000143486_21 (sequence is synthesized)
ggtgctcgagaaactggtagggggagcagatttgatgctgcctggactggtgatgccccctgctggtctgcctcagccccgaaggacgacaactggacataaagaagtcaagctacaaaa

SEQ ID NO: 380304 - DNA, 120 bp, Artificial Sequence
  ENSG00000143486_22 (sequence is synthesized)
ccctgctggtctgcctcagagcccctgtagccattggagttgcagccatgtccacagctgagatgctcacgtcaggcctgaagggaaggggcttctctgtgctccacacttaccaggacc

SEQ ID NO: 380305 - DNA, 120 bp, Artificial Sequence
  ENSG00000143486_23 (sequence is synthesized)
tcaggagtgagagttttggtcctagccatgtctttaagcaagttgctaagcccagacttttatttccttacaaatataaagaaaatatttttttcccctgtttggacaagtaatgagaga

SEQ ID NO: 380306 - DNA, 120 bp, Artificial Sequence
  ENSG00000143486_24 (sequence is synthesized)
gaactttattttctaagtgaattatagaatcttagacccaaaggaagaccttagggatcatctgctctgcctctcagtacagtgatactcgtttttttatagccctggtcaatctggccc

SEQ ID NO: 380307 - DNA, 120 bp, Artificial Sequence
  ENSG00000143486_25 (sequence is synthesized)
tagctgcgatgcacattttagacatcatgtgaccccatgatgagtgcttctgaatcctaatcactgcagggtagacctttagactccaggattataacctgattacttttatgttattca

SEQ ID NO: 380308 - DNA, 120 bp, Artificial Sequence
  ENSG00000143486_26 (sequence is synthesized)
gatttcacattccagactcctcctcctcatgaaagtaacgcattctgactgtaaaggttgcattcttgagacgcgtacctgttcattttctggttattttcttgtcattttagcaaaaca

SEQ ID NO: 380309 - DNA, 120 bp, Artificial Sequence
  ENSG00000143486_27 (sequence is synthesized)
gtaagcagtgattttctcaaagcacacatttagccaagtattgtggcctgttggtatagattcattcttatattttccagcccagtcttggaattattaatttttttttttttttttttt

SEQ ID NO: 380310 - DNA, 120 bp, Artificial Sequence
  ENSG00000143486_28 (sequence is synthesized)
tttttctttaatctttctcagtcttgggatgtctattaatagtattattcttttgggatagggaggagacaagatttattctccccatttcagagatgaagaaactgaggcatggaactt

SEQ ID NO: 380311 - DNA, 120 bp, Artificial Sequence
  ENSG00000143486_29 (sequence is synthesized)
ttaggggcccagaattgaaagtacgcttgagatgagggcacaggctctctgccccctcctggccactcctgcctgttggctctctgctgtctctgacctcactgctgactcctctgtggc

SEQ ID NO: 380312 - DNA, 120 bp, Artificial Sequence
  ENSG00000143486_30 (sequence is synthesized)
agcctgacgaactccactccactgctgactagaatggcccttaagcttccgggggaggaggggaaggtccttattttctgtgagggtggcgcagcagccctttcacatcttgtttttgaa

SEQ ID NO: 380313 - DNA, 120 bp, Artificial Sequence
  ENSG00000143486_31 (sequence is synthesized)
tcctttccacataagtcacgtcttcctgggagctaatctgccctggcatttgcctgtcttcagctacaaagccctccaaggtttcttctggctcaacttctctgggtgaacactcctagc

SEQ ID NO: 380314 - DNA, 120 bp, Artificial Sequence
  ENSG00000143486_32 (sequence is synthesized)
ttggtgggactttgtggcttgactccttctctggggtcaaccctctttaaaggctcagtgctcaagagaggctgggagctttggtacctgggaatgggttcctttcagagccaagtgggt

SEQ ID NO: 380315 - DNA, 120 bp, Artificial Sequence
  ENSG00000143486_33 (sequence is synthesized)
gaggtagggatgaagctgggggtcgttttcttgtaccaggtgttctgtatccctcaggaaggatgtggctcttgtcttttccctgcagaacaaatggatgagctgttacagcaatgcttc

SEQ ID NO: 380316 - DNA, 120 bp, Artificial Sequence
  ENSG00000143486_34 (sequence is synthesized)
gccggggtctcacgtgtgctccttggtagtaggacaggatggggccaatgcagggactggttgagggacatgctgtggaaagagtggagggaaggcttatctgacaaatacattagttcc

SEQ ID NO: 380317 - DNA, 120 bp, Artificial Sequence
  ENSG00000143486_35 (sequence is synthesized)
tgggttctaaaaagttaattcttagcttgctgggctgttaaaacaaaatcttaaattttagccaatgaaaggatattgaggaccggaaagttaaaattcctgagattctgtgaacactgc

SEQ ID NO: 380318 - DNA, 120 bp, Artificial Sequence
  ENSG00000143486_36 (sequence is synthesized)
ctctgccgtgggggttctgggcaacctcacaaatcgggcagcgtgtcctctgcaggaagtgtcccagggcagcctctttgtcaggaatcttcttctggaacattcaacctcctcacactt

SEQ ID NO: 380319 - DNA, 120 bp, Artificial Sequence
  ENSG00000143486_37 (sequence is synthesized)
ctgaaaagtatgtggggggccacattaggttttattaggaggaagaattggtgtgaacaccccccgtcccggcccaccccatccaaaacacaagccatcaggagtggtattattgcgtgt

SEQ ID NO: 380320 - DNA, 120 bp, Artificial Sequence
  ENSG00000143486_38 (sequence is synthesized)
ggatagaacctggattttgaagacagagctgtctgtactcaactgctaggtctccagggtgttcaagcaatgtgcattttagcttgttactgggcttctctgagtcctaatttctaataa

SEQ ID NO: 380321 - DNA, 120 bp, Artificial Sequence
  ENSG00000143486_39 (sequence is synthesized)
tcatgggattgctgtaaagattacatagcctgaaccataataagcattcagtaaatactatcatgtcaggaggtttgcttattgatttttaccctgagattgaatttatttatttattta

SEQ ID NO: 380322 - DNA, 120 bp, Artificial Sequence
  ENSG00000143486_40 (sequence is synthesized)
acaggcgtgagccactgtgtccggcctgaatttatttctttttgagaatctggctgtggttttttaaaaaagtgattcttaatgtaatgtcttcccatttatacttgggtgtctttaagc

SEQ ID NO: 380323 - DNA, 120 bp, Artificial Sequence
  ENSG00000143486_41 (sequence is synthesized)
tcccatttatacttgggtgtctttaagctatcctgtacaaatgtggtgtctggagtgtgtggagggatacttggtaatctgttctgactttcttgggttgcaaatatatggtaaaggggc

SEQ ID NO: 380324 - DNA, 120 bp, Artificial Sequence
  ENSG00000143486_42 (sequence is synthesized)
cccagaatattctgtaggataggattctggggtggattctagaaggactcctcgagaatccactgctattgcgtgtcatgttttgagagaagatgtaagcttttatcaggaatgttctct

SEQ ID NO: 380325 - DNA, 120 bp, Artificial Sequence
  ENSG00000143486_43 (sequence is synthesized)
tgaatattttcagttttgcaggccacaccatctctgttgcaactgctcgatgctgccattgtagcactaatgtgaccatagacagtagataattagttggccagacctgaccccaggatg

SEQ ID NO: 380326 - DNA, 120 bp, Artificial Sequence
  ENSG00000143486_44 (sequence is synthesized)
cggcttgctgggccccactccaggcctggctgcccacagtgtgagtttgctgttgcaactttggaggccacagaaggttgtctggtctgggaggaatctaaggctgtatccaatgtggta

SEQ ID NO: 380327 - DNA, 120 bp, Artificial Sequence
  ENSG00000143486_45 (sequence is synthesized)
gccactggccacatgtcgctattttcagtttaaattaatttaaagtaaataaaatttaaaattcagttcccttggtcacattagtcacacttcaagtacttactacccacatgtggctaa

SEQ ID NO: 380328 - DNA, 120 bp, Artificial Sequence
  ENSG00000143486_46 (sequence is synthesized)
tggctgccctgttagacaacacagagaacattccacgtctatggaaagttctcttgaacagcactgatttagaatgtcccatagtctgcatccctctctgctgtcatccctgggcagaga

SEQ ID NO: 380329 - DNA, 120 bp, Artificial Sequence
  ENSG00000143486_47 (sequence is synthesized)
gttctggcacagtggcctctctctgaaggtgggggaggaaggctgaggaaaaaggccctcctctcagtgtcaggcaggtcccagtatgactgctcattagtttaatttgccttttccatc

SEQ ID NO: 380330 - DNA, 120 bp, Artificial Sequence
  ENSG00000143486_48 (sequence is synthesized)
aggtaattttagaaagacacaatgttcaaggatagtgatttaatgttcttgccaagttctggtctccctaatgtgattggaggtttttagattggcctcaaactcatcaaagattttttt

SEQ ID NO: 380331 - DNA, 120 bp, Artificial Sequence
  ENSG00000143486_49 (sequence is synthesized)
atgaaacacccgtgtttatgtgcctgggctgggctctgtatgaaacaggtaaagctgaccccgctcactcactgccctctaggattttgttctaggaaacttgctagagcctggttccaa

SEQ ID NO: 380332 - DNA, 120 bp, Artificial Sequence
  ENSG00000143486_50 (sequence is synthesized)
aagtaaacaagattgtattttcatttttttcttagaactatgttatggacattcagctcccacatattctttcacctcttaggccttgctcaatgaaaataacttgtaaaaaacttgctg

SEQ ID NO: 380333 - DNA, 120 bp, Artificial Sequence
  ENSG00000143486_51 (sequence is synthesized)
aaggaactgagtgtgtttagcttggcaacacaaaattgtggggaaccaatgacatctctcctcaaatatgtgcaaagctgtcccctggcaaagtagggcacttattctatatgccttgaa

SEQ ID NO: 380334 - DNA, 120 bp, Artificial Sequence
  ENSG00000143486_52 (sequence is synthesized)
aggacagaaataggattattgggtggaaatgccaagaaggcagacttgagtctgtctttgtaaagactcaagaactttgtagtagtgtacagttacgagcgtgggctttggatagtactg

SEQ ID NO: 380335 - DNA, 120 bp, Artificial Sequence
  ENSG00000143486_53 (sequence is synthesized)
ggttcaaatgcagccgttgcctcactgcctgaccttgagcatgttacttcatttctttttgtctgagttttactctgtgaaaaatggggataatacctacctggtaaggcattgtgagga

SEQ ID NO: 380336 - DNA, 120 bp, Artificial Sequence
  ENSG00000143486_54 (sequence is synthesized)
tcaaatgaaggcgtatacatggctgaagcacttagaatgtacttggcatataaatacttggttctcaataattgagaaccagtaatgataatctttacaataattagtaacagtcactat

SEQ ID NO: 380337 - DNA, 120 bp, Artificial Sequence
  ENSG00000143486_55 (sequence is synthesized)
ttattgagtgtttaattatgtgccagacactgaactaaataattttcatatatatagtttatgtaaacactaattttctgttaataatgacaaatagaattgtccaaaattgaaattggt

SEQ ID NO: 380338 - DNA, 120 bp, Artificial Sequence
  ENSG00000143486_56 (sequence is synthesized)
gcttcataaaatagtgaatttttttctggagagtctgcaagcaaaaattaggtgagcacttgtcaggggaggatgtagttgggggttcatgcatcaggtgggcaattggaagagatacgt

SEQ ID NO: 380339 - DNA, 120 bp, Artificial Sequence
  ENSG00000143486_57 (sequence is synthesized)
cctctaaagtcttattgattctaagattttctgggtctggagctcattgataagcgtaaggctagttggagcttttatagtctttattgatagcagtcatcccccacacacccctgatag

SEQ ID NO: 380340 - DNA, 120 bp, Artificial Sequence
  ENSG00000143486_58 (sequence is synthesized)
taatacactttactatctgtagtcatgaatgagaaagaatttgttttaaagcaacaagggggagaattgtgatattttaaaagcactaacatttttcttttttatctcaaagtcacatac

SEQ ID NO: 380341 - DNA, 120 bp, Artificial Sequence
  ENSG00000143486_59 (sequence is synthesized)
ttgtcatttgtgaagctgaataccagaagaatgcatgtgttgctgactagattgttgatattaaggagctattgtttgttactttatttttaggtgtgatgatggttttgtttttatgtt

SEQ ID NO: 380342 - DNA, 120 bp, Artificial Sequence
  ENSG00000143486_60 (sequence is synthesized)
taaatgagccttgtcttttggagatacatactgaaatatttatagatgaaatgatctgatgtctggggaggtttgctttaaagtaatagaggagtggggagtagacaggggtatagatga

SEQ ID NO: 380343 - DNA, 120 bp, Artificial Sequence
  ENSG00000143486_61 (sequence is synthesized)
atcaaggttggccatgagttggtaattgttgaaactggtgataggtacatgtgggtttatatactattctgctttcatttatgttttgaattctccaaataaaacttaaaaaagaagtag

SEQ ID NO: 380344 - DNA, 120 bp, Artificial Sequence
  ENSG00000143486_62 (sequence is synthesized)
gcaggagcagattatacaggtgaaggagctgagcaaaggggtggagagcattgtggctgtggactggaaacacccgaggtgagtgcagggggcctgtcactgtagcccagctggccccag

SEQ ID NO: 380345 - DNA, 120 bp, Artificial Sequence
  ENSG00000143486_63 (sequence is synthesized)
gtatgacaacaggacgaagatggccattaccattagtgtacacgctgtggtcctatcctgatcttctgccaacctttacaacatggcctctggtgctcgagaaactggtagggggagcag

SEQ ID NO: 380346 - DNA, 120 bp, Artificial Sequence
  ENSG00000143493_0 (sequence is synthesized)
gtaacagggcttgacagcgcgcggaagaaaaaccagcaagaaggcggcgggggaagatggcggtcctggggtagagtttgcaagctttctgactaggctagtcgagtaactattcgggtc

SEQ ID NO: 380347 - DNA, 120 bp, Artificial Sequence
  ENSG00000143493_1 (sequence is synthesized)
atggcgtcaaactcaactaagtctttcctggcagatgccggctatggcgaacaggaactggatgccaactctgcccttatggaattggacaaaggcctaagatctggcaaacttggtgaa

SEQ ID NO: 380348 - DNA, 120 bp, Artificial Sequence
  ENSG00000143493_2 (sequence is synthesized)
cagtgtgaagcagttgttcgctttcccagactttttcagaagtatccattccctattcttatcaattctgcattcctaaagttagctgatgttttcagagttggaaataatttcctgagg

SEQ ID NO: 380349 - DNA, 120 bp, Artificial Sequence
  ENSG00000143493_3 (sequence is synthesized)
ctatgtgttcttaaagttacccaacaaagtgagaaacatttggagaagattctaaatgtggatgaatttgtgaagagaattttttctgtgattcatagtaatgatcctgtggcaagagcc

SEQ ID NO: 380350 - DNA, 120 bp, Artificial Sequence
  ENSG00000143493_4 (sequence is synthesized)
atcaccctccggatgttgggaagtctggcatcaataattcctgagaggaagaatgctcatcatagtattcgtcagagtttagattcacatgataatgtagaagttgaagctgctgttttt

SEQ ID NO: 380351 - DNA, 120 bp, Artificial Sequence
  ENSG00000143493_5 (sequence is synthesized)
gctgctgcaaacttctctgcacagtcaaaggattttgctgtaggaatctgtaacaaaatcagtgaaatgattcaaggtttagcgacaccagtagacttgaagctaaaattgatacccatt

SEQ ID NO: 380352 - DNA, 120 bp, Artificial Sequence
  ENSG00000143493_6 (sequence is synthesized)
ctacagcacatgcaccatgatgcaatcttggcttccagtgctcgtcagcttttacaacagctggtcacatcctatccgtccaccaaaatggtgattgtgtctttgcacactttcactctg

SEQ ID NO: 380353 - DNA, 120 bp, Artificial Sequence
  ENSG00000143493_7 (sequence is synthesized)
cttgcagcgtcatctttggttgatacacctaagcagattcagcttctgttgcagtatttgaagaatgatcccaggaaggcagtaaagagacttgctattcaagatctgaaattacttgct

SEQ ID NO: 380354 - DNA, 120 bp, Artificial Sequence
  ENSG00000143493_8 (sequence is synthesized)
aataaaacaccacatacttggagtagggagaatattcaggcactttgtgagtgtgccctccagactccttatgacagcttaaaactagggatgttgtctgtcctttccacactatcaggg

SEQ ID NO: 380355 - DNA, 120 bp, Artificial Sequence
  ENSG00000143493_9 (sequence is synthesized)
accatcgccatcaaacattacttcagtatagttccaggaaatgtgagttcttctcccagatcttctgatttagtcaaattagcccaagagtgctgttaccataataacaggggcattgca

SEQ ID NO: 380356 - DNA, 120 bp, Artificial Sequence
  ENSG00000143493_10 (sequence is synthesized)
gctcatggagttagagtcctaactaatataactgtttcttgtcaagaaaaggatcttttggcactggaacaagatgctgtctttggcctggaatccctactggtactttgtagtcaagat

SEQ ID NO: 380357 - DNA, 120 bp, Artificial Sequence
  ENSG00000143493_11 (sequence is synthesized)
gatagtccaggtgctcaggccactttaaagattgctctaaactgtatggtgaagttggccaagggcaggccccatcttagccagtcagtagttgagaccttgttgactcaattgcacagt

SEQ ID NO: 380358 - DNA, 120 bp, Artificial Sequence
  ENSG00000143493_12 (sequence is synthesized)
gctcaagacgctgcccggattttgatgtgccattgcctggcagccattgccatgcaactgccggtgctgggtgatgggatgcttggtgacctcatggagctgtacaaggtgattggacga

SEQ ID NO: 380359 - DNA, 120 bp, Artificial Sequence
  ENSG00000143493_13 (sequence is synthesized)
tcagccacagacaagcaacaagaacttctggtgagtttggctactgtgatttttgttgcaagtcagaaggcattgtctgtggaaagtaaggcagtaattaagcagcagcttgaaagtgtc

SEQ ID NO: 380360 - DNA, 120 bp, Artificial Sequence
  ENSG00000143493_14 (sequence is synthesized)
tccaatggatggactgtataccgtattgccagacaggcttccagaatgggtaatcatgacatggccaaagagctttatcagagtttgctgactcaggttgcctcagaacatttctacttc

SEQ ID NO: 380361 - DNA, 120 bp, Artificial Sequence
  ENSG00000143493_15 (sequence is synthesized)
tggctaaatagtttgaaggagttttcacatgcagaacagtgtctcactgggttgcaagaggaaaattatagttcagcactttcttgcattgctgaatctttaaaattctatcacaaaggg

SEQ ID NO: 380362 - DNA, 120 bp, Artificial Sequence
  ENSG00000143493_16 (sequence is synthesized)
attgcttccttaacagcagctagtacaccactgaatcctttaagctttcagtgtgaatttgtaaaactcaggattgaccttttacaagccttctctcaacttatctgtacttgtaatagc

SEQ ID NO: 380363 - DNA, 120 bp, Artificial Sequence
  ENSG00000143493_17 (sequence is synthesized)
ctgaagacaagcccaccacctgcaattgccacaacaattgccatgaccttaggaaatgacctccagaggtgtggtcgcatctccaatcagatgaaacagtccatggaagaatttcgaagc

SEQ ID NO: 380364 - DNA, 120 bp, Artificial Sequence
  ENSG00000143493_18 (sequence is synthesized)
agaagccctgattttggatccagaatcagcaagtttccaggaatatggatctactggaacagcccatgctgatagtgaatatgaaagaagaatgatgtctgtatataatcatgtcttgga

SEQ ID NO: 380365 - DNA, 120 bp, Artificial Sequence
  ENSG00000143493_19 (sequence is synthesized)
ggaggtagaatcactcaatcggaaatatacccctgtttcttatatgcacacagcatgcctctgcaatgccatcattgctttgctgaaagttcccctttctttccagagatattttttcca

SEQ ID NO: 380366 - DNA, 120 bp, Artificial Sequence
  ENSG00000143493_20 (sequence is synthesized)
gaaactacagtctaccagcatcaagcttgctctgtcaccatcgccccggaatcctgcagagcccattgctgtccagaataaccagcagctggcgctaaaggtagagggagtggttcagca

SEQ ID NO: 380367 - DNA, 120 bp, Artificial Sequence
  ENSG00000143493_21 (sequence is synthesized)
cggatctaaaccaggactcttccgcaaaattcagtctgtctgtctgaatgtttcttccacactgcagagtaaatctggacaagactacaagatacccattgacaacatgaccaatgagat

SEQ ID NO: 380368 - DNA, 120 bp, Artificial Sequence
  ENSG00000143493_22 (sequence is synthesized)
ggagcaaagggttgaacctcataatgattacttcagtactcaatttctgttgaactttgctatccttggaacacacaacattacagtggaatcttctgtgaaagatgccaatggtatagt

SEQ ID NO: 380369 - DNA, 120 bp, Artificial Sequence
  ENSG00000143493_23 (sequence is synthesized)
atggaagactggtcccagaactaccatatttgtaaaatccctggaagacccttattcccagcaaattcgcttacaacagcagcaagcccagcagccattacagcagcagcagcaacgcaa

SEQ ID NO: 380370 - DNA, 120 bp, Artificial Sequence
  ENSG00000143493_24 (sequence is synthesized)
tgcctacacacggttttaaccatggaatgaatgcactgcagactctcaagagatcaatcaaattgccagaaacagtttggtttttcatatggaataagtattaaagttacagtgtagttc

SEQ ID NO: 380371 - DNA, 120 bp, Artificial Sequence
  ENSG00000143493_25 (sequence is synthesized)
ttaaagttacagtgtagttcatttattcattgatttttgtaatgtaatattctggaaaaaattttgttttcttaaaaattttgtctgacagctgggcgtggttgctcacgcctgtaatcc

SEQ ID NO: 380372 - DNA, 62 bp, Artificial Sequence
  ENSG00000143493_26 (sequence is synthesized)
gagcttgcagtgagccgacattttgtctgaaaaataactgggatcctggccagaaagattgt

SEQ ID NO: 380373 - DNA, 120 bp, Artificial Sequence
  ENSG00000143493_27 (sequence is synthesized)
ttgtctgaaaaataactgggatcctggccagaaagattgttctttcttgttttattattagttttttctgttgccaagcttttttttctttcaagaatagtcacatgttgagatcactga

SEQ ID NO: 380374 - DNA, 120 bp, Artificial Sequence
  ENSG00000143493_28 (sequence is synthesized)
attggtaaatttgaccgctactcttccaaaatacatcatttgctgcctgacttagacctaggattctgagttgttcattgggaggttctgaccagtcactacaaggtttatccatggtag

SEQ ID NO: 380375 - DNA, 120 bp, Artificial Sequence
  ENSG00000143493_29 (sequence is synthesized)
cagaacctgagtccttctgtagatggacttgaaagtgttccgtgcaacatccagccttctggattatgaaagcccacagtctaacagtattgaaacatcctgctgtattagttcaaccac

SEQ ID NO: 380376 - DNA, 120 bp, Artificial Sequence
  ENSG00000143493_30 (sequence is synthesized)
atatttatctcttcctgtgctaaagcagtctttattattttcatatttaattgaaacaaagagcagctagcaatttcatagaaaattaatttgttttttctgatgtgtctgcaactgtgt

SEQ ID NO: 380377 - DNA, 120 bp, Artificial Sequence
  ENSG00000143493_31 (sequence is synthesized)
ataatacagacatttcacattgtttccaaaagtgaagaacactcatttaatatcttcaatgttttaagttagaaggggtggatcttttcctttggttggtgattggtttggtttatactt

SEQ ID NO: 380378 - DNA, 120 bp, Artificial Sequence
  ENSG00000143493_32 (sequence is synthesized)
gatgagttatgctagactgattgtttagagagagcagtctctttattacacaggctcagtttgttgggatgctcagggaacagagttttctggttagccagaaaacccccttttttccta

SEQ ID NO: 380379 - DNA, 120 bp, Artificial Sequence
  ENSG00000143493_33 (sequence is synthesized)
ttttaattctggttgaaaaccatgataaaatagactttcttagcacagtatggtagatataacttaactgctttttgattggggatcatttagggcttcaggatcacgatttctaaacat

SEQ ID NO: 380380 - DNA, 120 bp, Artificial Sequence
  ENSG00000143493_34 (sequence is synthesized)
cagggatcatatggttgcagatgccgatgctataagtaatttggccggatgcagctcctaaggtaaagcagggtactttccctggaatttcctttttaaataaatatctgtttctttgct

SEQ ID NO: 380381 - DNA, 120 bp, Artificial Sequence
  ENSG00000143493_35 (sequence is synthesized)
tttactgatatctcatgcaatagaagccctgattttggatccagaatcagcaaggtaattctaatattaataatagttggcgttacagaacactttctatacattgtcttacctaatcat

SEQ ID NO: 380382 - DNA, 120 bp, Artificial Sequence
  ENSG00000143493_36 (sequence is synthesized)
cagaagactattttggagctagtactatggaagtaaaaacaaagtggaagaattcttcagcattttttgtgggtcacataactagtgacaaaacatagatttacctcctgcctcctgttt

SEQ ID NO: 380383 - DNA, 120 bp, Artificial Sequence
  ENSG00000143493_37 (sequence is synthesized)
tcaaaaagttaacatggaaagataactgggaagacattctttgaatatgagcaatttcttcttgtatattataattatactacgaaaaattgagttaatgatacaattaaacttgaactt

SEQ ID NO: 380384 - DNA, 120 bp, Artificial Sequence
  ENSG00000143493_38 (sequence is synthesized)
gttggcatagcccatttggtgctggagtttttgttttagttgtgtttcttaccacctcccctaacccgagcacctgaccttggaatattagttgcagtttggaatattgtatttcttctg

SEQ ID NO: 380385 - DNA, 120 bp, Artificial Sequence
  ENSG00000143493_39 (sequence is synthesized)
agcttttattgtatggatgtgggtttttcatacatttatggcacttactgtgtgagttcaacaaattaacctttctgtgcctgtttccttatccataaaacagggttaatacctacctca

SEQ ID NO: 380386 - DNA, 120 bp, Artificial Sequence
  ENSG00000143494_0 (sequence is synthesized)
atgaccggctccgcggccgacactcaccgctgcccccaccccaaaggcgccaaaggcacccggtcccggagcagccacgcgcggcccgtgagcctcgccaccagcgggggctcagaggag

SEQ ID NO: 380387 - DNA, 120 bp, Artificial Sequence
  ENSG00000143494_1 (sequence is synthesized)
gaggacaaagacggcggggtgctgttccacgtcaacaagagcggcttccccatcgacagccacacctgggagcgcatgtggatgcacgtggccaaggtgcaccctaaggggggagaaatg

SEQ ID NO: 380388 - DNA, 120 bp, Artificial Sequence
  ENSG00000143494_2 (sequence is synthesized)
gtgggcgccatcaggaacgccgccttcttggcaaagccttcaataccccaggtcccaaactacaggctgtcgatgacgatcccagactggctccaggcgatccagaattacatgaagacc

SEQ ID NO: 380389 - DNA, 120 bp, Artificial Sequence
  ENSG00000143494_3 (sequence is synthesized)
ctacaatataatcacacagggacccagttctttgaaattaggaaaatgagaccgctgagtgggttaatggaaacagcaaaagaaatgacccgagagtccttgcctatcaaatgccttgaa

SEQ ID NO: 380390 - DNA, 120 bp, Artificial Sequence
  ENSG00000143494_4 (sequence is synthesized)
gggatttactgcaatggccgctatggctcattgggcatgagccgcagggctgagctgatggacaagccattgacttttcggactctgagtgacctcatctttgactttgaggactcttac

SEQ ID NO: 380391 - DNA, 120 bp, Artificial Sequence
  ENSG00000143494_5 (sequence is synthesized)
aagaaatacctgcacacagtcaagaaggtcaagattgggctgtacgtcccccatgagcctcatagcttccagcccattgagtggaagcagctggtcctcaacgtctcaaagatgctgagg

SEQ ID NO: 380392 - DNA, 120 bp, Artificial Sequence
  ENSG00000143494_6 (sequence is synthesized)
gctgacataaggaaggagctggagaaatatgccagggacatgagaatgaagatcctgaaacctgcaagtgcccactctccgacccaagtgagaagccggggaaaatccctgtcccccaga

SEQ ID NO: 380393 - DNA, 120 bp, Artificial Sequence
  ENSG00000143494_7 (sequence is synthesized)
aggagacaggcaagccccccgaggaggctcggccggcgagagaagtcgcctgcactgcctgaaaagaaggtggctgatctgagcactctgaatgaagtgggctatcaaatccgaatttag

SEQ ID NO: 380394 - DNA, 120 bp, Artificial Sequence
  ENSG00000143494_8 (sequence is synthesized)
cgatccagaattacatgaagaccctacaatataatcacacagggacccagttctttgaaattaggaaaatgagaccgctgagtgggtaagtggtgcatgatctatgggccagatgacctc

SEQ ID NO: 380395 - DNA, 120 bp, Artificial Sequence
  ENSG00000143494_9 (sequence is synthesized)
gggccaggttggaggtgggactgaggactgagcaactctgacagtggagctcagtggtgaattctagcttccagggtggaggaggcttgtaaactctgcctctcgaggcttcatttattt

SEQ ID NO: 380396 - DNA, 120 bp, Artificial Sequence
  ENSG00000143494_10 (sequence is synthesized)
gttctattgtaatgcccccgtgctggggcattgggagggtgctatggagtactggcactaactccaggaattaactcttgtgctttggtgccttcctgcaaggtgacttctcccttttcc

SEQ ID NO: 380397 - DNA, 120 bp, Artificial Sequence
  ENSG00000143494_11 (sequence is synthesized)
tatttgtgctccaagaaaaaagaaagacttttggctgagacttaaaagggactttccagtacacatgatgaattagtctcactggatagaaaaagaggatgaggagtgaaactctctttt

SEQ ID NO: 380398 - DNA, 120 bp, Artificial Sequence
  ENSG00000143494_12 (sequence is synthesized)
tgccttggagagaagccagtgagccatttgggtttggtggctaaggatatctttaccgagggagggagatgtaccctggtgggagtagatacgttatatgaaacatcaaaatgcaaactg

SEQ ID NO: 380399 - DNA, 120 bp, Artificial Sequence
  ENSG00000143494_13 (sequence is synthesized)
gggagaaatgctgccgagcctcggggttatagcgtggcggatggtttcccctggaccctggggacgctggtacggctgagaagattcctgggcaggtctaggaatgccagacttgagacc

SEQ ID NO: 380400 - DNA, 120 bp, Artificial Sequence
  ENSG00000143494_14 (sequence is synthesized)
gcagccccagccccagccccaggcccagcagcagcagcagcagcccctgctctcccgccgcccggagaggctctgcagccatgaagccaaccgtcccgagccttcaataccccaggtccc

SEQ ID NO: 380401 - DNA, 120 bp, Artificial Sequence
  ENSG00000143494_15 (sequence is synthesized)
tggagaaatatgccagggacatgagaatgaagggcttgtgcagtcactaagagaaaaggattatgctgacttcaggcctggctatgtttagcacttgtggacttgtcatcttcactctgc

SEQ ID NO: 380402 - DNA, 120 bp, Artificial Sequence
  ENSG00000143494_16 (sequence is synthesized)
gtgggatgggagcatcagaggaagaacaggctggtttctgaggcaatagagatgggactttgccttcgtgaggagaggaacttgccaagcaaacaaacacagccccggggagactgaggc

SEQ ID NO: 380403 - DNA, 120 bp, Artificial Sequence
  ENSG00000143494_17 (sequence is synthesized)
attgggctgtgttcctctctctacacggcacagggagcacaatgtgaccatctgtatatctgtcttggaagtggtgcccttgctgcttgacagtacaggacgagagaggaatgtgtgtgt

SEQ ID NO: 380404 - DNA, 120 bp, Artificial Sequence
  ENSG00000143494_18 (sequence is synthesized)
ctccagcctccttttttagaagtcttcctgctcaatgccttctaaaccatggcatcatgattgggctggggggtggaatgtggtgctagaagaagacctgagggtggaggtcccttagga

SEQ ID NO: 380405 - DNA, 120 bp, Artificial Sequence
  ENSG00000143494_19 (sequence is synthesized)
accagggtgattaactcctcacatctccttcagatcctgaaacctgcaagtgcccactctccgacccaagtgagaagccggggaaaatccctgtcccccagaaggagacaggcaagcccc

SEQ ID NO: 380406 - DNA, 120 bp, Artificial Sequence
  ENSG00000143494_20 (sequence is synthesized)
ccgaggaggctcggccggcgagagaagtcccctgaggccagtgatcccacatctacttcttagaccaaaataacccacttaagcaatgacagattggagatgctggggatgcccaaattc

SEQ ID NO: 380407 - DNA, 120 bp, Artificial Sequence
  ENSG00000143494_21 (sequence is synthesized)
accagcgataatccgctggcaaatatttgaactatagccatcctgggaaaaaatactgcttttcttaataatagcagcatgctgtgtcacccagcctcttgccatgctggaaccatgtgg

SEQ ID NO: 380408 - DNA, 120 bp, Artificial Sequence
  ENSG00000143494_22 (sequence is synthesized)
cacagtgcacagggggcttggttgaatcccaactgtgccacgtgttagctgtgcagctgggcacatccttcctcctcggggagccttggtttcttcatccataaaagagtatcaaatgct

SEQ ID NO: 380409 - DNA, 120 bp, Artificial Sequence
  ENSG00000143494_23 (sequence is synthesized)
gccccagcagccccagccccagccccaggcccagcagcagcagcagcagcccctgctctcccgccgcccggagaggctctgcagccatgaagccaaccgtcccgaggcaccgccggtaag

SEQ ID NO: 380410 - DNA, 120 bp, Artificial Sequence
  ENSG00000143494_24 (sequence is synthesized)
taagcagggagcctccgcggagctcccgccgccgctcccccttggtgagtcctgccgcagcgagaggcatggagaaggccgcccccgcggggcgctgatcccctcgccgcgcccgcgcgc

SEQ ID NO: 380411 - DNA, 120 bp, Artificial Sequence
  ENSG00000143494_25 (sequence is synthesized)
ctgcaactatttattaagaacttgtgaattttatttttaaggattcacctggaaatagaatctgagtgggtggtaaccattagctttaaaaaattcactaaaaggcaccatgaaaaggct

SEQ ID NO: 380412 - DNA, 120 bp, Artificial Sequence
  ENSG00000143494_26 (sequence is synthesized)
gaagtaataagccccactggggttggactatgtccctcactcaagatcttaaggataaccgtaactgaagttttatatttttccatttacctactttcttttacttgctttgaacattat

SEQ ID NO: 380413 - DNA, 120 bp, Artificial Sequence
  ENSG00000143494_27 (sequence is synthesized)
gcctcaccaatagtaaatgttcatgaaataatctcttgaacttttggtatagtaaggtaactctaacagtattactgtctttttcagcaataacagaaagcaaaaatgggtgggtttttt

SEQ ID NO: 380414 - DNA, 120 bp, Artificial Sequence
  ENSG00000143494_28 (sequence is synthesized)
atttcccatggggatctccacaagtttggagttttttcctggtgcacacacgtgaggagatttaaggtactatatgcaagtgttttactaaaaagcactgaaattcttctggcaatacaa

SEQ ID NO: 380415 - DNA, 120 bp, Artificial Sequence
  ENSG00000143494_29 (sequence is synthesized)
gaaccattttcaggatcttggagttacttccttcttaatctttcttaaagcattcactgatgtttttgttttttcaaaatgaaacaaaaatatcacattgagaagctagtctatgttctg

SEQ ID NO: 380416 - DNA, 120 bp, Artificial Sequence
  ENSG00000143494_30 (sequence is synthesized)
tcactaacatttaaactttgcagactctaacaaaaagcacaagaggtcacgtactattatacaaatttagcggtactggatttacctctgacattaacacactcaggcagagaccaggag

SEQ ID NO: 380417 - DNA, 120 bp, Artificial Sequence
  ENSG00000143494_31 (sequence is synthesized)
tgatcagcaggtcttcagaaccaaaaaacctttctgttcacatttcatctgatttttaaactgaggcaggctttgattcttctgaaggatgccaagaatcaaactaagggaggactcact

SEQ ID NO: 380418 - DNA, 120 bp, Artificial Sequence
  ENSG00000143494_32 (sequence is synthesized)
gttaaagatgtgttctgatgtcttatattaagaccaaatgtgacatgatgtgattatcttccagtactttgcttttaggtaccatttcatgacattttaggaatgagtattggaaaatat

SEQ ID NO: 380419 - DNA, 120 bp, Artificial Sequence
  ENSG00000143494_33 (sequence is synthesized)
aaagaattagaaaagcagcactttttttttaatggaaaagtcttcggtccagtgttacaccttatagtgtaattcagtccctaagcacagaatgaatgtctggcctgcatatggtagtta

SEQ ID NO: 380420 - DNA, 120 bp, Artificial Sequence
  ENSG00000143494_34 (sequence is synthesized)
cagtgtaacctctggctgcagaccacacaggacaaccctaacagcctagtcttgtatggtgtaaatatcaagagtacagcttcaatttcatttgctttatcttagcaacaatgccaactc

SEQ ID NO: 380421 - DNA, 120 bp, Artificial Sequence
  ENSG00000143494_35 (sequence is synthesized)
aggagagcagacggccgatttcagtgaagtctggtagtcaacagatgttatttcagtctcagtgcatctcctctggctttctttgactgaaggtgtttataggaaggaagttaaaaaaaa

SEQ ID NO: 380422 - DNA, 120 bp, Artificial Sequence
  ENSG00000143494_36 (sequence is synthesized)
aaaaagctcattgagattctttaccaattctttacaagatttctgggggtgacagggaaagcaaaaggacttcaaagcaaaagggtgcacaagagcttacttcaccctgaaaatcagtat

SEQ ID NO: 380423 - DNA, 120 bp, Artificial Sequence
  ENSG00000143494_37 (sequence is synthesized)
tattaatgaaaagtactgttttcttaaagaagtcgaatgtcctttagatgaacaagaccaagtatacatctccattagattaaaatgtagcacagggttaaaaattatcagtttaatctc

SEQ ID NO: 380424 - DNA, 120 bp, Artificial Sequence
  ENSG00000143494_38 (sequence is synthesized)
tttaagaacagtattatcagagtttaaaatgagttagctctgtttatctacacacagcaaacccattcgcagcctcttggccacatgtattcagatgtttgaaatagtgaatcatttcat

SEQ ID NO: 380425 - DNA, 120 bp, Artificial Sequence
  ENSG00000143494_39 (sequence is synthesized)
tttcattctaaaacaatactgacttagccatataccttctgtttgtcaatctgaaacttgcttacatctaataagtagacctcttataacactgcaaccattctaagagttggaatttat

SEQ ID NO: 380426 - DNA, 120 bp, Artificial Sequence
  ENSG00000143494_40 (sequence is synthesized)
ttttgccaagtattaagtactgttacatctaaaatacagaatgtcaaatggttgcatagcttgtttcccacaacaaggaggaaaagaacaggaatacaaactctgtaatatgctgataaa

SEQ ID NO: 380427 - DNA, 120 bp, Artificial Sequence
  ENSG00000143494_41 (sequence is synthesized)
gaagccttagaactgccaactggcttgatggttcaattagtaagctaatttctcccacacccgctccttgatttttagactaattttcccaaagcaaggtttagtcacacaaacttgaaa

SEQ ID NO: 380428 - DNA, 120 bp, Artificial Sequence
  ENSG00000143494_42 (sequence is synthesized)
gtacatttaaaatgttcttagttgtcatcctacttttattgcctatggaatatgctaatttctaaaaaaaatacgggagaggcaccaaacccctaaattctagtgcaataatttaaaaaa

SEQ ID NO: 380429 - DNA, 120 bp, Artificial Sequence
  ENSG00000143494_43 (sequence is synthesized)
aagggtctagcttctcccacactttctgttccatttttcaccagactcccggctcttcagcctgagaggaatatggtgcagagaaactgtgatggcatcgacatattggtggtgatgacc

SEQ ID NO: 380430 - DNA, 120 bp, Artificial Sequence
  ENSG00000143494_44 (sequence is synthesized)
acctcccttacacaatagtctcatccctgcacaattttatacattcgagcatcatgccattggaatcacccacaaccctttgaaattgtggggatagacccaggaacagcctttgagcct

SEQ ID NO: 380431 - DNA, 120 bp, Artificial Sequence
  ENSG00000143494_45 (sequence is synthesized)
gatctgccacaatcagatagaagagcaaagatgctccgaagtcctatgggatggatggctgtaagggacagtggaaaaggaaacactgcaagacaggagcttgagagatggtcccaggca

SEQ ID NO: 380432 - DNA, 120 bp, Artificial Sequence
  ENSG00000143494_46 (sequence is synthesized)
agatcagttaggtccttgagcgctgtgctgagaaatgacttttttccaaaaggcaatgggcaacccagatgaaagctctgaagcagaggtgtggcatgcttaggtatatgctctagagag

SEQ ID NO: 380433 - DNA, 120 bp, Artificial Sequence
  ENSG00000143494_47 (sequence is synthesized)
gtagttctccaaagcacaggctgaaggacagattgggaaaggctgggctggatcagcaaagcccgttgggagctgttacatgagggaatggtgaggctagactcatggccctggggatgg

SEQ ID NO: 380434 - DNA, 120 bp, Artificial Sequence
  ENSG00000143494_48 (sequence is synthesized)
ttaatgaggaaggagtcaacgtctccaggtttctgaattgggcaatcgactgcgggattagctggaggaatgagagtggcagagaaaggatatgcgtcaatgcagacctgaactaagaca

SEQ ID NO: 380435 - DNA, 120 bp, Artificial Sequence
  ENSG00000143494_49 (sequence is synthesized)
gtgccagtgaaggtggagggaagggatggaggcatacatcatcaccaccactaggggactgcttagatgggaggagttattggagaaaggcagtgactccacatttctggcttgcatgat

SEQ ID NO: 380436 - DNA, 120 bp, Artificial Sequence
  ENSG00000143494_50 (sequence is synthesized)
aatgccacaagggaagaacttcaaggagaggatcggatttagggaaagatgagctcagatttggacatgtgaaatttgaggtgccttgtgggatgtcggaatgaggtatttgcaatgtgg

SEQ ID NO: 380437 - DNA, 120 bp, Artificial Sequence
  ENSG00000143494_51 (sequence is synthesized)
agctcacaggggaatctgcactggaaatgcgaatttaggagctgtgattaggaggttgtgcttactgttcaataagtgaaaggagaaaaagatcaaagatgaaatcagtattttttggtc

SEQ ID NO: 380438 - DNA, 120 bp, Artificial Sequence
  ENSG00000143494_52 (sequence is synthesized)
tagtttggcacaaagagcccatgaaagagacttaagaaggaaagagaggtagaaagaaaaccaggagagaaaggggatggagaggtcagtggaaggacatgtggctcagaattagactgg

SEQ ID NO: 380439 - DNA, 120 bp, Artificial Sequence
  ENSG00000143494_53 (sequence is synthesized)
ggacaggaggattggtctagtctgttttctgggtctcctggacatctttgtgggaaggagaatctctgtgcctctctgcagtctgtggaacacttgcagccctgatctgaaaccagattg

SEQ ID NO: 380440 - DNA, 120 bp, Artificial Sequence
  ENSG00000143494_54 (sequence is synthesized)
accacaggtgccttggctgacatttgaaaaatggaaacttgaaccttactgaggcccctccccaaccctcttgtcatcctcctccctgtttcccacaaaggagatgaaacatgtgcctgg

SEQ ID NO: 380441 - DNA, 120 bp, Artificial Sequence
  ENSG00000143494_55 (sequence is synthesized)
ggaacccagcaggaagctgggaatgggggtcggggcagcagatggctcagggccccaactctttagtggcaggagtcagccacagctgttcagcgaagcctcctgcaagtttaatggggg

SEQ ID NO: 380442 - DNA, 120 bp, Artificial Sequence
  ENSG00000143494_56 (sequence is synthesized)
cagatgattggctggggatttgctggtggaagagatcaacgaaggggaacacaagcccaggcccttcatggggtagacaagctaacttcagactctttgttgaggggtgtctgagtgcct

SEQ ID NO: 380443 - DNA, 120 bp, Artificial Sequence
  ENSG00000143494_57 (sequence is synthesized)
ctggatttaggtcattgaaatgaccacctcccttacacaatagtctcatccctgcacaattttatacatttgcgcatcatgccactggaatcacccacgaccttttggaattgtggggat

SEQ ID NO: 380444 - DNA, 120 bp, Artificial Sequence
  ENSG00000143494_58 (sequence is synthesized)
agacccaggaacagcctttgagcctgtccaaatcagagacagtgtgctcgtggttttcctttgttcttatccttctgacatttcagaaaagtgcaggaaggtggagagcttcagttcacg

SEQ ID NO: 380445 - DNA, 120 bp, Artificial Sequence
  ENSG00000143494_59 (sequence is synthesized)
aagtgcaggaaggtggagagcttcagttcacgctgctgaactcagggaaatttgactcttgcacacagacaggaaacacagatccgaattcttcttcttttttttttttttttgagacgg

SEQ ID NO: 380446 - DNA, 120 bp, Artificial Sequence
  ENSG00000143494_60 (sequence is synthesized)
cctcagcctcccaaagtgttgagattagaggcaggagccatcgcgcctggctcgccagggaaaattctaagagtggcgtgtggaggagaccaagcagtggtggtctacttaaccaatggg

SEQ ID NO: 380447 - DNA, 120 bp, Artificial Sequence
  ENSG00000143494_61 (sequence is synthesized)
caaaatataaaaaataaaactatgaagtgatttgaaatcggttttaaaaagttgttagtgcaagagaaattttatgtttaagccatcatggcaatatatgcaaagtttaaatgaatgaca

SEQ ID NO: 380448 - DNA, 120 bp, Artificial Sequence
  ENSG00000143494_62 (sequence is synthesized)
gaaatcttgattttagactgtatgttgtgctgttttgagtacactttatttcggagatatttagtattttctatacactctgaaatcatgagcatttcactttttctaagtcaattattt

SEQ ID NO: 380449 - DNA, 120 bp, Artificial Sequence
  ENSG00000143494_63 (sequence is synthesized)
cataaggattttattaatagatattggtaaatagaactttggaaatcttaattcagaattcttactatacctgagtcttttgtaagctatagttttatgtacaaccttgtacagtttttt

SEQ ID NO: 380450 - DNA, 120 bp, Artificial Sequence
  ENSG00000143494_64 (sequence is synthesized)
tgacatacaattcagaactttgtttattctcttggactttgttctggccaatacattttttttaaatctttaagaagaactgtgattgttttagtgggtatttttctaattaaatgaaaa

SEQ ID NO: 380451 - DNA, 120 bp, Artificial Sequence
  ENSG00000143494_65 (sequence is synthesized)
cttgtataatggtattttagagaatgccagtaagtgcatgtttcaagttaatgtttttctcatcacttgtatgtttctaacacagcatgggactttaataaaaccatcctggaaacttaa

SEQ ID NO: 380452 - DNA, 120 bp, Artificial Sequence
  ENSG00000143494_66 (sequence is synthesized)
tccacaagtttggagttttttcctggtgcacacacgtgaggagatttaagcatgggactttaataaaaccatcctggaaacttaaggattgtttttcttctaaatatgtaagatgtggcc

SEQ ID NO: 380453 - DNA, 74 bp, Artificial Sequence
  ENSG00000143494_67 (sequence is synthesized)
cttaaggattgtttttcttctaaatatgtaagatgtggccgggctcagtggctcaagcctgtaatcccggcact

SEQ ID NO: 380454 - DNA, 120 bp, Artificial Sequence
  ENSG00000143494_68 (sequence is synthesized)
gcggaggttgcagtgagctgagatcccgccaatgtactccagcctgggcaacagtgcaagactcagtctcaaaaaaaaaaaaagtaagatggtgtgatttttttttttggtcctcttatt

SEQ ID NO: 380455 - DNA, 120 bp, Artificial Sequence
  ENSG00000143494_69 (sequence is synthesized)
atggtgtgatttttttttttggtcctcttattatatatttattctactgaacctatttatcgttctttcacccttctttcacaatctgcagactctatattaaaaacactctatcactct

SEQ ID NO: 380456 - DNA, 120 bp, Artificial Sequence
  ENSG00000143498_0 (sequence is synthesized)
acttccggggtcgaggcgaggccaacgatacgcctgctgcagcaggaggagttacgagccgggccgcgcgctgcctaaatacctaaaccaggtttagcgcctgctcatataaagctctcc

SEQ ID NO: 380457 - DNA, 120 bp, Artificial Sequence
  ENSG00000143498_1 (sequence is synthesized)
taactcgtcttccggtgggaatttcttcacgtgggccggagtcggagactgagtttagctttactgaggagctctaaatttaggcgggtatgagtgatttcagtgaagaattaaaagggc

SEQ ID NO: 380458 - DNA, 120 bp, Artificial Sequence
  ENSG00000143498_2 (sequence is synthesized)
ctgtgacagatgatgaagaagtggaaacatctgtgctcagtggtgcaggaatgcattttccttggcttcaaacatacgtagaaactgtggccattggagggaaaaggaggaaggattttg

SEQ ID NO: 380459 - DNA, 120 bp, Artificial Sequence
  ENSG00000143498_3 (sequence is synthesized)
ctcagacaacaagtgcttgtttaagttttatccaagaagctctgctgaagcaccaatggcagcaagctgcagaatacatgtacagttattttcagaccttggaagattcagatagctaca

SEQ ID NO: 380460 - DNA, 120 bp, Artificial Sequence
  ENSG00000143498_4 (sequence is synthesized)
aaaggcaggctgcacctgagattatttggaagctcggaagtgaaattctattttatcatcccaaaagcaacatggagagtttcaatacttttgctaaccggatgaaaaatattggcgtca

SEQ ID NO: 380461 - DNA, 120 bp, Artificial Sequence
  ENSG00000143498_5 (sequence is synthesized)
tgaattatttaaagatctccttacaacatgcattataccttctgcatcatggaatgcttaaagatgctaagagaaatctgagtgaggcagagacatggagacatggtgaaaatacgtctt

SEQ ID NO: 380462 - DNA, 120 bp, Artificial Sequence
  ENSG00000143498_6 (sequence is synthesized)
cccgggaaatattaatcaaccttattcaggcctataaagggcttttacagtattatacctggtctgaaaagaagatggaattgtcaaagcttgataaggatgattatgcttacaatgcag

SEQ ID NO: 380463 - DNA, 120 bp, Artificial Sequence
  ENSG00000143498_7 (sequence is synthesized)
tagcccaggatgtgttcaaccacagctggaagacatctgcaaatatttctgcattgattaaaattcctggagtttgggacccttttgtgaagagttatgtagaaatgctggaattctatg

SEQ ID NO: 380464 - DNA, 120 bp, Artificial Sequence
  ENSG00000143498_8 (sequence is synthesized)
tgaaaagtttccatcaaatccaaatgcccatatctacttatacaactttctaaagagacagaaggcaccaagatcaaaattgataagtgtgcttaagattttgtatcagattgtaccatc

SEQ ID NO: 380465 - DNA, 120 bp, Artificial Sequence
  ENSG00000143498_9 (sequence is synthesized)
tcataaattgatgttggaattccatacattacttagaaaatcagaaaaagaagaacaccgtaaactggggttggaggtattatttggagtcttagattttgccggatgcactaagaatat

SEQ ID NO: 380466 - DNA, 120 bp, Artificial Sequence
  ENSG00000143498_10 (sequence is synthesized)
aactgcttggaaatacttggcaaaatatctgaaaaatatcttaatgggaaaccaccttgcgtgggttcaagaagagtggaactccaggaaaaactggtggccaggctttcatttcagcta

SEQ ID NO: 380467 - DNA, 120 bp, Artificial Sequence
  ENSG00000143498_11 (sequence is synthesized)
cttttgggcaaaaagtgattggaaggaagatacagctttggcctgtgagaaagcttttgtggctggtttactgttaggaaaaggttgtagatatttccggtatattttaaagcaagatca

SEQ ID NO: 380468 - DNA, 120 bp, Artificial Sequence
  ENSG00000143498_12 (sequence is synthesized)
ccaaatcttagggaagaaaattaagcggatgaagagatctgtgaaaaaatacagtattgtaaatccaagactctgatactgaattttagttatttcacagttgtagctacacagtatacc

SEQ ID NO: 380469 - DNA, 120 bp, Artificial Sequence
  ENSG00000143498_13 (sequence is synthesized)
accatgaagaaatatattggtgatgagttctattgaggaattttgaaaagagagaaggatttagaaaaaagactctttctcggccgggcgcagtggctcacacttctaatcccagcactt

SEQ ID NO: 380470 - DNA, 120 bp, Artificial Sequence
  ENSG00000143498_14 (sequence is synthesized)
ttatatatttttatatttttgtattatttatagctagagaaacaatattactgcctttgctctttgtaactatgtctgttttcttttttgtaatgttaaatgttacatttgttaaggaat

SEQ ID NO: 380471 - DNA, 120 bp, Artificial Sequence
  ENSG00000143498_15 (sequence is synthesized)
taaggaataattcttcaaatgacaaactaattacagaatatagctctacagcagttattgtttgcaaatactttgcctcttgctattgtgtaataaactgtaacttgtagtgctgtgaaa

SEQ ID NO: 380472 - DNA, 120 bp, Artificial Sequence
  ENSG00000143498_16 (sequence is synthesized)
ttggctccagctgccatctccatgtatgtatcatccacactatcccctgctgcccggatgagactgaggagagaggatcagaagtcttgtgcaaccctggttggaatactctgcactgat

SEQ ID NO: 380473 - DNA, 120 bp, Artificial Sequence
  ENSG00000143498_17 (sequence is synthesized)
tgtgcttggatgcgttacattcatgaaccaccatggtaatcatgatatagaacatttctgtcgcccccagaatgcctttcatttccctttgcagcctgtctgtccccacaaccatggccc

SEQ ID NO: 380474 - DNA, 120 bp, Artificial Sequence
  ENSG00000143498_18 (sequence is synthesized)
cagacaatcactgatctgcttattgtcactatagattaatttttatctcttctagaatttcatgtaaatggactcttatgtagtcattttaatctggcttctcttgctcagcgtaacata

SEQ ID NO: 380475 - DNA, 120 bp, Artificial Sequence
  ENSG00000143498_19 (sequence is synthesized)
tttgagattcacccatgttattgtgtatattagtaatttccttattactgctgaatagtatttcatttttatacattcacttcttgatggacatttgggtaatttttactttttggctat

SEQ ID NO: 380476 - DNA, 120 bp, Artificial Sequence
  ENSG00000143499_0 (sequence is synthesized)
cgccccccgcagctctaggtgacgcgtctccaataacagctcgccgggagccgcagctcgggcacagccggcggccgcgccccgccgccaccatgagggccgagggcctcggcggcctgg

SEQ ID NO: 380477 - DNA, 120 bp, Artificial Sequence
  ENSG00000143499_1 (sequence is synthesized)
ctggagcgcttctgcagcccgggcaaaggccgggggctgcgggctctgcagcccttccaggtgggggacttgctgttctcctgcccggcctatgcctacgtgctcacggtcaacgagcgg

SEQ ID NO: 380478 - DNA, 120 bp, Artificial Sequence
  ENSG00000143499_2 (sequence is synthesized)
ggcaaccactgcgagtactgcttcaccaggaaagaaggattgtccaaatgtggaagatgcaagcaggcattttactgcaatgtggagtgtcagaaagaagattggcccatgcacaagctg

SEQ ID NO: 380479 - DNA, 120 bp, Artificial Sequence
  ENSG00000143499_3 (sequence is synthesized)
gaatgttctcccatggttgtttttggggaaaactggaatccctcggagactgtaagactaacagcaaggattctggccaaacagaaaatccacccagagagaacaccttcggaaaaattg

SEQ ID NO: 380480 - DNA, 120 bp, Artificial Sequence
  ENSG00000143499_4 (sequence is synthesized)
ttagctgtgaaggagtttgaatcacatctggataagttagacaatgagaagaaggatttgattcagagtgacatagctgctctccatcacttttactccaagcatctcggattccctgac

SEQ ID NO: 380481 - DNA, 120 bp, Artificial Sequence
  ENSG00000143499_5 (sequence is synthesized)
aatgatagcctcgtagtactctttgcacaggttaactgtaatggcttcacaattgaagatgaagaactttctcatttgggatcagcgatatttcctgatgttgcattgatgaatcatagc

SEQ ID NO: 380482 - DNA, 120 bp, Artificial Sequence
  ENSG00000143499_6 (sequence is synthesized)
tgttgccccaatgtcattgtgacctacaaagggaccctggcagaagtcagagctgtacaggaaatcaagccgggagaggaggtttttaccagctatattgatctcctgtacccaacggaa

SEQ ID NO: 380483 - DNA, 120 bp, Artificial Sequence
  ENSG00000143499_7 (sequence is synthesized)
ggacaaggataaggccaaggtggaaatccggaagctcagcgatcccccaaaggcagaagccatccgagacatggtcagatatgcacgcaacgtcattgaagagttccggagggccaagca

SEQ ID NO: 380484 - DNA, 120 bp, Artificial Sequence
  ENSG00000143499_8 (sequence is synthesized)
ctataaatcccctagtgagctgctggagatctgcgagctcagccaggagaagatgagctctgtgtttgaggacagtaacgtgtacatgttgcacatgatgtaccaggccatgggtgtctg

SEQ ID NO: 380485 - DNA, 120 bp, Artificial Sequence
  ENSG00000143499_9 (sequence is synthesized)
cttgtacatgcaggactgggaaggagccctgcaatatggacagaaaatcattaagccctacagtaagcactatcctttgtactccctcaacgtggcctccatgtggttgaagctagggag

SEQ ID NO: 380486 - DNA, 120 bp, Artificial Sequence
  ENSG00000143499_10 (sequence is synthesized)
actctacatgggcctggaacacaaagccgcaggggagaaagccctgaagaaggccattgcaatcatggaagtagctcacggcaaagatcatccatatatttctgagatcaaacaggaaat

SEQ ID NO: 380487 - DNA, 120 bp, Artificial Sequence
  ENSG00000143499_11 (sequence is synthesized)
tgaaagccactgaaactatgcagcatttcagttttcatttaaacacttagttcagaaaccttaaaggatttgaatatttcaaattgcacacgtcactccagcatctctgtaaaataattg

SEQ ID NO: 380488 - DNA, 120 bp, Artificial Sequence
  ENSG00000143499_12 (sequence is synthesized)
gaatgaaaatacttcttgcacttaaacactgcacatgccgtactttgaggttagtctgaatcttgaactttaataccaaattaattttgaatgcttttgtttcctaagagataatggcat

SEQ ID NO: 380489 - DNA, 120 bp, Artificial Sequence
  ENSG00000143499_13 (sequence is synthesized)
ggtttcatatgttatactttggacagacagagttttaaaaatggaattattttttctttcatgcctcttgtaatgttctgaacaaacttgaatgatgaaagtattaaagagatatcagta

SEQ ID NO: 380490 - DNA, 120 bp, Artificial Sequence
  ENSG00000143499_14 (sequence is synthesized)
ctgccctgatagcttattatccctcgccaacaaggcaaggtgggaagttggaaagagggagcaggagaaggatggatttaagattctgaaaaccaaaggaggaatgtctcctagtaaatg

SEQ ID NO: 380491 - DNA, 120 bp, Artificial Sequence
  ENSG00000143499_15 (sequence is synthesized)
tgtaaaggcgtactgaccacccacaatgtggtgtccatcctgttggagttgtatgattttatttccccttattttggctagtttggctgggagccccatgtggtggaggaccatgaagga

SEQ ID NO: 380492 - DNA, 120 bp, Artificial Sequence
  ENSG00000143499_16 (sequence is synthesized)
cagagccttgatggccttgtgctttgggtattttactttgggcagggcacagtgccaagggccttgcttatttcagctctcctcactggcacactctgagcagggactctgctcattccc

SEQ ID NO: 380493 - DNA, 120 bp, Artificial Sequence
  ENSG00000143499_17 (sequence is synthesized)
atgcagcagatgaggaaacagcctgatagatattaagtaatttgcccaaaggacacagctgatggtgataggatctaggattttgtcccagctctatcagaatccatattcttaaccatt

SEQ ID NO: 380494 - DNA, 120 bp, Artificial Sequence
  ENSG00000143499_18 (sequence is synthesized)
gtattgtagcattttcttgggagttgaaaagggattcgatttgtactctaaagggtagaatttaaaaccagtgagaggaaatgagagaaaggcacattgtttctcagcataagaaagaac

SEQ ID NO: 380495 - DNA, 120 bp, Artificial Sequence
  ENSG00000143499_19 (sequence is synthesized)
tttgccacagtgggagtcgtgctcagggttccaacttgggtgaggatttgaatttgattagaatcgtgattttaatcaacattgtttacatcagaactaggggtctggaccctgcggcta

SEQ ID NO: 380496 - DNA, 120 bp, Artificial Sequence
  ENSG00000143499_20 (sequence is synthesized)
aaattcttgagttgagcggttccgaccttcaggttttcttcatttgttttttctggagaaatgtaattcctttcacttttgcttggctttctgtaagttactttttcatggggtaagggt

SEQ ID NO: 380497 - DNA, 120 bp, Artificial Sequence
  ENSG00000143499_21 (sequence is synthesized)
tatggacagaaaatcattaagccctacaggtgattgcagaggctgttctaatcatccacggagtggaatttggttgtttagaatgtatacgatagtgtcatcttcctgcccattgctgag

SEQ ID NO: 380498 - DNA, 120 bp, Artificial Sequence
  ENSG00000143499_22 (sequence is synthesized)
gcagggcactgctcccgagtcaggcctgttctcaccatcatcccaaggagacaggttgaggttatgcagcggatactggggcaagatccctcccaggtccatccagggccatatccatag

SEQ ID NO: 380499 - DNA, 120 bp, Artificial Sequence
  ENSG00000143499_23 (sequence is synthesized)
tagttaactcaggctagttttgagaagccactagtttgcttcttttcccacccactgcttccaagtttaattactaagtggtggtctcagaaaccctggttttcatcattactcacacca

SEQ ID NO: 380500 - DNA, 120 bp, Artificial Sequence
  ENSG00000143499_24 (sequence is synthesized)
tccccttcttttgctttttcaaattacagccccagtttgcaaatggggaagctctgggaccagtgggttgaccgtggttatctaatctccccaccccaggtttggaaaaaagaaacaaaa

SEQ ID NO: 380501 - DNA, 120 bp, Artificial Sequence
  ENSG00000143499_25 (sequence is synthesized)
attgctttttaatttgtagtaataatgaatattagccctggagagatttcctgcctgagagggttactaaacctaaaagtgggtgacagacggaagttgtggctttgtcctctgactcgg

SEQ ID NO: 380502 - DNA, 120 bp, Artificial Sequence
  ENSG00000143499_26 (sequence is synthesized)
actagacacttcagggctgaggtggcctagatgggatcactggagctctttttaaaggcactgatattatgcatttacagggtacgtccaacaccaagtgggccaagtgaatcagggtcg

SEQ ID NO: 380503 - DNA, 120 bp, Artificial Sequence
  ENSG00000143499_27 (sequence is synthesized)
ctgggcattagacccagaaatctgtgttctggaagcatcccaggtgtttctcaggagtttgagaagccctcagtctccttccacttccgagattagggtctgtgaaggttgtgtctggtc

SEQ ID NO: 380504 - DNA, 120 bp, Artificial Sequence
  ENSG00000143499_28 (sequence is synthesized)
tgaatgtccactgcccactccaccctctacttaccccactgtgccctgattagccagcagggggagcccaaaggaagccagctcttaaaatctgctcttggaaacagaatttgttaaatt

SEQ ID NO: 380505 - DNA, 120 bp, Artificial Sequence
  ENSG00000143499_29 (sequence is synthesized)
ggggataaactcaaaccttccttttctcctagagtgtgtgaggaagtgcactggcctcatgcgcagttctctgtgtgagatctgtagggagagaggagcagacagacagcatcccagccc

SEQ ID NO: 380506 - DNA, 120 bp, Artificial Sequence
  ENSG00000143499_30 (sequence is synthesized)
tgtggttctcccagcagggccttgctctgctagacccatctttatctgcgtgagcccctcccggaagcccagctctggtcttctgtggggccgtgggtcccagggctgcctcctacccag

SEQ ID NO: 380507 - DNA, 120 bp, Artificial Sequence
  ENSG00000143499_31 (sequence is synthesized)
gaatacagctagaacatgtctttttggactgactttcaggagacacagggtggaacagcctagcctttaaataaacacctcttacacacatgtaaacacacacactggctcacccaccag

SEQ ID NO: 380508 - DNA, 120 bp, Artificial Sequence
  ENSG00000143499_32 (sequence is synthesized)
ctgcctctgggccctgttcttagggaaatggctgtttcccaggcagaccccatcagtcagtcttcaggtacagccggagagaacacttgctgtatctaaagcccctgctggacaatgggg

SEQ ID NO: 380509 - DNA, 120 bp, Artificial Sequence
  ENSG00000143499_33 (sequence is synthesized)
aaagaacatccagaagacacaggaagtgttctgacttcagagcacttaactgttttgctaaaccaacccatatcatagtgtgacagaaagctggggtcttaagacacattggggtgggtg

SEQ ID NO: 380510 - DNA, 120 bp, Artificial Sequence
  ENSG00000143499_34 (sequence is synthesized)
ggggttgggtgggtggctgtatgtctgagtacctaaggtgataggcctaattgctgccttcataaatgggacatttacttcacaagctgttttcccagggtcttcctctgggtatgtctg

SEQ ID NO: 380511 - DNA, 120 bp, Artificial Sequence
  ENSG00000143499_35 (sequence is synthesized)
aaatataaaaatctggactgggattgaagattgtgtttacaaatgcttttgaataggatttctcctgcagttgttacgtagcttttcagaaacacacaaactacaaataatgaacaacat

SEQ ID NO: 380512 - DNA, 120 bp, Artificial Sequence
  ENSG00000143499_36 (sequence is synthesized)
ctgcaatgattcggcagggtggcagcatccacgctctccacccaaaccctggtgggatttggagaggccgctggtgggcagaggttggccctaagcatggcagcctccggcttactgcac

SEQ ID NO: 380513 - DNA, 120 bp, Artificial Sequence
  ENSG00000143499_37 (sequence is synthesized)
ccagcctgtggggcggctcagtagccgctgacatggtggcctgttgtctcttctcttgttctagtaagcactatcctttgtactccctcaacgtggcctccatgtggttgaagctaggga

SEQ ID NO: 380514 - DNA, 120 bp, Artificial Sequence
  ENSG00000143499_38 (sequence is synthesized)
aactattagatttttaaaaaatgtcttgcaaagattcagttcctctgacttagcaagtaagtagtgaaggaagctaaacagtctgcctatctcattttaaaaactgggttttctcttctg

SEQ ID NO: 380515 - DNA, 120 bp, Artificial Sequence
  ENSG00000143502_0 (sequence is synthesized)
caggtaagaccgacagtcccggaagggtcttccattccgaggaggcgcgcgcaggccggggagggggagttggtgcctggtgcagctccccaagggagaattttttttttttttttgaca

SEQ ID NO: 380516 - DNA, 120 bp, Artificial Sequence
  ENSG00000143502_1 (sequence is synthesized)
gcgcagagaaatctcactggggactggggcagtaggatcgatcccaatcccgaggaaaaccagagaagtagctgggggagacggtgccacattgtgagattcccagagtgaaatgtatag

SEQ ID NO: 380517 - DNA, 120 bp, Artificial Sequence
  ENSG00000143502_2 (sequence is synthesized)
gcccagggaaaagtgtcttcgcggccccgagacgcggggaggctctagactttcctgtggtgggcacagctgctgaatcccggggaccggcgcggagccaatgtgcgctaacccctgccc

SEQ ID NO: 380518 - DNA, 120 bp, Artificial Sequence
  ENSG00000143502_3 (sequence is synthesized)
tccctcctgtcctccatcccccagcacgcgcagcatcccacggcggctgttactcagtgcacccggctcgggggaaggcgggggacctcgccgtgggaaagggggcgggggccgcgcggg

SEQ ID NO: 380519 - DNA, 120 bp, Artificial Sequence
  ENSG00000143502_4 (sequence is synthesized)
ggaggaaccaggatggagcctgggaagccgaggcgccgggtcccagagcggaggagggggagcgtggcccccgagcccggacagactggcttattgtggtgttccgcttctggttgcaga

SEQ ID NO: 380520 - DNA, 120 bp, Artificial Sequence
  ENSG00000143502_5 (sequence is synthesized)
ctcttgcaagctggatgccctctgtggatgaaagatgtatcatggaatgaacccgagcaatggagatggatttctagagcagcagcagcagcagcagcaacctcagtccccccagagact

SEQ ID NO: 380521 - DNA, 120 bp, Artificial Sequence
  ENSG00000143502_6 (sequence is synthesized)
cttggccgtgatcctgtggtttcagctggcgctgtgcttcggccctgcacagctcacgggcgggttcgatgaccttcaagtgtgtgctgaccccggcattcccgagaatggcttcaggac

SEQ ID NO: 380522 - DNA, 120 bp, Artificial Sequence
  ENSG00000143502_7 (sequence is synthesized)
ccccagcggaggggttttctttgaaggctctgtagcccgatttcactgccaagacggattcaagctgaagggcgctacaaagagactgtgtttgaagcattttaatggaaccctaggctg

SEQ ID NO: 380523 - DNA, 120 bp, Artificial Sequence
  ENSG00000143502_8 (sequence is synthesized)
gatcccaagtgataattccatctgtgtgcaagaagattgccgtatccctcaaatcgaagatgctgagattcataacaagacatatagacatggagagaagctaatcatcacttgtcatga

SEQ ID NO: 380524 - DNA, 120 bp, Artificial Sequence
  ENSG00000143502_9 (sequence is synthesized)
aggattcaagatccggtaccccgacctacacaatatggtttcattatgtcgcgatgatggaacgtggaataatctgcccatctgtcaaggctgcctgagacctctagcctcttctaatgg

SEQ ID NO: 380525 - DNA, 120 bp, Artificial Sequence
  ENSG00000143502_10 (sequence is synthesized)
ctatgtaaacatctctgagctccagacctccttcccggtggggactgtgatctcctatcgctgctttcccggatttaaacttgatgggtctgcgtatcttgagtgcttacaaaaccttat

SEQ ID NO: 380526 - DNA, 120 bp, Artificial Sequence
  ENSG00000143502_11 (sequence is synthesized)
ctggtcgtccagcccaccccggtgccttgctctggaagtctgtccactacctccaatggtgagtcacggagatttcgtctgccacccgcggccttgtgagcgctacaaccacggaactgt

SEQ ID NO: 380527 - DNA, 120 bp, Artificial Sequence
  ENSG00000143502_12 (sequence is synthesized)
ggtggagttttactgcgatcctggctacagcctcaccagcgactacaagtacatcacctgccagtatggagagtggtttccttcttatcaagtctactgcatcaaatcagagcaaacgtg

SEQ ID NO: 380528 - DNA, 120 bp, Artificial Sequence
  ENSG00000143502_13 (sequence is synthesized)
gcccagcacccatgagaccctcctgaccacgtggaagattgtggcgttcacggcaaccagtgtgctgctggtgctgctgctcgtcatcctggccaggatgttccagaccaagttcaaggc

SEQ ID NO: 380529 - DNA, 120 bp, Artificial Sequence
  ENSG00000143502_14 (sequence is synthesized)
ccactttccccccagggggcctccccggagttccagcagtgaccctgactttgtggtggtagacggcgtgcccgtcatgctcccgtcctatgacgaagctgtgagtggcggcttgagtgc

SEQ ID NO: 380530 - DNA, 120 bp, Artificial Sequence
  ENSG00000143502_15 (sequence is synthesized)
cttaggccccgggtacatggcctctgtgggccagggctgccccttacccgtggacgaccagagccccccagcataccccggctcaggggacacggacacaggcccaggggagtcagaaac

SEQ ID NO: 380531 - DNA, 120 bp, Artificial Sequence
  ENSG00000143502_16 (sequence is synthesized)
ctgtgacagcgtctcaggctcttctgagctgctccaaagtctgtattcacctcccaggtgccaagagagcacccaccctgcttcggacaaccctgacataattgccagcacggcagagga

SEQ ID NO: 380532 - DNA, 120 bp, Artificial Sequence
  ENSG00000143502_17 (sequence is synthesized)
ggtggcatccaccagcccaggcatcgacattgcagatgagattcctctaatggaagaagatccctaatatgggtcaagatccagatgactctcctgctccttcggggaaaggaccttgta

SEQ ID NO: 380533 - DNA, 120 bp, Artificial Sequence
  ENSG00000143502_18 (sequence is synthesized)
tcttggagtgaggtcacagaaggatagagcctgggggcaaaatgtctaacttgtctacatggggaccacagttcacattatgcatctcaggctccacagtgaggctgacaaactgcaatg

SEQ ID NO: 380534 - DNA, 120 bp, Artificial Sequence
  ENSG00000143502_19 (sequence is synthesized)
gcagtgcttttaaatgagatttgaggattcaccaagacccatggggaaccggggcagcagggaagccctcgcgtggtcttggatgaggggtgttaaatgtgtatcgtgctgtggaacatg

SEQ ID NO: 380535 - DNA, 120 bp, Artificial Sequence
  ENSG00000143502_20 (sequence is synthesized)
ggacaattccacgcacatcccaccgaatcatcacgcatcccattgactggcaagtactccccgccccctctgaaagcatgtcacatcatgtaaatttgcttctaacatctgcttcaaact

SEQ ID NO: 380536 - DNA, 120 bp, Artificial Sequence
  ENSG00000143502_21 (sequence is synthesized)
gtctctggactccaaatttggatgggtcagcctctgcagaaagtttgtgttgagatgctggaagaacagcagagcctcctgcaccctcagcaagggaccagctcccaaaggaaaggtcct

SEQ ID NO: 380537 - DNA, 120 bp, Artificial Sequence
  ENSG00000143502_22 (sequence is synthesized)
tgtgtgacatttggagaatcttccttcatccagacaactctactcgaagcaagacgaaagcaggatgtggcagttgcagtgagaaaggaaaggaaagatgggcagactctgctttctgga

SEQ ID NO: 380538 - DNA, 120 bp, Artificial Sequence
  ENSG00000143502_23 (sequence is synthesized)
aatttcttcacaaagtagagctcatgaactctgtgctgtcttctggtaacatatcatcagtgtttgtattcatggtgtggcacatggatccatggcattgggtaaatctggtggttttta

SEQ ID NO: 380539 - DNA, 120 bp, Artificial Sequence
  ENSG00000143502_24 (sequence is synthesized)
cacatggtcagaatgtgttcaaatacatctcatgatggagacagtaaccaaggtaatgttttgtttcagcattttaaaaagactccacttaacatttatctcagaatcatgagcctctct

SEQ ID NO: 380540 - DNA, 120 bp, Artificial Sequence
  ENSG00000143502_25 (sequence is synthesized)
ctagttgacaattgtcattgttcccccagccccaaattgaaccatacatttattttccaaaacagaaattgtttctgtaaacatatccgaccttcaaaagaagtgtgaggttggattttt

SEQ ID NO: 380541 - DNA, 120 bp, Artificial Sequence
  ENSG00000143502_26 (sequence is synthesized)
cccccttttatttgtcctaagattccaggaggctggcctcccagcccagatagctcagccacctcacctgcctatcattcctgcattcctactttgagggtctcatcatgcccactgggt

SEQ ID NO: 380542 - DNA, 120 bp, Artificial Sequence
  ENSG00000143502_27 (sequence is synthesized)
gttgttcctaagaaactgattgattaaaaaatttcccaaagtgtcctgaagtgtctcttcaaatacatgttgatctgtggagttgattcctttccttctcttggttttagacaaatgtaa

SEQ ID NO: 380543 - DNA, 120 bp, Artificial Sequence
  ENSG00000143502_28 (sequence is synthesized)
acaaagctctgatccttaaaattgctatgctgatagagtggtgagggctggaagcttgatcaagtcctgtttcttcttgacacagactgattaaaaattaaaagaaaatgacagtttgaa

SEQ ID NO: 380544 - DNA, 120 bp, Artificial Sequence
  ENSG00000143502_29 (sequence is synthesized)
gaagcttccgtctcgctcgctcgcgcagcggcggcagcagaggtcgcgcacagatgcgggttagactggcggggggaggaggcggaggagggaaggaagctgcatgcatgagacccacag

SEQ ID NO: 380545 - DNA, 120 bp, Artificial Sequence
  ENSG00000143502_30 (sequence is synthesized)
ccccccacccccaggcttcaaggaagagagccaagagtttgctcaacaagtgactcctttaaggtctctgactcatgcaaacccctggtccagcggccctctctgcatacccaagtcatg

SEQ ID NO: 380546 - DNA, 120 bp, Artificial Sequence
  ENSG00000143502_31 (sequence is synthesized)
gtcctagtgcagctgaattgagctcctggagccctcatttggttcatgtcgctgtagtgctgtgctctgtgccagcaggtggaaacagatgctttctgactgactcactgatttgtagtg

SEQ ID NO: 380547 - DNA, 120 bp, Artificial Sequence
  ENSG00000143502_32 (sequence is synthesized)
ttaagtcccttagttttattgagaaacattttcttacatggtagagtgaaagcttttcattcaatgctacatctaaaattcacaatttcaaactgcgcttaatctgtaagcaaagtccca

SEQ ID NO: 380548 - DNA, 120 bp, Artificial Sequence
  ENSG00000143502_33 (sequence is synthesized)
gtgccttgctctggaaggtaacacatctcattctttcggaagttgtattttgtattattaaagggaggaagaagatcagtaggaggaagagctgtgaattatgatgggcaataacttttc

SEQ ID NO: 380549 - DNA, 120 bp, Artificial Sequence
  ENSG00000143502_34 (sequence is synthesized)
ttctctgaatacatctttctcacttttctccagagcagagatcagctgccgtgaagccatatttacaattagatgtaaaacttgcttccctcatccttaggcttaaagaggagagcagat

SEQ ID NO: 380550 - DNA, 120 bp, Artificial Sequence
  ENSG00000143502_35 (sequence is synthesized)
ctactcactcctctagttgcttctgtgagtttccgtttccccttctctgaaagaaccaacaagatctacactacagtgttgtttgaaggactagagagtgcctgtagtgtgcctccaacc

SEQ ID NO: 380551 - DNA, 120 bp, Artificial Sequence
  ENSG00000143502_36 (sequence is synthesized)
ctgcttcacacgcatcgggacacctccggcagggtggcctgctctgcagggagggccatcttgttttccaagtggcacccactgctgccatctgtccactacctccaatggtgagtcacg

SEQ ID NO: 380552 - DNA, 120 bp, Artificial Sequence
  ENSG00000143502_37 (sequence is synthesized)
tttatttttgccctgtgttaaagtcctctcccaccccagcacctacctgttcctcaactagcaccaccacatctctgttctaaatgttgttctcctgcaataaaggacgtttgaattaaa

SEQ ID NO: 380553 - DNA, 120 bp, Artificial Sequence
  ENSG00000143507_0 (sequence is synthesized)
aactatgttgctgctggagatcaatgaagccgagtgaatgggggctgaatgtgcgagtccatagctgaagaggagcgccagatggtggaggaatacacttatttatgaaactgtcttgag

SEQ ID NO: 380554 - DNA, 120 bp, Artificial Sequence
  ENSG00000143507_1 (sequence is synthesized)
ttcttcttgaattgccagttttcagcctcctcatgcctccgtctcctttagacgacagggtagtagtggcactatctaggcccgtccgacctcaggatctcaacctttgtttagactcta

SEQ ID NO: 380555 - DNA, 120 bp, Artificial Sequence
  ENSG00000143507_2 (sequence is synthesized)
gttaccttggctctgccaacccaggcagtaacagccaccctcctgtcatcgccaccaccgttgtgtccctcaaggctgcgaatctgacgtatatgccctcatccagcggctctgcccgct

SEQ ID NO: 380556 - DNA, 120 bp, Artificial Sequence
  ENSG00000143507_3 (sequence is synthesized)
cgctgaattgtggatgcagcagtgccagctgctgcactgtggcaacctacgacaaggacaatcaggcccaaacccaagccattgccgctggcaccaccaccactgccatcggaacctcta

SEQ ID NO: 380557 - DNA, 120 bp, Artificial Sequence
  ENSG00000143507_4 (sequence is synthesized)
ccacctgccctgctaaccagatggtcaacaataatgagaatacaggctctctaagtccatcaagtggggtgggcagccctgtgtcagggacccccaagcagctagccagcatcaaaataa

SEQ ID NO: 380558 - DNA, 120 bp, Artificial Sequence
  ENSG00000143507_5 (sequence is synthesized)
tctaccccaatgacttggcaaagaagatgaccaaatgcagcaagagtcacctgccgagtcagggccctgtcatcattgactgcaggcccttcatggagtacaacaagagtcacatccaag

SEQ ID NO: 380559 - DNA, 120 bp, Artificial Sequence
  ENSG00000143507_6 (sequence is synthesized)
gagctgtccacattaactgtgccgataagatcagccggcggagactgcagcagggcaagatcactgtcctagacttgatttcctgtagggaaggcaaggactctttcaagaggatctttt

SEQ ID NO: 380560 - DNA, 120 bp, Artificial Sequence
  ENSG00000143507_7 (sequence is synthesized)
ccaaagaaattatagtttatgatgagaataccaatgaaccaagccgagtgatgccctcccagccacttcacatagtcctcgagtccctgaagagagaaggcaaagaacctctggtgttga

SEQ ID NO: 380561 - DNA, 120 bp, Artificial Sequence
  ENSG00000143507_8 (sequence is synthesized)
aaggtggacttagtagttttaagcagaaccatgaaaacctctgtgacaactccctccagctccaagagtgccgggaggtggggggcggcgcatccgcggcctcgagcttgctacctcagc

SEQ ID NO: 380562 - DNA, 120 bp, Artificial Sequence
  ENSG00000143507_9 (sequence is synthesized)
ccatccccaccacccctgacatcgagaacgctgagctcacccccatcttgcccttcctgttccttggcaatgagcaggatgctcaggacctggacaccatgcagcggctgaacatcggct

SEQ ID NO: 380563 - DNA, 120 bp, Artificial Sequence
  ENSG00000143507_10 (sequence is synthesized)
tgccagccactgacagcaacaagcagaacctgcggcagtactttgaagaggcttttgagttcattgaggaagctcaccagtgtgggaaggggcttctcatccactgccaggctggggtgt

SEQ ID NO: 380564 - DNA, 120 bp, Artificial Sequence
  ENSG00000143507_11 (sequence is synthesized)
cccgctccgccaccatcgtcatcgcttacttgatgaagcacactcggatgaccatgactgatgcttataaatttgtcaaaggcaaacgaccaattatctccccaaaccttaacttcatgg

SEQ ID NO: 380565 - DNA, 120 bp, Artificial Sequence
  ENSG00000143507_12 (sequence is synthesized)
ggcagttgctagagttcgaggaagacctaaacaacggtgtgacaccgagaatccttacaccaaagctgatgggcgtggagacggttgtgtgacaatggtctggatggaaaggattgctgc

SEQ ID NO: 380566 - DNA, 90 bp, Artificial Sequence
  ENSG00000143507_13 (sequence is synthesized)
gggagtaagtttgtgaatggaaacaaacttgtttaaacactttatttttaacaagtgtaagaagactataacttttgatgccattgagat

SEQ ID NO: 380567 - DNA, 120 bp, Artificial Sequence
  ENSG00000143507_14 (sequence is synthesized)
acaagtgtaagaagactataacttttgatgccattgagattcacctcccacaaactgacaaattaaggaggttaaagaagtaatttttttaagccaacaataaaaatataatacaacttg

SEQ ID NO: 380568 - DNA, 120 bp, Artificial Sequence
  ENSG00000143507_15 (sequence is synthesized)
tttctcccccttttccttttaagctatttgtagagtttatgactaaatagtctgtgcaggttcatagaccgaagatactacacactttaaaccaattaaaaagaaccaaaagtaaataga

SEQ ID NO: 380569 - DNA, 120 bp, Artificial Sequence
  ENSG00000143507_16 (sequence is synthesized)
aaagacattgaatcaccaaggcctgggatcaacctgggctgtccacacagaaaacaaaaacccaaccaaaccaagccctgttgtgctcactggtgcaaagagaagatcagggcagcttaa

SEQ ID NO: 380570 - DNA, 120 bp, Artificial Sequence
  ENSG00000143507_17 (sequence is synthesized)
gtggtctaagaatccttcaggcattctttaaggagaaaaaggatacctttgattttgtgtgtttcatgctctggattttttttttttttccttctctgggtttaagagattttttttgaa

SEQ ID NO: 380571 - DNA, 120 bp, Artificial Sequence
  ENSG00000143507_18 (sequence is synthesized)
atagtgaggaactgaccattatatgccttcactggcttcttgtgcaataatatgatgttttaagtgtgcaaacaagttagagctggcagctgaatgatagacaaatagtgcaaatttgcc

SEQ ID NO: 380572 - DNA, 120 bp, Artificial Sequence
  ENSG00000143507_19 (sequence is synthesized)
agctggcagctgaatgatagacaaatagtgcaaatttgccagcttggagatagaaaggaattcaacaatatatcaaatactttccttcccacctttttccttttttttttttttttctga

SEQ ID NO: 380573 - DNA, 120 bp, Artificial Sequence
  ENSG00000143507_20 (sequence is synthesized)
aaccttgttacatatgtatatcagaatgtaagaaaaaaaaatttatttaaaaatatttttcgcaaaaaaaaaaaaaatcttggtgtgtttctgttgattgtgtaaaaatttattttcatt

SEQ ID NO: 380574 - DNA, 120 bp, Artificial Sequence
  ENSG00000143507_21 (sequence is synthesized)
gtataaacaaaatagtatgcaacttacagcaatgtctctcccacttataataaaacacctaactctcatgtagcattttatccatattgagagctctgtgagatagaaattattatatta

SEQ ID NO: 380575 - DNA, 120 bp, Artificial Sequence
  ENSG00000143512_0 (sequence is synthesized)
gggcagagcagggaagccaacctgagcaaacacagcagcccgagtgttcccaaggccaaaatgctgagaacgtccactcctaatctgtgtggtggtctgcattgccgggccccctggctc

SEQ ID NO: 380576 - DNA, 120 bp, Artificial Sequence
  ENSG00000143512_1 (sequence is synthesized)
tcttctggcattctctgcctctgcctcatattcttgttgggccaggtgggcttgctgcagggacacccccagtgcctggattacgggccccctttccagccccctctgcaccttgagttt

SEQ ID NO: 380577 - DNA, 120 bp, Artificial Sequence
  ENSG00000143512_2 (sequence is synthesized)
tgctctgactatgagtccttcggctgctgtgatcagcacaaggaccgccgcatcgctgcccggtactgggacatcatggaatattttgatctgaagagacatgagctgtgtggagattac

SEQ ID NO: 380578 - DNA, 120 bp, Artificial Sequence
  ENSG00000143512_3 (sequence is synthesized)
attaaagacatcctttgccaggagtgctcgccctacgcagcccacctctacgacgccgaaaacacccagacgcctctccggaatctcccgggcctctgctctgattactgctctgccttc

SEQ ID NO: 380579 - DNA, 120 bp, Artificial Sequence
  ENSG00000143512_4 (sequence is synthesized)
cattctaactgtcactcagccatttccctgctgaccaatgaccgcggcctccaggagtctcatggaagggacggtacccgcttctgccacctcctggaccttcctgacaaggactattgc

SEQ ID NO: 380580 - DNA, 120 bp, Artificial Sequence
  ENSG00000143512_5 (sequence is synthesized)
ttccctaatgtcctgaggaacgactatctcaaccgccacctgggcatggtggcccaagatcctcagggctgcctgcagctctgcctgagcgaggtggccaacgggctgaggaaccccgtc

SEQ ID NO: 380581 - DNA, 120 bp, Artificial Sequence
  ENSG00000143512_6 (sequence is synthesized)
tccatggtccatgctggggacggcacccatcgcttctttgttgccgagcaggtaggagtggtgtgggtctacctccctgatgggagtcgcctggagcaacccttcctggacctcaagaac

SEQ ID NO: 380582 - DNA, 120 bp, Artificial Sequence
  ENSG00000143512_7 (sequence is synthesized)
atcgtgttgaccaccccatggatcggggatgagagaggcttcttggggttggcttttcaccccaaattccgccacaatcgcaagttctatatttattattcgtgcctggacaagaagaag

SEQ ID NO: 380583 - DNA, 120 bp, Artificial Sequence
  ENSG00000143512_8 (sequence is synthesized)
gtagaaaagatccgaattagtgagatgaaggtttctcgggctgatcctaacaaagctgacctgaaatcagagagggtcatcttggagattgaagaaccagcctcaaaccataatggcgga

SEQ ID NO: 380584 - DNA, 120 bp, Artificial Sequence
  ENSG00000143512_9 (sequence is synthesized)
caacttctttttggcctggatggctatatgtacatattcactggggacgggggacaggctggagatccctttggcctgtttggaaatgctcagaacaaaagttccctgctgggaaaagtt

SEQ ID NO: 380585 - DNA, 120 bp, Artificial Sequence
  ENSG00000143512_10 (sequence is synthesized)
cctcggacaatccatttgtttctgagccaggggcccaccccgccatctatgcctatgggatcaggaacatgtggcgttgtgctgtggaccgaggggaccccatcacgcgccagggccgag

SEQ ID NO: 380586 - DNA, 120 bp, Artificial Sequence
  ENSG00000143512_11 (sequence is synthesized)
gccggatattctgtggggacgtgggccagaacaggtttgaagaggttgacctcattttgaaaggtggaaactatggctggagagcaaaggaagggtttgcatgttatgacaaaaaacttt

SEQ ID NO: 380587 - DNA, 120 bp, Artificial Sequence
  ENSG00000143512_12 (sequence is synthesized)
gtcacaatgcctctttggatgatgttctgccaatctatgcttatggccatgcagtggggaagtcagtcactggaggttatgtctatcgtggttgtgaatccccaaatctcaatggcctgt

SEQ ID NO: 380588 - DNA, 120 bp, Artificial Sequence
  ENSG00000143512_13 (sequence is synthesized)
atatctttggagacttcatgagtggtcgacttatggctttgcaggaagatagaaaaaacaagaaatggaagaagcaggatctttgcctgggcagcaccacgtcctgtgccttcccagggc

SEQ ID NO: 380589 - DNA, 120 bp, Artificial Sequence
  ENSG00000143512_14 (sequence is synthesized)
tgatcagcacccatagcaagttcatcatctcctttgctgaagatgaagcaggggagctgtatttcctggcgacctcttacccaagtgcctatgcaccacgtggatctatttacaagtttg

SEQ ID NO: 380590 - DNA, 120 bp, Artificial Sequence
  ENSG00000143512_15 (sequence is synthesized)
ttgacccctcaaggcgagcacccccaggcaagtgcaaatacaagccagtgcccgtgagaaccaagagtaagcggatcccgttcagaccactcgccaagacagtcttggacttgctaaagg

SEQ ID NO: 380591 - DNA, 120 bp, Artificial Sequence
  ENSG00000143512_16 (sequence is synthesized)
aacaatcagagaaagctgctagaaaatcttccagtgcaaccttagcttctggcccagcccagggtttgtctgagaaaggctcctccaagaagctggcttctcctacaagcagcaagaata

SEQ ID NO: 380592 - DNA, 120 bp, Artificial Sequence
  ENSG00000143512_17 (sequence is synthesized)
cattgcgagggcctggtacaaagaagaaagccagagtggggccccacgtccgccagggcaagaggaggaagagcctgaaaagccacagtggcaggatgaggccatcagcagagcagaagc

SEQ ID NO: 380593 - DNA, 120 bp, Artificial Sequence
  ENSG00000143512_18 (sequence is synthesized)
gagctggcagaagtctcccttgacctattggtcaaggtggccgacagggtgacgtgagagaggagagccacctcatcaaatgaaagtcactgctgaataaagaccttagaagtctgggaa

SEQ ID NO: 380594 - DNA, 120 bp, Artificial Sequence
  ENSG00000143512_19 (sequence is synthesized)
gccagggtagaggtggggcagggcggttttcctctccctgggaaatcttgctgtctactgaataaataaatgcaccttctctgtatgcagtgcttctgtgggagaccatatcccagattg

SEQ ID NO: 380595 - DNA, 120 bp, Artificial Sequence
  ENSG00000143512_20 (sequence is synthesized)
ctggtgcacctgggttatggtaagcactagtccatgagcctgcttggaatcacactggatgtctccgttttgtcttgtaaatgcctacaacctgaggtaataaatcaacatttgctcaaa

SEQ ID NO: 380596 - DNA, 120 bp, Artificial Sequence
  ENSG00000143512_21 (sequence is synthesized)
gttgacctcattttgaaaggtggaaactatggctggagagcaaaggaagggtttgcatgttatgacaaaaaactttgtcacaatgcctctttggggggaaaacttagccatgtggatttc

SEQ ID NO: 380597 - DNA, 120 bp, Artificial Sequence
  ENSG00000143512_22 (sequence is synthesized)
caaatattgtggatggcctattgagaacaataaacatgattcacttgcttgcctgtcctactgaagaccaagagatgatgttctgccaatctatgcttatggccatgcagtggggaagtc

SEQ ID NO: 380598 - DNA, 120 bp, Artificial Sequence
  ENSG00000143512_23 (sequence is synthesized)
atttttcttttctttggcagttttctgattcagttggcaggtaatttaactccccactttcacaagagcagctgtgagaagccacacagaaagcacccataaagcattttcacactgaag

SEQ ID NO: 380599 - DNA, 120 bp, Artificial Sequence
  ENSG00000143512_24 (sequence is synthesized)
acatccttacttattcaccttttttttttaagttgacatttatggagttactcctgtgtgccaggcactgtactaagtgctgtgcatgtgggctctcatttaatgctgacagaattccaa

SEQ ID NO: 380600 - DNA, 120 bp, Artificial Sequence
  ENSG00000143512_25 (sequence is synthesized)
ccaggcaggttaacatcctcactctatggataaagaaactgaaggctagaagatgcacccggggacaagcagtttaagaatgtgtgtgttactaggcagagaagctggcatcgcctgagg

SEQ ID NO: 380601 - DNA, 120 bp, Artificial Sequence
  ENSG00000143512_26 (sequence is synthesized)
gctgtgccttgagttcttgaagacattttctttaaagggagtcaccagcaccaccatcagaagcagcagcagaatcatcctcatcatcattttcatcatcctcatctgcgagcaccccca

SEQ ID NO: 380602 - DNA, 120 bp, Artificial Sequence
  ENSG00000143514_0 (sequence is synthesized)
ggtttcggagcggaggagggagccccgaccgtcacgagcgtcgaagagacaaagccgcgtcagggggcccggccggggcgggggagcccggggcttgttggtgccccagcccgcgcggag

SEQ ID NO: 380603 - DNA, 120 bp, Artificial Sequence
  ENSG00000143514_1 (sequence is synthesized)
cgccgccgcctcgcaacaggtccgggcggcctcgctctccgctcccctcccccgcatccgcgaccctccggggcacctcagctcggccggggccgcagtctggccacccgcttccatgcg

SEQ ID NO: 380604 - DNA, 120 bp, Artificial Sequence
  ENSG00000143514_2 (sequence is synthesized)
ggggccgcagtctggccacccgcttccatgcggttcgggtccaagatgatgccgatgtttcttaccgtgtatctcagtaacaatgagcagcacttcacagaagttccagttactccagaa

SEQ ID NO: 380605 - DNA, 120 bp, Artificial Sequence
  ENSG00000143514_3 (sequence is synthesized)
acaatatgcagagacgtggtggatctgtgcaaagaacccggcgagagtgattgccatttggctgaagtgtggtgtggctctgaacgtccagttgcggataatgagcgaatgtttgatgtt

SEQ ID NO: 380606 - DNA, 120 bp, Artificial Sequence
  ENSG00000143514_4 (sequence is synthesized)
cttcaacgatttggaagtcagaggaacgaagttcgcttcttccttcgtcatgaacgcccccctggcagggacattgtgagtggaccaagatctcaggatccaagtttaaaaagaaatggt

SEQ ID NO: 380607 - DNA, 120 bp, Artificial Sequence
  ENSG00000143514_5 (sequence is synthesized)
gtaaaagttcctggtgaatatcgaagaaaggagaacggtgttaatagtcctaggatggatctgactcttgctgaacttcaggaaatggcatctcgccagcagcaacagattgaagcccag

SEQ ID NO: 380608 - DNA, 120 bp, Artificial Sequence
  ENSG00000143514_6 (sequence is synthesized)
caacaattgctggcaactaaggaacagcgcttaaagtttttgaaacaacaagatcagcgacaacagcaacaagttgctgagcaggagaaacttaaaaggctaaaagaaatagctgagaat

SEQ ID NO: 380609 - DNA, 120 bp, Artificial Sequence
  ENSG00000143514_7 (sequence is synthesized)
caggaagctaagctaaaaaaagtgagagcacttaaaggccacgtggaacagaagagactaagcaatgggaaacttgtggaggaaattgaacagatgaataatttgttccagcaaaaacag

SEQ ID NO: 380610 - DNA, 120 bp, Artificial Sequence
  ENSG00000143514_8 (sequence is synthesized)
agggagctcgtcctggctgtgtcaaaagtagaagaactgaccaggcagctagagatgctcaagaacggcaggatcgacagccaccatgacaatcagtctgcagtggctgagcttgatcgc

SEQ ID NO: 380611 - DNA, 120 bp, Artificial Sequence
  ENSG00000143514_9 (sequence is synthesized)
ctctataaggagctgcagctaagaaacaaattgaatcaagagcagaatgccaagctacaacaacagagggagtgtttgaataagcgtaattcagaagtggcagtcatggataagcgtgtt

SEQ ID NO: 380612 - DNA, 120 bp, Artificial Sequence
  ENSG00000143514_10 (sequence is synthesized)
aatgagctgagggaccggctgtggaagaagaaggcagctctacagcaaaaagaaaatctaccagtttcatctgatggaaatcttccccagcaagccgcgtcagccccaagccgtgtggct

SEQ ID NO: 380613 - DNA, 120 bp, Artificial Sequence
  ENSG00000143514_11 (sequence is synthesized)
gcagtaggtccctatatccagtcgtctactatgcctcggatgccctcaaggcctgaattgctggtgaagccagccctgccggatggttccttggtcattcaggcttcagaggggccgatg

SEQ ID NO: 380614 - DNA, 120 bp, Artificial Sequence
  ENSG00000143514_12 (sequence is synthesized)
aaaatacagacactgcccaacatgagatctggggctgcttcacaaactaaaggctctaaaatccatccagttggccctgattggagtccttcaaatgcagatcttttcccaagccaaggc

SEQ ID NO: 380615 - DNA, 120 bp, Artificial Sequence
  ENSG00000143514_13 (sequence is synthesized)
tctgcttctgtacctcaaagcactgggaatgctctggatcaagttgatgatggagaggttccgctgagggagaaagagaagaaagtgcgtccgttctcaatgtttgatgcagtagaccag

SEQ ID NO: 380616 - DNA, 120 bp, Artificial Sequence
  ENSG00000143514_14 (sequence is synthesized)
tccaatgccccaccttcctttggtactctgaggaagaaccagagcagtgaagatatcttgcgggatgctcaggttgcaaataaaaatgtggctaaagtaccacctcctgttcctacaaaa

SEQ ID NO: 380617 - DNA, 120 bp, Artificial Sequence
  ENSG00000143514_15 (sequence is synthesized)
ccaaaacagattaatttgccttattttggacaaactaatcagccaccttcagacattaagccagacggaagttctcagcagttgtcaacagttgttccgtccatgggaactaaaccaaaa

SEQ ID NO: 380618 - DNA, 120 bp, Artificial Sequence
  ENSG00000143514_16 (sequence is synthesized)
ccagcagggcagcagccgagagtgctgctatctcccagcataccttcggttggccaagaccagaccctttctccaggttctaagcaagaaagtccacctgctgctgccgtccggcccttt

SEQ ID NO: 380619 - DNA, 120 bp, Artificial Sequence
  ENSG00000143514_17 (sequence is synthesized)
actccccagccttccaaagacaccttacttccacccttcagaaaaccccagaccgtggcagcaagttcaatatattccatgtatacgcaacagcaggcgccaggaaaaaacttccagcag

SEQ ID NO: 380620 - DNA, 120 bp, Artificial Sequence
  ENSG00000143514_18 (sequence is synthesized)
gctgtgcagagcgcgttgaccaagactcataccagagggccacacttttcaagtgtatatggtaagcctgtaattgctgctgcccagaatcaacagcagcacccagagaacatttattcc

SEQ ID NO: 380621 - DNA, 120 bp, Artificial Sequence
  ENSG00000143514_19 (sequence is synthesized)
aacgaaagaattcctcggccactcagcccaactaaattactgcctttcttatctaatccttaccgaaaccagagtgatgctgacctagaagccttacgaaagaaactgtctaacgcacca

SEQ ID NO: 380622 - DNA, 120 bp, Artificial Sequence
  ENSG00000143514_20 (sequence is synthesized)
aggcctctaaagaaacgtagttctattacagagccagagggtcctaatgggccaaatattcagaagcttttatatcagaggaccaccatagcggccatggagaccatctctgtcccatca

SEQ ID NO: 380623 - DNA, 120 bp, Artificial Sequence
  ENSG00000143514_21 (sequence is synthesized)
tacccatccaagtcagcttctgtgactgccagctcagaaagcccagtagaaatccagaatccatatttacatgtggagcccgaaaaggaggtggtctctctggttcctgaatcattgtcc

SEQ ID NO: 380624 - DNA, 120 bp, Artificial Sequence
  ENSG00000143514_22 (sequence is synthesized)
ccagaggatgtggggaatgccagtacagagaacagtgacatgccagctccttctccaggccttgattatgagcctgagggagtcccagacaacagcccaaatctccagaataacccagaa

SEQ ID NO: 380625 - DNA, 120 bp, Artificial Sequence
  ENSG00000143514_23 (sequence is synthesized)
gaaccaaatccagaggctccacatgtgcttgatgtgtacctggaggagtaccctccatacccacccccaccatacccatctggggagcctgaagggcccggagaagactcggtgagcatg

SEQ ID NO: 380626 - DNA, 120 bp, Artificial Sequence
  ENSG00000143514_24 (sequence is synthesized)
cgcccgcctgaaatcaccgggcaggtctctctgcctcctggtaaaaggacaaacttgcgtaaaactggctcagagcgtatcgctcatggaatgagggtgaaattcaacccccttgcttta

SEQ ID NO: 380627 - DNA, 120 bp, Artificial Sequence
  ENSG00000143514_25 (sequence is synthesized)
ctgctagattcgtctttggagggagaatttgaccttgtacagagaattatttatgaggttgatgacccaagcctccccaatgatgaaggcatcacggctcttcacaatgctgtgtgtgca

SEQ ID NO: 380628 - DNA, 120 bp, Artificial Sequence
  ENSG00000143514_26 (sequence is synthesized)
ggccacacagaaatcgttaagttcctggtacagtttggtgtaaatgtaaatgctgctgatagtgatggatggactccattacattgtgctgcctcatgtaacaacgtccaagtgtgtaag

SEQ ID NO: 380629 - DNA, 120 bp, Artificial Sequence
  ENSG00000143514_27 (sequence is synthesized)
tttttggtggagtcaggagccgctgtgtttgccatgacctacagtgacatgcagactgctgcagataagtgcgaggaaatggaggaaggctacactcagtgctcccaatttctttatgga

SEQ ID NO: 380630 - DNA, 120 bp, Artificial Sequence
  ENSG00000143514_28 (sequence is synthesized)
gttcaggagaagatgggcataatgaataaaggagtcatttatgcgctttgggattatgaacctcagaatgatgatgagctgcccatgaaagaaggagactgcatgacaatcatccacagg

SEQ ID NO: 380631 - DNA, 120 bp, Artificial Sequence
  ENSG00000143514_29 (sequence is synthesized)
gaagacgaagatgaaatcgaatggtggtgggcgcgccttaatgataaggagggatatgttccacgtaacttgctgggactgtacccaagaattaaaccaagacaaaggagcttggcctga

SEQ ID NO: 380632 - DNA, 120 bp, Artificial Sequence
  ENSG00000143514_30 (sequence is synthesized)
aacttccacacagaattttagtcaatgaagaattaatctctgttaagaagaagtaatacgattatttttggcaaaaatttcacaagacttattttaatgacaatgtagcttgaaagcgat

SEQ ID NO: 380633 - DNA, 120 bp, Artificial Sequence
  ENSG00000143514_31 (sequence is synthesized)
gaagaatgtctctagaagagaatgaaggattgaagaattcaccattagaggacatttagcgtgatgaaataaagcatctacgtcagcaggccatactgtgttggggcaaaggtgtcccgt

SEQ ID NO: 380634 - DNA, 120 bp, Artificial Sequence
  ENSG00000143514_32 (sequence is synthesized)
gtagcactcagataagtatacagcgacaatcctgttttctacaagaatcctgtctagtaaataggatcatttattgggcagttgggaaatcagctctctgtcctgttgagtgttttcagc

SEQ ID NO: 380635 - DNA, 120 bp, Artificial Sequence
  ENSG00000143514_33 (sequence is synthesized)
agctgctcctaaaccagtcctcctgccagaaaggaccagtgccgtcacatcgctgtctctgattgtccccggcaccagcaggcccttggggggctcacctgaaggctcgaaggcactgca

SEQ ID NO: 380636 - DNA, 120 bp, Artificial Sequence
  ENSG00000143514_34 (sequence is synthesized)
cacttgtatattgtcagtgaagaactgttagttggttgtcagtgaacaataactttattatatgagtttttgtagcatcttaagaattatacatatgtttgaaatattgaaactaagcta

SEQ ID NO: 380637 - DNA, 120 bp, Artificial Sequence
  ENSG00000143514_35 (sequence is synthesized)
cggtaccagtaattagatgtagaatcttgtttgtaggctgaattttaatctgtatttattgtcttttgtatctcagaaattagaaacttgctacagacttacccgtaatatttgtcaaga

SEQ ID NO: 380638 - DNA, 120 bp, Artificial Sequence
  ENSG00000143514_36 (sequence is synthesized)
tcatagctgactttaaaaacagttgtaataaactttttgatgctagctgtttactggtttttgtttttgatgtcataaatagaccttgtttaatagtcacaagccgttgggatatcatac

SEQ ID NO: 380639 - DNA, 120 bp, Artificial Sequence
  ENSG00000143514_37 (sequence is synthesized)
ccagctgaaaaagaacaaactgcttaacataagtatatgtatcgtaataagagttttttaccagctaagtgattcaatgtaagtggtttttaaaataaaatactgtagagatcatggtga

SEQ ID NO: 380640 - DNA, 120 bp, Artificial Sequence
  ENSG00000143514_38 (sequence is synthesized)
acttcctttagatggttgctcggttgctcaagagtcctctgactgcatagtacggagaggagggctcctgtgctgagtgtcttttttttgcctctctgcattcacttttcaccttcctcc

SEQ ID NO: 380641 - DNA, 120 bp, Artificial Sequence
  ENSG00000143514_39 (sequence is synthesized)
tgagtttaaaaaaaatctctctttgtattcattattcatgtttgaattctaaaaatccttttatattctttgctggtgtaatgagacgtttaaaaaattaaaattgataccctggttgta

SEQ ID NO: 380642 - DNA, 120 bp, Artificial Sequence
  ENSG00000143514_40 (sequence is synthesized)
acagagttgctcatataagtagcaagaggtgctagatttcagttgcctttccttaaagagaaggcaggttgtggggggaacccaaactccagagaatccagagtaaactttatagtaccc

SEQ ID NO: 380643 - DNA, 120 bp, Artificial Sequence
  ENSG00000143514_41 (sequence is synthesized)
tagacaggaaatttgagacattcctcataaccacagctggtggtcttgcacaggtgtcacttaattttaaaccatgagatgagaagtgtggaggggtggagggacctcatatttttagaa

SEQ ID NO: 380644 - DNA, 120 bp, Artificial Sequence
  ENSG00000143514_42 (sequence is synthesized)
ctaccagtaagtgggccgttttgtaatggttttggggaggagggaaaaagatgaccagcccagtgaggttactcataggcatcttcttcagaatcattactcagtgtgccctcagaaaac

SEQ ID NO: 380645 - DNA, 120 bp, Artificial Sequence
  ENSG00000143514_43 (sequence is synthesized)
agatgctgtttatggatccttaaaagacaatccgctgcttttttactttttaatgttattacctgtgtagctctgtttgtctctaatacttgtaataaagtgtgggtgagagttcattgg

SEQ ID NO: 380646 - DNA, 120 bp, Artificial Sequence
  ENSG00000143514_44 (sequence is synthesized)
ggagtgtttattttggaatgttttttgtagactctatggctagattctgaaactgctcattttaaaaagtttcatctgatggaaatcttccccagcaagccgcgtcagccccaagccgtg

SEQ ID NO: 380647 - DNA, 120 bp, Artificial Sequence
  ENSG00000143515_0 (sequence is synthesized)
acaagcactactcattgccgccagaacacatgagagcctccattgtccctgggatggataccttgagagctgttccccttttttcaatatctggcctcttctcctttccctacagggtct

SEQ ID NO: 380648 - DNA, 120 bp, Artificial Sequence
  ENSG00000143515_1 (sequence is synthesized)
cccatgggattgctgggatcttgctgggtgagatggcagtgtgtgcaaaaaagcgccccccagaagaagaaaggagggcgcgggctaatgaccgagaatacaatgagaaattccagtatg

SEQ ID NO: 380649 - DNA, 120 bp, Artificial Sequence
  ENSG00000143515_2 (sequence is synthesized)
cgagtaactgcatcaagacctccaagtacaatattctcaccttcctgcctgtcaacctctttgagcagttccaggaagttgccaacacttacttcctgttcctcctcattctgcagttga

SEQ ID NO: 380650 - DNA, 120 bp, Artificial Sequence
  ENSG00000143515_3 (sequence is synthesized)
tcccccagatctcttccctgtcctggttcaccaccattgtgcctttggttcttgtcctcaccatcacagctgttaaagatgccactgatgactatttccgccacaagagcgataaccagg

SEQ ID NO: 380651 - DNA, 120 bp, Artificial Sequence
  ENSG00000143515_4 (sequence is synthesized)
tgaataaccgccagtctcaggtgctgatcaatggaatcctccagcaggagcagtggatgaatgtctgtgttggtgatattatcaagctagaaaataaccagtttgtggcggcggatctcc

SEQ ID NO: 380652 - DNA, 120 bp, Artificial Sequence
  ENSG00000143515_5 (sequence is synthesized)
tcctcctttccagcagtgagccccatgggctgtgttacatagagacagcagaacttgatggcgagaccaacatgaaagtacgtcaggcgattccagtcacctcagaattgggagacatca

SEQ ID NO: 380653 - DNA, 120 bp, Artificial Sequence
  ENSG00000143515_6 (sequence is synthesized)
gtaagcttgccaagtttgacggtgaagtgatctgtgaacctcccaacaacaaactggacaaattcagcggaaccctctactggaaggaaaataagttccctctgagcaaccagaacatgc

SEQ ID NO: 380654 - DNA, 120 bp, Artificial Sequence
  ENSG00000143515_7 (sequence is synthesized)
tgctgcggggctgtgtgctgcgaaacaccgagtggtgcttcgggctggtcatctttgcaggtcccgacactaagctgatgcaaaacagcggcagaacaaagttcaaaagaacgagtatcg

SEQ ID NO: 380655 - DNA, 120 bp, Artificial Sequence
  ENSG00000143515_8 (sequence is synthesized)
atcgcctaatgaataccctggtgctctggatttttggattcctggtttgcatgggggtgatcctggccattggcaatgccatctgggagcacgaggtggggatgcgtttccaggtctacc

SEQ ID NO: 380656 - DNA, 120 bp, Artificial Sequence
  ENSG00000143515_9 (sequence is synthesized)
tgccgtgggatgaggcagtggacagtgccttcttctctggcttcctctccttctggtcctacatcatcatcctcaacaccgttgtgcccatttcactctatgtcagtgtggaggtcatcc

SEQ ID NO: 380657 - DNA, 120 bp, Artificial Sequence
  ENSG00000143515_10 (sequence is synthesized)
gtctgggccacagctacttcatcaactgggataagaagatgttctgcatgaagaagcggacgcctgcagaagcccgcaccaccaccctaaacgaggagctgggccaggtggagtacatct

SEQ ID NO: 380658 - DNA, 120 bp, Artificial Sequence
  ENSG00000143515_11 (sequence is synthesized)
tctccgacaagacgggcaccctcacccagaacatcatggttttcaacaagtgctccatcaatggccacagctatggtgatgtgtttgacgtcctgggacacaaagctgaattgggagaga

SEQ ID NO: 380659 - DNA, 120 bp, Artificial Sequence
  ENSG00000143515_12 (sequence is synthesized)
ggcctgaacctgttgacttctccttcaatcctctggctgacaagaagttcttattttgggaccccagcctgctggaggctgtcaagatcggggacccccacacgcatgagttcttccgcc

SEQ ID NO: 380660 - DNA, 120 bp, Artificial Sequence
  ENSG00000143515_13 (sequence is synthesized)
tcctttccctgtgtcatactgtcatgtcagaagaaaagaacgaaggagagctgtactacaaagctcagtccccagatgagggggccctggtcaccgcagccaggaactttggttttgttt

SEQ ID NO: 380661 - DNA, 120 bp, Artificial Sequence
  ENSG00000143515_14 (sequence is synthesized)
tccgctctcgcacccccaaaacaatcaccgtccatgagatgggcacagccatcacctaccagctgctggccatcctggacttcaacaacatccgcaagcggatgtcggtcatagtgcgga

SEQ ID NO: 380662 - DNA, 120 bp, Artificial Sequence
  ENSG00000143515_15 (sequence is synthesized)
atccagaggggaagatccgactctactgcaaaggggctgacactatcctactggacagactgcaccactccactcaagagctgctcaacaccaccatggaccaccttaatgagtacgcag

SEQ ID NO: 380663 - DNA, 120 bp, Artificial Sequence
  ENSG00000143515_16 (sequence is synthesized)
gggaagggctgaggaccctggtgctggcctacaaggatctggatgaagagtactacgaggagtgggctgagcgacgcctccaggccagcctggcccaggacagccgggaggacaggctgg

SEQ ID NO: 380664 - DNA, 120 bp, Artificial Sequence
  ENSG00000143515_17 (sequence is synthesized)
ctagcatctatgaggaggttgagaacaacatgatgctgctgggtgcaacggccattgaggacaaacttcagcaaggggttccagagaccattgccctcctgacactggccaacatcaaga

SEQ ID NO: 380665 - DNA, 120 bp, Artificial Sequence
  ENSG00000143515_18 (sequence is synthesized)
tttgggtgctaaccggagacaagcaagagacggctgtgaacatcggctattcctgcaagatgctgacggatgacatgactgaggttttcatagtcactggccatactgtcctggaggtgc

SEQ ID NO: 380666 - DNA, 120 bp, Artificial Sequence
  ENSG00000143515_19 (sequence is synthesized)
gggaggagctcaggaaagcccgggagaagatgatggactcatcccgctccgtaggcaacggcttcacctatcaggacaagctttcttcttccaagctaacttctgtcctggaggccgttg

SEQ ID NO: 380667 - DNA, 120 bp, Artificial Sequence
  ENSG00000143515_20 (sequence is synthesized)
ctggggagtacgccctggtcataaatggtcacagcctggcccacgcactggaggcagacatggagctggagtttctggagacagcgtgtgcctgcaaagctgtcatctgctgccgggtga

SEQ ID NO: 380668 - DNA, 120 bp, Artificial Sequence
  ENSG00000143515_21 (sequence is synthesized)
cccccttgcagaaggcacaggtggtagaactggtcaagaagtacaagaaggctgtgacgcttgccattggagacggagccaatgatgtcagcatgatcaaaacggctcacattggtgtgg

SEQ ID NO: 380669 - DNA, 120 bp, Artificial Sequence
  ENSG00000143515_22 (sequence is synthesized)
ggatcagtgggcaggaagggatccaggctgtcttggcctccgattactccttctcccagttcaagttcctgcagcgcctcctgctggtgcatgggcgctggtcctacctgcgaatgtgca

SEQ ID NO: 380670 - DNA, 120 bp, Artificial Sequence
  ENSG00000143515_23 (sequence is synthesized)
agtttctttgctatttcttctacaaaaactttgctttcaccatggtccacttctggtttggcttcttctgtggcttctcagcccagaccgtctatgaccagtatttcatcaccctgtata

SEQ ID NO: 380671 - DNA, 120 bp, Artificial Sequence
  ENSG00000143515_24 (sequence is synthesized)
tatgggggtctttgatcaggatgtccccgagcagcggagcatggagtaccctaagctgtatgagccgggccagctgaaccttctcttcaacaagcgggagttcttcatctgcatcgccca

SEQ ID NO: 380672 - DNA, 120 bp, Artificial Sequence
  ENSG00000143515_25 (sequence is synthesized)
gggcatctacacctccgtgctcatgttcttcattccctatggggtgtttgctgatgccacccgggatgatggcactcagctggctgactaccagtcctttgcagtcactgtggccacatc

SEQ ID NO: 380673 - DNA, 120 bp, Artificial Sequence
  ENSG00000143515_26 (sequence is synthesized)
cttggtcattgtggttagcgtgcagattgggctcgacacaggctactggacggccatcaaccacttcttcatctggggaagccttgctgtttactttgccatcctctttgccatgcacag

SEQ ID NO: 380674 - DNA, 120 bp, Artificial Sequence
  ENSG00000143515_27 (sequence is synthesized)
caatgggctcttcgacatgtttcccaaccagttccggtttgtggggaatgcccagaacaccttggcccagcccacggtgtggctgaccattgtgctcaccacagtcgtctgcatcatgcc

SEQ ID NO: 380675 - DNA, 120 bp, Artificial Sequence
  ENSG00000143515_28 (sequence is synthesized)
cgtggttgccttccgattcctcaggctcaacctgaagccggatctctccgacacggtccgctacacacagctcgtgaggaagaagcagaaggcccagcaccgctgcatgcggcgggttgg

SEQ ID NO: 380676 - DNA, 120 bp, Artificial Sequence
  ENSG00000143515_29 (sequence is synthesized)
ccgcactggctcccggcgctccggctatgccttctcccatcaggagggcttcggggagctcatcatgtctggcaagaacatgcggctgagctctctcgcgctctccagcttcaccacccg

SEQ ID NO: 380677 - DNA, 120 bp, Artificial Sequence
  ENSG00000143515_30 (sequence is synthesized)
ctccagctccagctggattgagagcctgcgcaggaagaagagtgacagtgccagtagccccagtggcggtgccgacaagcccctcaagggctgaaggccgaggatggatgccctgtgcca

SEQ ID NO: 380678 - DNA, 120 bp, Artificial Sequence
  ENSG00000143515_31 (sequence is synthesized)
gtgaccagagcacccagggctggccagtcactgagggaacagcgtctcggaactgctggtcctcattccttgcttcccgtccccccggtagactctgtcctgctggtcccaccacacatg

SEQ ID NO: 380679 - DNA, 120 bp, Artificial Sequence
  ENSG00000143515_32 (sequence is synthesized)
gctgggacatctgttcccagctgtaggcccttccaccagctggggagctagagggagcaggcccaagggcagagcagaggctgaggcacggggagccagccccactcggggaccagaagt

SEQ ID NO: 380680 - DNA, 120 bp, Artificial Sequence
  ENSG00000143515_33 (sequence is synthesized)
ggaaccaaaaacaagaaaaaactgtgagagattgtgtctgcccctgccctgcctgggacccacagggagactataatctccttatttttttactcctactccccagaggggccctagtgc

SEQ ID NO: 380681 - DNA, 120 bp, Artificial Sequence
  ENSG00000143515_34 (sequence is synthesized)
ctctgttcctgaattacataagaatgtaccatgccgggaagccagagacctgcaggggcctcggcccctcacatcgtgtatgtctctccttgatttgtgttgtgtccagtttggttttgt

SEQ ID NO: 380682 - DNA, 120 bp, Artificial Sequence
  ENSG00000143515_35 (sequence is synthesized)
ctttttttatttggcaagtggaggaggcttttatgtgacttttatgttgtggttggtgtcttaactctcctgggaaaaggaggctggcacacactgggatgccgcagcctggccggctgt

SEQ ID NO: 380683 - DNA, 120 bp, Artificial Sequence
  ENSG00000143515_36 (sequence is synthesized)
ggggtggtttgggaggatccatgtcggctctgcctgcagtgaccagtgctctgtggggcagaggagctgaccagggagggaggtacccatgagcagagggtagtgggagagtgtaaagga

SEQ ID NO: 380684 - DNA, 120 bp, Artificial Sequence
  ENSG00000143515_37 (sequence is synthesized)
gggtttggtcctgtctgcttcctcaccttgagagtaaagtgctgccctctgcccccaacacacacacatatcaattcctggattccttagtcctgctggccttgggctggagcctaggaa

SEQ ID NO: 380685 - DNA, 120 bp, Artificial Sequence
  ENSG00000143515_38 (sequence is synthesized)
ctgctggccttgggctggagcctaggaaagtggcccccaaatccttagtgagctaaagctgggtctgaaatttggtcagtggggaggggtagttttcttttcttttttctttttcttttt

SEQ ID NO: 380686 - DNA, 120 bp, Artificial Sequence
  ENSG00000143515_39 (sequence is synthesized)
aggcgtgagccaccacacccagctcagggaggcgtagttttctttaattttaaatttaaacccaagtttattggcagactcccttttgacctccctttgcctccccatctggtgctttct

SEQ ID NO: 380687 - DNA, 120 bp, Artificial Sequence
  ENSG00000143515_40 (sequence is synthesized)
tgcatctacaccccagggccctgtggtggggctgcagggggaagctgtgcacctgagatgaggctggaacgggaattggcctctctgctcccttcttcagtaagcaaggagccccgcccc

SEQ ID NO: 380688 - DNA, 120 bp, Artificial Sequence
  ENSG00000143515_41 (sequence is synthesized)
tcaggcccagcctctggcaagaggtggtggaatccttgtgccgggtagtagaggaggataagggcaaaaccaggcccaggccagtgcctggcttggtctggatgggacactgtcagagtt

SEQ ID NO: 380689 - DNA, 120 bp, Artificial Sequence
  ENSG00000143515_42 (sequence is synthesized)
tggccacagcctgtcctttacttcatccacacctatgaagctattccctaaataaggcatttcccaagttagtcgctacctaatcagccttgagaagaatcctttcctcttctttgatag

SEQ ID NO: 380690 - DNA, 120 bp, Artificial Sequence
  ENSG00000143515_43 (sequence is synthesized)
tgggtcgggggattcttcaggaatggtttggagctgggagtgggtagggggattttaaatgttccatatgggagccccaaaggaactggatgggctgcagtgaggtgggggcgggtgggc

SEQ ID NO: 380691 - DNA, 120 bp, Artificial Sequence
  ENSG00000143515_44 (sequence is synthesized)
agggaatgggagaggggaagtcttggcagggaaatcccttttggccacacagtttacaaacccagtatcatgtctgtctgtgtgtctctcaaggtgagagtctgatttttataccaaaga

SEQ ID NO: 380692 - DNA, 120 bp, Artificial Sequence
  ENSG00000143515_45 (sequence is synthesized)
ttttcatattttgtttgtctatattatataaatatatatatacagttatatatatatatattattttttggttctctctcgttttttagggagggaagaaagtaccaagttgcattgagc

SEQ ID NO: 380693 - DNA, 120 bp, Artificial Sequence
  ENSG00000143515_46 (sequence is synthesized)
gttgcattgagctgtaattaaggaacattataatttatgacacatttctatacttgcaaaaattatatcattttatggatataagagaaaaatgcctttttataaaatttcaatttctga

SEQ ID NO: 380694 - DNA, 120 bp, Artificial Sequence
  ENSG00000143515_47 (sequence is synthesized)
ccgggaggatggcctgggctgcgggtggggcgcgcgcccgacggctggggctcccctctgagcggctgcggctcctgcacctccccggggagccgccccgtcgatgccactaaggccaag

SEQ ID NO: 380695 - DNA, 120 bp, Artificial Sequence
  ENSG00000143515_48 (sequence is synthesized)
ccgccccgtcgatgccactaaggccaaggacatatagacggtctgccctcccccactcaaaccgggatcatgacggtccccaaggagatgcccgagaagtgggcccgggcccaggcgcct

SEQ ID NO: 380696 - DNA, 86 bp, Artificial Sequence
  ENSG00000143515_49 (sequence is synthesized)
tcaatggccacagctatgttgggtctgaggggcctagaagaaagggtccatcctggccaggcacggtggctcatgcctatagtcac

SEQ ID NO: 380697 - DNA, 120 bp, Artificial Sequence
  ENSG00000143515_50 (sequence is synthesized)
agcctgggcaacatagtgagaccacatccctacaaaaaatttaaaaattagccaggtatggtggcatgcacctgtggtctcagctggccagtgactcaggaggctgagatgggaggatca

SEQ ID NO: 380698 - DNA, 120 bp, Artificial Sequence
  ENSG00000143515_51 (sequence is synthesized)
ctgcactccagcctgggcgacagaatgaggccctgtctctcgagaaaaatccacacacaaagaagaggtccattctgtgtcccatgtcaagaagcagatcctggctgggcgcagtggatc

SEQ ID NO: 380699 - DNA, 78 bp, Artificial Sequence
  ENSG00000143515_52 (sequence is synthesized)
acaaagaagaggtccattctgtgtcccatgtcaagaagcagatcctggctgggcgcagtggatcacctgaggtcaagt

SEQ ID NO: 380700 - DNA, 61 bp, Artificial Sequence
  ENSG00000143515_53 (sequence is synthesized)
tgttacagtgagccgagtttgcgccattgtactccagcctgggcgacaagagtgaaagtct

SEQ ID NO: 380701 - DNA, 120 bp, Artificial Sequence
  ENSG00000143515_54 (sequence is synthesized)
ctctagaccacctgttccctctctctgtttggagaggggaatggggcaaggacaacctaccgttgggactgagggctgcctgggaagagtgcttgggggaggggaagcaacctcctcagc

SEQ ID NO: 380702 - DNA, 120 bp, Artificial Sequence
  ENSG00000143515_55 (sequence is synthesized)
cactctccatctgctatcgtgctgaatttttcatgccttcacctgtcagtgaagcagaatacattgacccccttgagactcccttctctcctcctctttccccctcccacacctgtgttt

SEQ ID NO: 380703 - DNA, 120 bp, Artificial Sequence
  ENSG00000143515_56 (sequence is synthesized)
actgtcttctcgttgcctcagcctccagcaggagcagtggatgaatgtctgtgttggtgatattatcaagctagaaaataaccagtttgtggcggcggatctcctcctcctttccagcag

SEQ ID NO: 380704 - DNA, 80 bp, Artificial Sequence
  ENSG00000143515_57 (sequence is synthesized)
cacaaagtagcgggccgaggccccgggggagcggggccgcagctgggggggcgggagcccgtggggagccgagccgagcg

SEQ ID NO: 380705 - DNA, 120 bp, Artificial Sequence
  ENSG00000143515_58 (sequence is synthesized)
tttctatgaagatgaagtccttgagaagtaacgagaagtcctcttcttcctgtactgtaaacatttgatgttatctgtttatctttgtgggcagagcaaactttttaccacagtttcctg

SEQ ID NO: 380706 - DNA, 120 bp, Artificial Sequence
  ENSG00000143515_59 (sequence is synthesized)
gtacttgggactgtattagagaaaaaaaaatattgatttattcagcacctatttattacatgcctactgtgtacaaagaagtgtgctaggtgccatcacaaataaaagatgaattaggaa

SEQ ID NO: 380707 - DNA, 120 bp, Artificial Sequence
  ENSG00000143520_0 (sequence is synthesized)
accctgcaagctgcatcaggctttatcctacttgttcctttggtgaaccaggttcacttaaacttgcaaaaagatgaccgacctcttgagaagtgttgtcaccgtaattgatgttttcta

SEQ ID NO: 380708 - DNA, 120 bp, Artificial Sequence
  ENSG00000143520_1 (sequence is synthesized)
caaatacaccaagcaagatggggagtgtggcacactgagcaagggtgaactaaaggaacttctggagaaagagcttcatccagttctgaagaacccagatgatccagacacagtggatgt

SEQ ID NO: 380709 - DNA, 120 bp, Artificial Sequence
  ENSG00000143520_2 (sequence is synthesized)
catcatgcatatgctggatcgagatcatgacagaagattggactttactgagtttcttttgatgatattcaagctgactatggcctgcaacaaggtcctcagcaaagaatactgcaaagc

SEQ ID NO: 380710 - DNA, 120 bp, Artificial Sequence
  ENSG00000143520_3 (sequence is synthesized)
ttcagggtcaaagaagcataggcgtggtcaccgacaccaagaagaagaaagtgaaacagaagaggatgaagaggatacaccaggacataaatcaggttacagacattcaagttggagtga

SEQ ID NO: 380711 - DNA, 120 bp, Artificial Sequence
  ENSG00000143520_4 (sequence is synthesized)
gggagaggagcatggatatagttctgggcactcaaggggaactgtgaaatgtagacatgggtccaactccaggaggctaggaagacaaggtaatttatccagctctgggaaccaagaggg

SEQ ID NO: 380712 - DNA, 120 bp, Artificial Sequence
  ENSG00000143520_5 (sequence is synthesized)
atctcagaaaagataccacaggtccagctgtggtcattcatggagtggtggcaaagacagacatggttccagctctgtagaactgagagaaagaataaacaagtcacacattagcccttc

SEQ ID NO: 380713 - DNA, 120 bp, Artificial Sequence
  ENSG00000143520_6 (sequence is synthesized)
tagggaatctggggaggagtatgaatctggatctggatcaaacagttgggaaaggaaaggtcatggtggtctgtcatgtggattggagactagtgggcatgaatcaaactctactcagtc

SEQ ID NO: 380714 - DNA, 120 bp, Artificial Sequence
  ENSG00000143520_7 (sequence is synthesized)
aagaattagagaacaaaagcttgggtctagctgttcaggttcaggagacagtgggaggcgaagtcatgcatgtggttatagcaattcaagtgggtgtggaaggccacaaaatgcttcaag

SEQ ID NO: 380715 - DNA, 120 bp, Artificial Sequence
  ENSG00000143520_8 (sequence is synthesized)
ttcttgtcagtcacatagatttggagggcaaggaaatcaatttagctatattcagtcaggctgtcagtcaggaattaagggaggacaaggccatggctgtgtctcaggaggtcagccctc

SEQ ID NO: 380716 - DNA, 120 bp, Artificial Sequence
  ENSG00000143520_9 (sequence is synthesized)
tggatgtggtcaacctgagtctaacccctgtagtcagtcctatagtcagagaggatatggagctagagaaaatggtcaaccacagaactgtggaggacaatggagaacaggctcaagtca

SEQ ID NO: 380717 - DNA, 120 bp, Artificial Sequence
  ENSG00000143520_10 (sequence is synthesized)
gtcctcttgctgtggacaatatgggtctggaggtagccagtcttgtagtaatggtcaacatgaatatggttcctgtggccgcttttcaaactcttctagttcaaatgaattttccaaatg

SEQ ID NO: 380718 - DNA, 120 bp, Artificial Sequence
  ENSG00000143520_11 (sequence is synthesized)
tgatcaatatgggtctggttcaagtcagtctactagctttgaacaacatggaacaggcttgagtcagtcctctgggttcgaacaacatgtatgtggctcaggtcaaacttgtggccagca

SEQ ID NO: 380719 - DNA, 120 bp, Artificial Sequence
  ENSG00000143520_12 (sequence is synthesized)
tgagtctacatcaagtcaatccttgggctatgaccagcatgggtctagctcaggtaagacatctggctttggacaacatgggtctggctcaggtcagtcctctggctttggacaatgtgg

SEQ ID NO: 380720 - DNA, 120 bp, Artificial Sequence
  ENSG00000143520_13 (sequence is synthesized)
gtcaggctcaggtcagtcctctggctttggacagcatgggtctgtctcaggacaatcctctggttttggacagcatgggtctgtctcaggacaatcctctggttttggacaacatgagtc

SEQ ID NO: 380721 - DNA, 120 bp, Artificial Sequence
  ENSG00000143520_14 (sequence is synthesized)
tagatcacgtcagtctagctatggccaacatggttctggctcaagtcaatcatctggctatggccaatatgggtctagagagacatctggctttggacaacatgggttgggctcaggtca

SEQ ID NO: 380722 - DNA, 120 bp, Artificial Sequence
  ENSG00000143520_15 (sequence is synthesized)
atccactggctttggccaatatggatcgggctcaggtcagtcctctggctttggacaacatgggtctggctcaggacaatcctctggctttggacaacatgagtctagatcaggtcagtc

SEQ ID NO: 380723 - DNA, 120 bp, Artificial Sequence
  ENSG00000143520_16 (sequence is synthesized)
tagttatggccaacacagttctggctcaagtcagtcatctggctatggccaacatgggtctagacagacatctggctttggacaacatgggtcaggctcaagtcaatccactggctttgg

SEQ ID NO: 380724 - DNA, 120 bp, Artificial Sequence
  ENSG00000143520_17 (sequence is synthesized)
ccaatatggatcaggctcaggtcagtcctctggctttggacaacatgtttctggctcaggacaatcctctggttttggacaacatgagtctagatcaggtcattctagctatggccaaca

SEQ ID NO: 380725 - DNA, 120 bp, Artificial Sequence
  ENSG00000143520_18 (sequence is synthesized)
tggttttggctcaagtcaatcatctggctatggtcaacatgggtcaagttcaggacagacatctggatttggacaacacgagttaagctcaggtcagtcttccagctttggccaacatgg

SEQ ID NO: 380726 - DNA, 120 bp, Artificial Sequence
  ENSG00000143520_19 (sequence is synthesized)
atcaggctcaggtcagtcctctggctttggacaacatgggtctggctcaggacaatcctctggctttggacaacatgagtctagatcaggtcagtctagctatggccaacacagttctgg

SEQ ID NO: 380727 - DNA, 120 bp, Artificial Sequence
  ENSG00000143520_20 (sequence is synthesized)
ctcaagtcagtcatctggctatggccaacatgggtctagacagacatctggctttggacaacatgggtcaggctcaagtcaatccactggctttggccaatatggatcaggctcaggtca

SEQ ID NO: 380728 - DNA, 120 bp, Artificial Sequence
  ENSG00000143520_21 (sequence is synthesized)
gtccgctggctttggacaacatgggtctggctcaggacaatcctctggctttggacagcatgagtctagatcacatcagtccagctatggccaacatggttctggctcaagtcaatcatc

SEQ ID NO: 380729 - DNA, 120 bp, Artificial Sequence
  ENSG00000143520_22 (sequence is synthesized)
tggctatggtcaacatgggtcaagttcgggacagacatctggctttggacaacacaggtcaagctcaggtcaatactctggctttggacaacatggatcaggctcaggtcagtccagtgg

SEQ ID NO: 380730 - DNA, 120 bp, Artificial Sequence
  ENSG00000143520_23 (sequence is synthesized)
ctttggacaacatgggactggctcaggacaatactctggttttggacaacatgagtctagatcacatcagtctagctatggccaacatggttctggctcaagtcagtcatctggctatgg

SEQ ID NO: 380731 - DNA, 120 bp, Artificial Sequence
  ENSG00000143520_24 (sequence is synthesized)
tcaacatgggtcaagttcaggacagacttttggatttggacaacacaggtcaggctcaggtcaatcctctggctttggccaacatggatcaggctcaggtcagtcctctggctttggaca

SEQ ID NO: 380732 - DNA, 120 bp, Artificial Sequence
  ENSG00000143520_25 (sequence is synthesized)
acatgagtcaggctcaggaaaatcctctggctttggacagcatgagtctagatcaagtcagtctaattatggccaacatggttctggctcaagtcagtcatctggctatggtcaacatgg

SEQ ID NO: 380733 - DNA, 120 bp, Artificial Sequence
  ENSG00000143520_26 (sequence is synthesized)
gtctagttcaggacagacaactggctttggacaacacaggtcaagctcaggccaatactcaggctttggacaacatggatcaggctcagatcagtcctctggctttggacaacatgggac

SEQ ID NO: 380734 - DNA, 120 bp, Artificial Sequence
  ENSG00000143520_27 (sequence is synthesized)
tggttcaggacaatcctctggttttggacaatatgagtctagatcacgtcagtctagctatggccaacatggttctggctcaagtcaatcatctggctatggtcaacatgggtcaaattc

SEQ ID NO: 380735 - DNA, 120 bp, Artificial Sequence
  ENSG00000143520_28 (sequence is synthesized)
aggacagacatctggatttggacaacacaggccaggctcaggtcagtcctctggctttggccaatatggatcgggctcaggtcagtcttctggctttggacaacatgggtcaggcacagg

SEQ ID NO: 380736 - DNA, 120 bp, Artificial Sequence
  ENSG00000143520_29 (sequence is synthesized)
taaatcctctggctttgcacagcatgagtacagatcaggtcagtctagctatggccaacatggtactggctccagtcaatcatctggctgtggccaacatgagtctggctcaggtccaac

SEQ ID NO: 380737 - DNA, 120 bp, Artificial Sequence
  ENSG00000143520_30 (sequence is synthesized)
cacaagttttggacagcatgtgtctggctcagacaatttctctagttctggacaacatatatctgactcaggtcagtccactggatttggccaatatggttcaggctcaggtcaatcaac

SEQ ID NO: 380738 - DNA, 120 bp, Artificial Sequence
  ENSG00000143520_31 (sequence is synthesized)
tggcttgggccagggtgaatctcaacaagtagagtcaggatccacagttcatgggagacaggaaactactcatggtcagacaataaataccactagacatagccagtctggtcaaggaca

SEQ ID NO: 380739 - DNA, 120 bp, Artificial Sequence
  ENSG00000143520_32 (sequence is synthesized)
atccacacagacagggtccagggtaactagaagacgaagatctagccaaagtgagaacagtgacagtgaagtgcactcaaaggtctcacacagacattcagaacacattcacacacaagc

SEQ ID NO: 380740 - DNA, 120 bp, Artificial Sequence
  ENSG00000143520_33 (sequence is synthesized)
tggatctcactacccaaagtcaggatccacagttcgcagaagacaaggaactactcatggacagagaggagataccactagacatggccattctggtcatggacagtctacacagacagg

SEQ ID NO: 380741 - DNA, 120 bp, Artificial Sequence
  ENSG00000143520_34 (sequence is synthesized)
ttccagaacatctggaagacagagatttagccacagtgatgccactgacagtgaagtgcactcaggggtctcacatagaccacactcacaagaacaaactcacagccaagctggatctca

SEQ ID NO: 380742 - DNA, 120 bp, Artificial Sequence
  ENSG00000143520_35 (sequence is synthesized)
acatggagagtcagaatccacagttcatgagagacatgaaactacttatggacagacaggagaggccactggacatggccactctggtcatggacagtccacacagagagggtccaggac

SEQ ID NO: 380743 - DNA, 120 bp, Artificial Sequence
  ENSG00000143520_36 (sequence is synthesized)
aactggaagaaggggatctggccatagtgagtccagtgacagtgaagtgcactcagggggctcacacagaccacaatcacaagaacaaactcatggccaagccggatctcaacatggaga

SEQ ID NO: 380744 - DNA, 120 bp, Artificial Sequence
  ENSG00000143520_37 (sequence is synthesized)
gtcaggatccacagttcatgggagacacggaactactcatggacagacaggagataccactagacatgcccactatcatcatggaaaatccacacagagagggtccagtacaactggaag

SEQ ID NO: 380745 - DNA, 120 bp, Artificial Sequence
  ENSG00000143520_38 (sequence is synthesized)
ggatctggccacagtgagtccagtgacagtgaagtgcactcagggggctcgcacacacattcaggacacactcacggccaaagtggatctcaacatggagagtcagaatccataattcat

SEQ ID NO: 380746 - DNA, 120 bp, Artificial Sequence
  ENSG00000143520_39 (sequence is synthesized)
gacagacacagaattactcatggacagacaggagataccactagacattcctactctggtcatgaacaaaccacacagacagggtccaggacaactggaagacagagaactagccacagt

SEQ ID NO: 380747 - DNA, 120 bp, Artificial Sequence
  ENSG00000143520_40 (sequence is synthesized)
gagtccactgacagtgaagtgcactcagggggctcacacagaccacactcacgagaacacacttacggccaagccggatctcaacatgaagagccagaattcacagttcatgagagacac

SEQ ID NO: 380748 - DNA, 120 bp, Artificial Sequence
  ENSG00000143520_41 (sequence is synthesized)
ggaactactcatggacagataggagataccactggacattcccactctggtcatggacagtccacacagagagggtccaggacaactggaagacagagatctagccacagtgagtccagt

SEQ ID NO: 380749 - DNA, 120 bp, Artificial Sequence
  ENSG00000143520_42 (sequence is synthesized)
gacagtgaagtgcactcaggggtctcacacacacatacaggacacactcatggtcaagctggatctcaacatggacagtcagaatccatagttcctgagagacatggaactactcatgga

SEQ ID NO: 380750 - DNA, 120 bp, Artificial Sequence
  ENSG00000143520_43 (sequence is synthesized)
cagacaggagataccactagacatgcccactatcatcatggattaaccacacagacagggtccaggactactggaagaaggggatctggccacagtgagtacagtgacagtgaagggtac

SEQ ID NO: 380751 - DNA, 120 bp, Artificial Sequence
  ENSG00000143520_44 (sequence is synthesized)
tcaggagtctcacatacacattcaggacacactcatggccaagccagatctcaacatggagagtcagaatccatagttcatgagagacatggaactatacatggacagacaggcgatacc

SEQ ID NO: 380752 - DNA, 120 bp, Artificial Sequence
  ENSG00000143520_45 (sequence is synthesized)
accagacatgcccactctggtcatggacagtccacacagacagggtccaggaccactggaagaaggtcatctggccacagtgagtacagtgacagtgaagggcactcagggttctcacaa

SEQ ID NO: 380753 - DNA, 120 bp, Artificial Sequence
  ENSG00000143520_46 (sequence is synthesized)
agaccacactcacgaggacacactcacggccaggctggatctcaacatggagagtcagaatccatagttgacgagagacatggaactactcatggacagacaggagataccagtggacat

SEQ ID NO: 380754 - DNA, 120 bp, Artificial Sequence
  ENSG00000143520_47 (sequence is synthesized)
tctcaatctggtcatggacagtccacacagtcaggatccagtacaactggaagaaggagatctggccacagtgagtccagtgacagtgaagtgcactcagggggctcacatacacattca

SEQ ID NO: 380755 - DNA, 120 bp, Artificial Sequence
  ENSG00000143520_48 (sequence is synthesized)
ggacacacacacagccaagccaggtctcaacatggagagtcagaatccacagttcacaagagacaccaaactactcatggacagacaggagataccactgaacatggccaccctagtcat

SEQ ID NO: 380756 - DNA, 120 bp, Artificial Sequence
  ENSG00000143520_49 (sequence is synthesized)
ggacaaaccatacagacagggtccaggacaactggaagaaggggatctggccacagtgagtacagtgacagtgaagggccctcaggggtctcacacacacattcaggacacactcacggt

SEQ ID NO: 380757 - DNA, 120 bp, Artificial Sequence
  ENSG00000143520_50 (sequence is synthesized)
caagctggatctcactatccagagtcaggatcctcagttcatgagagacacggaactactcatggacaaacagcagataccactagacatggccactctggtcatggacagtccacacag

SEQ ID NO: 380758 - DNA, 120 bp, Artificial Sequence
  ENSG00000143520_51 (sequence is synthesized)
agagggtccaggacaactggaagaagggcatctggccacagtgagtacagtgacagtgaagggcactcaggggtctcacacacacattcaggacacgctcatggccaagccggatctcaa

SEQ ID NO: 380759 - DNA, 120 bp, Artificial Sequence
  ENSG00000143520_52 (sequence is synthesized)
catggagagtcaggatcctcagttcatgagagacacggaactactcatggacagacaggagataccactagacatgctcactctggtcatggacagtccacacagagagggtcaaggaca

SEQ ID NO: 380760 - DNA, 120 bp, Artificial Sequence
  ENSG00000143520_53 (sequence is synthesized)
gctggaagaaggggatctggccacagtgagtccagtgacagtgaagtgcactcaggggtctcacacacacattcaggacacacttatggccaagccagatctcaacatggagagtcagga

SEQ ID NO: 380761 - DNA, 120 bp, Artificial Sequence
  ENSG00000143520_54 (sequence is synthesized)
tctgccattcacgggagacagggaactatacatggacagacaggagataccactagacatggccagtctggtcatggacagtccacacagacaggttccaggacaactggaagacaaaga

SEQ ID NO: 380762 - DNA, 120 bp, Artificial Sequence
  ENSG00000143520_55 (sequence is synthesized)
tctagtcacagtgagtccagtgatagtgaagtgcactcagaggcctcacccacacattcaggacacactcacagccaagccggatctcgacatggacagtcaggatcctcaggtcatggg

SEQ ID NO: 380763 - DNA, 120 bp, Artificial Sequence
  ENSG00000143520_56 (sequence is synthesized)
agacagggaactactcatggacagacaggagataccactagacatgcccactatggttatggacaatccacacagagagggtccaggacaactggaagaaggggatctggccacagtgag

SEQ ID NO: 380764 - DNA, 120 bp, Artificial Sequence
  ENSG00000143520_57 (sequence is synthesized)
tccagtgacagtgaagtgcactcatggggctcacacacacattcaggacacattcagggccaagctggatctcaacaaagacagccaggatccacagttcatgggagactggaaactact

SEQ ID NO: 380765 - DNA, 120 bp, Artificial Sequence
  ENSG00000143520_58 (sequence is synthesized)
catggacagacaggagataccactagacatggccattctggttatggacaatccacacagacaggttccagatctagtagagcaagtcattttcagtcacatagtagtgaaaggcaaagg

SEQ ID NO: 380766 - DNA, 120 bp, Artificial Sequence
  ENSG00000143520_59 (sequence is synthesized)
catggatcaagtcaggtttggaaacatggcagctatggacctgcagaatatgactatgggcacactgggtatgggccttctggtggcagcagaaaaagcatcagtaattctcacctttca

SEQ ID NO: 380767 - DNA, 120 bp, Artificial Sequence
  ENSG00000143520_60 (sequence is synthesized)
tggtcaacagacagcactgcaaacaagcaactgtctagacattgacagttattttctagttctgaccttatagtatccaaagcaactaaaagaacaggaagacacagtttaaatcatgaa

SEQ ID NO: 380768 - DNA, 120 bp, Artificial Sequence
  ENSG00000143520_61 (sequence is synthesized)
cagtcaatggtaagttatgaacattcagttgattctcagtatcagtctcgacctattattataagaagtcaggaatctagtcatggacattctatagtaactcataaacagtcaaacaac

SEQ ID NO: 380769 - DNA, 120 bp, Artificial Sequence
  ENSG00000143520_62 (sequence is synthesized)
acctatgttcaacctggatataacacagccagaagggagggatgtacacatagccagtcaaatgaccaccttggatttggccatggacaatccatatcagttcatggccattcaaaatct

SEQ ID NO: 380770 - DNA, 120 bp, Artificial Sequence
  ENSG00000143520_63 (sequence is synthesized)
agttcaatcagaaaacaggaatcccatactgataacaaaaagcattcagaagattgggagaaagacactcatgagcaattaggatctaggcatgggaagttagagttcaatacaataggt

SEQ ID NO: 380771 - DNA, 120 bp, Artificial Sequence
  ENSG00000143520_64 (sequence is synthesized)
atacatggatctagccagcaacatttcggagatacaacttttcatgggcaggtaagatccagcacaggttttgccagataggtattaagtcatgggccatcaagagatgcctagggtcag

SEQ ID NO: 380772 - DNA, 120 bp, Artificial Sequence
  ENSG00000143520_65 (sequence is synthesized)
tctggattcagtaccaatgaaagacaagtatacagccatggccaatcaaatgatagttatgagtagtcaaatgacagcaaaagtcaaagatacattttcagtcactttcttgacagccaa

SEQ ID NO: 380773 - DNA, 120 bp, Artificial Sequence
  ENSG00000143520_66 (sequence is synthesized)
gaccctgcaggaattgaagagtataggtatagatattcatcaagcagtgcaaccatatgcagtgggggagacaaaggcaagagtcagagtcaagtctgtcaggaggtatcagaatatacg

SEQ ID NO: 380774 - DNA, 120 bp, Artificial Sequence
  ENSG00000143520_67 (sequence is synthesized)
gtgaggatgtgggcaaaaaacaaagaggctctgaggccagcggttaccatacaaaggaaagaacaggctctggttccttctgcttagatagcaacaccccactctatgaatatgtccaag

SEQ ID NO: 380775 - DNA, 120 bp, Artificial Sequence
  ENSG00000143520_68 (sequence is synthesized)
aacaaaggagttattactttgaataagaagccaacataaactagcccaagataagaactaacccagagaagaaatgagacacatacatgaaattaaggtatttaacatgatctcctcttt

SEQ ID NO: 380776 - DNA, 120 bp, Artificial Sequence
  ENSG00000143520_69 (sequence is synthesized)
tggtagtaagggtatatgtctgttctttcattttaactatagttctgtactatattacttttgtttggtgccaggtgtttttgtaaggctccacattcattgaactccttggttagaaaa

SEQ ID NO: 380777 - DNA, 120 bp, Artificial Sequence
  ENSG00000143520_70 (sequence is synthesized)
ctccagcctgggtgactgagcaagactccaccttgaaaaaaagaaagaaagaaaatagtgaatggaagaaaaagataaacaccatttggggctatattcagaactatataataaagagag

SEQ ID NO: 380778 - DNA, 120 bp, Artificial Sequence
  ENSG00000143520_71 (sequence is synthesized)
tatataataaagagagatttgtgtggttgggaataaaattaggttttaaaaaaatttccgaatttcaaaatttggattttccagattttgttttaattaattattgacaaacctatccaa

SEQ ID NO: 380779 - DNA, 120 bp, Artificial Sequence
  ENSG00000143520_72 (sequence is synthesized)
ggagctaaatgacgtggtttaggagccaaaacgtctctagaaacattataacacatcccatcctgaacaaagaatgttgtcatagtttcccacatgaatattcagaatatttgcatcttt

SEQ ID NO: 380780 - DNA, 120 bp, Artificial Sequence
  ENSG00000143520_73 (sequence is synthesized)
ttgtgtcactactggaattctgtacaattatatttaaatttattgtcatggccttctggatataggatccagaaaattgtacttcataaaaattggcaataaacatttcatcaagttata

SEQ ID NO: 380781 - DNA, 120 bp, Artificial Sequence
  ENSG00000143536_0 (sequence is synthesized)
actcctcacaccacttaacagccacttgtttcatcccacctgggcattaggttgacttcaaagatgcctcagttactgcaaaacattaatgggatcatcgaggccttcaggcgctatgca

SEQ ID NO: 380782 - DNA, 120 bp, Artificial Sequence
  ENSG00000143536_1 (sequence is synthesized)
aggacggagggcaactgcacagcgctcacccgaggggagctgaaaagactcttggagcaagagtttgccgatgtgattgtgaaaccccacgatccagcaactgtggatgaggtcctgcgt

SEQ ID NO: 380783 - DNA, 120 bp, Artificial Sequence
  ENSG00000143536_2 (sequence is synthesized)
ctgctggatgaagaccacacagggactgtggaattcaaggaattcctggtcttagtgtttaaagttgcccaggcctgtttcaagacactgagcgagagtgctgagggagcctgcggctct

SEQ ID NO: 380784 - DNA, 120 bp, Artificial Sequence
  ENSG00000143536_3 (sequence is synthesized)
caagagtctggaagcctccactctggggcctcgcaggagctgggcgaaggacagagaagtggcactgaagtgggaagggcggggaaagggcagcattatgaggggagcagccacagacag

SEQ ID NO: 380785 - DNA, 120 bp, Artificial Sequence
  ENSG00000143536_4 (sequence is synthesized)
agccagcagggttccagagggcagaacaggcctggggttcagacccagggtcaggccactggctctgcgtgggtcagcagctatgacaggcaagctgagtcccagagccaggaaagaata

SEQ ID NO: 380786 - DNA, 120 bp, Artificial Sequence
  ENSG00000143536_5 (sequence is synthesized)
agcccgcagatacaactctctgggcagacagagcagacccagaaagctggagaaggcaagaggaatcagacaacagagatgaggccagagagacagccacagaccagggaacaggacaga

SEQ ID NO: 380787 - DNA, 120 bp, Artificial Sequence
  ENSG00000143536_6 (sequence is synthesized)
gcccaccagacaggtgagactgtgactggatctggaactcagacccaggcaggtgccacccagactgtggagcaggacagcagccaccagacaggaagaaccagcaagcagacacaggag

SEQ ID NO: 380788 - DNA, 120 bp, Artificial Sequence
  ENSG00000143536_7 (sequence is synthesized)
cacacccagacacccacccagaccgtggagcaggacagcagccaccagacaggaagcaccagcacccagacacaggagtccaccaatggccagaacagagggactgagatccacggtcaa

SEQ ID NO: 380789 - DNA, 120 bp, Artificial Sequence
  ENSG00000143536_8 (sequence is synthesized)
ggcaggagccagaccagccaggctgtgacaggaggacacactcagatacaggcagggtcacacaccgagactgtggagcaggacagaagccaaactgtaagccacggaggggctagagaa

SEQ ID NO: 380790 - DNA, 120 bp, Artificial Sequence
  ENSG00000143536_9 (sequence is synthesized)
cagggacagacccagacgcagccaggcagtggtcaaagatggatgcaagtgagcaaccctgaggcaggagagacagtaccgggaggacaggcccagactggggcaagcactgagtcagga

SEQ ID NO: 380791 - DNA, 120 bp, Artificial Sequence
  ENSG00000143536_10 (sequence is synthesized)
aggcaggagtggagcagcactcacccaaggcgctgtgtgacagaagggcagggagacagacagcccacagtggttggtgaggaatgggttgatgaccactcaagggagacagtgatcctc

SEQ ID NO: 380792 - DNA, 120 bp, Artificial Sequence
  ENSG00000143536_11 (sequence is synthesized)
aggctggaccagggcaacttgcataccagtgtttcctcagcacagggccaggatgcagcccagtcagaagagaagcgaggcatcacagctagagagctgtattcctacttgagaagcacc

SEQ ID NO: 380793 - DNA, 120 bp, Artificial Sequence
  ENSG00000143536_12 (sequence is synthesized)
aagccatgacttccccgactccaatgtccagtactggaagaagacagctggagagagtttggcttgtcctgcatggccaatccagtgggtgcatccctggacatcagctcttcattatgc

SEQ ID NO: 380794 - DNA, 120 bp, Artificial Sequence
  ENSG00000143536_13 (sequence is synthesized)
agcttcccttttaggtctttctcaatgagataatttctgcaaggagctttctatcctgaactcttctttcttacctgctttgcggtgcagaccctctcaggagcaggaagactcagagca

SEQ ID NO: 380795 - DNA, 120 bp, Artificial Sequence
  ENSG00000143536_14 (sequence is synthesized)
agtcacccctttgtactgaattgtcctcatcttgtggggggtttcaggactatttttatctctgacatctctctattgccccatctaccctaatgcatcaataaaaccttaagccactgg

SEQ ID NO: 380796 - DNA, 120 bp, Artificial Sequence
  ENSG00000143537_0 (sequence is synthesized)
ctgctgggttctccgaggcgacctggccgccggccgctcctccgcgcgctgttccgcacttgctgccctcgcccggcccggagcgccgctgccatgcggctggcgctgctctgggccctg

SEQ ID NO: 380797 - DNA, 120 bp, Artificial Sequence
  ENSG00000143537_1 (sequence is synthesized)
gggccctggggctcctgggcgcgggcagccctctgccttcctggccgctcccaaatataggtggcactgaggagcagcaggcagagtcagagaaggccccgagggagcccttggagcccc

SEQ ID NO: 380798 - DNA, 120 bp, Artificial Sequence
  ENSG00000143537_2 (sequence is synthesized)
aggtccttcaggacgatctcccaattagcctcaaaaaggtgcttcagaccagtctgcctgagcccctgaggatcaagttggagctggacggtgacagtcatatcctggagctgctacaga

SEQ ID NO: 380799 - DNA, 120 bp, Artificial Sequence
  ENSG00000143537_3 (sequence is synthesized)
atagggagttggtcccaggccgcccaaccctggtgtggtaccagcccgatggcactcgggtggtcagtgagggacacactttggagaactgctgctaccagggaagagtgcggggatatg

SEQ ID NO: 380800 - DNA, 120 bp, Artificial Sequence
  ENSG00000143537_4 (sequence is synthesized)
caggctcctgggtgtccatctgcacctgctctgggctcagaggcttggtggtcctgaccccagagagaagctataccctggagcaggggcctggggaccttcagggtcctcccattattt

SEQ ID NO: 380801 - DNA, 120 bp, Artificial Sequence
  ENSG00000143537_5 (sequence is synthesized)
cgcgaatccaagatctccacctgccaggccacacctgtgccctgagctggcgggaatctgtacacactcagaagccaccagagcaccccctgggacagcgccacattcgccggaggcggg

SEQ ID NO: 380802 - DNA, 120 bp, Artificial Sequence
  ENSG00000143537_6 (sequence is synthesized)
atgtggtaacagagaccaagactgtggagttggtgattgtggctgatcactcggaggcccagaaataccgggacttccagcacctgctaaaccgcacactggaagtggccctcttgctgg

SEQ ID NO: 380803 - DNA, 120 bp, Artificial Sequence
  ENSG00000143537_7 (sequence is synthesized)
acacattcttccggcccctgaatgtacgagtggcactagtgggcctggaggcctggacccagcgtgacctggtggagatcagcccaaacccagctgtcaccctcgaaaacttcctccact

SEQ ID NO: 380804 - DNA, 120 bp, Artificial Sequence
  ENSG00000143537_8 (sequence is synthesized)
ggcgcagggcacatttgctgcctcgattgccccatgacagtgcccagctggtgactggtacttcattctctgggcctacggtgggcatggccattcagaactccatctgttctcctgact

SEQ ID NO: 380805 - DNA, 120 bp, Artificial Sequence
  ENSG00000143537_9 (sequence is synthesized)
tctcaggaggtgtgaacatggaccactccaccagcatcctgggagtcgcctcctccatagcccatgagttgggccacagcctgggcctggaccatgatttgcctgggaatagctgcccct

SEQ ID NO: 380806 - DNA, 120 bp, Artificial Sequence
  ENSG00000143537_10 (sequence is synthesized)
gtccaggtccagccccagccaagacctgcatcatggaggcctccacagacttcctaccaggcctgaacttcagcaactgcagccgacgggccctggagaaagccctcctggatggaatgg

SEQ ID NO: 380807 - DNA, 120 bp, Artificial Sequence
  ENSG00000143537_11 (sequence is synthesized)
gcagctgcctcttcgaacggctgcctagcctaccccctatggctgctttctgcggaaatatgtttgtggagccgggcgagcagtgtgactgtggcttcctggatgactgcgtcgatccct

SEQ ID NO: 380808 - DNA, 120 bp, Artificial Sequence
  ENSG00000143537_12 (sequence is synthesized)
attgccagctgcgcccgtctggctggcagtgtcgtcctaccagaggggattgtgacttgcctgaattctgcccaggagacagctcccagtgtccccctgatgtcagcctaggggatggcg

SEQ ID NO: 380809 - DNA, 120 bp, Artificial Sequence
  ENSG00000143537_13 (sequence is synthesized)
agccctgcgctggcgggcaagctgtgtgcatgcacgggcgttgtgcctcctatgcccagcagtgccagtcactttggggacctggagcccagcccgctgcgccactttgcctccagacag

SEQ ID NO: 380810 - DNA, 120 bp, Artificial Sequence
  ENSG00000143537_14 (sequence is synthesized)
ctaatactcggggaaatgcttttgggagctgtgggcgcaaccccagtggcagttatgtgtcctgcacccctagagatgccatttgtgggcagctccagtgccagacaggtaggacccagc

SEQ ID NO: 380811 - DNA, 120 bp, Artificial Sequence
  ENSG00000143537_15 (sequence is synthesized)
ctctgctgggctccatccgggatctactctgggagacaatagatgtgaatgggactgagctgaactgcagctgggtgcacctggacctgggcagtgatgtggcccagcccctcctgactc

SEQ ID NO: 380812 - DNA, 120 bp, Artificial Sequence
  ENSG00000143537_16 (sequence is synthesized)
tgcctggcacagcctgtggccctggcctggtgtgtatagaccatcgatgccagcgtgtggatctcctgggggcacaggaatgtcgaagcaaatgccatggacatggggtctgtgacagca

SEQ ID NO: 380813 - DNA, 120 bp, Artificial Sequence
  ENSG00000143537_17 (sequence is synthesized)
acaggcactgctactgtgaggagggctgggcaccccctgactgcaccactcagctcaaagcaaccagctccctgaccacagggctgctcctcagcctcctggtcttattggtcctggtga

SEQ ID NO: 380814 - DNA, 120 bp, Artificial Sequence
  ENSG00000143537_18 (sequence is synthesized)
tgcttggtgccagctactggtaccgtgcccgcctgcaccagcgactctgccagctcaagggacccacctgccagtacagggcagcccaatctggtccctctgaacggccaggacctccgc

SEQ ID NO: 380815 - DNA, 120 bp, Artificial Sequence
  ENSG00000143537_19 (sequence is synthesized)
agagggccctgctggcacgaggcactaagcaggctagtgctctcagcttcccggcccccccttccaggccgctgccgcctgaccctgtgtccaagagactccaggctgagctggctgacc

SEQ ID NO: 380816 - DNA, 120 bp, Artificial Sequence
  ENSG00000143537_20 (sequence is synthesized)
gacccaatccccctacccgccctctgcccgctgacccggtggtgagaagcccgaagtctcaggggccagccaagcccccacccccaaggaagccactgcctgccgacccccagggccggt

SEQ ID NO: 380817 - DNA, 120 bp, Artificial Sequence
  ENSG00000143537_21 (sequence is synthesized)
gcccatcgggtgacctgcccggcccaggggctggaatcccgcccctagtggtaccctccagaccagcgccaccgcctccgacagtgtcctcgctctacctctgacctctccggaggttcc

SEQ ID NO: 380818 - DNA, 120 bp, Artificial Sequence
  ENSG00000143537_22 (sequence is synthesized)
gctgcctccaagccggacttagggcttcaagaggcgggcgtgccctctggagtcccctaccatgactgaaggcgccagagactggcggtgtcttaagactccgggcaccgccacgcgctg

SEQ ID NO: 380819 - DNA, 120 bp, Artificial Sequence
  ENSG00000143537_23 (sequence is synthesized)
tcaagcaacactctgcggacctgccggcgtagttgcagcgggggcttggggaggggctgggggttggacgggattgaggaaggtccgcacagcctgtctctgctcagttgcaataaacgt

SEQ ID NO: 380820 - DNA, 120 bp, Artificial Sequence
  ENSG00000143537_24 (sequence is synthesized)
cttgctgccctcgcccggcccggagcgccgctgccatgcggctggcgctgctctgggccctggggctcctgggcgcgggcagccctctgccttcctggccgctcccaaatatagtctcag

SEQ ID NO: 380821 - DNA, 120 bp, Artificial Sequence
  ENSG00000143537_25 (sequence is synthesized)
gagcagcctgggtgggcaagaccaggtgtgagaagggacatttggaccacaatgaacagagcccagacttcaccattcaccaatgtcaaaggcagggactccaagggaagtcagtttctt

SEQ ID NO: 380822 - DNA, 120 bp, Artificial Sequence
  ENSG00000143537_26 (sequence is synthesized)
acttcagatggagcaaagtcctatcaactcactatgccttggtttccccatctgtaaacgcagggtatggcctcaaccttattggcctcccagtcccattaaagctttgtgggaatctga

SEQ ID NO: 380823 - DNA, 120 bp, Artificial Sequence
  ENSG00000143537_27 (sequence is synthesized)
acttgctgccctcgcccggcccggagcgccgctgccatgcggctggcgctgctctgggccctggggctcctgggcgcgggcagccctctgccttcctggccgctcccaaatatagtactg

SEQ ID NO: 380824 - DNA, 120 bp, Artificial Sequence
  ENSG00000143537_28 (sequence is synthesized)
gctcttcattaggtgatcggggtgcccctcagccttcagacactctgagccccagaagcagcaaaggtctcaggggccagccaagcccccacccccaaggaagccactgcctgccgaccc

SEQ ID NO: 380825 - DNA, 120 bp, Artificial Sequence
  ENSG00000143537_29 (sequence is synthesized)
gcactaagcagtgaccccaggagggcacaagggcagtggtgctcagaatggccttccgtaggcccaggtcaccatgttagaagggctgcaggctagtgctctcagcttcccggccccccc

SEQ ID NO: 380826 - DNA, 120 bp, Artificial Sequence
  ENSG00000143537_30 (sequence is synthesized)
ctcgattgccccatgacagtgcccagctggtgacgtaagggccccagactcagccagagaggccagtcctgtcctggccaaattcacaccccttcagcaccctacctcagcccctgaagc

SEQ ID NO: 380827 - DNA, 120 bp, Artificial Sequence
  ENSG00000143537_31 (sequence is synthesized)
gctgcgtggtgtgccaggcacccgagacgcccgagtcctacgtgtgccggacgctggactgcgaggccgtgtactgctggtcgtgctgggacgacatgcggcagcggtgcccggtctgca

SEQ ID NO: 380828 - DNA, 120 bp, Artificial Sequence
  ENSG00000143537_32 (sequence is synthesized)
cgccccgcgaagagctctcttcctccgcctttagtgacagcaacgacgacactgcctacgcggggtgaagaggcgtcctgctcgctcttccgcaccgtccttcccgccctgctgtcgatt

SEQ ID NO: 380829 - DNA, 120 bp, Artificial Sequence
  ENSG00000143537_33 (sequence is synthesized)
gccctctgcttggatgatgggagtgtgtgcacacctcctccccactcgctccccacctgcatgcacctgcataactgcatgcacagcacccactgccctgggcccctgctggccccccct

SEQ ID NO: 380830 - DNA, 120 bp, Artificial Sequence
  ENSG00000143537_34 (sequence is synthesized)
atctgcacctgctctgggctcaggtatactgggcggatttaatgacagtagagaaagtaaggagacccaggcatggagctgaaatgttctctgactttcttttttcttagaggcttggtg

SEQ ID NO: 380831 - DNA, 120 bp, Artificial Sequence
  ENSG00000143537_35 (sequence is synthesized)
tggtgttccccagcaccagtgcgttgggggtgggcaacatgacacccccccacctaagccggcctcctgccttctctccctcagtctcaggggccagccaagcccccacccccaaggaag

SEQ ID NO: 380832 - DNA, 120 bp, Artificial Sequence
  ENSG00000143537_36 (sequence is synthesized)
ctctgccttcctggccgctcccaaatatagtattcttctttaagtctcagcatgcaatgtggaagcccctcaggtacctaagggtcttgatgggctgggagctggtggatctgagggcac

SEQ ID NO: 380833 - DNA, 120 bp, Artificial Sequence
  ENSG00000143537_37 (sequence is synthesized)
tctgcccgctgacccggtggtgagaagcccgaaggtaacggtggggggagagaagggcacggcctctccccccacctagggctgtggtgctggtagccatgacggtggtggccgtggcga

SEQ ID NO: 380834 - DNA, 120 bp, Artificial Sequence
  ENSG00000143537_38 (sequence is synthesized)
gggcagccctctgccttcctggccgctcccaaatatagccctgctgtcgattccctcagtactgtcttggggtgtcctgggacctgcaggtggcactgaggagcagcaggcagagtcaga

SEQ ID NO: 380835 - DNA, 120 bp, Artificial Sequence
  ENSG00000143537_39 (sequence is synthesized)
caaggcaggtgggaggcttggtacccaactgcagttctcatccctgctccctgccagtggtgctcttcattaggtgatcggggtgcccctcagccttcagacactctgagccccagaagc

SEQ ID NO: 380836 - DNA, 120 bp, Artificial Sequence
  ENSG00000143537_40 (sequence is synthesized)
agcaaagggtgagcctcctgccttggtttctaccaccatctggtggtcaatggcgggactgcagtcggccagggactgcggttgacctacaccttcctcccctgagacatcagctggcat

SEQ ID NO: 380837 - DNA, 120 bp, Artificial Sequence
  ENSG00000143537_41 (sequence is synthesized)
ttactgttttttaaaaatttgaaaaaaaccactgagtttggagccagaaaagcaggggtctactccaaccttcattatctacttcctggtcctccttggcaagttcctgggccctctggc

SEQ ID NO: 380838 - DNA, 120 bp, Artificial Sequence
  ENSG00000143537_42 (sequence is synthesized)
ctggggtgagccgcgcactgcctcgcctgcagtcgggaaagcctgcccgcccgacctctccgagccaggccgcgcacaggaggcagggaggccgcgaagctactagggaggggtccggac

SEQ ID NO: 380839 - DNA, 120 bp, Artificial Sequence
  ENSG00000143537_43 (sequence is synthesized)
ctggcgccgggtgaaggcgcgccgcccaagccggtcggaccgggcaccggctcccactccgcacagttgcggggaagcggtagcgctgagcagcgcgggcgtagtgggcggtgtccccgc

SEQ ID NO: 380840 - DNA, 120 bp, Artificial Sequence
  ENSG00000143537_44 (sequence is synthesized)
gcgggcagccctctgccttcctggccgctcccaaatataggtgagtcctccgcctggagtgggtcggggggcggactgggagggaggtgcaggaaagtcggaaggcattagggtaatggg

SEQ ID NO: 380841 - DNA, 120 bp, Artificial Sequence
  ENSG00000143537_45 (sequence is synthesized)
gccggacggagaccctgggagagcccagccagagcgcggcccgccctggtccgctgtcctgggcctagggcccggtgacttggcgatggggtgaaaagagaaggaggggggatgccggcg

SEQ ID NO: 380842 - DNA, 120 bp, Artificial Sequence
  ENSG00000143537_46 (sequence is synthesized)
ccccctgcctcctgcctggtcatcctctgcgcggtccctgcggacactttcaggctcaggtaccaggtaccgaggggcctgtccagcgccacttcaagatcgtgatgagagggtcgctgc

SEQ ID NO: 380843 - DNA, 120 bp, Artificial Sequence
  ENSG00000143537_47 (sequence is synthesized)
tccccaggactggcatcttcgctgctctggggcctagctaaccgttcgacccggtgccagggcgctgagcgggcatggcttgtagggtttagtgaagaggattctctctagcctctattc

SEQ ID NO: 380844 - DNA, 120 bp, Artificial Sequence
  ENSG00000143537_48 (sequence is synthesized)
caggcctggggccgccaggcactcctcaccctggtgctgttgccaccagtgcctggccgagcgggaggggcccgagatgagccaggagaagggagaattggccaggaaagaggctgggac

SEQ ID NO: 380845 - DNA, 120 bp, Artificial Sequence
  ENSG00000143537_49 (sequence is synthesized)
accaactcctccttggaactttcacttcccgctgctgtcttgggccgggaccgagagggcaggcgcgggtggagtgtccggaggagagagggccattgtgtgttgggggggtggggggtg

SEQ ID NO: 380846 - DNA, 120 bp, Artificial Sequence
  ENSG00000143537_50 (sequence is synthesized)
ctcgaggaggaagcagaggctgtaggcagcgggtgtgcctgactgggcatgagggtgtttagggaggtgggggtgtttgcactgctcacccagaaatgggcgttcctggcatctccgatg

SEQ ID NO: 380847 - DNA, 120 bp, Artificial Sequence
  ENSG00000143537_51 (sequence is synthesized)
tgagcgaaggggagggtgagcgggcacccggccacaaggcttagctcagtctcgagagggggcgttcctgaagtggggggagagtgattgggagggagtgggaaccggggagggtcctgt

SEQ ID NO: 380848 - DNA, 120 bp, Artificial Sequence
  ENSG00000143537_52 (sequence is synthesized)
gagaacctgggattggccggaaggggacaaggagggccacaggctgcgcaagccgaaagtctttcttggggacttgtgaatgggttggtgggtggaaagccataaattagagagacaccc

SEQ ID NO: 380849 - DNA, 120 bp, Artificial Sequence
  ENSG00000143543_0 (sequence is synthesized)
accgacgcggaagactataagccccagcgggcgacgaccgaacgcccccgggaacaccgggccccgagctcggtcccgcgcccgaggatcctccacggggctagatggctgcgtcggggg

SEQ ID NO: 380850 - DNA, 120 bp, Artificial Sequence
  ENSG00000143543_1 (sequence is synthesized)
cgggagcggaggtgagcgggcgctagggccgcgagcccccgccggcccttcctccagcgccctgcggaccccgcagaaggcgctcgcctccctagcccgcaaaaacatatcgatttttct

SEQ ID NO: 380851 - DNA, 120 bp, Artificial Sequence
  ENSG00000143543_2 (sequence is synthesized)
cgctgtggcaacggggacgtcctgatagatcctctgctccaataggcaactccggccttccctgccctgacctggaacctctgggagggctgcagagtaagtgccgcctctgcgctccga

SEQ ID NO: 380852 - DNA, 120 bp, Artificial Sequence
  ENSG00000143543_3 (sequence is synthesized)
cggaggcacgaggcctgtggagtaggtccctctgttccgacaggtgcgacacttggcgctccatgcttgcgggtgccgggaggcctggcctcccccagggccgccacctctgctggttgc

SEQ ID NO: 380853 - DNA, 120 bp, Artificial Sequence
  ENSG00000143543_4 (sequence is synthesized)
tctgtgctttcaccttaaagctctgccaagcagaggctcccgtgcaggaagagaagctgtcagcaagcacctcaaatttgccatgctggctggtggaagagtttgtggtagcagaagagt

SEQ ID NO: 380854 - DNA, 120 bp, Artificial Sequence
  ENSG00000143543_5 (sequence is synthesized)
atgcagctcatctaagagaaatgagttcaaaagctgccgctcagctttgatggaacaacgcttattttggaagttcgaaggggctgtcgtgtgtgtggccctgatcttcgcttgtcttgt

SEQ ID NO: 380855 - DNA, 120 bp, Artificial Sequence
  ENSG00000143543_6 (sequence is synthesized)
catcattcgtcagcgacaattggacagaaaggctctggaaaaggtccggaagcaaatcgagtccatatagctacattccacccttgtatcctgggtcttagagaccctatctcagacagt

SEQ ID NO: 380856 - DNA, 120 bp, Artificial Sequence
  ENSG00000143543_7 (sequence is synthesized)
gaaagtgaaatggactgatttgcactcttggttctttggagccttgtggtggaatccccttttccccatcttcttctttcagatcattaatgagcagaataaaaagagtaaaatggtttc

SEQ ID NO: 380857 - DNA, 120 bp, Artificial Sequence
  ENSG00000143543_8 (sequence is synthesized)
cttcccttctgtaacttggagcaggaagtcatgggggcagagagggaaaggaggtggttacttaaggccccaatctaccaagtcttccccaccacttctcccttgttttccccctcttct

SEQ ID NO: 380858 - DNA, 120 bp, Artificial Sequence
  ENSG00000143543_9 (sequence is synthesized)
actacttatttcaaacttctgggatacaatttcagctaaaacgtttatttctcactcaaaacttatttcccctcaaccctatacccaaagaagaaataaaatcacagatacataacagaa

SEQ ID NO: 380859 - DNA, 120 bp, Artificial Sequence
  ENSG00000143543_10 (sequence is synthesized)
agccccagcgggcgacgaccgaacgcccccgggaacaccgggccccgagctcggtcccgcgcccgaggatcctccacggggctagatggctgcgtcgggggcgggagcggaggcaactcc

SEQ ID NO: 380860 - DNA, 120 bp, Artificial Sequence
  ENSG00000143543_11 (sequence is synthesized)
ttaaagctctgccaagcagaggctcccgtgcaggaagagaagctgtcaggtgggtgattgtctgggaacccgacacgtcccgtcgtttgtttttggttttagtatcttccccatatacca

SEQ ID NO: 380861 - DNA, 120 bp, Artificial Sequence
  ENSG00000143543_12 (sequence is synthesized)
aggccggcaccacatggaatgagggcaagcgctgtgccgggaagttggatgggcagagcctgggagaaatgttttctgaatggcctggggctggcatttatctttcctttcagcaagcac

SEQ ID NO: 380862 - DNA, 120 bp, Artificial Sequence
  ENSG00000143545_0 (sequence is synthesized)
cttcctggcctgggctccgtgccgctctgtttgccaaccgtccagtcccgcctaccagtgccgggcgctccccacccctcccccggctcccccggtgtccgccatggccaaagcctacga

SEQ ID NO: 380863 - DNA, 120 bp, Artificial Sequence
  ENSG00000143545_1 (sequence is synthesized)
ccacctcttcaagttgctgctgatcggggactcgggggtgggcaagacttgtctgatcattcgctttgcagaggacaacttcaacaacacttacatctccaccatcggaattgatttcaa

SEQ ID NO: 380864 - DNA, 120 bp, Artificial Sequence
  ENSG00000143545_2 (sequence is synthesized)
gatccgcactgtggatatagaggggaagaagatcaaactacaagtctgggacacggctggccaagagcggttcaagacaataactactgcctactaccgtggagccatgggcattatcct

SEQ ID NO: 380865 - DNA, 120 bp, Artificial Sequence
  ENSG00000143545_3 (sequence is synthesized)
agtatacgacatcacggatgagaaatctttcgagaatattcagaactggatgaaaagcatcaaggagaatgcctcggctggggtggagcgcctcttgctggggaacaaatgtgacatgga

SEQ ID NO: 380866 - DNA, 120 bp, Artificial Sequence
  ENSG00000143545_4 (sequence is synthesized)
ggccaagaggaaggtgcagaaggagcaggccgataagttggctcgagagcatggaatccgatttttcgaaactagtgctaaatccagtatgaatgtggatgaggcttttagttccctggc

SEQ ID NO: 380867 - DNA, 120 bp, Artificial Sequence
  ENSG00000143545_5 (sequence is synthesized)
cttgctcaagtcaggaggccggagatcaggaaacggcaacaagcctcccagtactgacctgaaaacttgtgacaagaagaacaccaacaagtgctccctgggctgaggaccctttcttgc

SEQ ID NO: 380868 - DNA, 120 bp, Artificial Sequence
  ENSG00000143545_6 (sequence is synthesized)
ctccccaccccggaagctgaacctgagggagacaacggcagagggagtgagcaggggagaaatagcagaggggcttggagggtcacataggtagatggtaaagagaatgaggagaaaaag

SEQ ID NO: 380869 - DNA, 120 bp, Artificial Sequence
  ENSG00000143545_7 (sequence is synthesized)
gagaaaagggaaaagcagaaaggaaaaaaaggaagagagaggaagggagaagggagaggaatgaattgaggaagtgaaagaaggcaaggaggtaggaagagagggaggaggaaaggaagg

SEQ ID NO: 380870 - DNA, 120 bp, Artificial Sequence
  ENSG00000143545_8 (sequence is synthesized)
agagatgcctcaggcttcagaccttacctgggttttcagggcaaacataaatgtaaatacactgatttattctgttactagatcaggttttagggtcctgcaaaaggctagctcggcact

SEQ ID NO: 380871 - DNA, 120 bp, Artificial Sequence
  ENSG00000143545_9 (sequence is synthesized)
acactagggaatttgctcctgttctgtcacttgtcatggtctttcttggtattaaaggccaccatttgcacaaatgttcctgttttgggtaacttggattattgtcagaattgttctcca

SEQ ID NO: 380872 - DNA, 120 bp, Artificial Sequence
  ENSG00000143545_10 (sequence is synthesized)
tgtgggttgcagagggcccaacatggcctagtgtttagacccatggatgcggggtcacttacagggcagtgggaagcctcaatgggaacatggtccaaggtgaattttgtcatctcccag

SEQ ID NO: 380873 - DNA, 120 bp, Artificial Sequence
  ENSG00000143545_11 (sequence is synthesized)
ggcattatcctagtatacgacatcacggatgagaaatctttcgagaatattcagaactggatgaaaagcatcaaggaggtgaggaccctccaaaagagatggggaaactggttagaacct

SEQ ID NO: 380874 - DNA, 82 bp, Artificial Sequence
  ENSG00000143545_12 (sequence is synthesized)
gaggaccctccaaaagagatggggaaactggttagaacctggagaatgaaggggtccatcaggataggcaagacctaacggg

SEQ ID NO: 380875 - DNA, 67 bp, Artificial Sequence
  ENSG00000143545_13 (sequence is synthesized)
gcaggacctaacttttacttgtcttttgcccccagaatgcctcggctggggtggagcgcctcttgct

SEQ ID NO: 380876 - DNA, 120 bp, Artificial Sequence
  ENSG00000143545_14 (sequence is synthesized)
gagcaggccgataaggtgagggccaggctgagcaatgttctagaactgggctgggagggccaagataggttgcattgcagaggacttggctgctgtccttaattcaattctcttcccact

SEQ ID NO: 380877 - DNA, 120 bp, Artificial Sequence
  ENSG00000143545_15 (sequence is synthesized)
tcaccccttatagttggctcgagagcatggaatccgatttttcgaaactagtgctaaatccagtatgaatgtggatgaggtgagatccacacccccatccccgaccaagagaggaagtat

SEQ ID NO: 380878 - DNA, 120 bp, Artificial Sequence
  ENSG00000143545_16 (sequence is synthesized)
tagaaggtagattctcctccctccaaactgactctgttccccactttaggcttttagttccctggcccgggacatcttgctcaagtcaggaggccggagatcagtaagttggttttgctg

SEQ ID NO: 380879 - DNA, 84 bp, Artificial Sequence
  ENSG00000143545_17 (sequence is synthesized)
ttgataaaaacggggagcaatgctaagatttctcatgagggtggatttactttaaacagtttataccctcctaccctaaccatc

SEQ ID NO: 380880 - DNA, 120 bp, Artificial Sequence
  ENSG00000143545_18 (sequence is synthesized)
gggaaatagacaggaagagtctcacgacaattctggttacaaaggaaaaggaaaaatgcccctctttcctaattgtctcaaaagtaatcctgtttagcctcagactttcctagtgccaag

SEQ ID NO: 380881 - DNA, 120 bp, Artificial Sequence
  ENSG00000143545_19 (sequence is synthesized)
tttggcccactagttaattcacatagactggcttcagctacttttttccttactctctactaggagggtaggtgggataccaagagtagagggctctaagaaaacagagaagaggaatgt

SEQ ID NO: 380882 - DNA, 120 bp, Artificial Sequence
  ENSG00000143545_20 (sequence is synthesized)
gaaagtaatatctggggggagacagagactgaattcagagagttgtcagctggtataactgaatggacccaagaggcagcctaaggattttaagcctccatgcagaattttcgtcacctt

SEQ ID NO: 380883 - DNA, 120 bp, Artificial Sequence
  ENSG00000143546_0 (sequence is synthesized)
gagcagccttcctgagagaggagagagaaagctcagggaggtctggagcaaagatactcctggaggtggggagtgaggcagggataaggaaggagagtatcctccagcaccttccagtgg

SEQ ID NO: 380884 - DNA, 120 bp, Artificial Sequence
  ENSG00000143546_1 (sequence is synthesized)
gtggggcaagtccgtgggcatcatgttgaccgagctggagaaagccttgaactctatcatcgacgtctaccacaagtactccctgataaaggggaatttccatgccgtctacagggatga

SEQ ID NO: 380885 - DNA, 120 bp, Artificial Sequence
  ENSG00000143546_2 (sequence is synthesized)
agagaccgagtgtcctcagtatatcaggaaaaagggtgcagacgtctggttcaaagagttggatatcaacactgatggtgcagttaacttccaggagttcctcattctggtgataaagat

SEQ ID NO: 380886 - DNA, 120 bp, Artificial Sequence
  ENSG00000143546_3 (sequence is synthesized)
gggcgtggcagcccacaaaaaaagccatgaagaaagccacaaagagtagctgagttactgggcccagaggctgggcccctggacatgtacctgcagaataataaagtcatcaatacctca

SEQ ID NO: 380887 - DNA, 120 bp, Artificial Sequence
  ENSG00000143546_4 (sequence is synthesized)
acccttcccaccagagccatagccatctgctggtttggttatttggagagtgcaggccaggacaaggccatcgcttggggcatgaatcctctgcgtactgccctggccagatgcaaattc

SEQ ID NO: 380888 - DNA, 120 bp, Artificial Sequence
  ENSG00000143549_0 (sequence is synthesized)
actcaggcagcagccccttctttcttgccccagtctccagttctccagtgttcacaggtgagcctaccaacagccactgctcatgatggaggccatcaagaaaaagatgcagatgctgaa

SEQ ID NO: 380889 - DNA, 120 bp, Artificial Sequence
  ENSG00000143549_1 (sequence is synthesized)
gttagacaaggagaatgctctggatcgggcagagcaagctgaagctgagcagaagcaggcagaagaaagaagtaaacagctggaggatgagctggcagccatgcagaagaagctgaaagg

SEQ ID NO: 380890 - DNA, 120 bp, Artificial Sequence
  ENSG00000143549_2 (sequence is synthesized)
gacagaggatgagctggacaagtattctgaagctttgaaggatgcccaggagaagctggaactggcagagaagaaggctgctgatgctgaggctgaggtggcctccttgaaccgtaggat

SEQ ID NO: 380891 - DNA, 120 bp, Artificial Sequence
  ENSG00000143549_3 (sequence is synthesized)
ccagctggttgaagaagagctggaccgtgctcaggagcgcctggccactgccctgcaaaagctggaagaagctgaaaaagctgctgatgagagtgagagaggtatgaaggttattgaaaa

SEQ ID NO: 380892 - DNA, 120 bp, Artificial Sequence
  ENSG00000143549_4 (sequence is synthesized)
ccgggccttaaaagatgaagaaaagatggaactccaggaaatccaactcaaagaagctaagcacattgcagaagaggcagataggaagtatgaagaggtggctcgtaagttggtgatcat

SEQ ID NO: 380893 - DNA, 120 bp, Artificial Sequence
  ENSG00000143549_5 (sequence is synthesized)
tgaaggagacttggaacgcacagaggaacgagctgagctggcagagtctaagtgttctgagctggaggaggagctgaagaatgtcaccaacaacctcaagtctcttgaggctcaggcgga

SEQ ID NO: 380894 - DNA, 120 bp, Artificial Sequence
  ENSG00000143549_6 (sequence is synthesized)
gaagtactctcaaaaagaagataaatatgaggaagaaatcaagattcttactgataaactcaaggaggcagagacccgtgctgagtttgctgagagatcggtagccaagctggaaaagac

SEQ ID NO: 380895 - DNA, 120 bp, Artificial Sequence
  ENSG00000143549_7 (sequence is synthesized)
aattgatgacctggaagatgagctctatgcccagaaactgaagtacaaggccattagcgaggagctggaccacgccctcaatgacatgacctctatataattatcaccgtttctgctctg

SEQ ID NO: 380896 - DNA, 120 bp, Artificial Sequence
  ENSG00000143549_8 (sequence is synthesized)
ttctggatctgccccctttactcctcggggaacccaaggccccactctcgctctggattccatttgggtcagcctggctggtccccaaggcattaggatgggggagcaaaaagcaactta

SEQ ID NO: 380897 - DNA, 120 bp, Artificial Sequence
  ENSG00000143549_9 (sequence is synthesized)
tgtattttcttccacccccaccccaaattaaaatgttaagctgctggaaacctcatgccaccctgcatttgtgtcattgacaaagctgttgctgtccctaagaaggagccttgggggtgt

SEQ ID NO: 380898 - DNA, 120 bp, Artificial Sequence
  ENSG00000143549_10 (sequence is synthesized)
gatgtggggaagagctattgtaggctccccctcctctgacttatgtaatcaaagccacttttgtgtgtgtctattttttcttgacatttaaactcagctgatctgattctaccagagtga

SEQ ID NO: 380899 - DNA, 120 bp, Artificial Sequence
  ENSG00000143549_11 (sequence is synthesized)
tggatttagtacaggttactcaggatagtaattttagttatactcctcaagctgaacaagattaaattccttatttccaggttcttaaatcatcctgcctgcagtgtttccattctctct

SEQ ID NO: 380900 - DNA, 120 bp, Artificial Sequence
  ENSG00000143549_12 (sequence is synthesized)
tcaggtattcctcctttggtgtggtgtcattgagaagccattgaagtgactctcaatacacattctgtacccttttaccggtggttcaaatggtgcatcctcagaacacccagtgaaccc

SEQ ID NO: 380901 - DNA, 120 bp, Artificial Sequence
  ENSG00000143549_13 (sequence is synthesized)
aatacattattgctaagattgactaattatgtcaactccagtcacagaaaaatacacaatggatagaattctggacggtttttttactttttcttctttaaacctttcttacatatttga

SEQ ID NO: 380902 - DNA, 120 bp, Artificial Sequence
  ENSG00000143549_14 (sequence is synthesized)
gacttgctaccatttgcctgctagtgtgtgactagtgggatataagataagtgataaattattattgggaaaactaaaatgaccaatcatgcatatttcaaataatgtgcatatgaggct

SEQ ID NO: 380903 - DNA, 120 bp, Artificial Sequence
  ENSG00000143549_15 (sequence is synthesized)
aatgatttattacatacataaatttctgctagtaaaattttccttggttcatattgtggaattaaatatcaacattttagaaattcccattataggccgggcgtggtagctcacgcctat

SEQ ID NO: 380904 - DNA, 120 bp, Artificial Sequence
  ENSG00000143549_16 (sequence is synthesized)
gagagactccatctcaaaaaaaaaaaaggaattcgcattccaatttacacagcagagatttcttaatagtatagctgtgaattatactaatccaagcacgtaagtgttgttcacttagta

SEQ ID NO: 380905 - DNA, 120 bp, Artificial Sequence
  ENSG00000143549_17 (sequence is synthesized)
acttagtactttagtttcccagcagggtatgtatttaaaatttgcttttcttttagctgggtgcaatggcacttgcctgtactgcctgtagcttcttgggaggctgaggcaggaggattg

SEQ ID NO: 380906 - DNA, 120 bp, Artificial Sequence
  ENSG00000143549_18 (sequence is synthesized)
caggagttctgcactgtagtgtgctatgcaggtcagatgtcctcactaaatttggcatcagtatggtgacctcctgggagtggagaacaacaaggttgcctaagaaggggtgaactggcc

SEQ ID NO: 380907 - DNA, 120 bp, Artificial Sequence
  ENSG00000143549_19 (sequence is synthesized)
caggtcggaaatggagcaggtcaaaattcctgtgctgatcagtagtgggattgcacctataaatagccactgtagtactccagcctgggcaacacagcaagattccatctgttaaaaaca

SEQ ID NO: 380908 - DNA, 120 bp, Artificial Sequence
  ENSG00000143549_20 (sequence is synthesized)
cttttgctcttcttttaaacagatataatcaggtagggaagttttccttaatctaaaactttaagtcatatcaaattcacgtttccttttgtccattccatttcttactgccgcatagcc

SEQ ID NO: 380909 - DNA, 120 bp, Artificial Sequence
  ENSG00000143549_21 (sequence is synthesized)
tttgagattaaggttcagattcatttattcagctgacacttcctggtatcttctaggtataggatattaagatggagacagaaataaagatggaggcaccattcctactctcaagttgct

SEQ ID NO: 380910 - DNA, 120 bp, Artificial Sequence
  ENSG00000143549_22 (sequence is synthesized)
tagaatctactaggagagaaaacatacataaagctacagatactgtgtgatgaatgccacaaataatagtgttatgggaattgagtagaggggacgagattgatcctagtgggaatgaat

SEQ ID NO: 380911 - DNA, 120 bp, Artificial Sequence
  ENSG00000143549_23 (sequence is synthesized)
ttgagtagaggggacgagattgatcctagtgggaatgaattggaaaaactcatggaagaaggcatgtaatgggtacttcataaacatgttaaaacttttttctttttttctttttttttt

SEQ ID NO: 380912 - DNA, 120 bp, Artificial Sequence
  ENSG00000143549_24 (sequence is synthesized)
gcgcccagccaacatgttaaacttgcatattcatttttattgggttccaaaagtggatttttgacaagcagagttgggttgtgggatagtgaatattgagcattccattatttatttatt

SEQ ID NO: 380913 - DNA, 84 bp, Artificial Sequence
  ENSG00000143549_25 (sequence is synthesized)
gcattccatttaaagagaaacaaaataataaaggcattgatagagatgagaaggccacaatagctctaaaggtagatttagaca

SEQ ID NO: 380914 - DNA, 120 bp, Artificial Sequence
  ENSG00000143549_26 (sequence is synthesized)
gatgagaaggccacaatagctctaaaggtagatttagacagagtagggaacaggttgtgtcttaaaatgaggctgaggagttataattttacttggagttaatggggatgccactggaga

SEQ ID NO: 380915 - DNA, 120 bp, Artificial Sequence
  ENSG00000143549_27 (sequence is synthesized)
ttttgaataggatatgttgtgatctgaataacatataagaagaattaatttggtaactaatttgcagattagcaaagtgattcactaacatggtgtttctcacatttcagccatttatgt

SEQ ID NO: 380916 - DNA, 120 bp, Artificial Sequence
  ENSG00000143549_28 (sequence is synthesized)
taccatttttgatggctttttccatattcattgctgcctacattgttttcttcagatctactcatttccagatttattttgttcttacttgacacaattctattttgaaatcaaagtttt

SEQ ID NO: 380917 - DNA, 120 bp, Artificial Sequence
  ENSG00000143549_29 (sequence is synthesized)
gatgtgttagtgttttttcctaatcacattaaagtaactatagcagtgaatacaccacactttggaaaaaattgggttaggttaatttagttttctaggagagaataatcagggtctgag

SEQ ID NO: 380918 - DNA, 120 bp, Artificial Sequence
  ENSG00000143549_30 (sequence is synthesized)
ctagagtagtggcaggagagatagcactaaataaagacaggcattgtgaaaggcctggccacttgatgtgaggaggaaagacaaggatgactggtttttagagtaggagaattagccggg

SEQ ID NO: 380919 - DNA, 120 bp, Artificial Sequence
  ENSG00000143549_31 (sequence is synthesized)
tgcagtggctcatgcctgtaatccctgcactttaggaggctgaggtgagaggatttcttgaatccaggagttcgagaccagcctggcaataaagtgagaacctgtctctacaaaatataa

SEQ ID NO: 380920 - DNA, 120 bp, Artificial Sequence
  ENSG00000143549_32 (sequence is synthesized)
aaacttagccaaacatggtggtgcgtgcctgcagtcctatctacttggagggccgaagccagaggatcctttgagcccaggagtctgaggctgcagcaagctgtgatcacactgctgcac

SEQ ID NO: 380921 - DNA, 120 bp, Artificial Sequence
  ENSG00000143549_33 (sequence is synthesized)
tccatcctgggtggcagaatgagaccccccccaaaaaaagagtaggaaagtggtggggttaaagatgtagggagatcatgttgtcctggtttggggagctgggggaagggaaagaagata

SEQ ID NO: 380922 - DNA, 120 bp, Artificial Sequence
  ENSG00000143549_34 (sequence is synthesized)
cggctgacaatctggcaggtatctgggtgaaaacaaaattctagggcgtgaggcagagaggttgacataagagagttgggaatccatatggggtacaggtagtttatgccatggaggtaa

SEQ ID NO: 380923 - DNA, 73 bp, Artificial Sequence
  ENSG00000143549_35 (sequence is synthesized)
aatccatatggggtacaggtagtttatgccatggaggtaaattagaaccatgaaggacaattgcaaatacaaa

SEQ ID NO: 380924 - DNA, 72 bp, Artificial Sequence
  ENSG00000143549_36 (sequence is synthesized)
cactaaacaatgaggaaaacgttatgtaagaggaggaaccaaatggaactgattggagggaaagaagacggt

SEQ ID NO: 380925 - DNA, 120 bp, Artificial Sequence
  ENSG00000143549_37 (sequence is synthesized)
gaggaaccaaatggaactgattggagggaaagaagacggttgagtagttctttaaaaagttccgggttggatgctttctagtggtttttcaacagagaggctaagaaggaagataactga

SEQ ID NO: 380926 - DNA, 120 bp, Artificial Sequence
  ENSG00000143549_38 (sequence is synthesized)
aaatgggacatgcattgatactttagtaatttgagggtacattttgagtgttaagaagtgaagaggaggagtcattttcaggggcaaaagagtgtattggtaggaagattatataggcaa

SEQ ID NO: 380927 - DNA, 120 bp, Artificial Sequence
  ENSG00000143549_39 (sequence is synthesized)
tataatttactttagagcagggctttccaacagaacttttggtaatgatgtctagtacattagccacatgtggcagtcaagcactcaaaacatggctagtgtggctgaggggctaaaatt

SEQ ID NO: 380928 - DNA, 120 bp, Artificial Sequence
  ENSG00000143549_40 (sequence is synthesized)
taattgtatttcattgtagttcatttaaatttggctacctgtggctagtggctattatattggacaatgcatttctaaatattcagatcctgggcagaagttggctttgacatgaagaaa

SEQ ID NO: 380929 - DNA, 65 bp, Artificial Sequence
  ENSG00000143549_41 (sequence is synthesized)
attcagatcctgggcagaagttggctttgacatgaagaaagacttcttagaaaggaaggaagtag

SEQ ID NO: 380930 - DNA, 64 bp, Artificial Sequence
  ENSG00000143549_42 (sequence is synthesized)
gaaaaaaaagaaggaaataagagggagattgggagaaaagtaaggtgttatagctctgatctgt

SEQ ID NO: 380931 - DNA, 120 bp, Artificial Sequence
  ENSG00000143549_43 (sequence is synthesized)
gagattgggagaaaagtaaggtgttatagctctgatctgtggtatctcctgttttccttgcggtatgactagtgtgagccaaggatagagaccaacaaactggggtaccaaagtggacaa

SEQ ID NO: 380932 - DNA, 120 bp, Artificial Sequence
  ENSG00000143549_44 (sequence is synthesized)
tgaagtactatgtaattagtgctaatgctaaattcattcctttgtttaaggcttaatatccttgcagaagccatcctgtgttacttgagcctggactagtattggggtgaagtcaagcat

SEQ ID NO: 380933 - DNA, 120 bp, Artificial Sequence
  ENSG00000143549_45 (sequence is synthesized)
cagagtaaaacatttgtccccttaatgttaccccctcttaatttctaagaaccacaggcccattttgcccttccttgttaccatcattgagataaggaataagatgtagtaaccccaagt

SEQ ID NO: 380934 - DNA, 120 bp, Artificial Sequence
  ENSG00000143549_46 (sequence is synthesized)
tatctgataggtacaactgacctattctgtttggcagctttatcttagacctattctgtttggcagctttatcttagccccaaccaaatctcttcctttcacatggtgttggttgaatac

SEQ ID NO: 380935 - DNA, 120 bp, Artificial Sequence
  ENSG00000143549_47 (sequence is synthesized)
cccgcctcggccttccaaagtgctggggttacagacttgagccactgcacctggccatggggttgtttcttaattagatatagctgaaaagaacgctagaccaaataggttctctgcctt

SEQ ID NO: 380936 - DNA, 120 bp, Artificial Sequence
  ENSG00000143549_48 (sequence is synthesized)
acgctagaccaaataggttctctgccttgccttttcgtttgttttgttttagctattatcagggaaccaaaaactttaaggagctagtactggtcttaatttttaataactagagatagc

SEQ ID NO: 380937 - DNA, 120 bp, Artificial Sequence
  ENSG00000143549_49 (sequence is synthesized)
agagttagaaactaagttcaaagtgagagaacagctgcatttgtctttctgacctcatgcaattcctaggaaactctgtgttctgtgatttagtcaggcaataaaatgctctcactcctt

SEQ ID NO: 380938 - DNA, 120 bp, Artificial Sequence
  ENSG00000143549_50 (sequence is synthesized)
atgctggaccagaccctgcttgacctgaatgagatgtagaacgccccagtcccaccctgctgctgctcctccctctgacccagactccgcctgaggccagcctgcgggaagctgaccttt

SEQ ID NO: 380939 - DNA, 120 bp, Artificial Sequence
  ENSG00000143549_51 (sequence is synthesized)
aactgagggctgatctttaactggaaggctgctttctcctttcaccaccccctccttccctgtgtctttttcgccaaactgtctctgcctcttcccggagaatccagctgggctagaggc

SEQ ID NO: 380940 - DNA, 120 bp, Artificial Sequence
  ENSG00000143549_52 (sequence is synthesized)
tgagcacctttggaaacaacatttaagggaatgtgagcacaatgcataatgtctttaaaaagcatgttgtgatgtacacattttgtaattaccttttttgttgttttgtagcaaccattt

SEQ ID NO: 380941 - DNA, 120 bp, Artificial Sequence
  ENSG00000143549_53 (sequence is synthesized)
gcaggcggaagtaagggtgagaggaggctgcaacgccgagcggaggaggcaggaaccggagcgcgagcagtagctgggtgggcaccatggctgggatcaccaccatcgaggcggtgaagc

SEQ ID NO: 380942 - DNA, 120 bp, Artificial Sequence
  ENSG00000143549_54 (sequence is synthesized)
gcaagatccaggttctgcagcagcaggcagatgatgcagaggagcgagctgagcgcctccagcgagaagttgagggagaaaggcgggcccgggaacaggctgaggctgaggtggcctcct

SEQ ID NO: 380943 - DNA, 120 bp, Artificial Sequence
  ENSG00000143549_55 (sequence is synthesized)
aaggtgtaggcctgccttaccgagagccaaacagagcccagggagactccgctgtgggaaacctcattgttctgtacaaagtactagctaaaccagaaaggtgattccaggaggagttag

SEQ ID NO: 380944 - DNA, 120 bp, Artificial Sequence
  ENSG00000143549_56 (sequence is synthesized)
ccaaacaacaacaaaaacaaaaaatgtgctgttcaagttttcagctttaagatatctttggataatgttatttctattttttatttttttcattagaagttaccaaattaagatggtaag

SEQ ID NO: 380945 - DNA, 120 bp, Artificial Sequence
  ENSG00000143549_57 (sequence is synthesized)
acctctgagaccaaaattttgtcccatctctaccccctcacaactgcttacagaatggatcatgtcccccttatgttgaggtgaccacttaattgctttcctgcctccttgaaagaaaga

SEQ ID NO: 380946 - DNA, 120 bp, Artificial Sequence
  ENSG00000143549_58 (sequence is synthesized)
aagaaagaagactgtgtttttgccactgatttagccatgtgaaactcatctcattacccttttctgggtttgaagctgctgtctctagaagtgccatctcaattgtgctttgtatcagtc

SEQ ID NO: 380947 - DNA, 120 bp, Artificial Sequence
  ENSG00000143549_59 (sequence is synthesized)
agtgctggagaaatcttgaatagcttatgtacaaaactttttaaattttatattattttgaaactttgctttgggtttgtggcaccctggccaccccatctggctgtgacagcctctgca

SEQ ID NO: 380948 - DNA, 120 bp, Artificial Sequence
  ENSG00000143549_60 (sequence is synthesized)
gtccgtgggctggcagtttgttgatcttttaagtttccttccctacccagtccccattttctggtaaggtttctaggaggtctgttaggtgtacatcctgcagcttattggcttaaaatg

SEQ ID NO: 380949 - DNA, 120 bp, Artificial Sequence
  ENSG00000143549_61 (sequence is synthesized)
tactctccttttatgtggtctctttggggccgattgggagaaagagaaatcaatagtgcaactgttttgatactgaatattgacaagtgtctttttgaaataaagaaccagtccctccaa

SEQ ID NO: 380950 - DNA, 120 bp, Artificial Sequence
  ENSG00000143549_62 (sequence is synthesized)
gaccagaacctgaagtgtctgagtgctgctgaagaaaagtaagtgttctgagctggaggaggagctgaagaatgtcaccaacaacctcaagtctcttgaggctcaggcggagaagtactc

SEQ ID NO: 380951 - DNA, 120 bp, Artificial Sequence
  ENSG00000143549_63 (sequence is synthesized)
tgatgggcagggctcaatgatgcccattaaactgagcttactgctcacaccactgacctggaccccaacaaaaagctgattgtctttttaaaagttattattttgccctgagcaaattgc

SEQ ID NO: 380952 - DNA, 120 bp, Artificial Sequence
  ENSG00000143549_64 (sequence is synthesized)
attttaattggggcagttagaatgttgatttcctaacagcattgtgaagttgaccattgtgaagtttctgtccctttagaagagattatgggtgaagaagggaggggcctgagagattat

SEQ ID NO: 380953 - DNA, 120 bp, Artificial Sequence
  ENSG00000143549_65 (sequence is synthesized)
agtgagaaaacttgcgagaattttgttttccacccttatttgctgctctttcacttgggcactgactgtaggatatgttcccttgcatggatgtttttaacaataaaaggactgacttga

SEQ ID NO: 380954 - DNA, 120 bp, Artificial Sequence
  ENSG00000143549_66 (sequence is synthesized)
ttatatatgtggtgtggttttgttttgttttgtttttgttttgcagctgcctcccctccacttgattttgttgagtgctgtctcatctcttcatggaatgctccattcttttccacttac

SEQ ID NO: 380955 - DNA, 120 bp, Artificial Sequence
  ENSG00000143549_67 (sequence is synthesized)
gctcatcaagcaggggaaaggaaaaacacctccttgggttgatctgaataatatcaaagcttagatccatcttaaaaagtcatggagaattttaacctgaggatctcatggctctaaaga

SEQ ID NO: 380956 - DNA, 120 bp, Artificial Sequence
  ENSG00000143549_68 (sequence is synthesized)
aggtatggaacctggagtagggattgaaatagagaaatatagaggaagactgcccattaaccattaatctctttttctgtacaccaaaggaagttggtagtgacttggcatgtattaata

SEQ ID NO: 380957 - DNA, 120 bp, Artificial Sequence
  ENSG00000143549_69 (sequence is synthesized)
tcatgtgcactgtcctatgccacagctaggcaaagtgggtcaaactctagaattggttttttaaatttaatcttttcctttaagaagactttaccaaatagtctgcaatttgtacccttc

SEQ ID NO: 380958 - DNA, 120 bp, Artificial Sequence
  ENSG00000143549_70 (sequence is synthesized)
tacctccaatttattagtcttaaacctttagtctgtgggtttaaatggaagccatgatttcagaagggcaagatgtatgtcatttcatggctactttccacagttctttttgccactcaa

SEQ ID NO: 380959 - DNA, 120 bp, Artificial Sequence
  ENSG00000143549_71 (sequence is synthesized)
gttgtcgggtatttatccaataaatgaagttgtggaataaccatatctgaacattgaccaatgtcaggagctttctaaatactttctgtccctgcaagttggtaactgccatccaccctg

SEQ ID NO: 380960 - DNA, 120 bp, Artificial Sequence
  ENSG00000143549_72 (sequence is synthesized)
acaagggaacgtactctttgctttgagaactctgatgtatgctcctttggtacactctcttggcagagttgcaggggcagcctgtggagcagaggggccactaataggttcacattttgt

SEQ ID NO: 380961 - DNA, 120 bp, Artificial Sequence
  ENSG00000143549_73 (sequence is synthesized)
aggcagagaagtgtctgaatatggatatatactctctccctttgctatttttgttcaattaagtgttatcactgctaggaattgggtacctggatgggagtggtatcctcttgagtgctt

SEQ ID NO: 380962 - DNA, 120 bp, Artificial Sequence
  ENSG00000143549_74 (sequence is synthesized)
agtcgtgagtatctagctccccaaatcttgtcattaccaatttatcccttcccctttggcttgggcactaatatgaataaattagcattccttcaaccttgttaaacagggcctagggaa

SEQ ID NO: 380963 - DNA, 120 bp, Artificial Sequence
  ENSG00000143549_75 (sequence is synthesized)
tgggagtcatctatagtgcttttttaggcccaagaatggttttaggcttccttattctcctgactagtgacaagtgacaaaagaggctttcttattttttgttggtagggtttacaaatt

SEQ ID NO: 380964 - DNA, 120 bp, Artificial Sequence
  ENSG00000143549_76 (sequence is synthesized)
aatagcatctttgtgggtggtagcaacaggatttattctttattattattatttttgagatgaagtttcattcttgttgcctgggctggagcgtaatggctcgatctcggctcactgcaa

SEQ ID NO: 380965 - DNA, 120 bp, Artificial Sequence
  ENSG00000143549_77 (sequence is synthesized)
cctcagcttcccaaaatgctgggattacgggcgtgagccaccgcacccagctggagcaacaggatttaatatagagcaaatgtttagttttatcatctgtaaaatggagataagtattgt

SEQ ID NO: 380966 - DNA, 120 bp, Artificial Sequence
  ENSG00000143549_78 (sequence is synthesized)
tcatctgtaaaatggagataagtattgtcagagtaaacatgaagattagaaagaacacttaatgtgctgggccttttataggttaacactgacatctcaggctgaactatatacattttc

SEQ ID NO: 380967 - DNA, 120 bp, Artificial Sequence
  ENSG00000143549_79 (sequence is synthesized)
cttcacaaccatatcaatccttataaactatggatttatgctccttaaaacaatatataatgctgatcactactataaatgcgtggttttaaccaactgtactgaaacagctttgagttt

SEQ ID NO: 380968 - DNA, 120 bp, Artificial Sequence
  ENSG00000143549_80 (sequence is synthesized)
atattctgtttggatatttggagaaaacaacaagtgctctcaagagtatttgcttagaggccggctgtgtgagtggataactttgaaagctgcttttgagacgccagtgtctggcatttc

SEQ ID NO: 380969 - DNA, 120 bp, Artificial Sequence
  ENSG00000143549_81 (sequence is synthesized)
ctgcattctggcctggaggccggacgtgaatctgacttctagtaaaaatacacggttcccttgacaaagtcgagctgtttatcccagagactgcacaattttccgttgataggcatggac

SEQ ID NO: 380970 - DNA, 120 bp, Artificial Sequence
  ENSG00000143549_82 (sequence is synthesized)
caatgctaactggaaatcattgcaaaaagtttttttgtcgggcggagggtgtggtgttaagataaacagtgtgcaacagaagaaattaaaactggaagaaattaaagggttttttttaga

SEQ ID NO: 380971 - DNA, 67 bp, Artificial Sequence
  ENSG00000143549_83 (sequence is synthesized)
gccctcaatgacatgacctctataattgaccaggctgctttgagggataaagatcctgataacagat

SEQ ID NO: 380972 - DNA, 120 bp, Artificial Sequence
  ENSG00000143549_84 (sequence is synthesized)
cttctgactgggtggaaaaaagggaagtgaaagaaaagttgtgggatatgaatatgggtctgtgttgccatcaccttctctgagttgaagatttgagtattttcctcacctctttagagc

SEQ ID NO: 380973 - DNA, 120 bp, Artificial Sequence
  ENSG00000143549_85 (sequence is synthesized)
agtcagagtggtttgcttgctagacagattagattctccttaatgttcagctgctgattttctttctgacttttgcgtcctttttctggttttatgttaatttcaagtaactgtcacaag

SEQ ID NO: 380974 - DNA, 120 bp, Artificial Sequence
  ENSG00000143549_86 (sequence is synthesized)
ctagttctgttcaatagctctgcagcaatctcaaggtttgcttacaactacttgtttcagtagtattcttggctttgttttctttagagattatttgacttaactgtgagcgccctttta

SEQ ID NO: 380975 - DNA, 120 bp, Artificial Sequence
  ENSG00000143549_87 (sequence is synthesized)
tttatcccatcagttattactttggcctctactttttcgaaaaaacatgtagtgcatgaggatcttcctgtgctctttataatctgagattctgatgtttctattgtttgcaatgttcaa

SEQ ID NO: 380976 - DNA, 120 bp, Artificial Sequence
  ENSG00000143549_88 (sequence is synthesized)
gggcaaaacctagaaaagtggatggctgatggttaaggcttgctctttcattgactgaaagctgaaagtgttggttgggtgtgggagggagaggaaatggctgataagggccctaactcc

SEQ ID NO: 380977 - DNA, 120 bp, Artificial Sequence
  ENSG00000143549_89 (sequence is synthesized)
ctcacccaggaagtgcagcaacacctacaacttcagtaggcaagccaaaggccctacaaaactgggtgatgtaatagctcacttctgtggctgagaaggcagctgctttatcagtctgca

SEQ ID NO: 380978 - DNA, 120 bp, Artificial Sequence
  ENSG00000143549_90 (sequence is synthesized)
gcttctctgcaacaggagcaagtctcaaagagcgggtagaccttgaaatttacttctagttcttgtaacttctctcctttacccccattagataaactgaaatgcaccaaagaggagcac

SEQ ID NO: 380979 - DNA, 60 bp, Artificial Sequence
  ENSG00000143549_91 (sequence is synthesized)
ctgaggctgaggtggcctccttgaaccgtaggatccagctggttgaagaagagctggacc

SEQ ID NO: 380980 - DNA, 120 bp, Artificial Sequence
  ENSG00000143549_92 (sequence is synthesized)
gagaaatttcccatgtgggaatccggctggatccctgtgagggaagacccttggagaacgcagcctggagttctggtaaaaagccctagaagaggagaggactcctgtggactgcaggct

SEQ ID NO: 380981 - DNA, 120 bp, Artificial Sequence
  ENSG00000143549_93 (sequence is synthesized)
gcttcctggcagaagtttcctctcttaccctcagtctaaagccttagtttcaattctgccaggcaaggtggggaactataagtcttctcttctggagcccacgatggagcctgccaggga

SEQ ID NO: 380982 - DNA, 120 bp, Artificial Sequence
  ENSG00000143549_94 (sequence is synthesized)
ggatgagcagattagactgatggaccagaacctgaagtgtctgagtgctgctgaagaaaaggcagagacccgtgctgagtttgctgagagatcggtagccaagctggaaaagacaattga

SEQ ID NO: 380983 - DNA, 120 bp, Artificial Sequence
  ENSG00000143549_95 (sequence is synthesized)
agcaagctgaagctgagcagaagcaggcagaagaaagaagtaaacagactgcctttgtgaccttgggaaagtcagtgagccacagtatgtctgctgaatttaagtagaaatggaccatgt

SEQ ID NO: 380984 - DNA, 120 bp, Artificial Sequence
  ENSG00000143549_96 (sequence is synthesized)
ttgtggccaggagcaagcaagaagaaaggtttctttcctcaaagctagagtcagcaaactaccacctgtgggttaaatcttgcaacagcctggttttgtaaataaagttttatcggaaca

SEQ ID NO: 380985 - DNA, 120 bp, Artificial Sequence
  ENSG00000143549_97 (sequence is synthesized)
ctaatacatggtgaacagttaattggaagatcctactgggtccttccacctggggtggaagacatcaaagtggctatcctgatttaagatctagtgtctggctgggtgtggtggctcaaa

SEQ ID NO: 380986 - DNA, 120 bp, Artificial Sequence
  ENSG00000143549_98 (sequence is synthesized)
cctgtagtcccagctacttagtatgccaaggcaggaaggttgcttgaacccaggagttggaggccagcctgggcgtcatagggagaccctgtccctaaaacaaataaatttaaaaaaaaa

SEQ ID NO: 380987 - DNA, 120 bp, Artificial Sequence
  ENSG00000143549_99 (sequence is synthesized)
atctggtgtctgttttggccactttgccaatctgctagggaaccttagggcaagggtagatattaactgctctcccgtcggtaccttctgggccttgattaacaaagtcagtgctgaatg

SEQ ID NO: 380988 - DNA, 120 bp, Artificial Sequence
  ENSG00000143549_100 (sequence is synthesized)
catatgtatttgtgcttccctcttacattcccgtctgccagacataacatatcatgaccatggtggtgttctcttcccattttttgaatttttttttttcgttttgctgcttgttttctt

SEQ ID NO: 380989 - DNA, 120 bp, Artificial Sequence
  ENSG00000143549_101 (sequence is synthesized)
gctgtgttcctttttgacctttctccctccccacaacctggcttgtgccatccccgtgactatcactaacagccgttgccgagagatggatgagcagattagactgatggaccagaacct

SEQ ID NO: 380990 - DNA, 120 bp, Artificial Sequence
  ENSG00000143549_102 (sequence is synthesized)
ggtgatttgggggactgtttgggttgggcatttgttcccacctccaccccaggtagcagttatgacttgttcctggtagtggatttctctcaagtgctttattagtattcaaacattttt

SEQ ID NO: 380991 - DNA, 120 bp, Artificial Sequence
  ENSG00000143549_103 (sequence is synthesized)
gagcccaggaaggtctagctcctgacacgttctatggtagagggaggagggttgatgcttgctcaggttacttgggaacatctcttccccagtatgccttccaactctctctacatatag

SEQ ID NO: 380992 - DNA, 120 bp, Artificial Sequence
  ENSG00000143549_104 (sequence is synthesized)
gttcaattcacgtctatgtgtctctctccctttttttattctcttccttttcccttttcctctcctgtggtatttaaaatattcacagtaagtgttctgagctggaggaggagctgaaga

SEQ ID NO: 380993 - DNA, 120 bp, Artificial Sequence
  ENSG00000143549_105 (sequence is synthesized)
atgtcaccaacaacctcaagtctcttgaggctcaggcggagaaggtaggggctggtttgtgaaagtgacaggctttggggcctgggcccagccctgcccttgatgaaagactggagacac

SEQ ID NO: 380994 - DNA, 120 bp, Artificial Sequence
  ENSG00000143549_106 (sequence is synthesized)
tctgtgcactttgattgctttaattaaaataacttcttggtctcaggttactggagtcatgtgctccttaggctgatactgctgtgctgaaaagcaataatcaagggccctaacaggctt

SEQ ID NO: 380995 - DNA, 120 bp, Artificial Sequence
  ENSG00000143549_107 (sequence is synthesized)
tctagcagacagatgggggcaacagacagaatcagctctgagacctaatgagcaatcaagacagatgacttcactttgccatcatgtgggtgtgtttcagtcatgtgaccttggggtgct

SEQ ID NO: 380996 - DNA, 120 bp, Artificial Sequence
  ENSG00000143549_108 (sequence is synthesized)
ataccatgccaaatagaatgagaatttgtgccatcttgcccatcccttccactccgacagttccattcattgacttccaggagacgggagagagaacctacctacctgagccgactttga

SEQ ID NO: 380997 - DNA, 120 bp, Artificial Sequence
  ENSG00000143549_109 (sequence is synthesized)
aaggagactgagtggggctcttttgaacctgaggcccagaaagtcttttagacttttcttataacttggttttggagtttgtcgtggggctgaggctgaggtggcctccttgaaccgtag

SEQ ID NO: 380998 - DNA, 120 bp, Artificial Sequence
  ENSG00000143552_0 (sequence is synthesized)
acgcctgtggattggctgatggagctgtgagccggctgtagttgagcgggaacccgagacctggcagtcgccatgactggctgtccggcgtcatcaagacgccgaggcttcgggctcttt

SEQ ID NO: 380999 - DNA, 120 bp, Artificial Sequence
  ENSG00000143552_1 (sequence is synthesized)
ttcttcttgcgtctacaccgcctcctgttgttgtttctggttttgcgtgggaccctggccaacaaacttaacgtgccacaggtgttgctacccttcggccgagagccaggccgggtgcct

SEQ ID NO: 381000 - DNA, 120 bp, Artificial Sequence
  ENSG00000143552_2 (sequence is synthesized)
ttcctgctggaggcccagcggggctgctacacttggcattccacccatcatgatgcagttactgttgagcctttatatgaaaatggcaccttgtgttcccaaaaagctgtactcattgct

SEQ ID NO: 381001 - DNA, 120 bp, Artificial Sequence
  ENSG00000143552_3 (sequence is synthesized)
gaatctacgcaaccgatacgcctcagcagtattattcttgctcgagaaatagtgactgaccatgagctacgctgtgatgttaaggttgatgtgataaacagcattgaaattgtatctcgg

SEQ ID NO: 381002 - DNA, 120 bp, Artificial Sequence
  ENSG00000143552_4 (sequence is synthesized)
gcccgggaactttatgtagatgattcgccactggaactgatggtgagggcattggatgctgaaggaaatacttttagtagtttggcagggatgatgtttgagtggagcattgcccaggac

SEQ ID NO: 381003 - DNA, 120 bp, Artificial Sequence
  ENSG00000143552_5 (sequence is synthesized)
aacgagtcagcaagagaagaactgtctagcaaaattaggattcttaaatactccgaagcagaatatgctcccccaatatatatagctgagatggaaaaagaggagaaacaaggagatgtg

SEQ ID NO: 381004 - DNA, 120 bp, Artificial Sequence
  ENSG00000143552_6 (sequence is synthesized)
attttagtgtctgggattagaactggtgctgctgttgtaaaagttcgaattcatgaaccattctataagaaagtggcagcagccttaatacgtctgcttgttttggagaatatatttctt

SEQ ID NO: 381005 - DNA, 120 bp, Artificial Sequence
  ENSG00000143552_7 (sequence is synthesized)
ataccatcccatgatatttatctcttagtaggaacatatattaaataccaagttgcaaaaatggttcaagggagagtgacagaggtgaaatttcccctggaacattatatactggaattg

SEQ ID NO: 381006 - DNA, 120 bp, Artificial Sequence
  ENSG00000143552_8 (sequence is synthesized)
caagaccatagagttgcacttaacgggtctcattctgagaaagtggctatactggatgacaaaacagccatggtgactgcctcacaactgggccagactaatcttgtctttgtccataaa

SEQ ID NO: 381007 - DNA, 120 bp, Artificial Sequence
  ENSG00000143552_9 (sequence is synthesized)
aatgttcatatgcgatctgtgtctggactcccaaattgcaccatatatgttgtagagcctggatttttaggtttcactgtccaacctggaaaccgatggagtctagaggtgggacaggta

SEQ ID NO: 381008 - DNA, 120 bp, Artificial Sequence
  ENSG00000143552_10 (sequence is synthesized)
tatgtcattacagtagacgtctttgataaaagcagcacaaaggtctatatttcagataatctcaggattacatacgactttcctaaggagtactttgaagagcaactaactaccgtgaat

SEQ ID NO: 381009 - DNA, 120 bp, Artificial Sequence
  ENSG00000143552_11 (sequence is synthesized)
ggatcttaccatatagtaaaagccctgaaagatggtgttgtggtaataaatgcatccctgacctccatcatttaccagaataaagatattcagcctataaaatttctaatcaaacaccaa

SEQ ID NO: 381010 - DNA, 120 bp, Artificial Sequence
  ENSG00000143552_12 (sequence is synthesized)
caagaagtgaagatttattttcccatcatgcttacacccaaatttctggcatttcctcatcatcctatgggaatgttatatcgttataaagtacaggtagagggtggcagtggcaacttt

SEQ ID NO: 381011 - DNA, 120 bp, Artificial Sequence
  ENSG00000143552_13 (sequence is synthesized)
acctggacttcttctaatgaaacagtggtcatagtaaccacgaaaggagtggtgactgcaggtcaggtcagggggaatagtactgttttggcccgagatgtacaaaatccctttcgatat

SEQ ID NO: 381012 - DNA, 120 bp, Artificial Sequence
  ENSG00000143552_14 (sequence is synthesized)
ggagaaattaagatacatgtcctgaaactgaacaaaatggaactgttaccatttcatgctgatgtggagattggccagattatagaaatacccattgcaatgtatcacataaataaagag

SEQ ID NO: 381013 - DNA, 120 bp, Artificial Sequence
  ENSG00000143552_15 (sequence is synthesized)
accaaagaagccatggcattcacagactgctctcatttatccttggatctgaacatggataaacaaggagtctttactcttctcaaagaaggtattcaaagacctggaccaatgcattgt

SEQ ID NO: 381014 - DNA, 120 bp, Artificial Sequence
  ENSG00000143552_16 (sequence is synthesized)
tccagtacacatatcgcagctaaatctcttggccatactctggtaacagtaagtgtgaatgaatgtgacaagtacttggagagcagtgctacatttgctgcttatgaacccctaaaggct

SEQ ID NO: 381015 - DNA, 120 bp, Artificial Sequence
  ENSG00000143552_17 (sequence is synthesized)
ttaaatcctgtggaagtggcattggtgacatggcagtctgtgaaggaaatggtatttgaagggggtcctcgtccatggatcttggagccctcccgattttttttggaattgaatgcggag

SEQ ID NO: 381016 - DNA, 120 bp, Artificial Sequence
  ENSG00000143552_18 (sequence is synthesized)
aagacagagaagattggaatagcacaagtgtggctgccatctaagagaaaacagaaccagtacatctaccggatccaatgcctggatttaggggaacaagttctcacattccgaattgga

SEQ ID NO: 381017 - DNA, 120 bp, Artificial Sequence
  ENSG00000143552_19 (sequence is synthesized)
aatcatccaggtgtcctgaaccctagtccagctgtagaggttttgcaggttcgcttcatttgtgcccaccctgccagtatgtcagtaactccagtatacaaggtgccagctggtgcccag

SEQ ID NO: 381018 - DNA, 120 bp, Artificial Sequence
  ENSG00000143552_20 (sequence is synthesized)
ccatgtcctctgccacagcacaacaaatggctgattcctgtatcaagactgagggacacagtcctggaactagcagtgtttgatcaacataggagaaagtttgataatttcagttcacta

SEQ ID NO: 381019 - DNA, 120 bp, Artificial Sequence
  ENSG00000143552_21 (sequence is synthesized)
atgctagaatggaaatcctccaatgaaacactagcccatttcgaagattataaatcagtggaaatggtagcaaaagatgatggcagtgggcagacccggttacatggtcatcagatcctt

SEQ ID NO: 381020 - DNA, 120 bp, Artificial Sequence
  ENSG00000143552_22 (sequence is synthesized)
aaagtacatcagataaaagggactgtactgattggagtcaattttgtgggctattcagagaagaaaagcccaaaagaaatttccaacttgcccagatctgtagatgtggaactgctcctg

SEQ ID NO: 381021 - DNA, 120 bp, Artificial Sequence
  ENSG00000143552_23 (sequence is synthesized)
gtagatgatgtaactgtagtgcctgagaatgccaccatctataaccaccctgatgtaaaggaaacatttagccttgtggaaggatctggttattttttagtcaacagcagtgagcagggt

SEQ ID NO: 381022 - DNA, 120 bp, Artificial Sequence
  ENSG00000143552_24 (sequence is synthesized)
atcacttacatggaagcagaaagctctgttgagttagttccattacatcctggattttttaccttggaggtctatgatctttgtttggctttcttgggtccagcaacagcccacctcagg

SEQ ID NO: 381023 - DNA, 120 bp, Artificial Sequence
  ENSG00000143552_25 (sequence is synthesized)
gtgtcagacatacaagagctggagcttgatctgattgataaggttgaaatagacaaaactgtgttagtgactgtgagggttcttggctcttccaaacgcccattccaaaataaatacttc

SEQ ID NO: 381024 - DNA, 120 bp, Artificial Sequence
  ENSG00000143552_26 (sequence is synthesized)
agaaacatggaactcaaactgcagttggcttctgccattgtcaccctgacaccaatggagcaacaggacgaatactctgaaaattatattcttcgagctaccactattgggcaaaccaca

SEQ ID NO: 381025 - DNA, 120 bp, Artificial Sequence
  ENSG00000143552_27 (sequence is synthesized)
cttgtggctattgccaaggacaagatgggaagaaaatacacatcaactcctcggcacattgaagtgtttcctccattcagacttcttccagagaaaatgacactgattccaatgaatatg

SEQ ID NO: 381026 - DNA, 120 bp, Artificial Sequence
  ENSG00000143552_28 (sequence is synthesized)
atgcaggtaatgtctgaaggtggcccccagccccaatccatcgttcacttctccatcagtaatcagaccgtggctgttgttaataggagggggcaagttacagggaagattgttggcaca

SEQ ID NO: 381027 - DNA, 120 bp, Artificial Sequence
  ENSG00000143552_29 (sequence is synthesized)
gctgtggttcatggcaccatccagacagtaaatgaagatactggcaaagtcattgtgttttctcaggatgaagtacagattgaagttgttcagctaagggctgttaggatccttgcagct

SEQ ID NO: 381028 - DNA, 120 bp, Artificial Sequence
  ENSG00000143552_30 (sequence is synthesized)
gcaactcggctcatcacagctaccaagatgccagtttatgtcatgggagtaaccagtacccagacccctttctccttcagcaatgctaatcctgggctcacattccactggtctatgagc

SEQ ID NO: 381029 - DNA, 120 bp, Artificial Sequence
  ENSG00000143552_31 (sequence is synthesized)
aaaagggatgtattggatctagtgcccaggcattcagaggtttttctacagctcccagtagagcataactttgccatggttgtccatacaaaagcagcaggcaggaccagtatcaaggtc

SEQ ID NO: 381030 - DNA, 120 bp, Artificial Sequence
  ENSG00000143552_32 (sequence is synthesized)
actgttcactgcatgaacagttcctctgggcagtttgaggggaatttgttggaactctctgatgaagtacagatcctggtgtttgaaaaactccaactcttctatccagagtgccaacca

SEQ ID NO: 381031 - DNA, 120 bp, Artificial Sequence
  ENSG00000143552_33 (sequence is synthesized)
gagcagattctgatgcctataaattctcagctcaaactccataccaacagggaaggagctgccttcgtgagttctcgtgttctcaagtgtttccctaattcatccgtcattgaggaggat

SEQ ID NO: 381032 - DNA, 120 bp, Artificial Sequence
  ENSG00000143552_34 (sequence is synthesized)
ggtgaagggctcctgaaagctggttccattgcaggtactgctgtattggaagtcacttctatagaaccttttggagtcaaccaaacaaccataactggggtccaggtagcaccggtgaca

SEQ ID NO: 381033 - DNA, 120 bp, Artificial Sequence
  ENSG00000143552_35 (sequence is synthesized)
tacctgcgagtgagcagccaacccaagctatacacagcccaaggaaggaccctgtcagcatttcccttgggcatgtctcttaccttcactgttcagttttataatagtatcggagagaaa

SEQ ID NO: 381034 - DNA, 120 bp, Artificial Sequence
  ENSG00000143552_36 (sequence is synthesized)
ttccacacacacaatacccagctttatctggctctgaacagagatgacttgctgcatattggaccagggaataagaactatacttacatggcccaggctgtgaacagagggctgacactt

SEQ ID NO: 381035 - DNA, 120 bp, Artificial Sequence
  ENSG00000143552_37 (sequence is synthesized)
gtggggctttgggaccggagacatccaggcatggcagattatattcctgttgctgtagagcatgccattgagccagacaccaagcttacctttgttggagatatcatctgcttcagtact

SEQ ID NO: 381036 - DNA, 120 bp, Artificial Sequence
  ENSG00000143552_38 (sequence is synthesized)
caccttgtcagccagcatggtgaacctgggatatggatgatttctgccaacaatattctacagacagacattgtcactggagtaggagtggccaggagtccggggactgcaatgattttt

SEQ ID NO: 381037 - DNA, 120 bp, Artificial Sequence
  ENSG00000143552_39 (sequence is synthesized)
catgacatcccaggagtagtgaaaacatatcgagaggtggtggtcaatgcatcatcaagattaatgctcagttatgacctcaagacttatctcaccaataccctcaattcaactgtattc

SEQ ID NO: 381038 - DNA, 120 bp, Artificial Sequence
  ENSG00000143552_40 (sequence is synthesized)
aagctcttcatcaccactggcagaaatggtgtcaatcttaaaggattctgtaccccaaaccaggccttggccattacaaaagtacttcttccagcgaccctcatgctgtgccatgtacag

SEQ ID NO: 381039 - DNA, 120 bp, Artificial Sequence
  ENSG00000143552_41 (sequence is synthesized)
ttcagtaatactttgctagacattccagcaagtaaagtctttcaggtccattcagatttcagtatggagaaaggggtttatgtctgcataatcaaggttcgaccgcagtcagaggagctg

SEQ ID NO: 381040 - DNA, 120 bp, Artificial Sequence
  ENSG00000143552_42 (sequence is synthesized)
ctacaggccctcagtgtggctgacacctcagtctatgggtgggctacactggtcagtgaacgtagcaagaatggaatgcaacgaatcctcattcctttcatcccagccttttatattaac

SEQ ID NO: 381041 - DNA, 120 bp, Artificial Sequence
  ENSG00000143552_43 (sequence is synthesized)
cagtcagaattggttcttagccacaaacaagatatcggggagataagagtactgggagtggacagagttcttaggaagctagaggtcatctccagctccccagttctagtggtcgctggc

SEQ ID NO: 381042 - DNA, 120 bp, Artificial Sequence
  ENSG00000143552_44 (sequence is synthesized)
catagccactctcccctcactcctggcctggccatttactctgtaagagtggtcaacttcacttccttccagcaaatggcatcacctgttttcatcaatatttcctgtgtactcaccagt

SEQ ID NO: 381043 - DNA, 120 bp, Artificial Sequence
  ENSG00000143552_45 (sequence is synthesized)
caaagtgaggcagtggtagtgagggctatgaaagataagttgggtgcagatcactgtgaagattccgccatcctcaagcggttcactggctcttaccagatcctgctcttgaccctcttt

SEQ ID NO: 381044 - DNA, 120 bp, Artificial Sequence
  ENSG00000143552_46 (sequence is synthesized)
gcagtgctggcatcaacagcttccatcttcctagcatacaatgccttcctaaacaagatacaaacagttccagttgtgtatgtaccaactctaggaacaccacagccaggtttttttaac

SEQ ID NO: 381045 - DNA, 120 bp, Artificial Sequence
  ENSG00000143552_47 (sequence is synthesized)
tccacaagttctccccctcacttcatgagtctacaacctccattggcccaaagtcggctgcaacattggttatggagtataaggcactaacctctgcttggacaagtttctcttaactgc

SEQ ID NO: 381046 - DNA, 120 bp, Artificial Sequence
  ENSG00000143552_48 (sequence is synthesized)
aggggaatgaagatttctagtcctcgacaagaagcctaacagcaacttctacattaagtttccagataaggcttctgagaactataaataaagcatcctaagctgtttcttaaaactggt

SEQ ID NO: 381047 - DNA, 120 bp, Artificial Sequence
  ENSG00000143553_0 (sequence is synthesized)
gcggccctcgcggcaggtttcgggcttcaggacaattcgtgatggcgggggctggttccgccgctgtatcgggggcagggaccccggtggcggggcccacaggccgcgaccttttcgccg

SEQ ID NO: 381048 - DNA, 120 bp, Artificial Sequence
  ENSG00000143553_1 (sequence is synthesized)
aagggctgctggagttcctgcgacccgctgtgcagcagctcgactctcacgtacacgccgtcagagagagccaggtagagctccgggaacaaattgacaacctagccacagaactgtgcc

SEQ ID NO: 381049 - DNA, 120 bp, Artificial Sequence
  ENSG00000143553_2 (sequence is synthesized)
gcataaatgaggatcagaaggtggccctggatcttgacccctatgttaagaagctacttaatgcccggcgacgcgttgtcttggttaacaacattctacagaatgctcaggaacgactga

SEQ ID NO: 381050 - DNA, 120 bp, Artificial Sequence
  ENSG00000143553_3 (sequence is synthesized)
gacggctaaaccacagtgttgccaaggaaacagcccgcaggagagcaatgctggattcgggaatttacccccctggctccccaggcaaataacagatgagcctatggactcagtagcaca

SEQ ID NO: 381051 - DNA, 120 bp, Artificial Sequence
  ENSG00000143553_4 (sequence is synthesized)
tcctaggagacagtccccatagaccttcagacattaaaaagggagccgtacagtttgtttgaagcacttcgtcttacccatttatgtaggggccccaggaaacctacacacagccagaat

SEQ ID NO: 381052 - DNA, 120 bp, Artificial Sequence
  ENSG00000143553_5 (sequence is synthesized)
gaggttcccaaaggacttacattaattatggctcttgcttcctttcacaaatgagctgaggcctctacttttttttttaagctgcatacgtgaggcttaccttcttcaggactagttaac

SEQ ID NO: 381053 - DNA, 120 bp, Artificial Sequence
  ENSG00000143553_6 (sequence is synthesized)
cagaggggcttcctttgtatgttacatgcctggttacatgggcctggacagcatgtcctctacctgtgacttctcattttcctgtttacactggggatttggagggggcaggcaaagtca

SEQ ID NO: 381054 - DNA, 120 bp, Artificial Sequence
  ENSG00000143553_7 (sequence is synthesized)
aagtgaatgacctctgtccacccacttttttattgcactggcttgaatacagtagcagtgttgatagaatcattttattcaataaatacttaaaatgatattctagtttactctggtata

SEQ ID NO: 381055 - DNA, 120 bp, Artificial Sequence
  ENSG00000143553_8 (sequence is synthesized)
tggagttcctgcgacccgctgtgcagcagctcgactctcacgtacacgccgtcaggtgcccgggagggaagttgggggcggggcctgtctctctggctttgtaggggcggggccaagaaa

SEQ ID NO: 381056 - DNA, 120 bp, Artificial Sequence
  ENSG00000143553_9 (sequence is synthesized)
aggcggggaggacaggcgggaaggccgcaggtggagggttcagcggaggccggcttctctcagtacttggtaaatacgtaggggagttcgtttcctgagctccggtaactgcctgacctt

SEQ ID NO: 381057 - DNA, 120 bp, Artificial Sequence
  ENSG00000143553_10 (sequence is synthesized)
ccggaattcttcagcccactttcaggaccttaggtttttgccaacccctgggctgagtttctgtcacttgcttccagggcatcagggctgccaaaggactcctcctttcagggatgtctt

SEQ ID NO: 381058 - DNA, 120 bp, Artificial Sequence
  ENSG00000143553_11 (sequence is synthesized)
tctaatggctgtggcccgtttgggtgcaagtgttttccatcccattaccagcctgctttccctcagaacaagagataagccgttagatcttagctgcaccttacttccatccccagaact

SEQ ID NO: 381059 - DNA, 120 bp, Artificial Sequence
  ENSG00000143554_0 (sequence is synthesized)
aaaaggtctgtcatcctccagttgaagtctgtgtgcctaccaagaatggccggaggactcgctgcttgacgggagggatgctccagcttggtctccagggacaactgtacctggagataa

SEQ ID NO: 381060 - DNA, 120 bp, Artificial Sequence
  ENSG00000143554_1 (sequence is synthesized)
agtctggataccagggagggacagagatgctcttccttccacagtgtggccacttgctgggccatgtgaaccagcagaggagagttccttggctatgctgttgttcccccgctgtccagg

SEQ ID NO: 381061 - DNA, 120 bp, Artificial Sequence
  ENSG00000143554_2 (sequence is synthesized)
gagaatggaggtggactgaggagtgaagtttgggcgaactgcacagagctgctcctcttcaccccgaaaatttgtctttttacagaatccaggttctcccctccctcatcactgctgttg

SEQ ID NO: 381062 - DNA, 120 bp, Artificial Sequence
  ENSG00000143554_3 (sequence is synthesized)
cttcctttgaaagtctaaaccactggaggcttctttttccttcctctctccttccccagtttcctctgtcccaattaaaaccaggatggagagcatttgctggctggccccaattattgt

SEQ ID NO: 381063 - DNA, 120 bp, Artificial Sequence
  ENSG00000143554_4 (sequence is synthesized)
acccttgcccaaagggaggggcctctgtcgtgacccctcagaaatctggcagtctgggtttccacctttcccctatttaactctcagcccccacccatcccctggggttgcggctggcag

SEQ ID NO: 381064 - DNA, 120 bp, Artificial Sequence
  ENSG00000143554_5 (sequence is synthesized)
gccgggacttgcagaaccaaatgggccaggggccaagttcattcttttgggagagagcaatggtaccttcccttaacgggaaaacgagaaatattgaggggaagatggactgcgatccaa

SEQ ID NO: 381065 - DNA, 120 bp, Artificial Sequence
  ENSG00000143554_6 (sequence is synthesized)
acgccctggctctcaggcctggactctagggcttagccagatgcctaaaccgcccaagccgagaaacaacttagaagacagacataaccctgggattcagggaaggcgcgagcaccgccc

SEQ ID NO: 381066 - DNA, 120 bp, Artificial Sequence
  ENSG00000143554_7 (sequence is synthesized)
aggacctggtagggtgcgagccgcgagcagtccgggagggagcgcgcctagggcggagcgtaggctgtggggggagggctgggagtccggggccgccccacacccgcactcctcccgggt

SEQ ID NO: 381067 - DNA, 120 bp, Artificial Sequence
  ENSG00000143554_8 (sequence is synthesized)
ttctgctctccgcccgtgtggagtggtgggggcctgggtgggaatgggcgtgtgccagcgcacgcgcgctccctggaaggagaagtctcagctagaacgagcggccctaggttttcggaa

SEQ ID NO: 381068 - DNA, 120 bp, Artificial Sequence
  ENSG00000143554_9 (sequence is synthesized)
gggaggatcagggatgtttgcgagcggctggaaccagacggtgccgatagaggaagcgggctccatggctgccctcctgctgctgcccctgctgctgttgctaccgctgctgctgctgaa

SEQ ID NO: 381069 - DNA, 120 bp, Artificial Sequence
  ENSG00000143554_10 (sequence is synthesized)
gctacacctctggccgcagttgcgctggcttccggcggacttggcctttgcggtgcgagctctgtgctgcaaaagggctcttcgagctcgcgccctggccgcggctgccgccgacccgga

SEQ ID NO: 381070 - DNA, 120 bp, Artificial Sequence
  ENSG00000143554_11 (sequence is synthesized)
aggtcccgaggggggctgcagcctggcctggcgcctcgcggaactggcccagcagcgcgccgcgcacacctttctcattcacggctcgcggcgctttagctactcagaggcggagcgcga

SEQ ID NO: 381071 - DNA, 120 bp, Artificial Sequence
  ENSG00000143554_12 (sequence is synthesized)
gagtaacagggctgcacgcgccttcctacgtgcgctaggctgggactggggacccgacggcggcgacagcggcgaggggagcgctggagaaggcgagcgggcagcgccgggagccggaga

SEQ ID NO: 381072 - DNA, 120 bp, Artificial Sequence
  ENSG00000143554_13 (sequence is synthesized)
tggcccagagtttctgtggctctggttcgggctggccaaggccggcctgcgcactgcctttgtgcccaccgccctgcgccggggccccctgctgcactgcctccgcagctgcggcgcgcg

SEQ ID NO: 381073 - DNA, 120 bp, Artificial Sequence
  ENSG00000143554_14 (sequence is synthesized)
cgcgctggtgctggcgccagagtttctggagtccctggagccggacctgcccgccctgagagccatggggctccacctgtgggctgcaggcccaggaacccaccctgctggaattagcga

SEQ ID NO: 381074 - DNA, 120 bp, Artificial Sequence
  ENSG00000143554_15 (sequence is synthesized)
tttgctggctgaagtgtccgctgaagtggatgggccagtgccaggatacctctcttccccccagagcataacagacacgtgcctgtacatcttcacctctggcaccacgggcctccccaa

SEQ ID NO: 381075 - DNA, 120 bp, Artificial Sequence
  ENSG00000143554_16 (sequence is synthesized)
ggctgctcggatcagtcatctgaagatcctgcaatgccagggcttctatcagctgtgtggtgtccaccaggaagatgtgatctacctcgccctcccactctaccacatgtccggttccct

SEQ ID NO: 381076 - DNA, 120 bp, Artificial Sequence
  ENSG00000143554_17 (sequence is synthesized)
gctgggcatcgtgggctgcatgggcattggggccacagtggtgctgaaatccaagttctcggctggtcagttctgggaagattgccagcagcacagggtgacggtgttccagtacattgg

SEQ ID NO: 381077 - DNA, 120 bp, Artificial Sequence
  ENSG00000143554_18 (sequence is synthesized)
ggagctgtgccgataccttgtcaaccagcccccgagcaaggcagaacgtggccataaggtccggctggcagtgggcagcgggctgcgcccagatacctgggagcgttttgtgcggcgctt

SEQ ID NO: 381078 - DNA, 120 bp, Artificial Sequence
  ENSG00000143554_19 (sequence is synthesized)
cgggcccctgcaggtgctggagacatatggactgacagagggcaacgtggccaccatcaactacacaggacagcggggcgctgtggggcgtgcttcctggctttacaagcatatcttccc

SEQ ID NO: 381079 - DNA, 120 bp, Artificial Sequence
  ENSG00000143554_20 (sequence is synthesized)
cttctccttgattcgctatgatgtcaccacaggagagccaattcgggacccccaggggcactgtatggccacatctccaggtgagccagggctgctggtggccccggtaagccagcagtc

SEQ ID NO: 381080 - DNA, 120 bp, Artificial Sequence
  ENSG00000143554_21 (sequence is synthesized)
cccattcctgggctatgctggcgggccagagctggcccaggggaagttgctaaaggatgtcttccggcctggggatgttttcttcaacactggggacctgctggtctgcgatgaccaagg

SEQ ID NO: 381081 - DNA, 120 bp, Artificial Sequence
  ENSG00000143554_22 (sequence is synthesized)
ttttctccgcttccatgatcgtactggagacaccttcaggtggaagggggagaatgtggccacaaccgaggtggcagaggtcttcgaggccctagattttcttcaggaggtgaacgtcta

SEQ ID NO: 381082 - DNA, 120 bp, Artificial Sequence
  ENSG00000143554_23 (sequence is synthesized)
tggagtcactgtgccagggcatgaaggcagggctggaatggcagccctagttctgcgtcccccccacgctttggaccttatgcagctctacacccacgtgtctgagaacttgccacctta

SEQ ID NO: 381083 - DNA, 120 bp, Artificial Sequence
  ENSG00000143554_24 (sequence is synthesized)
tgcccggccccgattcctcaggctccaggagtctttggccaccacagagaccttcaaacagcagaaagttcggatggcaaatgagggcttcgaccccagcaccctgtctgacccactgta

SEQ ID NO: 381084 - DNA, 120 bp, Artificial Sequence
  ENSG00000143554_25 (sequence is synthesized)
cgttctggaccaggctgtaggtgcctacctgcccctcacaactgcccggtacagcgccctcctggcaggaaaccttcgaatctgagaacttccacacctgaggcacctgagagaggaact

SEQ ID NO: 381085 - DNA, 120 bp, Artificial Sequence
  ENSG00000143554_26 (sequence is synthesized)
ctgtggggtgggggccgttgcaggtgtactgggctgtcagggatcttttctataccagaactgcggtcactattttgtaataaatgtggctggagctgatccagctgtctctgacctaca

SEQ ID NO: 381086 - DNA, 120 bp, Artificial Sequence
  ENSG00000143554_27 (sequence is synthesized)
cgccaggtaaggctggagctccgaactgactaaggcggggccagccacagaagggggcgtgtcggagaccacagaaaggcttggtctcatccctgggcctgggaagaagccgactatccc

SEQ ID NO: 381087 - DNA, 120 bp, Artificial Sequence
  ENSG00000143554_28 (sequence is synthesized)
ttggggttcgaaagtgggtggagataggagtctccgggtttgagaagggatgaggctgaatctttggtgccccaaggatccccaaggagtcgagttccaggcctcagacccaagatggaa

SEQ ID NO: 381088 - DNA, 120 bp, Artificial Sequence
  ENSG00000143554_29 (sequence is synthesized)
tgtccatacccttcaccctcatccaagagcagtgtgggctgggatagggaggggacatgggtcataggctcttctaggtagagccagggccccggcgttgtgctttcccacccttctaga

SEQ ID NO: 381089 - DNA, 120 bp, Artificial Sequence
  ENSG00000143554_30 (sequence is synthesized)
gggcattggtcagtctccccaaccccaccttcattaattcatccagtagacatttattaagcacgtactatggtgtgagtcctccagggtagataatctagaggacggatggggcagagc

SEQ ID NO: 381090 - DNA, 120 bp, Artificial Sequence
  ENSG00000143554_31 (sequence is synthesized)
cctactcaccaggagctctgtacaatagggcaatgtcacctgcctagacctacagactgaggaacggtgaggggggccatacagccacataactccaggctgcagggtcaaaggcaggga

SEQ ID NO: 381091 - DNA, 120 bp, Artificial Sequence
  ENSG00000143554_32 (sequence is synthesized)
aggactgtgtcagtccaggaacaggcaagtaagagaagagggagagagagacaaggaagtgagagtgtggaggatgagatctttggggctgggaagtagggaaagggcattcacctcttc

SEQ ID NO: 381092 - DNA, 120 bp, Artificial Sequence
  ENSG00000143554_33 (sequence is synthesized)
taaggctggggacaggggccgggggaggggaaagagggccagcacggcttcctgacggtgtgactcccacagtgggcccttcccagggaaagactacagtgatggctggggtctggaaag

SEQ ID NO: 381093 - DNA, 120 bp, Artificial Sequence
  ENSG00000143554_34 (sequence is synthesized)
cagcccccggtgcgtgggcacagatcctgggcagagctgctgacacagggctagctcacggggagcaggacagttgacaggagacagggagttggagggagaagcagcaagaagaaaatg

SEQ ID NO: 381094 - DNA, 120 bp, Artificial Sequence
  ENSG00000143554_35 (sequence is synthesized)
gcagtgtaagataaggagccagagatggcctaggccatctgatgcttacggcctctgaaggaggtcacagtaggagggggttctggggaatggggaacaggaattcacttccgggagcgg

SEQ ID NO: 381095 - DNA, 120 bp, Artificial Sequence
  ENSG00000143554_36 (sequence is synthesized)
tgaggggcagagaggaaactgaaaacccgtggaacagcagagggctggcaggagagggggctcatgtgactgcaatgatccagtacccaggtctccctttccccagcatatcttcccctt

SEQ ID NO: 381096 - DNA, 120 bp, Artificial Sequence
  ENSG00000143554_37 (sequence is synthesized)
acaggaggactggaattggagactggggtggatgggggcagaaggctctgggaaaggtgacaccactcctgaccctggtgactctgccaggtgagccagggctgctggtggccccggtaa

SEQ ID NO: 381097 - DNA, 120 bp, Artificial Sequence
  ENSG00000143554_38 (sequence is synthesized)
ctctaatctgccacctcaacctgggtcctaagctaatctctcattctcagatctcaccatttcatccctgtgacactgacctctgacctcatctccccaccaagcccataaggccctgac

SEQ ID NO: 381098 - DNA, 120 bp, Artificial Sequence
  ENSG00000143554_39 (sequence is synthesized)
gagtcactgtgccaggtgcctaggcatggaaggtgggggaggcacccagccaccaccccgaattggtagtacttgggcgcagggagcacgaggccttcgtggtggtcagccatggagggg

SEQ ID NO: 381099 - DNA, 120 bp, Artificial Sequence
  ENSG00000143554_40 (sequence is synthesized)
gatggctcccaaactccacaaagggacccccaacgtaatacactccgtgaagagaaaaaacacggagacacaagctcttcaccccacttctttccttatccctgccttcttctggcctgg

SEQ ID NO: 381100 - DNA, 120 bp, Artificial Sequence
  ENSG00000143554_41 (sequence is synthesized)
ctctttctcctccctgtcacctcctcccctaaaccttgacctcacactccctttcccaagacttgctccttaacaaaattcaggcaactcccctgaaccacgtgggcagagtccccttcc

SEQ ID NO: 381101 - DNA, 120 bp, Artificial Sequence
  ENSG00000143556_0 (sequence is synthesized)
ggcttggggtgcaggccagcccagactgactactggctgaaagatctgctttgggaagctttttgaaagcaaagatgagcaacactcaagctgagaggtccataataggcatgatcgaca

SEQ ID NO: 381102 - DNA, 120 bp, Artificial Sequence
  ENSG00000143556_1 (sequence is synthesized)
ccttagtgcctgtgacaaaaagggcacaaattacctcgccgatgtctttgagaaaaaggacaagaatgaggataagaagattgatttttctgagtttctgtccttgctgggagacatagc

SEQ ID NO: 381103 - DNA, 120 bp, Artificial Sequence
  ENSG00000143556_2 (sequence is synthesized)
cacagactaccacaagcagagccatggagcagcgccctgttccgggggcagccagtgacccagccccaccaatgggcctccagagaccccaggaacaataaaatgtcttctcccaccaga

SEQ ID NO: 381104 - DNA, 120 bp, Artificial Sequence
  ENSG00000143569_0 (sequence is synthesized)
agtattctaccttgtaaatactgttatttgtatatactgtaaatgatgacatcggtgggcactaaccgagcccggggaaactgggaacaacctcaaaaccaaaaccagacacagcacaag

SEQ ID NO: 381105 - DNA, 120 bp, Artificial Sequence
  ENSG00000143569_1 (sequence is synthesized)
cagcggccacaggccactgcagaacaaattagacttgcacagatgatttcggaccataatgatgctgactttgaggagaaggtgaaacaattgattgatattacaggcaagaaccaggat

SEQ ID NO: 381106 - DNA, 120 bp, Artificial Sequence
  ENSG00000143569_2 (sequence is synthesized)
gaatgtgtgattgctttgcatgactgcaatggagatgtcaacagagctatcaatgttcttctggaaggaaacccagacacgcattcctgggagatggtcgggaagaagaagggagtctca

SEQ ID NO: 381107 - DNA, 120 bp, Artificial Sequence
  ENSG00000143569_3 (sequence is synthesized)
ggccagaaggatggtggccagacggaatccaatgaggaaggcaaagaaaatcgagaccgggacagagactatagtcggcgacgtggtgggccaccaagacgggggagaggtgccagccgt

SEQ ID NO: 381108 - DNA, 120 bp, Artificial Sequence
  ENSG00000143569_4 (sequence is synthesized)
ggacgagagtttcgaggtcaggaaaatggattggatggcaccaagagtggagggccttctggaagaggaacagaaagaggcagaaggggccgtggccgaggcagaggtggctctggtagg

SEQ ID NO: 381109 - DNA, 120 bp, Artificial Sequence
  ENSG00000143569_5 (sequence is synthesized)
cgaggaggaaggttttctgctcaaggaatgggaacctttaacccagctgattatgcagagccagccaatactgatgataactatggcaatagcagcggcaatacgtggaacaacactggc

SEQ ID NO: 381110 - DNA, 120 bp, Artificial Sequence
  ENSG00000143569_6 (sequence is synthesized)
cactttgaaccagatgatgggacgagtgcatggaggactgcaacagaggagtgggggactgaagattggaatgaagatctttctgagaccaagatcttcactgcctctaatgtgtcttca

SEQ ID NO: 381111 - DNA, 120 bp, Artificial Sequence
  ENSG00000143569_7 (sequence is synthesized)
gtgcctctgcctgcggagaatgtgacaatcactgctggtcagagaattgaccttgctgttctgctggggaagacaccatctacaatggagaatgattcatctaatctggatccgtctcag

SEQ ID NO: 381112 - DNA, 120 bp, Artificial Sequence
  ENSG00000143569_8 (sequence is synthesized)
gctccttctctggcccagcctctggtgttcagtaattcgaagcagactgccatatcacagcctgcttcagggaacacattttctcatcacagtatggtgagcatgttagggaaaggattt

SEQ ID NO: 381113 - DNA, 120 bp, Artificial Sequence
  ENSG00000143569_9 (sequence is synthesized)
ggtgatgtcggtgaagctaaaggcggcagtactacaggctcccagttcttggagcaattcaagactgcccaagccctggctcagttggcagctcagcattctcagtctggaagcaccacc

SEQ ID NO: 381114 - DNA, 120 bp, Artificial Sequence
  ENSG00000143569_10 (sequence is synthesized)
acctcctcttgggacatgggctcgacgacacaatccccatcactggtgcagtatgatttgaagaacccaagtgattcagcagtgcacagcccctttacaaagcgccaggcttttacccca

SEQ ID NO: 381115 - DNA, 120 bp, Artificial Sequence
  ENSG00000143569_11 (sequence is synthesized)
tcttcaaccatgatggaggtgttccttcaggagaagtcacctgcagtggctacctccacagctgcacctccacctccgtcttctcctctgccaagcaaatccacatcggctccacagatg

SEQ ID NO: 381116 - DNA, 120 bp, Artificial Sequence
  ENSG00000143569_12 (sequence is synthesized)
tcgcctggatcttcagacaaccagtcctctagccctcagccggctcagcagaaactgaaacagcagaagaaaaaagcctccttgacttctaagattcctgctctggctgtggagatgcct

SEQ ID NO: 381117 - DNA, 120 bp, Artificial Sequence
  ENSG00000143569_13 (sequence is synthesized)
ggctcagcagatatctcagggctaaacctgcagtttggggcattgcagtttgggtcagagcctgtcctttctgattatgagtccacccccaccacgagcgcctcttcaagccaggctcca

SEQ ID NO: 381118 - DNA, 120 bp, Artificial Sequence
  ENSG00000143569_14 (sequence is synthesized)
agtagcctgtataccagcacggccagtgaatcatcctctacaatttcatctaaccagagtcaggagtctggttatcagagcggcccaattcagtcgacaacctatacctcccaaaataat

SEQ ID NO: 381119 - DNA, 120 bp, Artificial Sequence
  ENSG00000143569_15 (sequence is synthesized)
gctcagggccctctttatgaacagagatccacacagactcggcggtaccccagctccatctcttcatcaccccaaaaggacctgactcaggcaaagaatggcttcagttctgtgcaggcc

SEQ ID NO: 381120 - DNA, 120 bp, Artificial Sequence
  ENSG00000143569_16 (sequence is synthesized)
gttgaaggtgctacaggctctgcagtgaaatctgattcaccttccacttctagcatcccccctctcaatgaaacggtatctgcagcttccttactgacgacaaccaatcagcattcatcc

SEQ ID NO: 381121 - DNA, 120 bp, Artificial Sequence
  ENSG00000143569_17 (sequence is synthesized)
tccttgggtggcttgagccacagtgaggagattccaaatactaccaccacacaacacagcagcacgttatctacgcagcagaataccctttcatcatcaacatcttctgggcgcacttcg

SEQ ID NO: 381122 - DNA, 120 bp, Artificial Sequence
  ENSG00000143569_18 (sequence is synthesized)
acatccactcttttgcacacaagtgtggagagtgaggcgaatctccattcttcctccagcactttttccaccacatccagcacagtctctgcacctcccccagtggtcagtgtctcctcc

SEQ ID NO: 381123 - DNA, 120 bp, Artificial Sequence
  ENSG00000143569_19 (sequence is synthesized)
agtctcaatagtggcagtagcctgggcctcagcctaggcagcaactccactgtcacagcctcgactcgaagctcagttgctacgacttcaggaaaagctcctcccaacctccctcctggg

SEQ ID NO: 381124 - DNA, 120 bp, Artificial Sequence
  ENSG00000143569_20 (sequence is synthesized)
gtcccgccgttgttgcctaatccgtatattatggctccagggctgttacatgcctacccgccacaagtatatggttatgatgacttgcagatgcttcagacaagatttccattggattac

SEQ ID NO: 381125 - DNA, 120 bp, Artificial Sequence
  ENSG00000143569_21 (sequence is synthesized)
tacagcatcccatttcccacacccactactccgctgactgggagggatggtagcctggccagcaacccttattctggtgacctcacaaagttcggccgtggggatgcctcctccccagcc

SEQ ID NO: 381126 - DNA, 120 bp, Artificial Sequence
  ENSG00000143569_22 (sequence is synthesized)
ccggccacaaccttggcccaaccccaacagaaccagacgcagactcaccataccacgcagcagacattcctgaacccggcgctgcctcctggctacagttacaccagcctgccatactat

SEQ ID NO: 381127 - DNA, 120 bp, Artificial Sequence
  ENSG00000143569_23 (sequence is synthesized)
acaggggtcccgggcctccccagcaccttccagtatgggcctgctgtgttccctgtggctcctacctcttccaagcagcatggtgtgaatgtcagtgtgaatgcatcggccacccctttc

SEQ ID NO: 381128 - DNA, 120 bp, Artificial Sequence
  ENSG00000143569_24 (sequence is synthesized)
caacagccgagtggatatgggtctcatggatacaacactggtgtttcagtcacctccagtaacacgggcgtgccagatatctcgggttctgtgtactccaaaacccagcagtcctttgag

SEQ ID NO: 381129 - DNA, 120 bp, Artificial Sequence
  ENSG00000143569_25 (sequence is synthesized)
aaacaaggttttcattccggtactcctgctgcttccttcaacttgccttcagccctaggaagtgggggccccatcaatccggccacagctgctgcctacccacctgccccctttatgcac

SEQ ID NO: 381130 - DNA, 120 bp, Artificial Sequence
  ENSG00000143569_26 (sequence is synthesized)
attctgaccccccatcagcagccgcattctcagatccttcaccatcacctgcagcaggatggccagacgggcagcgggcaacgtagccagaccagctccatcccgcagaagccccagacc

SEQ ID NO: 381131 - DNA, 120 bp, Artificial Sequence
  ENSG00000143569_27 (sequence is synthesized)
aacaagtctgcctacaacagctacagctggggggccaactgaggccctgaccctcttctcccggtcccatcttctgagagggcttctcagcctggaaactatggaaacagcatcaaagag

SEQ ID NO: 381132 - DNA, 120 bp, Artificial Sequence
  ENSG00000143569_28 (sequence is synthesized)
aaaggaatgtggggggtttccgctgccccccacccccagcggcccaccccatgcctcagcttcatgtctgtcccattcctataccatccccaccctgttgtatgtattataggatttgta

SEQ ID NO: 381133 - DNA, 120 bp, Artificial Sequence
  ENSG00000143569_29 (sequence is synthesized)
ttttctccttttttttcccccttccattccttctcccctcttgcattcaagattatgaaactttgctatgggccctgcacttcctttgcttcctcctgttcaccctggtggtgtacggat

SEQ ID NO: 381134 - DNA, 120 bp, Artificial Sequence
  ENSG00000143569_30 (sequence is synthesized)
gaggcggggaggtgggacccccaaacatatatcagcccaacagccctaagtctccttctttattattaggaaaacaacaacaacaacaaacaaaaaaatggcgtcatgaatatgaacagc

SEQ ID NO: 381135 - DNA, 81 bp, Artificial Sequence
  ENSG00000143569_31 (sequence is synthesized)
caacaacaaacaaaaaaatggcgtcatgaatatgaacagcattgtcagatgaattagttgagtcctcaaatttaatggatt

SEQ ID NO: 381136 - DNA, 120 bp, Artificial Sequence
  ENSG00000143569_32 (sequence is synthesized)
gagctaatttggcccaaggctgggggctgtgttttgtgtgtgtgtataaatttgcactgaagtcttgtttcagaaaccagaccactgaggagagcctgctgagctgaggccatggcctgc

SEQ ID NO: 381137 - DNA, 120 bp, Artificial Sequence
  ENSG00000143569_33 (sequence is synthesized)
gtggcttggggaaatgagttggtggataccttctgggcttttgaacttgcccctcccccatttccctctcccccatgtgtctgaccctgtcttacccatttcaagttcaagcggtgcagc

SEQ ID NO: 381138 - DNA, 120 bp, Artificial Sequence
  ENSG00000143569_34 (sequence is synthesized)
accttcgaagcatcaatgcacacacctgctgttgcttttgatttctggaaggcatgtagtttcaacttgtaacaaaaatatttgtagtcttcaataaactgtggtatttctttagctaac

SEQ ID NO: 381139 - DNA, 120 bp, Artificial Sequence
  ENSG00000143569_35 (sequence is synthesized)
ttgtttaatttttgttcctattttggttttttggatagtctacattgtattaatattaatccttttggttaatttacagagtttctcctaaagatttgttgaccaaaataaagctgcatc

SEQ ID NO: 381140 - DNA, 120 bp, Artificial Sequence
  ENSG00000143569_36 (sequence is synthesized)
ggtgaataagtattactgtaccaactgggcctcctctagcaggcccctgaaggcagtggaataaaatgaaatcttcgccctttaagaactcctgaccttaatgtggtagtagtatcttgt

SEQ ID NO: 381141 - DNA, 120 bp, Artificial Sequence
  ENSG00000143569_37 (sequence is synthesized)
ccttgaggggatttccttcccctcacccctaagactttcacaacctggtgactggaaagaaccaccacaaatcttcatttcctccagaaactgctacatctacagccgatttcaggcagt

SEQ ID NO: 381142 - DNA, 120 bp, Artificial Sequence
  ENSG00000143569_38 (sequence is synthesized)
aaagggagagggatagaggagattgggtggaaaatggagaggatcaagaaggagctgagaccatttcaaagaaaaaaaatgctttatagagttttaagtatgacttagatgggtccaggc

SEQ ID NO: 381143 - DNA, 120 bp, Artificial Sequence
  ENSG00000143569_39 (sequence is synthesized)
tgacttagatgggtccaggcaaataaactaaaaagaagtgaaggcaacatgtatcgtctggcagaactaaatcttggagtggggtgagggatgaaagactacatattgggtacagtgtac

SEQ ID NO: 381144 - DNA, 120 bp, Artificial Sequence
  ENSG00000143569_40 (sequence is synthesized)
gctaaagtcgcagaaatcactaaagaactcatccatgtaaccaaacaccacctgtaccccaaaaacgaaataaaaaaacaaaaccttggggcccattccccctaggaatggactactgta

SEQ ID NO: 381145 - DNA, 120 bp, Artificial Sequence
  ENSG00000143569_41 (sequence is synthesized)
tttttatagctctggcttcagatggacccctgtgaataccaaaacttgcacatactcaagccctgcagttggctctgtggaatccatgtatatgagttttgcattctgtaaatgtggccg

SEQ ID NO: 381146 - DNA, 120 bp, Artificial Sequence
  ENSG00000143569_42 (sequence is synthesized)
tatttttgatctgtgtgtctggttggaaaaaattcatatataaacagcgtgcagttcaaacctgtgttaagggtcaactgtaattaaaatataaaataaatgagggattgccacatgtaa

SEQ ID NO: 381147 - DNA, 120 bp, Artificial Sequence
  ENSG00000143569_43 (sequence is synthesized)
tcaaactggtttttaatctttgcagttttggaaaaaatactaaactgaggccaacccatctattgtgtatctgctttggtttatggtgcacacatgtatgcatgtgtgtgtgtgcgtaca

SEQ ID NO: 381148 - DNA, 120 bp, Artificial Sequence
  ENSG00000143569_44 (sequence is synthesized)
tatttttaagccagattttgaagagtataagagacagagacttgtagaatagagagtaaaactggttgttcgtgtatgttttgtgtctactctattggtatcaagaagccagcctactag

SEQ ID NO: 381149 - DNA, 120 bp, Artificial Sequence
  ENSG00000143569_45 (sequence is synthesized)
aatcagtagtatttagctcaaggaaagcttcaagacctttcatgaatcatttaatctctgtgtactttactgctttttccttaaataaaattgaaggaaataatccgtgtcctgttctaa

SEQ ID NO: 381150 - DNA, 120 bp, Artificial Sequence
  ENSG00000143569_46 (sequence is synthesized)
gatgaatgttctgttgaattagcttgtctcttggctccttgttttgctaacatcatgaccagttcctgttattgctatatgtctgtatctttcagccacaagtatatggttatgatgact

SEQ ID NO: 381151 - DNA, 120 bp, Artificial Sequence
  ENSG00000143569_47 (sequence is synthesized)
cgtagaccttgtctgactgtgctcatggccaggcaggggggacagtgtatgcaagagtaatgtggagtttgtgctaactctagccagcttaattagtgactggataaattgcacaactct

SEQ ID NO: 381152 - DNA, 120 bp, Artificial Sequence
  ENSG00000143569_48 (sequence is synthesized)
atcccttaaaactgccttccctttccttttcttacccttcctcaccaccaccttcacccaatccctccccagcgccagtcatgggcacacagcacatacagacacaagcgcacataacac

SEQ ID NO: 381153 - DNA, 120 bp, Artificial Sequence
  ENSG00000143569_49 (sequence is synthesized)
tcatcccatcagacctgggtcacaccttccctctttcctctcccagccttccctcttccctgacattttagctttcccttctaatggtggagttctattgtcaaagtttgtccctttatt

SEQ ID NO: 381154 - DNA, 120 bp, Artificial Sequence
  ENSG00000143569_50 (sequence is synthesized)
ttccatatatcctggttctgcctcagctaccatatttgcagatgattctctgttgccagcgccagcaggaggagcaggtaatgaaattgaatgatcatatgcttgaacccactccttttc

SEQ ID NO: 381155 - DNA, 120 bp, Artificial Sequence
  ENSG00000143569_51 (sequence is synthesized)
agtccccatttcaccttcacagcctcagggaacttgaaaagactgcgcggtcacaaatcgggatacacaaacacaaacaccttgctgagctctctggcctccccttcctctctcctcctc

SEQ ID NO: 381156 - DNA, 120 bp, Artificial Sequence
  ENSG00000143569_52 (sequence is synthesized)
ccctccccaacaccctctttatctttgtacccttccccagctgtggaaaacattcggttaccagaatggaaaagattcttggggcagcatctggagcctgaggcctcagactgcctctca

SEQ ID NO: 381157 - DNA, 120 bp, Artificial Sequence
  ENSG00000143569_53 (sequence is synthesized)
aagtgggcgggggaaggcgcgagagcgagcgcgagagggaaaaggagggagggggtggggaagagggaatcttatatcacgtgacaggggcggcgcggcccggggtgtcagtgtggagga

SEQ ID NO: 381158 - DNA, 120 bp, Artificial Sequence
  ENSG00000143569_54 (sequence is synthesized)
ttatttttttttttttatgtctagcatgcctgtaagttcagtatgcatatgatcatgtgactccactatattttattgggttccttgcttctactctttctttggctaaaactattgagc

SEQ ID NO: 381159 - DNA, 120 bp, Artificial Sequence
  ENSG00000143569_55 (sequence is synthesized)
atatattgaagggcttgaaagtcaatccattcaggattcctcagggtagatagttttctctttatagggctttcactttttcttgatgttgaattccccttacctatgccaagtttctga

SEQ ID NO: 381160 - DNA, 65 bp, Artificial Sequence
  ENSG00000143570_0 (sequence is synthesized)
ttttctttattcttaacggttccatgcagcccccgacctcccgggctcaggtgattctcccgcct

SEQ ID NO: 381161 - DNA, 120 bp, Artificial Sequence
  ENSG00000143570_1 (sequence is synthesized)
gcagcccccgacctcccgggctcaggtgattctcccgcctcagcaccgcgagcagctaggaccacaggcgcgagccactgcgtccggccggcgggacttatttgtcaggcggggattggg

SEQ ID NO: 381162 - DNA, 120 bp, Artificial Sequence
  ENSG00000143570_2 (sequence is synthesized)
ttccgccagcctaaagggaggggtaagcgccagaatatgaatcgccgggaagctgggagaaagctccgggaaaccctgagcagccaggtcgcctgctccgcccgctcccgctcccgatct

SEQ ID NO: 381163 - DNA, 120 bp, Artificial Sequence
  ENSG00000143570_3 (sequence is synthesized)
ctgattgctcctaactgacgtcactcccggtctgtccccgcccactcggtgctgccattggcagtcggtcgtgggtctgagagtcactggagctaccagaagcatcatggggccctgggg

SEQ ID NO: 381164 - DNA, 120 bp, Artificial Sequence
  ENSG00000143570_4 (sequence is synthesized)
agagccagagctcctggtgtggcgccccgaggcggtagcttcagagcctccagtgcctgtggggctggaggtgaagttgggggccctggtgctgctgctggtgctcaccctcctctgcag

SEQ ID NO: 381165 - DNA, 120 bp, Artificial Sequence
  ENSG00000143570_5 (sequence is synthesized)
cctggtgcccatctgtgtgctgcgccggccaggagctaaccatgaaggctcagcttcccgccagaaagccctgagcctagtaagctgtttcgcggggggcgtctttttggccacttgtct

SEQ ID NO: 381166 - DNA, 120 bp, Artificial Sequence
  ENSG00000143570_6 (sequence is synthesized)
cctggacctgctgcctgactacctggctgccatagatgaggccctggcagccttgcacgtgacgctccagttcccactgcaagagttcatcctggccatgggcttcttcctggtcctggt

SEQ ID NO: 381167 - DNA, 120 bp, Artificial Sequence
  ENSG00000143570_7 (sequence is synthesized)
gatggagcagatcacactggcttacaaggagcagtcagggccgtcacctctggaggaaacaagggctctgctgggaacagtgaatggtgggccgcagcattggcatgatgggccaggggt

SEQ ID NO: 381168 - DNA, 120 bp, Artificial Sequence
  ENSG00000143570_8 (sequence is synthesized)
cccacaggcgagtggagccccagcaaccccctcagccttgcgtgcctgtgtactggtgttctccctggccctccactccgtgttcgaggggctggcggtagggctgcagcgagaccgggc

SEQ ID NO: 381169 - DNA, 120 bp, Artificial Sequence
  ENSG00000143570_9 (sequence is synthesized)
tcgggccatggagctgtgcctggctttgctgctccacaagggcatcctggctgtcagcctgtccctgcggctgttgcagagccaccttagggcacaggtggtggctggctgtgggatcct

SEQ ID NO: 381170 - DNA, 120 bp, Artificial Sequence
  ENSG00000143570_10 (sequence is synthesized)
cgggctgggtgcagctctggcagagtcggcaggacctctgcaccagctggcccagtctgtgctagagggcatggcagctggcacctttctctatatcacctttctggaaatcctgcccca

SEQ ID NO: 381171 - DNA, 120 bp, Artificial Sequence
  ENSG00000143570_11 (sequence is synthesized)
ggagctggccagttctgagcaaaggatcctcaaggtcattctgctcctagcaggctttgccctgctcactggcctgctcttcatccaaatctagggggcttcaagagaggggcaggggag

SEQ ID NO: 381172 - DNA, 120 bp, Artificial Sequence
  ENSG00000143570_12 (sequence is synthesized)
attgatgatcaggtgcccctgttctcccttccctcccccagttgtggggaataggaaggaaaggggaagggaaatactgaggaccaaaaagttctctgggagctaaagatagagcctttg

SEQ ID NO: 381173 - DNA, 120 bp, Artificial Sequence
  ENSG00000143570_13 (sequence is synthesized)
gggctatctgactaatgagagggaagtgggcagacaagaggctggccccagtcccaaggaacaagagatggtcaagtcgctagagacatatcaggggacattaggattggggaagacact

SEQ ID NO: 381174 - DNA, 120 bp, Artificial Sequence
  ENSG00000143570_14 (sequence is synthesized)
tgactgctagaatcagaggttggacactatacataaggacaggctcacatgggaggctggaggtgggtacccagctgctgtggaacgggtatggacaggtcataaacctagagtcagtgt

SEQ ID NO: 381175 - DNA, 120 bp, Artificial Sequence
  ENSG00000143570_15 (sequence is synthesized)
cctgttggtcctagcccatttcagcaccctgccacttggagtggacccctcctactcttcttagcgcctaccctcatacctatctccctcctcccatctcctaggggactggcgccaaat

SEQ ID NO: 381176 - DNA, 120 bp, Artificial Sequence
  ENSG00000143570_16 (sequence is synthesized)
ggtctctccctgccaattttggtatcttctctggcctctccagtcctgcttactcctctatttttaaagtgccaaacaaatccccttcctctttctcaaagcacagtaatgtggcactga

SEQ ID NO: 381177 - DNA, 120 bp, Artificial Sequence
  ENSG00000143570_17 (sequence is synthesized)
gccctacccagcacctcagtgaagggggcctgcttgctctttattttggtcccggatcctggggtggggcagaaatattttctgggctggggtaggaggaaggttgttgcagccatctac

SEQ ID NO: 381178 - DNA, 120 bp, Artificial Sequence
  ENSG00000143570_18 (sequence is synthesized)
tgctgctgtaccctaggaatatggggacatggacatggtgtcccatgcccagatgataaacactgagctgccaaaacatttttttaaatacacccgaggagcccaagggggaagggcaat

SEQ ID NO: 381179 - DNA, 120 bp, Artificial Sequence
  ENSG00000143570_19 (sequence is synthesized)
gcctacccccagcgttatttttggggagggagggctgtgcatagggacatattctttagaatctattttattaactgacctgttttgggacctgttacccaaataaaagatgtttctaga

SEQ ID NO: 381180 - DNA, 120 bp, Artificial Sequence
  ENSG00000143570_20 (sequence is synthesized)
gtcggctgcccaggcctccccgggcccgggaacaggagtcccagctcacgcattcttcatctgcttcccgcgacgcttggcggcctcgcaccccgcctcctggagcccggactttcaggc

SEQ ID NO: 381181 - DNA, 120 bp, Artificial Sequence
  ENSG00000143570_21 (sequence is synthesized)
accgccctcagtgtcgcctcagtccgtcccgggaccgcagactcttagggcccctctctttggccatctgcctctaggtcccatcctggggcctgaagcgcttgttctctgcgctgggaa

SEQ ID NO: 381182 - DNA, 120 bp, Artificial Sequence
  ENSG00000143570_22 (sequence is synthesized)
aaggggaacgatggagcgatccagcacccaaacttaccctgtccaggtggcccacgaagctacccaagacatctctgcacagccctagcctttttggcttcacccactccgttcgggagt

SEQ ID NO: 381183 - DNA, 120 bp, Artificial Sequence
  ENSG00000143570_23 (sequence is synthesized)
agatatccatacagcctttctcatgcctcggtttcccccgtgcagtctccctgaataagtcacttgggaaagaaagtgtgagaagagaggaatgttcctggtacaggagtagatgagtca

SEQ ID NO: 381184 - DNA, 120 bp, Artificial Sequence
  ENSG00000143570_24 (sequence is synthesized)
ccctgggtaggggaaggtcacaaagtggctggggccagggagctgcactctgctgaccaagcttccccattccttgccccatcttcctttgcatgatttttcccaaccactctggtctgt

SEQ ID NO: 381185 - DNA, 120 bp, Artificial Sequence
  ENSG00000143570_25 (sequence is synthesized)
actacaaaagtggatgccaccttgccaggagccacggtagggccgctgtatctgggagtaggggactaagagtctgagggtccacaaacggaatttaagaagtcgcctgctccgcccgct

SEQ ID NO: 381186 - DNA, 120 bp, Artificial Sequence
  ENSG00000143570_26 (sequence is synthesized)
gtctgtccccgcccactcggtgctgccattggcagtcggtcgtgggtacgcggctcctgtgggggaggggggagctatgggagggggcgggaattcccgactctaggccggaagcgcgcg

SEQ ID NO: 381187 - DNA, 120 bp, Artificial Sequence
  ENSG00000143575_0 (sequence is synthesized)
aaagataaagcctttcaaatttgaggaagaccttcggtcccgcctccatttcacgtccggcttaccgtcgtttacgacagtgtcaggatcgcgggcttgctttccggtagcgtgggctga

SEQ ID NO: 381188 - DNA, 120 bp, Artificial Sequence
  ENSG00000143575_1 (sequence is synthesized)
cgcctcgctcaatttctcacagggctgcgcaggtttcccccgtctgcgaatggaccactggaggggttcaaaggttcgcgtcccagtacgggaatgagcctctttgatctcttccggggc

SEQ ID NO: 381189 - DNA, 120 bp, Artificial Sequence
  ENSG00000143575_2 (sequence is synthesized)
tttttcggctttcctggacctcggagccacagagatcccttttttggagggatgactcgagatgaagatgatgatgaggaagaagaagaagaagggggctcatggggccgtgggaaccca

SEQ ID NO: 381190 - DNA, 120 bp, Artificial Sequence
  ENSG00000143575_3 (sequence is synthesized)
aggttccatagtcctcagcacccccctgaggaatttggcttcggcttcagcttcagcccaggaggagggatacgtttccacgataacttcggctttgatgacctagtacgagatttcaat

SEQ ID NO: 381191 - DNA, 120 bp, Artificial Sequence
  ENSG00000143575_4 (sequence is synthesized)
agcatcttcagcgatatgggggcctggaccttgccttcccatcctcctgaacttccaggtcctgagtcagagacacctggtgagagactacgggagggacagacacttcgggactcaatg

SEQ ID NO: 381192 - DNA, 120 bp, Artificial Sequence
  ENSG00000143575_5 (sequence is synthesized)
aggatctttgggggggtcttggagagtgatgcaagaagtgaatccccccaaccagcaccagactggggctcccagaggccatttcataggtttgatgatgtatggcctatggacccccat

SEQ ID NO: 381193 - DNA, 120 bp, Artificial Sequence
  ENSG00000143575_6 (sequence is synthesized)
cctagaaccagagaggacaatgatcttgattcccaggtttcccaggagggtcttggcccggttctacagccccagcccaaatcctatttcaagagcatctctgtgaccaagatcactaaa

SEQ ID NO: 381194 - DNA, 120 bp, Artificial Sequence
  ENSG00000143575_7 (sequence is synthesized)
ccagatgggatagtggaggagcgccggactgtggtggacagtgagggccggacagagactacagtaacccgacacgaagcagatagcagtcctaggggtgatccagaatcaccaagacct

SEQ ID NO: 381195 - DNA, 120 bp, Artificial Sequence
  ENSG00000143575_8 (sequence is synthesized)
ccagccctggatgatgccttttccatcctggacttattcctgggacgttggttccggtcccggtagccttgttaaccctcagaggccttcaagtcctttccacctctcacccattgccca

SEQ ID NO: 381196 - DNA, 120 bp, Artificial Sequence
  ENSG00000143575_9 (sequence is synthesized)
ccattaataagcttagcttctcttgccacctcaggggcttggatatgtggaatagtgaactggggccatgtcagtttgtcactcacccaaactgaccaataaaacctttatttatgctaa

SEQ ID NO: 381197 - DNA, 120 bp, Artificial Sequence
  ENSG00000143575_10 (sequence is synthesized)
actccttcaactcctgcagagaggacagaagtcgcaacattgaacactcaccccgccacagtaaccaaggcggtcattaagaggagaaacagcaaactaagcctttctccaacctggggt

SEQ ID NO: 381198 - DNA, 120 bp, Artificial Sequence
  ENSG00000143575_11 (sequence is synthesized)
gatgcaacagggacccgggcggggaagaccgtgagggtctggggaataagacagtgagcaagtgagcaggaccttgggagagagaggagggactggggcacactgaagaaaaactggggg

SEQ ID NO: 381199 - DNA, 120 bp, Artificial Sequence
  ENSG00000143575_12 (sequence is synthesized)
aaggtgtatgaagggagctgcgagctgaggtctgactttgattaaaaaaaaaaaaaaaaaaaaagaactgtcagccattgtattaatgttttgatgtggcagccagtcctccgaccctct

SEQ ID NO: 381200 - DNA, 120 bp, Artificial Sequence
  ENSG00000143575_13 (sequence is synthesized)
ccctagcttcccagaccccttgctcttgtcccactttgccacccatgagttgatttaatggcttaaatagtgctgaaatattggtggccaatctgcctccactctcagccacagagatcc

SEQ ID NO: 381201 - DNA, 120 bp, Artificial Sequence
  ENSG00000143575_14 (sequence is synthesized)
ccccgtctgcgaatggaccactggaggggttcaaaggttcgcgtcccagtacgggaatgagcctctttgatctcttccggggctttttcggctttcctggacctcggagaacttccaggt

SEQ ID NO: 381202 - DNA, 120 bp, Artificial Sequence
  ENSG00000143575_15 (sequence is synthesized)
gtctggaggaaggggaagtttaccagccttttgttattcttctgaagttctgtgtgttctccctccctgaagtttcttcctgtacacttgtctccttttttcctttggactctttctctc

SEQ ID NO: 381203 - DNA, 120 bp, Artificial Sequence
  ENSG00000143575_16 (sequence is synthesized)
ttcagcgatatgggggcctggaccttgccttcccatcctcctggtgtgtggctttccctaaggggcaacctgtggtttctggtgggttggtgggtgaaataaagagcctgcagggagtag

SEQ ID NO: 381204 - DNA, 120 bp, Artificial Sequence
  ENSG00000143575_17 (sequence is synthesized)
gggaagtgtgagaagactgatgatttcagagagattaatagagcccaagtcctttcccatcccagcaaacacctgccacctttctgcagaacttccaggtcctgagtcagagacacctgg

SEQ ID NO: 381205 - DNA, 120 bp, Artificial Sequence
  ENSG00000143578_0 (sequence is synthesized)
ccatgatctccctcttgcaaaagcgagggctacagaacaggcattcaggagtcctgtgctccagtcacagccttttctgttcttcagctaggagacaccaaaccctcaggaagatttact

SEQ ID NO: 381206 - DNA, 120 bp, Artificial Sequence
  ENSG00000143578_1 (sequence is synthesized)
atagctaagagaaaactgcagcagaaagggcgcggctacctacttcttaaattccgtttgtggaccctcagactcttagtcccctactcccagatacagcggccctaccgtggctcctgg

SEQ ID NO: 381207 - DNA, 120 bp, Artificial Sequence
  ENSG00000143578_2 (sequence is synthesized)
caaggtggcatccacttttgtagtaagcatggatctcggaatccctgacctgctggacgcgtggctggagcccccagaggatatcttctcgacaggatccgtcctggagctgggactcca

SEQ ID NO: 381208 - DNA, 120 bp, Artificial Sequence
  ENSG00000143578_3 (sequence is synthesized)
ctgcccccctccagaggttccggtaactaggctacaggaacagggactgcaaggctggaagtccggtggggaccgtggctgtggccttcaagagagtgagcctgaagatttcttgaagct

SEQ ID NO: 381209 - DNA, 120 bp, Artificial Sequence
  ENSG00000143578_4 (sequence is synthesized)
tttcattgatcccaatgaggtgtactgctcagaagcatctcctggcagtgacagtggcatctctgaggacccctgccatccagacagtccccctgcccccagggcaaccagttctcctat

SEQ ID NO: 381210 - DNA, 120 bp, Artificial Sequence
  ENSG00000143578_5 (sequence is synthesized)
gctctatgaggttgtctatgaggcaggggccctggagaggatgcagggggaaactgggccaaatgtaggccttatctccatccagctagatcagtggagcccagcatttatggtgcctga

SEQ ID NO: 381211 - DNA, 120 bp, Artificial Sequence
  ENSG00000143578_6 (sequence is synthesized)
ttcctgcatggtcagtgagctgccctttgatgctcatgcccacatcctgcccagagcaggcaccgtagccccagtgccctgtacaaccctgctgccctgtcaaaccctgttcctgaccga

SEQ ID NO: 381212 - DNA, 120 bp, Artificial Sequence
  ENSG00000143578_7 (sequence is synthesized)
gagagggtcctcaagaaggtcaggaggaaaatccgtaacaagcagtcagctcaggacagtcggcggcggaagaaggagtacattgatgggctggagagcagggtggcagcctgttctgca

SEQ ID NO: 381213 - DNA, 120 bp, Artificial Sequence
  ENSG00000143578_8 (sequence is synthesized)
cagaaccaagaattacagaaaaaagtccaggagctggagaggcacaacatctccttggtagctcagctccgccagctgcagacgctaattgctcaaacttccaacaaagctgcccagacc

SEQ ID NO: 381214 - DNA, 120 bp, Artificial Sequence
  ENSG00000143578_9 (sequence is synthesized)
agcacttgtgttttgattcttcttttttccctggctctcatcatcctgcccagcttcagtccattccagagtcgaccagaagctgggtctgaggattaccagcctcacggagtgacttcc

SEQ ID NO: 381215 - DNA, 120 bp, Artificial Sequence
  ENSG00000143578_10 (sequence is synthesized)
agaaatatcctgacccacaaggacgtaacagaaaatctggagacccaagtggtagagtccagactgagggagccacctggagccaaggatgcaaatggctcaacaaggacactgcttgag

SEQ ID NO: 381216 - DNA, 120 bp, Artificial Sequence
  ENSG00000143578_11 (sequence is synthesized)
aagatgggagggaagccaagacccagtgggcgcatccggtccgtgctgcatgcagatgagatgtgagctggaacagaccttcctggcccacttcctgatcacaaggaatcctgggcttcc

SEQ ID NO: 381217 - DNA, 120 bp, Artificial Sequence
  ENSG00000143578_12 (sequence is synthesized)
ttatggctttgcttcccactgggattcctacttaggtgtctgccctcaggggtccaaatcacttcaggacaccccaagagatgtcctttagtctctgcctgaggcctagtctgcatttgt

SEQ ID NO: 381218 - DNA, 120 bp, Artificial Sequence
  ENSG00000143578_13 (sequence is synthesized)
ttgcatatatgagagggtacctcaaatacttctgttatgtatctgtgattttatttcttctttgggtatagggttgaggggaaataagttttgagtgagaaataaacgttttagctgaaa

SEQ ID NO: 381219 - DNA, 120 bp, Artificial Sequence
  ENSG00000143578_14 (sequence is synthesized)
caaggtaacatgcttcccctaagggtatcccaacccaggggcctcaccatgacctctgaggggccaatatcccaggagaagcattggggagttgggggcaggtgaaggacccaggactca

SEQ ID NO: 381220 - DNA, 120 bp, Artificial Sequence
  ENSG00000143578_15 (sequence is synthesized)
taagggggtttacccaacctgtgccactacccaggccctgcggctgtcagggtgttcctaagtctcctttctcccagctacctgttttctactccagatcagtggagcccagcatttatg

SEQ ID NO: 381221 - DNA, 120 bp, Artificial Sequence
  ENSG00000143578_16 (sequence is synthesized)
gggagtgggggtggggttgagacacaactctgtgataagaggcttcagctcccacttggagacaggtctgaaaacagaccacccccaaaatagacgtaagttgtataataactgtctcca

SEQ ID NO: 381222 - DNA, 69 bp, Artificial Sequence
  ENSG00000143578_17 (sequence is synthesized)
ctagctgctcgcggtgctgaggcgggagaatcacctgagcccgggaggtcgggggctgcatggaaccgt

SEQ ID NO: 381223 - DNA, 120 bp, Artificial Sequence
  ENSG00000143578_18 (sequence is synthesized)
aaaataagaataaagaaaaaaaaaagaaagaactgcggccccattggcctgactctcctgaacagccaaactgtctccgaccagttacggaagaggcggccttgagagggtagtgtgcca

SEQ ID NO: 381224 - DNA, 80 bp, Artificial Sequence
  ENSG00000143590_0 (sequence is synthesized)
ggcctaaggctgggggccgacggcggcggcagcagggagctgggaagcggagaagccgggagcgcggggctcagtcgggg

SEQ ID NO: 381225 - DNA, 120 bp, Artificial Sequence
  ENSG00000143590_1 (sequence is synthesized)
ctgctgctgctgctgctgctcgtgcccgtgccgctgctgccgctgctggcccaagggcccggaggggcgctgggaaaccggcatgcggtgtactggaacagctccaaccagcacctgcgg

SEQ ID NO: 381226 - DNA, 120 bp, Artificial Sequence
  ENSG00000143590_2 (sequence is synthesized)
cgagagggctacaccgtgcaggtgaacgtgaacgactatctggatatttactgcccgcactacaacagctcgggggtgggccccggggcgggaccggggcccggaggcggggcagagcag

SEQ ID NO: 381227 - DNA, 120 bp, Artificial Sequence
  ENSG00000143590_3 (sequence is synthesized)
tacgtgctgtacatggtgagccgcaacggctaccgcacctgcaacgccagccagggcttcaagcgctgggagtgcaaccggccgcacgccccgcacagccccatcaagttctcggagaag

SEQ ID NO: 381228 - DNA, 120 bp, Artificial Sequence
  ENSG00000143590_4 (sequence is synthesized)
ttccagcgctacagcgccttctctctgggctacgagttccacgccggccacgagtactactacatctccacgcccactcacaacctgcactggaagtgtctgaggatgaaggtgttcgtc

SEQ ID NO: 381229 - DNA, 120 bp, Artificial Sequence
  ENSG00000143590_5 (sequence is synthesized)
tgctgcgcctccacatcgcactccggggagaagccggtccccactctcccccagttcaccatgggccccaatgtgaagatcaacgtgctggaagactttgagggagagaaccctcaggtg

SEQ ID NO: 381230 - DNA, 120 bp, Artificial Sequence
  ENSG00000143590_6 (sequence is synthesized)
cccaagcttgagaagagcatcagcgggaccagccccaaacgggaacacctgcccctggccgtgggcatcgccttcttcctcatgacgttcttggcctcctagctctgccccctcccctgg

SEQ ID NO: 381231 - DNA, 120 bp, Artificial Sequence
  ENSG00000143590_7 (sequence is synthesized)
ggggcttggaaggagcagggagcctttggcctctccaagggaagcctagtgggcctagacccctcctcccatggctagaagtggggcctgcaccatacatctgtgtccgccccctctacc

SEQ ID NO: 381232 - DNA, 120 bp, Artificial Sequence
  ENSG00000143590_8 (sequence is synthesized)
ccttccccccacgtagggcactgtagtggaccaagcacggggacagccatgggtcccgggcggccttgtggctctggtaatgtttggtaccaaacttgggggccaaaaagggcagtgctc

SEQ ID NO: 381233 - DNA, 120 bp, Artificial Sequence
  ENSG00000143590_9 (sequence is synthesized)
aggactccctggcccctggtacctttccctgactcctggtgccctctccctttgtccccccagagagacatatgcccccagagagagcaaatcgaagcgtgggaggcacccccattgctc

SEQ ID NO: 381234 - DNA, 120 bp, Artificial Sequence
  ENSG00000143590_10 (sequence is synthesized)
tcctccaggggcagaacatggggaggggactagatgggcaaggggcagcactgcctgctgcttccttcccctgtttacagcaataagcacgtcctcctcccccactcccacttccaggat

SEQ ID NO: 381235 - DNA, 120 bp, Artificial Sequence
  ENSG00000143590_11 (sequence is synthesized)
tgtggtttggattgaaaccaagtttacaagtagacacccctgggggggcgggcagtggacaaggatggcaaggggtgggcattggggtgccaggcaggcatgtacagactctatatctct

SEQ ID NO: 381236 - DNA, 120 bp, Artificial Sequence
  ENSG00000143590_12 (sequence is synthesized)
atatataatgtacagacagacagagtcccttccctctttaaccccctgacctttcttgacttccccttcagcttcagaccccttccccaccaggctaggccccccacacctgggggaccc

SEQ ID NO: 381237 - DNA, 120 bp, Artificial Sequence
  ENSG00000143590_13 (sequence is synthesized)
cctggcccctcttttgtcttctgtgaagacaggacctatgcaacgcacagacacttttggagaccgtaaaacaacaacgccccctcccttccagccctgagccgggaaccatctcccagg

SEQ ID NO: 381238 - DNA, 120 bp, Artificial Sequence
  ENSG00000143590_14 (sequence is synthesized)
accttgccctgctcaccctatgtggtcccacctatcctcctgggcctttttcaagtgctttggctgtgactttcatactctgctcttagtctaaaaaaaataaactggagataaaaataa

SEQ ID NO: 381239 - DNA, 120 bp, Artificial Sequence
  ENSG00000143590_15 (sequence is synthesized)
gcggctgagaccagggaggaggcgtgggcacgggacgcctgaggggttcagctcagacgaggtcgtggggccaagagaggagtttggtgacagtcccaagtttgggctgcggagaatcgc

SEQ ID NO: 381240 - DNA, 120 bp, Artificial Sequence
  ENSG00000143595_0 (sequence is synthesized)
gtgcagtgacagtgtgcctatgcagacagagggagcagtgaatagcaatagggtgtttccaccatggtcttcactcaggccccggctgaaatcatgggccacctccggatacgcagcctc

SEQ ID NO: 381241 - DNA, 120 bp, Artificial Sequence
  ENSG00000143595_1 (sequence is synthesized)
ctggcccggcagtgcctggcagagtttctgggtgtgtttgtactcatgctcctcacccaaggagctgtggcccaggctgtcaccagtggagaaaccaaaggcaacttcttcaccatgttt

SEQ ID NO: 381242 - DNA, 120 bp, Artificial Sequence
  ENSG00000143595_2 (sequence is synthesized)
ctggctggctctctggccgttacgatagccatctacgtgggtggtaacgtctcaggggcccacctgaatccagccttctccctggccatgtgcatcgttggacgcctcccctgggtcaag

SEQ ID NO: 381243 - DNA, 120 bp, Artificial Sequence
  ENSG00000143595_3 (sequence is synthesized)
ctccccatttacatcttggtgcagttgctgtctgctttctgtgcttcgggagccacctatgttctctaccatgatgccctacagaactatacaggtgggaacctgacagtgactggcccc

SEQ ID NO: 381244 - DNA, 120 bp, Artificial Sequence
  ENSG00000143595_4 (sequence is synthesized)
aaggagacagcctccatttttgccacctatcctgccccctatctgtccctgaacaatggcttcctggatcaggttctgggcactgggatgctgattgtggggctcttggccatcctggac

SEQ ID NO: 381245 - DNA, 120 bp, Artificial Sequence
  ENSG00000143595_5 (sequence is synthesized)
agacggaacaagggagtccctgcgggtctggagcctgtggtggtggggatgctgatcctggccctcgggttatccatgggtgccaactgcgggattccactcaaccctgcccgggacctg

SEQ ID NO: 381246 - DNA, 120 bp, Artificial Sequence
  ENSG00000143595_6 (sequence is synthesized)
ggcccacgtctcttcacctacgtggctggctggggtcctgaagtcttcagtgctggtaatggctggtggtgggtgcctgtggtggcccctctggtgggggccaccgttggcacagccact

SEQ ID NO: 381247 - DNA, 120 bp, Artificial Sequence
  ENSG00000143595_7 (sequence is synthesized)
ggctctgcaccaccctgagggcccagagccagctcaggatctggtgtctgctcaacacaaagcctcagagttggaaactcctgcctcagctcagatgctggagtgtaagctatgattagg

SEQ ID NO: 381248 - DNA, 120 bp, Artificial Sequence
  ENSG00000143595_8 (sequence is synthesized)
acaaccctcacttcactcatggaccctggagccagccactgaccccgcctgggaacaacagtcattcttcctctttgttaatgtgccagaacctgggaggcttctctgtttatctgtttg

SEQ ID NO: 381249 - DNA, 120 bp, Artificial Sequence
  ENSG00000143595_9 (sequence is synthesized)
gcatcccttcctcctaaactaagaaggatcctggacagggagaagtggaggaggataaggtaccaggactcaggcttctcatcccctcctcccgcaaagcggttttctgaccctcagggc

SEQ ID NO: 381250 - DNA, 120 bp, Artificial Sequence
  ENSG00000143595_10 (sequence is synthesized)
ctctcggaatgtagttgctcgaggtaaccgctagagggtgcgcacctggatgctggatggggacggctgcgggcatctgcagggtggagggggccaccatccagtgtagggcacaaccct

SEQ ID NO: 381251 - DNA, 120 bp, Artificial Sequence
  ENSG00000143595_11 (sequence is synthesized)
ggggactgccctccatagcctgtcccgactgccgactcctagctctcatcgcctcggcgcctcccaccttcaccctctcggggatgcctccccaagagggtagttaggggtggggaagcc

SEQ ID NO: 381252 - DNA, 120 bp, Artificial Sequence
  ENSG00000143595_12 (sequence is synthesized)
gcctccacccagggggcgtggtgggggcggagggaaggagggcggcggggcacagagacagagagcaaggctgtgaaactgaggcaccgttcctagacatctcggtgctgtgtcgttcat

SEQ ID NO: 381253 - DNA, 120 bp, Artificial Sequence
  ENSG00000143595_13 (sequence is synthesized)
tcaaggagagttgagatacagtgaaatgagccagggcgaggagggagggtgaaggaacggagggcgggcggctccgaggagcgagagtcgggctgagggcaacctggcgccagggaaaat

SEQ ID NO: 381254 - DNA, 120 bp, Artificial Sequence
  ENSG00000143595_14 (sequence is synthesized)
tctggttattcaccacttctacagctctcctgccgctccctgcagaggatgctcgttttgcagagaaggcagtgttcctctattcccttcttccgaattaaaaataccccctcagagcga

SEQ ID NO: 381255 - DNA, 120 bp, Artificial Sequence
  ENSG00000143595_15 (sequence is synthesized)
ggctggggtcctgaagtcttcaggtgggagacagactctcctggtgctggcctccactcaccttcctctgctaagggctctgtccctgggtccacagcactctgcctttaaaatagctct

SEQ ID NO: 381256 - DNA, 120 bp, Artificial Sequence
  ENSG00000143595_16 (sequence is synthesized)
cttggcttcttaggacagtgttctttctccaagtcatattctccccctttctcccttgcttccctcccaacttttcactgaaacagtaagatttagaggttgtgttcttaggcatgccac

SEQ ID NO: 381257 - DNA, 120 bp, Artificial Sequence
  ENSG00000143595_17 (sequence is synthesized)
attacttccatgcacattagtgacttcatcagcaaaattaatatattcagataattccctaaggcaagaggctggaccaagctctcctggggttccctcttctaaatactatgctttggt

SEQ ID NO: 381258 - DNA, 120 bp, Artificial Sequence
  ENSG00000143603_0 (sequence is synthesized)
gaggactcagaataaacctgctgctgcttcgtaaacatctcctgataaaaatggctacaggtgttacctgggcagagcagctgggcgccgccttggaatcagctgggggagcacctctcc

SEQ ID NO: 381259 - DNA, 120 bp, Artificial Sequence
  ENSG00000143603_1 (sequence is synthesized)
ttgggacgggatgacagggcttcccaggcggtccccacaagcccgcgccccagctcagccccagttctcccctcccacctcaactcctccttgggataaataaagatgagtgtgtgtgtg

SEQ ID NO: 381260 - DNA, 120 bp, Artificial Sequence
  ENSG00000143603_2 (sequence is synthesized)
agtgcgcgcccggatggagaacagcaggcactggctttagcggggagctggccccactgctccagcctctcagtccagccccaagacggaggagggggtttccctcccagagggagtgga

SEQ ID NO: 381261 - DNA, 120 bp, Artificial Sequence
  ENSG00000143603_3 (sequence is synthesized)
gatggaggaaggactccatgttttcgttggccctgaaatgccttatcagtctgtccaccatcatccttttgggcttgatcatcgcctaccacacacgtgaagtccagctcttcgtgatcg

SEQ ID NO: 381262 - DNA, 120 bp, Artificial Sequence
  ENSG00000143603_4 (sequence is synthesized)
acaatggcgcggatgactggcggatagccatgacctacgagcgcatcctgtacatcagcctggagatgctggtgtgcgccatccaccccattcctggcgagtacaagttcttctggacgg

SEQ ID NO: 381263 - DNA, 120 bp, Artificial Sequence
  ENSG00000143603_5 (sequence is synthesized)
cacgcctggccttctcctacacaccctcccgggcggaggccgatgtggacatcatcctgtctatccccatgttcctgcgcctgtacctgatcgcccgagtcatgctgctgcacagcaagc

SEQ ID NO: 381264 - DNA, 120 bp, Artificial Sequence
  ENSG00000143603_6 (sequence is synthesized)
actgtgctgctcgtgttcagcatctctctgtggatcattgctgcctggaccgtccgtgtctgtgaaaggtaccatgaccagcaggacgtaactagtaactttctgggtgccatgtggctc

SEQ ID NO: 381265 - DNA, 120 bp, Artificial Sequence
  ENSG00000143603_7 (sequence is synthesized)
atctccatcacattcctttccattggttatggggacatggtgccccacacatactgtgggaaaggtgtctgtctcctcactggcatcatgggtgcaggctgcactgcccttgtggtggcc

SEQ ID NO: 381266 - DNA, 120 bp, Artificial Sequence
  ENSG00000143603_8 (sequence is synthesized)
gtggtggcccgaaagctggaactcaccaaagcggagaagcacgttcataacttcatgatggacactcagctcaccaagcggatcaagaatgctgcagccaatgtccttcgggaaacatgg

SEQ ID NO: 381267 - DNA, 120 bp, Artificial Sequence
  ENSG00000143603_9 (sequence is synthesized)
ttaatctataaacacacaaagctgctaaagaagattgaccatgccaaagtgaggaaacaccagaggaagttcctccaagctatccaccagttgaggagcgtcaagatggaacagaggaag

SEQ ID NO: 381268 - DNA, 120 bp, Artificial Sequence
  ENSG00000143603_10 (sequence is synthesized)
ctgagtgaccaagccaacactctggtggacctttccaagatgcagaatgtcatgtatgacttaatcacagaactcaatgaccggagcgaagacctggagaagcagattggcagcctggag

SEQ ID NO: 381269 - DNA, 120 bp, Artificial Sequence
  ENSG00000143603_11 (sequence is synthesized)
tcgaagctggagcatctcaccgccagcttcaactccctgccgctgctcatcgccgacaccctgcgccagcagcagcagcagctcctgtctgccatcatcgaggcccggggtgtcagcgtg

SEQ ID NO: 381270 - DNA, 120 bp, Artificial Sequence
  ENSG00000143603_12 (sequence is synthesized)
gcagtgggcaccacccacaccccaatctccgatagccccattggggtcagctccacctccttcccgaccccgtacacaagttcaagcagttgctaaataaatctccccactccagaagca

SEQ ID NO: 381271 - DNA, 120 bp, Artificial Sequence
  ENSG00000143603_13 (sequence is synthesized)
attgagccagcgaggagtgaagctgagcctggcctcacacgctcctagaggaccacctcctgagagagttctttcaccccctcttctttctccaagctcccctcctgctctccctccctg

SEQ ID NO: 381272 - DNA, 120 bp, Artificial Sequence
  ENSG00000143603_14 (sequence is synthesized)
cccaatacaatgcattcttgagtggcagcgtctggactccaggcagccccagagaaccgaagcaagccaaagagaggactggagccaagatactggtgggggagattggatgcctggctt

SEQ ID NO: 381273 - DNA, 120 bp, Artificial Sequence
  ENSG00000143603_15 (sequence is synthesized)
tctttgaggacatctttggagcgagggtggctttggggtgggggcttgtgctgcagggaatacagccaggccccaagatggacacttctgggcacttccatgactcgggggtgggggact

SEQ ID NO: 381274 - DNA, 90 bp, Artificial Sequence
  ENSG00000143603_16 (sequence is synthesized)
tgagcagcagccaccaccgccagcgccaccagcagccccccagcagcccctgggaccctcgctgcagcctcagcctccgcagcttcagca

SEQ ID NO: 381275 - DNA, 82 bp, Artificial Sequence
  ENSG00000143603_17 (sequence is synthesized)
caccgcatcccctgtctcagctcgcccaactccagagccagcccgtccaccctggcctgctgcactcctctcccaccgcttt

SEQ ID NO: 381276 - DNA, 120 bp, Artificial Sequence
  ENSG00000143603_18 (sequence is synthesized)
ccgtccaccctggcctgctgcactcctctcccaccgctttcagggcccccccttcgtccaactccaccgccatcctccacccttcctccaggcaaggcagccagctcaatctcaatgacc

SEQ ID NO: 381277 - DNA, 120 bp, Artificial Sequence
  ENSG00000143603_19 (sequence is synthesized)
acttgcttggccactctccaagttccacagctacaagtgggcctggcggaggcagccggcaccgacaggccagccccctggtgcaccggcgggacagcaaccccttcacggagatcgcca

SEQ ID NO: 381278 - DNA, 120 bp, Artificial Sequence
  ENSG00000143603_20 (sequence is synthesized)
tgagctcctgcaagtatagcggtggggtcatgaagcccctcagccgcctcagcgcctcccggaggaacctcatcgaggccgagactgagggccaacccctccagcttttcagccctagca

SEQ ID NO: 381279 - DNA, 120 bp, Artificial Sequence
  ENSG00000143603_21 (sequence is synthesized)
accccccggagatcgtcatctcctcccgggaggacaaccatgcccaccagaccctgctccatcaccctaatgccacccacaaccaccagcatgccggcaccaccgccagcagcaccacct

SEQ ID NO: 381280 - DNA, 120 bp, Artificial Sequence
  ENSG00000143603_22 (sequence is synthesized)
tccccaaagccaacaagcggaaaaaccaaaacattggctataagctgggacacaggagggccctgtttgaaaagagaaagcgactgagtgactatgctctgatttttgggatgtttggaa

SEQ ID NO: 381281 - DNA, 120 bp, Artificial Sequence
  ENSG00000143603_23 (sequence is synthesized)
ctaactcatgttcattcagcgtgcttggtccgacatgccttgaaaccagaaatctaatctctgtttaggtgcctctacttgggagcgggaagaggagatgacaggaagcgacgcctctgg

SEQ ID NO: 381282 - DNA, 120 bp, Artificial Sequence
  ENSG00000143603_24 (sequence is synthesized)
cagggcccttgctgcagagttggtggagaacagaaatccacgctcaatctcaggtcttcacgcggggggtgggggtcagatgcactgaagtagccaacagcgaagccagtccagaagagg

SEQ ID NO: 381283 - DNA, 120 bp, Artificial Sequence
  ENSG00000143603_25 (sequence is synthesized)
ggtccgctgggagggagggttgtgtcaggcttgggggatgggctcttcgccatgggggtctttgaacacacctctctcctttccttttgtctacggaagcctctgggtgacaaaagtaaa

SEQ ID NO: 381284 - DNA, 120 bp, Artificial Sequence
  ENSG00000143603_26 (sequence is synthesized)
agagagctgcccacaacttgccaaaacagatatactcgaatcagactgaaaaaaaaaaaaaaagacacagacaaataaaaagccagattttccactcgatattaatacccacataaacct

SEQ ID NO: 381285 - DNA, 120 bp, Artificial Sequence
  ENSG00000143603_27 (sequence is synthesized)
gtgtgtttgcaaacgtgtacatgtacacacatacacatcccacgttcgcttcaggtcctttcttatttgagcttaatccaaataaaaagggacttgacaccttaccctgcatacaatagg

SEQ ID NO: 381286 - DNA, 120 bp, Artificial Sequence
  ENSG00000143603_28 (sequence is synthesized)
caccccttacatgtgttttgagttggtctgaatctgaacatggggtgctttcagttcaggtagttagctagttctggccacattctgagtttcactgaagatgtggatcccttcagacat

SEQ ID NO: 381287 - DNA, 120 bp, Artificial Sequence
  ENSG00000143603_29 (sequence is synthesized)
aatgcacattgctttgtcctggatatgcaccttgcttgatttgaaatggatgccaagccaaaattgttggcattcaggagggataagcaggcttctaaaaataacagcatctgcagagtt

SEQ ID NO: 381288 - DNA, 120 bp, Artificial Sequence
  ENSG00000143603_30 (sequence is synthesized)
ttcttcttccatccaaacaagttgtgtttcgatggtccacatgaccaggtgtatgtctgtaagtgtggagggagaggacaagaaattgtgcatgtgtgtgcagacatgcacaaacaggag

SEQ ID NO: 381289 - DNA, 120 bp, Artificial Sequence
  ENSG00000143603_31 (sequence is synthesized)
caatccaataacaccttagtgaatagaaatatggttggggatttgctgagctgtatttatccagcaacaggtttccagccccagatgttagtagtgcaaaagggccaagtgcctcaattg

SEQ ID NO: 381290 - DNA, 120 bp, Artificial Sequence
  ENSG00000143603_32 (sequence is synthesized)
tgagcctctgagctaggaggagaagtgatgaagagtggcctatgtggtcccttctacctgaccttaagtcatctcaaaatgaaatattgtgagaatgaagggaacccttagggaaccttg

SEQ ID NO: 381291 - DNA, 120 bp, Artificial Sequence
  ENSG00000143603_33 (sequence is synthesized)
tgggtaaggtaagtggacatggatttgtcagtagcctgttcctactgtgccatgttaatcttggtgcgaaaaactattccaatacatctcaaactccaagagacttcagaaacatcaaga

SEQ ID NO: 381292 - DNA, 120 bp, Artificial Sequence
  ENSG00000143603_34 (sequence is synthesized)
tttagtgtaatgagcggcgcagaaaaatgttttcattgctccataatctgaccacacgtaacatttgtgacgtgaaaaccatgactttctcattctgaggtctttggtttctgcctgtgg

SEQ ID NO: 381293 - DNA, 120 bp, Artificial Sequence
  ENSG00000143603_35 (sequence is synthesized)
gaaattgaatggcactgtatggactatttcatctgttgatggtaaaacaaaagggtgatttttttgcttgtggttgtcatcttgggtttacctttgtaagaagacatcatcaccattctg

SEQ ID NO: 381294 - DNA, 120 bp, Artificial Sequence
  ENSG00000143603_36 (sequence is synthesized)
aaggcagtggcttggcatggagatttttattctgtagcactgggcctgttcttctaaggacagcacaaggtagacaattgtagagccaaggccactttttcaggaagatctagtctcttg

SEQ ID NO: 381295 - DNA, 120 bp, Artificial Sequence
  ENSG00000143603_37 (sequence is synthesized)
ctaaccctcttctttctctcttgctattgctgctgctcttttgatggtttatagtcttaatggcctgccttgataattcctttgaacactttcattagttgttttgcataccagagatgc

SEQ ID NO: 381296 - DNA, 120 bp, Artificial Sequence
  ENSG00000143603_38 (sequence is synthesized)
cgcacctgctgttggcttatttttttacttgttctattaactgttgattatctgaatgtttcccctcctccttgtttcatgtcccaagaatggtgctcctgttttcagtgacagttcagc

SEQ ID NO: 381297 - DNA, 120 bp, Artificial Sequence
  ENSG00000143603_39 (sequence is synthesized)
tgaacatataagcagatgtgtaaacagatgaagtaaccatgcagtttccttgtggcattagttccatttcacaaagtgaagaccactggtgggctgatctgagtgtgccaatcctgatca

SEQ ID NO: 381298 - DNA, 120 bp, Artificial Sequence
  ENSG00000143603_40 (sequence is synthesized)
tttaaacctacagccttcaactggtgattcctacccaccgttttcattctgctataaccctgtgatatgtgtgcgtgtgggtgtgagtgtgggtgtgtgcacatatagagatttagtctt

SEQ ID NO: 381299 - DNA, 120 bp, Artificial Sequence
  ENSG00000143603_41 (sequence is synthesized)
aatttcaaccaaatgacatgcaagattccactgccactcttcctggccaaaagtgtgcacagactgtgatttattcattgtggtctgtgactttaacccatcattgatgctctcacttag

SEQ ID NO: 381300 - DNA, 120 bp, Artificial Sequence
  ENSG00000143603_42 (sequence is synthesized)
gtaaaccctaaagaccaaactagcaacactagtcaagggagtgactggagttatttctggtagcagtagccactggcatcctagaaacacatggacatttgtagcatgaattgacctatt

SEQ ID NO: 381301 - DNA, 120 bp, Artificial Sequence
  ENSG00000143603_43 (sequence is synthesized)
ggtagtgcaatagctatacatgatttttattcttggcaaaagaaaatgcttcaaaaaaaaagtgatcaaacctgcacattgatcctgtaatagcaaatggaaggctatttctctgtacta

SEQ ID NO: 381302 - DNA, 120 bp, Artificial Sequence
  ENSG00000143603_44 (sequence is synthesized)
gcatttcagctttatgtgggaaagttacccgttctcctgcaagtacaatcaacccttgatgacttaagtattaattattctgggtgtagctcacccaagttttcttcctacatcttttgg

SEQ ID NO: 381303 - DNA, 120 bp, Artificial Sequence
  ENSG00000143603_45 (sequence is synthesized)
ctaattccaccacacctcagcatcacagtcagatgggaaaaggggcaggtggattctcatgtcatgccttcttgtaccttattttcaagttttgtggtggaggaggtttaattatctgct

SEQ ID NO: 381304 - DNA, 76 bp, Artificial Sequence
  ENSG00000143603_46 (sequence is synthesized)
attttcaagttttgtggtggaggaggtttaattatctgctcaagaatctggtatatacaaggcgagaggatcacct

SEQ ID NO: 381305 - DNA, 87 bp, Artificial Sequence
  ENSG00000143603_47 (sequence is synthesized)
cggctatatgtaaaaactattaattatgtaacctcactccaatactgtactgatcaagatctgcccactcctagaggactgacccaa

SEQ ID NO: 381306 - DNA, 120 bp, Artificial Sequence
  ENSG00000143603_48 (sequence is synthesized)
tactgatcaagatctgcccactcctagaggactgacccaatggcagatcccctactataatctttctgacaactcagtgacaggtaaaatcactctaatattcctaaaatatctagacac

SEQ ID NO: 381307 - DNA, 120 bp, Artificial Sequence
  ENSG00000143603_49 (sequence is synthesized)
ttgaattagaaatacagaaccacccccacccctgccattgcttaagccatattaaagcttcatgtactgtaaagtcagggatgtactgtgatactttaagaccactaatctcagtggaat

SEQ ID NO: 381308 - DNA, 120 bp, Artificial Sequence
  ENSG00000143603_50 (sequence is synthesized)
ttcaggacatagcattagttggtaaattacaccagactaggggctcactcctccttagattgaagtccaaataaaagtcttcacctttggatcaaaggccacatatatatgatcatcatc

SEQ ID NO: 381309 - DNA, 120 bp, Artificial Sequence
  ENSG00000143603_51 (sequence is synthesized)
aataaattgtcataaagtgtctatgaactgctcttgccatcttcctaatacgtaacttcatgacatcatgtctctagaagtgcttaatacaatccaaaagaacaaggggggaaggcccca

SEQ ID NO: 381310 - DNA, 120 bp, Artificial Sequence
  ENSG00000143603_52 (sequence is synthesized)
agtcaccactgaccgacctcagcaggggccagtggtagaacaacaatcttgtgaattaggagacatagaaaatgtacgcaaaagtaaattccaagcgctgagcatgtacaagctattttt

SEQ ID NO: 381311 - DNA, 120 bp, Artificial Sequence
  ENSG00000143603_53 (sequence is synthesized)
attattaaaagccaagaaggaagagcattgaagaagtaatgattttaatatagtgggggatttcccccttaaatttttataatttccttgtgaataaacaatcatggaaaagaagaaacc

SEQ ID NO: 381312 - DNA, 120 bp, Artificial Sequence
  ENSG00000143603_54 (sequence is synthesized)
aatacatcaatttctctgtacttaaaatgaagagaataattaatattcttaagtacaatgttttcaatagagaacaaatgaaatcacctttgtcatcaacagcagcccagactgactgta

SEQ ID NO: 381313 - DNA, 120 bp, Artificial Sequence
  ENSG00000143603_55 (sequence is synthesized)
tctagatcacaccttgatgttacgtttgaatgcagtcagtagttaccaaaaagtaattagtgcacattaaatagtggtaaaatcagcagggagaaatatgggattagcacgtagttccag

SEQ ID NO: 381314 - DNA, 120 bp, Artificial Sequence
  ENSG00000143603_56 (sequence is synthesized)
aaccttcctcctcctccagagtgcaactcaacaaacagtacactccaaattaagaatcaatgtttcatcccaggacaaacggtgttgctcccatcacagtaccacaactgagatactgtg

SEQ ID NO: 381315 - DNA, 120 bp, Artificial Sequence
  ENSG00000143603_57 (sequence is synthesized)
aagtcattgcactaccagtaggttactactcttttgaagttactgtttttaaatcctaaaatatgtccccagttttctacattcattcttcttcccctaagagttgctagaagcagatga

SEQ ID NO: 381316 - DNA, 120 bp, Artificial Sequence
  ENSG00000143603_58 (sequence is synthesized)
aggatccctattgactctgcagggtttgatttcagtaccttagacagctatctggtgacttcccagtaggcacgaacaaccccttctctccccttgcagtcggtgggcttgatgacgccc

SEQ ID NO: 381317 - DNA, 120 bp, Artificial Sequence
  ENSG00000143603_59 (sequence is synthesized)
cagacagtatcctttccttctctactgccgccaaaataaacattagggaaatgggatcattaacaccactgagaaaggagtttacagggatcgcaatagtaactgtctgcttgtggtagt

SEQ ID NO: 381318 - DNA, 120 bp, Artificial Sequence
  ENSG00000143603_60 (sequence is synthesized)
agaaagcttgtgccaggctgcatgaatagaaattaatgttaaactcctgttagacgagtaatatgtagatttttattgaaacagaccacagcttattaaaaagtactcagtgcaatggta

SEQ ID NO: 381319 - DNA, 120 bp, Artificial Sequence
  ENSG00000143603_61 (sequence is synthesized)
tatacatatatacagatagaaaaaaatataactgtgatctttttgtcttacgccattactggaaacacccaaacgtgaactggagttccctctgaacaaaaccattgtcaaatcttcaac

SEQ ID NO: 381320 - DNA, 120 bp, Artificial Sequence
  ENSG00000143603_62 (sequence is synthesized)
atatgacctccaaatctaggtgccaagtgccctgtgacagttgtttacacacctgaaaaatgtatcctggaagctgtaatcttgggcctgggctatgtgttgaaacaagcaaaagagaca

SEQ ID NO: 381321 - DNA, 120 bp, Artificial Sequence
  ENSG00000143603_63 (sequence is synthesized)
catcgtgaccaaccaagctggtggaggaaaagcacaaaattcaactccaacctgcagttaggatcccaaagagatgttgacatttatagccaaaaagaaaaagtacatatatatatatat

SEQ ID NO: 381322 - DNA, 120 bp, Artificial Sequence
  ENSG00000143603_64 (sequence is synthesized)
atatatatatatatatatatatctgaatcagatcgaagcagccaacgtccagcttcactcaagaaggacaaggaataaacaacattctctagctgtgtcatgttgtctcagtttttgaat

SEQ ID NO: 381323 - DNA, 120 bp, Artificial Sequence
  ENSG00000143603_65 (sequence is synthesized)
cagtttttgaatctcaaccaggactgatccaccttcatcagatacgttttttaatggcgcaacaactcaattttggtcccagactctccattctgcactggccacgagaacaacaagaga

SEQ ID NO: 381324 - DNA, 120 bp, Artificial Sequence
  ENSG00000143603_66 (sequence is synthesized)
atgacaggatgttaatggaggaaacattttcatggcaagctcagaaactgaagtgtttatattcagaatcagatgagctttaatatgaatttgcatcttgcctctgtactgcttgctatt

SEQ ID NO: 381325 - DNA, 120 bp, Artificial Sequence
  ENSG00000143603_67 (sequence is synthesized)
aatgataggagaaagcataacagtttattttaaatatgaaatatattgatatattataaaatatattgtaactttcaattaacattttgtatcaaactagtgtttagcaggtccactgtc

SEQ ID NO: 381326 - DNA, 120 bp, Artificial Sequence
  ENSG00000143603_68 (sequence is synthesized)
tgtcagcctgctctcccaatgactgtttctgagtacacatcactgttagtgattgccgggcacccagaaaaagggtcctcctaccacagcctactgaactgccatattctaattctccaa

SEQ ID NO: 381327 - DNA, 120 bp, Artificial Sequence
  ENSG00000143603_69 (sequence is synthesized)
ggcctgggtattagagacaaaagaacattattccaagagtagaggaataattctaccctaaattctatcaagccatttcagaagagattttaaaagccatcactcctttagtagctctgc

SEQ ID NO: 381328 - DNA, 120 bp, Artificial Sequence
  ENSG00000143603_70 (sequence is synthesized)
aaagccagtttaataaaagttcaggctctttctatataaattcaaaggcctcattacataaattatataagtctcaaacctagccaaccagttttcctttgacaatgtcagaattggaca

SEQ ID NO: 381329 - DNA, 120 bp, Artificial Sequence
  ENSG00000143603_71 (sequence is synthesized)
taagaaagagtcctgttttcctgtaacttaaaatactcaaaatcctaggcattctgagtttctccatgtacgtgaaaccggggtcggctttccaaactacacaaggcccaacaagagtcc

SEQ ID NO: 381330 - DNA, 120 bp, Artificial Sequence
  ENSG00000143603_72 (sequence is synthesized)
agtgtgcagatgtgcttttctaaattggcaatacccttgagggagcaaggttcccacatgtttatcaaggacatggagcccagctcctaagggagtgatgggaggagccggcaggacatg

SEQ ID NO: 381331 - DNA, 120 bp, Artificial Sequence
  ENSG00000143603_73 (sequence is synthesized)
aacagccagagccagcaaagagccgggctgccttttctgctagcttcctctagctgggaggaaataaagggttcccgttgagatattgtcctttatagcaaaattaagcaactcatggaa

SEQ ID NO: 381332 - DNA, 120 bp, Artificial Sequence
  ENSG00000143603_74 (sequence is synthesized)
tctacacccctctttctctacagagcagctgagacatacatgtagaagttctcagttccctccttcatatggctaaggcactacttctagatgaaaacaggatgtgttcggttacagaat

SEQ ID NO: 381333 - DNA, 120 bp, Artificial Sequence
  ENSG00000143603_75 (sequence is synthesized)
aaagattttctagaatcagtgagcctcttctcacctgggaccctcacttgctgttgttgctttggtgcaatattgtacaggtgcaaaccaggttgcatcggggcagattaactgagccta

SEQ ID NO: 381334 - DNA, 120 bp, Artificial Sequence
  ENSG00000143603_76 (sequence is synthesized)
tgtgtctcttcccttcccaagccctgaaaattcacatagatttacagatagtgcaaaacaacaagttttctcctgggaaaaggctggaatccttcaaatttcaatttatatgagcttaaa

SEQ ID NO: 381335 - DNA, 120 bp, Artificial Sequence
  ENSG00000143603_77 (sequence is synthesized)
ggtatataagtcatggggctcactgacattaggtattcatgctgtttgaaagagaaatgtctaaatgcccgttttcagtctgtttgtgtagctgagccctaacttgtacacaagttttct

SEQ ID NO: 381336 - DNA, 120 bp, Artificial Sequence
  ENSG00000143603_78 (sequence is synthesized)
tgttatggagctaaattctctcagtgcctgtattactcctcagttatatgttaggccgagctccactaaagccatctgaactccagggcacttgtttttatcaggttacttactcaccgg

SEQ ID NO: 381337 - DNA, 120 bp, Artificial Sequence
  ENSG00000143603_79 (sequence is synthesized)
ataatggaaattggcttattttcaattttacaattgactgatgaatgtattggtggtaattgatttatttcttcacttttttttgctactaaatgattttttcttttttaaaattattat

SEQ ID NO: 381338 - DNA, 120 bp, Artificial Sequence
  ENSG00000143603_80 (sequence is synthesized)
tgcctgggcctcccaaagtgagccactgtgcctggcccagtaagtgcttttttcttttggtttttccttctaacactgctcagaccaagacttacatttataaagagcaaatatattctg

SEQ ID NO: 381339 - DNA, 120 bp, Artificial Sequence
  ENSG00000143603_81 (sequence is synthesized)
acctttcccctcaaagttgtattccatctagaatcaaggaaacaaatgcaaattcatcatttggggaaagcagacctcttgacagtaattcaagtccatggctatatgctaacccttgct

SEQ ID NO: 381340 - DNA, 120 bp, Artificial Sequence
  ENSG00000143603_82 (sequence is synthesized)
actcaaagtgtggtccacagaccagcagcgttagcatcatctgtaagcttgttagaaatgcagaatctcaggccccacatcaaaccttcttcatcagaattggccttttaacaaatcccc

SEQ ID NO: 381341 - DNA, 120 bp, Artificial Sequence
  ENSG00000143603_83 (sequence is synthesized)
aggtgacctgtatgcaccagaaatattgataagcactggcctcacctcaccgtagtgataactaacctcgttaataattagagaatgaagctatctcttccttgagtctcatttacagaa

SEQ ID NO: 381342 - DNA, 120 bp, Artificial Sequence
  ENSG00000143603_84 (sequence is synthesized)
ttatttgaagatgtgaaggtcctgaatgatcataaggattaaaaaaatgcatctttaaattccacttgaggttatataacttggatggtctacatcaaacataataaagtcaataagaga

SEQ ID NO: 381343 - DNA, 120 bp, Artificial Sequence
  ENSG00000143603_85 (sequence is synthesized)
tagtctttttccggtcttacctaaatagcactccatatccttgagccacctcaaagcccccatttttaagttttagtctttttttttttagaccagactagcaaagccatcagaatatca

SEQ ID NO: 381344 - DNA, 120 bp, Artificial Sequence
  ENSG00000143603_86 (sequence is synthesized)
ggtggaacctcagggcaggtcctctggaaggctacaggagtctctgcttagcatagtacagaaattgttgtgtttctcgatccttgtgttcttcccttgaggaactcagcatctcaccag

SEQ ID NO: 381345 - DNA, 120 bp, Artificial Sequence
  ENSG00000143603_87 (sequence is synthesized)
taagaactcccctcccctagaggaaaatagcaagagaagttagtttaaccatctagaaacattgctaatctccttgaaagccaattctcttactcattgcaccaacaagaaacactccaa

SEQ ID NO: 381346 - DNA, 120 bp, Artificial Sequence
  ENSG00000143603_88 (sequence is synthesized)
ggtgggcaaggaaagacgtgaattctgatattggcgccataactcgatatgtacccagaaacagttatgttctaaattaatggctttaacctgttcattgtaaaaagtgccttggacttc

SEQ ID NO: 381347 - DNA, 120 bp, Artificial Sequence
  ENSG00000143603_89 (sequence is synthesized)
aatctaaagaggtcagtataaatatgtatgtgtgtgtgtgacgtgtatgtaggcaaatatttacagatttatacatacataggtgcacacacatatacccgcacattcatatataatata

SEQ ID NO: 381348 - DNA, 120 bp, Artificial Sequence
  ENSG00000143603_90 (sequence is synthesized)
tacatacatatataaatgcttcataatatatcatattgctattcacagctccatttcttttgtctggtcctatgtttatttgtttagtgagacctttacatagagaggttctattcggaa

SEQ ID NO: 381349 - DNA, 120 bp, Artificial Sequence
  ENSG00000143603_91 (sequence is synthesized)
cattgatgtattttttgtttgttttttactttttattaaaaaggtaaaggatattaaaaaaaaaaaaaaaagtcaagtgcctgaaggttttgaatggagttacggtaaactttctcaggt

SEQ ID NO: 381350 - DNA, 120 bp, Artificial Sequence
  ENSG00000143603_92 (sequence is synthesized)
caccaaagaggaaacatttttcctttggaaaacatttttctgtttcagtgactttgttttcccttggtggtaatgcataaataagagtggttaaagtgattttgtaagttttatttcaat

SEQ ID NO: 381351 - DNA, 120 bp, Artificial Sequence
  ENSG00000143603_93 (sequence is synthesized)
ccatttctgtggttcccataaggcaatagctaaaaatttgttcagtctagtgcccagttttctccacacatcagcatcagaagggcccggtcttcacatgctctgtgtggttttgttcgc

SEQ ID NO: 381352 - DNA, 120 bp, Artificial Sequence
  ENSG00000143603_94 (sequence is synthesized)
gttgttactgtgttccttactaaggaaaggcaaatgaaattgcaggggctggagcttagaccagctccaaatatggcttccttttggtaacacacacagaaggtggactagtgggaagtc

SEQ ID NO: 381353 - DNA, 120 bp, Artificial Sequence
  ENSG00000143603_95 (sequence is synthesized)
tctctccctgaagcaggtgggaacctgtgtcttagaaggcagaggagtcccagtgaactctccacagctccatgggccctgcctgtctacagttatacaactgcctgtatgagtcagcct

SEQ ID NO: 381354 - DNA, 120 bp, Artificial Sequence
  ENSG00000143603_96 (sequence is synthesized)
ttctctaccttagccaaaggtcttctctttctgtggtgtgacagcttgtaatgaaccaacttgctctggttagaagtccctagagctccaggaagagtcgccaggtttccattgctgtgc

SEQ ID NO: 381355 - DNA, 120 bp, Artificial Sequence
  ENSG00000143603_97 (sequence is synthesized)
tcaaagctcaaggacacattatacttctttaaaccaactaaatctctctagctccctgcccccatggtgacactttcataataggcagggccaagtcagagaggtcatgccctgtataca

SEQ ID NO: 381356 - DNA, 120 bp, Artificial Sequence
  ENSG00000143603_98 (sequence is synthesized)
gtgtcaatcagaagagacactgcaaaatgtcagaggtgaccagaaagacaacagatctctccagctgtcctcacagctgcaggcacatttgtggaattgtgagtaggaaggcttggcagc

SEQ ID NO: 381357 - DNA, 120 bp, Artificial Sequence
  ENSG00000143603_99 (sequence is synthesized)
caggggatgggaaatgaatttccccaagttgaaaaccctgtacccttactttccttcccataaatttttctgtagttctaggtaaataataataataataaaaatgcaaattaggtgctt

SEQ ID NO: 381358 - DNA, 120 bp, Artificial Sequence
  ENSG00000143603_100 (sequence is synthesized)
tagaaggagtatgtaatatctgggactttttctaagttggtagacctaaaaaatgttttcaaaaatatatctagctgcatttctactgctgtcattccttaaagctcttcctccaaaaac

SEQ ID NO: 381359 - DNA, 120 bp, Artificial Sequence
  ENSG00000143603_101 (sequence is synthesized)
tccatatgaatgaatacatttaccaactcagtgattactaaataatagtactttatacttatacacagtaatacctttcatctaaggatctcaaatgccaatatattagtcatcaccctg

SEQ ID NO: 381360 - DNA, 120 bp, Artificial Sequence
  ENSG00000143603_102 (sequence is synthesized)
taaggtggatgacatattattcccattattccaatgggaaaattgggccatagaaaactgaggagcaaatgactcatctacaggaattaaatggaaaaaacaggctaggatttctcagca

SEQ ID NO: 381361 - DNA, 120 bp, Artificial Sequence
  ENSG00000143603_103 (sequence is synthesized)
cactttaggagtgaatgaaaacttacaggcttcagttctactgctggccaccattggatttgtaagatccaggatgtgtattgaccacatgtgtccagacccaggcttagggcatctgga

SEQ ID NO: 381362 - DNA, 120 bp, Artificial Sequence
  ENSG00000143603_104 (sequence is synthesized)
atgagagtggtgggctggtgtgtgggtctgaggatctggatgggagactgcattttcttctctgtgcaaaatatggaagtgtgaccttgaaggtgggcttagtctatggccttccccact

SEQ ID NO: 381363 - DNA, 120 bp, Artificial Sequence
  ENSG00000143603_105 (sequence is synthesized)
cctgcttgaactgaagctggagagaatgggcatttttaaatgttacggcatatgctaatataatattatggcattaaataaaaacaagaagagaactgactaaaaccaaaaaaccaaaaa

SEQ ID NO: 381364 - DNA, 120 bp, Artificial Sequence
  ENSG00000143603_106 (sequence is synthesized)
caggaaagtcagcttaaaggacactccttgcagggactgagctggcacctactccttagagcttgctgataccaggcctgccacgcgacatctgcaaggacagttgtttggtgttttgct

SEQ ID NO: 381365 - DNA, 120 bp, Artificial Sequence
  ENSG00000143612_0 (sequence is synthesized)
gctggaaggcgtcgttctcctttcccagctctcctgcctgtccgccatgttttcaggccgggtctggcttggtcttcccccgtaaggaaatggccggggagctccaggggacccaggcgc

SEQ ID NO: 381366 - DNA, 120 bp, Artificial Sequence
  ENSG00000143612_1 (sequence is synthesized)
cgtcgcttcggcggagcctgggctgaccagccaggacagcggggtaaacccgaacaattctgcgcgaggtagggaggccatggcgtccggcagtaactggctctccggggtgaatgtcgt

SEQ ID NO: 381367 - DNA, 120 bp, Artificial Sequence
  ENSG00000143612_2 (sequence is synthesized)
gctggtgatggcctacgggagcctggtgtttgtactgctatttatttttgtgaagaggcaaatcatgcgctttgcaatgaaatctcgaaggggacctcatgtccctgtgggacacaatgc

SEQ ID NO: 381368 - DNA, 120 bp, Artificial Sequence
  ENSG00000143612_3 (sequence is synthesized)
ccccaaggacttgaaagaggagattgatattcgactctccagggttcaggatatcaagtatgagccccagctccttgcagatgatgatgctagactactacaactggaaacccagggaaa

SEQ ID NO: 381369 - DNA, 120 bp, Artificial Sequence
  ENSG00000143612_4 (sequence is synthesized)
tcaaagttgctacaactatctgtataggatgaaagctctggatgccattcgtacctctgagatcccatttcattctgaaggccggcatccccgttccttaatgggcaagaatttccgctc

SEQ ID NO: 381370 - DNA, 120 bp, Artificial Sequence
  ENSG00000143612_5 (sequence is synthesized)
ctacctgctggatctgcgaaacactagtacgcctttcaagggtgtacgcaaagcactcattgatacccttttggatggctatgaaacagcccgctatgggacaggggtctttggccagaa

SEQ ID NO: 381371 - DNA, 120 bp, Artificial Sequence
  ENSG00000143612_6 (sequence is synthesized)
tgagtacctacgctatcaggaggccctgagtgagctggccactgcggttaaagcacgaattgggagctctcagcgacatcaccagtcagcagccaaagacctaactcagtcccctgaggt

SEQ ID NO: 381372 - DNA, 120 bp, Artificial Sequence
  ENSG00000143612_7 (sequence is synthesized)
ctcccctccagtcagaagagtaaacgtgccaagcacttccttgaattgaagagctttaaggataactataacacattggagagtactctgtgacggagctgaaggactcttgccgtagat

SEQ ID NO: 381373 - DNA, 120 bp, Artificial Sequence
  ENSG00000143612_8 (sequence is synthesized)
taagccagtcagttgcaatgtgcaagacaggctgcttgccgggccgccctcggaacatctggcccagcaggcccagactgtatccatccaagttcccgttgtatccagagttcttagagc

SEQ ID NO: 381374 - DNA, 120 bp, Artificial Sequence
  ENSG00000143612_9 (sequence is synthesized)
ttgtgtctaaagggtaattccccaacccttccttatgagcatttttagaacattggctaagactattttcccccagtagcgcttttttctggatttgcattcaggtgttattcttaatgt

SEQ ID NO: 381375 - DNA, 120 bp, Artificial Sequence
  ENSG00000143612_10 (sequence is synthesized)
ttctgtcaaagcttcttaaaaatcttcacttggtttcagccatagttcaccttccctgttccaggtttatttaattccaaaggtgagagttggagtgagatgtcttccatatctatacct

SEQ ID NO: 381376 - DNA, 120 bp, Artificial Sequence
  ENSG00000143612_11 (sequence is synthesized)
ttgtgcacagttgaatgggaactgtttgggtttagggcatcttagagttgattgatggaaaaagcagacaggaactggtgggaggtcaagtggggaagttggtgaatgtggaataactta

SEQ ID NO: 381377 - DNA, 120 bp, Artificial Sequence
  ENSG00000143612_12 (sequence is synthesized)
cctttgtgctccacttaaaccagatgtgttgcagctttcctgacatgcaaggatctactttaattccacactctcattaataaattgaataaaagggaatgttttggcacctgatataat

SEQ ID NO: 381378 - DNA, 120 bp, Artificial Sequence
  ENSG00000143612_13 (sequence is synthesized)
ctgccaggctatgtgacagtaggaaggaatggtttcccctaacaagcccaatgcactggtctgactttataaattatttaataaaatgaactattatcaaataaaacgtatgaatcagtc

SEQ ID NO: 381379 - DNA, 66 bp, Artificial Sequence
  ENSG00000143612_14 (sequence is synthesized)
atcccatttcattctgaaggccggcatccccgttccttaatgggcaagaatttccgctcctacctg

SEQ ID NO: 381380 - DNA, 120 bp, Artificial Sequence
  ENSG00000143612_15 (sequence is synthesized)
tgaccttcataaagcatataaacaaaatccatgataccataagagttgtcaggttctagactattagatcagtctcttacattagaaagcagatgcggccgggcacagtggttcacgcct

SEQ ID NO: 381381 - DNA, 120 bp, Artificial Sequence
  ENSG00000143612_16 (sequence is synthesized)
agcgagactccatctcaaaaaaaaagactaaagaatgagaagagatatcattgtgctgttttctccacagagatcccatttcattctgaaggccggcatccccgttccttaatgggcaag

SEQ ID NO: 381382 - DNA, 68 bp, Artificial Sequence
  ENSG00000143612_17 (sequence is synthesized)
ggtgagccaagatcgtgccattagaaaagaaagcagatgcaactatacaagctagtaaaagaagtttt

SEQ ID NO: 381383 - DNA, 120 bp, Artificial Sequence
  ENSG00000143612_18 (sequence is synthesized)
gaaagcagatgcaactatacaagctagtaaaagaagtttttactagcatttttcttgtgtgcatttttcttgtcttttgtttagcccaataaaatgtcaaaattggtgtagcctagcaaa

SEQ ID NO: 381384 - DNA, 120 bp, Artificial Sequence
  ENSG00000143614_0 (sequence is synthesized)
ccgtcgccgccgccgctgcccccgtctgtaccgcagtgtctgctccgcccgcccgccccggtccggcccgcccccctcccctacccccgtccctagtcccgtcagcagggtctggatccc

SEQ ID NO: 381385 - DNA, 120 bp, Artificial Sequence
  ENSG00000143614_1 (sequence is synthesized)
ccccgtccctagtcccgtcagcagggtctggatcccctgtgccgtcgcctcttcctttttcgacgcctccgccgccgcctgaggaggcgagctagccgggagttacaccgccaccgccag

SEQ ID NO: 381386 - DNA, 120 bp, Artificial Sequence
  ENSG00000143614_2 (sequence is synthesized)
gatggatagaatgacagaagatgctcttcgcttgaatctgttgaagcggagcttggacccagcagatgagcgagatgatgtcctggcaaagcgactcaaaatggaggggcatgaggccat

SEQ ID NO: 381387 - DNA, 120 bp, Artificial Sequence
  ENSG00000143614_3 (sequence is synthesized)
ggaacgtctgaaaatgttggcattgctcaaaaggaaggatttggcaaatcttgaggtgccacatgagttacccaccaaacaggatggcagtggtgtcaagggctatgaagaaaaacttaa

SEQ ID NO: 381388 - DNA, 120 bp, Artificial Sequence
  ENSG00000143614_4 (sequence is synthesized)
cgggaatctcaggcctcatggagacaacaggactgctggaaggccaggcaaagaaaacatcaatgatgagcctgtggatatgagtgctagacggagtgagccagagcgaggaaggctaac

SEQ ID NO: 381389 - DNA, 120 bp, Artificial Sequence
  ENSG00000143614_5 (sequence is synthesized)
tccctcaccagacatcattgttttgtctgacaatgaggcttccagtccccgttccagttccagaatggaagaaagactcaaagcagccaacttagagatgtttaaggggaaaggcattga

SEQ ID NO: 381390 - DNA, 120 bp, Artificial Sequence
  ENSG00000143614_6 (sequence is synthesized)
ggagcggcagcagcttatcaagcagctgagggatgagctacgattggaagaagcccgactggtcctgttaaagaaactgagacagagtcagctacagaaagagaatgtggtccagaagac

SEQ ID NO: 381391 - DNA, 120 bp, Artificial Sequence
  ENSG00000143614_7 (sequence is synthesized)
tccagttgtacagaatgcagcatctattgttcagccatctcctgcccatgtgggacagcagggcctatctaagcttccctctcggcctggggcccaaggggttgaacctcaaaatttgag

SEQ ID NO: 381392 - DNA, 120 bp, Artificial Sequence
  ENSG00000143614_8 (sequence is synthesized)
aacattacagggtcacagtgtcatccgttcagctaccaataccacccttccacacatgttgatgtctcaacgtgttattgcaccaaacccagcccagctacagggtcagcggggcccgcc

SEQ ID NO: 381393 - DNA, 120 bp, Artificial Sequence
  ENSG00000143614_9 (sequence is synthesized)
taagcctggccttgtacgcaccacaacacccaacatgaatcccgccatcaattatcaaccgcagtcaagttcttctgttccatgtcagcgtacaacatcctctgccatctatatgaacct

SEQ ID NO: 381394 - DNA, 120 bp, Artificial Sequence
  ENSG00000143614_10 (sequence is synthesized)
tgcttctcatatccagccagggacggtgaacagagtgtcctcgccacttcctagccccagcgccatgactgatgctgccaactcacaggctgcagccaaattggctcttcgcaaacagct

SEQ ID NO: 381395 - DNA, 120 bp, Artificial Sequence
  ENSG00000143614_11 (sequence is synthesized)
ggaaaagacactcctggagatcccaccccctaaacctcctgctcccttacttcatttcttgcctagtgcagccaatagcgagttcatctacatggtaggcttggaagaagtcgtacagag

SEQ ID NO: 381396 - DNA, 120 bp, Artificial Sequence
  ENSG00000143614_12 (sequence is synthesized)
tgtcattgacagccaaggcaaaagctgtgcctcacttctgcgggttgaaccctttgtatgtgcccagtgccgcacagatttcacccctcactggaagcaagaaaagaatggtaagattct

SEQ ID NO: 381397 - DNA, 120 bp, Artificial Sequence
  ENSG00000143614_13 (sequence is synthesized)
atgtgagcagtgtatgacctccaaccagaaaaaggctctaaaagctgaacacaccaaccggctgaaaaatgcatttgtgaaagccctacagcaggaacaggaaattgaacagcgattaca

SEQ ID NO: 381398 - DNA, 120 bp, Artificial Sequence
  ENSG00000143614_14 (sequence is synthesized)
gcagcaggcagccctctcccccactacggctccagctgtgtccagtgtcagtaaacaagagaccatcatgagacatcatacgcttcggcaggctccacagccccagagcagcctccagcg

SEQ ID NO: 381399 - DNA, 120 bp, Artificial Sequence
  ENSG00000143614_15 (sequence is synthesized)
tggcatacccacatctgcccgctccatgctttcaaactttgcacaggcaccccagttgtctgtgccaggtggcctccttggtatgccaggtgtcaacattgcatacttgaatactggcat

SEQ ID NO: 381400 - DNA, 120 bp, Artificial Sequence
  ENSG00000143614_16 (sequence is synthesized)
cggaggacacaaaggccccagtttggcagaccgacagcgtgaataccttttagacatgatccctccccggtctatatcgcagtccatcagtggacagaaataacgcctgttccacttgta

SEQ ID NO: 381401 - DNA, 120 bp, Artificial Sequence
  ENSG00000143614_17 (sequence is synthesized)
ctgccccatccttgaatcctttatccctttcctctttcattcccccaacttctgtcgcatgcagtgcctgtactggtgcctaccatacacggaaagcaaaacagaaaaacagaagacaaa

SEQ ID NO: 381402 - DNA, 120 bp, Artificial Sequence
  ENSG00000143614_18 (sequence is synthesized)
aaatagagatcagcaagaaaacacacgccctgccctgccacctcccctttatttcacactgctgcgatctgttcttctgccgctctgtcttctctcttcagttttctttaacagtgaggt

SEQ ID NO: 381403 - DNA, 120 bp, Artificial Sequence
  ENSG00000143614_19 (sequence is synthesized)
ggatctttacctctgatagaggtcagaatgaggtcctggggagaatctaagccctccgatgtgtgtttctaaagttgttttatgctataattattaccatttttaatgatgttgtgtgtc

SEQ ID NO: 381404 - DNA, 120 bp, Artificial Sequence
  ENSG00000143614_20 (sequence is synthesized)
tatgctataattattaccatttttaatgatgttgtgtgtcctccctttgttcagtggacggttaaaccttcccccactcaaccaatctttttctttttccttttcttccttttttttttt

SEQ ID NO: 381405 - DNA, 120 bp, Artificial Sequence
  ENSG00000143614_21 (sequence is synthesized)
agcattgcagattgcagtaggggtcccagctgccaagtaggacatgactaggagtgttaggggcagaagttttgaatgcacttaaccggaggagggcgcagggtggggggtatcaaagaa

SEQ ID NO: 381406 - DNA, 120 bp, Artificial Sequence
  ENSG00000143614_22 (sequence is synthesized)
ggacgaatagcaccctacctgtgggtgtttgggggctggacaatttgggtggcagtgtttggtactgaagttgggctctaagaatgaggggaaagagcctggggaggagcttaaaactca

SEQ ID NO: 381407 - DNA, 120 bp, Artificial Sequence
  ENSG00000143614_23 (sequence is synthesized)
accactctggaatttacccatagaagacgggaagaaagaggtatgaagatgggctcaattatgagccagggaggattgaaactaggtcctgcctttctgtatcttggggaaataagaccg

SEQ ID NO: 381408 - DNA, 120 bp, Artificial Sequence
  ENSG00000143614_24 (sequence is synthesized)
atctcctgaccccattgggaacacggaagtctattccaggccaaccagcccaaaattatttcatcttgtattctttgtaaaattctccctcaccccaccctgcttttaaaaattctaatc

SEQ ID NO: 381409 - DNA, 120 bp, Artificial Sequence
  ENSG00000143614_25 (sequence is synthesized)
tatcccctctaaccatagccccatctataatacagaggaacggctgttccaaggctgtttgctgggtgtcccacaagttgggtggacataaatgagtcaagtgacaacaggaggaaatag

SEQ ID NO: 381410 - DNA, 120 bp, Artificial Sequence
  ENSG00000143614_26 (sequence is synthesized)
acttagacgaaagaaaggatttctcttccaacagttgagattcgcatatttgcctattctttcaccctctgagtgccaggagatgagaggctgggggtacacaatcaggttggagtcctg

SEQ ID NO: 381411 - DNA, 120 bp, Artificial Sequence
  ENSG00000143614_27 (sequence is synthesized)
tccttactctgctgcaccagctgcagaaccaactgctcaaagccaaacagctcatggcaaaaccagcttaggacctctgctgtacaaatagttgcttcccactgccccccgcccgccccc

SEQ ID NO: 381412 - DNA, 120 bp, Artificial Sequence
  ENSG00000143614_28 (sequence is synthesized)
attttgccttttttttttttttttttttaagcgctactaatgtagagaatgaattgaattgtgcaatgttgctgttctggggactggggagattagcatcccatttgcccacactgtggg

SEQ ID NO: 381413 - DNA, 120 bp, Artificial Sequence
  ENSG00000143614_29 (sequence is synthesized)
ccacactgtgggaagacggagtggaccaggctgtttttgaagtaagggaagccccttaaaggtacgggtttctgctcttctcatagtgtacacccacctgcctctctggctccagaagct

SEQ ID NO: 381414 - DNA, 120 bp, Artificial Sequence
  ENSG00000143614_30 (sequence is synthesized)
gccagagtgcactggggggaatgttctcagcagagaagaatgaggagaagtttaatattttgcccttgaaagtcacctgaggaagtttccccacttttattttttaaaattaagtaattt

SEQ ID NO: 381415 - DNA, 120 bp, Artificial Sequence
  ENSG00000143614_31 (sequence is synthesized)
gaactgcacaccttccccataaaatttggaggtggggtgggagaaagagctaaaatcaggctcagttcccctactctggcctctactccccacaccccagtgccactgtgggtgactata

SEQ ID NO: 381416 - DNA, 120 bp, Artificial Sequence
  ENSG00000143614_32 (sequence is synthesized)
ctggccctacgggccttcctggcttttttctttcctcccttaccccaaattcattgagcacttaaaggagcagagatgcagccagtgtctgggctcccccagtggtgaaatgatctggaa

SEQ ID NO: 381417 - DNA, 120 bp, Artificial Sequence
  ENSG00000143614_33 (sequence is synthesized)
gctagatgctagtaacaggtagtgattgggttttttgagtatttttccggggaatgtggtacccctgactgtaagtggtgggagagggaggggggttaatggaactgggtctgggattat

SEQ ID NO: 381418 - DNA, 120 bp, Artificial Sequence
  ENSG00000143614_34 (sequence is synthesized)
tttaaaattatatatatatatataaagatatattcttacatcttttctttgccctctgtgctttgaaagcactggataaattgtttggttttgcttttctctcttccacaaaattggaag

SEQ ID NO: 381419 - DNA, 120 bp, Artificial Sequence
  ENSG00000143614_35 (sequence is synthesized)
ctttttttaaaaatgttttccccacaagtcatcttgccttgtggcatgtctgtctagcctcttcctccctccctcatgatgaagtgccatttctgttacgtctccctctccccaagctca

SEQ ID NO: 381420 - DNA, 120 bp, Artificial Sequence
  ENSG00000143614_36 (sequence is synthesized)
gaggtgctcagaggtacgagatgcccaagtttgtcagttgagattaaaagtaaggaacagagaatgtgcaataccgtctggctgggggctgtccctgccctgccctgagctgagtccttt

SEQ ID NO: 381421 - DNA, 120 bp, Artificial Sequence
  ENSG00000143614_37 (sequence is synthesized)
ccctgggagccaggccaccttagaatggggtttggaagtaagatgtatagagttggggaatcatggagaaggaaagcctatagtcgagtgcctgcttaggtgctgaggtcacaggggaga

SEQ ID NO: 381422 - DNA, 120 bp, Artificial Sequence
  ENSG00000143614_38 (sequence is synthesized)
tggtggaatcttccctgtttttatcccctcagggtcagttacatagaagctgcttcttgactagtatagctcggtgaccctttgttcaaccgctgaggtttgatttcttaccctttcttc

SEQ ID NO: 381423 - DNA, 120 bp, Artificial Sequence
  ENSG00000143614_39 (sequence is synthesized)
tccccattttcatactcttcccagggattagtgatggaggtgaggtctccctaatcatggtaaagtgttaaccttccacctcctcccttccctcctccttcctcatccttctgtcttcct

SEQ ID NO: 381424 - DNA, 120 bp, Artificial Sequence
  ENSG00000143614_40 (sequence is synthesized)
caattctccgtctcttttttttcatcactgattgccttgtgtccctccaagtctacttgttactatccatctccaggctctgggccgtgtagacactaaacctcatgccctaaggacagg

SEQ ID NO: 381425 - DNA, 120 bp, Artificial Sequence
  ENSG00000143614_41 (sequence is synthesized)
aggaaagaccctctgtttggagcattattagtagagtgaggatcccaccagttctgcctggcttcctccatccccagaggcactaaaagcagtattttaaggttggtgtcttactccctg

SEQ ID NO: 381426 - DNA, 120 bp, Artificial Sequence
  ENSG00000143614_42 (sequence is synthesized)
gaagcctgaaatgggtggaatagcggtaaggcttgagtaaaactaggggacagaggttcttatttgtcgattttattttataatttgaccacagcatctgaactccctctctccctggaa

SEQ ID NO: 381427 - DNA, 120 bp, Artificial Sequence
  ENSG00000143614_43 (sequence is synthesized)
taagtatttttcccacatttttggatatatgtatggtagacaatttttttttaagacacagagataaatgttttcctgctttggttacctttcctttcccctttaaaaggaattagctat

SEQ ID NO: 381428 - DNA, 120 bp, Artificial Sequence
  ENSG00000143614_44 (sequence is synthesized)
agaactgctttgtaaagatgcttcttgatattttacttttgttccttttccctaatcattcccttttctccccactcctccagaaggcataacccttctctccacaccccctacccccac

SEQ ID NO: 381429 - DNA, 120 bp, Artificial Sequence
  ENSG00000143614_45 (sequence is synthesized)
ccccgtcctaggctcccatcctttccatcaagaccttcattagcttatgatatttgctgccgagatgttataacaaggactcgttcatgtatataagctatttcttgatccatttaaaag

SEQ ID NO: 381430 - DNA, 120 bp, Artificial Sequence
  ENSG00000143614_46 (sequence is synthesized)
gaattgtacattgtgtagaaaaaaaaaaaaacctgaaaaagagaaaaaaaagccctagccatggatattgtgaaactgtgttatgtcattttgtaatgtgcccgtttgtgtatgatccgt

SEQ ID NO: 381431 - DNA, 120 bp, Artificial Sequence
  ENSG00000143614_47 (sequence is synthesized)
gcaaaagggtttctggggaaggggagggggtagggaggcagggctgtggagggtgggtaggggagtgggccgggcccagcacactgagactggcagctgctccaaccccatccctcctta

SEQ ID NO: 381432 - DNA, 120 bp, Artificial Sequence
  ENSG00000143614_48 (sequence is synthesized)
gagatgccacctcccccaccacccacccctaatttgtgccttgcctccccaccctggagtagtccctccgggtcaccagcactgccttggcagagcccactccctaccctaacctgccca

SEQ ID NO: 381433 - DNA, 120 bp, Artificial Sequence
  ENSG00000143614_49 (sequence is synthesized)
ccctccctatcccccagcattaggttgatactgtggggaagtgctgggggctgggaggtagccgaggaatggggcagttcccgggggcatcgaaaccaagtattattatgaattgtaatt

SEQ ID NO: 381434 - DNA, 120 bp, Artificial Sequence
  ENSG00000143614_50 (sequence is synthesized)
gtatttgcactgtttttttcctctgattgcatcagcatatatacaatatacctatataacaaaattcagtgtcaagctttcttatgcaagggatttcccccaccccacctcctcaaaaaa

SEQ ID NO: 381435 - DNA, 120 bp, Artificial Sequence
  ENSG00000143614_51 (sequence is synthesized)
gaaagaacctagtcttatgggcctttgagggtggattgtcaggggatgatagaaaggattttaataagtcatcctgaggaaatttcacctagtgagagccacatccatctgcacagcctt

SEQ ID NO: 381436 - DNA, 120 bp, Artificial Sequence
  ENSG00000143614_52 (sequence is synthesized)
aggctgcgtgaaccgaggtgaggctgagctcctgtgaaagccaagacctcctggtccaggactttgtagagtaaaaagaaccaccaacacaaaaggggttgagggggctacaatctggag

SEQ ID NO: 381437 - DNA, 120 bp, Artificial Sequence
  ENSG00000143614_53 (sequence is synthesized)
acctggggtctcctactaacttgctatatgatctttggtagagttaattttctgagtatcaattttcttatctgtgaagtgaagagggggatcatctggccaccaagtttaaaattctat

SEQ ID NO: 381438 - DNA, 120 bp, Artificial Sequence
  ENSG00000143614_54 (sequence is synthesized)
acttctcacctgccaaaaccaaaaaacaacttgaggtgaggaaagtgttgggcccagaaaccagggaggaactgaaagtgactcgcgttgaagtggttatgtgtatgacaatgctcttgg

SEQ ID NO: 381439 - DNA, 120 bp, Artificial Sequence
  ENSG00000143614_55 (sequence is synthesized)
agaactgccagtcctctatggttacccttgatttgggagaggcagcagagtcatgtccagggcatcagaccagtgacatctttgcctttatgcctctagtcatctgagggcggggactag

SEQ ID NO: 381440 - DNA, 120 bp, Artificial Sequence
  ENSG00000143614_56 (sequence is synthesized)
gcctcaagccccatctcacagccaaccacagagcccttaagggtggttgacaattgaatgccccaggttggtgctttagttatttactccctttgtgagctacaggatgtgtaacttttc

SEQ ID NO: 381441 - DNA, 120 bp, Artificial Sequence
  ENSG00000143614_57 (sequence is synthesized)
ccccatcttggtgataaaataggagagcgcagacacagcccacattttgtctcctttcctcagatttcatctgaaccccgctaaaggcagctgtttcacagtctgtctccttcaggggcc

SEQ ID NO: 381442 - DNA, 120 bp, Artificial Sequence
  ENSG00000143614_58 (sequence is synthesized)
caatttccccacagcctgggctgagtactcctactctcttctttaggttctgggctgataaagcctggagagggtacagggtgatgggtgaagccctggtgaaggtgaaaggatagattg

SEQ ID NO: 381443 - DNA, 120 bp, Artificial Sequence
  ENSG00000143614_59 (sequence is synthesized)
gggttggggggtggggagcagggaggtgggatggggaatggccttccctgaatagggtgggtgggaggggaacaagacccttttgcacaactctctttaagtttcctttatttctttttt

SEQ ID NO: 381444 - DNA, 120 bp, Artificial Sequence
  ENSG00000143614_60 (sequence is synthesized)
aactcattctgattttctgcattgtgtttgggaaataaaatgaaaaaactaagaccaatagaaactggttttcaaaaaggcaaatacactcccatctgtttcagatgctgctgagcattt

SEQ ID NO: 381445 - DNA, 120 bp, Artificial Sequence
  ENSG00000143614_61 (sequence is synthesized)
cagcagtgacagattcaaataataagctaatttttggagaaaggattaaaagaaaaaaaaactttgtaatatttatcacttgcaagctatgtttaataaagaaaggaatggtttctaaaa

SEQ ID NO: 381446 - DNA, 120 bp, Artificial Sequence
  ENSG00000143614_62 (sequence is synthesized)
tgggacacactggatctgtcttccagttcagttcctgagggtcggtggaacttacccttccctaaccacaccgggacttagagtacttttggcctccctgctctcaattacattgaggag

SEQ ID NO: 381447 - DNA, 120 bp, Artificial Sequence
  ENSG00000143614_63 (sequence is synthesized)
tccttggtatgccaggtgggcccaatgtcatcatgagggtccttaaaagcggaagaggaaggtggagaggagagagagatggagagccagagacgcgatgtgcaggaggaaggggccaca

SEQ ID NO: 381448 - DNA, 120 bp, Artificial Sequence
  ENSG00000143614_64 (sequence is synthesized)
gccaaggatgcccggcctctagaaaccggaaaagcccccgcaggaaacgcacgactcctgtgggctccgtctctgatgttcaatccagggcgctgcatttcacaccggctttcatgcgtg

SEQ ID NO: 381449 - DNA, 120 bp, Artificial Sequence
  ENSG00000143614_65 (sequence is synthesized)
tctaccccagagcgagctccaggagggcggggactttgtggtgctcccagctgtgtgcccagagcagagtctggcacaggatgggctctcagttaatgtttgttaaggggaggaggtgcc

SEQ ID NO: 381450 - DNA, 89 bp, Artificial Sequence
  ENSG00000143614_66 (sequence is synthesized)
cctgtagttccagctactcgggaggctgcgacaggaggttcatttgagcctgggacgcagaggttgcagtgagccaagaaagcgcacct

SEQ ID NO: 381451 - DNA, 120 bp, Artificial Sequence
  ENSG00000143614_67 (sequence is synthesized)
gcactccagcctgggtgacagagtgaggaccttgtctcaataaagaaaaaaaaaaattacaaacgttttcttcataaccacaatgccattatcatatatgacaaaattctttaattattc

SEQ ID NO: 381452 - DNA, 120 bp, Artificial Sequence
  ENSG00000143614_68 (sequence is synthesized)
cttaatatcatctaatacctagtccttaaccaaatatccctgattgtctgaaaaatgtctttctactgtttttctgttttgaatcaagaacaaggtttatacgctgcatttgattattgt

SEQ ID NO: 381453 - DNA, 120 bp, Artificial Sequence
  ENSG00000143614_69 (sequence is synthesized)
gtctcttaatgatcttatcaaaggcaaacacccccaaccctcacccttatatgtcattgaattgttgaagagactgggtaaattttccagtaaaattttgcatgttctggatctgtctga

SEQ ID NO: 381454 - DNA, 120 bp, Artificial Sequence
  ENSG00000143614_70 (sequence is synthesized)
ggtacggcggctgcctggggaccaaaacgtctctaaggatggatagaatgacagaagatgctcttcgcttgaatctgttgaagcggagcttggacccagcagatgagcgagatgatgtcc

SEQ ID NO: 381455 - DNA, 120 bp, Artificial Sequence
  ENSG00000143614_71 (sequence is synthesized)
agaggattgcttgagcccaggagtgccagaccagcctgggcaacaaagtcagattgtgtctctgtttaaaaaaaaaaaaaaaaaaggaaattgggtattgggtgctgtcctgctcaatca

SEQ ID NO: 381456 - DNA, 120 bp, Artificial Sequence
  ENSG00000143614_72 (sequence is synthesized)
ctgaaaatgtttctcatgggtcagctgttagttagtatacagttctgtagcagcccctttaagggaattgttcctttactttctgttctttctttagggcatacactctcactcttctgt

SEQ ID NO: 381457 - DNA, 120 bp, Artificial Sequence
  ENSG00000143614_73 (sequence is synthesized)
gttttcagggaatggagatgttaaggcaggatggatagaatgacagaagatgctcttcgcttgaatctgttgaagcggagcttggacccagcagatgagcgagatgatgtcctggcaaag

SEQ ID NO: 381458 - DNA, 120 bp, Artificial Sequence
  ENSG00000143614_74 (sequence is synthesized)
ggtctggatcccctgtgccgtcgcctcttcctttttcgacgcctccgccgccgcctgaggaggcgagctagccgggagttacaccgccaccgccaggaaaactatttttcagcgtttgta

SEQ ID NO: 381459 - DNA, 120 bp, Artificial Sequence
  ENSG00000143621_0 (sequence is synthesized)
ctcttcagttgtctgctactcagaggaaggggcggttggtgcggcctccattgttcgtgttttaaggcgccatgaggggtgacagaggccgtggtcgtggtgggcgctttggttccagag

SEQ ID NO: 381460 - DNA, 120 bp, Artificial Sequence
  ENSG00000143621_1 (sequence is synthesized)
gaggcccaggaggagggttcaggccctttgtaccacatatcccatttgacttctatttgtgtgaaatggcctttccccgggtcaagccagcacctgatgaaacttccttcagtgaggcct

SEQ ID NO: 381461 - DNA, 120 bp, Artificial Sequence
  ENSG00000143621_2 (sequence is synthesized)
tgctgaagaggaatcaggacctggctcccaattctgctgaacaggcatctatcctttctctggtgacaaaaataaacaatgtgattgataatctgattgtggctccagggacatttgaag

SEQ ID NO: 381462 - DNA, 120 bp, Artificial Sequence
  ENSG00000143621_3 (sequence is synthesized)
tgcaaattgaagaagttcgacaggtgggatcctataaaaaggggacaatgactacaggacacaatgtggctgacctggtggtgatactcaagattctgccaacgttggaagctgttgctg

SEQ ID NO: 381463 - DNA, 120 bp, Artificial Sequence
  ENSG00000143621_4 (sequence is synthesized)
ccctggggaacaaagtcgtggaaagcctaagagcacaggatccttctgaagttttaaccatgctgaccaacgaaactggctttgaaatcagttcttctgatgctacagtgaagattctca

SEQ ID NO: 381464 - DNA, 120 bp, Artificial Sequence
  ENSG00000143621_5 (sequence is synthesized)
ttacaacagtgccacccaatcttcgaaaactggatccagaactccatttggatatcaaagtattgcagagtgccttagcagccatccgacatgcccgctggttcgaggaaaatgcttctc

SEQ ID NO: 381465 - DNA, 120 bp, Artificial Sequence
  ENSG00000143621_6 (sequence is synthesized)
agtccacagttaaagttctcatcagactactgaaggacttgaggattcgttttcctggctttgagcccctcacaccctggatccttgacctactaggccattatgctgtgatgaacaacc

SEQ ID NO: 381466 - DNA, 120 bp, Artificial Sequence
  ENSG00000143621_7 (sequence is synthesized)
tctggctgcaggactgttcctgccaggttcagtgggtatcactgacccctgtgagagtggcaactttagagtacacacagtcatgaccctagaacagcaggacatggtctgctatacagc

SEQ ID NO: 381467 - DNA, 120 bp, Artificial Sequence
  ENSG00000143621_8 (sequence is synthesized)
tcagactctcgtccgaatcctctcacatggtggctttaggaagatccttggccaggagggtgatgccagctatcttgcttctgaaatatctacctgggatggagtgatagtaacaccttc

SEQ ID NO: 381468 - DNA, 120 bp, Artificial Sequence
  ENSG00000143621_9 (sequence is synthesized)
agaaaaggcttatgagaagccaccagagaagaaggaaggagaggaagaagaggagaatacagaagaaccacctcaaggagaggaagaagaaagcatggaaactcaggagtgacattccct

SEQ ID NO: 381469 - DNA, 120 bp, Artificial Sequence
  ENSG00000143621_10 (sequence is synthesized)
tcactccttttcctacccaagggggaagactggagcctaagctgcctgctactgggctttacatggtgacagacatttccgtgggatagggaagatagcaggaagaaaagtaaactccat

SEQ ID NO: 381470 - DNA, 120 bp, Artificial Sequence
  ENSG00000143621_11 (sequence is synthesized)
agaagtgtcattccactgggttttgatattggcttagctgccagtctcccatttgtgacctatgccatccatctataatggaggataccaacatttcttcctaatattctataatctcca

SEQ ID NO: 381471 - DNA, 120 bp, Artificial Sequence
  ENSG00000143621_12 (sequence is synthesized)
actcctgaaaacccctctctcaactaatactttgctgttgaaatgttgtgaaatgttaagtgtctggaaatttttttttctaagaaaaactattaaagtacttcctagtagggctcttgg

SEQ ID NO: 381472 - DNA, 120 bp, Artificial Sequence
  ENSG00000143621_13 (sequence is synthesized)
tctttctggttggtgttttttgtttgtttgtttttttgcatgtggcaaccttttttgcttttggctttgtgtactcttttgttgaaaatgataattgagtcatttaattataaatactca

SEQ ID NO: 381473 - DNA, 120 bp, Artificial Sequence
  ENSG00000143621_14 (sequence is synthesized)
gatcacaatttgaagctgtctttgaattaaaggacaaactcctggaacctttccatataccagagtaaactagaatatcattttaagtatttattgaataaaatgattctatcaacactg

SEQ ID NO: 381474 - DNA, 120 bp, Artificial Sequence
  ENSG00000143621_15 (sequence is synthesized)
aacatagcacttggattaggggtttaggtatctttttttgttttgagacaaattctccctccgttggccaggctggagtgcagtggtaccattgtagctcactgcagccttgacctccac

SEQ ID NO: 381475 - DNA, 81 bp, Artificial Sequence
  ENSG00000143621_16 (sequence is synthesized)
cagtggtaccattgtagctcactgcagccttgacctccactacagcaagtgatcttccctaccacacccagctaatttttg

SEQ ID NO: 381476 - DNA, 120 bp, Artificial Sequence
  ENSG00000143622_0 (sequence is synthesized)
agtgccggagcctccgcgagtgaaggaagacgaagtgcgtgacccgaccggctgtggtgttccagtccccactgaccagtaggagcagcagggcgtcggcttgtgaggtggcttttcctc

SEQ ID NO: 381477 - DNA, 120 bp, Artificial Sequence
  ENSG00000143622_1 (sequence is synthesized)
ggggcaaccgaggaaggccccaagaggacaatggattctggaactcgcccagttggtagctgctgtagcagccccgctgggctctcacgggagtacaaactagtgatgctgggtgctggt

SEQ ID NO: 381478 - DNA, 120 bp, Artificial Sequence
  ENSG00000143622_2 (sequence is synthesized)
ggtgtagggaagagtgccatgaccatgcagttcatcagccaccgattcccagaagatcatgatcccaccattgaagatgcttataagatcaggatccgtattgatgatgagcctgccaat

SEQ ID NO: 381479 - DNA, 120 bp, Artificial Sequence
  ENSG00000143622_3 (sequence is synthesized)
ctggacattttggatacagctggacaggcagagtttacagccatgcgggaccagtatatgagggcaggagaagggtttatcatctgttactctatcacggatcgtcgaagtttccatgaa

SEQ ID NO: 381480 - DNA, 120 bp, Artificial Sequence
  ENSG00000143622_4 (sequence is synthesized)
gttcgtgagtttaaacagcttatttatcgagtccgacgtactgacgatacacctgtggttcttgtgggaaacaagtcagacctcaaacagctaagacaggtcaccaaggaagaaggattg

SEQ ID NO: 381481 - DNA, 120 bp, Artificial Sequence
  ENSG00000143622_5 (sequence is synthesized)
gccttggcccgagaattcagctgtcccttttttgagacatctgctgcataccgctactatattgatgatgttttccatgcccttgtacgggagatacgtaggaaagaaaaggaggcagta

SEQ ID NO: 381482 - DNA, 120 bp, Artificial Sequence
  ENSG00000143622_6 (sequence is synthesized)
ctggccatggagaaaaaatctaagcccaaaaacagtgtatggaagaggctaaaatcaccattccggaagaagaaagattcagtaacttgaagagaagatgtgaagtgtttatctgtgaac

SEQ ID NO: 381483 - DNA, 120 bp, Artificial Sequence
  ENSG00000143622_7 (sequence is synthesized)
tgcagtgctgtatcaaagcagtccagtaacctgcagtactgagtatggtgcttgctctttcacttaactgataagagggacatgcctactaggagtttttaatgatgtggtatttaaagt

SEQ ID NO: 381484 - DNA, 120 bp, Artificial Sequence
  ENSG00000143622_8 (sequence is synthesized)
attgtctcttagttaagtatgatttattaacccagtggagcactgtctgcttttaaattgtcacattagaatttgttctaccaatgttttgggttctgttgcgctattaattaatgtaaa

SEQ ID NO: 381485 - DNA, 120 bp, Artificial Sequence
  ENSG00000143622_9 (sequence is synthesized)
tttgtttatacccaggagaatatgtataccatgtgtgtttgactaagttcacaagggaagtttttggctctgcactccacattatcctttaatttcaatttcctgggactatcccagaga

SEQ ID NO: 381486 - DNA, 120 bp, Artificial Sequence
  ENSG00000143622_10 (sequence is synthesized)
aagacctcagtctcttctattcacactatgcttcctagagacagaacaaaaatcatgtagggaaattggggctaatgagatcagtgccaaatttcagcagatacctgtgaggctgacacc

SEQ ID NO: 381487 - DNA, 120 bp, Artificial Sequence
  ENSG00000143622_11 (sequence is synthesized)
tgttgcagactatggagtggtgagatttgggaaagttgggctatatgtttgcagggacttaaaaaggtaggttcagaacagtattctcagtacaagcttcgcttttctaagaagtacaca

SEQ ID NO: 381488 - DNA, 120 bp, Artificial Sequence
  ENSG00000143622_12 (sequence is synthesized)
tttggcccaaattcaccgggataagtgagaacagccagaagcataaaatgtgatgaaggtttctcctgggaaccttattttactcttcatttcagggttttctttttttttttaccttca

SEQ ID NO: 381489 - DNA, 120 bp, Artificial Sequence
  ENSG00000143622_13 (sequence is synthesized)
aaggtagacattttgggaatcataactgtattactaaacgtgtttaatcaaaattcatagttggatcagccattgccttgtacaggtttattttttccccacagacgcacacaccaacac

SEQ ID NO: 381490 - DNA, 120 bp, Artificial Sequence
  ENSG00000143622_14 (sequence is synthesized)
gctctgtaaaagagctacagctggcaagatgttttttcggcccttcatcactgattgcattttccatacagaagagacatcaggggtgtgggtaaaattgtgtgtgtgcctccttgacgt

SEQ ID NO: 381491 - DNA, 120 bp, Artificial Sequence
  ENSG00000143622_15 (sequence is synthesized)
ggacaatcactagactcagtgctctgagaaaatctgctatttctgttgaatgggtcagtcttaaagctttaaaattcacataggtggagtttcccatctgaagatttctttacaaggact

SEQ ID NO: 381492 - DNA, 120 bp, Artificial Sequence
  ENSG00000143622_16 (sequence is synthesized)
ttgctaagttcatctcagggttatctgagccttgaccaagtttatcctaagggaataccactttgctccctgtgcatagtttaggaactgtagtcctaggaggaaacagctttaaatatt

SEQ ID NO: 381493 - DNA, 120 bp, Artificial Sequence
  ENSG00000143622_17 (sequence is synthesized)
ggtagtgagttgtctaagatcaggactgttttgatatctgaccttgttatatgcggagagtaaatgcaaaaatgctaagagtaatgcatcatgtattgaatattaagtgtcactgaagca

SEQ ID NO: 381494 - DNA, 120 bp, Artificial Sequence
  ENSG00000143622_18 (sequence is synthesized)
atgtttgtgttgactagaaacgtaagatgacttgtgtagcacctctttataagcacacagctcatcttaatattttccatttttattagaggaagtaggacagagttgtgtttttcttta

SEQ ID NO: 381495 - DNA, 120 bp, Artificial Sequence
  ENSG00000143622_19 (sequence is synthesized)
taaacaaatgataaactagcttttttaaaaagtgactgttagaacttttttagctctgagtagtggtccctttttaaactcctggaaacatttttgttaccaaataaatcatgttttatg

SEQ ID NO: 381496 - DNA, 120 bp, Artificial Sequence
  ENSG00000143622_20 (sequence is synthesized)
gtactcagccatccaaaagtgaaagacctagcatttgattctgtgcaggacacaaatctcacaggaactatagcactttggaaaagcatcaaagtagaaaagaaatacagtgcaattcta

SEQ ID NO: 381497 - DNA, 120 bp, Artificial Sequence
  ENSG00000143622_21 (sequence is synthesized)
ttatgagaatgttttacatttaaactggtttagcaccttttaagtttaaagcccatagcttcttattactagtgacctagggaattgttattaacattaagagatatatatatatatata

SEQ ID NO: 381498 - DNA, 120 bp, Artificial Sequence
  ENSG00000143622_22 (sequence is synthesized)
tttttttttttttttttttttttaaatagagatgaggtttcactatgttgcccaggctgatctcgaactcctaggctcaagcaatcctcccaatatgctgggattacaggcatgagccac

SEQ ID NO: 381499 - DNA, 120 bp, Artificial Sequence
  ENSG00000143622_23 (sequence is synthesized)
ggcatgagccaccacctggcccaagcaagaaattgacactatatagttatttaaggtagtcaggcagtagaaacattgccagaaggatagaaaggaatttggattatatataaggaaaat

SEQ ID NO: 381500 - DNA, 120 bp, Artificial Sequence
  ENSG00000143622_24 (sequence is synthesized)
aacaaatcggtgtttttaagactatcactgtcatatattagatccttgtattagtccatccattaatattagttctattcgtggtgctaggtagcttgacaggtatgatatgcataagtc

SEQ ID NO: 381501 - DNA, 120 bp, Artificial Sequence
  ENSG00000143622_25 (sequence is synthesized)
atagctctattcttagtgtcataaagtgtagctaatttataagctctaagtaatcagctttatctaatttgagggcattaaaattactgcctagaactttgagaagagaaaaattcaggg

SEQ ID NO: 381502 - DNA, 120 bp, Artificial Sequence
  ENSG00000143622_26 (sequence is synthesized)
ataagttgaaaggcactggaactgttcatgtccataccagaccggtaaattataagatccagatgttagtgtctagaattagctgtttagaattcagaggggacatatgttttaactttg

SEQ ID NO: 381503 - DNA, 120 bp, Artificial Sequence
  ENSG00000143622_27 (sequence is synthesized)
tcatatattagcaagaattggtctactgtgatgtttggggaggaggagggggggataatttttttaatgcacttgtatgtgaagacagtttgtatgacataatacaaaacttttaaacaa

SEQ ID NO: 381504 - DNA, 120 bp, Artificial Sequence
  ENSG00000143622_28 (sequence is synthesized)
ggtattaaatcccagaatgttatgagtaaaggcttttttactctagcaaaggggaggggaaggcctacacagagaagatcaatagtttatctctcttaatttttcatgcactctgactca

SEQ ID NO: 381505 - DNA, 120 bp, Artificial Sequence
  ENSG00000143622_29 (sequence is synthesized)
atcttactcggttgcgggaggggtcacaggtcagtgccggagcctccgcgagtgaaggaagacgaagtgcgtgacccgaccggctgtggtgttccagtccccactgaccagtggcttttc

SEQ ID NO: 381506 - DNA, 120 bp, Artificial Sequence
  ENSG00000143622_30 (sequence is synthesized)
atttagaaacaagggtatcagcagttggtaagcaactgaatatttctttttttttcagactttatgtcataagccatctttagtctttgtctcttactgaacattaatgggacaactctc

SEQ ID NO: 381507 - DNA, 120 bp, Artificial Sequence
  ENSG00000143622_31 (sequence is synthesized)
tttgttgtatttttttatggttgtatacaggccacttaacgaagccttttcttgctgtcacttctctaagggtatgacttgagactcgctctgtaactgtgagtcagctggtttgaactt

SEQ ID NO: 381508 - DNA, 120 bp, Artificial Sequence
  ENSG00000143624_0 (sequence is synthesized)
gccttcccaccccccgcccttccactatggccgcttctgtgtggtgtggggagacgctggtcctccccgtcctcccatagcgcttattgcctcaccctcaccccctaggggccggatcca

SEQ ID NO: 381509 - DNA, 120 bp, Artificial Sequence
  ENSG00000143624_1 (sequence is synthesized)
aaggcgctgcactccccaagccttggggcatcagccaggaaggtttcctacctcctaattcaggggcaggactcctcttttccccccacggggaaaagaggcagaaacttaggggtttcc

SEQ ID NO: 381510 - DNA, 120 bp, Artificial Sequence
  ENSG00000143624_2 (sequence is synthesized)
ctcctttcttagggtcagacgctcttagggtccacttcttcaggggcggaagcctctcctacccttcccatagggacacaggcctttaccccactgtacttcggagccaacgcctttccc

SEQ ID NO: 381511 - DNA, 120 bp, Artificial Sequence
  ENSG00000143624_3 (sequence is synthesized)
tcagcactgccaccccagagtcaggacccagaggactgtgccttcgcccccaacgcaggcgcggccttttggagaggagggaggagtggagaggacaggggcccttgctctcccctcccc

SEQ ID NO: 381512 - DNA, 120 bp, Artificial Sequence
  ENSG00000143624_4 (sequence is synthesized)
aacttgttcctcttgccccccagtccctggcaatccagagatcccgatatctaggactgtccatccatccactccctgaccttttcccggctcctggctgcagccatggagttgcagaag

SEQ ID NO: 381513 - DNA, 120 bp, Artificial Sequence
  ENSG00000143624_5 (sequence is synthesized)
ggaaaaggggcggcagcagcagcagctgcttcgggagcagcgggaggtggaggaggaggagcgggagcaggagccccaggaggggggaggctgctactttcaaccagtttggatgccaag

SEQ ID NO: 381514 - DNA, 120 bp, Artificial Sequence
  ENSG00000143624_6 (sequence is synthesized)
gatgagttagaggagagattggaaaggtgtatgagcattgtgacatcgatgactgctggtgtctcggagagagaagccaatgatgccctcaatgcgtatgtgtgcaaaggcctcccccag

SEQ ID NO: 381515 - DNA, 120 bp, Artificial Sequence
  ENSG00000143624_7 (sequence is synthesized)
catgaagaaatctgcctgggcctgtttactctcatcctcactgaacctgcccaagcccagaagtgttaccgggacttagctctggtgagtcgtgatggcatgaatattgtcctgaataaa

SEQ ID NO: 381516 - DNA, 120 bp, Artificial Sequence
  ENSG00000143624_8 (sequence is synthesized)
atcaaccagatacttatggagaagtacctgaagctgcaggatacctgccgtactcagttggtgtggttggtacgggaactggtgaagagtggggttctgggagccgatggtgtttgtatg

SEQ ID NO: 381517 - DNA, 120 bp, Artificial Sequence
  ENSG00000143624_9 (sequence is synthesized)
acgtttatgaagcagattgcaggtggagatgttacagccaaaaatatctggttggcagaaagtgttctggatatcctgacagagcaaagggagtgggtcctgaagagcagcatcctcatt

SEQ ID NO: 381518 - DNA, 120 bp, Artificial Sequence
  ENSG00000143624_10 (sequence is synthesized)
gccatggctgtttacacgtacctccgcctcatcgtggaccaccatgggactgcccagctccaggccctgcgacagaaggaagtagacttctgcatctcactgcttcgggaacggttcatg

SEQ ID NO: 381519 - DNA, 120 bp, Artificial Sequence
  ENSG00000143624_11 (sequence is synthesized)
gaatgtctgatgattggtcgggatctcgtaagactacttcagaatgttgctaggataccagaatttgaactgctttggaaagatattatccataatcctcaggccttgagtcctcagttc

SEQ ID NO: 381520 - DNA, 120 bp, Artificial Sequence
  ENSG00000143624_12 (sequence is synthesized)
acaggtatcctacagcttcttcagtcaagaacatcccgaaaattcctagcatgtcgtctaaccccggacatggagactaaactcctcttcatgacatcccgggtgcgatttggtcaacaa

SEQ ID NO: 381521 - DNA, 120 bp, Artificial Sequence
  ENSG00000143624_13 (sequence is synthesized)
aagcgataccaagattggttccagcgccagtacctgtcaactccagatagtcagtctctgcgctgtgacctcattcgctacatctgtggggtagtccacccttctaatgaagtactgagt

SEQ ID NO: 381522 - DNA, 120 bp, Artificial Sequence
  ENSG00000143624_14 (sequence is synthesized)
tcagatatcttgccccggtgggccatcattggttggctcctgacaacgtgcacgtcaaatgtcgctgcctccaatgccaagctggctttgttttatgactggctgttctttagtccagac

SEQ ID NO: 381523 - DNA, 120 bp, Artificial Sequence
  ENSG00000143624_15 (sequence is synthesized)
aaggatagcattatgaacatagaaccagccatcctggtcatgcaccactccatgaagccccacccagccatcactgccacactcctggacttcatgtgccgcatcattcccaacttctat

SEQ ID NO: 381524 - DNA, 120 bp, Artificial Sequence
  ENSG00000143624_16 (sequence is synthesized)
ccaccattggagggccacgtgcggcagggtgtcttttcctccctcaaccacattgtggagaaacgggtcttggcacacctagctcccctgtttgacaaccctaagttggataaggagctg

SEQ ID NO: 381525 - DNA, 120 bp, Artificial Sequence
  ENSG00000143624_17 (sequence is synthesized)
cgggcaatgctgagagagaagtttcctgagttctgcagctcaccctccccacctgtggaagtcaaaattgaggagccagtttccatggagatggacaaccatatgtcggataaggatgag

SEQ ID NO: 381526 - DNA, 120 bp, Artificial Sequence
  ENSG00000143624_18 (sequence is synthesized)
agttgctatgacaatgcagaggcagccttcagtgacgatgaagaggatctcaacagcaaaggaaagaagagggagtttcgcttccaccctatcaaggagacagttgtggaggagccagtt

SEQ ID NO: 381527 - DNA, 120 bp, Artificial Sequence
  ENSG00000143624_19 (sequence is synthesized)
gatatcaccccttaccttgaccagttggatgagtccctgagggacaaagtactccagctacagaaggggagtgatacggaggcccagtgtgaggtcatgcaggaaattgtggaccaggtc

SEQ ID NO: 381528 - DNA, 120 bp, Artificial Sequence
  ENSG00000143624_20 (sequence is synthesized)
ctggaggaagactttgactcggagcagctgtctgtccttgcttcctgcctacaggagctcttcaaggcccactttcgaggggaggtcctgcctgaggagattactgaggagtccctggag

SEQ ID NO: 381529 - DNA, 120 bp, Artificial Sequence
  ENSG00000143624_21 (sequence is synthesized)
ctccgagctatatcagaagcagcccaagattggctaccacctgctctactacctgagggccagcaaagccgccgcagggaagatgaacctgtacgagtcatttgcccaggctacccagct

SEQ ID NO: 381530 - DNA, 120 bp, Artificial Sequence
  ENSG00000143624_22 (sequence is synthesized)
gggcgatctgcacacctgcctgatgatggacatgaaggcctgccaggaggacgatgtgcggctcctgtgccacctcacgccctccatctacacagagtttccagatgaaaccttgaggag

SEQ ID NO: 381531 - DNA, 120 bp, Artificial Sequence
  ENSG00000143624_23 (sequence is synthesized)
cggagagctgctgaacatgatcgtggctgttattgactctgcacagctccaggagctggtctgccacgtgatgatgggtaacctggttatgtttcgaaaagactcagttctcaacatact

SEQ ID NO: 381532 - DNA, 120 bp, Artificial Sequence
  ENSG00000143624_24 (sequence is synthesized)
cattcagagcctagactgggagacctttgagcagtattgtgcctggcagctctttctggcccacaatattcccctggagaccataatccccatcctgcagcacctcaaatacaaggagca

SEQ ID NO: 381533 - DNA, 120 bp, Artificial Sequence
  ENSG00000143624_25 (sequence is synthesized)
cccagaggccctgtcctgcctactgcttcaactccgaagagaaaagcccagcgaggagatggtgaagatggtgctgagccggccctgccatcctgacgaccagttcaccaccagcatcct

SEQ ID NO: 381534 - DNA, 120 bp, Artificial Sequence
  ENSG00000143624_26 (sequence is synthesized)
gcggcactggtgcatgaaacatgacgagctgctggccgagcacatcaagtccctgctcatcaagaacaacagcctgcctcgcaagagacagagcctgaggagctctagcagcaagctggc

SEQ ID NO: 381535 - DNA, 120 bp, Artificial Sequence
  ENSG00000143624_27 (sequence is synthesized)
ccagctgactctggagcagatcctggagcacttggacaatctgcggctcaacctgaccaacaccaagcagaacttttttagccagacgccaattctccaggcgctgcagcatgtccaagc

SEQ ID NO: 381536 - DNA, 120 bp, Artificial Sequence
  ENSG00000143624_28 (sequence is synthesized)
gagctgtgacgaagcccacaagatgaaattcagtgatctcttctccctggcggaggaatatgaggactcttccaccaagccacccaagagccggcgaaaagcagctctgtccagccctcg

SEQ ID NO: 381537 - DNA, 120 bp, Artificial Sequence
  ENSG00000143624_29 (sequence is synthesized)
aagtcgaaagaatgccacacagccccccaatgccgaagaagagtcgggctccagcagtgcttcagaagaggaagacacgaaaccgaagcctaccaagcggaaacgaaaagggtcctctgc

SEQ ID NO: 381538 - DNA, 120 bp, Artificial Sequence
  ENSG00000143624_30 (sequence is synthesized)
agtgggctctgacagtgactgaggccctgcattccccatcccacccccggctggactgccctctccttcttggtgattcaaaggttaatagaggctgaggagattgcaggggaaacaccc

SEQ ID NO: 381539 - DNA, 120 bp, Artificial Sequence
  ENSG00000143624_31 (sequence is synthesized)
ttgctgcatccccaagctcccccggtggaaggaggagctttctcctctggctgagtttgagaagctgccatgcagcccctagccccttccctcctcctggggcctccagcccctcacact

SEQ ID NO: 381540 - DNA, 120 bp, Artificial Sequence
  ENSG00000143624_32 (sequence is synthesized)
gctgttcccagtgatatttgggatctgactgaagccagaggctctgtaaaatcagaccatagtggaagtcctcagccccctggccccttccgcaatctcctcccccagtctcccaaagag

SEQ ID NO: 381541 - DNA, 120 bp, Artificial Sequence
  ENSG00000143624_33 (sequence is synthesized)
ccatttcaacagagaagggaaatgacaaaggggcagctggccagataagctaggatgagagcagagactcagtgtgtgggtgtcccttcctgcttccccttcaggtcttggtttgttctg

SEQ ID NO: 381542 - DNA, 120 bp, Artificial Sequence
  ENSG00000143624_34 (sequence is synthesized)
aagggacgttttatagtcactatccacatgccagtgtgaaatgggcatctatgacgtggtcagggtgtccattcctaatcatggggcagatgccacaagcattcagaaaggagtctgaaa

SEQ ID NO: 381543 - DNA, 120 bp, Artificial Sequence
  ENSG00000143624_35 (sequence is synthesized)
gggtggccacagccccacgtggtgtgccctggaggcttaggttggtctgaggttggcacctcaatctacaccagagcccagggagtcccagaggcaagtttcacagaattgtcaaatgat

SEQ ID NO: 381544 - DNA, 120 bp, Artificial Sequence
  ENSG00000143624_36 (sequence is synthesized)
tttttgtttttttttgttttttttttggcagagataatcgtgtcttaaaagttgtttttaaatgacaataaaacaagccagaatgtcttttgtgctggagtgtctgctggcatttgcccc

SEQ ID NO: 381545 - DNA, 120 bp, Artificial Sequence
  ENSG00000143624_37 (sequence is synthesized)
ggagtgtctgctggcatttgccccgtgcatgtatagcttggtcttgatttgattggcacccctacttgtaaccgcagaacatccccctttcccttcctgttctgcccccacttttgtcta

SEQ ID NO: 381546 - DNA, 120 bp, Artificial Sequence
  ENSG00000143624_38 (sequence is synthesized)
gagcagaagggacttggctttggccactacccatccttcctgctgccactggaggtgggagccaggcactgatctgtctatgcagaaccatcccccgtaggatgaggcctgtccttactc

SEQ ID NO: 381547 - DNA, 120 bp, Artificial Sequence
  ENSG00000143624_39 (sequence is synthesized)
atttctcaagaaacaagatgcttccaaaaggtctgtcatcctccagttgaagtctgtgtgcctaccaagaatggccggaggactcgctgcttgacgggagggatgctccagcttggtctc

SEQ ID NO: 381548 - DNA, 120 bp, Artificial Sequence
  ENSG00000143624_40 (sequence is synthesized)
cagggacaactgtacctggagataaagtctggataccagggagggacagagatgctcttccttccacagtgtggccacttgctgggccatgtgaaccagcagaggagagttccttggcta

SEQ ID NO: 381549 - DNA, 120 bp, Artificial Sequence
  ENSG00000143624_41 (sequence is synthesized)
tgctgttgttcccccgctgtccagggagaatggaggtggactgaggagtgaagtttgggcgaactgcacagagctgctcctcttcaccccgaaaatttgtctttttacagaatccaggtt

SEQ ID NO: 381550 - DNA, 120 bp, Artificial Sequence
  ENSG00000143624_42 (sequence is synthesized)
ctcccctccctcatcactgctgttgcttcctttgaaagtctaaaccactggaggcttctttttccttcctctctccttccccagtttcctctgtcccaattaaaaccaggatggagagca

SEQ ID NO: 381551 - DNA, 120 bp, Artificial Sequence
  ENSG00000143624_43 (sequence is synthesized)
atttggcacttatctttataggcacttggaagagaaaattaggaagttgtccgtagcttagccagttgatagtccaagatagatactagcatgagtgagcaagcaaaaaatcaaagcatc

SEQ ID NO: 381552 - DNA, 120 bp, Artificial Sequence
  ENSG00000143624_44 (sequence is synthesized)
tactcccagtgtcaaatcatcaattatttctgaggcactgtagccaagcccaagaagcgtgaattgggagggtgaatagttctagacagagcataggagccagtgtgtttcctccctgca

SEQ ID NO: 381553 - DNA, 120 bp, Artificial Sequence
  ENSG00000143624_45 (sequence is synthesized)
gccttccaccctcggcgtccagtgtagacggtgctgccctggcccagactatgcctggagccaggctgggggcaggggcaggacacccggggccacaacccacactcgggataaaacaac

SEQ ID NO: 381554 - DNA, 120 bp, Artificial Sequence
  ENSG00000143624_46 (sequence is synthesized)
ctgtgcgtgctgtttaataagctcccagacatctgattgtttttccttccctgctctcccttttcttcctctagtttttagccagacgccaattctccaggcgctgcagcatgtccaagc

SEQ ID NO: 381555 - DNA, 120 bp, Artificial Sequence
  ENSG00000143624_47 (sequence is synthesized)
ttagtgatagcagtcataaatctcagggcaccgtggagtggaggcagtttatctgggagcagctctgttgttcctcatcagttttcccttgacctagaaagagaattgctttgataaggc

SEQ ID NO: 381556 - DNA, 120 bp, Artificial Sequence
  ENSG00000143624_48 (sequence is synthesized)
taagccatcactgtacctcctccccacagtcttcaggatgcatggtcttcaggaggggagggcatgggcaaaggaaaaggctgtaccatgtcctgcttctcctcacctattacttccctt

SEQ ID NO: 381557 - DNA, 120 bp, Artificial Sequence
  ENSG00000143624_49 (sequence is synthesized)
ctcaaagctgaatgctgggaacaagaagggaaatgagggctacaagctgtttcggggcctgtctgctcttgggtctgctcagtggaaatggggggaatagacatagcacttcccagagcc

SEQ ID NO: 381558 - DNA, 120 bp, Artificial Sequence
  ENSG00000143624_50 (sequence is synthesized)
attcatgtatattgacatcccattttatggagatagaaacagactgactttagcctggcgtggtggcgcacacctgtaattccagctgctggggaggttgaggcatgagattcgcttgaa

SEQ ID NO: 381559 - DNA, 80 bp, Artificial Sequence
  ENSG00000143624_51 (sequence is synthesized)
tccagctgctggggaggttgaggcatgagattcgcttgaacctgggaggcagaggcttcagtgagctgagatcgtaccat

SEQ ID NO: 381560 - DNA, 120 bp, Artificial Sequence
  ENSG00000143624_52 (sequence is synthesized)
actgatgtgaggggctctttaatttcacatcctccagaaccagccatcctggtcatgcaccactccatgaagccccacccagccatcactgccacactcctggacttcatgtgccgcgta

SEQ ID NO: 381561 - DNA, 120 bp, Artificial Sequence
  ENSG00000143624_53 (sequence is synthesized)
agtgttagagctctcttttctccccatgcctggatgagcagaattcagtgtatctcccctaatctcccagtgaacgggtcttctcggtatgccttgactgagagcagaaatggtcatggg

SEQ ID NO: 381562 - DNA, 120 bp, Artificial Sequence
  ENSG00000143624_54 (sequence is synthesized)
tcctatcccccaagttaataaatgcttcccttccatattccactgtctgcacttggatcttcccattttctgtggggtttctcaatcacaaggatggtgactcaaggtagaatctggttt

SEQ ID NO: 381563 - DNA, 120 bp, Artificial Sequence
  ENSG00000143624_55 (sequence is synthesized)
gcagccatactccccagtgtcccctgatcaaaaccaaagcagcttttcagatctaattcagcggaagcctctggatggagtcctgtgctcatttttcccctccttcttcgcttccagatc

SEQ ID NO: 381564 - DNA, 120 bp, Artificial Sequence
  ENSG00000143624_56 (sequence is synthesized)
attcccaacttctatccaccattggagggccacgtgcggcagggtgtcttttcctccctcaaccacattgtggagaaacgggtcttggcgtaaggaatttggtgggggaaggaggttgtt

SEQ ID NO: 381565 - DNA, 120 bp, Artificial Sequence
  ENSG00000143624_57 (sequence is synthesized)
ttcccatttttcattaggtccaggtgtatccaaatgttgccatagcactgctggcccttttctctgacaggtgtaaaaagtattggctctacctcagactgctgggcatatgtcttcttg

SEQ ID NO: 381566 - DNA, 120 bp, Artificial Sequence
  ENSG00000143624_58 (sequence is synthesized)
gctcttagaggaatttctctcctgccatcgtattacaaaggtcttcaaatgccttcatgttccctgttgacccccttcagggatctgagtatggtccagttagactgattgtgcttagac

SEQ ID NO: 381567 - DNA, 77 bp, Artificial Sequence
  ENSG00000143624_59 (sequence is synthesized)
ggatctgagtatggtccagttagactgattgtgcttagacctatctcaactccatgttgagttagaaatgagaagct

SEQ ID NO: 381568 - DNA, 62 bp, Artificial Sequence
  ENSG00000143624_60 (sequence is synthesized)
aggtgggcagatcacctgaggttaggaatttgagacctgcctggccaacatggcaaaatagc

SEQ ID NO: 381569 - DNA, 120 bp, Artificial Sequence
  ENSG00000143624_61 (sequence is synthesized)
tgccactgcactccagcctaggtgatgagagtgacactctgtctcaaaaaaaaataaaaataagagaagctctgatattgaccttcatcatgttccccatttagacacctagctcccctg

SEQ ID NO: 381570 - DNA, 71 bp, Artificial Sequence
  ENSG00000143624_62 (sequence is synthesized)
actaggattatagacgtgagccaccgggcccagccatttgtatattttctttggagaaatatctattcaaa

SEQ ID NO: 381571 - DNA, 120 bp, Artificial Sequence
  ENSG00000143624_63 (sequence is synthesized)
agccatttgtatattttctttggagaaatatctattcaaaaatgttcctatttttaattgagttatttgtctttttattattgacttttaagattttttttttttttttttttgaggcag

SEQ ID NO: 381572 - DNA, 120 bp, Artificial Sequence
  ENSG00000143624_64 (sequence is synthesized)
tttttttttgaggcagagtctcgctctgctgcccagactggagtgcagtggcgcgagctccactcactgcaacctccgcatgctaggttccagcaattctcctgcctcagcctgctgagt

SEQ ID NO: 381573 - DNA, 120 bp, Artificial Sequence
  ENSG00000143624_65 (sequence is synthesized)
tacaggcatgagccaccatacccggccaactttcaagaatgtttttaagattttgttgcataccaaaagtgttctttatatattctggatgcaagtctcagacataatgatttgcaaata

SEQ ID NO: 381574 - DNA, 120 bp, Artificial Sequence
  ENSG00000143624_66 (sequence is synthesized)
aagtctcagacataatgatttgcaaatattttttcttccattctgcgagttttaacttttttgatagcatcttttgaacaaaaagtgctaactttttatgaagctaaatttgtctatttt

SEQ ID NO: 381575 - DNA, 120 bp, Artificial Sequence
  ENSG00000143624_67 (sequence is synthesized)
tttcttttaccacttgtgtttttgttgtcatgaagatttactcctgttttctcttctacaagttgtgtggctttaattcttacatttaggcctacaagccattttgagctaagtttgtat

SEQ ID NO: 381576 - DNA, 120 bp, Artificial Sequence
  ENSG00000143624_68 (sequence is synthesized)
atgctgtgaggtgtcactgccctcatggttagagcccagaaagcaagagagaaagccttctccagcctgacctgagccctccctcttctgttcctgactctcatccggcagtagcttcac

SEQ ID NO: 381577 - DNA, 120 bp, Artificial Sequence
  ENSG00000143624_69 (sequence is synthesized)
tcactgatcgtggttggagcccttttgagctctggggaaggatggacagaaagaagagtatcccctggttcccctgagttatcaagcccctgtgggaggcagttgggagggacatgaggc

SEQ ID NO: 381578 - DNA, 120 bp, Artificial Sequence
  ENSG00000143624_70 (sequence is synthesized)
agattagcacagggcatctggagccagcaaagcagttttagagcgggagcctgcttcggggatgcttgaaggtgggcactggggtcaggctgctggctcaggcccagctggtcttgcagc

SEQ ID NO: 381579 - DNA, 120 bp, Artificial Sequence
  ENSG00000143624_71 (sequence is synthesized)
ccttgatatcagtccccagcttccagctctcttcccctgaacagctaggagccaatcctttggttccagaagaaatcatagtttcttcaaccctctttccttccctccctagaacatgtt

SEQ ID NO: 381580 - DNA, 120 bp, Artificial Sequence
  ENSG00000143624_72 (sequence is synthesized)
aagacaagatccagctcaaagagagaggatggatcttctctctgtcaggaacgggaaagaggaatcagggctaacacacccctatcattgtgtgtctaaattgtaatgtgctcctttcag

SEQ ID NO: 381581 - DNA, 120 bp, Artificial Sequence
  ENSG00000143624_73 (sequence is synthesized)
ttgtaattgaattagctcccttctcaaactcacagttcctgctcttcatctgtttttccctctttcctttagttggtgtggttggtacgggaactggtgaagagtggggttctgggagcc

SEQ ID NO: 381582 - DNA, 120 bp, Artificial Sequence
  ENSG00000143624_74 (sequence is synthesized)
gatggtgtttgtatgacgtttatgaagcagattgcaggtgagtttgatggcaggagcataaagaagaaaggaggagagcccagagactacatagagacaatggagaatgattaagtgcca

SEQ ID NO: 381583 - DNA, 120 bp, Artificial Sequence
  ENSG00000143624_75 (sequence is synthesized)
aagggatggaattcttggattgcttagactgtttccttctgatacagacatcttctggccacatatgttgtagaaataaattgattgaaaaatcatggggggccttttaaagcagtaagt

SEQ ID NO: 381584 - DNA, 120 bp, Artificial Sequence
  ENSG00000143624_76 (sequence is synthesized)
cttgcctcattttctttcctgctaaacccagggcttgacagaatatttggcctattttagccagtcttcactctgagattttatagcatttcagagcaggaagaaatggggagagaagtg

SEQ ID NO: 381585 - DNA, 120 bp, Artificial Sequence
  ENSG00000143624_77 (sequence is synthesized)
agggcaattaatttgttctcaagtccctgtgctttcagaaacctagacatcttccctggctccacccccattatctgaacgcttgctccctaataattaagccctttactggggccagaa

SEQ ID NO: 381586 - DNA, 120 bp, Artificial Sequence
  ENSG00000143624_78 (sequence is synthesized)
tgagggacaaactatgtcacagaacagaccctgacatttaggttttattctcatcttggcatcggtgacatctgtctgagctatcgcatattcaagcggctactcccaagattgcatgtg

SEQ ID NO: 381587 - DNA, 120 bp, Artificial Sequence
  ENSG00000143624_79 (sequence is synthesized)
tttgtttaaaagtgacctgctactacctcaccattagcccactgggacttgcttcctctttaaaattttatgtaacactgatgctcctgttttgatgtgtatgaaccttaatctatgtga

SEQ ID NO: 381588 - DNA, 120 bp, Artificial Sequence
  ENSG00000143624_80 (sequence is synthesized)
tatgtgactttgtgaacattgaattttttaattgagacctggggcaaggcatagttgtagctatttttatcctctttcctggcacttcttccctgtttggcacttccagcccctgcttct

SEQ ID NO: 381589 - DNA, 120 bp, Artificial Sequence
  ENSG00000143624_81 (sequence is synthesized)
tatcccaagactggtatggcattgctgtgtgttaattctgccccacagagtttcatagcaagcactaaagactgttacctggaaataagaaactcttggcctgttgggggcctcagtgca

SEQ ID NO: 381590 - DNA, 120 bp, Artificial Sequence
  ENSG00000143624_82 (sequence is synthesized)
ggactcaggacatccagttgctagactgcagctgttgtcagccacctgtacttctcaggctctatctgagatatcatcctttctttccaactgtgggcttcttatatctacttctcagac

SEQ ID NO: 381591 - DNA, 120 bp, Artificial Sequence
  ENSG00000143624_83 (sequence is synthesized)
gttcattttcaagggccaaaatgttcccactccaactcacaatctgtgggaaagtagcagctctggtttctagaaaaattcagaaccttccctttccttctttctggaggcaaagggtga

SEQ ID NO: 381592 - DNA, 120 bp, Artificial Sequence
  ENSG00000143624_84 (sequence is synthesized)
aactttaaagcctgacagaacagaaggcagtttatctcagcagtgaagggatggcagtaatgggatggcagtcagggtggaccagcagaatgggtgaagagatgtattggattggctgac

SEQ ID NO: 381593 - DNA, 120 bp, Artificial Sequence
  ENSG00000143627_0 (sequence is synthesized)
actttaaccagtctgcagaactgatccccagcccagctgggcctcatgcctctgacaacccaacagtgtggagcagacccacagagagggagacccagagaggtgtgcagtggcatggaa

SEQ ID NO: 381594 - DNA, 120 bp, Artificial Sequence
  ENSG00000143627_1 (sequence is synthesized)
gggccagcggggtatctgcggcgggccagtgtggcccaactgacccaggagctgggcactgccttcttccagcagcagcagctgccagctgctatggcagacaccttcctggaacacctc

SEQ ID NO: 381595 - DNA, 120 bp, Artificial Sequence
  ENSG00000143627_2 (sequence is synthesized)
tgcctactggacattgactccgagcccgtggctgctcgcagtaccagcatcattgccaccatcgggccagcatctcgctccgtggagcgcctcaaggagatgatcaaggccgggatgaac

SEQ ID NO: 381596 - DNA, 120 bp, Artificial Sequence
  ENSG00000143627_3 (sequence is synthesized)
attgcgcgactcaacttctcccacggctcccacgagtaccatgctgagtccatcgccaacgtccgggaggcggtggagagctttgcaggttccccactcagctaccggcccgtggccatc

SEQ ID NO: 381597 - DNA, 120 bp, Artificial Sequence
  ENSG00000143627_4 (sequence is synthesized)
gccctggacaccaagggaccggagatccgcactgggatcctgcaggggggtccagagtcggaagtggagctggtgaagggctcccaggtgctggtgactgtggaccccgcgttccggacg

SEQ ID NO: 381598 - DNA, 120 bp, Artificial Sequence
  ENSG00000143627_5 (sequence is synthesized)
cgggggaacgcgaacaccgtgtgggtggactaccccaatattgtccgggtcgtgccggtggggggccgcatctacattgacgacgggctcatctccctagtggtccagaaaatcggccca

SEQ ID NO: 381599 - DNA, 120 bp, Artificial Sequence
  ENSG00000143627_6 (sequence is synthesized)
gagggactggtgacccaagtggagaacggcggcgtcctgggcagccggaagggcgtgaacttgccaggggcccaggtggacttgcccgggctgtccgagcaggacgtccgagacctgcgc

SEQ ID NO: 381600 - DNA, 120 bp, Artificial Sequence
  ENSG00000143627_7 (sequence is synthesized)
ttcggggtggagcatggggtggacatcgtctttgcctcctttgtgcggaaagccagcgacgtggctgccgtcagggctgctctgggtccggaaggacacggcatcaagatcatcagcaaa

SEQ ID NO: 381601 - DNA, 120 bp, Artificial Sequence
  ENSG00000143627_8 (sequence is synthesized)
attgagaaccacgaaggcgtgaagaggtttgatgaaatcctggaggtgagcgacggcatcatggtggcacggggggacctaggcatcgagatcccagcagagaaggttttcctggctcag

SEQ ID NO: 381602 - DNA, 120 bp, Artificial Sequence
  ENSG00000143627_9 (sequence is synthesized)
aagatgatgattgggcgctgcaacttggcgggcaagcctgttgtctgtgccacacagatgctggagagcatgattaccaagccccggccaacgagggcagagacaagcgatgtcgccaat

SEQ ID NO: 381603 - DNA, 120 bp, Artificial Sequence
  ENSG00000143627_10 (sequence is synthesized)
tgcagcatgcgattgcccgggaggcagaggccgcagtgtaccaccggcagctgtttgaggagctacgtcgggcagcgccactaagccgtgatcccactgaggtcaccgccattggtgctg

SEQ ID NO: 381604 - DNA, 120 bp, Artificial Sequence
  ENSG00000143627_11 (sequence is synthesized)
tggaggctgccttcaagtgctgtgctgctgccatcattgtgctgaccacaactggccgctcagcccagcttctgtctcggtaccgacctcgggcagcagtcattgctgtcacccgctctg

SEQ ID NO: 381605 - DNA, 120 bp, Artificial Sequence
  ENSG00000143627_12 (sequence is synthesized)
cccaggctgcccgccaggtccacttatgccgaggagtcttccccttgctttaccgtgaacctccagaagccatctgggcagatgatgtagatcgccgggtgcaatttggcattgaaagtg

SEQ ID NO: 381606 - DNA, 120 bp, Artificial Sequence
  ENSG00000143627_13 (sequence is synthesized)
gaaagctccgtggcttcctccgtgttggagacctggtgattgtggtgacaggctggcgacctggctccggctacaccaacatcatgcgggtgctaagcatatcctgagacgcccctccct

SEQ ID NO: 381607 - DNA, 120 bp, Artificial Sequence
  ENSG00000143627_14 (sequence is synthesized)
cctctggcccagcctacccttgtaccccatcccttcctccccagtctacgttctccagcccacacccctccaaagccccacctttaagtcctctcttctctattcctgaccctccctacc

SEQ ID NO: 381608 - DNA, 120 bp, Artificial Sequence
  ENSG00000143627_15 (sequence is synthesized)
tgaggcctatctgagactataactgtcatctagccccttcgaggttgccccttccccatctccatttcacacaggtcctgaaagtctgtgtccaattatgcactggccacccaacagcac

SEQ ID NO: 381609 - DNA, 120 bp, Artificial Sequence
  ENSG00000143627_16 (sequence is synthesized)
caattgtacattccctgcatccaatctgctcagcaggccctaagatgccttgagtctttaatcccagtttggctggttaattccataaccccaggcatcccatcccttggggtgggggag

SEQ ID NO: 381610 - DNA, 120 bp, Artificial Sequence
  ENSG00000143627_17 (sequence is synthesized)
aggggagacagggcaatcttgtccacagtctcccattctcatatgtagccctcatgataatctgggcatctcgtgccagggcaggctaccccttcatggtgactaacagttacatgaaag

SEQ ID NO: 381611 - DNA, 120 bp, Artificial Sequence
  ENSG00000143627_18 (sequence is synthesized)
tccacgcttttgggaaaactgggtgggatggatgctggggagaagtgagggctgggcagctgattttgtcactgtcttcacaacctccgtgctgggcttgtagaccactgtcctggctgc

SEQ ID NO: 381612 - DNA, 120 bp, Artificial Sequence
  ENSG00000143627_19 (sequence is synthesized)
tctcatgcctgcctgataccctgcttggtcaaatccccggctgcttccttctgcacccagaaattccttcccactcatgttgttcccacacacaaaccaagagccaaaaatgagtgtgtc

SEQ ID NO: 381613 - DNA, 120 bp, Artificial Sequence
  ENSG00000143627_20 (sequence is synthesized)
atgcctctgacaacccaacagtgtggagcagacccacagagagggagacccagagaggtgtgcagtggcatggaagcagcagcagctgccagctgctatggcagacaccttcctggaaca

SEQ ID NO: 381614 - DNA, 120 bp, Artificial Sequence
  ENSG00000143627_21 (sequence is synthesized)
ctctcattccatggtcccgcagccccaggcccacactgaaagcatgtcgatccaggagaacatatcatccctgcagcttcggtcatgggtctctaagtcccaaagagacttagcaaagtc

SEQ ID NO: 381615 - DNA, 120 bp, Artificial Sequence
  ENSG00000143627_22 (sequence is synthesized)
agaactccccacccagaaggaaaggagacttagggtcctggtcccacagtctttaatgctgtagagtaggagaggggacaggcagagtgagggtggtaaaggactactcttgtccctgag

SEQ ID NO: 381616 - DNA, 120 bp, Artificial Sequence
  ENSG00000143627_23 (sequence is synthesized)
aaggcagaggtgctggctggcctgcccttccccaggcttggataccttgggcctttcccttattcctgcaccaacagcaaactcagaaggaaaaaacaaaacaaaactctaaaggtaaac

SEQ ID NO: 381617 - DNA, 120 bp, Artificial Sequence
  ENSG00000143627_24 (sequence is synthesized)
gcggtccttctccctctctcatgtggctcctcctgcccctacctgggagaaggttcaagtattgcgctgatgggtttgggcaaggaccacagaggctggcatggagaggccctgcctcct

SEQ ID NO: 381618 - DNA, 120 bp, Artificial Sequence
  ENSG00000143627_25 (sequence is synthesized)
cctactcctcctgtctccttacctgaaaaggaggggagggatggataaaggaatgggtaaacaaaattaattggtaacacataaagttagtaaatgaataaatacaattaaataaatgaa

SEQ ID NO: 381619 - DNA, 120 bp, Artificial Sequence
  ENSG00000143630_0 (sequence is synthesized)
gattccgagcctacgacgcctccgctagagcccgcggggctgcgccgactcctgctctggaggggttgcgggtacctgatggccacagagggctctaggaggccgagcgtgtaagcgggg

SEQ ID NO: 381620 - DNA, 120 bp, Artificial Sequence
  ENSG00000143630_1 (sequence is synthesized)
cgccatggaggcagagcagcggccggcggcgggggccagcgaaggggcgacccctggactggaggcggtgcctcccgttgctcccccgcctgcgaccgcggcctcaggtccgatccccaa

SEQ ID NO: 381621 - DNA, 120 bp, Artificial Sequence
  ENSG00000143630_2 (sequence is synthesized)
ccaaatctgggcctgagcctaagaggaggcaccttgggacgctgctccagcctacggtcaacaagttctcccttcgggtgttcggcagccacaaagcagtggaaatcgagcaggagcggg

SEQ ID NO: 381622 - DNA, 120 bp, Artificial Sequence
  ENSG00000143630_3 (sequence is synthesized)
tgaagtcagcgggggcctggatcatccacccctacagcgacttccggttttactgggacctgatcatgctgctgctgatggtggggaacctcatcgtcctgcctgtgggcatcaccttct

SEQ ID NO: 381623 - DNA, 120 bp, Artificial Sequence
  ENSG00000143630_4 (sequence is synthesized)
tcaaggaggagaactccccgccttggatcgtcttcaacgtattgtctgatactttcttcctactggatctggtgctcaacttccgaacgggcatcgtggtggaggagggtgctgagatcc

SEQ ID NO: 381624 - DNA, 120 bp, Artificial Sequence
  ENSG00000143630_5 (sequence is synthesized)
tgctggcaccgcgggccatccgcacgcgctacctgcgcacctggttcctggttgacctcatctcttctatccctgtggattacatcttcctagtggtggagctggagccacggttggacg

SEQ ID NO: 381625 - DNA, 120 bp, Artificial Sequence
  ENSG00000143630_6 (sequence is synthesized)
ctgaggtctacaaaacggcacgggccctacgcatcgttcgcttcaccaagatcctaagcctgctgaggctgctccgcctctcccgcctcatccgctacatacaccagtgggaggagatct

SEQ ID NO: 381626 - DNA, 120 bp, Artificial Sequence
  ENSG00000143630_7 (sequence is synthesized)
ttcacatgacctatgacctggccagtgctgtggttcgcatcttcaacctcattgggatgatgctgctgctatgtcactgggatggctgtctgcagttcctggtgcccatgctgcaggact

SEQ ID NO: 381627 - DNA, 120 bp, Artificial Sequence
  ENSG00000143630_8 (sequence is synthesized)
tccctcccgactgctgggtctccatcaaccacatggtgaaccactcgtggggccgccagtattcccatgccctgttcaaggccatgagccacatgctgtgcattggctatgggcagcagg

SEQ ID NO: 381628 - DNA, 120 bp, Artificial Sequence
  ENSG00000143630_9 (sequence is synthesized)
cacctgtaggcatgcccgacgtctggctcaccatgctcagcatgatcgtaggtgccacatgctacgccatgttcatcggccatgccacggcactcatccagtccctggactcttcccggc

SEQ ID NO: 381629 - DNA, 120 bp, Artificial Sequence
  ENSG00000143630_10 (sequence is synthesized)
gtcagtaccaggagaagtacaagcaggtggagcagtacatgtccttccacaagctgccagcagacacgcggcagcgcatccacgagtactatgagcaccgctaccagggcaagatgttcg

SEQ ID NO: 381630 - DNA, 120 bp, Artificial Sequence
  ENSG00000143630_11 (sequence is synthesized)
atgaggaaagcatcctgggcgagctgagcgagccgcttcgcgaggagatcattaacttcacctgtcggggcctggtggcccacatgccgctgtttgcccatgccgaccccagcttcgtca

SEQ ID NO: 381631 - DNA, 120 bp, Artificial Sequence
  ENSG00000143630_12 (sequence is synthesized)
ctgcagttctcaccaagctgcgctttgaggtcttccagccgggggatctcgtggtgcgtgagggctccgtggggaggaagatgtacttcatccagcatgggctgctcagtgtgctggccc

SEQ ID NO: 381632 - DNA, 120 bp, Artificial Sequence
  ENSG00000143630_13 (sequence is synthesized)
gcggcgcccgggacacacgcctcaccgatggatcctactttggggagatctgcctgctaactaggggccggcgcacagccagtgttcgggctgacacctactgccgcctttactcactca

SEQ ID NO: 381633 - DNA, 120 bp, Artificial Sequence
  ENSG00000143630_14 (sequence is synthesized)
gcgtggaccatttcaatgctgtgcttgaggagttccccatgatgcgccgggcctttgagactgtggccatggatcggctgctccgcatcggcaagaagaattccatactgcagcggaagc

SEQ ID NO: 381634 - DNA, 120 bp, Artificial Sequence
  ENSG00000143630_15 (sequence is synthesized)
tggaaagccagtactgtgggagccactggtacatgcgccccttcaggcagctgctgtgacctccaatgtggccattgccctgactcatcagcggggccctctgcccctctcccctgactc

SEQ ID NO: 381635 - DNA, 120 bp, Artificial Sequence
  ENSG00000143630_16 (sequence is synthesized)
tccagccaccctccttgctcgctctgcttggcgctcagcaggctctccagcttccccgctggtgcccgtccgagctggcccatgggcatccacctcccgcctgcccgccccacctgcccg

SEQ ID NO: 381636 - DNA, 120 bp, Artificial Sequence
  ENSG00000143630_17 (sequence is synthesized)
aaccctgcacgccagcctatcccgggcagggcgctcccaggtctccctgctgggtccccctccaggaggaggtggacggcggctaggacctcggggccgcccactctcagcctcccaacc

SEQ ID NO: 381637 - DNA, 120 bp, Artificial Sequence
  ENSG00000143630_18 (sequence is synthesized)
ctctctgcctcagcgggcaacaggcgatggctctcctgggcgtaagggatcaggaagtgagcggctgcctccctcagggctcctggccaaacctccaaggacagcccagccccccaggcc

SEQ ID NO: 381638 - DNA, 120 bp, Artificial Sequence
  ENSG00000143630_19 (sequence is synthesized)
accagtgcctgagccagccacaccccggggtctccagctttctgccaacatgtaaaacctttgagtacatccagccttagttcttggggtgcagtagtatgtacccaagggcagatgcct

SEQ ID NO: 381639 - DNA, 120 bp, Artificial Sequence
  ENSG00000143630_20 (sequence is synthesized)
cttggggaaggccatggggacctgaaacattgccccatggaaatgtcgaccctgtgcggacattccgcatactgccatgaagacggtctctgtgtcctcagctcaagaatcctgtagctt

SEQ ID NO: 381640 - DNA, 120 bp, Artificial Sequence
  ENSG00000143630_21 (sequence is synthesized)
gtcccatcataatccattcacccgttcatcatgtgtactgagcagctaccatgttcaaggtaatatgccaggcgctgtatgtctccactgccaagtagaagtgactcaaaaccctctgac

SEQ ID NO: 381641 - DNA, 120 bp, Artificial Sequence
  ENSG00000143630_22 (sequence is synthesized)
aaggatattcccttggctatggtcctgccaggtgcaggcccaggcccatgaccccacctttactaagcacaagtacttgccactgccatcactgccaagtaactagatgtctctgtttcc

SEQ ID NO: 381642 - DNA, 120 bp, Artificial Sequence
  ENSG00000143630_23 (sequence is synthesized)
ctgccaatgatcctgcaggttctgcccggtctggttatcttcctgttcctgtagcatagccaggcactgccagtcacctgtgcccccattgctgtcagcagatgtcttgggtcctgagtg

SEQ ID NO: 381643 - DNA, 120 bp, Artificial Sequence
  ENSG00000143630_24 (sequence is synthesized)
tgggtatccacttttacccgctcactgccacctgtggacactctgtgtctaccctctgagtgggaacatacttctaagttccctgcagtctctgtcctgtggtagaccatctttttgtaa

SEQ ID NO: 381644 - DNA, 120 bp, Artificial Sequence
  ENSG00000143630_25 (sequence is synthesized)
actgcgagcttcctcttccctgtaccctctgccccagtcgtgaccccctaaaagttaaggggtagttggcacctccttattaatatgccagcctagatcccccccggtggaggggcaaat

SEQ ID NO: 381645 - DNA, 120 bp, Artificial Sequence
  ENSG00000143630_26 (sequence is synthesized)
ggctgaatccttgtgtgatatttttttcttcgcttgtttatttattcatttatttaattgtatttattcatttactaactttatgtgttaccaattaattttgtttacccattcctttat

SEQ ID NO: 381646 - DNA, 120 bp, Artificial Sequence
  ENSG00000143630_27 (sequence is synthesized)
ccatccctcccctccttttcaggtaaggagacaggaggagtaggaggaggcagggcctctccatgccagcctctgtggtccttgcccaaacccatcagcgcaatacttgaaccttctccc

SEQ ID NO: 381647 - DNA, 120 bp, Artificial Sequence
  ENSG00000143630_28 (sequence is synthesized)
aggtaggggcaggaggagccacatgagagagggagaaggaccgcgtttacctttagagttttgttttgttttttccttctgagtttgctgttggtgcaggaataagggaaaggcccaagg

SEQ ID NO: 381648 - DNA, 120 bp, Artificial Sequence
  ENSG00000143630_29 (sequence is synthesized)
tatccaagcctggggaagggcaggccagccagcacctctgccttctcagggacaagagtagtcctttaccaccctcactctgcctgtcccctctcctactctacagcattaaagactgtg

SEQ ID NO: 381649 - DNA, 120 bp, Artificial Sequence
  ENSG00000143630_30 (sequence is synthesized)
ggaccaggaccctaagtctcctttccttctgggtggggagttctggggttcttggtgtgtgggagaagttttataattgcttccaaacagctgggtttaaatataaaatagacacactca

SEQ ID NO: 381650 - DNA, 120 bp, Artificial Sequence
  ENSG00000143630_31 (sequence is synthesized)
agcaggaggtgggagatgatcacaacagaaaataggagcgaggaggtggggaggagggaggaaaggggaaggagacccagaagaagtgctcgtgtgttggagggagcaggcaaaggaagg

SEQ ID NO: 381651 - DNA, 120 bp, Artificial Sequence
  ENSG00000143630_32 (sequence is synthesized)
gtacctacccggaagctgaggcccccaagttgcaatagaggacccttttgcctcagggccccccagaaccaaacttaagtgcctgccaggaggaaggcctgcagtagaaggggcagacag

SEQ ID NO: 381652 - DNA, 120 bp, Artificial Sequence
  ENSG00000143630_33 (sequence is synthesized)
aaagaccaaagaaggaaaaggggcaggcagagaatgaggctccgaggggcccatgcccagctctgcaatatactctgcccctcagaaccactcgtggggccgccagtattcccatgccct

SEQ ID NO: 381653 - DNA, 120 bp, Artificial Sequence
  ENSG00000143631_0 (sequence is synthesized)
cttttggtgaacaaggttcacatttattgccaaaagatgtctactctcctggaaaacatctttgccataattaatcttttcaagcaatattcaaaaaaagataaaaacactgacacattg

SEQ ID NO: 381654 - DNA, 120 bp, Artificial Sequence
  ENSG00000143631_1 (sequence is synthesized)
agtaaaaaagagctgaaggaacttctggaaaaggaatttcggcaaatcctgaagaatccagatgacccagatatggttgatgtcttcatggatcacttggatatagaccacaacaagaaa

SEQ ID NO: 381655 - DNA, 120 bp, Artificial Sequence
  ENSG00000143631_2 (sequence is synthesized)
attgacttcactgagtttcttctgatggtattcaagttggctcaagcatattatgagtctaccagaaaagagaatttaccgatatcaggacacaagcacagaaagcacagtcatcatgat

SEQ ID NO: 381656 - DNA, 120 bp, Artificial Sequence
  ENSG00000143631_3 (sequence is synthesized)
aaacatgaagataataaacaggaagaaaacaaagaaaacagaaaaagaccctcaagtctggaaagaagaaacaatagaaaagggaataagggaagatccaagagcccaagagaaacaggg

SEQ ID NO: 381657 - DNA, 120 bp, Artificial Sequence
  ENSG00000143631_4 (sequence is synthesized)
gggaaaaggcatgaatctagttctgaaaaaaaagaaagaaaaggatattcacctactcatagagaagaagaatatggaaaaaaccatcataactcaagtaaaaaagagaaaaacaagact

SEQ ID NO: 381658 - DNA, 120 bp, Artificial Sequence
  ENSG00000143631_5 (sequence is synthesized)
gaaaatactagattaggagacaataggaagaggctaagtgaaagacttgaagagaaagaagacaatgaagaaggagtatatgattatgaaaatacaggaagaatgactcaaaaatggata

SEQ ID NO: 381659 - DNA, 120 bp, Artificial Sequence
  ENSG00000143631_6 (sequence is synthesized)
caatcaggccatattgccacatattacacaatccaggatgaagcctatgacaccactgatagtctattagaagaaaacaaaatatatgaaagatcaaggtcatctgatggcaaatcatca

SEQ ID NO: 381660 - DNA, 120 bp, Artificial Sequence
  ENSG00000143631_7 (sequence is synthesized)
tctcaagtgaacaggtcaagacatgaaaatacaagccaggtaccattgcaggagtccaggacaagaaagcgtaggggatccagagttagccaggacagggacagtgagggacactcagaa

SEQ ID NO: 381661 - DNA, 120 bp, Artificial Sequence
  ENSG00000143631_8 (sequence is synthesized)
gactctgagaggcactctgggtcggcttccagaaaccatcatggatctgcgtgggagcagtcaagagatggctccagacaccccaggtcccatgatgaagacagagccagtcatgggcac

SEQ ID NO: 381662 - DNA, 120 bp, Artificial Sequence
  ENSG00000143631_9 (sequence is synthesized)
tctgcagacagctccagacaatcaggcactcgtcacgcagagacttcctctcgtggacagactgcatcatcccatgaacaggcaagatcaagtccaggagaaagacatggatccggccac

SEQ ID NO: 381663 - DNA, 120 bp, Artificial Sequence
  ENSG00000143631_10 (sequence is synthesized)
cagcagtcagcagacagctccagacactcagccactgggcgcgggcaagcttcatctgcagtcagcgatcgtggacaccgggggtctagcggtagtcaggccagtgacagtgagggacat

SEQ ID NO: 381664 - DNA, 120 bp, Artificial Sequence
  ENSG00000143631_11 (sequence is synthesized)
tcagaaaactcagacacacaatcagtgtcaggccacggaaaggctgggctgagacagcagagccaccaagagtccacacgtggccggtcaggggaacggtctggacgttcagggtcttcc

SEQ ID NO: 381665 - DNA, 120 bp, Artificial Sequence
  ENSG00000143631_12 (sequence is synthesized)
ctctaccaggtgagcactcatgaacagcctgactctgcccatggacggaccgggaccagcactggaggaagacaaggatcgcaccacgagcaggcacgagacagctccaggcattcagcg

SEQ ID NO: 381666 - DNA, 120 bp, Artificial Sequence
  ENSG00000143631_13 (sequence is synthesized)
tcccaagagggtcaggacaccattcgtggacacccggggtcaagcagaggaggaaggcagggatcccaccacgagcaatcggtaaataggtctggacactcaggttcccatcacagccac

SEQ ID NO: 381667 - DNA, 120 bp, Artificial Sequence
  ENSG00000143631_14 (sequence is synthesized)
accacatcccagggaaggtctgatgcctcccatgggcagtcaggatccagaagtgcaagcagacaaacacgaaatgaggaacaatcaggagacggcaccaggcactcagggtcacgtcat

SEQ ID NO: 381668 - DNA, 120 bp, Artificial Sequence
  ENSG00000143631_15 (sequence is synthesized)
catgaagcttcctctcaggctgacagctctagacactcacaggtgggccagggacaatcatcggggcccaggacaagtaggaaccagggatccagtgttagccaggacagtgacagtcag

SEQ ID NO: 381669 - DNA, 120 bp, Artificial Sequence
  ENSG00000143631_16 (sequence is synthesized)
ggacactcagaagactctgagaggtggtctgggtctgcttccagaaaccatcatggatctgctcaggagcagtcaagagatggctccagacaccccaggtcccatcacgaagacagagct

SEQ ID NO: 381670 - DNA, 120 bp, Artificial Sequence
  ENSG00000143631_17 (sequence is synthesized)
ggtcatgggcactctgcagacagctccagaaaatcaggcactcgtcacacacagaattcctctagtggacaggctgcgtcatcccatgaacaggcaagatcaagtgcaggagaaagacat

SEQ ID NO: 381671 - DNA, 120 bp, Artificial Sequence
  ENSG00000143631_18 (sequence is synthesized)
ggatcccgccaccagctccagtcagcagacagctccagacactcaggcactgggcacggacaagcttcatctgcagtcagagacagtggacaccgagggtccagtggtagtcaggccact

SEQ ID NO: 381672 - DNA, 120 bp, Artificial Sequence
  ENSG00000143631_19 (sequence is synthesized)
gacagtgagggacattcagaagactcagacacacagtcagtgtcaggccatggacaggctggtcaccatcagcagagccaccaagagtccgcacgtgaccggtcaggggaaaggtctcga

SEQ ID NO: 381673 - DNA, 120 bp, Artificial Sequence
  ENSG00000143631_20 (sequence is synthesized)
cgttcagggtctttcctctaccaggtgagcactcataaacagtctgagtcctcccatggatggacagggcccagcactggagtaagacaaggatcccaccatgagcaggcacgagacaac

SEQ ID NO: 381674 - DNA, 120 bp, Artificial Sequence
  ENSG00000143631_21 (sequence is synthesized)
tccaggcactcagcatcccaagatggtcaggacaccattcgtggacacccggggtcaagcagaagaggaaggcaggggtcccaccacgagcaatcggtagataggtctggacactcaggg

SEQ ID NO: 381675 - DNA, 120 bp, Artificial Sequence
  ENSG00000143631_22 (sequence is synthesized)
tcccatcacagccacaccacatcccagggaaggtctgatgcctcccgtgggcagtcaggatccagaagtgcaagcagaacaacacgtaatgaggaacaatcaagagacggctccaggcac

SEQ ID NO: 381676 - DNA, 120 bp, Artificial Sequence
  ENSG00000143631_23 (sequence is synthesized)
tcagggtcacgtcaccatgaagcttcctctcatgccgacatctctagacactcacaggcaggccagggacaatcagaggggtccaggacaagcaggcgccagggatccagtgttagccag

SEQ ID NO: 381677 - DNA, 120 bp, Artificial Sequence
  ENSG00000143631_24 (sequence is synthesized)
gacagtgacagtgagggacattcagaagactctgagaggtggtctgggtctgcttccagaaaccatcgtggatctgctcaggagcagtcaagacatggctccagacaccccaggtcccat

SEQ ID NO: 381678 - DNA, 120 bp, Artificial Sequence
  ENSG00000143631_25 (sequence is synthesized)
cacgaagacagagccggtcacgggcactctgcagacagctccagacaatcaggaactcctcacgcagagacttcctctggtggacaggctgcgtcatcccatgaacaggcaagatcaagt

SEQ ID NO: 381679 - DNA, 120 bp, Artificial Sequence
  ENSG00000143631_26 (sequence is synthesized)
ccaggagaaagacacggatcccgccaccagcagtcagcagacagctccagacactcaggcattccgcgcagacaagcttcatctgcagtcagagacagtggacactgggggtccagtggt

SEQ ID NO: 381680 - DNA, 120 bp, Artificial Sequence
  ENSG00000143631_27 (sequence is synthesized)
agtcaggccagtgatagtgagggacattcagaggagtcagacacacagtcagtgtcaggccatggacaggatgggccccatcagcagagccaccaagagtccgcacgtgactggtcaggg

SEQ ID NO: 381681 - DNA, 120 bp, Artificial Sequence
  ENSG00000143631_28 (sequence is synthesized)
ggaaggtctggacgttcagggtctttcatctaccaggtgagcactcatgaacagtctgagtctgcccatgggcggaccaggaccagcactggacgaagacaaggatcccaccacgagcag

SEQ ID NO: 381682 - DNA, 120 bp, Artificial Sequence
  ENSG00000143631_29 (sequence is synthesized)
gcacgagacagctccaggcactcagcgtcccaagagggtcaggacaccattcgtgcacacccggggtcaaggagaggaggaaggcagggatcccaccatgagcaatcggtagatagatct

SEQ ID NO: 381683 - DNA, 120 bp, Artificial Sequence
  ENSG00000143631_30 (sequence is synthesized)
ggacactcagggtcccatcacagccacaccacatcccagggaaggtctgatgcctcccatgggcagtcaggatccagaagtgcaagcagacaaactcgtaaggacaaacaatcaggagac

SEQ ID NO: 381684 - DNA, 120 bp, Artificial Sequence
  ENSG00000143631_31 (sequence is synthesized)
ggctccaggcactcagggtcacgtcaccatgaagctgcctcttgggctgacagctctagacactcacaggtgggacaggaacaatcatcggggtccaggacaagcaggcaccagggatcc

SEQ ID NO: 381685 - DNA, 120 bp, Artificial Sequence
  ENSG00000143631_32 (sequence is synthesized)
agtgttagccaggacagtgacagtgagagacactcagacgactccgagaggttgtctgggtctgcttccagaaaccatcatggatcttctcgggagcagtcaagagatggctccagacac

SEQ ID NO: 381686 - DNA, 120 bp, Artificial Sequence
  ENSG00000143631_33 (sequence is synthesized)
cctgggttccatcaagaagacagagccagtcacgggcactctgcagacagctccagacaatcaggcactcatcacacagagtcttcctctcatggacaggctgtgtcatcccatgaacag

SEQ ID NO: 381687 - DNA, 120 bp, Artificial Sequence
  ENSG00000143631_34 (sequence is synthesized)
gcaagatcaagtccaggagaaagacatggatcccgccaccagcagtcagcagacagctccagacactcaggcattgggcacagacaagcttcatctgcagtcagagacagtggacaccga

SEQ ID NO: 381688 - DNA, 120 bp, Artificial Sequence
  ENSG00000143631_35 (sequence is synthesized)
gggtccagtggtagtcaggtcactaacagtgagggacattcagaagactcagacacacagtcagtgtcagcccacggacaagctgggccccatcagcagagccacaaagagtccgcacgt

SEQ ID NO: 381689 - DNA, 120 bp, Artificial Sequence
  ENSG00000143631_36 (sequence is synthesized)
ggccagtcaggggaaagctctggacgttcaaggtctttcctctaccaggtgagctctcatgaacagtctgagtccacacacggacagactgcacccagcactggaggaagacaaggatcc

SEQ ID NO: 381690 - DNA, 120 bp, Artificial Sequence
  ENSG00000143631_37 (sequence is synthesized)
cgccatgagcaggcacgaaacagctctaggcactcagcatcccaagacggtcaggacaccattcgtggacacccggggtcaagcagaggaggaaggcagggatcctaccacgagcaatca

SEQ ID NO: 381691 - DNA, 120 bp, Artificial Sequence
  ENSG00000143631_38 (sequence is synthesized)
gtagataggtctggacactcagggtaccatcacagccacaccacaccccagggaaggtctgatgcctcccatgggcagtcaggacccagaagtgcaagcaggcaaacaagaaatgaggaa

SEQ ID NO: 381692 - DNA, 120 bp, Artificial Sequence
  ENSG00000143631_39 (sequence is synthesized)
caatcaggagacggctccaggcactcagggtcacgtcaccatgaaccttccactcgggccggcagctctagacactcacaggtgggccagggagaatcagcggggtccaagacaagcagg

SEQ ID NO: 381693 - DNA, 120 bp, Artificial Sequence
  ENSG00000143631_40 (sequence is synthesized)
cgccagggatccagtgttagtcaggacagggacagtgagggacactcagaagactctgagaggcggtctgagtcggcttccagaaaccattatggatctgctcgggagcagtcaagacat

SEQ ID NO: 381694 - DNA, 120 bp, Artificial Sequence
  ENSG00000143631_41 (sequence is synthesized)
ggctccaggaaccccaggtcccatcaagaagatagagccagtcatgggcactctgcagagagctccagacaatcaggcactcgtcatgcagagacttcctctggtggacaggctgcatca

SEQ ID NO: 381695 - DNA, 120 bp, Artificial Sequence
  ENSG00000143631_42 (sequence is synthesized)
tcccaggaacaggcaaggtcaagtccaggagaaagacatggatcccgccaccagcagtcagcagacagctccacagactcaggcactgggcgcagacaagattcatctgtagtcggagac

SEQ ID NO: 381696 - DNA, 120 bp, Artificial Sequence
  ENSG00000143631_43 (sequence is synthesized)
agtggaaaccgagggtccagtggtagccaggccagtgacagcgagggacactcagaagagtcagacacacagtcagtgtcagcccacggacaggctgggccccatcagcagagccaccaa

SEQ ID NO: 381697 - DNA, 120 bp, Artificial Sequence
  ENSG00000143631_44 (sequence is synthesized)
gagtccacacgtggccagtcaggggaaaggtctggacgttcagggtctttcctctaccaggtgagcactcatgaacagtctgagtccgcccatggacgcacagggcccagcactggagga

SEQ ID NO: 381698 - DNA, 120 bp, Artificial Sequence
  ENSG00000143631_45 (sequence is synthesized)
agacaaagatcccgccacgagcaggcacgagacagctccaggcactcagcgtcccaagagggtcaggacaccattcgtggacacccagggtcaagcagaggaggaaggcagggatcccac

SEQ ID NO: 381699 - DNA, 120 bp, Artificial Sequence
  ENSG00000143631_46 (sequence is synthesized)
tatgagcaatcggtagatagttctggacactcagggtctcatcacagccacaccacgtcccaggaaaggtctgatgtctcccgtgggcagtcaggatccagaagtgtcagcagacaaaca

SEQ ID NO: 381700 - DNA, 120 bp, Artificial Sequence
  ENSG00000143631_47 (sequence is synthesized)
cgtaatgagaaacaatcaggagacggctccaggcactcagggtcgcgtcaccatgaagcttcctctcgggccgacagctctagacactcgcaggtgggccagggacaatcatcagggccc

SEQ ID NO: 381701 - DNA, 120 bp, Artificial Sequence
  ENSG00000143631_48 (sequence is synthesized)
aggacaagcaggaaccagggatccagtgttagccaggacagtgacagtcagggacactcagaagactctgagaggtggtctgggtctgcttccagaaaccatcttggatctgcttgggag

SEQ ID NO: 381702 - DNA, 120 bp, Artificial Sequence
  ENSG00000143631_49 (sequence is synthesized)
cagtcaagagatggctccagacaccctgggtcccatcacgaagacagagccggtcacgggcactctgcagacagctccagacaatcaggcactcgtcacacagagtcttcctctcgtgga

SEQ ID NO: 381703 - DNA, 120 bp, Artificial Sequence
  ENSG00000143631_50 (sequence is synthesized)
caggctgcgtcatcccatgaacaggcaagatcaagtgcaggagaaagacatggatcccaccaccagctccagtcagcagacagctccagacactcaggcattgggcatggacaagcttca

SEQ ID NO: 381704 - DNA, 120 bp, Artificial Sequence
  ENSG00000143631_51 (sequence is synthesized)
tctgcagtcagagacagtggacaccgagggtacagtggtagtcaggccagtgacagtgagggacattcagaagactcagacacacagtcagtgtcagcacagggaaaagctgggccccat

SEQ ID NO: 381705 - DNA, 120 bp, Artificial Sequence
  ENSG00000143631_52 (sequence is synthesized)
cagcagagccacaaagagtccgcacgtggccagtcaggggaaagctctggacgttcagggtctttcctctaccaggtgagcactcatgaacagtctgagtccacccatggacagtctgcg

SEQ ID NO: 381706 - DNA, 120 bp, Artificial Sequence
  ENSG00000143631_53 (sequence is synthesized)
cattatgatcaggcacaagacagctccaggcactcagcatcccaagagggtcaggacaccattcgtggacacccggggccaagcagaggaggaagacaggggtcccaccaagagcaatcg

SEQ ID NO: 381707 - DNA, 120 bp, Artificial Sequence
  ENSG00000143631_54 (sequence is synthesized)
gtagataggtctggacactcagggtctcatcacagccacaccacatcccagggaaggtctgatgcctcccgtgggcagtcaggatccagaagtgcaagcagaaaaacatatgacaaggaa

SEQ ID NO: 381708 - DNA, 120 bp, Artificial Sequence
  ENSG00000143631_55 (sequence is synthesized)
caatcaggagatggctctaggcactcagggtcgcatcatcatgaagcttcctcttgggccgacagctctagacactcactggtgggccagggacaatcatcagggcccaggacaagcagg

SEQ ID NO: 381709 - DNA, 120 bp, Artificial Sequence
  ENSG00000143631_56 (sequence is synthesized)
ccccggggatccagtgttagccaggacagtgacagtgagggacactcagaagattctgagaggcggtctgggtctgcgtccagaaaccatcatggatctgctcaggagcagtcaagagat

SEQ ID NO: 381710 - DNA, 120 bp, Artificial Sequence
  ENSG00000143631_57 (sequence is synthesized)
ggctccagacaccccaggtcccatcacgaagacagagccggtcatgggcactctgcagagagctccagacaatcaggcactcatcatgcagagaattcctctggtggacaggctgcatca

SEQ ID NO: 381711 - DNA, 120 bp, Artificial Sequence
  ENSG00000143631_58 (sequence is synthesized)
tcccatgaacaggcaagatcaagtgcaggagagagacacggatcccaccaccagcagtcagcagacagctccagacactcaggcattgggcacggacaagcttcatctgcagtcagagac

SEQ ID NO: 381712 - DNA, 120 bp, Artificial Sequence
  ENSG00000143631_59 (sequence is synthesized)
agtggacaccgagggtccagtggtagtcaggccagtgacagtgagggacattcagaagactcagacacacagtcagtgtcagcccacggacaggctgggccccatcagcagagccaccaa

SEQ ID NO: 381713 - DNA, 120 bp, Artificial Sequence
  ENSG00000143631_60 (sequence is synthesized)
gagtccacacgtggccggtcagcaggaaggtctggacgttcagggtctttcctctaccaggtgagcactcatgaacagtctgagtccgcccatggacggaccgggaccagcactggagga

SEQ ID NO: 381714 - DNA, 120 bp, Artificial Sequence
  ENSG00000143631_61 (sequence is synthesized)
agacaaggatcccaccacaagcaggcacgagacagctccaggcactcaacgtcccaagagggtcaggacaccattcatggacacccggggtcaagcagtggaggaaggcagggatcccac

SEQ ID NO: 381715 - DNA, 120 bp, Artificial Sequence
  ENSG00000143631_62 (sequence is synthesized)
tacgagcaattggtagatagatctggacactcagggtctcatcacagccacaccacatcccagggaaggtctgatgcctcccatgggcactcaggatccagaagtgcaagcagacaaact

SEQ ID NO: 381716 - DNA, 120 bp, Artificial Sequence
  ENSG00000143631_63 (sequence is synthesized)
cgtaacgatgaacaatcaggagacggctccaggcactcagggtcgcgtcaccatgaagcttcctctcgggccgacagctctggacactcgcaggtgggccagggacaatcagaggggccc

SEQ ID NO: 381717 - DNA, 120 bp, Artificial Sequence
  ENSG00000143631_64 (sequence is synthesized)
aggacaagcaggaactggggatccagttttagccaggacagtgacagtcagggacactcagaagactctgagaggtggtctgggtctgcttccagaaaccatcatggatctgctcaggag

SEQ ID NO: 381718 - DNA, 120 bp, Artificial Sequence
  ENSG00000143631_65 (sequence is synthesized)
cagctaagagatggctccagacaccccaggtcccatcaagaagacagagctggtcatgggcactctgcagacagctccagacaatcaggcactcgtcacacacagacttcctctggtgga

SEQ ID NO: 381719 - DNA, 120 bp, Artificial Sequence
  ENSG00000143631_66 (sequence is synthesized)
caggctgcatcatcccatgaacaggcaagatcaagtgcaggagaaagacatggatcccaccaccagcagtcagcagacagctccagacactcaggcattgggcacggacaagcttcatct

SEQ ID NO: 381720 - DNA, 120 bp, Artificial Sequence
  ENSG00000143631_67 (sequence is synthesized)
gcagtcagagacagtggacaccgagggtacagtggtagtcaggccagtgacaatgagggacattcagaagactcagacacacagtcagtgtcagcccacggacaggctgggtcccatcag

SEQ ID NO: 381721 - DNA, 120 bp, Artificial Sequence
  ENSG00000143631_68 (sequence is synthesized)
cagagccaccaagagtccgcacgtggccggtcaggggaaacgtctggacattcaggatctttcctctaccaggtgagcactcatgaacagtctgagtcctcccatggatggacggggccc

SEQ ID NO: 381722 - DNA, 120 bp, Artificial Sequence
  ENSG00000143631_69 (sequence is synthesized)
agcactagaggaagacaaggatcccgccatgagcaggcacaagacagctccaggcactcagcatcccaagacggtcaggacaccattcgtggacacccggggtcaagcagaggaggaagg

SEQ ID NO: 381723 - DNA, 120 bp, Artificial Sequence
  ENSG00000143631_70 (sequence is synthesized)
caggggtaccaccacgagcattcggtagatagctctggacactcagggtcccatcacagccacaccacatcccagggaaggtctgatgcctcccgtgggcagtcaggatccagaagtgca

SEQ ID NO: 381724 - DNA, 120 bp, Artificial Sequence
  ENSG00000143631_71 (sequence is synthesized)
agcagaacaacacgtaatgaggaacaatcaggagacggctccaggcactcagggtcgcgtcaccatgaagcttccactcatgccgacatctctagacactcacaggcagtccagggacaa

SEQ ID NO: 381725 - DNA, 120 bp, Artificial Sequence
  ENSG00000143631_72 (sequence is synthesized)
tcagaggggtccaggagaagcaggcgccagggatccagtgtgagccaggacagtgacagtgagggacattcagaagactctgagaggtggtctgggtctgcttccagaaaccatcatgga

SEQ ID NO: 381726 - DNA, 120 bp, Artificial Sequence
  ENSG00000143631_73 (sequence is synthesized)
tctgctcaggagcagctaagagatggctccagacaccccaggtcccatcaagaagacagagctggtcatgggcactctgcagacagctccagacaatcaggcactcgtcacacacagact

SEQ ID NO: 381727 - DNA, 120 bp, Artificial Sequence
  ENSG00000143631_74 (sequence is synthesized)
tcctctggtggacaggctgcatcatcccatgaacaggcaagatcaagtgcaggagaaagacatggatcccaccaccagcagtcagcagacagctccagacactcaggcattgggcacgga

SEQ ID NO: 381728 - DNA, 120 bp, Artificial Sequence
  ENSG00000143631_75 (sequence is synthesized)
caagcttcatctgcagtcagagacagtggacaccgagggtacagtggtagtcaggccagtgacaatgagggacattcagaagactcagacacacagtcagtgtcagcccacggacaggct

SEQ ID NO: 381729 - DNA, 120 bp, Artificial Sequence
  ENSG00000143631_76 (sequence is synthesized)
gggtcccatcagcagagccaccaagagtccgcacgtggccggtcaggggaaacgtctggacattcaggatctttcctctaccaggtgagcactcatgaacagtctgagtcctcccatgga

SEQ ID NO: 381730 - DNA, 120 bp, Artificial Sequence
  ENSG00000143631_77 (sequence is synthesized)
tggacggggcccagcactagaggaagacaaggatcccgccatgagcaggcacaagacagctccaggcactcagcatcccaatacggtcaggacaccattcgtggacacccggggtcaagc

SEQ ID NO: 381731 - DNA, 120 bp, Artificial Sequence
  ENSG00000143631_78 (sequence is synthesized)
agaggaggaaggcaggggtaccaccacgagcattcggtagatagctctggacactcagggtcccatcacagccacaccacatcccagggaaggtctgatgcctcccgtgggcagtcagga

SEQ ID NO: 381732 - DNA, 120 bp, Artificial Sequence
  ENSG00000143631_79 (sequence is synthesized)
tccagaagtgcaagcagaacaacacgtaatgaggaacaatcaggagacagctccaggcactcagtgtcacgtcaccatgaagcttccactcatgccgacatctctagacactcacaggca

SEQ ID NO: 381733 - DNA, 120 bp, Artificial Sequence
  ENSG00000143631_80 (sequence is synthesized)
gtccagggacaatcagaggggtccaggagaagcaggcgccagggatccagtgtgagccaggacagtgacagtgagggacattcagaagactctgagaggtggtctgggtctgcttccaga

SEQ ID NO: 381734 - DNA, 120 bp, Artificial Sequence
  ENSG00000143631_81 (sequence is synthesized)
aaccatcgtggatctgttcaggagcagtcaaggcacggctccagacaccccaggtcccatcacgaagacagagccggtcacgggcactctgcagaccgctccagacaatcaggcactcgt

SEQ ID NO: 381735 - DNA, 120 bp, Artificial Sequence
  ENSG00000143631_82 (sequence is synthesized)
cacgcagagacttcctctggtggacaggctgcatcatcccatgaacaggcaagatcaagtccaggagagagacacggatcccgccaccagcagtcagcagacagctccagacactcaggc

SEQ ID NO: 381736 - DNA, 120 bp, Artificial Sequence
  ENSG00000143631_83 (sequence is synthesized)
attccgcgtggacaagcttcatctgcagtcagagacagtagacactgggggtccagtggtagtcaggccagtgatagtgagggacattcagaagagtcagacacacagtcagtgtcaggc

SEQ ID NO: 381737 - DNA, 120 bp, Artificial Sequence
  ENSG00000143631_84 (sequence is synthesized)
catggacaggctgggccccatcagcagagccaccaagagtccgcacgtgaccggtcagggggaaggtctggacgttcagggtctttcctctaccaggtgagcactcatgaacagtctgag

SEQ ID NO: 381738 - DNA, 120 bp, Artificial Sequence
  ENSG00000143631_85 (sequence is synthesized)
tctgcccatgggcggaccaggaccagcactggacgaagacaaggatcccaccacgagcaggcacgagacagctccaggcactcagcgtcccaagagggtcaggacaccattcgtggacac

SEQ ID NO: 381739 - DNA, 120 bp, Artificial Sequence
  ENSG00000143631_86 (sequence is synthesized)
ccggggtcaagcagaagaggaaggcagggatcccactacgagcaatcggtagataggtctggacactcagggtcccatcacagccacaccacatcccagggaaggtctgatgcctcccgt

SEQ ID NO: 381740 - DNA, 120 bp, Artificial Sequence
  ENSG00000143631_87 (sequence is synthesized)
gggcagtcaggatccagaagtgccagcagacaaactcgtaatgacgaacaatcaggagatggctccaggcactcatggtcgcatcaccatgaagcttccactcaggcggacagctctaga

SEQ ID NO: 381741 - DNA, 120 bp, Artificial Sequence
  ENSG00000143631_88 (sequence is synthesized)
cactcacagtccggccagggacaatcagcggggcccaggacaagcaggaaccagggatccagtgttagccaggacagtgacagtcagggacactcagaagactctgagaggtggtctggg

SEQ ID NO: 381742 - DNA, 120 bp, Artificial Sequence
  ENSG00000143631_89 (sequence is synthesized)
tctgcttccagaaaccatcgtggatctgctcaggagcagtcaagagatggctccagacaccccacgtcccatcacgaagacagagccggtcacgggcactctgcagagagctccagacaa

SEQ ID NO: 381743 - DNA, 120 bp, Artificial Sequence
  ENSG00000143631_90 (sequence is synthesized)
tcaggcactcatcatgcagagaattcctctggtggacaggctgcatcatcccatgaacaggcaagatcaagtgcaggagagagacatggatcccaccaccagcagtcagcagacagctcc

SEQ ID NO: 381744 - DNA, 120 bp, Artificial Sequence
  ENSG00000143631_91 (sequence is synthesized)
agacactcaggcattgggcacggacaagcttcatctgcagtcagagacagtggacaccgagggtccagtggtagtcaggccagtgacagtgagggacattcagaagactcagacacacag

SEQ ID NO: 381745 - DNA, 120 bp, Artificial Sequence
  ENSG00000143631_92 (sequence is synthesized)
tcagtgtcagcccacggacaggctgggccccatcagcagagccaccaagagtccacacgtggccggtcagcaggaaggtctggacgttcagggtctttcctctaccaggtgagcactcat

SEQ ID NO: 381746 - DNA, 120 bp, Artificial Sequence
  ENSG00000143631_93 (sequence is synthesized)
gaacagtctgagtctgcccatggacgggctgggcccagtactggaggaagacaaggatcccgccacgagcaggcacgagacagctccaggcactcagcgtcccaagagggtcaggacacc

SEQ ID NO: 381747 - DNA, 120 bp, Artificial Sequence
  ENSG00000143631_94 (sequence is synthesized)
attcgtggacacccggggtcaaggagaggaggaagacagggatcctaccacgagcaatcggtagataggtctggacactcagggtcccatcacagccacaccacatcccagggaaggtct

SEQ ID NO: 381748 - DNA, 120 bp, Artificial Sequence
  ENSG00000143631_95 (sequence is synthesized)
gatgcctcccatgggcagtcaggatccagaagtgcaagcagagaaacacgtaatgaggaacagtcaggagacggctccaggcactcagggtcgcgtcaccatgaagcttccactcaggct

SEQ ID NO: 381749 - DNA, 120 bp, Artificial Sequence
  ENSG00000143631_96 (sequence is synthesized)
gacagctctagacactcacagtccggccagggtgaatcagcggggtccaggagaagcaggcgccagggatccagtgttagccaggacagtgacagtgaggcatacccagaggactctgag

SEQ ID NO: 381750 - DNA, 120 bp, Artificial Sequence
  ENSG00000143631_97 (sequence is synthesized)
aggcgatctgagtctgcttccagaaaccatcatggatcttctcgggagcagtcaagagatggctccagacaccccggatcctctcaccgcgatacagccagtcatgtacagtcttcacct

SEQ ID NO: 381751 - DNA, 120 bp, Artificial Sequence
  ENSG00000143631_98 (sequence is synthesized)
gtacagtcagactctagtaccgctaaggaacatggtcactttagtagtctttcacaagattctgcgtatcactcaggaatacagtcacgtggcagtcctcacagttctagttcttatcat

SEQ ID NO: 381752 - DNA, 120 bp, Artificial Sequence
  ENSG00000143631_99 (sequence is synthesized)
tatcaatctgagggcactgaaaggcaaaaaggtcaatcaggtttagtttggagacatggcagctatggtagtgcagattatgattatggtgaatccgggtttagacactctcagcacgga

SEQ ID NO: 381753 - DNA, 120 bp, Artificial Sequence
  ENSG00000143631_100 (sequence is synthesized)
agtgttagttacaattccaatcctgttgttttcaaggaaagatctgatatctgtaaagcaagtgcgtttggtaaagatcatccaaggtattatgcaacgtatattaataaggacccaggt

SEQ ID NO: 381754 - DNA, 120 bp, Artificial Sequence
  ENSG00000143631_101 (sequence is synthesized)
ttatgtggccattctagtgatatatcgaaacaactgggatttagtcagtcacagagatactattactatgagtaagaaattaatggcaaaggaattaatccaagaatagaagaatgaagc

SEQ ID NO: 381755 - DNA, 120 bp, Artificial Sequence
  ENSG00000143631_102 (sequence is synthesized)
aagttcactttcaatcaagaaacttcataatactttcagggaagttatcttttcctgtcaatctgtttaaaatatgctatagtatttcattagtttggtggtagcttatttttattgtgt

SEQ ID NO: 381756 - DNA, 120 bp, Artificial Sequence
  ENSG00000143631_103 (sequence is synthesized)
aatgatctttaaacgctatatttcagaaatattaaatggaagaaatcaatatcatggagagctaactttagaaaactagctggagtattttaggagattctgggtcaagtaatgttttat

SEQ ID NO: 381757 - DNA, 120 bp, Artificial Sequence
  ENSG00000143631_104 (sequence is synthesized)
gtttttgaaagtttaagttttagacactccccaaatttctaaattaatctttttcagaaatatcgaaggagccaaaaatataaaacagttctgtataccaaagtggctatatcaacatca

SEQ ID NO: 381758 - DNA, 120 bp, Artificial Sequence
  ENSG00000143631_105 (sequence is synthesized)
gggctagcacatctttctctattatccttctattggaattctagtattctgtattcaaaaaatcatcttggacataattaatattatagtaagctgcatctaaattaaaaataaactatt

SEQ ID NO: 381759 - DNA, 120 bp, Artificial Sequence
  ENSG00000143632_0 (sequence is synthesized)
accgcagcggacagcgccaagtgaagcctcgcttcccctccgcggcgaccagggcccgagccgagagtagcagttgtagctacccgcccagaaactagacacaatgtgcgacgaagacga

SEQ ID NO: 381760 - DNA, 120 bp, Artificial Sequence
  ENSG00000143632_1 (sequence is synthesized)
gaccaccgccctcgtgtgcgacaatggctccggcctggtgaaagccggcttcgccggggatgacgcccctagggccgtgttcccgtccatcgtgggccgcccccgacaccagggcgtcat

SEQ ID NO: 381761 - DNA, 120 bp, Artificial Sequence
  ENSG00000143632_2 (sequence is synthesized)
ggtcggtatgggtcagaaagattcctacgtgggcgacgaggctcagagcaagagaggtatcctgaccctgaagtaccctatcgagcacggcatcatcaccaactgggatgacatggagaa

SEQ ID NO: 381762 - DNA, 120 bp, Artificial Sequence
  ENSG00000143632_3 (sequence is synthesized)
gatctggcaccacaccttctacaacgagcttcgcgtggctcccgaggagcaccccaccctgctcaccgaggcccccctcaatcccaaggccaaccgcgagaagatgacccagatcatgtt

SEQ ID NO: 381763 - DNA, 120 bp, Artificial Sequence
  ENSG00000143632_4 (sequence is synthesized)
tgagaccttcaacgtgcccgccatgtacgtggccatccaggccgtgctgtccctctacgcctccggcaggaccaccggcatcgtgctggactccggcgacggcgtcacccacaacgtgcc

SEQ ID NO: 381764 - DNA, 120 bp, Artificial Sequence
  ENSG00000143632_5 (sequence is synthesized)
catttatgagggctacgcgctgccgcacgccatcatgcgcctggacctggcgggccgcgatctcaccgactacctgatgaagatcctcactgagcgtggctactccttcgtgaccacagc

SEQ ID NO: 381765 - DNA, 120 bp, Artificial Sequence
  ENSG00000143632_6 (sequence is synthesized)
ggacttcgagaacgagatggcgacggccgcctcctcctcctccctggaaaagagctacgagctgccagacgggcaggtcatcaccatcggcaacgagcgcttccgctgcccggagacgct

SEQ ID NO: 381766 - DNA, 120 bp, Artificial Sequence
  ENSG00000143632_7 (sequence is synthesized)
cttccagccctccttcatcggtatggagtcggcgggcattcacgagaccacctacaacagcatcatgaagtgtgacatcgacatcaggaaggacctgtatgccaacaacgtcatgtcggg

SEQ ID NO: 381767 - DNA, 120 bp, Artificial Sequence
  ENSG00000143632_8 (sequence is synthesized)
gggcaccacgatgtaccctgggatcgctgaccgcatgcagaaagagatcaccgcgctggcacccagcaccatgaagatcaagatcatcgccccgccggagcgcaaatactcggtgtggat

SEQ ID NO: 381768 - DNA, 120 bp, Artificial Sequence
  ENSG00000143632_9 (sequence is synthesized)
gtccaccttccagcagatgtggatcaccaagcaggagtacgacgaggccggcccttccatcgtccaccgcaaatgcttctagacacactccacctccagcacgcgacttctcaggacgac

SEQ ID NO: 381769 - DNA, 120 bp, Artificial Sequence
  ENSG00000143632_10 (sequence is synthesized)
cagcacgcgacttctcaggacgacgaatcttctcaatgggggggcggctgagctccagccaccccgcagtcactttctttgtaacaacttccgttgctgccatcgtaaactgacacagtg

SEQ ID NO: 381770 - DNA, 120 bp, Artificial Sequence
  ENSG00000143632_11 (sequence is synthesized)
tttataacgtgtacatacattaacttattacctcattttgttatttttcgaaacaaagccctgtggaagaaaatggaaaacttgaagaagcattaaagtcattctgttaagctgcgtaaa

SEQ ID NO: 381771 - DNA, 120 bp, Artificial Sequence
  ENSG00000143633_0 (sequence is synthesized)
gcggaacccggaagcgggggtgcagcgcggcagaatgagggttgattcctcggctgaccccacaatgtcgcaggagcaagggccggggtcctccacgcctcccagttctccgacacttct

SEQ ID NO: 381772 - DNA, 120 bp, Artificial Sequence
  ENSG00000143633_1 (sequence is synthesized)
tgacgctctgctccagaacctttacgactttggaggtacagaaggtgaaacagaacagaagaagatcataaagaaaagggaaaacaagaagagagatgtgatggcttcagcggccttggc

SEQ ID NO: 381773 - DNA, 120 bp, Artificial Sequence
  ENSG00000143633_2 (sequence is synthesized)
agcagagccatctcccctacctggttctctcataagaggccagaggaagagcgcttcgagcttcttcaaggaacttagagaagagcggcattgtgctccttctgggacccccacaggacc

SEQ ID NO: 381774 - DNA, 120 bp, Artificial Sequence
  ENSG00000143633_3 (sequence is synthesized)
agagatccttgctgctgcagttcctccctcttccctaaagaacaatagggaacaagtagaagtggtagaatttcacagcaataaaaaaagaaaattgacgccagatcataacaagaacac

SEQ ID NO: 381775 - DNA, 120 bp, Artificial Sequence
  ENSG00000143633_4 (sequence is synthesized)
aaagcaggctaatcctagtgttttggagagagatgtggatacacaagaatttaacctagaaaaagctcgtttagaagtgcaccggtttggtatcacgggttatggaaaaggaaaggagag

SEQ ID NO: 381776 - DNA, 120 bp, Artificial Sequence
  ENSG00000143633_5 (sequence is synthesized)
aagaagaaaagagactggcccaagaaacagatattttcaagaaaaagaagaggaaaggacaggaggacaggaaatccaaaaagaagtccgctcccagtattttgtcaaatggacggattg

SEQ ID NO: 381777 - DNA, 120 bp, Artificial Sequence
  ENSG00000143633_6 (sequence is synthesized)
gacaggttggaaaattcaaaaatggaacactgattctgagcccagttgatatcaagaaaataaattcttccagagtggccaaatgaagtactttgtcaaataaaacgaggatgggaacaa

SEQ ID NO: 381778 - DNA, 120 bp, Artificial Sequence
  ENSG00000143633_7 (sequence is synthesized)
ctgagtcaactgcagcggccctggaccctgtgcgactctagatagatcgttcttaacacgcatttcacagactgctttttcattttagaaaaaaagtcaaacagaagtaacatttctagt

SEQ ID NO: 381779 - DNA, 120 bp, Artificial Sequence
  ENSG00000143633_8 (sequence is synthesized)
tgccgaagtgtctgcttcatggtgctgaacgtgtcaggcccagtgcagcatgaatgtgaagtgaacccactgaaaagtgatttttaatgttctccagcaaacttcactcctgtttcatgt

SEQ ID NO: 381780 - DNA, 120 bp, Artificial Sequence
  ENSG00000143633_9 (sequence is synthesized)
tcactggtatttggtgcatttgcttgtaatacagttttttataactttactgttttgtaaatgctagtagtttacattaaattgccttatatttttaatgatttaatgttatgatatcat

SEQ ID NO: 381781 - DNA, 120 bp, Artificial Sequence
  ENSG00000143633_10 (sequence is synthesized)
gaaagaaccaagaatctagtaatttatcagttttgtggaaaagcagttttaatttttagcctaccatgtgtacaaaatctacttcataagaagttatataaataaaataggtttgtagta

SEQ ID NO: 381782 - DNA, 120 bp, Artificial Sequence
  ENSG00000143633_11 (sequence is synthesized)
ggacgccttgaatgtatgtggtgttgctagcccattagagcgcttcactgtctctcatttatccttgtcaaagtaggatttagtaaactgcccaagatcaaacaactgcctgagaactga

SEQ ID NO: 381783 - DNA, 120 bp, Artificial Sequence
  ENSG00000143633_12 (sequence is synthesized)
attaggaagtttctccaatcttccacttttcaccgacactctaagtgactagtggaaaagctgcagtttacatttccaagaaaagacttctaagagtgctgctacagcagcgtagtctgg

SEQ ID NO: 381784 - DNA, 120 bp, Artificial Sequence
  ENSG00000143633_13 (sequence is synthesized)
gtctgtatagcctgctctttgacataccacgtaagatagagcaccgtaattatgaataagggatgttgactttgttgctttatacttgtttgttagcttttgttcaaatgcctttttctc

SEQ ID NO: 381785 - DNA, 120 bp, Artificial Sequence
  ENSG00000143633_14 (sequence is synthesized)
aaatggtcatttgttctggccaccgatctgtatctgttgaatgcctctttgtgccaggcatgtgggtgtcttaggtattggtgtacagctgtaatcacactaaagatatccctgcccttg

SEQ ID NO: 381786 - DNA, 120 bp, Artificial Sequence
  ENSG00000143633_15 (sequence is synthesized)
aggagcttcattgtagggagagaaacaccccaaaacatacaaatggataagtaagatgatatcaggtactggcaagtattgtagagaggctgaaagagagcattgtgaaggaaaaccaca

SEQ ID NO: 381787 - DNA, 120 bp, Artificial Sequence
  ENSG00000143633_16 (sequence is synthesized)
gggagaaggtgagctgggaaattagtctgaggaggtgacatcggagctgagaactgaacaaagaagaggggcagcctggaaagagctggtagcagaacattccttgcagaagaaaccagt

SEQ ID NO: 381788 - DNA, 120 bp, Artificial Sequence
  ENSG00000143633_17 (sequence is synthesized)
gcaagggccctgaggcaggaaggcagtagcatgtttcagggaccacaggaaggcgtatggggtggggggtgtgcatggcaggcgaccaggagtttgcaggccagactgcagtggcctggt

SEQ ID NO: 381789 - DNA, 120 bp, Artificial Sequence
  ENSG00000143633_18 (sequence is synthesized)
ggatcccatgctccccatttcttcgagttagctctgtttagtaataccagccaagtaatctggcgtacttacatgcaagatttgctttgaaatagcaaactccttgtcttagtccgtttt

SEQ ID NO: 381790 - DNA, 120 bp, Artificial Sequence
  ENSG00000143633_19 (sequence is synthesized)
tgttgctgtaaaggaatgcctgatgctgcgtaatttataaagaaaggaggctgatttggagcatggttctgcagactgcatggaaagcatagcactggcatctgctcggcctccggtgag

SEQ ID NO: 381791 - DNA, 120 bp, Artificial Sequence
  ENSG00000143633_20 (sequence is synthesized)
cctgcagatttgccaaaaggactcacaggacccaagactcagcatatagcccttatcagtcatgtaggcctacagactgaccttagttattcaagttctagacctccagtgaaaagcagg

SEQ ID NO: 381792 - DNA, 120 bp, Artificial Sequence
  ENSG00000143633_21 (sequence is synthesized)
tattcaccatcaatcacattgctagtataaactgtctgggaaaacttggtacagcagtggctcaagacctcaggtatgcaaaaacactctgatcaggcagaatattctaattgctcaatt

SEQ ID NO: 381793 - DNA, 120 bp, Artificial Sequence
  ENSG00000143633_22 (sequence is synthesized)
ctcaggaggcagccaactgccagtcatgaaaataggactttcttgggaatgtgcagggtttggtaaacacaggcctgctgagttaactcttacagcaactctttctggcattcctgttat

SEQ ID NO: 381794 - DNA, 120 bp, Artificial Sequence
  ENSG00000143633_23 (sequence is synthesized)
gtgctagccacagttgtaggcactgggatatagcagtgaaccaaatgtatagaaattcttgctctcgaggaaaagcaatgctggtggaaaagcaatttgatttttctgagcagtaatctt

SEQ ID NO: 381795 - DNA, 120 bp, Artificial Sequence
  ENSG00000143633_24 (sequence is synthesized)
tttttctgagcagtaatctttttcagagtgagcttgtaaatctcacctaaaattcagtccccaagggaggtgtggttgctcctccaaatgtttttaattttttttttttttgagacggag

SEQ ID NO: 381796 - DNA, 120 bp, Artificial Sequence
  ENSG00000143633_25 (sequence is synthesized)
tgtttttaatttatctattcacaagaatatcataatggctttgacaaattcattgctattccatttctgtaacatcccccacgtcctgcaaacctttgtctatcaacaaagaagtgagga

SEQ ID NO: 381797 - DNA, 120 bp, Artificial Sequence
  ENSG00000143633_26 (sequence is synthesized)
ttgaacgtattagtttctaagcctgctataacaaattaccacaaacatggtgacttaaaccaacagaaatgtattctcttacagttccgtagtccagaagtccaaaatcaaagtgttggc

SEQ ID NO: 381798 - DNA, 120 bp, Artificial Sequence
  ENSG00000143633_27 (sequence is synthesized)
agggccatgctccctctgagggctttgggggagaatcctttgcctctgaccagaaggtagctctaacagtttccttggcttgtggttgcataactataatctctgcctccgtcttaatgt

SEQ ID NO: 381799 - DNA, 120 bp, Artificial Sequence
  ENSG00000143633_28 (sequence is synthesized)
ggttttcatccctgtgtccctgagtctcatgtttccctctgccttcctctttgctttaggcccaccctgaatctgggatgatctccttttgagatgtttaattataaagatccctctcca

SEQ ID NO: 381800 - DNA, 120 bp, Artificial Sequence
  ENSG00000143633_29 (sequence is synthesized)
agtaagatcacattcacaggttctgaagaggagtaggacatggccatatgtttttagaggccacaattctacccactacgaagatggtttggcttgcattgttctttatgaatgtataaa

SEQ ID NO: 381801 - DNA, 120 bp, Artificial Sequence
  ENSG00000143633_30 (sequence is synthesized)
tgtatgttagtgtccagtgtttgccacatctttatggttttaaaaaccatctgtataatcttttctaaaattcaggtagcatttcatatcaagcttgctggcatctcttcctcaaagatc

SEQ ID NO: 381802 - DNA, 120 bp, Artificial Sequence
  ENSG00000143633_31 (sequence is synthesized)
gttagcgcattctgcaggctgagcgtggtggctcacgccagtaatccgagcactttgggatgccaaggccagaggattgcttgacttcaggaagtcgagactgcagtgggctgtgattgt

SEQ ID NO: 381803 - DNA, 120 bp, Artificial Sequence
  ENSG00000143633_32 (sequence is synthesized)
gtcactgcactccagcgggggtgacagagcgagaccctttctccaaaaaaaaaaaaaaagattattagtgaatctgtaaccatgtctacctttattttaggattctagataagcttctta

SEQ ID NO: 381804 - DNA, 120 bp, Artificial Sequence
  ENSG00000143633_33 (sequence is synthesized)
actcttatgttccaaatataaggctctgggaactgttacgggagggtcaagaaatggattcccttggtgtttggggcaaccagagccccgaagctggccatctcccagtaccccagtgta

SEQ ID NO: 381805 - DNA, 120 bp, Artificial Sequence
  ENSG00000143633_34 (sequence is synthesized)
ccctacaaatactggtattttctgtatgtgtcatgatatgaaaaatgttggtgagcactgctttgcaatataattcagcatttgaagacttcaactaacataaagcatttaggcaccctt

SEQ ID NO: 381806 - DNA, 120 bp, Artificial Sequence
  ENSG00000143633_35 (sequence is synthesized)
tgcctgatgctgcgtaatttataaagaaaggaggctgatttggagcatggttctgcagactgcatggaaagcatagcactggcatctgctcggcctccggcccaagaaacagatattttc

SEQ ID NO: 381807 - DNA, 120 bp, Artificial Sequence
  ENSG00000143633_36 (sequence is synthesized)
ctacctttcacctaaaatggaagatttgagctttcagtgtaagactattagtcttacctggaatagccattcacattcttttgtctttttctttctaactgagacaggatcttgctgtgt

SEQ ID NO: 381808 - DNA, 120 bp, Artificial Sequence
  ENSG00000143633_37 (sequence is synthesized)
ctggtcttgaactcctgggatcaagtgatcctccccccttggcttcctggagtgctaggactataggcatgagccaccacgccaggcccagcctttcacattcttgaaagggttttaggg

SEQ ID NO: 381809 - DNA, 120 bp, Artificial Sequence
  ENSG00000143641_0 (sequence is synthesized)
actcgcgagcagcggcggccccgccggcggccgagttgggagaatgcggcggcgctcgcggatgctgctctgcttcgccttcctgtgggtgctgggcatcgcctactacatgtactcggg

SEQ ID NO: 381810 - DNA, 120 bp, Artificial Sequence
  ENSG00000143641_1 (sequence is synthesized)
gggcggctctgcgctggccgggggcgcgggcggcggcgccggcaggaaggaggactggaatgaaattgaccccattaaaaagaaagaccttcatcacagcaatggagaagagaaagcaca

SEQ ID NO: 381811 - DNA, 120 bp, Artificial Sequence
  ENSG00000143641_2 (sequence is synthesized)
aagcatggagaccctccctccagggaaagtacggtggccagactttaaccaggaagcttatgttggagggacgatggtccgctccgggcaggacccttacgcccgcaacaagttcaacca

SEQ ID NO: 381812 - DNA, 120 bp, Artificial Sequence
  ENSG00000143641_3 (sequence is synthesized)
ggtggagagtgataagcttcgaatggacagagccatccctgacacccggcatgaccagtgtcagcggaagcagtggcgggtggatctgccggccaccagcgtggtgatcacgtttcacaa

SEQ ID NO: 381813 - DNA, 120 bp, Artificial Sequence
  ENSG00000143641_4 (sequence is synthesized)
tgaagccaggtcggccctactcaggaccgtggtcagcgtgcttaagaaaagcccgccccatctcataaaagaaatcatcttggtggatgactacagcaatgatcctgaggacggggctct

SEQ ID NO: 381814 - DNA, 120 bp, Artificial Sequence
  ENSG00000143641_5 (sequence is synthesized)
cttggggaaaattgagaaagtgcgagttcttagaaatgatcgacgagaaggcctcatgcgctcacgggttcggggggccgatgctgcccaagccaaggtcctgaccttcctggacagtca

SEQ ID NO: 381815 - DNA, 120 bp, Artificial Sequence
  ENSG00000143641_6 (sequence is synthesized)
ctgcgagtgtaatgagcactggctggagcccctcctggaaagggtggcggaggacaggactcgggttgtgtcacccatcatcgatgtcattaatatggacaactttcagtatgtgggggc

SEQ ID NO: 381816 - DNA, 120 bp, Artificial Sequence
  ENSG00000143641_7 (sequence is synthesized)
atctgctgacttgaagggcggttttgattggaacttggtattcaagtgggattacatgacgcctgagcagagaaggtcccggcaggggaacccagtcgcccctataaaaacccccatgat

SEQ ID NO: 381817 - DNA, 120 bp, Artificial Sequence
  ENSG00000143641_8 (sequence is synthesized)
tgctggtgggctgtttgtgatggataagttctattttgaagaactggggaagtacgacatgatgatggatgtgtggggaggagagaacctagagatctcgttccgcgtgtggcagtgtgg

SEQ ID NO: 381818 - DNA, 120 bp, Artificial Sequence
  ENSG00000143641_9 (sequence is synthesized)
tggcagcctggagatcatcccgtgcagccgtgtgggacacgtgttccggaagcagcacccctacacgttcccgggtggcagtggcactgtctttgcccgaaacacccgccgggcagcaga

SEQ ID NO: 381819 - DNA, 120 bp, Artificial Sequence
  ENSG00000143641_10 (sequence is synthesized)
ggtctggatggatgaatacaaaaatttctattatgcagcagtgccttctgctagaaacgttccttatggaaatattcagagcagattggagcttaggaagaaactcagctgcaagccttt

SEQ ID NO: 381820 - DNA, 120 bp, Artificial Sequence
  ENSG00000143641_11 (sequence is synthesized)
caaatggtaccttgaaaatgtctatccagagttaagggttccagaccatcaggatatagcttttggggccttgcagcagggaactaactgcctcgacactttgggacactttgctgatgg

SEQ ID NO: 381821 - DNA, 120 bp, Artificial Sequence
  ENSG00000143641_12 (sequence is synthesized)
tgtggttggagtttatgaatgtcacaatgctgggggaaaccaggaatgggccttgacgaaggagaagtcggtgaagcacatggatttgtgccttactgtggtggaccgggcaccgggctc

SEQ ID NO: 381822 - DNA, 120 bp, Artificial Sequence
  ENSG00000143641_13 (sequence is synthesized)
tcttataaagctgcagggctgccgagaaaatgacagcagacagaaatgggaacagatcgagggcaactccaagctgaggcacgtgggcagcaacctgtgcctggacagtcgcacggccaa

SEQ ID NO: 381823 - DNA, 120 bp, Artificial Sequence
  ENSG00000143641_14 (sequence is synthesized)
gagcgggggcctaagcgtggaggtgtgtggcccggccctttcgcagcagtggaagttcacgctcaacctgcagcagtaggagggtccgggaggccctgccgtcctgtctcctgcaccatt

SEQ ID NO: 381824 - DNA, 120 bp, Artificial Sequence
  ENSG00000143641_15 (sequence is synthesized)
gggtggagtctggtgatcacattattgattatgtttcttaaactttccgcgaaactaatatacctcagtattccatcatggtctgaaagtcaaacttcggcaaggcacggacgactgtgc

SEQ ID NO: 381825 - DNA, 120 bp, Artificial Sequence
  ENSG00000143641_16 (sequence is synthesized)
agacacagcagcggcaagaagcgagaactgccctccccctcctctcggtgcagcccagccgggcccccttccccaggccggagcgcccctcttccttccagctttcacttctgccggctc

SEQ ID NO: 381826 - DNA, 120 bp, Artificial Sequence
  ENSG00000143641_17 (sequence is synthesized)
cgcaactgagtgacacccagcgacaaccgactggggagtggtagaagcaactgaacggatgcgtgcgagctgaggacagggcgggaggagggggcacacatgccccaggggagcgaggag

SEQ ID NO: 381827 - DNA, 120 bp, Artificial Sequence
  ENSG00000143641_18 (sequence is synthesized)
ctcctccattcgcaagtgtcttcctgggccagactcccctccacctcatgtacttgctatattgaggatgaagttttctatggtgggacactaaatataaagctatatagagaaagaatg

SEQ ID NO: 381828 - DNA, 120 bp, Artificial Sequence
  ENSG00000143641_19 (sequence is synthesized)
tacggtcagttccctatggtttctgtagatcatcgtcatcttgtatattccccacaaagccgttcgcagcttccgggagaaggggccagagcccggtggggccagtttctcacagaggga

SEQ ID NO: 381829 - DNA, 120 bp, Artificial Sequence
  ENSG00000143641_20 (sequence is synthesized)
ggaggtggcctttgtcccctggagcccgatcagccagttggtgctactgctgtggccagctggggggcttcctccagaccaccggcctcggccccggcatccctgttgggcgtcagcctg

SEQ ID NO: 381830 - DNA, 120 bp, Artificial Sequence
  ENSG00000143641_21 (sequence is synthesized)
agagtccctactgtgcgtcagaatccaccttgcgtgctgtgcgtatctgtgaacctggagcggttacttattttgacagatatcactttgggtctttttacattaaatttcttttctcta

SEQ ID NO: 381831 - DNA, 120 bp, Artificial Sequence
  ENSG00000143641_22 (sequence is synthesized)
aggaatataagacataccccatagctctgtgtgagccagcaataccgctgccccctggcgacagggcagaccaatgatgccaggcagctgtcacacgctagtattggcttcattgtgatc

SEQ ID NO: 381832 - DNA, 120 bp, Artificial Sequence
  ENSG00000143641_23 (sequence is synthesized)
tgagccctgcacgctgggccttcagaattaatggccagcagtgtcagggatgagcccgtcagccagggcacaggcctggctcacagtcctgcacacctgctggcctggggagctccagcc

SEQ ID NO: 381833 - DNA, 120 bp, Artificial Sequence
  ENSG00000143641_24 (sequence is synthesized)
aggcagcgagtcctgccccgcccgcagctccctcccacaccccgcctggccaagatgactgcttcagggggctttggggaaagaattaggaagggtcagaaccaaacaatacctgctcat

SEQ ID NO: 381834 - DNA, 120 bp, Artificial Sequence
  ENSG00000143641_25 (sequence is synthesized)
ttacactgaggattcagggcgggagacaggagccttggggtcctgttaaaccacagacagttatgaactgaaagtcataacggggagaggtgcctggcttctacctgggtgctcaggaat

SEQ ID NO: 381835 - DNA, 120 bp, Artificial Sequence
  ENSG00000143641_26 (sequence is synthesized)
gttcctcgtcacccctgccactctgtggtcggtgccctgcttcctcctccactcctggccgccttctccagcgccgcacacacagatgctcagtctcagagaggctggcacggcctggca

SEQ ID NO: 381836 - DNA, 120 bp, Artificial Sequence
  ENSG00000143641_27 (sequence is synthesized)
gtctgagaaaagcgtcagttaggcacacctgcaggcccctcggtgggacagcggcggccttggagttaggagccaccctgggaggttgtgccggtgccatgctcctccctgtgtcttgta

SEQ ID NO: 381837 - DNA, 120 bp, Artificial Sequence
  ENSG00000143641_28 (sequence is synthesized)
tgaaaggggccactgtgtgtcttcctccccggcgggagccccacatgtgtgcactgtaggacagcggccccgaggtggaagcctggctggagggctgccctataggtcttctcttcccgc

SEQ ID NO: 381838 - DNA, 120 bp, Artificial Sequence
  ENSG00000143641_29 (sequence is synthesized)
ctcccctgccatgcaaccagatgtgttgtgagtgggcagcgtgcccccacgctggagtaactccgcacgcttctgtctttcacggtgggcgctcggggggagcctgaggaaaaccccctt

SEQ ID NO: 381839 - DNA, 120 bp, Artificial Sequence
  ENSG00000143641_30 (sequence is synthesized)
aggtacctgtgcgaggctgtggagtgcaggccagagcagggtgtgcgtagcccccagcacccaggttcttctgtcagaccctgtgacctgcgagctgctactactgtaaggagggaaatg

SEQ ID NO: 381840 - DNA, 120 bp, Artificial Sequence
  ENSG00000143641_31 (sequence is synthesized)
gatgaatctggctcgttttaaaatcacgttttctgacgaatcctttgccccttcacctttaccccgcccgcacccctaggccctctcagccttcctatcatcccacgtgtctacccagac

SEQ ID NO: 381841 - DNA, 120 bp, Artificial Sequence
  ENSG00000143641_32 (sequence is synthesized)
ccttgtgcggcccatgccctgggggcggcgtcctgtccctgagctgggaggcggctttggatggtccgggcgtcaagagcaggggtgggccggggaggggtcctttgcggtgagctatgt

SEQ ID NO: 381842 - DNA, 120 bp, Artificial Sequence
  ENSG00000143641_33 (sequence is synthesized)
ttacatgacacagtgtgccaaagtgacttactgcggttgcgttagtttttaatcatcaggactatctcaccctcccactcctgtttttaaaactcagaattctttcctaagagcccttcg

SEQ ID NO: 381843 - DNA, 120 bp, Artificial Sequence
  ENSG00000143641_34 (sequence is synthesized)
agcaaagcgtgccgaagttagttgtcttctctgtgctggtcctttcttatgtcctcataaaagctcagatgatggtatctgtgagtatgttttgcaaattcaaaatatagtttggtaatt

SEQ ID NO: 381844 - DNA, 120 bp, Artificial Sequence
  ENSG00000143641_35 (sequence is synthesized)
tttttttccagttgatttttaaaaagaactgctgtacagagcttgtactttgtccattttatagatggaaaccatccttgaaaattgtttaacttaaataaagagaagatactttctaga

SEQ ID NO: 381845 - DNA, 120 bp, Artificial Sequence
  ENSG00000143641_36 (sequence is synthesized)
ggctgagcggggtccaaaacattgatgactaccctgaaagcaggacctgaccttgggctgtttgaggacagatgtccttcactgggtgtggtggtacatgcctatagtcccagctgctca

SEQ ID NO: 381846 - DNA, 120 bp, Artificial Sequence
  ENSG00000143641_37 (sequence is synthesized)
gtgcaaacatggcagtctttcagcttagccccgcagaaaagaaagtgattttcccaggaactcttatcttatgtagtctgaactttaatgcagagctgtctgatagtgtcgtagccgtga

SEQ ID NO: 381847 - DNA, 120 bp, Artificial Sequence
  ENSG00000143641_38 (sequence is synthesized)
cggagaaggccgtggggcctggaatctccttgctgtgctctgtggccccggccctctgtggacgcgtaatgtgagagtttttaaagagtaactttcttttgtccttctttaagatataga

SEQ ID NO: 381848 - DNA, 120 bp, Artificial Sequence
  ENSG00000143641_39 (sequence is synthesized)
ccccagtccctcctttaaaatattggctcgtgctgtaatttccactttgccttttgccctttgaccatctgtgtgacaagaaagccattccaatggttcagtaagcacccgctgaggctg

SEQ ID NO: 381849 - DNA, 120 bp, Artificial Sequence
  ENSG00000143641_40 (sequence is synthesized)
gctccccacaggtccagctcgaggtgctggtggggacagcccaccctctgctgtgtgccgtgatcccagctggagctgctgcacacccagagggagccgcctcagtcacacgccagcaga

SEQ ID NO: 381850 - DNA, 120 bp, Artificial Sequence
  ENSG00000143641_41 (sequence is synthesized)
gggcgcgggcggcggcgccggcaggaagctccagactctgtgctctgttctgcagtgttggagctaggaccgcacatcccagctgctttgccagtggcttccgggccacctccatcagca

SEQ ID NO: 381851 - DNA, 120 bp, Artificial Sequence
  ENSG00000143641_42 (sequence is synthesized)
gcctcatcgtccacactccctgcagatcccaccactcctccaaggaagtctctacctcagggccctttggctacgcttctaaggttaagtctaaccggttccctcaggcctaggggtggt

SEQ ID NO: 381852 - DNA, 120 bp, Artificial Sequence
  ENSG00000143641_43 (sequence is synthesized)
ggctgcttcctgtcgttgctacttccctgatatctagaattttcctttttctacccagttacctggttactgactttctacccagttaacaatttatattaaagcccttctgttcaaaaa

SEQ ID NO: 381853 - DNA, 120 bp, Artificial Sequence
  ENSG00000143641_44 (sequence is synthesized)
agaagccagtaaggccatagaagcagcagaggggaaatggaggtggggctgcaggcatgagattgggcacctgggccccagtgagagcctgtggtctcactccatggtgtggagctgaga

SEQ ID NO: 381854 - DNA, 120 bp, Artificial Sequence
  ENSG00000143641_45 (sequence is synthesized)
atctgctcccaagttggcctgctgctgtctctgtcctgcagagctgccctcccatgcttcggagtcccagaggcagtcccccgggcctcaccttgtttttggcttgttctccattggcaa

SEQ ID NO: 381855 - DNA, 120 bp, Artificial Sequence
  ENSG00000143641_46 (sequence is synthesized)
ggtgatgggctgggtgacctgaaggactggtgtctgacaggctcttcgagtgaccaggagcagtccccagcctccgcaagcatgcagtgtctgcagccagccctcgatccccccgccagg

SEQ ID NO: 381856 - DNA, 120 bp, Artificial Sequence
  ENSG00000143641_47 (sequence is synthesized)
cgcctttgcatgcctccgatctgctgcgctcacccttgctgctcctgtgggccagcagataacagcccccacgaggctccctcctcccagctaggttaatcacatgtgaaacggaagtaa

SEQ ID NO: 381857 - DNA, 120 bp, Artificial Sequence
  ENSG00000143641_48 (sequence is synthesized)
tgctgccccacgtccctccggaggattcatggcagaaacacctttctgagcattatttccacacccagcctcttgttttaagcgaatacgagctccccatctggagggacctgctgataa

SEQ ID NO: 381858 - DNA, 120 bp, Artificial Sequence
  ENSG00000143641_49 (sequence is synthesized)
cctcgtgagaagacctatagatccgctggggtggaggagccatctgcacttcatcttcttaaagggactgtcaggcaggtcgtgccttaatgcggcacattccttattctaaatattccc

SEQ ID NO: 381859 - DNA, 120 bp, Artificial Sequence
  ENSG00000143641_50 (sequence is synthesized)
agagcattttacagcggctcacatatctccagcacagtgcctgcgaacgcaagacttgccaccattatctttccgctaacagctccttcagagcccttgtcacggagatttgttggacag

SEQ ID NO: 381860 - DNA, 120 bp, Artificial Sequence
  ENSG00000143641_51 (sequence is synthesized)
ttaggtaatgcggcctctctctgttgctcctgttcgctcacttggctctttggaaccgtttcctctgcttttcaagtaacatgccaggcgccaggtggcccatgccccctaggaggagaa

SEQ ID NO: 381861 - DNA, 120 bp, Artificial Sequence
  ENSG00000143641_52 (sequence is synthesized)
caggagagaacacagcgtccttctccctcggatccctgccgtgcaggacagcttttgctggggattgagagcaccagatggtcaccagcgatggtcacctgcagcggcaagggtgcactg

SEQ ID NO: 381862 - DNA, 120 bp, Artificial Sequence
  ENSG00000143641_53 (sequence is synthesized)
gtcacagttgctggttgcagggccctggtcttcttcctgccagctctgtcctctcggccatgtgcactcaacccaaaagaacccattctgcctctgtgtctggccccagaatatgatgtc

SEQ ID NO: 381863 - DNA, 120 bp, Artificial Sequence
  ENSG00000143641_54 (sequence is synthesized)
tacacctcctgcctggtgtccctatacaacagattcttgactgtgggcactaaggcggctgctcatcaactctccgtcagccaaagaggggcttcaattcagtggattttaacccaacca

SEQ ID NO: 381864 - DNA, 120 bp, Artificial Sequence
  ENSG00000143641_55 (sequence is synthesized)
tgccactcactttgctttttcagtcacagttgactgccatttctcacagaggtcacccatggtttgtagtgacactgggccccgcacccactgaagaccacatctgaggcactgagcacc

SEQ ID NO: 381865 - DNA, 120 bp, Artificial Sequence
  ENSG00000143641_56 (sequence is synthesized)
atcctggctggcaaatctgcttcccctgtctgtggggggtgagggagacatcagcctcgtgttttgtgtctgtaatatcaccgccgtttactgagtgcctcctacgagccaggcactggg

SEQ ID NO: 381866 - DNA, 120 bp, Artificial Sequence
  ENSG00000143641_57 (sequence is synthesized)
ccgtgtgctttacacgaaatgttctatgtaacacttgcagcagatctgggtagcccatagcctaccaaagggcaaatcgagcttcagagaaagtgagtcttgcctgaaagccagcacctg

SEQ ID NO: 381867 - DNA, 120 bp, Artificial Sequence
  ENSG00000143641_58 (sequence is synthesized)
gcagaggtgggctgaggtttggatctggttctgaagcacgttgttcttccccgtggctgtggctttgttcacattagaccacctgacaagtctgcccacctttcccgtctttactggata

SEQ ID NO: 381868 - DNA, 120 bp, Artificial Sequence
  ENSG00000143641_59 (sequence is synthesized)
aaggtcagatcctaagtgtattggaaagttcaaggcaacaggatctgaccacattgattttctaaatgacttccaataagactaacattgaagagtatcaggagcttttccttcctttcc

SEQ ID NO: 381869 - DNA, 120 bp, Artificial Sequence
  ENSG00000143641_60 (sequence is synthesized)
gagtgtacacgaacgaaaagcactggctggagatcatctatgtggaatgtggacagggcaaggtgcccgtagcccctatggctgacagagaggactggaatgaaattgaccccattaaaa

SEQ ID NO: 381870 - DNA, 120 bp, Artificial Sequence
  ENSG00000143643_0 (sequence is synthesized)
aagggctgtcgcgcatgcgccttgagggaagatggcacctgccggctgctgctgctgctgctgcttctggggcggcgctgtggccgccgcgggcgccgcccggcgtgtcctgctgctgct

SEQ ID NO: 381871 - DNA, 120 bp, Artificial Sequence
  ENSG00000143643_1 (sequence is synthesized)
gctgctgggggtcctgtccgccgggctgcggccaggcgccctggccaccgagcactactcgccgctctccctgctcaagcaggagctgcagcaccggcagcagcaggaggccccggcggg

SEQ ID NO: 381872 - DNA, 120 bp, Artificial Sequence
  ENSG00000143643_2 (sequence is synthesized)
cggcggcggctgcagcccgcagtccggggactggggggaccagtactctgccgagtgcggcgagtcatcctttttgaacttccatgactcagactgcgaacccaagggatcatcaccctg

SEQ ID NO: 381873 - DNA, 120 bp, Artificial Sequence
  ENSG00000143643_3 (sequence is synthesized)
tgactccttgctttccctcaacactgagaagattctgagccaggccaagtctattgcagaacagaagagattcccgtttgccactgataatgacagcacaaatgaagagttagctattgc

SEQ ID NO: 381874 - DNA, 120 bp, Artificial Sequence
  ENSG00000143643_4 (sequence is synthesized)
ttatgtcttgattggcagtggtctgtatgatgaagcaatacggcatttttcaacaatgcttcaggaggagcctgatctggttagtgcaatttatggccgagggatagcctatggaaagaa

SEQ ID NO: 381875 - DNA, 120 bp, Artificial Sequence
  ENSG00000143643_5 (sequence is synthesized)
gggactacatgacattaagaatgctgagcttgctctgttcgaactgagccgagtaattaccttggaaccagatcgtccagaggtatttgagcagcgagcagaaattctgtcccctctggg

SEQ ID NO: 381876 - DNA, 120 bp, Artificial Sequence
  ENSG00000143643_6 (sequence is synthesized)
acgaattaatgaagcagtgaatgacctcactaaagctatccaactgcagccctcagcacggctgtacagacatcggggaaccctgtacttcatatcagaggactatgcaacagcccatga

SEQ ID NO: 381877 - DNA, 120 bp, Artificial Sequence
  ENSG00000143643_7 (sequence is synthesized)
agactttcagcagtccttagaactgaacaaaaaccagcctatagctatgctatacaaaggtttaactttctttcacagaggacttctgaaggaagctattgaatccttcaaagaagcttt

SEQ ID NO: 381878 - DNA, 120 bp, Artificial Sequence
  ENSG00000143643_8 (sequence is synthesized)
gaagcagaaagttgactttattgatgcatataaaagtctagggcaggcatatagagaactgggcaattttgaagcagccactgagagctttcaaaaggcactgttgctcaaccaaaatca

SEQ ID NO: 381879 - DNA, 120 bp, Artificial Sequence
  ENSG00000143643_9 (sequence is synthesized)
tgtgcaaaccctccagctccggggaatgatgctctaccaccacggcagcttacaggaagcccttaagaactttaagcggtgtctgcagctagagccatataatgaagtgtgccagtatat

SEQ ID NO: 381880 - DNA, 120 bp, Artificial Sequence
  ENSG00000143643_10 (sequence is synthesized)
gaaagggctcagccatgttgccatgggacagttttatgaagggataaaagcacaaacaaaagttatgctgaatgatcctctcccaggccagaaggctagccctgagtatcttaaagtaaa

SEQ ID NO: 381881 - DNA, 120 bp, Artificial Sequence
  ENSG00000143643_11 (sequence is synthesized)
gtatctccgagagtattctcgatatcttcatgcacaccttgataccccccttacggaatataacattgatgtggatctgcctggaagctttaaggaccactgggctaaaaatttgccttt

SEQ ID NO: 381882 - DNA, 120 bp, Artificial Sequence
  ENSG00000143643_12 (sequence is synthesized)
cctcatagaagactacgaagagcagccagggttgcaaccccacataaaagatgtgttacatcagaattttgagagttataagcctgaagtacaggagctgatttgtgtggctgatcgttt

SEQ ID NO: 381883 - DNA, 120 bp, Artificial Sequence
  ENSG00000143643_13 (sequence is synthesized)
gccaaacaagagaatacacagagctatgggtttggccgcattggaggtcatgcaagccgtgcagcgtacatggaccaactcgaaagttcgaatgaatgggaagacacggttgatgcagtg

SEQ ID NO: 381884 - DNA, 120 bp, Artificial Sequence
  ENSG00000143643_14 (sequence is synthesized)
gagagacatgtttgacattgcagttaaatggagaaggattgctgacccagaccagcccgtgctgtggttagatcaaatgccagcacgaagtcttagcagaggttttaacaaccacattaa

SEQ ID NO: 381885 - DNA, 120 bp, Artificial Sequence
  ENSG00000143643_15 (sequence is synthesized)
tttaatcaggggtcaggtgatcaacatgagatacctagaatattttgagaaaatacttcattttattaaagacagaattcttgtttatcatggagctaataatcctaaaggattgctgga

SEQ ID NO: 381886 - DNA, 120 bp, Artificial Sequence
  ENSG00000143643_16 (sequence is synthesized)
agttcgggaagccctggaaaaggtacacaaagtagaagaccttcttccgattatgaagcagtttaatactaaaacgaaggatgggttcaccgtgaacacaaaagttcccagccttaaaga

SEQ ID NO: 381887 - DNA, 120 bp, Artificial Sequence
  ENSG00000143643_17 (sequence is synthesized)
ccaagggaaggaatatgatggattcacaatcacgattacaggagacaaagttggcaatatattattttctgtggaaactcaaaccacggaagaaaggacacaattatatcatgctgaaat

SEQ ID NO: 381888 - DNA, 120 bp, Artificial Sequence
  ENSG00000143643_18 (sequence is synthesized)
agatgcactttataaagatttgacagcaaaaggaaaagtattgattctttcatcagaatttggggaggctgatgctgtctgcaacttaatcttatccttagtttattacttttataattt

SEQ ID NO: 381889 - DNA, 120 bp, Artificial Sequence
  ENSG00000143643_19 (sequence is synthesized)
aatgccactctctcgaggatccagtgtaattgcttactcggtcatcgtgggagcactgatggcaagtggaaaagaagtagcaggaaaaattcccaaagggaagttagtcgactttgaagc

SEQ ID NO: 381890 - DNA, 120 bp, Artificial Sequence
  ENSG00000143643_20 (sequence is synthesized)
tatgacagcccctggttcagaggcctttagcaaagtcgccaaaagctggatgaacttgaaaagtatttcaccttcttataagactcttccatcagtatcagaaacgtttccaacgttaag

SEQ ID NO: 381891 - DNA, 120 bp, Artificial Sequence
  ENSG00000143643_21 (sequence is synthesized)
atcgatgattgaggtgctaaacacagactcttctccacgttgtcttaagaaactctagttctgctgctgtatttatacaagtaaagggccggacctcttgcttcttaagttattttttaa

SEQ ID NO: 381892 - DNA, 120 bp, Artificial Sequence
  ENSG00000143643_22 (sequence is synthesized)
aacatggaattataaagaaattaggtcctctattacttttgataccaatttttataggaattgaatacttgaaatcattttctttacttttctgaaccataatgaaaatcatgaaagagg

SEQ ID NO: 381893 - DNA, 120 bp, Artificial Sequence
  ENSG00000143643_23 (sequence is synthesized)
ctttcggggggaaaaagctacttgacttggagggaaagcgtatgtattagccggcagcctgttggttcccacttataaagtcatataactccttccttacagtaaaaaaaattttcctca

SEQ ID NO: 381894 - DNA, 120 bp, Artificial Sequence
  ENSG00000143643_24 (sequence is synthesized)
acaactaaaatataatactgaagatgaacaaaaacaaaaccaaataggagtgtttgtattcctttagagatctggatatttttcaaagacttgctttttacgcacattgtgatagagcat

SEQ ID NO: 381895 - DNA, 120 bp, Artificial Sequence
  ENSG00000143643_25 (sequence is synthesized)
cttttgttgactcacgtaacctccatgtgtgggtcctttgttttattagaaccatggaagaaggttcctgggccatcagtatgtgttgcagagctcacagccaggaacacttattttgaa

SEQ ID NO: 381896 - DNA, 120 bp, Artificial Sequence
  ENSG00000143643_26 (sequence is synthesized)
caatgcagacagtacttgccagagtcccaaatgctgaattattgaaccatgtttttttttcctttgttgaaaaaaataaaccagggtgatttctataaatcaccagtttttggcattgga

SEQ ID NO: 381897 - DNA, 120 bp, Artificial Sequence
  ENSG00000143643_27 (sequence is synthesized)
cacaaagtagaagaccttcttccgattatgaaggtaactttagcatcagaatggcagtccatgtttttagaggaaaagaaaaccaacagcacttttttaaaaagaactcagaattattaa

SEQ ID NO: 381898 - DNA, 120 bp, Artificial Sequence
  ENSG00000143643_28 (sequence is synthesized)
atgctatttgaaatcactcgtatgaacacattctgaataataaccaaaataaaagaacctacaggcatcagactcaaacagaaaaaacaacttgtgaggaagcagttaatatagaaaaaa

SEQ ID NO: 381899 - DNA, 120 bp, Artificial Sequence
  ENSG00000143643_29 (sequence is synthesized)
tttacaactatctaatccaggggttatatcaggcattttggatcttcccagggaaacaacaaaaacttttctattgaattccattgttttatctatgttgtaaggatatttcacaaacca

SEQ ID NO: 381900 - DNA, 120 bp, Artificial Sequence
  ENSG00000143643_30 (sequence is synthesized)
tgcgtcccaagcaccatcagtcttcactttgagagttttctgagagtgttctcttagttacaaggaacagccctagggtggtggttgcctgtcaactagtaagaaagatggggactgaaa

SEQ ID NO: 381901 - DNA, 120 bp, Artificial Sequence
  ENSG00000143643_31 (sequence is synthesized)
tatgcttagagattgattcattcaaacgtagtttctttgttcccaacgccttaaaatcttgattctactatgtcccctctttggcagaatgaggtagagagctgtgcagtgattagacag

SEQ ID NO: 381902 - DNA, 120 bp, Artificial Sequence
  ENSG00000143643_32 (sequence is synthesized)
tgtatgatgaagcaatacggcatttttcaacaatgcttcaggaagctattgaatccttcaaagaagctttgaagcagaaagttgactttattgatgcatataaaagtctagggcaggcat

SEQ ID NO: 381903 - DNA, 120 bp, Artificial Sequence
  ENSG00000143653_0 (sequence is synthesized)
gctgtggactcgtcatggcgaccgagcagaggcctttccacctggtggtgttcggcgcgtctggcttcaccggccagttcgtgaccgaggaggtggcccgggagcaggtggacccggagc

SEQ ID NO: 381904 - DNA, 120 bp, Artificial Sequence
  ENSG00000143653_1 (sequence is synthesized)
ggagctcccgcctgccctgggccgtggcgggccgctcccgggagaagctgcagcgggtgctggagaaggcggccctgaagctgggaagaccaacactgtcatctgaagttggaatcatca

SEQ ID NO: 381905 - DNA, 120 bp, Artificial Sequence
  ENSG00000143653_2 (sequence is synthesized)
tctgtgatattgctaatccagcctcgcttgatgaaatggctaaacaggcaacagttgtcctcaattgcgtaggaccatatcggttttatggagaacctgtaataaaagcatgtattgaaa

SEQ ID NO: 381906 - DNA, 120 bp, Artificial Sequence
  ENSG00000143653_3 (sequence is synthesized)
atggagccagttgtatcgacatcagtggagaacctcagtttctggaactaatgcaactgaagtatcatgagaaagctgcagacaaaggggtttatatcattggaagcagcggctttgact

SEQ ID NO: 381907 - DNA, 120 bp, Artificial Sequence
  ENSG00000143653_4 (sequence is synthesized)
ccattccagcagatctgggagtaatatataccagaaataaaatgaatggtactttgactgctgtggaaagtttcctgactatacattcaggacctgaggggttgagcattcatgatggta

SEQ ID NO: 381908 - DNA, 120 bp, Artificial Sequence
  ENSG00000143653_5 (sequence is synthesized)
cctggaagtcagcaatttatggttttggagatcagagtaatttgagaaaactaagaaatgtatcaaatctgaaacctgtcccgctcattggtccaaaattgaagagaaggtggccaattt

SEQ ID NO: 381909 - DNA, 120 bp, Artificial Sequence
  ENSG00000143653_6 (sequence is synthesized)
cttattgtcgggaactcaaaggttattccattccttttatgggatctgatgtgtctgttgtaaggaggactcaacgttacttgtatgaaaatttagaggaatcaccagttcagtatgctg

SEQ ID NO: 381910 - DNA, 120 bp, Artificial Sequence
  ENSG00000143653_7 (sequence is synthesized)
cgtatgtaactgtgggaggcatcacctctgttattaagctgatgtttgcaggacttttctttttgttctttgtgaggtttggaattggaaggcaacttctcataaaattcccatggttct

SEQ ID NO: 381911 - DNA, 120 bp, Artificial Sequence
  ENSG00000143653_8 (sequence is synthesized)
ggtacagataagaacaaaccaaatatcaaaatttgtactcaggtgaaaggaccagaggctggctatgtggctacccccatagctatggttcaggcagccatgactcttctaagtgatgct

SEQ ID NO: 381912 - DNA, 120 bp, Artificial Sequence
  ENSG00000143653_9 (sequence is synthesized)
tctcatctgcctaaggcgggcggggtcttcacacctggagcagctttttccaaaacaaagttgattgacagactcaacaaacacggtattgagtttagtgttattagcagctctgaagtc

SEQ ID NO: 381913 - DNA, 120 bp, Artificial Sequence
  ENSG00000143653_10 (sequence is synthesized)
taaacactggaagaattaactgaagtcataacgtgcgtgaattaacagcttctctatttgatatttgaaattcttctgtaagcctgtctgagtgtatgtggaaacgattgtcaaatctaa

SEQ ID NO: 381914 - DNA, 120 bp, Artificial Sequence
  ENSG00000143653_11 (sequence is synthesized)
aatatctatatattaaaaagtaggaaattgtcctagcttaccctaaatttcaaatctgagttgattttgtgattttattgcttataacagagaactcatatttgacatatttttttcatt

SEQ ID NO: 381915 - DNA, 120 bp, Artificial Sequence
  ENSG00000143653_12 (sequence is synthesized)
gatgtgttcctggtagattttcacgaatgagctggcaggtctaatgggggaggcggcgtcccagtctgtgttgcagcagcattctcatcgggggtgcgcacaccatcgttactgtcgggc

SEQ ID NO: 381916 - DNA, 120 bp, Artificial Sequence
  ENSG00000143653_13 (sequence is synthesized)
agtaactgccgcttgccttgccgcagtaggagggaaatctcaccttccttccacatactgtcttgagcctttgctaaattaaactgcactttttgctatttttgcctagtttttcgccaa

SEQ ID NO: 381917 - DNA, 120 bp, Artificial Sequence
  ENSG00000143653_14 (sequence is synthesized)
tctacactgattttggactgttacctaagttgaaaaataaaaggttgtcaatcgaatggtggtttaatgtttggacctgccgatgtatttgtatagtggtagaaacatgctgcttaagtg

SEQ ID NO: 381918 - DNA, 120 bp, Artificial Sequence
  ENSG00000143653_15 (sequence is synthesized)
gcctaacctgtttcttgccaataagtaggcttatcattttatctttacgtaattctatatctgtgactaggtttttaaggatacagcttataagttgctatcaattttcactacctaagc

SEQ ID NO: 381919 - DNA, 120 bp, Artificial Sequence
  ENSG00000143653_16 (sequence is synthesized)
agaatttttctctaatttactttttgtattttaactaggttttacatggaagccctaaaataaggcaaaagactttttcttttgtaataagcatataataaacacgtatatacatagcaa

SEQ ID NO: 381920 - DNA, 120 bp, Artificial Sequence
  ENSG00000143669_0 (sequence is synthesized)
gcggcggcggcagcggcgtcggctcggggttctccgggagagggggagtgcgcggcggccgcagctgccacaaaccaggtgaagctttgttctaagaatatttgtttcatctagtttatg

SEQ ID NO: 381921 - DNA, 120 bp, Artificial Sequence
  ENSG00000143669_1 (sequence is synthesized)
agtccaaatgatatagactgtaaatgtcacagcagtggtgaaagactgctcggtcatgagcaccgacagtaactcactggcacgtgaatttctgaccgatgtcaaccggctttgcaatgc

SEQ ID NO: 381922 - DNA, 120 bp, Artificial Sequence
  ENSG00000143669_2 (sequence is synthesized)
agtggtccagagggtggaggccagggaggaagaagaggaggagacgcacatggcaacccttggacagtaccttgtccatggtcgaggatttctattacttaccaagctaaattctataat

SEQ ID NO: 381923 - DNA, 120 bp, Artificial Sequence
  ENSG00000143669_3 (sequence is synthesized)
tgatcaggcattgacatgtagagaagaactcctgactcttcttctgtctctccttccactggtatggaagatacctgtccaagaagaaaaggcaacagattttaacctaccgctctcagc

SEQ ID NO: 381924 - DNA, 120 bp, Artificial Sequence
  ENSG00000143669_4 (sequence is synthesized)
agatataatcctgaccaaagaaaagaactcaagttcacaaagatccactcaggaaaaattacatttagaaggaagtgccctgtctagtcaggtttctgcaaaagtaaatgtttttcgaaa

SEQ ID NO: 381925 - DNA, 120 bp, Artificial Sequence
  ENSG00000143669_5 (sequence is synthesized)
aagcagacgacagcgtaaaattacccatcgctattctgtaagagatgcaagaaagacacagctctccacctcagattcagaagccaattcagatgaaaaaggcatagcaatgaataagca

SEQ ID NO: 381926 - DNA, 120 bp, Artificial Sequence
  ENSG00000143669_6 (sequence is synthesized)
tagaaggccccatctgctgcatcattttttaacatcgtttcctaaacaagaccaccccaaagctaaacttgaccgcttagcaaccaaagaacagactcctccagatgctatggctttgga

SEQ ID NO: 381927 - DNA, 120 bp, Artificial Sequence
  ENSG00000143669_7 (sequence is synthesized)
aaattccagagagattattccaagacaggggtcaaacactgacattttaagtgagccagctgccttgtctgttatcagtaacatgaacaattctccatttgacttatgtcatgttttgtt

SEQ ID NO: 381928 - DNA, 120 bp, Artificial Sequence
  ENSG00000143669_8 (sequence is synthesized)
atctttattagaaaaagtttgtaagtttgacgttaccttgaatcataattctcctttagcagccagtgtagtgcccacactaactgaattcctagcaggctttggggactgctgcagtct

SEQ ID NO: 381929 - DNA, 120 bp, Artificial Sequence
  ENSG00000143669_9 (sequence is synthesized)
gagcgacaacttggagagtcgagtagtttctgcaggttggaccgaagaaccggtggctttgattcaaaggatgctctttcgaacagtgttgcatcttctgtcagtagatgttagtactgc

SEQ ID NO: 381930 - DNA, 120 bp, Artificial Sequence
  ENSG00000143669_10 (sequence is synthesized)
agagatgatgccagaaaatcttaggaaaaatttaactgaattgcttagagcagctttaaaaattagaatatgcctagaaaagcagcctgacccttttgcaccaagacaaaagaaaacact

SEQ ID NO: 381931 - DNA, 120 bp, Artificial Sequence
  ENSG00000143669_11 (sequence is synthesized)
gcaggaggttcaggaagattttgtgttttcaaagtatcgtcatagagcccttcttttacctgagcttttggaaggagttcttcagattctgatctgttgtcttcaaagtgcagcttcaaa

SEQ ID NO: 381932 - DNA, 120 bp, Artificial Sequence
  ENSG00000143669_12 (sequence is synthesized)
tcccttctacttcagtcaagccatggatttggttcaagaattcattcagcatcatggatttaatttatttgaaacagcagttcttcaaatggaatggctggttttaagagatggagttcc

SEQ ID NO: 381933 - DNA, 120 bp, Artificial Sequence
  ENSG00000143669_13 (sequence is synthesized)
tcccgaggcctcagagcatttgaaagccctaataaatagtgtgatgaaaataatgagcactgtcaaaaaagtgaaatcagagcaacttcatcattcgatgtgtacaagaaaaaggcacag

SEQ ID NO: 381934 - DNA, 120 bp, Artificial Sequence
  ENSG00000143669_14 (sequence is synthesized)
acgatgtgaatattctcattttatgcatcatcaccgagatctctcaggtcttctggtttcggcttttaaaaaccaggtttccaaaaacccatttgaagagactgcagatggagatgttta

SEQ ID NO: 381935 - DNA, 120 bp, Artificial Sequence
  ENSG00000143669_15 (sequence is synthesized)
ttatcctgagcggtgctgttgcattgcagtgtgtgcccatcagtgcttgcgcttactacagcaggcttccttgagcagcacttgtgtccagatcctatcgggtgttcataacattggaat

SEQ ID NO: 381936 - DNA, 120 bp, Artificial Sequence
  ENSG00000143669_16 (sequence is synthesized)
atgctgttgtatggatcccaaatctgtaatcattcctttgctccatgcttttaaattgccagcactgaaaaattttcagcagcatatattgaatatccttaacaaacttattttggatca

SEQ ID NO: 381937 - DNA, 120 bp, Artificial Sequence
  ENSG00000143669_17 (sequence is synthesized)
gttaggaggagcagagatatcaccaaaaattaaaaaagcagcttgtaatatttgtactgttgactctgaccaactagcccaattagaagagacactgcagggaaacttatgtgatgctga

SEQ ID NO: 381938 - DNA, 120 bp, Artificial Sequence
  ENSG00000143669_18 (sequence is synthesized)
actctcctcaagtttatccagtccttcttacagatttcaagggatcctgcccagcagtggatctgaagatttgttgtggaaatgggatgctttaaaggcttatcagaactttgtttttga

SEQ ID NO: 381939 - DNA, 120 bp, Artificial Sequence
  ENSG00000143669_19 (sequence is synthesized)
agaagacagattacatagtatacagattgcaaatcacatttgcaatttaatccagaaaggcaatatagttgttcagtggaaattatataattacatatttaatcctgtgctccaaagagg

SEQ ID NO: 381940 - DNA, 120 bp, Artificial Sequence
  ENSG00000143669_20 (sequence is synthesized)
agttgaattagcacatcattgtcaacacctaagcgttacttcagctcaaagtcatgtatgtagccatcataaccagtgcttgcctcaggacgtgcttcagatttatgtaaaaactctgcc

SEQ ID NO: 381941 - DNA, 120 bp, Artificial Sequence
  ENSG00000143669_21 (sequence is synthesized)
tatcctgcttaaatccagggtaataagagatttgtttttgagttgtaatggagtaagtcaaataatcgaattaaattgcttaaatggtattcgaagtcattctctaaaagcatttgaaac

SEQ ID NO: 381942 - DNA, 120 bp, Artificial Sequence
  ENSG00000143669_22 (sequence is synthesized)
tctgataatcagcctaggggagcaacagaaagatgcctcagttccagatattgatgggatagacattgaacagaaggagttgtcctctgtacatgtgggtacttcttttcatcatcagca

SEQ ID NO: 381943 - DNA, 120 bp, Artificial Sequence
  ENSG00000143669_23 (sequence is synthesized)
agcttattcagattctcctcagagtctcagcaaattttatgctggcctcaaagaagcttatccaaagagacggaagactgttaaccaagatgttcatatcaacacaataaacctattcct

SEQ ID NO: 381944 - DNA, 120 bp, Artificial Sequence
  ENSG00000143669_24 (sequence is synthesized)
ctgtgtggcttttttatgcgtaagtaaagaagcagagtctgacagggagtcggccaatgactcagaagatacttctggctatgacagcacagccagcgagcctttaagtcatatgctgcc

SEQ ID NO: 381945 - DNA, 120 bp, Artificial Sequence
  ENSG00000143669_25 (sequence is synthesized)
atgtatatctctcgagagccttgtcttgccttctcctgaacatatgcaccaagcagcagacatttggtctatgtgtcgttggatctacatgttgagttcagtgttccagaaacagtttta

SEQ ID NO: 381946 - DNA, 120 bp, Artificial Sequence
  ENSG00000143669_26 (sequence is synthesized)
taggcttggtggtttccgagtatgccataagttaatatttatgataatacagaaactgttcagaagtcacaaagaggagcaaggaaaaaaggagggagatacaagtgtaaatgaaaacca

SEQ ID NO: 381947 - DNA, 120 bp, Artificial Sequence
  ENSG00000143669_27 (sequence is synthesized)
ggatttaaacagaatttctcaacctaagagaactatgaaggaagatttattatctttggctataaaaagtgaccccataccatcagaactaggtagtctaaaaaagagtgctgacagttt

SEQ ID NO: 381948 - DNA, 120 bp, Artificial Sequence
  ENSG00000143669_28 (sequence is synthesized)
aggtaaattagagttacagcatatttcttccataaatgtggaagaagtttcagctactgaagccgctcccgaggaagcaaagctatttacaagtcaagaaagtgagacctcacttcaaag

SEQ ID NO: 381949 - DNA, 120 bp, Artificial Sequence
  ENSG00000143669_29 (sequence is synthesized)
tatacgacttttggaagcccttctggccatttgtcttcatggtgccagaactagtcaacagaagatggaattggagttacctaatcagaacttgtctgtggaaagtatattatttgaaat

SEQ ID NO: 381950 - DNA, 120 bp, Artificial Sequence
  ENSG00000143669_30 (sequence is synthesized)
gagggaccatctttcccagtcaaaggtgattgaaacacaactagcaaagcctttatttgatgccctgcttcgagttgccctcgggaattattcagcagattttgaacataatgatgctat

SEQ ID NO: 381951 - DNA, 120 bp, Artificial Sequence
  ENSG00000143669_31 (sequence is synthesized)
gactgagaagagtcatcaatctgcagaagaattgtcatcccagcctggtgatttttcagaagaagctgaggattctcagtgttgtagttttaaacttttagttgaagaagaaggttacga

SEQ ID NO: 381952 - DNA, 120 bp, Artificial Sequence
  ENSG00000143669_32 (sequence is synthesized)
agcagatagtgaaagcaatcctgaagatggcgaaacccaggatgatggggtagacttaaagtctgaaacagaaggtttcagtgcatcaagcagtccaaatgacttactcgaaaacctcac

SEQ ID NO: 381953 - DNA, 120 bp, Artificial Sequence
  ENSG00000143669_33 (sequence is synthesized)
tcaaggggaaataatttatcctgagatttgtatgctggaattaaatttgctttctgctagtaaagccaaacttgatgtgcttgcccatgtatttgagagttttttgaaaattattaggca

SEQ ID NO: 381954 - DNA, 120 bp, Artificial Sequence
  ENSG00000143669_34 (sequence is synthesized)
gaaagaaaagaatgtttttctgctcatgcaacagggaactgtgaaaaatcttttaggagggttcttgagtattttaacacaggatgattctgattttcaagcatgccagagagtattggt

SEQ ID NO: 381955 - DNA, 120 bp, Artificial Sequence
  ENSG00000143669_35 (sequence is synthesized)
ggatcttttggtatctttgatgagttcaagaacatgttcagaagagctaacccttcttttgagaatatttctggagaaatctccttgtacaaaaattcttcttctgggtattctgaaaat

SEQ ID NO: 381956 - DNA, 120 bp, Artificial Sequence
  ENSG00000143669_36 (sequence is synthesized)
tattgaaagtgatactactatgagcccttcacagtatctaaccttccctttactgcacgctccaaatttaagcaacggtgtttcatcacaaaagtatcctgggattttaaacagtaaggc

SEQ ID NO: 381957 - DNA, 120 bp, Artificial Sequence
  ENSG00000143669_37 (sequence is synthesized)
catgggtttattgagaagagcacgagtttcacggagcaagaaagaggctgatagagagagttttccccatcggctgctttcatcttggcacatagccccagtccacctgccgttgctggg

SEQ ID NO: 381958 - DNA, 120 bp, Artificial Sequence
  ENSG00000143669_38 (sequence is synthesized)
gcaaaactgctggccacacctatcagaaggtttcagtgtttccctgtggtttaatgtggagtgtatccatgaagctgagagtactacagaaaaaggaaagaagataaagaaaagaaacaa

SEQ ID NO: 381959 - DNA, 120 bp, Artificial Sequence
  ENSG00000143669_39 (sequence is synthesized)
atcattaattttaccagatagcagttttgatggtacagagagcgacagaccagaaggtgcagagtacataaatcctggtgaaagactcatagaagaaggatgtattcatataatttcact

SEQ ID NO: 381960 - DNA, 120 bp, Artificial Sequence
  ENSG00000143669_40 (sequence is synthesized)
gggatccaaagcgttgatgatccaagtgtgggctgatccccacaatgccactcttatctttcgtgtgtgcatggattcaaatgatgacatgaaagctgttttactagcacaggttgaatc

SEQ ID NO: 381961 - DNA, 120 bp, Artificial Sequence
  ENSG00000143669_41 (sequence is synthesized)
acaggagaatattttcctcccaagcaaatggcaacatttagtactcacctacttacagcagccccaagggaaaaggaggattcatgggaaaatctccatatgggtctctggacagaggaa

SEQ ID NO: 381962 - DNA, 120 bp, Artificial Sequence
  ENSG00000143669_42 (sequence is synthesized)
gcctgatgttactttggattttatgcttccaagaaaaacaagtttgtcatctgatagcaataaaacattttgcatgattggccattgtttatcatcccaagaagagtttttgcagttggc

SEQ ID NO: 381963 - DNA, 120 bp, Artificial Sequence
  ENSG00000143669_43 (sequence is synthesized)
tggaaaatgggacctgggaaatttgcttctcttcaacggagctaaggttggttcacaagaggccttttatctgtatgcttgtggacccaaccatacatctgtaatgccatgtaagtatgg

SEQ ID NO: 381964 - DNA, 120 bp, Artificial Sequence
  ENSG00000143669_44 (sequence is synthesized)
caagccagtcaatgactactccaaatatattaataaagaaattttgcgatgtgaacaaatcagagaactttttatgaccaagaaagatgtggatattggtctcttaattgaaagtctttc

SEQ ID NO: 381965 - DNA, 120 bp, Artificial Sequence
  ENSG00000143669_45 (sequence is synthesized)
agttgtttatacaacttactgtcctgctcagtataccatctatgaaccagtgattagacttaaaggtcaaatgaaaacccaactctctcaaagacccttcagctcaaaagaagttcagag

SEQ ID NO: 381966 - DNA, 120 bp, Artificial Sequence
  ENSG00000143669_46 (sequence is synthesized)
catcttattagaacctcatcatctaaagaatctccaacctactgaatataaaactattcaaggcattctgcacgaaattggtggaactggcatatttgtttttctctttgccagggttgt

SEQ ID NO: 381967 - DNA, 120 bp, Artificial Sequence
  ENSG00000143669_47 (sequence is synthesized)
tgaactcagtagctgtgaagaaactcaagcattagcactgcgagttatactctcattaattaaatacaaccaacaaagagtacatgaattagaaaattgtaatggactttctatgattca

SEQ ID NO: 381968 - DNA, 120 bp, Artificial Sequence
  ENSG00000143669_48 (sequence is synthesized)
tcaggtgttgatcaaacaaaaatgcattgttgggttttacattttgaagacccttcttgaaggatgctgtggtgaagatattatttatatgaatgagaatggagagtttaagttggatgt

SEQ ID NO: 381969 - DNA, 120 bp, Artificial Sequence
  ENSG00000143669_49 (sequence is synthesized)
agactctaatgctataatccaagatgttaagctgttagaggaactattgcttgactggaagatatggagtaaagcagagcaaggtgtttgggaaactttgctagcagctctagaagtcct

SEQ ID NO: 381970 - DNA, 120 bp, Artificial Sequence
  ENSG00000143669_50 (sequence is synthesized)
catcagagcagatcaccaccagcagatgtttaatattaagcagttattgaaagctcaagtggttcatcactttctactgacttgtcaggttttgcaggaatacaaagaggggcaactcac

SEQ ID NO: 381971 - DNA, 120 bp, Artificial Sequence
  ENSG00000143669_51 (sequence is synthesized)
acccatgccccgagaggtttgtagatcatttgtgaaaattatagcagaagtccttggatctcctccagatttggaattattgacaattatcttcaatttccttttagcagttcaccctcc

SEQ ID NO: 381972 - DNA, 120 bp, Artificial Sequence
  ENSG00000143669_52 (sequence is synthesized)
tactaatacttacgtttgtcacaatcccacgaacttctacttttctttgcacatagatggcaagatctttcaggagaaagtgcggtcaatcatgtacctgaggcattccagcagtggagg

SEQ ID NO: 381973 - DNA, 120 bp, Artificial Sequence
  ENSG00000143669_53 (sequence is synthesized)
aaggtcccttatgagccctggatttatggtaataagcccatctggttttactgcttcaccatatgaaggagagaattcctctaatattattccacaacagatggccgcccatatgctgcg

SEQ ID NO: 381974 - DNA, 120 bp, Artificial Sequence
  ENSG00000143669_54 (sequence is synthesized)
ttctagaagcctaccagcattccctacttcttcactactaacgcaatcacaaaaactgactggaagtttgggttgtagtatcgacaggttacaaaatattgcagatacttatgttgccac

SEQ ID NO: 381975 - DNA, 120 bp, Artificial Sequence
  ENSG00000143669_55 (sequence is synthesized)
ccaatcaaagaaacaaaattctttggggagttccgacacactgaaaaaaggcaaagaggacgcattcatcagtagctgtgagtctgcaaaaactgtttgtgaaatggaagctgtcctctc

SEQ ID NO: 381976 - DNA, 120 bp, Artificial Sequence
  ENSG00000143669_56 (sequence is synthesized)
ggatttccagtggtcaaagcagatcataaacagttgggagcagaacccaggtcagaagatgacagtcctggggatgagtcctgcccacgccgacctgattacctaaagggattggcctcc

SEQ ID NO: 381977 - DNA, 120 bp, Artificial Sequence
  ENSG00000143669_57 (sequence is synthesized)
ttccagcgaagccacagcactattgcaagccttgggctagcttttccttcacagaacggatctgcagctgttggccgttggccaagtcttgttgatagaaacactgatgattgggaaaac

SEQ ID NO: 381978 - DNA, 120 bp, Artificial Sequence
  ENSG00000143669_58 (sequence is synthesized)
tttgcctattctcttggttatgagccaaattacaaccgaactgcaagtgctcacagtgtaactgaagactgtttggtacctatatgctgtggattatatgaactcctaagtggggttctt

SEQ ID NO: 381979 - DNA, 120 bp, Artificial Sequence
  ENSG00000143669_59 (sequence is synthesized)
cttatcctgcctgatgttttgcttgaagatgtgatggacaagcttattcaagcagatacacttttggtcctcgttaaccacccatcaccagctatacaacaaggtgttattaaactatta

SEQ ID NO: 381980 - DNA, 120 bp, Artificial Sequence
  ENSG00000143669_60 (sequence is synthesized)
gatgcatattttgctagagcatctaaggaacaaaaagataaatttctgaagaatcgtggattttccttgctagccaaccagttgtatcttcatcgaggaactcaagaattgttagaatgc

SEQ ID NO: 381981 - DNA, 120 bp, Artificial Sequence
  ENSG00000143669_61 (sequence is synthesized)
ttcatcgaaatgttctttggtcgacatattggccttgatgaagaatttgatctggaagatgtgagaaacatgggattgtttcagaagtggtctgtcattcctattctgggactaatagag

SEQ ID NO: 381982 - DNA, 120 bp, Artificial Sequence
  ENSG00000143669_62 (sequence is synthesized)
acctctctatatgacaacatactcttgcataatgctcttttacttcttctccaaattttaaattcttgttctaaggtagcagatatgttgctggataatggtctactctatgtgttatgt

SEQ ID NO: 381983 - DNA, 120 bp, Artificial Sequence
  ENSG00000143669_63 (sequence is synthesized)
aatacagtagcagccctgaatggattagaaaagaacattcccatgagtgaatataaattgcttgcttgtgatatacagcaacttttcatagcagttacaattcatgcttgcagttcctca

SEQ ID NO: 381984 - DNA, 120 bp, Artificial Sequence
  ENSG00000143669_64 (sequence is synthesized)
ggctcacaatattttagggttattgaagaccttattgtaatgcttggatatcttcaaaatagcaaaaacaagaggacacaaaatatggctgttgcactacagcttagagttctccaggct

SEQ ID NO: 381985 - DNA, 120 bp, Artificial Sequence
  ENSG00000143669_65 (sequence is synthesized)
gctatggaatttataaggaccaccgcaaatcatgactctgaaaacctcacagattcactccagtcaccttctgctccccatcatgcagtagttcaaaagcggaaaagcattgctggtcct

SEQ ID NO: 381986 - DNA, 120 bp, Artificial Sequence
  ENSG00000143669_66 (sequence is synthesized)
cgaaaatttccccttgctcaaactgaatcgcttctgatgaaaatgcgttcagtggcaaatgatgagcttcatgtgatgatgcaacggagaatgagccaagagaaccctagccaagcaact

SEQ ID NO: 381987 - DNA, 120 bp, Artificial Sequence
  ENSG00000143669_67 (sequence is synthesized)
gaaacggaacttgcgcagagactacagaggctcactgttttagcagtcaacaggattatttatcaagaatttaattcagacattattgacattttgagaactccagaaaatgtaactcaa

SEQ ID NO: 381988 - DNA, 120 bp, Artificial Sequence
  ENSG00000143669_68 (sequence is synthesized)
agcaagacctcagttttccagaccgaaatttctgaggaaaatattcatcatgaacagtcttctgttttcaatccatttcagaaagaaatttttacatatctggtagaaggattcaaagta

SEQ ID NO: 381989 - DNA, 120 bp, Artificial Sequence
  ENSG00000143669_69 (sequence is synthesized)
tctattggttcaagtaaagccagtggttccaagcagcaatggactaaaattctgtggtcttgtaaggagaccttccgaatgcagcttgggagactactagtgcatattttgtcgccagcc

SEQ ID NO: 381990 - DNA, 120 bp, Artificial Sequence
  ENSG00000143669_70 (sequence is synthesized)
cacgctgcacaagagagaaagcaaatttttgaaatagttcatgaaccaaatcatcaggaaatactacgagactgtctcagcccatccctacaacatggagccaagttagttttgtatttg

SEQ ID NO: 381991 - DNA, 120 bp, Artificial Sequence
  ENSG00000143669_71 (sequence is synthesized)
tcagagttgatacataatcaccaaggtgaattgactgaagaagagctaggcacagcagaactgcttatgaatgctttgaagttatgtggtcacaagtgcatccctcccagtgcatcaaca

SEQ ID NO: 381992 - DNA, 120 bp, Artificial Sequence
  ENSG00000143669_72 (sequence is synthesized)
aaagcagaccttattaaaatgatcaaagaggaacaaaagaaatatgaaactgaagaaggagtgaataaagctgcttggcagaaaacagttaacaataatcaacaaagtctctttcagcgt

SEQ ID NO: 381993 - DNA, 120 bp, Artificial Sequence
  ENSG00000143669_73 (sequence is synthesized)
ctggattcaaaatcaaaggatatatctaaaatagctgcagatatcacccaggcagtgtctctctcccaaggaaatgagagaaaaaaggtgatccagcatattagaggaatgtataaagta

SEQ ID NO: 381994 - DNA, 120 bp, Artificial Sequence
  ENSG00000143669_74 (sequence is synthesized)
gatttgagtgccagcagacattggcaggaacttattcagcagctgacacatgatagagcagtatggtatgaccccatctactatccaacctcatggcagttggatccaacagaagggcca

SEQ ID NO: 381995 - DNA, 120 bp, Artificial Sequence
  ENSG00000143669_75 (sequence is synthesized)
aatcgagagaggagacgtttacagagatgttatttaactattccaaataagtatctccttagggatagacagaaatcagaagatgttgtcaaaccaccactctcttacctgtttgaagac

SEQ ID NO: 381996 - DNA, 120 bp, Artificial Sequence
  ENSG00000143669_76 (sequence is synthesized)
aaaactcattcttctttctcttctactgtcaaagacaaagctgcaagtgaatctataagagtgaatcgaagatgcatcagtgttgcaccatctagagagacagctggtgaattgttacta

SEQ ID NO: 381997 - DNA, 120 bp, Artificial Sequence
  ENSG00000143669_77 (sequence is synthesized)
ggtaaatgtggaatgtattttgtggaagataatgcttctgatacagttgaaagttcgagccttcagggagagttggaaccagcatcattttcctggacatatgaagaaattaaagaagtt

SEQ ID NO: 381998 - DNA, 120 bp, Artificial Sequence
  ENSG00000143669_78 (sequence is synthesized)
cacaagcgttggtggcaattgagagataatgctgtagaaatctttctaacaaatggcagaacactcctgttggcatttgataacaccaaggttcgtgatgatgtataccacaatatactc

SEQ ID NO: 381999 - DNA, 120 bp, Artificial Sequence
  ENSG00000143669_79 (sequence is synthesized)
acaaataacctccctaatcttctggaatatggtaacatcaccgctctgacaaatttatggtatactgggcaaattactaattttgaatatttgactcacttaaacaaacatgctggccga

SEQ ID NO: 382000 - DNA, 120 bp, Artificial Sequence
  ENSG00000143669_80 (sequence is synthesized)
tccttcaatgatctcatgcagtatcctgtgttcccatttatacttgctgactacgttagtgagacacttgacctcaatgatctgttgatatacagaaatctctctaaacctatagctgtt

SEQ ID NO: 382001 - DNA, 120 bp, Artificial Sequence
  ENSG00000143669_81 (sequence is synthesized)
cagtataaagaaaaagaagatcgttatgtggacacatacaagtacttggaggaagagtaccgcaaaggagccagagaagatgaccccatgcctcccgtgcagccctatcactatggctcc

SEQ ID NO: 382002 - DNA, 120 bp, Artificial Sequence
  ENSG00000143669_82 (sequence is synthesized)
cactattccaatagcggcactgtgcttcacttcctggtcaggatgcctcctttcactaaaatgtttttagcctatcaagatcaaagttttgacattccagacagaacttttcattctaca

SEQ ID NO: 382003 - DNA, 120 bp, Artificial Sequence
  ENSG00000143669_83 (sequence is synthesized)
aatacaacttggcgactctcatcttttgaatctatgactgatgtgaaagaacttatcccagagtttttctatcttccagagttcctagttaaccgtgaaggttttgattttggtgtgcgt

SEQ ID NO: 382004 - DNA, 120 bp, Artificial Sequence
  ENSG00000143669_84 (sequence is synthesized)
cagaatggtgaacgggttaatcacgtcaaccttcccccttgggcgcgtaatgatcctcgtctttttatcctcatccatcggcaggctctagagtctgactacgtgtcgcagaacatctgt

SEQ ID NO: 382005 - DNA, 120 bp, Artificial Sequence
  ENSG00000143669_85 (sequence is synthesized)
cagtggattgacttggtgtttgggtataagcaaaaggggaaggcttctgttcaagcgatcaatgtttttcatcctgctacatattttggaatggatgtctctgcagttgaagatccagtt

SEQ ID NO: 382006 - DNA, 120 bp, Artificial Sequence
  ENSG00000143669_86 (sequence is synthesized)
cagagacgagcgctagaaaccatgataaaaacctacgggcagactccccgtcagctgttccacatggcccatgtgagcagacctggagccaagctcaatattgaaggagagcttccagct

SEQ ID NO: 382007 - DNA, 120 bp, Artificial Sequence
  ENSG00000143669_87 (sequence is synthesized)
gctgtggggttgctagtgcagtttgctttcagggagacccgagaacaggtcaaagaaatcacctatccgagtcctttgtcatggataaaaggcttgaaatggggggaatacgtgggttcc

SEQ ID NO: 382008 - DNA, 120 bp, Artificial Sequence
  ENSG00000143669_88 (sequence is synthesized)
cccagtgctccagtacctgtggtctgcttcagccagccccacggagaaagatttggctctctccaggctctgcccaccagagcaatctgtggtttgtcacggaatttctgtcttctgatg

SEQ ID NO: 382009 - DNA, 120 bp, Artificial Sequence
  ENSG00000143669_89 (sequence is synthesized)
acatatagcaaggaacaaggtgtgagaagcatgaacagtacggacattcagtggtcagccatcctgagctggggatatgctgataatattttaaggttgaagagtaaacaaagtgagcct

SEQ ID NO: 382010 - DNA, 120 bp, Artificial Sequence
  ENSG00000143669_90 (sequence is synthesized)
ccagtaaactttattcaaagttcacaacagtaccaggtgactagttgtgcttgggtgcctgacagttgccagctgtttactggaagcaaatgcggtgtcatcacagcctacacaaacaga

SEQ ID NO: 382011 - DNA, 120 bp, Artificial Sequence
  ENSG00000143669_91 (sequence is synthesized)
tttacaagcagcacgccatcagaaatagaaatggagactcaaatacatctctatggtcacacagaagagataaccagcttatttgtttgcaaaccatacagtatactgataagtgtgagc

SEQ ID NO: 382012 - DNA, 120 bp, Artificial Sequence
  ENSG00000143669_92 (sequence is synthesized)
agagacggaacctgcatcatatgggatttaaacaggttatgctatgtacaaagtctggcgggacacaaaagccctgtcacagctgtctctgccagtgaaacctcaggtgatattgctact

SEQ ID NO: 382013 - DNA, 120 bp, Artificial Sequence
  ENSG00000143669_93 (sequence is synthesized)
gtgtgtgattcagctggcggaggcagtgacctcagactctggacggtgaacggggatctcgttggacatgtccactgcagggagatcatctgttccgtggctttctccaaccagcctgag

SEQ ID NO: 382014 - DNA, 120 bp, Artificial Sequence
  ENSG00000143669_94 (sequence is synthesized)
ggagtatctatcaatgtaatcgctgggggattagaaaatggaattgtaaggttatggagcacatgggacttaaagcctgtgagagaaattacatttcccaaatcaaataagcccatcatc

SEQ ID NO: 382015 - DNA, 120 bp, Artificial Sequence
  ENSG00000143669_95 (sequence is synthesized)
agccttacattttcttgtgatggccaccatttgtacacagcaaacagtgatgggaccgtgattgcctggtgtcggaaggaccagcagcgcttgaaacagccaatgttctattccttcctt

SEQ ID NO: 382016 - DNA, 120 bp, Artificial Sequence
  ENSG00000143669_96 (sequence is synthesized)
agcagctatgcagccgggtgaatgcgaatgaacttcacgttctccaaagcactttaactccaaactagatttgttgacttcaccagttttaggaggttgaacctaaagaaatggatgact

SEQ ID NO: 382017 - DNA, 120 bp, Artificial Sequence
  ENSG00000143669_97 (sequence is synthesized)
ggacaaaccatccaaataatgataaagtctattcatctgcacaaaattctgaagagtcacatgatcctaagaggaaagttctgttctattttagtgataatctggaagattgtgtcaata

SEQ ID NO: 382018 - DNA, 120 bp, Artificial Sequence
  ENSG00000143669_98 (sequence is synthesized)
tgcactagccaacaagttttaagcctcgcatggtacattaaaatgatattcttaaaattttttcccaccaaggtattccaaagaaaatattaaggtctcccctttttctatgattccaaa

SEQ ID NO: 382019 - DNA, 120 bp, Artificial Sequence
  ENSG00000143669_99 (sequence is synthesized)
aggaccagtagaatttaaattggttggttgattgtttatataaaacacactaaaattatattttaaaagtttactgccatgaaatactcctcccaccacacacacatgctccaaaagagg

SEQ ID NO: 382020 - DNA, 120 bp, Artificial Sequence
  ENSG00000143669_100 (sequence is synthesized)
aaagaaaaaaagataatttttaggacttgataattgctttctttgagaagcaaattattcagtaggtgcctctgtaccaaatattttatggaatatctaaatactaaaataaactatgaa

SEQ ID NO: 382021 - DNA, 120 bp, Artificial Sequence
  ENSG00000143669_101 (sequence is synthesized)
tgaatctcaaaattaggcagtttttgccagttgctttcttagctcaaaggagaaccagaatttttttgacagccacaaacaagaatacaggtatcttggatttcagacacattctgtttc

SEQ ID NO: 382022 - DNA, 120 bp, Artificial Sequence
  ENSG00000143669_102 (sequence is synthesized)
ttcataaaaattttacttaaaatctgtaacgctagatattgactatccttagttgagtcactgaggtttaaacacaatggtaagtcttaaagtctgctatttacagagcattgaatctgt

SEQ ID NO: 382023 - DNA, 120 bp, Artificial Sequence
  ENSG00000143669_103 (sequence is synthesized)
accaatttgcaatagaaagccttcagtatgcaagaagtttgcatgggtattaagaacacagcctaaataaggcatttgatctaatctgcaggaagaattttcttccccaaaacagaatta

SEQ ID NO: 382024 - DNA, 120 bp, Artificial Sequence
  ENSG00000143669_104 (sequence is synthesized)
taaaagcttactttaaacaggaggcagaataattcttttaggaaaccatttcattctgtttctactaacctataccatctgagaattctaggaagaataataaaatctcgtgtattccac

SEQ ID NO: 382025 - DNA, 120 bp, Artificial Sequence
  ENSG00000143669_105 (sequence is synthesized)
agcaaacttacataccataaagacagaattcctaaacatcttggagccgtctgtctctcccatatgatggctgtctgtatatttttacttggggtgctgctttattggctttgaaaacac

SEQ ID NO: 382026 - DNA, 120 bp, Artificial Sequence
  ENSG00000143669_106 (sequence is synthesized)
tgtcagataagctcagtaatatgttaccatgggataaaaatatgtatccctgcctaagaataacttgtgcatttgttatggaaatttaattcatatggtgtttacagtactacttttgta

SEQ ID NO: 382027 - DNA, 120 bp, Artificial Sequence
  ENSG00000143669_107 (sequence is synthesized)
acttccagactttctaaaacattctgcttaaaaaccatataaaatataattccaaagtctctgctgtcaagatagattcgagagaaagcacgtggccatgtatgctttaaccttaaactg

SEQ ID NO: 382028 - DNA, 120 bp, Artificial Sequence
  ENSG00000143669_108 (sequence is synthesized)
catacacatgtagtgatacctaggctgcatttagatcaccgtgtgctcaggccaggtgtgaatcctgaggtccatggaggtgcagagatgagattactcctattcacgttgaagtgattt

SEQ ID NO: 382029 - DNA, 120 bp, Artificial Sequence
  ENSG00000143669_109 (sequence is synthesized)
gctttgttaacaaaaaattgcagctattgtctagctttcatttttttactgagaactttaaattagtcccctattagaatagggttgctactcatctttttttaaaaaccgaatttcatc

SEQ ID NO: 382030 - DNA, 120 bp, Artificial Sequence
  ENSG00000143669_110 (sequence is synthesized)
atttatctaaagagaaaatatgcagaataactggtcttgttaagagtgcaatattatatttttatgtaaaaataaaaattaatttggggggattatttattcagcatgaaacctaatatg

SEQ ID NO: 382031 - DNA, 120 bp, Artificial Sequence
  ENSG00000143669_111 (sequence is synthesized)
tatatgtttgaaatacttcataatgtgcatgttgtagcaaacatttctgtaaattatcacaagctctgttacctttatatacactgcctcttcaatttggaaataaatttcataaaaata

SEQ ID NO: 382032 - DNA, 120 bp, Artificial Sequence
  ENSG00000143669_112 (sequence is synthesized)
aatacagatgaaaaatgtaatatgatctcaagtttatagaaatatttattttcaagaacatgaataacttcttttaaactatgggcaaacaaaattagcattattttaatctttttgaag

SEQ ID NO: 382033 - DNA, 120 bp, Artificial Sequence
  ENSG00000143669_113 (sequence is synthesized)
tggcaaaagtaaattaattatgataggcctcaaatagaattaggtctttgtgtcttaatcgtattatttgtatttttttatagatcaaagttttgacattccagacagaacttttcattc

SEQ ID NO: 382034 - DNA, 120 bp, Artificial Sequence
  ENSG00000143669_114 (sequence is synthesized)
cgcaagggcttctaagaagccatcccaatgaccttttggctttgagaagagcagtcctcataccagagtgtttggggttttggcctctttcagtgtttattcattcttacgtgggaaagt

SEQ ID NO: 382035 - DNA, 120 bp, Artificial Sequence
  ENSG00000143669_115 (sequence is synthesized)
tgtattccgaggtttctgtggtgcatgaagcttttgccttcaccatctgttcccgtgtcttcctcgggtgacatcagagtacagcagtattttcccttgccatctaatggggtttgggct

SEQ ID NO: 382036 - DNA, 120 bp, Artificial Sequence
  ENSG00000143669_116 (sequence is synthesized)
gtttgactcaaccgtgtgtgttcctcaatgccaggggaataatcctaccctaagtcagctgaacagaagccaggatctaactgcaaacaagagacccagcttgcttaacagcatggaaga

SEQ ID NO: 382037 - DNA, 120 bp, Artificial Sequence
  ENSG00000143669_117 (sequence is synthesized)
gaccagtttcgttgcagctacctgggaagacggttgctaattagcctgcaacaaagagttccttgctcatctaaaagaggcaatcaccgttcaggtgaagctttgttctaagaatatttg

SEQ ID NO: 382038 - DNA, 120 bp, Artificial Sequence
  ENSG00000143669_118 (sequence is synthesized)
tatgatagttaactgtagctacatggttttggattacatagtttctgaagcctccttgagataaagtccagtctttcacattattccactaaaaaaaaagtggacctatttataaccata

SEQ ID NO: 382039 - DNA, 120 bp, Artificial Sequence
  ENSG00000143669_119 (sequence is synthesized)
actaaatggtttcatatatactatgctttttatcgtaatatcagtgagataactatggttcttagtagaaatataagacataatcttatatccctgtatcttatgtcagaaacatgatga

SEQ ID NO: 382040 - DNA, 120 bp, Artificial Sequence
  ENSG00000143669_120 (sequence is synthesized)
attttcattttcaataaatatcaagtatgtttttgaaaaatttttggaggctgctaattctggagtgaaagcagagacctcttatgtgaactaataattactgagtcctttagcttgtat

SEQ ID NO: 382041 - DNA, 120 bp, Artificial Sequence
  ENSG00000143669_121 (sequence is synthesized)
acatctaatttatcaaacgtttttggcttaaagtatggtatgaccatatggttttgctgttttcttattataaaattaacagagttttaaaactagttgagactagatgttttcatctaa

SEQ ID NO: 382042 - DNA, 120 bp, Artificial Sequence
  ENSG00000143669_122 (sequence is synthesized)
ccttcttttacagatgagaaaacagatccagaaacattaagtactcacataaattaattttaaggccaaatgtgatttatatctttatttcattttagtagaaaatgaataattattttg

SEQ ID NO: 382043 - DNA, 120 bp, Artificial Sequence
  ENSG00000143669_123 (sequence is synthesized)
tgatcgtaaaactctacaatctgctttcagggaactaattaatatagttagttgaaaaaataatgaagtgtttgtaacaccaatatgatggattttttttaacactttgaatgttaccag

SEQ ID NO: 382044 - DNA, 120 bp, Artificial Sequence
  ENSG00000143669_124 (sequence is synthesized)
tgacaggattatctgatttgtacacaaagattgttttcagactataattttccttgagccgtaaaaatgtggtagtgttcttaacactcttaacatgttcttcaccttaaatgccttact

SEQ ID NO: 382045 - DNA, 120 bp, Artificial Sequence
  ENSG00000143669_125 (sequence is synthesized)
gtatacttgagagtatattggacttggaaacaaaaggaatcgagaatgcacgtccggcgggtgttggggcacgcggcagtgagatccagactcgtcggcagcggctccagcaccttcgct

SEQ ID NO: 382046 - DNA, 120 bp, Artificial Sequence
  ENSG00000143669_126 (sequence is synthesized)
acctttaaatacagtcagtcaaggaaaagcaggataaatgctgtttccttccctgtttattaatttttggaatgatgaattcatgcccctagtagcctctaattcttgtatttgttttta

SEQ ID NO: 382047 - DNA, 120 bp, Artificial Sequence
  ENSG00000143669_127 (sequence is synthesized)
tttttggagtgtcattaggagctcaggtattttaaaataaatgttatgtgttttagtctattgcagtcattattcagtttgatattaaaattaacacctctgtagattcaagttgttgtg

SEQ ID NO: 382048 - DNA, 120 bp, Artificial Sequence
  ENSG00000143669_128 (sequence is synthesized)
tcgacatggcctttttcattttaacaagttaatatgattaaacttccttgttttctggcacagaagaatgtcccaggcccaccttatgcaattccttccccaaacctagaacctaacttc

SEQ ID NO: 382049 - DNA, 120 bp, Artificial Sequence
  ENSG00000143669_129 (sequence is synthesized)
cctcccaagaagaccttatatccttttaaggagatgatagtatttagagactacaaatctaaggactaggtatgtttatttctcctgggttgtcatttcttctcagccttttttagtgga

SEQ ID NO: 382050 - DNA, 120 bp, Artificial Sequence
  ENSG00000143669_130 (sequence is synthesized)
caaagctaggaaataagtatttttttagaaagacaagtcatgagtttatactttcactttttcttggattcttttatttgtatttcttactaatgttgatatcttggttcctaacattaa

SEQ ID NO: 382051 - DNA, 120 bp, Artificial Sequence
  ENSG00000143669_131 (sequence is synthesized)
cataatcacttatttgccttgtctttctacatatataacattttcaaaataagatgatcaacatgatcactaataacaatcctgctgagtgcagttgaagatgtctttgtggttcttttt

SEQ ID NO: 382052 - DNA, 120 bp, Artificial Sequence
  ENSG00000143669_132 (sequence is synthesized)
ttcttagcatactattatggttatacagtgaaaatactgtattataaaagcacttaaaatagttttctttatttggtcaggctgccaacttcaaccaattagataggtaggtaggctttt

SEQ ID NO: 382053 - DNA, 120 bp, Artificial Sequence
  ENSG00000143669_133 (sequence is synthesized)
ttttccagtttgttttatagttttttgggattcctttgggtttttgtttgtttgcttaattttgtttttaatcatgtgaaatgtctacatggttctaaaagcaacgttgtgaaacagcac

SEQ ID NO: 382054 - DNA, 120 bp, Artificial Sequence
  ENSG00000143669_134 (sequence is synthesized)
attcagagaggttctagcttttatccctttccgctcctcttattttttccctctctgtgtaggtaactgactttttttttctgttgaagatacaagcaaatctatgtatacatgtattta

SEQ ID NO: 382055 - DNA, 120 bp, Artificial Sequence
  ENSG00000143669_135 (sequence is synthesized)
cacatgtaaatattctgtcccctacttcataacacaaagaaagatagcaaagtatacacactcttctgcaccttactttcttcacttagtatatcctagagatcattattacatagtagt

SEQ ID NO: 382056 - DNA, 120 bp, Artificial Sequence
  ENSG00000143669_136 (sequence is synthesized)
acagagtgatcttctttatgccttttcacagctgcatacatttaatttgtatttcatttggaatgtgcctggattttttaagccccagacttctttgccattacaacttgattctgatta

SEQ ID NO: 382057 - DNA, 120 bp, Artificial Sequence
  ENSG00000143669_137 (sequence is synthesized)
actctccagcctgctgaccctcttcttttcaagataatcatatctttgtgtcttgcaacctcttcacatcctgtttatttttacagtcatgctgttttattcatattgtccaccagcaca

SEQ ID NO: 382058 - DNA, 120 bp, Artificial Sequence
  ENSG00000143669_138 (sequence is synthesized)
gaacacctctctctcctttgtctatctatatcctcattctatccattcatttggccatgacccagatcactctataccttctttaaaacctttctccctttctgtagtctactcagaact

SEQ ID NO: 382059 - DNA, 120 bp, Artificial Sequence
  ENSG00000143669_139 (sequence is synthesized)
cttccttcttagaaccttctttgaaaagaaatattttacatattttagcactttattattttctaaggattcatgtttaacagattcaattccttaaatcagttttttaagggctgaaaa

SEQ ID NO: 382060 - DNA, 120 bp, Artificial Sequence
  ENSG00000143669_140 (sequence is synthesized)
taagagttttttgttatctattcccagtgacaccttttatagtccctgaaatgatcatcagtaagtgatcagagggtattaaaatgagatattagaaacaacttaagcgtttaagaaaat

SEQ ID NO: 382061 - DNA, 120 bp, Artificial Sequence
  ENSG00000143669_141 (sequence is synthesized)
catgtgtttcctttgatattcacaatgaataaaaacatttctgatagtttttcaagataatttttgaatgtcattgaataccaaactgaaatatttttaaagttatatcaagatcattac

SEQ ID NO: 382062 - DNA, 120 bp, Artificial Sequence
  ENSG00000143669_142 (sequence is synthesized)
ctttaagacacacttaggaaagtcttttagtcatgtaccgtttttatttatttgccaactctttaggccttttactcacagagcttctgttcatttttctcttttggtcaggtagcagct

SEQ ID NO: 382063 - DNA, 120 bp, Artificial Sequence
  ENSG00000143669_143 (sequence is synthesized)
gtctctgactaatttaaaatgttgcattaaaatgagctgtactattttcaccattgcatatgttcatcttttgcttttgggaaatgacacgatgtgattcagcatgttaatttaaatatc

SEQ ID NO: 382064 - DNA, 120 bp, Artificial Sequence
  ENSG00000143669_144 (sequence is synthesized)
acccaaaatgtaatcatttccagatccatttgctgacatttaatactattcacagtttaaaatgtcataaaactaaatacagtgatatttgtgtcaatgctgatttttaaagtaaaatat

SEQ ID NO: 382065 - DNA, 120 bp, Artificial Sequence
  ENSG00000143669_145 (sequence is synthesized)
atatgtttaacttgttggcaacattattgtctaaataatacatactgtacacagtagaatcaggtgtaatatctacagcatgtaagggccacttaaaaaaccgtgaatgaacgtttggtt

SEQ ID NO: 382066 - DNA, 120 bp, Artificial Sequence
  ENSG00000143669_146 (sequence is synthesized)
taggtctgtgctgcaaaggccaattgtcattatcttaagtaacactgtgaattttggttttagggcctgttaataaaagattggctaaaacaactctgccatggatacatacatagaatt

SEQ ID NO: 382067 - DNA, 120 bp, Artificial Sequence
  ENSG00000143669_147 (sequence is synthesized)
gtctgcgtggggtttgcgagtttttcaccttttgttctagggagtagtgaatgcttacaaactaaagataggttttagttccagaaatttcaccaaaggaagaagagtcagtaagtttta

SEQ ID NO: 382068 - DNA, 120 bp, Artificial Sequence
  ENSG00000143669_148 (sequence is synthesized)
aggtctaaaggaagctttcccttctagttcagtttttctgtgagaaaaactaaaaattatcttcctttatcccagtttctttcctgtattcctttagcaagtcctttccaaaattctttc

SEQ ID NO: 382069 - DNA, 120 bp, Artificial Sequence
  ENSG00000143669_149 (sequence is synthesized)
cccaaaagctagctggctagtttgcttgctttttaaaatatattttatatgaaaaaatttcaaacatacagagactagaaagaatagcgtaataaataccatggaaccatcacctagatt

SEQ ID NO: 382070 - DNA, 120 bp, Artificial Sequence
  ENSG00000143669_150 (sequence is synthesized)
atggaaccatcacctagatttaacagttgttactatttttattatattgacatcatttcttctttttctgaactattttaacatatatatagaaattatgatattttacctctaaattct

SEQ ID NO: 382071 - DNA, 120 bp, Artificial Sequence
  ENSG00000143669_151 (sequence is synthesized)
tgtaacataacattattacatctaacaaaattagcattaatcctctgtcatcaaatactcagtgcataatcagatttctgtacttatcctcagaatgtcttttgtaggtgctttatttaa

SEQ ID NO: 382072 - DNA, 120 bp, Artificial Sequence
  ENSG00000143669_152 (sequence is synthesized)
atcagatgcaaccaaataaatctagcaatataatttaattactactaagtaatttaaatgtaagaattaaaattctaaatgactaaaaaattattactttttttaaagcatggagccaag

SEQ ID NO: 382073 - DNA, 120 bp, Artificial Sequence
  ENSG00000143669_153 (sequence is synthesized)
tgtctcagcccatccctacaagcacactagaatctccatgttccccaaggactcacccatgacagcttaatgtgtgaactcccagcctttcccccattgggtaacggaattgggctgagt

SEQ ID NO: 382074 - DNA, 120 bp, Artificial Sequence
  ENSG00000143669_154 (sequence is synthesized)
tggtttttgggaaagccattatcttccaagccactataggtcaaagatatccactggatttgaaacaataagcaacttgcagttcgggctgtattttacaacattaggaatgatgaattt

SEQ ID NO: 382075 - DNA, 120 bp, Artificial Sequence
  ENSG00000143669_155 (sequence is synthesized)
aaagatgttcacattacactggaccaaattaagatggctttctccctcttgcgatgtgcctcagccgtgatagtgaccagcttggagtttacagttacagtatagtctttgccagagaca

SEQ ID NO: 382076 - DNA, 120 bp, Artificial Sequence
  ENSG00000143669_156 (sequence is synthesized)
atctttggtgttctaaggaaaaggctgccatggtggagatccatcatctcgcccttcaatttgtcttccatgacatcaacaagagcaagttcgcctgccaagtccttcattaagataccg

SEQ ID NO: 382077 - DNA, 120 bp, Artificial Sequence
  ENSG00000143669_157 (sequence is synthesized)
atggcacaggccatgccaagagcaccaaccccaacaactgtaatcttattctggaggatctgttcttcctttagaagactgtgaataagctgatccttgagcgtatacttgagagtatat

SEQ ID NO: 382078 - DNA, 120 bp, Artificial Sequence
  ENSG00000143669_158 (sequence is synthesized)
ttttgagaaaatgcatctcaatctcagttacaatgttatgtttcattagtcaattatagcttctgaaacagaatacagaaacttctaggtttttactataataaaatttactatattttt

SEQ ID NO: 382079 - DNA, 120 bp, Artificial Sequence
  ENSG00000143669_159 (sequence is synthesized)
aagactcatccccccagttttctcctggatgcactacctgtgttgtacctcctggagcaggtcctcgaaaatttccccttgctcaaactgaatcgcttctgatgaaaatgcgttcagtgg

SEQ ID NO: 382080 - DNA, 120 bp, Artificial Sequence
  ENSG00000143669_160 (sequence is synthesized)
gcacccagccaagtttatgtatttttattctttttcatgaatgtgatttgttaaatgagtgattaaatataatttttatatatttgtatgacttttctgtaaataaaatttaaaatcaga

SEQ ID NO: 382081 - DNA, 120 bp, Artificial Sequence
  ENSG00000143674_0 (sequence is synthesized)
gccggccgcagggcctgggcacgaccatggtgggacgtcgcccgcggcttcggggaccgctgcggcagcagaggcggctggccaggaacgcgggccgaggctggaccctttgggcagcta

SEQ ID NO: 382082 - DNA, 120 bp, Artificial Sequence
  ENSG00000143674_1 (sequence is synthesized)
ggaacgcgggccgaggctggaccctttgggcagctagcccgtgatctctgccgtcaccgatcgcgattcctaccccctcgccttcccccggcgccgacggccacaccgccggacgatgcg

SEQ ID NO: 382083 - DNA, 120 bp, Artificial Sequence
  ENSG00000143674_2 (sequence is synthesized)
ccgccttccccgcgcagctgcccccatggctttgcggggcgccgcgggagcgaccgacaccccggtgtcctcggccgggggagcccccggcggctcagcgtcctcgtcgtccacctcctc

SEQ ID NO: 382084 - DNA, 120 bp, Artificial Sequence
  ENSG00000143674_3 (sequence is synthesized)
gagcccccggcggctcagcgtcctcgtcgtccacctcctcgggcggctcggcctcggcgggcgcggggctgtgggccgcgctctatgactacgaggctcgcggcgaggacgagctgagcc

SEQ ID NO: 382085 - DNA, 120 bp, Artificial Sequence
  ENSG00000143674_4 (sequence is synthesized)
tgcggcgcggccagctggtggaggtgctgtcgcaggacgccgccgtgtcgggcgacgagggctggtgggcaggccaggtgcagcggcgcctcggcatcttccccgccaactacgtggctc

SEQ ID NO: 382086 - DNA, 120 bp, Artificial Sequence
  ENSG00000143674_5 (sequence is synthesized)
ccgcccggccgccagccccgcgccgccgccctcgcggcccagctccccggtacacgtcgccttcgagcggctggagctgaaggagctcatcggcgctgggggcttcgggcaggtgtaccg

SEQ ID NO: 382087 - DNA, 120 bp, Artificial Sequence
  ENSG00000143674_6 (sequence is synthesized)
gtgtaccgcgccacctggcagggccaggaggtggccgtgaaggcggcgcgccaggacccggagcaggacgcggcggcggctgccgagagcgtgcggcgcgaggctcggctcttcgccatg

SEQ ID NO: 382088 - DNA, 120 bp, Artificial Sequence
  ENSG00000143674_7 (sequence is synthesized)
ggcaccccaacatcatcgagctgcgcggcgtgtgcctgcagcagccgcacctctgcctggtgctggagttcgcccgcggcggagcgctcaaccgagcgctggccgctgccaacgccgccc

SEQ ID NO: 382089 - DNA, 120 bp, Artificial Sequence
  ENSG00000143674_8 (sequence is synthesized)
cggacccgcgcgcgcccggcccccgccgcgcgcgccgcatccctccgcacgtgctggtcaactgggccgtgcagatagcgcggggcatgctctacctgcatgaggaggccttcgtgccca

SEQ ID NO: 382090 - DNA, 120 bp, Artificial Sequence
  ENSG00000143674_9 (sequence is synthesized)
tcctgcaccgggacctcaagtccagcaacattttgctacttgagaagatagaacatgatgacatctgcaataaaactttgaagattacagattttgggttggcgagggaatggcacagga

SEQ ID NO: 382091 - DNA, 120 bp, Artificial Sequence
  ENSG00000143674_10 (sequence is synthesized)
ccaccaaaatgagcacagcaggcacctatgcctggatggcccccgaagtgatcaagtcttccttgttttctaagggaagcgacatctggagctatggagtgctgctgtgggaactgctca

SEQ ID NO: 382092 - DNA, 120 bp, Artificial Sequence
  ENSG00000143674_11 (sequence is synthesized)
ccggagaagtcccctatcggggcattgatggcctcgccgtggcttatggggtagcagtcaataaactcactttgcccattccatccacctgccctgagccgtttgccaagctcatgaaag

SEQ ID NO: 382093 - DNA, 120 bp, Artificial Sequence
  ENSG00000143674_12 (sequence is synthesized)
aatgctggcaacaagaccctcatattcgtccatcgtttgccttaattctcgaacagttgactgctattgaaggggcagtgatgactgagatgcctcaagaatcttttcattccatgcaag

SEQ ID NO: 382094 - DNA, 120 bp, Artificial Sequence
  ENSG00000143674_13 (sequence is synthesized)
atgactggaaactagaaattcaacaaatgtttgatgagttgagaacaaaggaaaaggagctgcgatcccgggaagaggagctgactcgggcggctctgcagcagaagtctcaggaggagc

SEQ ID NO: 382095 - DNA, 120 bp, Artificial Sequence
  ENSG00000143674_14 (sequence is synthesized)
tgctaaagcggcgtgagcagcagctggcagagcgcgagatcgacgtgctggagcgggaacttaacattctgatattccagctaaaccaggagaagcccaaggtaaagaagaggaagggca

SEQ ID NO: 382096 - DNA, 120 bp, Artificial Sequence
  ENSG00000143674_15 (sequence is synthesized)
agtttaagagaagtcgtttaaagctcaaagatggacatcgaatcagtttaccttcagatttccagcacaagataaccgtgcaggcctctcccaacttggacaaacggcggagcctgaaca

SEQ ID NO: 382097 - DNA, 120 bp, Artificial Sequence
  ENSG00000143674_16 (sequence is synthesized)
gcagcagttccagtcccccgagcagccccacaatgatgccccgactccgagccatacagttgacttcagatgaaagcaataaaacttggggaaggaacacagtctttcgacaagaagaat

SEQ ID NO: 382098 - DNA, 120 bp, Artificial Sequence
  ENSG00000143674_17 (sequence is synthesized)
ttgaggatgtaaaaaggaattttaagaaaaaaggttgtacctggggaccaaattccattcaaatgaaagatagaacagattgcaaagaaaggataagacctctctccgatggcaacagtc

SEQ ID NO: 382099 - DNA, 120 bp, Artificial Sequence
  ENSG00000143674_18 (sequence is synthesized)
cttggtcaactatcttaataaaaaatcagaaaaccatgcccttggcttcattgtttgtggaccagccagggtcctgtgaagagccaaaactttcccctgatggattagaacacagaaaac

SEQ ID NO: 382100 - DNA, 120 bp, Artificial Sequence
  ENSG00000143674_19 (sequence is synthesized)
caaaacaaataaaattgcctagtcaggcctacattgatctacctcttgggaaagatgctcagagagagaatcctgcagaagctgaaagctgggaggaggcagcctctgcgaatgctgcca

SEQ ID NO: 382101 - DNA, 120 bp, Artificial Sequence
  ENSG00000143674_20 (sequence is synthesized)
cagtctccattgagatgactcctacgaatagtctgagtagatccccccagagaaagaaaacggagtcagctctgtatgggtgcaccgtccttctggcatcggtggctctgggactggacc

SEQ ID NO: 382102 - DNA, 120 bp, Artificial Sequence
  ENSG00000143674_21 (sequence is synthesized)
tcagagagcttcataaagcacaggctgctgaagaaccgttgcccaaggaagagaagaagaaacgagagggaatcttccagcgggcttccaagtcccgcagaagcgccagtcctcccacaa

SEQ ID NO: 382103 - DNA, 120 bp, Artificial Sequence
  ENSG00000143674_22 (sequence is synthesized)
gcctgccatccacctgtggggaggccagcagcccaccctccctgccactgtcaagtgccctgggcatcctctccacaccttctttctccacaaagtgcctgctgcagatggacagtgaag

SEQ ID NO: 382104 - DNA, 120 bp, Artificial Sequence
  ENSG00000143674_23 (sequence is synthesized)
atccactggtggacagtgcacctgtcacttgtgactctgagatgctcactccggatttttgtcccactgccccaggaagtggtcgtgagccagccctcatgccaagacttgacactgatt

SEQ ID NO: 382105 - DNA, 120 bp, Artificial Sequence
  ENSG00000143674_24 (sequence is synthesized)
acagacggaccatgtctgatggaaatccgaccccaactggtgcaactattatctcagccactggagcctctgcactgccactctgcccctcacctgctcctcacagtcatctgccaaggg

SEQ ID NO: 382106 - DNA, 120 bp, Artificial Sequence
  ENSG00000143674_25 (sequence is synthesized)
aggtctcacccaagaagcacagcactgtccacatcgtgcctcagcgtcgccctgcctccctgagaagccgctcagatctgcctcaggcttacccacagacagcagtgtctcagctggcac

SEQ ID NO: 382107 - DNA, 120 bp, Artificial Sequence
  ENSG00000143674_26 (sequence is synthesized)
agactgcctgtgtagtgggtcgcccaggaccacatcccacccaattcctcgctgccaaggagagaactaaatcccatgtgccttcattactggatgctgacgtggaaggtcagagcaggg

SEQ ID NO: 382108 - DNA, 120 bp, Artificial Sequence
  ENSG00000143674_27 (sequence is synthesized)
actacactgtgccactgtgcagaatgaggagcaaaaccagccggccatctatatatgaactggagaaagaattcctgtcttaaactaagtgccttactgttgtttaagcatttttttaag

SEQ ID NO: 382109 - DNA, 120 bp, Artificial Sequence
  ENSG00000143674_28 (sequence is synthesized)
gtgaacaaatgaacacaatgtatctacctttgaactgtttcatgctgctgtgttttcaaaagctgtggccatgttcctaaattagtaagatatatccagcttctcaaaaaatgtatatga

SEQ ID NO: 382110 - DNA, 120 bp, Artificial Sequence
  ENSG00000143674_29 (sequence is synthesized)
ttgctgttagccatgtctattgtttttcctctggattcttttcttataacttggaatacacaaaagtgtaaaacaagagatgtgcaccaatgaaaactatgctgggtcgaattaccttca

SEQ ID NO: 382111 - DNA, 120 bp, Artificial Sequence
  ENSG00000143674_30 (sequence is synthesized)
gcacaatgttaatgtttttgttctcatttatgcctttgtccatttgcacacaacagaaattgtaatgagcttcactatttttgtttctttccttccttttttttcttttttcctttcttt

SEQ ID NO: 382112 - DNA, 120 bp, Artificial Sequence
  ENSG00000143674_31 (sequence is synthesized)
cctttttcttgtcttgtttcttgtttttttttcttgtagtttcttttcttaattgtcatttttgcaacaaaaagccaagaaagagctttagtttcttggcaagaataatgtgatattagt

SEQ ID NO: 382113 - DNA, 120 bp, Artificial Sequence
  ENSG00000143674_32 (sequence is synthesized)
aagtaaaggtcttaaaagtctgacgactggaatagatataaagtcctgtttaaactacctaaccttggctgtgggccgataatgcatatgtccagttctcacttaaattatgcaatgata

SEQ ID NO: 382114 - DNA, 120 bp, Artificial Sequence
  ENSG00000143674_33 (sequence is synthesized)
tttctctctgaggaaattatacggaatgtaacttataaaagctttactgaatataagttataagcattttattcattagaactccaaaatagatgttcaaagttcagtccttgccatttg

SEQ ID NO: 382115 - DNA, 120 bp, Artificial Sequence
  ENSG00000143674_34 (sequence is synthesized)
actgagaccacatggtgtgccccttgagtgaggctaatctttaggtttttcctatagaaaacattcttcctccatcagtagccctttatttgatattcagaagtggaaagctttttcatt

SEQ ID NO: 382116 - DNA, 120 bp, Artificial Sequence
  ENSG00000143674_35 (sequence is synthesized)
ctccagtagaacttttaaaaattgttacagatacctagctcttcacagatatcatgtactgtaaacagtcatgtgtcttaattttattttctctatttgagtgcataattatcctaataa

SEQ ID NO: 382117 - DNA, 120 bp, Artificial Sequence
  ENSG00000143674_36 (sequence is synthesized)
tcccaaagacactgacaactcaaggaacagcagtacagtactattagaagttaagtatgttgttgttatttcacatttcatttaattgtggataaatgttagacatctgttgaaataagc

SEQ ID NO: 382118 - DNA, 120 bp, Artificial Sequence
  ENSG00000143674_37 (sequence is synthesized)
tcatatggtggaaacgacaactatattatgaattattttcagaaatggatctttgaatagcagatcaggatttaaataataaaattatctatgaatcacttttatggtcatacatatatg

SEQ ID NO: 382119 - DNA, 120 bp, Artificial Sequence
  ENSG00000143674_38 (sequence is synthesized)
atacaaatccagagttattggtgcagaaatggctacccgagagcttggtaaatttgccttggtttcttatgttaaatgtattgtgcttcccttctgtctctagaatgtggctcttcagaa

SEQ ID NO: 382120 - DNA, 120 bp, Artificial Sequence
  ENSG00000143674_39 (sequence is synthesized)
gacagacaatcgacatttaaatttttccaaacaatgaaaaactaaattaaaaacattgcttgatatttcatttaaaattgcaccttgcttaaggtttactgaataactgaaatgtcagca

SEQ ID NO: 382121 - DNA, 120 bp, Artificial Sequence
  ENSG00000143674_40 (sequence is synthesized)
atttaaaataaattcaattgtgtgataaaatatctcacctataatagaagaaaaggaaaatcatattatttggcaattttgcagcattgtggttgcctaacaggtatatccagcagatga

SEQ ID NO: 382122 - DNA, 120 bp, Artificial Sequence
  ENSG00000143674_41 (sequence is synthesized)
gaaacagtatgaaaggattgtattaacatggtaagttttgccctaaggaaaacgatcttgcattctggattcttgcagcaaagtctcagatacttaatacgttttcttgttttatcatct

SEQ ID NO: 382123 - DNA, 120 bp, Artificial Sequence
  ENSG00000143674_42 (sequence is synthesized)
gttctatgattcggcttcactttgtgtggttattgaattatgtaacagagatttggttttcccaaaatgttatcacatttgaaactatgattgctttgtgttcagtccttttggaacacg

SEQ ID NO: 382124 - DNA, 120 bp, Artificial Sequence
  ENSG00000143674_43 (sequence is synthesized)
tagcttccagcttaagggtagagaaatatatacctaaaatcatcaatacatgaaagaaaaaggatggaaactatgtcctcagttttacttctaccaaaacatccctgtatgtgtgtgcat

SEQ ID NO: 382125 - DNA, 120 bp, Artificial Sequence
  ENSG00000143674_44 (sequence is synthesized)
gtatgttggcgtgtgtgtgtgtgcatgcatattagtaaatgtgtgtttgcatgtgtgtgttggggagtgtatgtgatctgggtgtttgtttatctctgttattattcccctttagcttta

SEQ ID NO: 382126 - DNA, 120 bp, Artificial Sequence
  ENSG00000143674_45 (sequence is synthesized)
ttttagtcaactctacattatgatgaatttcaaaatgaagctgtattaaaataattgtaatataacaattcaatctcacatgttactgcagatagttaacttttgctgcaatctattgta

SEQ ID NO: 382127 - DNA, 120 bp, Artificial Sequence
  ENSG00000143674_46 (sequence is synthesized)
catttgcaattttctgtgttagtaaacttagcagaatctggttatttatttttgtgtaggcttaatgttcactgaaagataagtcaattactgttagtaaaaaattaaggtactctcact

SEQ ID NO: 382128 - DNA, 120 bp, Artificial Sequence
  ENSG00000143674_47 (sequence is synthesized)
gcagagatttaaggcctgggcctaatgtgctgtattatgaagccttgtgactgaaaaatatgtttacatatgttgtctatttttttaataaacttttatagctggtctatttgctcagta

SEQ ID NO: 382129 - DNA, 120 bp, Artificial Sequence
  ENSG00000143674_48 (sequence is synthesized)
tgacttggattcaaattgagcagatgtgttttcatagcaggttgtagatgagtgtaggacatttcgtaggtgccacaactatttgagaaacaaaacttgagcataggttccttagtctaa

SEQ ID NO: 382130 - DNA, 120 bp, Artificial Sequence
  ENSG00000143674_49 (sequence is synthesized)
ttttcttctactcacaaaaaatgaattttagatgctatgcagttggtgatgcgacctggccccggagtagaaagtgaaacaccacatctcgagacattctgttaaacacttgcacgcaac

SEQ ID NO: 382131 - DNA, 120 bp, Artificial Sequence
  ENSG00000143674_50 (sequence is synthesized)
gttagcataacctaattctatcatcagccatttgtgtcagggtactttgaaaaatgaaatcaggaattcaggattacttctgtttctttctttgtttcgtgaggggaaaaaatttttgct

SEQ ID NO: 382132 - DNA, 120 bp, Artificial Sequence
  ENSG00000143674_51 (sequence is synthesized)
tttcaggatttaactttaattcactttaggtttgaccaacctaatacttaaaaattccttgtagtgttttggttttagaacaagcattcatcctggaggagacagtacagacagctgatt

SEQ ID NO: 382133 - DNA, 120 bp, Artificial Sequence
  ENSG00000143674_52 (sequence is synthesized)
cgcctggcacctttgcattgtgagagtttcagttaggctatgaatcagaatgtagcggatgaaataaaattactaatttttttcaaaggtgagtccagataaacccctaaaagtaggcta

SEQ ID NO: 382134 - DNA, 120 bp, Artificial Sequence
  ENSG00000143674_53 (sequence is synthesized)
agcgaaagaagaatgtgattaatgcgtatgtctgtaagtaatgtggtaattagcctaagtctgtggtaaaccattcatttggatcctctccttcctccaccaaacttaattccctgctgt

SEQ ID NO: 382135 - DNA, 120 bp, Artificial Sequence
  ENSG00000143674_54 (sequence is synthesized)
ttactcatccttatttggagaaaaaaaaaatccaaaagaaaattttgtctaatgaggcttgcatggaatctcatttttttttcctcttttgataatgaaaaccttggcaccagcagagat

SEQ ID NO: 382136 - DNA, 120 bp, Artificial Sequence
  ENSG00000143674_55 (sequence is synthesized)
ttcttttgcaagttctcggacaccaggatccccacagagaaactggatctaaatgaggctgtagttttagagcttaaaggactgtcatttattataactgatttggttttctgagaatgc

SEQ ID NO: 382137 - DNA, 120 bp, Artificial Sequence
  ENSG00000143674_56 (sequence is synthesized)
attttgcataaaaccgtacctcaaaccttgcctttgcctaggcaaaggcctaattaacggagagagaaagggtcccaggctggtctcccagctccacgaagggatgagcagatgggacac

SEQ ID NO: 382138 - DNA, 120 bp, Artificial Sequence
  ENSG00000143674_57 (sequence is synthesized)
cgtgccacccctgcttttgcctggccactcctctgccctctttcctgtgtcttcaccttctgctctggggaaaaccacctcacagaagccaggaagtggtactgggaaggcctggctggg

SEQ ID NO: 382139 - DNA, 120 bp, Artificial Sequence
  ENSG00000143674_58 (sequence is synthesized)
cccaagatgtgtaccagttaaagtaaataatttgggacttcaaatgaattccaaccctccaaagttgaaatgcagccagcttagggaggcgcatccttggcgctccttctcagaagtaac

SEQ ID NO: 382140 - DNA, 120 bp, Artificial Sequence
  ENSG00000143674_59 (sequence is synthesized)
atggtggaaaggttctaatcgagacagtccacacagggccagctttgtgtgtggcagctgttggctcaagttctccagcctggatgttgctcatcttcattgtgaccctgggtgctccaa

SEQ ID NO: 382141 - DNA, 120 bp, Artificial Sequence
  ENSG00000143674_60 (sequence is synthesized)
gaatgcctcttgtcttcatgtgtgtgcacacccccattcaattctgacagcctcattgagtggacccttttatgatccccaaatgcgggacagagaagttaccattaagctgacccaagt

SEQ ID NO: 382142 - DNA, 120 bp, Artificial Sequence
  ENSG00000143674_61 (sequence is synthesized)
tggtagctactaactggtgaagctggattcagacacatctgagtgtagatttcaccatccgtttccggcctcttagtacaggaaaagttcaatcaatgtggaaacaaaagagaaaccaga

SEQ ID NO: 382143 - DNA, 120 bp, Artificial Sequence
  ENSG00000143674_62 (sequence is synthesized)
ggagcaaatcaagaggggaaggaaagtaggaagggacgaaggtgaggagactaaagccgagagtgtagatagctctgggagtgtagatcagtcagtcagtcatatagccgagatgaactt

SEQ ID NO: 382144 - DNA, 120 bp, Artificial Sequence
  ENSG00000143674_63 (sequence is synthesized)
gggtctaataacccccagctgaaagcttttccggttctgctgccctcacttaaatgaaaactgctgatccgtttatctgtcattctactgtaaaactcttttaataaaaagaatgaacag

SEQ ID NO: 382145 - DNA, 120 bp, Artificial Sequence
  ENSG00000143674_64 (sequence is synthesized)
taattttctcattgttttcatgttttgagtaaggtagtttcacaactgatatgattcatttagcttttttaacaaagccaatattggttaatatgattgttgtggttaatatggttaata

SEQ ID NO: 382146 - DNA, 120 bp, Artificial Sequence
  ENSG00000143702_0 (sequence is synthesized)
ctttcccgaggcgcctgcgcactaggcagtcggtctttgccgttaccgctatgtgtggggcgtgtgtggaataacgttattgcccagcggagctgagggccccggagctcgaccgcagcg

SEQ ID NO: 382147 - DNA, 120 bp, Artificial Sequence
  ENSG00000143702_1 (sequence is synthesized)
gcagcgacgacaacagcggcgacgacgacgacgacgaggtggggggaggacggcgtgcgagagactcacgggacgcgacgcgccccgcctcccccgtccggtccctctctccacggtaag

SEQ ID NO: 382148 - DNA, 120 bp, Artificial Sequence
  ENSG00000143702_2 (sequence is synthesized)
gggatgacgtagctttgccaaagacttagaagctaagcagaaaatgagcttaacatcctggtttttggtgagcagtggaggcactcgccacaggctgccacgagaaatgatttttgttgg

SEQ ID NO: 382149 - DNA, 120 bp, Artificial Sequence
  ENSG00000143702_3 (sequence is synthesized)
aagagatgactgtgagctcatgttgcagtctcgtagtgtggataagcaacacgctgtcatcaactatgatgcgtctacggatgagcatttagtgaaggatttgggcagcctcaatgggac

SEQ ID NO: 382150 - DNA, 120 bp, Artificial Sequence
  ENSG00000143702_4 (sequence is synthesized)
ttttgtgaatgatgtaaggattccggaacagacttatatcaccttgaaacttgaagataagctgagatttggatatgatacaaatcttttcactgtagtacaaggagaaatgagggtccc

SEQ ID NO: 382151 - DNA, 120 bp, Artificial Sequence
  ENSG00000143702_5 (sequence is synthesized)
tgaagaagctcttaagcatgagaagtttaccattcagcttcagttgtcccaaaaatcttcagaatcagaattatccaaatctgcaagtgccaaaagcatagattcaaaggtagcagacgc

SEQ ID NO: 382152 - DNA, 120 bp, Artificial Sequence
  ENSG00000143702_6 (sequence is synthesized)
tgctactgaagtgcagcacaaaactactgaagcactgaaatccgaggaaaaagccatggatatttctgctatgccccgtggtactccattatatgggcagccgtcatggtggggggatga

SEQ ID NO: 382153 - DNA, 120 bp, Artificial Sequence
  ENSG00000143702_7 (sequence is synthesized)
tgaggtggatgaaaaaagagctttcaagacaaatggcaaacctgaagaaaaaaaccatgaagctggaacatcagggtgcggcatagatgccaagcaagttgaggaacaatctgcagctgc

SEQ ID NO: 382154 - DNA, 120 bp, Artificial Sequence
  ENSG00000143702_8 (sequence is synthesized)
aaatgaagaagtactttttcctttctgtagggaaccaagttattttgaaatccctacaaaagaattccagcaaccatcacaaataacagaaagcactattcatgaaatcccaacaaaaga

SEQ ID NO: 382155 - DNA, 120 bp, Artificial Sequence
  ENSG00000143702_9 (sequence is synthesized)
cacgccaagttcccatataacaggtgcagggcatgcttcatttaccattgaatttgatgacagtaccccagggaaggtaactattagagaccatgtgacaaagtttacttctgatcagcg

SEQ ID NO: 382156 - DNA, 120 bp, Artificial Sequence
  ENSG00000143702_10 (sequence is synthesized)
ccacaagtccaagaagtcttctcctggaactcaagacttgctggggattcaaacaggaatgatggcacccgaaaacaaagttgctgactggctagcacaaaacaaccctcctcaaatgct

SEQ ID NO: 382157 - DNA, 120 bp, Artificial Sequence
  ENSG00000143702_11 (sequence is synthesized)
atgggaaagaacagaagaggattctaaaagcattaaaagtgatgttccagtgtacttgaaaaggttgaaaggaaataaacatgatgatggtacgcaaagtgattcagagaacgctggggc

SEQ ID NO: 382158 - DNA, 120 bp, Artificial Sequence
  ENSG00000143702_12 (sequence is synthesized)
tcacaggcgctgtagcaaacgtgcaactcttgaggaacacttaagacgccaccattcagaacacaaaaagctacagaaggtccaggctactgaaaagcatcaagaccaagctgttactag

SEQ ID NO: 382159 - DNA, 120 bp, Artificial Sequence
  ENSG00000143702_13 (sequence is synthesized)
ctctgcgcatcacagaggggggcatggtgttccacatgggaaattgttaaaacagaaatcagaggagccatcggtgtcaatacccttcctacaaactgcattattaagaagttcagggag

SEQ ID NO: 382160 - DNA, 120 bp, Artificial Sequence
  ENSG00000143702_14 (sequence is synthesized)
tcttgggcacagaccaagccaggagatggataaaatgttaaaaaatcaagcaacttctgctacttctgaaaaggataatgatgatgaccaaagtgacaagggtacttataccattgagtt

SEQ ID NO: 382161 - DNA, 120 bp, Artificial Sequence
  ENSG00000143702_15 (sequence is synthesized)
agagaatcccaacagtgaggaagtggaagcaagaaaaatgattgacaaggtgtttggagtagatgacaatcaggattataataggcctgttatcaacgaaaaacataaagatctaataaa

SEQ ID NO: 382162 - DNA, 120 bp, Artificial Sequence
  ENSG00000143702_16 (sequence is synthesized)
agattgggctctcagttctgctgcagcagtaatggaagaaagaaaaccactgactacatctggatttcaccactcagaggaaggcacatcttcatctggaagcaaacgttgggtttcaca

SEQ ID NO: 382163 - DNA, 120 bp, Artificial Sequence
  ENSG00000143702_17 (sequence is synthesized)
gtgggctagtttggctgccaatcatacaaggcatgatcaagaagaaaggataatggaattttctgcacctcttcctttagagaatgagacagagatcagtgagtctggcatgacagtgag

SEQ ID NO: 382164 - DNA, 120 bp, Artificial Sequence
  ENSG00000143702_18 (sequence is synthesized)
aagtactggctctgcaacttccttggctagccagggagagagaaggagacgaactcttccccagcttccaaatgaagaaaagtctcttgagagccacagagcaaaggttgtaacacagag

SEQ ID NO: 382165 - DNA, 120 bp, Artificial Sequence
  ENSG00000143702_19 (sequence is synthesized)
gtcagagataggagaaaaacaagacacagaacttcaggagaaagaaacacctacacaggtataccagaaagataaacaagatgctgacagacccttgagtaaaatgaacagggcagtaaa

SEQ ID NO: 382166 - DNA, 120 bp, Artificial Sequence
  ENSG00000143702_20 (sequence is synthesized)
tggagagactctcaaaactggtggagataataaaaccctacttcacttaggcagctctgctcctggaaaagagaaaagtgaaactgataaggaaacttctttggtaaagcaaacattagc

SEQ ID NO: 382167 - DNA, 120 bp, Artificial Sequence
  ENSG00000143702_21 (sequence is synthesized)
aaaacttcaacaacaagaacaaagggaggaggctcagtggacacctactaaattgtcttccaaaaatgtttcaggtcagacagataaatgtagggaggaaacttttaaacaagaatcaca

SEQ ID NO: 382168 - DNA, 120 bp, Artificial Sequence
  ENSG00000143702_22 (sequence is synthesized)
acctccagaaaaaaattcaggacattctacaagcaaaggagacagagtggcacaaagtgagagcaagagaagaaaagctgaggaaattctgaaaagtcagactccaaagggaggagacaa

SEQ ID NO: 382169 - DNA, 120 bp, Artificial Sequence
  ENSG00000143702_23 (sequence is synthesized)
gaaggaatcctccaagtcattagtgcgacaagggagcttcactatagaaaaacccagcccaaacatacccatagaacttattccccatataaataaacagacttcctctactccttcttc

SEQ ID NO: 382170 - DNA, 120 bp, Artificial Sequence
  ENSG00000143702_24 (sequence is synthesized)
tttagcattaacatctgcaagtagaatacgagaaagaagtgagtctttggatcctgattctagtatggacacaacccttattctaaaagacacagaagcagtaatggcttttctagaagc

SEQ ID NO: 382171 - DNA, 120 bp, Artificial Sequence
  ENSG00000143702_25 (sequence is synthesized)
taaactacgtgaagataataaaactgatgaaggaccagatactcccagttataatagagacaattctatttcaccagaatctgatgtagatacagctagtacaatcagtctggttactgg

SEQ ID NO: 382172 - DNA, 120 bp, Artificial Sequence
  ENSG00000143702_26 (sequence is synthesized)
agaaactgaaagaaagtcaacccaaaagcgaaagagtttcactagcctctataaagataggtgttccacaggttctccttccaaagatgttacaaaatcatcatcttcaggtgctaggga

SEQ ID NO: 382173 - DNA, 120 bp, Artificial Sequence
  ENSG00000143702_27 (sequence is synthesized)
aaaaatggaaaagaaaacaaaaagtcgttccacagatgtgggttcaagagcagatggtcgtaaatttgttcagtccagtgggagaataagacagccctcagtagacttaacagatgatga

SEQ ID NO: 382174 - DNA, 120 bp, Artificial Sequence
  ENSG00000143702_28 (sequence is synthesized)
ccaaacctctagtgtacctcattctgccatctctgatattatgtcatctgatcaagaaacttactcttgtaaacctcatggacggactccacttacctcagctgatgagcatgtacattc

SEQ ID NO: 382175 - DNA, 120 bp, Artificial Sequence
  ENSG00000143702_29 (sequence is synthesized)
gacttccctcttgcgcagagcacgacttggtgaagcttcagacagtgaacttgctgatgctgacaaagcatctgttgcttctgaagtatccacaacaagttctacatcaaaacctcccac

SEQ ID NO: 382176 - DNA, 120 bp, Artificial Sequence
  ENSG00000143702_30 (sequence is synthesized)
aggaaggcgtaacatctctcggattgatttattggctcagcctcgtagaacacgacttggctcactgtcagctcgtagtgactctgaagcaacaatttctagaagtagtgcctcttcgag

SEQ ID NO: 382177 - DNA, 120 bp, Artificial Sequence
  ENSG00000143702_31 (sequence is synthesized)
gaccgcagaagccatcattagaagtggagccagactagtaccatcagataaattttctcctagaattagagctaacagtatctctcgactctcagactccaaggtcaaaagtatgacctc

SEQ ID NO: 382178 - DNA, 120 bp, Artificial Sequence
  ENSG00000143702_32 (sequence is synthesized)
agctcatggctctgcttcagtaaattcaagatggaggcgctttcctactgattatgcttccacctcagaagatgaatttggatcaaaccgtaattcccctaaacatacccgtctacgtac

SEQ ID NO: 382179 - DNA, 120 bp, Artificial Sequence
  ENSG00000143702_33 (sequence is synthesized)
ttctccagccctgaaaaccactcgcttgcagagcgctggatcagcaatgcctactagttcttcattcaaacaccggattaaagagcaggaagactacatccgagattggactgctcatcg

SEQ ID NO: 382180 - DNA, 120 bp, Artificial Sequence
  ENSG00000143702_34 (sequence is synthesized)
agaagagatagccaggatcagccaagatcttgctctcattgctcgggagatcaacgatgtagcaggagagatagattcagtgacttcatcaggcactgcccctagtaccacagtaagcac

SEQ ID NO: 382181 - DNA, 120 bp, Artificial Sequence
  ENSG00000143702_35 (sequence is synthesized)
tgctgccaccacccctggctctgccatagacactagagaagagttggttgatcgtgtttttgatgaaagcctcaacttccgaaagattcctccattagttcattccaaaacaccagaagg

SEQ ID NO: 382182 - DNA, 120 bp, Artificial Sequence
  ENSG00000143702_36 (sequence is synthesized)
aaacaacggtcgatctggtgatccaagacctcaagcagcagagcctcccgatcacttaacaattacaaggcggagaacctggagcagggatgaagtcatgggagataatctgctgctgtc

SEQ ID NO: 382183 - DNA, 120 bp, Artificial Sequence
  ENSG00000143702_37 (sequence is synthesized)
atccgtctttcagttctctaagaagataagacaatctatagataagacagctggaaagatcagaatattatttaaagacaaagatcggaattgggatgacatagaaagcaaattaagagc

SEQ ID NO: 382184 - DNA, 120 bp, Artificial Sequence
  ENSG00000143702_38 (sequence is synthesized)
cgaaagtgaagtccctattgtgaaaacctcaagcatggagatttcttctatcttacaggaactgaaaagagtagaaaagcagctgcaagcaatcaatgctatgattgatcctgatggaac

SEQ ID NO: 382185 - DNA, 120 bp, Artificial Sequence
  ENSG00000143702_39 (sequence is synthesized)
tttggaggctctgaacaacatgggatttcccagtgctatgttgccatctccaccgaaacagaagtccagccctgtgaataaccaccacagcccgggtcagacaccaacacttggccaacc

SEQ ID NO: 382186 - DNA, 120 bp, Artificial Sequence
  ENSG00000143702_40 (sequence is synthesized)
agaagctagggctcttcatcctgctgctgtttcagccgcagctgaatttgagaatgctgaatctgaggctgatttcagtatacatttcaatagattcaaccccgatggggaagaggaaga

SEQ ID NO: 382187 - DNA, 120 bp, Artificial Sequence
  ENSG00000143702_41 (sequence is synthesized)
tgttacagtacaagaatgactttctcttgattgttgaaaaatcattacctgtggaatggctaggaatattggaagcagcatagtgttgatgtacgcaaaacaagacagcttggtcagcta

SEQ ID NO: 382188 - DNA, 120 bp, Artificial Sequence
  ENSG00000143702_42 (sequence is synthesized)
caatcttggaatccctgtcttcttaattttatttatttatttttgacgtataatgtagtatatcaatcctttcaaactatttagataaccacttgatgcacaaataggaaaaagcagatt

SEQ ID NO: 382189 - DNA, 120 bp, Artificial Sequence
  ENSG00000143702_43 (sequence is synthesized)
gtggcagtgtcgccttttgtggttttatgattttcaaattgaatttaatgattacaccctttcccttcatagatcttttttcttttttttaagccatgctgtgacctacaagcaaactaa

SEQ ID NO: 382190 - DNA, 120 bp, Artificial Sequence
  ENSG00000143702_44 (sequence is synthesized)
atagccaacatttctgaacccctaagtctcctgtgccaagctgctccctgaaatggacttcttcatctgtacagatttgttaaaccattctatttgcttcttaataataggatttatatt

SEQ ID NO: 382191 - DNA, 120 bp, Artificial Sequence
  ENSG00000143702_45 (sequence is synthesized)
agtactcattaccattggacacaatgacataagtactctccacagtaaagcagacctttcacaacagtcactctgtgtcctaaaattttccaacatagatgtgatttatataactttgtt

SEQ ID NO: 382192 - DNA, 120 bp, Artificial Sequence
  ENSG00000143702_46 (sequence is synthesized)
gatacgtaaattgtcttggggtttacggaaattaactattatgtttgcactaagatttgctgggagtggtaggtggacatatctatatatcaataaggactaaccgtcttttttgtacat

SEQ ID NO: 382193 - DNA, 120 bp, Artificial Sequence
  ENSG00000143702_47 (sequence is synthesized)
aggagattgataatactgtatttgttttaagcccacagtgttttactccactttcaaaaagatcaatttggcactttttttcattttttttaatggaaataagatttggtctctcatttt

SEQ ID NO: 382194 - DNA, 120 bp, Artificial Sequence
  ENSG00000143702_48 (sequence is synthesized)
aggttaaatgataactagaaagattaaactagacagatagtttaggtggagtatatttttaaaactcagaacatgtatattggtcctgtgttaccaagtttatatgtgacagttgaaaaa

SEQ ID NO: 382195 - DNA, 120 bp, Artificial Sequence
  ENSG00000143702_49 (sequence is synthesized)
gaaattcccttgaaatgatcatgaggttaaaattttcttcattaggggacttggagaaccagtagtcgtaagattagttgatagtttcactcccaagcaatgaattgcttctgtgtgttt

SEQ ID NO: 382196 - DNA, 120 bp, Artificial Sequence
  ENSG00000143702_50 (sequence is synthesized)
ccctgtaggactcaatagtaaatgctgtctgtcttacacatttataaggaccctgcaagacgacgacaaaggcctttggcctgtgctactaaacaagaagcctatgaaaaatttcttctt

SEQ ID NO: 382197 - DNA, 120 bp, Artificial Sequence
  ENSG00000143702_51 (sequence is synthesized)
taaacttgttttttctctttccagtaagttcacatttggataattttaaaaagaaaagtaattacctttgtgtttccagaacactataattggggtgtatcttaattcagttaaatatta

SEQ ID NO: 382198 - DNA, 120 bp, Artificial Sequence
  ENSG00000143702_52 (sequence is synthesized)
ttagtagacctggattttcccccttgaccccatcagtctataaaggttaaactgcaacttttatgaaatggtctttaatatttccacaataatcctgtgctatatttgttttaagaaaca

SEQ ID NO: 382199 - DNA, 120 bp, Artificial Sequence
  ENSG00000143702_53 (sequence is synthesized)
aagtaactctatacacttcaagactttacaggattttttaaatcctgtattgttggatcaattaataaagatgcaaaaaaactttatagagatgtaaaaacaaaactataatggatctcc

SEQ ID NO: 382200 - DNA, 120 bp, Artificial Sequence
  ENSG00000143702_54 (sequence is synthesized)
tatttttctttaaatacaaaaaaaaaaaggtaaatgaactattctccttgtaaagctaaattccccattctgtctaataaaggaagactgaaaaaaggttttaaagaacataaatggaaa

SEQ ID NO: 382201 - DNA, 120 bp, Artificial Sequence
  ENSG00000143702_55 (sequence is synthesized)
gatacaaatgctttgaaggaataaacgaaatgttaaaacagggtcaatccatttgaagaaaaagttggacaaaataatcagcattgctccctcttttatttaatatttgggtactgatta

SEQ ID NO: 382202 - DNA, 120 bp, Artificial Sequence
  ENSG00000143702_56 (sequence is synthesized)
tatccacatggaagtagaaggtaaggagtttaggaaaatactagaatctactctgcttacattcttgtttaagtgtttacacagtttggttcaattataaacatttggccttttactatg

SEQ ID NO: 382203 - DNA, 120 bp, Artificial Sequence
  ENSG00000143702_57 (sequence is synthesized)
acatttggccttttactatgttatttttattttgtatgaatacattatcctccttatttatttttgttacatttattacttatgttattttgttatgcatttacaactccatttttaaat

SEQ ID NO: 382204 - DNA, 120 bp, Artificial Sequence
  ENSG00000143702_58 (sequence is synthesized)
gtaagaataaaaatcagattacatttcctagctacattttctttttctttactttgtatgttattttcaaatgcttatcaggtacatagcactttggggaccatccaatagaatatgaaa

SEQ ID NO: 382205 - DNA, 120 bp, Artificial Sequence
  ENSG00000143702_59 (sequence is synthesized)
aaaacacaattcacaatatagatatgccagaatttctatttattgggtgcattcctatactaaaatacatatatatttttagttattatgcctgttcctaaaagtaatcatggaaaagtt

SEQ ID NO: 382206 - DNA, 120 bp, Artificial Sequence
  ENSG00000143702_60 (sequence is synthesized)
ggtggactcagctttttttttccctctctctctctatttatgtagtttcagcatcagtctcactgaagtgctattgcatatataatttgagcatcaaagaatgtaactggggagaggaca

SEQ ID NO: 382207 - DNA, 120 bp, Artificial Sequence
  ENSG00000143702_61 (sequence is synthesized)
ggggaatgtttaattttagtccagcctagggattgctttcaggtggaacatgatgcatgaatcagcctcctgggatgaatgtaagaatttaaacctacttttccttccatccctcccgtt

SEQ ID NO: 382208 - DNA, 120 bp, Artificial Sequence
  ENSG00000143702_62 (sequence is synthesized)
aactgttttatgcatcacagctatattgcctattaaattcaaacttttcaatatcctgtgtcttctaagacctacgctctctgattaatccacattatgcatttagtgtgtatttaaaat

SEQ ID NO: 382209 - DNA, 120 bp, Artificial Sequence
  ENSG00000143702_63 (sequence is synthesized)
tcttatgtttaaaattaggaatctaataattgaacaaggacatgactgtattaaactgcatggggcagcgtgaagaatctctagtgaagggaaggagcatgattgcagaagaagaaagac

SEQ ID NO: 382210 - DNA, 120 bp, Artificial Sequence
  ENSG00000143702_64 (sequence is synthesized)
tgaggaagtggaagcaagaaaaatgattgacaaggtgacagcctcttctttttataagctcctttatcagacgtaacctcctcaaaagcaaagactgtcatacagattttgtaatcccct

SEQ ID NO: 382211 - DNA, 120 bp, Artificial Sequence
  ENSG00000143702_65 (sequence is synthesized)
agcacttttgtatatgcttctaaatttctacatgggactttttccttctctattgtgtgttttctttttgtatccaggaaataaacatgatgatggtacgcaaagtgattcagagaacgc

SEQ ID NO: 382212 - DNA, 90 bp, Artificial Sequence
  ENSG00000143702_66 (sequence is synthesized)
aatacaaaaattagccaggcattgtggcgggcgcctatcatcccaactcctttgggggctgaggcaagagaattacttgaacctgggagg

SEQ ID NO: 382213 - DNA, 120 bp, Artificial Sequence
  ENSG00000143702_67 (sequence is synthesized)
aaatgttaaacttttcatctgctacaatcatctcactgaaaaagttattgtatttcattttagtttaaatattttaatttgaatcttgtttgctagatatcataattatttcatatcatg

SEQ ID NO: 382214 - DNA, 120 bp, Artificial Sequence
  ENSG00000143702_68 (sequence is synthesized)
ttgctattaatgtagtaagtaccatgtagataatattaagtgttccaaataaagtgagagtgaaattcattgcttgtaaagtgataacatttagctaaaagtaggctaatttttgttatt

SEQ ID NO: 382215 - DNA, 120 bp, Artificial Sequence
  ENSG00000143702_69 (sequence is synthesized)
gctttccctgcaggagatttcttctatcttacaggaactgaaaagagtagaaaagcagctgcaagcaatcaatgctatgattgatcctgatggaactttggaggctctgaacaacatggg

SEQ ID NO: 382216 - DNA, 120 bp, Artificial Sequence
  ENSG00000143702_70 (sequence is synthesized)
cacctcactttgctttttgctttttctcaaggttaaaaatgtatcatcagaatgaatatgtttacctttggaaaaatttgtcccaaagtaaatatctatccagtactactttataacttt

SEQ ID NO: 382217 - DNA, 120 bp, Artificial Sequence
  ENSG00000143702_71 (sequence is synthesized)
aaatttattagtaattcaaaacataaatagacttacagattttattcaacagtacttcagaaatccatgctgctattgcttatttctgattcctataattaaaatttaaaatgtaatgaa

SEQ ID NO: 382218 - DNA, 120 bp, Artificial Sequence
  ENSG00000143702_72 (sequence is synthesized)
acagtatttgaacatggtttgtgaattgtaatattccacacaaatataattctatattgcttatatattgaaataatatattttatcagcatttgatgagtaccaagaagccattaaatt

SEQ ID NO: 382219 - DNA, 120 bp, Artificial Sequence
  ENSG00000143702_73 (sequence is synthesized)
attcatattttcactcaagtaagaaatatttgcaattgaaaagtactccagttaaacatcgatggatagagcttgcttagttgtttatcattagcgaaatttttcatctgaatgtttact

SEQ ID NO: 382220 - DNA, 120 bp, Artificial Sequence
  ENSG00000143702_74 (sequence is synthesized)
caccacactatggaaaacatggtcttccaattgtttttgattcttcattgtttttaattcaccgaagtgtaatgtttctatctctaaggagtagtagacttatggtttttgtgaggtatg

SEQ ID NO: 382221 - DNA, 120 bp, Artificial Sequence
  ENSG00000143702_75 (sequence is synthesized)
tgtacgtcagttattgaaaattgtgccgtgtgtgcgctctcatggtgttttgaagtcatgacttttattttacctcctttaaatgataacataataattctttttttaataattaaacta

SEQ ID NO: 382222 - DNA, 120 bp, Artificial Sequence
  ENSG00000143702_76 (sequence is synthesized)
tgaagatgtgtgattattttcagtaggcagacatctaagtaagccctaagtcttgagttaagagtggaggggaagttgatatgaaatttcatctttttatttttgattggtttacatcta

SEQ ID NO: 382223 - DNA, 120 bp, Artificial Sequence
  ENSG00000143702_77 (sequence is synthesized)
tctgaacaacatgggatttcccagtgctatgttgccatctccaccgaaacagaagtccagccctgtgaataaccaccacagcccggattcaaccccgatggggaagaggaagatgttaca

SEQ ID NO: 382224 - DNA, 120 bp, Artificial Sequence
  ENSG00000143702_78 (sequence is synthesized)
ggaagaattaaatttaacatagttatatattttggattttgaaaataaaacctgtgtagatgaatctcgattttataaaggaaatacatttgaagtgcttataaaaagaaagagtaattg

SEQ ID NO: 382225 - DNA, 120 bp, Artificial Sequence
  ENSG00000143702_79 (sequence is synthesized)
gtttattgaagatgttgtgcctctgttactacttgagaatggaataacttctgtctaatcataaaaattgtaatgccaatattggtactttttcaaattactgtgttctcataaaggttt

SEQ ID NO: 382226 - DNA, 120 bp, Artificial Sequence
  ENSG00000143702_80 (sequence is synthesized)
ttactcttctctgcttttttgtgaatcatatatcagttgttattataaaaaacaagccaaatctatatagtaagaagtaagttaaacctaaataaacatattcacatattctcatgctga

SEQ ID NO: 382227 - DNA, 120 bp, Artificial Sequence
  ENSG00000143702_81 (sequence is synthesized)
aaagtggtgtcagaagtgatttagagaggttcatgatattttatttgaaactgctggtgcttagatgtttgaggaaatcaagtttttagtgtggattagaatgaaatattcatcagaaaa

SEQ ID NO: 382228 - DNA, 120 bp, Artificial Sequence
  ENSG00000143702_82 (sequence is synthesized)
atgtgctccctgagtaggctgtgactatcactgaacttgattctcaccgtgattaatctagttcttgcctttgtgatgtaaaagtagtaatcctcctaaaatggacctttactttcataa

SEQ ID NO: 382229 - DNA, 120 bp, Artificial Sequence
  ENSG00000143702_83 (sequence is synthesized)
gtcatgcaccctgcctggcgactgcaccccgtggaggctctggctctgtagtaaacccgggggaggagagagtggcttcctgtcggcttcattgtcctaggattcagatgtagggttttg

SEQ ID NO: 382230 - DNA, 120 bp, Artificial Sequence
  ENSG00000143727_0 (sequence is synthesized)
gcctctgcgcgcgggaagatggcggaacaggctaccaagtccgtgctgtttgtgtgtctgggtaacatttgtcgatcacccattgcagaagcagttttcaggaaacttgtaaccgatcaa

SEQ ID NO: 382231 - DNA, 120 bp, Artificial Sequence
  ENSG00000143727_1 (sequence is synthesized)
aacatctcagagaattggagggtagacagcgcggcaacttccgggtatgagatagggaacccccctgactaccgagggcagagctgcatgaagaggcacggcattcccatgagccacgtt

SEQ ID NO: 382232 - DNA, 120 bp, Artificial Sequence
  ENSG00000143727_2 (sequence is synthesized)
gcccggcagattaccaaagaagattttgccacatttgattatatactatgtatggatgaaagcaatctgagagatttgaatagaaaaagtaatcaagttaaaacctgcaaagctaaaatt

SEQ ID NO: 382233 - DNA, 120 bp, Artificial Sequence
  ENSG00000143727_3 (sequence is synthesized)
gaactacttgggagctatgatccacaaaaacaacttattattgaagatccctattatgggaatgactctgactttgagacggtgtaccagcagtgtgtcaggtgctgcagagcgttcttg

SEQ ID NO: 382234 - DNA, 120 bp, Artificial Sequence
  ENSG00000143727_4 (sequence is synthesized)
gagaaggcccactgaggcaggttcgtgccctgctgcggccagcctgactagaccccaccctgaggtcctgcatttctcagtcggtgtgtaatcacgttccagggcccaaagcccagctct

SEQ ID NO: 382235 - DNA, 120 bp, Artificial Sequence
  ENSG00000143727_5 (sequence is synthesized)
ttgttcagttgacttactgtttcttaccttaaaaagtaattgtagatggaaatcagttgtgtttggcaggagaatcaataaaaatctttgattcagacagcttatggggtattttaagca

SEQ ID NO: 382236 - DNA, 120 bp, Artificial Sequence
  ENSG00000143727_6 (sequence is synthesized)
gttacaaaaatagtagaacaagcaacataaaacaatgaaggaaaacctcacttgaaggcccaggtcaacatctaagcctgttgagacttagataatcgagtctacctcttcagtaggttt

SEQ ID NO: 382237 - DNA, 120 bp, Artificial Sequence
  ENSG00000143727_7 (sequence is synthesized)
gtgtggatggcctggagggcaggtgccctctgctccccagtgctacctctctcttccctagggccttttgtggattgacagtagtcccctccgtaggagctcacagtctagattagaagt

SEQ ID NO: 382238 - DNA, 120 bp, Artificial Sequence
  ENSG00000143727_8 (sequence is synthesized)
gttttaatttctacacacccatagtgcacacttgtatattgaaaagatagggaagagagaaacatttatggaatcagtcgttggcaccttcaatacttcatgatttttgtcgagtttact

SEQ ID NO: 382239 - DNA, 120 bp, Artificial Sequence
  ENSG00000143727_9 (sequence is synthesized)
tcatgaggaggtcagcccattggctcccatctgaaccactttgcctctgaaacttaattacatccagaaagaaggacacttgtatgctagtctatggtcagttgaggaatatgactgttt

SEQ ID NO: 382240 - DNA, 120 bp, Artificial Sequence
  ENSG00000143727_10 (sequence is synthesized)
ttatatgcacatgtaacccaaatgtccaatataaattggcttattttttaaaataattttaaaagttgggaaaagtgttattatttggcatgcttaaatattgaataagtattcttcatc

SEQ ID NO: 382241 - DNA, 120 bp, Artificial Sequence
  ENSG00000143727_11 (sequence is synthesized)
agcatttaataaatgtataggcagatgtaaggtaatttctgtgtattttgagataatgtcaaaatcatgaatatttcaaaataaactggggagttataaaaatacaactagagatataaa

SEQ ID NO: 382242 - DNA, 120 bp, Artificial Sequence
  ENSG00000143727_12 (sequence is synthesized)
attgacagcggtgctgtttctgactggaacgtgggccggtccccagacccaagagctgtgagctgcctaagaaatcatggcattcacacagcccataaagcaagacaggtagacaagctc

SEQ ID NO: 382243 - DNA, 120 bp, Artificial Sequence
  ENSG00000143727_13 (sequence is synthesized)
ttgttcaatttctaatatatagagtccagtaacttgagaagtagcgaaaggattaaccagacttgtatattaatgaatgtgtttatttagggtgagcttaaccagctatggtgtgtccat

SEQ ID NO: 382244 - DNA, 120 bp, Artificial Sequence
  ENSG00000143727_14 (sequence is synthesized)
tttgtttcacttctggttgcacggtgttgaaagacttgcctgactttggaatttacttattaaaatgcacataaaagctaggtaatttataatgagagagcctgactgtgagctggggct

SEQ ID NO: 382245 - DNA, 120 bp, Artificial Sequence
  ENSG00000143727_15 (sequence is synthesized)
agtgcgcctgcgccgcgtcggcgtgcggaacgccgcggtgtctcggcgcctctgcgcgcgggaagatggcggaacaggctaccaagtccgtgctgtttgtgtgtctgggtaagatttttt

SEQ ID NO: 382246 - DNA, 120 bp, Artificial Sequence
  ENSG00000143727_16 (sequence is synthesized)
ttcttagtgaccacctctgaccacccaacttaatacttttactcctccctgccccaaagctgtatgtatctcctctctgctttatttcctccagggcatctgtgcctcctgtgtgttgcc

SEQ ID NO: 382247 - DNA, 120 bp, Artificial Sequence
  ENSG00000143727_17 (sequence is synthesized)
tgcccccatgtggaagggcagctccatgggacgcggctctgtccacttagcttggtgtttgttactggggcccaggatgttcagtgcttgtggaatgaaaaatagagtagaataatgaag

SEQ ID NO: 382248 - DNA, 120 bp, Artificial Sequence
  ENSG00000143727_18 (sequence is synthesized)
gggattaaatatgtgacattttagtatgttgactgtattatacactgctactaaggaattgaagccgatgtataaacattgtgtctacacattatactattttatgattattgtatggaa

SEQ ID NO: 382249 - DNA, 120 bp, Artificial Sequence
  ENSG00000143727_19 (sequence is synthesized)
ctttataatacaaaatttctttgcagtacaattttgagaaataggttaactctattttaacttaaaagtaccctaaaaattatttaattgtttattagtgagtaacaggctcaaatacag

SEQ ID NO: 382250 - DNA, 120 bp, Artificial Sequence
  ENSG00000143727_20 (sequence is synthesized)
acaaaaaccacgcgcccgccgggccgcgctcaggccttcgccctcagggacttcggaaccgccccgtcctcaagatcgaaaagcccagagccccgcggcggctccaagcacggtgttggg

SEQ ID NO: 382251 - DNA, 120 bp, Artificial Sequence
  ENSG00000143727_21 (sequence is synthesized)
ggtgggggtctcagggagcgcccaggcccaaggccgccctggtccggcgtggaccccgcggggctcaaggcaggttccccgcgtgacccgcccagcccctctatgcgaactcgaacgaca

SEQ ID NO: 382252 - DNA, 120 bp, Artificial Sequence
  ENSG00000143727_22 (sequence is synthesized)
agcccgccctgcaggtgacccgcggcccttcctcctccaggtgaacggcggcccagtccctgcaggtgacccgcggaccctccccgcccgtcctactaccgtcataggaccgcctccgca

SEQ ID NO: 382253 - DNA, 120 bp, Artificial Sequence
  ENSG00000143727_23 (sequence is synthesized)
ggcgcactggagccgattgcgcaggcgtggctctcacacgcgctgccctgttggcgttggtgcgggactgcgcaggcgcgcggggcaagagggtggcagtgcgcctgcgccgcgtcggcg

SEQ ID NO: 382254 - DNA, 120 bp, Artificial Sequence
  ENSG00000143727_24 (sequence is synthesized)
ggccaagtaatttgttgtccagatttactttttctattttaaaggttttaatagtcagtgatggtcaccatatgtagaattattttatttagaacagcaaaaaacttagtaatctagaat

SEQ ID NO: 382255 - DNA, 120 bp, Artificial Sequence
  ENSG00000143727_25 (sequence is synthesized)
tgtctcttaggtatttacaaggaaatacaccttagaaaagggaaagtctagttgttaatagcatgatttaattggaaaactagcttggctgttatagttttgtatcaagcatattgttct

SEQ ID NO: 382256 - DNA, 120 bp, Artificial Sequence
  ENSG00000143727_26 (sequence is synthesized)
gcatgagaacgattttgatatttttgctgtaatgattcctgggcagggcagtgttttattgattctcaggtcaaagctctgcaaccataggttcctattattatcccatcttgtaaaaga

SEQ ID NO: 382257 - DNA, 120 bp, Artificial Sequence
  ENSG00000143727_27 (sequence is synthesized)
aaaacattttttcaactgtaaagtgccttagtaatatagggtaataccagcaacattatggatatataattatagtctattgggccacacttaagtttggagtctaataaagtcacaatc

SEQ ID NO: 382258 - DNA, 120 bp, Artificial Sequence
  ENSG00000143727_28 (sequence is synthesized)
aaattctgcaatttcaattgaagataaccttgtctttatattatgaattagaagctaaagttgatttttctaagagttctttatttaaatgaagtactctgggactgaccttttcggaaa

SEQ ID NO: 382259 - DNA, 120 bp, Artificial Sequence
  ENSG00000143727_29 (sequence is synthesized)
tggaatcttcattggtcaggtgattcaacatttttatacaatttatccatcctcatctcttcaggatttgcataccttgccagtttctactggccattgttgaaaatacatttatttgga

SEQ ID NO: 382260 - DNA, 120 bp, Artificial Sequence
  ENSG00000143727_30 (sequence is synthesized)
gaagtccaaagccaaggggctcatggggctgtgaagtccttcttgctgcatcgtcctgtggtagaaggtggaggagtcaagagagtgccccagagtgagtgagagcgagaactagaaaaa

SEQ ID NO: 382261 - DNA, 120 bp, Artificial Sequence
  ENSG00000143727_31 (sequence is synthesized)
aaacctgggtcccctcgcgcctgccatatatccggggctcttggcatctgcagccacagcccctacaagccaaggtaacatttgtcgatcacccattgcagaagcagttttcaggaaact

SEQ ID NO: 382262 - DNA, 120 bp, Artificial Sequence
  ENSG00000143740_0 (sequence is synthesized)
gcggccgccgccccaccgtaggtccgtagcaggtggtcgaagtcgggcctccccgcgggcgtcacccagcgccgccggctgccccagccctgcgtgaaggcgctggaaaacacgcagggc

SEQ ID NO: 382263 - DNA, 120 bp, Artificial Sequence
  ENSG00000143740_1 (sequence is synthesized)
aggttgggcagcaagaagccccgcacaaagtcggcgtaggagaaggcgcccggctccgagacgaaggctacccggcccggagcctggccgacgccggggacatcgacccccaggcctcgg

SEQ ID NO: 382264 - DNA, 120 bp, Artificial Sequence
  ENSG00000143740_2 (sequence is synthesized)
aagtggctgtcggcgagggcgcgcgtctcgcggtccatccagctcagcacgggtcgaaggaccctcctcctcacttccgccggagcggaaacggtgaggaccagcctcggaaccagaaga

SEQ ID NO: 382265 - DNA, 120 bp, Artificial Sequence
  ENSG00000143740_3 (sequence is synthesized)
ggaaccagaagacgcagggcgccgcgtttctgccccgccagcgcctggggctccgggcctgcacgcatgcgcgcggctcgccgcggtcttcactgcgcaggcgccgagcggccgaggcgc

SEQ ID NO: 382266 - DNA, 120 bp, Artificial Sequence
  ENSG00000143740_4 (sequence is synthesized)
tgggactcgtctggcgtccctcagaggcagaagaggcctggaccttggcgcacacagacccaggaacagatgagcagggatgtctgcatccacacctggccgtgcacctactacctggag

SEQ ID NO: 382267 - DNA, 120 bp, Artificial Sequence
  ENSG00000143740_5 (sequence is synthesized)
cccaagaggcgatgggttactggacagctgtccttaacatcgctgtcgctcaggttcatgactgacagcactggagagattctggtcagcttccccctctccagcatagttgagatcaag

SEQ ID NO: 382268 - DNA, 120 bp, Artificial Sequence
  ENSG00000143740_6 (sequence is synthesized)
aaggaggcttcacattttatcttcagctccatcaccatcctggagaagggccatgccaagcactggttcagctccctgcggccaagtcgaaatgtggtcttcagcatcatcgagcatttc

SEQ ID NO: 382269 - DNA, 120 bp, Artificial Sequence
  ENSG00000143740_7 (sequence is synthesized)
tggagggagctgctgctgtctcagcctggagccgtggcagacgcatctgtcccaaggacccggggcgaggagctgacgggactcatggctggatcccagaaacgcctggaggacacggcg

SEQ ID NO: 382270 - DNA, 120 bp, Artificial Sequence
  ENSG00000143740_8 (sequence is synthesized)
agggtcctgcaccaccagggccagcagctggacagcgtcatgagaggcctggacaagatggagtcagacctggaggtggcggacagattgctgacagaactggaatctcctgcttggtgg

SEQ ID NO: 382271 - DNA, 120 bp, Artificial Sequence
  ENSG00000143740_9 (sequence is synthesized)
gaagggatactgataaaaattcctgctgttatttcccacagaacagagtctcacgttaaaccagggaggctcaccgtccttgtgtctgggttggaaatacatgactccagttctttgctc

SEQ ID NO: 382272 - DNA, 120 bp, Artificial Sequence
  ENSG00000143740_10 (sequence is synthesized)
atgcacaggtttgaaagagaagacgtggacgacatcaaggtccactcaccttacgaaattagcatccgccagcggtttattggaaagccagacatggcctatcgtttgatatctgccaag

SEQ ID NO: 382273 - DNA, 120 bp, Artificial Sequence
  ENSG00000143740_11 (sequence is synthesized)
atgccagaggttatccccattttagaagtgcagttcagcaagaagatggagctgttagaagatgcattggtgctcagaagcgcaagaacctcttcccccgcagagaagagctgctcagtc

SEQ ID NO: 382274 - DNA, 120 bp, Artificial Sequence
  ENSG00000143740_12 (sequence is synthesized)
tggcatgcagcatctgggctgatgggccgtaccctgcaccgtgagccacccgcaggagaccaggagggcacagcactgcacctgcagacaagcctgccagccctttctgaggcagatacc

SEQ ID NO: 382275 - DNA, 120 bp, Artificial Sequence
  ENSG00000143740_13 (sequence is synthesized)
caggaactaacccagatcctgaggaggatgaaggggctggccctggaggccgagagtgagctggagagacaagacgaagccctggatggcgttgcagcagctgtggacagggcaaccttg

SEQ ID NO: 382276 - DNA, 120 bp, Artificial Sequence
  ENSG00000143740_14 (sequence is synthesized)
accatcgacaagcacaacaggcggatgaagaggctgacctaggggcagaacgtccctgcattcctgtctcaccctgcacatcccgctgagatggagggctgggcggcagtgccagggctg

SEQ ID NO: 382277 - DNA, 120 bp, Artificial Sequence
  ENSG00000143740_15 (sequence is synthesized)
cagaggcctgtggccctccggagtggtcttcctctggatggggctgctactgtggggctgcttctgcaccaggggcctccccaggtgtgcaccatgcctgcctcccacttggctgtccct

SEQ ID NO: 382278 - DNA, 120 bp, Artificial Sequence
  ENSG00000143740_16 (sequence is synthesized)
gctgctgggcaggacccggccacatgttctgcggatgctgcagaagtgtggaccatggcgggaccccaaggacacttggcacaggcctggaagaggccgccctcgtcttgtctcggctcc

SEQ ID NO: 382279 - DNA, 120 bp, Artificial Sequence
  ENSG00000143740_17 (sequence is synthesized)
ctttcatggacagactggccttcttagctgtactataaatttgtgagtgaagttagagcccagctcacttagccagctcactttgagggcatcctataaacacccaactgttcttttatc

SEQ ID NO: 382280 - DNA, 120 bp, Artificial Sequence
  ENSG00000143740_18 (sequence is synthesized)
gtctcggttttagccaaaagtgaaattagcatgactgcatctttcaaacaaaaatattgatttctgcttttagggccccgtttccatccagaaataaagggaaatgctggcttcagagtg

SEQ ID NO: 382281 - DNA, 120 bp, Artificial Sequence
  ENSG00000143740_19 (sequence is synthesized)
atgagggcaaggctccggttcctgccctcacagggtcccagaagcaagggcagtgaggacctggcccacgtccctggcacgggctgtctgattctccttcgctgtggcgggaagatggcc

SEQ ID NO: 382282 - DNA, 120 bp, Artificial Sequence
  ENSG00000143740_20 (sequence is synthesized)
agcccgcccacacctccatcatacccagtgtgaagaggggctggggacccaccactcctgagaacagcatccttgggaagacccagctgtgagtgcacagcaggcacagtccctcaggcc

SEQ ID NO: 382283 - DNA, 120 bp, Artificial Sequence
  ENSG00000143740_21 (sequence is synthesized)
gaacgcgctggtgtccactctctggaagtcggggtgcgcaaccaaggaggccagcacctctgtgatgcgcccaacatcaaaggctgcctgttcgaaacccaacccagcaccgtcctcagc

SEQ ID NO: 382284 - DNA, 120 bp, Artificial Sequence
  ENSG00000143740_22 (sequence is synthesized)
ggctgcctccctcaggaccaggagcctcttctcagcgatgaccttgaggaagtggtaaaactcttcaaagttgatgcccgagcaggacctcatgatgacctgggcagagggaagaggcca

SEQ ID NO: 382285 - DNA, 120 bp, Artificial Sequence
  ENSG00000143740_23 (sequence is synthesized)
gtgagctaacaccatggacacagtccaagctgcaaaggacccgacatgcgcccagtccccaaggacgaagaagggaccattaagacagaggcactgagaagctgcgcggtgaccaaggga

SEQ ID NO: 382286 - DNA, 120 bp, Artificial Sequence
  ENSG00000143740_24 (sequence is synthesized)
gtctgagccatgcagcctaaaagcctcccccaggagggtagcctccatgcgtagccaccccacctggcagtggtggtgccagtcgggcatggagtccctccactcgctgacctcctcctg

SEQ ID NO: 382287 - DNA, 120 bp, Artificial Sequence
  ENSG00000143740_25 (sequence is synthesized)
cacggcgcatagctcctgctgcaagaagcgccacatgttggccaggttgaagccattgacccagttgtggttgatggagatggtgtcatcctggaaggggcacagtgcaggcaggcctga

SEQ ID NO: 382288 - DNA, 120 bp, Artificial Sequence
  ENSG00000143740_26 (sequence is synthesized)
cccagcagggcttgctcagcagggaagtgggtggcgggctcggaccacctcaggccacagtgaacccagagcaagtagacccagggaccggcagtgggtgaaacagaggctaggcctcag

SEQ ID NO: 382289 - DNA, 120 bp, Artificial Sequence
  ENSG00000143740_27 (sequence is synthesized)
cgacaccaccttgtgaaggggtcagcctcacccatgagccaccccattccagcccagctctggctgggagagtggggaggtggtgctgccgtcttcctgcaggaaggcccctgatagggg

SEQ ID NO: 382290 - DNA, 120 bp, Artificial Sequence
  ENSG00000143740_28 (sequence is synthesized)
gcaggagaagcagcacattaccaggttgtgcacctggtggtgccagccactgggcacaaacaccatctcgcccgcttcctgcgtgatctccaagggtgggccagcaagctggttccgtgg

SEQ ID NO: 382291 - DNA, 120 bp, Artificial Sequence
  ENSG00000143740_29 (sequence is synthesized)
gtgcaggtgtgtgtcgcagagtgctggggaggtcacgtcgtagggcaggttgccgtggcggtcccgcagggcctcttcctgccctggggggaagaggagccacttcttcctcccacagac

SEQ ID NO: 382292 - DNA, 120 bp, Artificial Sequence
  ENSG00000143740_30 (sequence is synthesized)
attgacagaccagctgaaggagcggaagatgtcagcatggaacggggacctgcggcagcaagagcgcctggttcatgcctgtaggggctggtatgggctttgcttggcaccccagaggcc

SEQ ID NO: 382293 - DNA, 120 bp, Artificial Sequence
  ENSG00000143740_31 (sequence is synthesized)
tggtccaactgaaggaggggtggccccttggtctcaagggatggcacccactgtgaggcctgtgccaagcagcccccctcctgccaccctgggcctcccagtccgttctgtcaccaggcc

SEQ ID NO: 382294 - DNA, 120 bp, Artificial Sequence
  ENSG00000143740_32 (sequence is synthesized)
ccttcgggttccactcccacatccgtggcctcaccagctgcccgcaggccccgcgtagacaaagcggtagtcatccacatccagtgcatcccagaactcattcagccagtcggacgagaa

SEQ ID NO: 382295 - DNA, 120 bp, Artificial Sequence
  ENSG00000143740_33 (sequence is synthesized)
gtacacaggcagggtgaaaacgtcctccaccggaaagtccctgtgaggagggcgcaagggcaccaccgacagcacgtgaggcacgaggagactagggcagcacgagtggggcaactgaga

SEQ ID NO: 382296 - DNA, 120 bp, Artificial Sequence
  ENSG00000143740_34 (sequence is synthesized)
ccaatcggctccagtggagcttccagatggctgcagcccccaaagagccccagaccctcctctgagccagacgctgctggcgggggagggggcggggcagtctgactacaatggttctgc

SEQ ID NO: 382297 - DNA, 120 bp, Artificial Sequence
  ENSG00000143740_35 (sequence is synthesized)
ggggcggggcagtctgactacaatggttctgcttattagaaagtactgatcatgcctataatcccagtgctttgagatgctgaggtggatgcatcacctgagctcaggagttcaagacca

SEQ ID NO: 382298 - DNA, 120 bp, Artificial Sequence
  ENSG00000143740_36 (sequence is synthesized)
cttcactgcgcaggcgccgagcggccgaggcgccgcggtcggctctgggactcgtctggcgtccctcagattgctgacagaactggaatctcctgcttggtggccctttagctccaagct

SEQ ID NO: 382299 - DNA, 120 bp, Artificial Sequence
  ENSG00000143740_37 (sequence is synthesized)
gttggtgatgctttgctccgagtctgcaggagctttgtggagacagagactttcctagcagggcagcaagcggaagcttttcttccagaacagcctttgctcagggcatgagggagccgg

SEQ ID NO: 382300 - DNA, 120 bp, Artificial Sequence
  ENSG00000143740_38 (sequence is synthesized)
ctgggggaccatggccataagctggcagtgtcagccacgcatcagttgcgtttctttgttcaggttgtgcctcttgctgcctgcctgagtcacccagggctgctccccttcctggctctg

SEQ ID NO: 382301 - DNA, 120 bp, Artificial Sequence
  ENSG00000143740_39 (sequence is synthesized)
acgccctcagcgggtcccacaagccgctcaggaccacagagtctggccatgggtctggccaggcatccactgatgctctaagctgcagcttctcttaggaacacttctatcaggtctggc

SEQ ID NO: 382302 - DNA, 120 bp, Artificial Sequence
  ENSG00000143740_40 (sequence is synthesized)
tcgcaggcatgccccagggccagcctggattgtactgtccttcaagcactccttgctctatttctttgaagtttataaaagtttgtttcccccaaaacccaaagcacttttaatcaggta

SEQ ID NO: 382303 - DNA, 120 bp, Artificial Sequence
  ENSG00000143740_41 (sequence is synthesized)
gtttctgtggaggtcgaactggctggaaggaaggctggttcctggatttctttactcatgtagcagggactcaaggaagtctgatttgcgcctcgcctctgactcagagcccatgaaggt

SEQ ID NO: 382304 - DNA, 120 bp, Artificial Sequence
  ENSG00000143740_42 (sequence is synthesized)
tcctgtgtgaggccactggctgcctcggagctgacagcatcctgcacaatggctagatggcttgtcaccccaggccgcagaggaacaactgtttctagggtttggccagacttcacattc

SEQ ID NO: 382305 - DNA, 120 bp, Artificial Sequence
  ENSG00000143740_43 (sequence is synthesized)
tccattctttccatccctgttatgtggaatgcacacgatgccatgtaattacttcagtcccttctcaaaggaaaaagaatctggacctgcactccaggacactagcagtttgaaggttcg

SEQ ID NO: 382306 - DNA, 120 bp, Artificial Sequence
  ENSG00000143740_44 (sequence is synthesized)
ctcaggaatgttctttgtctgcagacctagcagctgtacagatcgctcttgtgtttttgcactattaattaacttcaagtgcaattttggcaggcaggccaagggtctcaacaggctatt

SEQ ID NO: 382307 - DNA, 120 bp, Artificial Sequence
  ENSG00000143740_45 (sequence is synthesized)
tggaatgagttctcttttaaggccttcaacgtagtgagacattttcaaatcaaaaagtacagcaggagccagcctttattttgtctgtgtacacaataaaatattccgcttctataggca

SEQ ID NO: 382308 - DNA, 120 bp, Artificial Sequence
  ENSG00000143740_46 (sequence is synthesized)
cctagatgggcgaatggggcccacaggggacctggagggcatggcaaggggccccaggggatgacgggtgtctggagaagatggtggggaatgagggagggtgtgaaatgaaggtgtggt

SEQ ID NO: 382309 - DNA, 120 bp, Artificial Sequence
  ENSG00000143740_47 (sequence is synthesized)
gggagtgtgggtagggatttggggctgtgtacacatgagcagggctgaagtgggaggacatcggagtagtgacatgaggagtgttttgccaaacttgcaactggagttaccccaaaagtg

SEQ ID NO: 382310 - DNA, 120 bp, Artificial Sequence
  ENSG00000143740_48 (sequence is synthesized)
acaggcagactcagcacgcctgtgggaaatgcctaacagatgcgtcacctagagcagctgctggcctccagcttgctagagacagctcgtttgtttatacataaaaacaattccagacca

SEQ ID NO: 382311 - DNA, 120 bp, Artificial Sequence
  ENSG00000143740_49 (sequence is synthesized)
ccctcacttccctatccctgatgtctctaatctaaactttcctcaattaatctgtgtcctctcctagtcaggggaaaaaacatgtgtgtgtacctaatgaatgtaagataatcatattca

SEQ ID NO: 382312 - DNA, 120 bp, Artificial Sequence
  ENSG00000143742_0 (sequence is synthesized)
gccatcttggggctgctgggactcgcgtcggttggcgactcccggacgtaggtagtttgttgggccgggttctgaggccttgcttctctttacttttccactctaggccacgatgccgca

SEQ ID NO: 382313 - DNA, 120 bp, Artificial Sequence
  ENSG00000143742_1 (sequence is synthesized)
gtaccagacctgggaggagttcagccgcgctgccgagaagctttacctcgctgaccctatgaaggcacgtgtggttctcaaatataggcattctgatgggaacttgtgtgttaaagtaac

SEQ ID NO: 382314 - DNA, 120 bp, Artificial Sequence
  ENSG00000143742_2 (sequence is synthesized)
agatgatttagtttgtttggtgtataaaacagaccaagctcaagatgtaaagaagattgagaaattccacagtcaactaatgcgacttatggtagccaaggaagcccgcaatgttaccat

SEQ ID NO: 382315 - DNA, 120 bp, Artificial Sequence
  ENSG00000143742_3 (sequence is synthesized)
ggaaactgagtgaatggtttgaaatgaagactttgtcgtgtacttaggaagtaaatatcttttgaattagagaaagtgttgggacagaaagtactttatgtaactaagtgggctgttcag

SEQ ID NO: 382316 - DNA, 120 bp, Artificial Sequence
  ENSG00000143742_4 (sequence is synthesized)
aagcttagaggtcattttttgtaattttctttttaattactttagagagctagggatgcaaatgttttcagttagaaagcctttatttacttttggaaattgaacaagaaatgcatctgt

SEQ ID NO: 382317 - DNA, 120 bp, Artificial Sequence
  ENSG00000143742_5 (sequence is synthesized)
cttagaaactggagattatttgatgttaggtaaaacatgtaattgtttctctggcaaatttgtatcagtaatttgaaaatgagatattaggaaaaaccaattcttcttaaatttagttca

SEQ ID NO: 382318 - DNA, 120 bp, Artificial Sequence
  ENSG00000143742_6 (sequence is synthesized)
atccatgtattttggagcataaaatgtatgctgttgtgaccaataaatataaaatatggtaattggaattaactccacaccatagtatgcattgttatacatactgtgtacctaattatg

SEQ ID NO: 382319 - DNA, 120 bp, Artificial Sequence
  ENSG00000143742_7 (sequence is synthesized)
tatagcagtgtagtctcaattatatctgaaagtaattgtgactaacaagtatgctttgccttatttccacatttaaactacctgttaatataagggatttgtagtatcagcttgttgagc

SEQ ID NO: 382320 - DNA, 120 bp, Artificial Sequence
  ENSG00000143742_8 (sequence is synthesized)
aatgactttgaatctagttttcagtgatcagaagcagcagttatttgagtgtatgaatggaatgatgatcactgtgctataatgtactgaaaccaccatattacagaaatatttactaca

SEQ ID NO: 382321 - DNA, 120 bp, Artificial Sequence
  ENSG00000143742_9 (sequence is synthesized)
tattttccatctgtagtttctcagaagggctatggattagtttgaactgtcaaatccttgcatacttctgtgacacccctgcccattttctgtctttaattaaccaaggtgttaggtgtg

SEQ ID NO: 382322 - DNA, 120 bp, Artificial Sequence
  ENSG00000143742_10 (sequence is synthesized)
actgtcacaactgttatgttttccagtaaactagaagtacgatatttgataattatatttgtatttcaccacctaaatgtaatgttgattcctcaagaatgaaatgaaggcactacattg

SEQ ID NO: 382323 - DNA, 120 bp, Artificial Sequence
  ENSG00000143742_11 (sequence is synthesized)
aaatatgttttgtataaatttgtcatgttgaacagcattttagcatggtaagttcccttagctatatgaattttggcatgtttcagagagatcagtaaataaaatattagataaaatata

SEQ ID NO: 382324 - DNA, 120 bp, Artificial Sequence
  ENSG00000143742_12 (sequence is synthesized)
tcaagcggtcctcttgcttcagcctcctgaatagcagagactacaggtgtgcaccaccacactcagctaatttttaaatttttttgtcaagacagggtctcattatattgcccaggttga

SEQ ID NO: 382325 - DNA, 120 bp, Artificial Sequence
  ENSG00000143742_13 (sequence is synthesized)
tctggaactcctggactcaagccatctttctgccttagcctcccaaaccactgggattatgggtgtgaaccactaagtacttcttaaatcttgacattccacacagaaaaattttaattg

SEQ ID NO: 382326 - DNA, 120 bp, Artificial Sequence
  ENSG00000143742_14 (sequence is synthesized)
aagtggatctgtactacaaaatgaggaaagggctgccagcttaaagttgctgtttttgaagattctacaacagatggctttatgaccaaccataagcagatcttaagtatctagtgaaga

SEQ ID NO: 382327 - DNA, 120 bp, Artificial Sequence
  ENSG00000143742_15 (sequence is synthesized)
tatgaccaaccataagcagatcttaagtatctagtgaagaatttaactgctaacaaggaagaatttggtttgatttaaaagtaatatcttcaagcctgggcaacatggagaaaccccgtc

SEQ ID NO: 382328 - DNA, 120 bp, Artificial Sequence
  ENSG00000143748_0 (sequence is synthesized)
gactaggagctggcggtccgagctgtggcttggaagaccgacgcgatgaagcccagacctgcagggttcgtggataataaactcaagcagcgagtcatccagtaccttaccagtaacaaa

SEQ ID NO: 382329 - DNA, 120 bp, Artificial Sequence
  ENSG00000143748_1 (sequence is synthesized)
tgtggcaaatatgtggacattggagtcttagcgtctgatttacaaagagtgtacagtatagactatggtcgaagaaaaagaaatgcttttaggattcaggtagaaaaagtatttagcata

SEQ ID NO: 382330 - DNA, 120 bp, Artificial Sequence
  ENSG00000143748_2 (sequence is synthesized)
attagtagtgagaaggaacttaagaatttaacagaattagaagatgaacatttggcaaaaagggcaagacaaggtgaagaggataatgagtatactgaaagctattctgatgatgattca

SEQ ID NO: 382331 - DNA, 120 bp, Artificial Sequence
  ENSG00000143748_3 (sequence is synthesized)
agtatggaagactacccagatccacagtcagcaaatcacatgaacagttccctgctgtctttatatcggaaaggaaatcctgattctgtttcaaatactcctgagatggagcaaagagaa

SEQ ID NO: 382332 - DNA, 120 bp, Artificial Sequence
  ENSG00000143748_4 (sequence is synthesized)
accacctcttcaacaccacggataagttccaaaacaggctccattcccttgaagacccctgccaaagattctgaaggaggatggtttattgacaaaaccccaagtgtaaagaaagacagt

SEQ ID NO: 382333 - DNA, 120 bp, Artificial Sequence
  ENSG00000143748_5 (sequence is synthesized)
tttttcttggacctgtcatgtgagaaaagtaatcctaagaagccaataactgagatacaggattcaaaagattcttctcttttggagagtgatatgaaacggaaaggcaagctaaagaat

SEQ ID NO: 382334 - DNA, 120 bp, Artificial Sequence
  ENSG00000143748_6 (sequence is synthesized)
aaaggaagcaaaaggaagaaagaagatcttcaggaagtagatggagaaattgaagctgtcctgcaaaagaaagctaaagccagggggttagaattccagatctccaacgtgaagtttgaa

SEQ ID NO: 382335 - DNA, 120 bp, Artificial Sequence
  ENSG00000143748_7 (sequence is synthesized)
gatgtgggaggcaatgatatgacattaaaagaggtctgcaagatgctcatacacatgcgtcacccggaggtgtaccaccacctgggcgtcgtgccccctcgtggagttctccttcatgga

SEQ ID NO: 382336 - DNA, 120 bp, Artificial Sequence
  ENSG00000143748_8 (sequence is synthesized)
ccaccaggctgtgggaagacattacttgcacatgcaattgctggggaacttgacctgccaattttgaaagtggctgctccagagattgtgtctggagtatccggagagtctgagcagaag

SEQ ID NO: 382337 - DNA, 120 bp, Artificial Sequence
  ENSG00000143748_9 (sequence is synthesized)
ctgagagaactatttgagcaagctgtgtcaaatgcaccatgtatcattttcattgatgaaattgatgctattacccccaaaagagaagtggcttcaaaagatatggaacgaagaattgta

SEQ ID NO: 382338 - DNA, 120 bp, Artificial Sequence
  ENSG00000143748_10 (sequence is synthesized)
gcccaactcctaacctgcatggatgatctgaataatgtggctgctacagcccgggtcctagttattggagctactaatcgaccagactcgttagaccctgctttgagacgtgcgggaagg

SEQ ID NO: 382339 - DNA, 120 bp, Artificial Sequence
  ENSG00000143748_11 (sequence is synthesized)
ttcgaccgagaaatatgcctaggtatcccagatgaagcatccagggaaagaatacttcaaacattgtgcagaaaactgaggcttcctcaagcttttgatttctgtcacttagcacaccta

SEQ ID NO: 382340 - DNA, 120 bp, Artificial Sequence
  ENSG00000143748_12 (sequence is synthesized)
tgctgatctcatggcactgtgccgagaggcagcaatgtgtgcagtcaatagagtcttaatgaagctacaggaacagcagaagaaaaatcctgaaatggaagatttgccatctaaaggagt

SEQ ID NO: 382341 - DNA, 120 bp, Artificial Sequence
  ENSG00000143748_13 (sequence is synthesized)
ccaggaggaaaggctgggaactgagcccacttctgaaacacaggatgaattacaaaggctgctggggttgctaagagaccaagatcccctctcagaggagcagatgcaaggactgtgcat

SEQ ID NO: 382342 - DNA, 120 bp, Artificial Sequence
  ENSG00000143748_14 (sequence is synthesized)
tgaactgaatgatttcattgttgctctatcctcagtccaaccctctgccaaaagggaaggctttgtcactgtccctaatgtgacatgggcagatattggtgccctggaagacattagaga

SEQ ID NO: 382343 - DNA, 120 bp, Artificial Sequence
  ENSG00000143748_15 (sequence is synthesized)
ggagctcaccatggcaatattggcaccagtacgcaacccagaccagttcaaagctcttggattggtgactccagctggggtcctccttgctggtcctcctggctgtgggaagactctgct

SEQ ID NO: 382344 - DNA, 120 bp, Artificial Sequence
  ENSG00000143748_16 (sequence is synthesized)
ggcgaaggctgttgcaaatgagtccggactaaattttatatctgtcaagggccccgaattactaaacatgtatgttggtgagagtgaacgtgctgtgcgacaagtttttcaacgagccaa

SEQ ID NO: 382345 - DNA, 120 bp, Artificial Sequence
  ENSG00000143748_17 (sequence is synthesized)
gaactcagcaccctgtgtgatattctttgatgaagtggatgctttatgtcctcgaagatcagaccgagagacaggggcaagtgtccgagtggtgaatcagctacttacagagatggatgg

SEQ ID NO: 382346 - DNA, 120 bp, Artificial Sequence
  ENSG00000143748_18 (sequence is synthesized)
tctggaagcacgccagcaggtttttattatggcagccactaacaggccagatataattgaccctgcaatcctgcgcccgggccgcctggacaaaacactgtttgtgggtttaccgccccc

SEQ ID NO: 382347 - DNA, 120 bp, Artificial Sequence
  ENSG00000143748_19 (sequence is synthesized)
tgcagatcgccttgccatcttaaaaactatcacaaaaaatggtaccaaaccaccactggatgcagatgtaaatttggaagcaattgctggtgaccttcgctgtgattgctatacgggcgc

SEQ ID NO: 382348 - DNA, 120 bp, Artificial Sequence
  ENSG00000143748_20 (sequence is synthesized)
agatctctctgctttggtacgagaagcttctatctgtgccctgagacaggaaatggcaagacagaagagtggaaatgaaaaaggtgaactcaaggttagtcataagcattttgaagaagc

SEQ ID NO: 382349 - DNA, 120 bp, Artificial Sequence
  ENSG00000143748_21 (sequence is synthesized)
tttcaagaaagtaagatcatctatatcaaaaaaggatcaaatcatgtatgaacgtttgcaggagtccctcagccggtgatgtctccagcagccggcttagaggagctagcccatcaagcc

SEQ ID NO: 382350 - DNA, 120 bp, Artificial Sequence
  ENSG00000143748_22 (sequence is synthesized)
ggcagagaatcccccacacgctctgaaggacccactttcagctggacacaggcgcggcctcatgtaaacattttattttcaaatgaatgaggccaagctgaagctgaagctgaagattct

SEQ ID NO: 382351 - DNA, 120 bp, Artificial Sequence
  ENSG00000143748_23 (sequence is synthesized)
tcccatctggccagccttgtgtgaaaatgccttcttcctctttaagaaaaaggacaatttttaaactgctgaaataaaatgactgttacatttttcaaataaaacttttactttgaacta

SEQ ID NO: 382352 - DNA, 120 bp, Artificial Sequence
  ENSG00000143748_24 (sequence is synthesized)
gcccagctaattttttaatttttttgtagagacagagtctcccttagttgcccaggctagaatttgtatcttaatatcttaattataacagcatttcattgcattcatataaagctttct

SEQ ID NO: 382353 - DNA, 120 bp, Artificial Sequence
  ENSG00000143748_25 (sequence is synthesized)
acctaaaaaaaaaaaaaaattatttaaataagaaaagggctttttttttttcttatttaaatagttttttttttttttttaggcagagtctcgtactgtgggccaggctggagtgtagtg

SEQ ID NO: 382354 - DNA, 120 bp, Artificial Sequence
  ENSG00000143748_26 (sequence is synthesized)
tgcaagtgtttatttaatcctttaataaccctgggagacagacattacttattaaatctccgttttatagataaggaagctgacgcttagagaggttaagtaataactggttaagttgga

SEQ ID NO: 382355 - DNA, 120 bp, Artificial Sequence
  ENSG00000143748_27 (sequence is synthesized)
ttttgaatcctagtttctctgattccagagtttggactcttaaccaccataatcttttggctgaatatatttacttgttttgggtagtcatttttttaggatatgggagagaaagtcttt

SEQ ID NO: 382356 - DNA, 120 bp, Artificial Sequence
  ENSG00000143748_28 (sequence is synthesized)
gactaggagctggcggtccgagctgtggcttggaagaccgacgcgatgaagcccagacctgcagggttcgtggataataaactcaagcagcgagtcatccagtatagactatggtcgaag

SEQ ID NO: 382357 - DNA, 120 bp, Artificial Sequence
  ENSG00000143748_29 (sequence is synthesized)
atgcttttaggattcaggtagaaaaagcataattagtagtgagaaggaacttaagaatttaacagaattagaagatgaacatttggcaaaaagggcaagacaaggtgaagaggataatga

SEQ ID NO: 382358 - DNA, 120 bp, Artificial Sequence
  ENSG00000143748_30 (sequence is synthesized)
tgaagcaagggtcaatacaattgaggttcattactttctgttttattggcatttaatctatagaatacttatcatttatacccacgatgtttatcatttcaaaaatatgagttgttttat

SEQ ID NO: 382359 - DNA, 120 bp, Artificial Sequence
  ENSG00000143748_31 (sequence is synthesized)
gtttagtttattttaataaattcattttacaataatgattatgaaattctggaatggggttggcagactgtggcctacccacccaccacgtgtttttgtaaattaaagttatattggaac

SEQ ID NO: 382360 - DNA, 120 bp, Artificial Sequence
  ENSG00000143748_32 (sequence is synthesized)
cactggcacaatcatggcttaccgcagtcttgacgtcccaggcccaagcgatcctcccaccgcagcctcacaggtagctgggattacaggaaatcctgattctgtttcaaatactcctga

SEQ ID NO: 382361 - DNA, 120 bp, Artificial Sequence
  ENSG00000143748_33 (sequence is synthesized)
tgtggtggtgcatacctgtagtcccagccacttgggagactgaggtaggaggattgcttgagcctagaaggcagaggttgcagtaagctgagatctcaccactgtacttccagcctgggt

SEQ ID NO: 382362 - DNA, 85 bp, Artificial Sequence
  ENSG00000143748_34 (sequence is synthesized)
gggcgcagatctctctgctttggtacgagaagcttctatctgtgccctgagacaggaaatggcaagacagaagagtggaaatgaa

SEQ ID NO: 382363 - DNA, 120 bp, Artificial Sequence
  ENSG00000143751_0 (sequence is synthesized)
agagaggcttgaggttcgggtagtcggtgacatggcggaggccgcggcgctggtgtggattcgcggccctggcttcgggtgcaaggcggtgcggtgtgcctcgggtcggtgcaccgtccg

SEQ ID NO: 382364 - DNA, 120 bp, Artificial Sequence
  ENSG00000143751_1 (sequence is synthesized)
ggattttatccaccggcactgccaagatcagaatgttccagtggaaaacttctttgtgaaatgcaatggagcactcattaacaccagtgacacagtgcagcatggagctgtttatagttt

SEQ ID NO: 382365 - DNA, 120 bp, Artificial Sequence
  ENSG00000143751_2 (sequence is synthesized)
ggaacccagactttgcggtggaaaaggaggttttggatctatgctccgagcacttggtgctcagattgagaagacaaccaatcgagaagcttgtcgggatctcagtggaaggagactacg

SEQ ID NO: 382366 - DNA, 120 bp, Artificial Sequence
  ENSG00000143751_3 (sequence is synthesized)
cgatgtcaatcatgaaaaagcaatggctgaatgggtaaaacaacaagccgagcgagaggctgaaaaggagcagaagcggctggagcgactgcagcggaagcttgtagaacccaagcactg

SEQ ID NO: 382367 - DNA, 120 bp, Artificial Sequence
  ENSG00000143751_4 (sequence is synthesized)
cttcaccagccccgactaccagcagcagtgccatgagatggctgagcgtctggaggattccgtcctcaaaggtatgcaggctgcctccagcaagatggtttcagcagaaatcagtgagaa

SEQ ID NO: 382368 - DNA, 120 bp, Artificial Sequence
  ENSG00000143751_5 (sequence is synthesized)
tcggaaacggcaatggcctactaaatctcaaacagacagaggagccagtgcgggaaagaggagatgcttctggttgggcatggagggactagagactgcagaagggtccaactctgagag

SEQ ID NO: 382369 - DNA, 120 bp, Artificial Sequence
  ENSG00000143751_6 (sequence is synthesized)
ttcagatgatgacagtgaagaagcaccaagcacttcaggaatgggtttccatgctccaaaaattggtagcaatggtgtcgagatggcagccaaatttcccagtggttctcagagggcgag

SEQ ID NO: 382370 - DNA, 120 bp, Artificial Sequence
  ENSG00000143751_7 (sequence is synthesized)
agtagtgaatacagaccatggatcaccagaacaactgcagatcccggtgactgactctgggaggcatattttagaagactcatgtgctgagctgggggagtccaaagagcacatggaaag

SEQ ID NO: 382371 - DNA, 120 bp, Artificial Sequence
  ENSG00000143751_8 (sequence is synthesized)
caggatggttacagaaacagaagagacccaggagaagaaggcagagagtaaagaacccatagaagaggagcccactggggctggactgaataaggataaagagacagaagaaaggactga

SEQ ID NO: 382372 - DNA, 120 bp, Artificial Sequence
  ENSG00000143751_9 (sequence is synthesized)
tggggaaagagttgctgaggtagcacctgaagaaagggaaaacgttgccgttgccaaactgcaggaaagccagccaggaaacgcagttattgataaggaaactatagatttattggcgtt

SEQ ID NO: 382373 - DNA, 120 bp, Artificial Sequence
  ENSG00000143751_10 (sequence is synthesized)
cacctctgttgcagaactggagttgctgggtttggagaagctcaaatgtgaactgatggcccttggactgaaatgtgggggcactctgcaggagcgggcagcaagactcttctctgtcag

SEQ ID NO: 382374 - DNA, 120 bp, Artificial Sequence
  ENSG00000143751_11 (sequence is synthesized)
aggactggcaaaggagcaaattgacccggctttatttgccaagcctttgaaagggaagaaaaaatgagtatcatcagagctgattcctatttgtttatagtgtctaccatttacaacctg

SEQ ID NO: 382375 - DNA, 120 bp, Artificial Sequence
  ENSG00000143751_12 (sequence is synthesized)
cataatgtggactcttgaccagtattcctgttgatattaaaagctaactttttagtaacccaattctaactatcccctttttccttgtcagggctgtagaattaatgtctgaaaccatct

SEQ ID NO: 382376 - DNA, 120 bp, Artificial Sequence
  ENSG00000143751_13 (sequence is synthesized)
gggccttaaattttctttgtctggttttctatagtgtatttaataaatatagggctattcacattttttggtttgatcttggtgtcatttaggtaatgaatctatccaagaaatctatcc

SEQ ID NO: 382377 - DNA, 120 bp, Artificial Sequence
  ENSG00000143751_14 (sequence is synthesized)
ttttgacccaggttatcaaatttgtagacataaggttatttataatggtcccttcttacccttttaatgtctttaggagctgtgttgataatttccttttcattatgatactggtaattt

SEQ ID NO: 382378 - DNA, 120 bp, Artificial Sequence
  ENSG00000143751_15 (sequence is synthesized)
ttgataatttccttttcattatgatactggtaatttctgttctcactttcctaatcaggttgggtaggggtttatcagttttactgatctgactttttattttattttattttttttgag

SEQ ID NO: 382379 - DNA, 120 bp, Artificial Sequence
  ENSG00000143751_16 (sequence is synthesized)
tttggttttatttttctcaattgtttatataattaatttctgttattttctttcttctatttagcttgagtctcctttgatcttttttctttagttccttaagataagccttaggtcatt

SEQ ID NO: 382380 - DNA, 120 bp, Artificial Sequence
  ENSG00000143751_17 (sequence is synthesized)
aggtcattgatcttagacgttatttaaaatacatatttaaagctatacattttcttttaagcattactttagttgcgactttacaattttattatgtcgtatttttattattcagttcta

SEQ ID NO: 382381 - DNA, 85 bp, Artificial Sequence
  ENSG00000143751_18 (sequence is synthesized)
ttattatgtcgtatttttattattcagttctaattttcttttttttttctttttgagatggaatttcgcttttgttgcccaggct

SEQ ID NO: 382382 - DNA, 120 bp, Artificial Sequence
  ENSG00000143751_19 (sequence is synthesized)
caggtgtgagccaccatgcccagcctctgattattttctaatttcctccctcagttcttctttgacccatggattatcagaagtgggttgtctgatcagcaaacatttgttttttttcct

SEQ ID NO: 382383 - DNA, 120 bp, Artificial Sequence
  ENSG00000143751_20 (sequence is synthesized)
tgtctgatcagcaaacatttgttttttttcctcttaatatcttcttgttgctgatttctactttaattccattgaggtcagaaaatatcctctttatgatttcaatcctcttagttttat

SEQ ID NO: 382384 - DNA, 120 bp, Artificial Sequence
  ENSG00000143751_21 (sequence is synthesized)
atcctcttagttttattgagactcgttttatgacccaatatgttgtctgtcatggtgagtgtaccatacacagtttaaaagaatgcgtattttaggccaggtgtggtggctcatgcctgt

SEQ ID NO: 382385 - DNA, 120 bp, Artificial Sequence
  ENSG00000143751_22 (sequence is synthesized)
acatgctgagattacagctgtaatctgtaatttgagaggctgaggtgggaggatcatttcgagaccagcctgggcaatgtatagtgagaccatgtctctaagaaaaacaatatgtaattt

SEQ ID NO: 382386 - DNA, 120 bp, Artificial Sequence
  ENSG00000143751_23 (sequence is synthesized)
gaattgttgggttaatatgttttgtaatatcgatgagattaagtggttgatagtattgttcagatcttctatgtctttactgatccttttgtttatttctatcaggtgctgagaaaggat

SEQ ID NO: 382387 - DNA, 120 bp, Artificial Sequence
  ENSG00000143751_24 (sequence is synthesized)
gttaaaatcttcaattatgattgtggaattgtctatttcttaaattctaccagtttttgtatgaagctctaataacttatgtcttcctaatgtattgaccattttatcattatgaaattt

SEQ ID NO: 382388 - DNA, 120 bp, Artificial Sequence
  ENSG00000143751_25 (sequence is synthesized)
ccctctgtctctggtaatttgggtttgaaatctactttatcttatgtgaatatagccactgcagccttcttaagcttagtgtttgcacagtatacctctttctattaatttactttgtgc

SEQ ID NO: 382389 - DNA, 120 bp, Artificial Sequence
  ENSG00000143751_26 (sequence is synthesized)
ttctgtgcctatttaaagtagtttctttaaacaacatatacttgagacttgcatttttatctgttctctctgtatcttttaataagtttaacattaaatgtaattattaataggtttcta

SEQ ID NO: 382390 - DNA, 120 bp, Artificial Sequence
  ENSG00000143751_27 (sequence is synthesized)
acatgtttcctgtttagataagattattttataattgtattttaatttattggctctttagctatactgttttaataatttttttaagttggatgttctagtgattacaatatacattct

SEQ ID NO: 382391 - DNA, 120 bp, Artificial Sequence
  ENSG00000143751_28 (sequence is synthesized)
ttcttaatttttcagtctacctagagttgatgtgccacttcacataaaatgtagaaatcttgtaagtatgtacatccatttatcatacctgtcttttatgctgtagttgtcatacatatt

SEQ ID NO: 382392 - DNA, 120 bp, Artificial Sequence
  ENSG00000143751_29 (sequence is synthesized)
cttttatgctgtagttgtcatacatattaaatctacatatttaaatattgtaagtcctgtcataagttacaatttctgctttaaataatgatatgtattttaaagaaattaagaggaaaa

SEQ ID NO: 382393 - DNA, 120 bp, Artificial Sequence
  ENSG00000143753_0 (sequence is synthesized)
accacaccagccggggagccgccgccgccgccgccacctctgagcagccggctgggagcgagagccgacagctagtctgcaagccaccgctgtcgccatggggagccgcgtctcgcggga

SEQ ID NO: 382394 - DNA, 120 bp, Artificial Sequence
  ENSG00000143753_1 (sequence is synthesized)
agacttcgagtgggtctacaccgaccagccgcacgccgaccggcgccgggagatcctggcaaagtatccagagataaagtccttgatgaaacctgatcccaatttgatatggattataat

SEQ ID NO: 382395 - DNA, 120 bp, Artificial Sequence
  ENSG00000143753_2 (sequence is synthesized)
tatgatggttctcacccagttgggtgcattttacatagtaaaagacttggactggaaatgggtcatatttggggcctatgcgtttggcagttgcattaaccactcaatgactctggctat

SEQ ID NO: 382396 - DNA, 120 bp, Artificial Sequence
  ENSG00000143753_3 (sequence is synthesized)
tcatgagattgcccacaatgctgcctttggcaactgcaaagcaatgtggaatcgctggtttggaatgtttgctaatcttcctattgggattccatattcaatttcctttaagaggtatca

SEQ ID NO: 382397 - DNA, 120 bp, Artificial Sequence
  ENSG00000143753_4 (sequence is synthesized)
catggatcatcatcggtaccttggagctgatggcgtcgatgtagatattcctaccgattttgagggctggttcttctgtaccgctttcagaaagtttatatgggttattcttcagcctct

SEQ ID NO: 382398 - DNA, 120 bp, Artificial Sequence
  ENSG00000143753_5 (sequence is synthesized)
cttttatgcctttcgacctctgttcatcaaccccaaaccaattacgtatctggaagttatcaataccgtggcacaggtcacttttgacattttaatttattactttttgggaattaaatc

SEQ ID NO: 382399 - DNA, 120 bp, Artificial Sequence
  ENSG00000143753_6 (sequence is synthesized)
cttagtctacatgttggcagcatctttacttggcctgggtttgcacccaatttctggacattttatagctgagcattacatgttcttaaagggtcatgaaacttactcatattatgggcc

SEQ ID NO: 382400 - DNA, 120 bp, Artificial Sequence
  ENSG00000143753_7 (sequence is synthesized)
tctgaatttacttaccttcaatgtgggttatcataatgaacatcatgatttccccaacattcctggaaaaagtcttccactggtgaggaaaatagcagctgaatactatgacaacctccc

SEQ ID NO: 382401 - DNA, 120 bp, Artificial Sequence
  ENSG00000143753_8 (sequence is synthesized)
tcattagtgccaaagggattcttctccaaaactttagatgataaaatggaatttttgcattattaaacttgagaccagtgatgctcagaagctcccctggcacaatttcagagtaagagc

SEQ ID NO: 382402 - DNA, 120 bp, Artificial Sequence
  ENSG00000143753_9 (sequence is synthesized)
tcggtgataccaagaagtgaatctggcttttaaacagtcagcctgactctgtactgctcagtttcactcacaggaaacttgtgacttgtgtattatcgtcattgaggatgtttcactcat

SEQ ID NO: 382403 - DNA, 120 bp, Artificial Sequence
  ENSG00000143753_10 (sequence is synthesized)
gtgacttgtgtattatcgtcattgaggatgtttcactcatgtctgtcattttataagcatatcatttaaaaagcttctaaaaagctatttcgccaggcacggtggctcatgcctataatc

SEQ ID NO: 382404 - DNA, 65 bp, Artificial Sequence
  ENSG00000143753_11 (sequence is synthesized)
attgcttgaacccaggaggcggaggcagaggctgcagtgacccaaaaataaatatatataaaaaa

SEQ ID NO: 382405 - DNA, 120 bp, Artificial Sequence
  ENSG00000143753_12 (sequence is synthesized)
cactataaagttttgctttattaaaaagctaataaacagctattaatcacagtgtattagtatttgttacatttttgtatttcactatctttatactatataatatggtaacttgggtac

SEQ ID NO: 382406 - DNA, 120 bp, Artificial Sequence
  ENSG00000143753_13 (sequence is synthesized)
atactatataatatggtaacttgggtaccgggggaactttaaaatttcatctcaaaaataatttttaaaaagcctgaggtatgatatagcataaaagattgagatgaaaatatatttccc

SEQ ID NO: 382407 - DNA, 120 bp, Artificial Sequence
  ENSG00000143753_14 (sequence is synthesized)
tgtaagctgaattactcatttaaaaattttaacttctatatgggacccgaattagacactgctgaatcctgtacagccttactcataaataaagtacttactgaatttccaccattcaaa

SEQ ID NO: 382408 - DNA, 120 bp, Artificial Sequence
  ENSG00000143753_15 (sequence is synthesized)
gggaggcctaggtgaggaaaatagcagctgaatactatgacaacctccctcactacaattcctggataaaagtactgtatgattttgtgatggatgatacaataagtccctactcaagaa

SEQ ID NO: 382409 - DNA, 120 bp, Artificial Sequence
  ENSG00000143753_16 (sequence is synthesized)
gccgggagaggacgccggagggaaaggaagggggagcgcgcccagcatcgcttgggcctcctccacccgctcaggaggggaaacaggagagccgggagcacaacagcctcgcgcgcccgc

SEQ ID NO: 382410 - DNA, 120 bp, Artificial Sequence
  ENSG00000143753_17 (sequence is synthesized)
cgccgcctcagccttaggggaggccactacgcctctggttacatttcttgatcatggtatctccccagctagcaaagtatccagagataaagtccttgatgaaacctgatcccaatttga

SEQ ID NO: 382411 - DNA, 120 bp, Artificial Sequence
  ENSG00000143753_18 (sequence is synthesized)
agcgcgggagtccccgccaggcccacgccggccggttggggcgaagggtgtccccggctgtgccagccttgagtagatcttttcgctagaagattcctgtgccctcaggtgggcgccctt

SEQ ID NO: 382412 - DNA, 120 bp, Artificial Sequence
  ENSG00000143756_0 (sequence is synthesized)
aaggaatcaagcccccaagatggcggcagcggcggaggagcggatggcagaggaaggaggcggcggccaaggcgacggcggttcctctttggcctccggctctacccagcgacagcctcc

SEQ ID NO: 382413 - DNA, 120 bp, Artificial Sequence
  ENSG00000143756_1 (sequence is synthesized)
accgcccgcgccacagcacccgcagccggggtcccaggcgctcccagcccccgcgctggctccggaccagctgcctcaaaacaacacgcttgtggcgctgcccatcgtagccatcgagaa

SEQ ID NO: 382414 - DNA, 120 bp, Artificial Sequence
  ENSG00000143756_2 (sequence is synthesized)
catcctcagctttatgtcctacgacgaaattagccagctccgcctggtttgtaaaagaatggacttggtctgccagagaatgttgaatcagggatttctgaaagtggagaggtaccataa

SEQ ID NO: 382415 - DNA, 120 bp, Artificial Sequence
  ENSG00000143756_3 (sequence is synthesized)
tctatgtcagaaacaagttaaagcacaactcccaaggagagagtcagaaaggagaaaccattcattagctcgtcatgcagacattcttgctgctgttgaaacaaggctgtcactattaaa

SEQ ID NO: 382416 - DNA, 120 bp, Artificial Sequence
  ENSG00000143756_4 (sequence is synthesized)
tatgactttcatgaaatatgtggattccaatctctgttgcttcatcccaggaaaggtgattgatgagatttatcgtgtgttgagatatgtcaattctaccagagcccctcaacgagctca

SEQ ID NO: 382417 - DNA, 120 bp, Artificial Sequence
  ENSG00000143756_5 (sequence is synthesized)
tgaagtacttcaagaattaagggatatatcctctatggcaatggagtactttgatgaaaagattgttccaattttaaagaggaaattaccaggatcagatgtttctggaagactcatggg

SEQ ID NO: 382418 - DNA, 120 bp, Artificial Sequence
  ENSG00000143756_6 (sequence is synthesized)
ctctcctccagttccaggaccgtctgcagccctaacaacaatgcagctcttctccaagcaaaatccttcaagacaagaggttaccaaactccagcagcaggttaaaacaaatggtgctgg

SEQ ID NO: 382419 - DNA, 120 bp, Artificial Sequence
  ENSG00000143756_7 (sequence is synthesized)
cgtgactgttctcaggcgtgaaatttctgagcttcgcaccaaagtgcaagaacagcaaaaacagcttcaagaccaggaccagaaactgctagagcagacccagatcataggtgaacaaaa

SEQ ID NO: 382420 - DNA, 120 bp, Artificial Sequence
  ENSG00000143756_8 (sequence is synthesized)
tgcacggttggcagagctagaacgcaaactacgagaagtaatggaaagtgctgtaggaaattcctcagggtccgggcagaatgaggagtctcctcggaaacgaaaaaaggccacggaagc

SEQ ID NO: 382421 - DNA, 120 bp, Artificial Sequence
  ENSG00000143756_9 (sequence is synthesized)
catagactctcttaggaaatctaaacgtcttcggaatagaaagtaaattggaatgtggttctagttccagaggaagacacagcttagtagcttaagcagttatgcatatcaggatactgt

SEQ ID NO: 382422 - DNA, 120 bp, Artificial Sequence
  ENSG00000143756_10 (sequence is synthesized)
gagcaacatggtgtcccttaagcttctaggctttcagaacacaacttaaacttgaactcttatggttgggacattcttttcctgcttctcctgattgaactgatgcacagaatcttttta

SEQ ID NO: 382423 - DNA, 120 bp, Artificial Sequence
  ENSG00000143756_11 (sequence is synthesized)
ctttgcaatagatttgtactaaccagacctgttctatcatgttttgaggagttaacttttttctgtgcagataatgttgaaagtaagttaatttgtttctgcatatatgcacatacatac

SEQ ID NO: 382424 - DNA, 120 bp, Artificial Sequence
  ENSG00000143756_12 (sequence is synthesized)
gtaaggatcttaaacccagtcttgacagactagaagttaagtttaatacagaaaatgtcctgttcacttgaaagaaaagacctactttttaaatggacactatcttggttcttttttttt

SEQ ID NO: 382425 - DNA, 120 bp, Artificial Sequence
  ENSG00000143756_13 (sequence is synthesized)
taagtcatctttttgttataagtgacctttgtctggaatgtctgaaaagtagttaatgctttttggtattgaagtaatgggtaactaaaatggacttccatagtattgactgtagaagga

SEQ ID NO: 382426 - DNA, 120 bp, Artificial Sequence
  ENSG00000143756_14 (sequence is synthesized)
gcctctacaatattgactatatatttttataaactactggcaaggaacttacccagctgttatacatgttttcagttctctttgggggccatgtcctacatttgcatggatggatgcatg

SEQ ID NO: 382427 - DNA, 120 bp, Artificial Sequence
  ENSG00000143756_15 (sequence is synthesized)
cattgcctagtcaactcacttaaaaagctcttgcactggtattgatcttgaacctctatacttctccactttttagagcggcgtcttagtttatttaaacgcttaacatcttccaccgca

SEQ ID NO: 382428 - DNA, 120 bp, Artificial Sequence
  ENSG00000143756_16 (sequence is synthesized)
acagcttgcctctagagggggaattgttcatccatttgtcctccagttttataggaacaagagactattaaagcccattgctttatctgctctctgtagggttcaggtacactggctaag

SEQ ID NO: 382429 - DNA, 120 bp, Artificial Sequence
  ENSG00000143756_17 (sequence is synthesized)
gcagaaccccaaatttcaaggctctttctatcaatattggacctctgggagctaatactcctctttgctcaccaccatgtgatcattgatcagatgtggtgagtgagtaggggactcgac

SEQ ID NO: 382430 - DNA, 120 bp, Artificial Sequence
  ENSG00000143756_18 (sequence is synthesized)
ttgcgggatgcagttttgccattgcagcaaagttcattgaggaaaattgtaccatgaaaaagcattttgattatttcatttctggaggatgaccttgagggaagctttttaatattagtt

SEQ ID NO: 382431 - DNA, 120 bp, Artificial Sequence
  ENSG00000143756_19 (sequence is synthesized)
tcaagctttccttaccctacaactttaaacaaaagctttaattttgtttgcactcctattttgagcttgtaactggaaaagcatgtcttgcactgttcaacctcctgagtggtcgcttta

SEQ ID NO: 382432 - DNA, 120 bp, Artificial Sequence
  ENSG00000143756_20 (sequence is synthesized)
acaacctccaaattgtgtacagtggttattttccccagttgtatagttttgagacattcaattatcactgtcttagttgtattttaatttactaaattatgtagctatttgactgttaag

SEQ ID NO: 382433 - DNA, 120 bp, Artificial Sequence
  ENSG00000143756_21 (sequence is synthesized)
ttcttttaaacaactgtttccttgggcttcagttatttaaagtaaatttaggtgtaatatagaaaactgtccctttccaggtgggagcttaacacctgtataaaacctaaggttttggta

SEQ ID NO: 382434 - DNA, 120 bp, Artificial Sequence
  ENSG00000143756_22 (sequence is synthesized)
gttatcaccttttttatccgtccaccgtgacatggttatgcatcctttagattaacctcaccaaatgaagctttttctatccatttttaatattgtccttacataatattgtccttagat

SEQ ID NO: 382435 - DNA, 120 bp, Artificial Sequence
  ENSG00000143756_23 (sequence is synthesized)
tttgatcaattctatgtctgactttgaaattccatttacaatgtagtatgttttcaatgaaaaaccataaagtaacatccaagtgtttcatggtttgttgggaaggtaattttaaaataa

SEQ ID NO: 382436 - DNA, 120 bp, Artificial Sequence
  ENSG00000143756_24 (sequence is synthesized)
aacaatttccaaaaaacatttgtcagccaaggtcatccataaaagtccccgtctggaactcgttttctcagcacttctcatttttataatcatagtatttagccatattagcatatcttt

SEQ ID NO: 382437 - DNA, 120 bp, Artificial Sequence
  ENSG00000143756_25 (sequence is synthesized)
agaggaggcctggtggaatacccggggcctctactagtctgcttttccggtcataggaagacttttttttttacgtatcaaagcatgtgtttacagatttacagagtgtgatccgtatgc

SEQ ID NO: 382438 - DNA, 120 bp, Artificial Sequence
  ENSG00000143756_26 (sequence is synthesized)
atcaaagggatacagccccagactgtttctttaatggtcattcatgaactattaaaaatttcctgaatttctttttaaactacatctagatagcctaaacatctatgtagtcttccatta

SEQ ID NO: 382439 - DNA, 120 bp, Artificial Sequence
  ENSG00000143756_27 (sequence is synthesized)
gttaacatgtgtatagggctttcataataagtagtcacactgttacaaggtaaattttctattacaaaatccaaatttctattgcatacacttataatcatctattcataaagctaattc

SEQ ID NO: 382440 - DNA, 120 bp, Artificial Sequence
  ENSG00000143756_28 (sequence is synthesized)
attgtacttgttaatgcatgaatgttccatgcagtaggagaataaagcactacagttcggttgttcaaatcttaaatcttaggctatttagctaaaacatgttaggatattgccttcacc

SEQ ID NO: 382441 - DNA, 120 bp, Artificial Sequence
  ENSG00000143756_29 (sequence is synthesized)
acttgttaggacagttatttgatagccattatgcttacctatggatagcataatggtatttaaggttcaacaaaccgcagattattatgatcagctagaactgacatatgttacaagaaa

SEQ ID NO: 382442 - DNA, 120 bp, Artificial Sequence
  ENSG00000143756_30 (sequence is synthesized)
actgtaaattaacctcctgagagaaccattctgccctgcattttaagtcaggtatttaaatactgcgtgttgttaatattgcgttgtcttagtgcaacatttcttaaagtattcccgtta

SEQ ID NO: 382443 - DNA, 120 bp, Artificial Sequence
  ENSG00000143756_31 (sequence is synthesized)
tcttccttggctgtttttcagaggagacgtctccatgttaatgggtccttcccacatagaaatgtattctggtacagcgctgcacacatggatagcaatgtgaaaaggcatgcctaagag

SEQ ID NO: 382444 - DNA, 120 bp, Artificial Sequence
  ENSG00000143756_32 (sequence is synthesized)
acagaaacggctgaccttaccccaccccagccggatcctctgcttatctcccacatgcacttggcttaactggttttcacagattctgaggttatagaacctgttgtttttcaaactcct

SEQ ID NO: 382445 - DNA, 120 bp, Artificial Sequence
  ENSG00000143756_33 (sequence is synthesized)
gtacagagcctggaaataatggagcaaacgcaaatgtattgagagtcattatactttaaaatagttttaaagactattggggtaccatcaggtcaaaagccactgatttgggaagcaatt

SEQ ID NO: 382446 - DNA, 120 bp, Artificial Sequence
  ENSG00000143756_34 (sequence is synthesized)
tttttgcaaaacactttttttggagtactgaactttacaggggcttgccttaatctctatttagtagtttcaagatatatgcgcaattattctacgtgttaaaaatgttaaaatattcta

SEQ ID NO: 382447 - DNA, 120 bp, Artificial Sequence
  ENSG00000143756_35 (sequence is synthesized)
tgtagccccaaaggtgggtaaaacagtataagtaatgcctaaattaataagctaaaaggtgtcactacagctggatttttgagagaaaatggacataaaactaggctatgtgtaataaaa

SEQ ID NO: 382448 - DNA, 120 bp, Artificial Sequence
  ENSG00000143756_36 (sequence is synthesized)
ataatggcaccttaagattgcactattttatgcattattttatatgccatttcatagcctgcactttaatctccaaagaaacgatgtatgatgtcccacttgttccttattcttaataaa

SEQ ID NO: 382449 - DNA, 120 bp, Artificial Sequence
  ENSG00000143756_37 (sequence is synthesized)
ctttttcctgagacagggcacttaattctattttactatactgaattagtttcttggaggtagattcatttcttgagttctctgtttccttagccataatattttctaggatccgggaac

SEQ ID NO: 382450 - DNA, 120 bp, Artificial Sequence
  ENSG00000143756_38 (sequence is synthesized)
tccctatattgtctatttccaacattatataattttaatttaatgtaatgtaaatctcatacttggtgatcagcacattcttatatcctgctctagcaatgagtacccatttgttacact

SEQ ID NO: 382451 - DNA, 120 bp, Artificial Sequence
  ENSG00000143756_39 (sequence is synthesized)
taccaaactctctaaaaacatatactgtgagtaagatttgaagccaggaataaaaggcagtctgaaagaaaacgtcctatacgatgcagttgtttggaaatggctgatttctgatatgaa

SEQ ID NO: 382452 - DNA, 120 bp, Artificial Sequence
  ENSG00000143756_40 (sequence is synthesized)
acccaacttgatacactgtttggttctttgacttgggatctatctgaattgctttcactagtacacaaaaggttaagttaaaactactttaaacttgtatagcctgccatctgaggtgaa

SEQ ID NO: 382453 - DNA, 120 bp, Artificial Sequence
  ENSG00000143756_41 (sequence is synthesized)
ttattttcaaaaaatactaaatctatgaactgagactagcaattagttggctgctccctaccatgattttacttttaatagcaatacagttatattggtgataaatatgacaggcttaag

SEQ ID NO: 382454 - DNA, 120 bp, Artificial Sequence
  ENSG00000143756_42 (sequence is synthesized)
tactgctgtccttttgcatcttcctaagcatcttggttaaatttctgaagtttaaaaattagatccagatttcttctgttgtgtctgaagagaaccatgacatttagaagtatattggta

SEQ ID NO: 382455 - DNA, 120 bp, Artificial Sequence
  ENSG00000143756_43 (sequence is synthesized)
atctattaggtccattggcaaagtatattggtccatattcaaacctattccaaaaggttagaagtgtttaagattcctttattgtggtaccatgtctgtttacctatgcttatgagcaac

SEQ ID NO: 382456 - DNA, 120 bp, Artificial Sequence
  ENSG00000143756_44 (sequence is synthesized)
aataaattactagtttaccttctggaattttaattgttataaccgaatcaattattggaaagtgaaaaacacctcccggtcacacaacagggtacgtaaataaatgtgttgttaccagtg

SEQ ID NO: 382457 - DNA, 120 bp, Artificial Sequence
  ENSG00000143756_45 (sequence is synthesized)
ctgccctacataaacttattatacagttatgaatttctgattttagaaatgttagaattgtttctacttctctgagtttctactaatgaatttgtttgctttctgtacagttataaatat

SEQ ID NO: 382458 - DNA, 120 bp, Artificial Sequence
  ENSG00000143756_46 (sequence is synthesized)
acatattgcttcccaagtttttatagcaaagggcacaaagatcacaatgtgatttctgcagtggtttgtccattctcaccgtttgtgatcaacattttactggaggttctagccagagaa

SEQ ID NO: 382459 - DNA, 120 bp, Artificial Sequence
  ENSG00000143756_47 (sequence is synthesized)
attaggcaagaaaatgaaatacaaggcatccaaatgggaaaagaagaaatagaactctctgttcacagatgatatgatcttgtggataaggagtgcactaattgattattaaagctagta

SEQ ID NO: 382460 - DNA, 120 bp, Artificial Sequence
  ENSG00000143756_48 (sequence is synthesized)
aaccagttcagcaaggatatgggatataagaataatatacagaaaccaattatatttatatacactagcaatgaacaatccaaaaacgaaattcaaaacattttatcatagtttcaaaaa

SEQ ID NO: 382461 - DNA, 120 bp, Artificial Sequence
  ENSG00000143761_0 (sequence is synthesized)
agagccgccatcttgtgggagcaaaaccaacgcctggctcggagcagcagcctctgaggtgtccctggccagtgtccttccacctgtccacaagcatggggaacatcttcgccaacctct

SEQ ID NO: 382462 - DNA, 120 bp, Artificial Sequence
  ENSG00000143761_1 (sequence is synthesized)
tcaagggcctttttggcaaaaaagaaatgcgcatcctcatggtgggcctggatgctgcagggaagaccacgatcctctacaagcttaagctgggtgagatcgtgaccaccattcccacca

SEQ ID NO: 382463 - DNA, 120 bp, Artificial Sequence
  ENSG00000143761_2 (sequence is synthesized)
taggcttcaacgtggaaaccgtggagtacaagaacatcagcttcactgtgtgggacgtgggtggccaggacaagatccggcccctgtggcgccactacttccagaacacacaaggcctga

SEQ ID NO: 382464 - DNA, 120 bp, Artificial Sequence
  ENSG00000143761_3 (sequence is synthesized)
tcttcgtggtggacagcaatgacagagagcgtgtgaacgaggcccgtgaggagctcatgaggatgctggccgaggacgagctccgggatgctgtcctcctggtgttcgccaacaagcagg

SEQ ID NO: 382465 - DNA, 120 bp, Artificial Sequence
  ENSG00000143761_4 (sequence is synthesized)
acctccccaacgccatgaatgcggccgagatcacagacaagctggggctgcactcactacgccacaggaactggtacattcaggccacctgcgccaccagcggcgacgggctctatgaag

SEQ ID NO: 382466 - DNA, 120 bp, Artificial Sequence
  ENSG00000143761_5 (sequence is synthesized)
gactggactggctgtccaatcagctccggaaccagaagtgaacgcgacccccctccctctcactcctcttgccctctgctttactctcatgtggcaaacgtgcggctcgtggtgtgagtg

SEQ ID NO: 382467 - DNA, 120 bp, Artificial Sequence
  ENSG00000143761_6 (sequence is synthesized)
ccagaagctgcctccgtggtttggtcaccgtgtgcatcgcaccgtgctgtaaatgtggcagacgcagcctgcggccaggctttttatttaatgtaaatagtttttgtttccaatgaggca

SEQ ID NO: 382468 - DNA, 120 bp, Artificial Sequence
  ENSG00000143761_7 (sequence is synthesized)
ttgtaaaaagaaaaatcaactcactgttcagtgctgagaggggatgtaggcccatgggcacctggcctccaggagtcgctgtgttgggagagccggccacgcccttggctttagagctgt

SEQ ID NO: 382469 - DNA, 120 bp, Artificial Sequence
  ENSG00000143761_8 (sequence is synthesized)
gttgaaatccattttggtggttggtttttaacccaaactcagtgcattttttaaaatagttaagaatccaagtcgagaacacttgaacacacagaagggagaccccgcctagcatagatt

SEQ ID NO: 382470 - DNA, 120 bp, Artificial Sequence
  ENSG00000143761_9 (sequence is synthesized)
tgcagttacggcctggatgccagtcgccagcccagctgttcccctcgggaacatgaggtggtggtggcgcagcagactgcgatcaattctgcatggtcacagtagagatccccgcaactc

SEQ ID NO: 382471 - DNA, 120 bp, Artificial Sequence
  ENSG00000143761_10 (sequence is synthesized)
gcttgtccttgggtcaccctgcattccatagccatgtgcttgtccctgtgctcccacggttcccaggggccaggctgggagcccacagccaccccactatgccgcaggccgccctaccca

SEQ ID NO: 382472 - DNA, 120 bp, Artificial Sequence
  ENSG00000143761_11 (sequence is synthesized)
ccttcaggcagcctatgggacgcagggccccatctgtccctcggtcgccgtgtggccagagtgggtccgtcgtccccaacactcgtgctcgctcagacactttggcaggatgtctggggc

SEQ ID NO: 382473 - DNA, 120 bp, Artificial Sequence
  ENSG00000143761_12 (sequence is synthesized)
ctcaccagcaggagcgcgtgcaagccgggcaggcggtccacctagacccacagcccctcgggagcaccccacctctgtgtgtgatgtagctttctctccctcagcctgcaagggtccgat

SEQ ID NO: 382474 - DNA, 120 bp, Artificial Sequence
  ENSG00000143761_13 (sequence is synthesized)
ttgccatcgaaaaagacaacctctacttttttcttttgtattttgataaacactgaagctggagctgttaaatttatcttggggaaacctcagaactggtctatttggtgtcgtggaacc

SEQ ID NO: 382475 - DNA, 120 bp, Artificial Sequence
  ENSG00000143761_14 (sequence is synthesized)
tcttactgctttcaatacacgattagtaatcaactgttttgtatacttgttttcagttttcatttcgacaaacaagcactgtaattatagctattagaataaaatctcttaactatttca

SEQ ID NO: 382476 - DNA, 120 bp, Artificial Sequence
  ENSG00000143761_15 (sequence is synthesized)
ccttacccggcgtgccccgcgcccggaggcgctgacgtggccgccgtcagagccgccatcttgtgggagcaaaaccaacgcctggctcggagcagcagcctctgaggtgagggcgagggg

SEQ ID NO: 382477 - DNA, 120 bp, Artificial Sequence
  ENSG00000143761_16 (sequence is synthesized)
cgcgggccggtgtgggccgcagagacgttggagccggcgggggctggggactggcctcggggcgacttgaggtgtccctggccagtgtccttccacctgtccacaagcatggggaacatc

SEQ ID NO: 382478 - DNA, 120 bp, Artificial Sequence
  ENSG00000143761_17 (sequence is synthesized)
gcgcgtggacggttgggattagcggccgcgggggccggtgggggtcgtggggcctcccccacccgagtacaggcgagcgagcggcatccgggcggacccccgcctcggggaccgggaaac

SEQ ID NO: 382479 - DNA, 120 bp, Artificial Sequence
  ENSG00000143761_18 (sequence is synthesized)
aaactgaggctcgggcggcctgagacgccgtcaaggtcatgtaggtggtgggggcttgcatcttcgcctcccgactccatccagttcgtgtttgctgtgaagacggtgtccctggccagt

SEQ ID NO: 382480 - DNA, 120 bp, Artificial Sequence
  ENSG00000143761_19 (sequence is synthesized)
agtggctgtgacggtgagtgccacacagagctgcccacactggtggagggaaggcagggagataccaggaccatccggaaggggctgagtgtcatttgacaggtgccatgtgagcagaga

SEQ ID NO: 382481 - DNA, 120 bp, Artificial Sequence
  ENSG00000143761_20 (sequence is synthesized)
gtgggccgcagagacgttggagccggcgggggctggggactggcctcggggcgacttgagaggcgtctgggcagtggaggcccttcctgctggagtctccgcagggctctgatggtgtcc

SEQ ID NO: 382482 - DNA, 120 bp, Artificial Sequence
  ENSG00000143761_21 (sequence is synthesized)
gcagtgttaaatccctgcaggttccttattctcagcttgtgttgtgagtttcagtgttgggggctaatgtgggtttgcgtttttggtcttggttttcccagtggccagtccatcagccac

SEQ ID NO: 382483 - DNA, 120 bp, Artificial Sequence
  ENSG00000143761_22 (sequence is synthesized)
tgcactgggggccaggtagaggccaactgcaccctgcctgccagagtagaaatactggtaggccccaggctctgctgccccttccatgtccttgtgtaagcatccatggacaaagctgac

SEQ ID NO: 382484 - DNA, 120 bp, Artificial Sequence
  ENSG00000143761_23 (sequence is synthesized)
tcacggggtgtgcacagctgcagggaggccaggaaacaggggttttattctagagggccttgtgctcagtgacagaccagagtcccatcactgagagagcagggctggggcagcacaaag

SEQ ID NO: 382485 - DNA, 120 bp, Artificial Sequence
  ENSG00000143761_24 (sequence is synthesized)
gcaagtccttcattgtagctgtggtcagaggtcatgagacactgccttcagcagccctgggagtccacctggtgtgtggttagagctgtgcatctgcagatttcagaaggacttacgttt

SEQ ID NO: 382486 - DNA, 120 bp, Artificial Sequence
  ENSG00000143768_0 (sequence is synthesized)
acacccagctgcctgagaccctccttcaacctccctagaggacagccccactctgcctcctgctcccccagggcagcaccatgtggcccctgtggctctgctgggcactctgggtgctgc

SEQ ID NO: 382487 - DNA, 120 bp, Artificial Sequence
  ENSG00000143768_1 (sequence is synthesized)
ccctggctggccccggggcggccctgaccgaggagcagctcctgggcagcctgctgcggcagctgcagctcagcgaggtgcccgtactggacagggccgacatggagaagctggtcatcc

SEQ ID NO: 382488 - DNA, 120 bp, Artificial Sequence
  ENSG00000143768_2 (sequence is synthesized)
ccgcccacgtgagggcccagtatgtagtcctgctgcggcgcagccacggggaccgctcccgcggaaagaggttcagccagagcttccgagaggtggccggcaggttcctggcgtcggagg

SEQ ID NO: 382489 - DNA, 120 bp, Artificial Sequence
  ENSG00000143768_3 (sequence is synthesized)
ccagcacacacctgctggtgttcggcatggagcagcggctgccgcccaacagcgagctggtgcaggccgtgctgcggctcttccaggagccggtccccaaggccgcgctgcacaggcacg

SEQ ID NO: 382490 - DNA, 120 bp, Artificial Sequence
  ENSG00000143768_4 (sequence is synthesized)
ggcggctgtccccgcgcagcgcccaggcccgggtgaccgtcgagtggctgcgcgtccgcgacgacggctccaaccgcacctccctcatcgactccaggctggtgtccgtccacgagagcg

SEQ ID NO: 382491 - DNA, 120 bp, Artificial Sequence
  ENSG00000143768_5 (sequence is synthesized)
gctggaaggccttcgacgtgaccgaggccgtgaacttctggcagcagctgagccggccccggcagccgctgctgctacaggtgtcggtgcagagggagcatctgggcccgctggcgtccg

SEQ ID NO: 382492 - DNA, 120 bp, Artificial Sequence
  ENSG00000143768_6 (sequence is synthesized)
gcgcccacaagctggtccgctttgcctcgcagggggcgccagccgggcttggggagccccagctggagctgcacaccctggacctcagggactatggagctcagggcgactgtgaccctg

SEQ ID NO: 382493 - DNA, 120 bp, Artificial Sequence
  ENSG00000143768_7 (sequence is synthesized)
aagcaccaatgaccgagggcacccgctgctgccgccaggagatgtacattgacctgcaggggatgaagtgggccaagaactgggtgctggagcccccgggcttcctggcttacgagtgtg

SEQ ID NO: 382494 - DNA, 120 bp, Artificial Sequence
  ENSG00000143768_8 (sequence is synthesized)
tcgtcagcatcaaggagggaggcaggaccaggccccaggtggtcagcctgcccaacatgagggtgcagaagtgcagctgtgcctcggatggggcgctcgtgccaaggaggctccagccat

SEQ ID NO: 382495 - DNA, 120 bp, Artificial Sequence
  ENSG00000143768_9 (sequence is synthesized)
aggcgcctggtgtatccattgagccctctaactgaacgtgtgcatagaggtggtcttaatgtaggtcttaactttatacttagcaagttactccatcccaatttagtgctcctgtgtgac

SEQ ID NO: 382496 - DNA, 120 bp, Artificial Sequence
  ENSG00000143768_10 (sequence is synthesized)
cttcgccctgtgtccttccatttcctgtctttcccgtccatcacccatcctaagcacttacgtgagtaaataatgcagctcagatgctgagctctagtaggaaatgctggcatgctgatt

SEQ ID NO: 382497 - DNA, 120 bp, Artificial Sequence
  ENSG00000143768_11 (sequence is synthesized)
acaagatacagctgagcaatgcacacattttcagctgggagtttctgttctctggcaaattcttcactgagtctggaacaataataccctatgattagaactggggaaacagaactgaat

SEQ ID NO: 382498 - DNA, 120 bp, Artificial Sequence
  ENSG00000143768_12 (sequence is synthesized)
tgctgtgttatatgaggaattaaaaccttcaaatctctatttcccccaaatactgacccattctggacttttgtaaacatacctaggcccctgttcccctgagagggtgctaagaggaag

SEQ ID NO: 382499 - DNA, 120 bp, Artificial Sequence
  ENSG00000143768_13 (sequence is synthesized)
gatgaagggcttcaggctgggggcagtggacagggaattgggatacctggattctggttctgacagggccacaagctaggatctctaacaaacgcagaaggctttggctcgtcatttcct

SEQ ID NO: 382500 - DNA, 120 bp, Artificial Sequence
  ENSG00000143768_14 (sequence is synthesized)
cttaaaaaggaggagctgggcttcagctctaagaacttcattgccctggggatcagacagcccctacctacccctgcccactcctctggagactgagccttgcccgtgcatatttaggtc

SEQ ID NO: 382501 - DNA, 120 bp, Artificial Sequence
  ENSG00000143768_15 (sequence is synthesized)
atttcccacactgtcttagagaacttgtcaccagaaaccacatgtatttgcatgttttttgttaatttagctaaagcaattgaatgtagatactcagaagaaataaaaaatgatgtttca

SEQ ID NO: 382502 - DNA, 120 bp, Artificial Sequence
  ENSG00000143768_16 (sequence is synthesized)
ccggtgtctcctggcctggctgccagctcagtggccctgccatcctcagagctccgctggagtccggggaggccctgctgaccctgctcttgtccccagaggtggccggcaggttcctgg

SEQ ID NO: 382503 - DNA, 120 bp, Artificial Sequence
  ENSG00000143768_17 (sequence is synthesized)
gtcctttctagacagccccctcctccaggctcagggacctgtctggctgtgagctcccaggaggtcccaggggtgtgacctccctccctccctccctccctcttcccttcaccccaggcc

SEQ ID NO: 382504 - DNA, 120 bp, Artificial Sequence
  ENSG00000143771_0 (sequence is synthesized)
atccgagcgggtttgacggaaggagcggcggcgacggaggaggaggatggaggcggtggtgttcgtcttctctctcctcgattgttgcgcgctcatcttcctctcggtctacttcataat

SEQ ID NO: 382505 - DNA, 120 bp, Artificial Sequence
  ENSG00000143771_1 (sequence is synthesized)
tacattgtctgatttagaatgtgattacattaatgctagatcatgttgctcaaaattaaacaagtgggtaattccagaattgattggccataccattgtcactgtattactgctcatgtc

SEQ ID NO: 382506 - DNA, 120 bp, Artificial Sequence
  ENSG00000143771_2 (sequence is synthesized)
attgcactggttcatcttccttctcaacttacctgttgccacttggaatatatatcgatacattatggtgccgagtggtaacatgggagtgtttgatccaacagaaatacacaatcgagg

SEQ ID NO: 382507 - DNA, 120 bp, Artificial Sequence
  ENSG00000143771_3 (sequence is synthesized)
gcagctgaagtcacacatgaaagaagccatgatcaagcttggtttccacttgctctgcttcttcatgtatctttatagtatgatcttagctttgataaatgactgaagctggagaagccg

SEQ ID NO: 382508 - DNA, 120 bp, Artificial Sequence
  ENSG00000143771_4 (sequence is synthesized)
tggttgaagtcagcctacactacagtgcacagttgaggagccagagacttcttaaatcatccttagaaccgtgaccatagcagtatatattttcctcttggaacaaaaaactatttttgc

SEQ ID NO: 382509 - DNA, 120 bp, Artificial Sequence
  ENSG00000143771_5 (sequence is synthesized)
tgtatttttaccatataaagtatttaaaaaacatgaattgagtttctgtagatttctagttctcaactttagcctgaacgccaacacttgaaggtgtttttcatcctctgtatgttgaag

SEQ ID NO: 382510 - DNA, 120 bp, Artificial Sequence
  ENSG00000143771_6 (sequence is synthesized)
gtggttatttgtatgtaggaacaggactgccatcccagctttgcatgccaaagaaataaagaacacactttaaagggcaaactgaagagatgagcgagcaaaggtgcccttcaggtctac

SEQ ID NO: 382511 - DNA, 120 bp, Artificial Sequence
  ENSG00000143771_7 (sequence is synthesized)
tgaaaagttagagtacaaaacaacactgttgatctggacaaaagaagaaaaattaccctttttgcttgtgttgtgacaacttcatttaatatggtttaaagatttatgagactgtcagct

SEQ ID NO: 382512 - DNA, 120 bp, Artificial Sequence
  ENSG00000143771_8 (sequence is synthesized)
aaaagtcttttcacaagaatgtcaacagagaatggcatctcaaaatatatatatttctttgcacaatttgtgaaaccttataagccattttccccaggtacaatgtagttcctgctgata

SEQ ID NO: 382513 - DNA, 120 bp, Artificial Sequence
  ENSG00000143771_9 (sequence is synthesized)
gaaaggaaatattttgtcaagagctttcatttaaaagctactacctccacaatcacccccaaacccagaaaatccccactggctcttgccagtctggttttcgtattgcagttattccaa

SEQ ID NO: 382514 - DNA, 120 bp, Artificial Sequence
  ENSG00000143771_10 (sequence is synthesized)
ttgtatttgatctccctgataacgtattttcatgggtttgggtagaagatgctaatcagattagaagcaggaatagttatttgctgtctgtgaaattgagccttttggtgcgccacgtgg

SEQ ID NO: 382515 - DNA, 120 bp, Artificial Sequence
  ENSG00000143771_11 (sequence is synthesized)
tgccagatcaacacttctatccctctgcactgaccacgttgtgaactgggagaccaaatgcaagccatttcatggacatagcaatatacaaccaaactctgttccttggagttatattgt

SEQ ID NO: 382516 - DNA, 120 bp, Artificial Sequence
  ENSG00000143771_12 (sequence is synthesized)
aaactcttgcaggtgggagagcagttcacctccttagctctgtttgccagctcttacagggtaaaataaacctggcaatttatcctcagtcctagtttgtggtttaatgttgctatctta

SEQ ID NO: 382517 - DNA, 120 bp, Artificial Sequence
  ENSG00000143771_13 (sequence is synthesized)
agcactggcatttgggcaaaacatgactgtgttctgtgggagaatccaaaggcattattcactctagttgagatagaattgggtggctaaacagggtgtgtggtacccaaaagattaaat

SEQ ID NO: 382518 - DNA, 120 bp, Artificial Sequence
  ENSG00000143771_14 (sequence is synthesized)
gttacatgtccttttagtccttgaccaggtctagccttggcagaagcaagggagccactaagccaaactccctgtgcagacagaccatgtttcaaggctggaagtagtgccctggcaaca

SEQ ID NO: 382519 - DNA, 120 bp, Artificial Sequence
  ENSG00000143771_15 (sequence is synthesized)
cacaaaaggaacggtgaaatggtaggcaaagtgaacttggctctgctggcctctttggggtcacagaaattgctccttgtggtaatcttatatttctgtcaggcacagggccaagaagct

SEQ ID NO: 382520 - DNA, 120 bp, Artificial Sequence
  ENSG00000143771_16 (sequence is synthesized)
gtgtaacagacattactttgcttgcatctctttttcataccttttccctctgaggcagcttttgcttagaaaacagtcccttcactctgcctttcctcctaacttcctgtgcctcttcat

SEQ ID NO: 382521 - DNA, 120 bp, Artificial Sequence
  ENSG00000143771_17 (sequence is synthesized)
tcatgttctgctcaagctttttaaagcaacgaagctgttggagaacttaaatccttgcaactgagagataagctacttaaaggcggtagagatctttttttttttttttttgagatgggg

SEQ ID NO: 382522 - DNA, 120 bp, Artificial Sequence
  ENSG00000143771_18 (sequence is synthesized)
cctggccatgtagatgacttttgaccaaaatgtttcaccttctcattcagatattcttagtaaccaaaacagtgactcatgcagttgagagagcctttgggctgtcagtttacagtacat

SEQ ID NO: 382523 - DNA, 120 bp, Artificial Sequence
  ENSG00000143771_19 (sequence is synthesized)
caggcttgctgaggctaagcaaatcagaaaggtgccatgtttataacagaggtcaaagctccttacttctgaaacattagctgtggttaaaaacaaaaactcttccttcttgtattgctt

SEQ ID NO: 382524 - DNA, 120 bp, Artificial Sequence
  ENSG00000143771_20 (sequence is synthesized)
gtctatcaaagccaggaaagtgggggatcactgtagttaaattttttttttttttaattagagacagagtcttgccctgtcgcccaagctggagtgcactggcgcaatcgtggtacactg

SEQ ID NO: 382525 - DNA, 120 bp, Artificial Sequence
  ENSG00000143771_21 (sequence is synthesized)
ctgcctcagcttcccaagtagttgggagtaggtgcacaccaccatgcccagcgaattttttgtagagacagaggtcttgctatgttgcctaggctggtatcaaaattactggcctcaagc

SEQ ID NO: 382526 - DNA, 120 bp, Artificial Sequence
  ENSG00000143771_22 (sequence is synthesized)
ctaggctggtatcaaaattactggcctcaagcgattctcctgcctcggcctcccagatgttgggattactggtgtgagccaccacgcccagctcaaaaacaatttttttaggggcacttc

SEQ ID NO: 382527 - DNA, 120 bp, Artificial Sequence
  ENSG00000143771_23 (sequence is synthesized)
tacaaatcatgaaagggggataaaagcactgactttaaaaagccatgtttaagatgctataaatgttctccccttttcattgattggagagttgtagaggaccttagagatcattttgtc

SEQ ID NO: 382528 - DNA, 120 bp, Artificial Sequence
  ENSG00000143771_24 (sequence is synthesized)
taactccctcatcccaaagataaactgaggcctagagatcgttcagggtgttgtaactgggaacatctgaatgctgaggcctagagatcgttcagggtgttgtaactgggaacatctgaa

SEQ ID NO: 382529 - DNA, 120 bp, Artificial Sequence
  ENSG00000143771_25 (sequence is synthesized)
tgctgaggcctagagatcgttcagggtgttgtaactgggaacatctgaatgctgaggcctagagatcgttcagggtgttgtaactgggaacatctgaatgctgaggcctagagatcgttc

SEQ ID NO: 382530 - DNA, 120 bp, Artificial Sequence
  ENSG00000143771_26 (sequence is synthesized)
agggtgttgtaactgggaacatctgaatgctgaggcctagagatcgttcagggtgttgtaactgggaacatctgaatgctgaggcctagagatcgttcagggtgttgtaactgggaacat

SEQ ID NO: 382531 - DNA, 120 bp, Artificial Sequence
  ENSG00000143771_27 (sequence is synthesized)
ctgaatgctgaggcctagagatcgttcagggtgttgtaactgggaacatctgaatgctgaggcttagtccagtgttctctctcccttaccactcctcttccccttccctctataatggca

SEQ ID NO: 382532 - DNA, 120 bp, Artificial Sequence
  ENSG00000143771_28 (sequence is synthesized)
gtacccagggcccggtccatagactactatcgagtgctcctatgtgcatcttagtacgtatcattttcccttgcctttttccttctatcctttcagtggtagcaactgcccttgctaatc

SEQ ID NO: 382533 - DNA, 120 bp, Artificial Sequence
  ENSG00000143771_29 (sequence is synthesized)
accgtaacctcggctgagaaagaagaggaagcgaaatccaagatgcagctcagttcatcaaagcctagcaggtcccctcagctgccttttcatgcctgccacagactacagtaggacaaa

SEQ ID NO: 382534 - DNA, 120 bp, Artificial Sequence
  ENSG00000143771_30 (sequence is synthesized)
acctgacctggtctttgaagttaagagctaagaaagcttcctatagtagtatctcccatggcacttaccacattctatctggtattacagttatttgtatgcaattaatcactcttagat

SEQ ID NO: 382535 - DNA, 120 bp, Artificial Sequence
  ENSG00000143771_31 (sequence is synthesized)
tgtatgttcctggagggcagaatatgcccattcatatttgtatcttcttccttctgctcttggcacctaacacagtgccttgcacacaaacaataaatgattgttgagtgaataagtaaa

SEQ ID NO: 382536 - DNA, 120 bp, Artificial Sequence
  ENSG00000143771_32 (sequence is synthesized)
ggtttgacggaaggagcggcggcgacggaggaggaggatggaggcggtggtgttcgtcttctctctcctcgattgttgcgcgctcatcttcctctcggtctacttcgtatccttgcctga

SEQ ID NO: 382537 - DNA, 120 bp, Artificial Sequence
  ENSG00000143771_33 (sequence is synthesized)
gcaggcgaacgccttgccgggggacacggctgagggtgggccagttgggcacccgggcaggtgtgtgggactagggaggcgcccggcggcgggcgtgggctccctgggagctggcctggc

SEQ ID NO: 382538 - DNA, 120 bp, Artificial Sequence
  ENSG00000143771_34 (sequence is synthesized)
gagaggctggctgccctacccgacgggccctgctgccctgcacgcacttgccctgcctgggttgccggccgcccctcactcgggtccgagtgggcctctccgggcgcgccccgtctcggc

SEQ ID NO: 382539 - DNA, 120 bp, Artificial Sequence
  ENSG00000143771_35 (sequence is synthesized)
gccctgcgccgtgctcttcgtcggatattgggggtcccaagggcggtcgcttgcgacagtcgggtgccgggataagtgcgggccatttgcctcctcctgttccccacgcaacacccccgg

SEQ ID NO: 382540 - DNA, 120 bp, Artificial Sequence
  ENSG00000143771_36 (sequence is synthesized)
cacccgcccctttgttctggcgggtgttagtacttgcagggacctttcacatccaggagttgactcattcgccaaaggagcgaagttgcttccttcactgtgccgttttgtatgggtaat

SEQ ID NO: 382541 - DNA, 120 bp, Artificial Sequence
  ENSG00000143771_37 (sequence is synthesized)
gggtttgacggaaggagcggcggcgacggaggaggaggatggaggcggtggtgttcgtcttctctctcctcgattgttgcgcgctcatcttcctctcggtctacttcgccagttgcagtg

SEQ ID NO: 382542 - DNA, 120 bp, Artificial Sequence
  ENSG00000143771_38 (sequence is synthesized)
gctgacacctgtccccagtactttgggaggccgaggagggagaatcacttgagcccagcggttcgagaccagctctggtaacatagggagacttcctctctacaaaaataaaacaagagg

SEQ ID NO: 382543 - DNA, 120 bp, Artificial Sequence
  ENSG00000143771_39 (sequence is synthesized)
aaaaaaaaaagaaacatgtttcaggtctgtgtctgtgtaatacaaagatgactgcagcctacagtaagaaatccagagactgaaggctatagctttagggatctgatatggatcgcagag

SEQ ID NO: 382544 - DNA, 120 bp, Artificial Sequence
  ENSG00000143772_0 (sequence is synthesized)
atggctgtgtactgctatgcgctcaatagcctggtgatcatgaatagcgccaacgagatgaagagcggcggcggcccggggcccagtggcagcgagacgcccccgcccccgaggagggca

SEQ ID NO: 382545 - DNA, 120 bp, Artificial Sequence
  ENSG00000143772_1 (sequence is synthesized)
gtgctgagccccggcagcgttttcagccccgggagaggcgcctctttcctcttccccccagccgagtcgctgtcccccgaggagccccggagccccgggggctggcggagcggccggcgc

SEQ ID NO: 382546 - DNA, 120 bp, Artificial Sequence
  ENSG00000143772_2 (sequence is synthesized)
aggctgaatagtagcagcggcagtggcagcggcagcagcggcagtagcgtgagcagcccaagttgggctggtcgcctgcgaggggaccggcagcaggtggtggcagccggtaccctctcc

SEQ ID NO: 382547 - DNA, 120 bp, Artificial Sequence
  ENSG00000143772_3 (sequence is synthesized)
ccgccagggccggaggaggccaagaggaagctgcggatcttgcagcgcgagttgcagaacgtgcaggtgaaccagaaagtgggcatgtttgaggcgcacatccaggcacagagctccgcc

SEQ ID NO: 382548 - DNA, 120 bp, Artificial Sequence
  ENSG00000143772_4 (sequence is synthesized)
attcaagcgccccgcagcccgcgtttgggcagggctcgctcgccctccccgtgccccttccgcagcagcagtcagccccctggaagggtcctggttcagggcgcccggagcgaggaacgg

SEQ ID NO: 382549 - DNA, 120 bp, Artificial Sequence
  ENSG00000143772_5 (sequence is synthesized)
aggacaaagtcctggggggagcaatgtccagagacttcaggaaccgactccgggaggaaaggagggcccagcctatgctcctcgcaggtgaagaaaggaatgccacctcttcccggccgg

SEQ ID NO: 382550 - DNA, 120 bp, Artificial Sequence
  ENSG00000143772_6 (sequence is synthesized)
gctgcccctacaggatcagaggctcagggtccatccgcttttgtaaggatggagaagggtatccctgccagtccccgctgtggctcacccacagctatggaaattgacaaaaggggctct

SEQ ID NO: 382551 - DNA, 120 bp, Artificial Sequence
  ENSG00000143772_7 (sequence is synthesized)
cctaccccgggaactcggagctgcctagctccctcattggggctgttcggagctagcttaacgatggccacggaagtggcagcgagagttacatccactgggccacaccgtccacaggat

SEQ ID NO: 382552 - DNA, 120 bp, Artificial Sequence
  ENSG00000143772_8 (sequence is synthesized)
cttgccctcactgagccgtctgggagagcccgtgagcttgaggacctgcagcccccagaggccctggtggagaggcaggggcagtttctgggcagtgagacaagcccagccccagaaagg

SEQ ID NO: 382553 - DNA, 120 bp, Artificial Sequence
  ENSG00000143772_9 (sequence is synthesized)
ggcgggccccgcgatggagaaccccctgggaagatggggaaaggatatctgccctgtggcatgccgggctctggggagcctgaagtgggcaaaaggccagaggagacgactgtgagcgtg

SEQ ID NO: 382554 - DNA, 120 bp, Artificial Sequence
  ENSG00000143772_10 (sequence is synthesized)
caaagcgcagagtcctctgattccctgagctggtccaggctgcccagggccctggcctccgtaggccctgaggaggcccgaagtggggcccccgtgggcggggggcgttggcagctctcc

SEQ ID NO: 382555 - DNA, 120 bp, Artificial Sequence
  ENSG00000143772_11 (sequence is synthesized)
gacagagtggagggagggtccccaacgctgggcttgcttgggggcagcccctcagcacagccggggaccgggaatgtggaggcgggaattccttctggcagaatgctggagcctttgccc

SEQ ID NO: 382556 - DNA, 120 bp, Artificial Sequence
  ENSG00000143772_12 (sequence is synthesized)
tgttgggacgctgcgaaagatctgaaagaacctcagtgccctcctggggacagggtgggtgtgcagcctgggaactccagggtttggcagggcaccatggagaaagccggtttggcttgg

SEQ ID NO: 382557 - DNA, 120 bp, Artificial Sequence
  ENSG00000143772_13 (sequence is synthesized)
acgcgtggcacaggggtgcaatcagaggggacttgggaaagccagcggcaggacagtgatgccctcccaagtccggagctgctaccccaagatccggacaagcctttcctgaggaaggcc

SEQ ID NO: 382558 - DNA, 120 bp, Artificial Sequence
  ENSG00000143772_14 (sequence is synthesized)
tgcagccccagcaacatacctgctgtcatcattacagacatgggcacccaggaggatggggccttggaggagacgcagggaagccctcggggcaacctgcccctgaggaaactgtcctct

SEQ ID NO: 382559 - DNA, 120 bp, Artificial Sequence
  ENSG00000143772_15 (sequence is synthesized)
tcctcggcctcctccacgggcttctcctcatcctacgaagactcagaggaggacatctccagtgaccctgagcgcaccctggaccccaactcagccttcctgcataccctggaccagcag

SEQ ID NO: 382560 - DNA, 120 bp, Artificial Sequence
  ENSG00000143772_16 (sequence is synthesized)
aaacctagagtgagcaaatcatggaggaagataaaaaacatggtgcactggtctcccttcgtcatgtccttcaagaagaagtacccctggatccagctggcaggacacgcagggagtttc

SEQ ID NO: 382561 - DNA, 120 bp, Artificial Sequence
  ENSG00000143772_17 (sequence is synthesized)
aaggcagctgccaatggcaggatcctgaagaagcactgtgagtcagagcagcgctgcctggaccggctgatggtggatgtgctgaggcccttcgtacctgcctaccatggggatgtggtg

SEQ ID NO: 382562 - DNA, 120 bp, Artificial Sequence
  ENSG00000143772_18 (sequence is synthesized)
aaggacggggagcgctacaaccagatggacgacctgctggccgacttcgactcgccctgtgtgatggactgcaagatgggaatcaggacctacctggaggaggagctcacgaaggcccgg

SEQ ID NO: 382563 - DNA, 120 bp, Artificial Sequence
  ENSG00000143772_19 (sequence is synthesized)
aagaagcccagcctgcggaaggacatgtaccagaagatgatcgaggtggaccccgaggcccccaccgaggaggaaaaagcacagcgggctgtgaccaagccacggtacatgcagtggcgg

SEQ ID NO: 382564 - DNA, 120 bp, Artificial Sequence
  ENSG00000143772_20 (sequence is synthesized)
gagaccatcagctccacggccaccctggggttcaggatcgagggaatcaagaaagaagacggcaccgtgaaccgggacttcaagaagaccaaaacgagggagcaggtcaccgaggccttc

SEQ ID NO: 382565 - DNA, 120 bp, Artificial Sequence
  ENSG00000143772_21 (sequence is synthesized)
agagagttcactaaaggaaaccataacatcctgatcgcctatcgggaccggctgaaggccattcgaaccactctagaagtttctcccttcttcaagtgccacgaggtcattggcagctcc

SEQ ID NO: 382566 - DNA, 120 bp, Artificial Sequence
  ENSG00000143772_22 (sequence is synthesized)
ctcctcttcatccacgacaagaaggaacaggccaaagtgtggatgatcgactttgggaaaaccacgcccctgcctgagggccagaccctgcagcatgacgtcccctggcaggaggggaac

SEQ ID NO: 382567 - DNA, 120 bp, Artificial Sequence
  ENSG00000143772_23 (sequence is synthesized)
cgggaggatggctacctctcggggctcaataacctcgtcgacatcctgaccgagatgtcccaggatgccccactcgcctgagctgcccacgccctccctggcccccgcctgggcctcctt

SEQ ID NO: 382568 - DNA, 120 bp, Artificial Sequence
  ENSG00000143772_24 (sequence is synthesized)
cctgaactgcactacaagacactttgtagaagaggagatgagagtttctagtcattttcctaacttcagggcttggaggtggtgtttgcactgctttttgtagagagggtcacctactag

SEQ ID NO: 382569 - DNA, 120 bp, Artificial Sequence
  ENSG00000143772_25 (sequence is synthesized)
aagagaaatgcccagtcttagaggtgggtcaggtgtagagctggagggggtccctggctgctgaggggaccctaccagatgagccctgcctctgggagccccctaggaagcaccagcctg

SEQ ID NO: 382570 - DNA, 120 bp, Artificial Sequence
  ENSG00000143772_26 (sequence is synthesized)
gacctaccacctgcggaggcctgctgccccctggcggccagtgctgttagagtgctgccaagcacagccttatttctgccggggcctccccaccggagagcccagggggccggccgggtt

SEQ ID NO: 382571 - DNA, 120 bp, Artificial Sequence
  ENSG00000143772_27 (sequence is synthesized)
cctggtccctggctgggagcagggctttctggtagttggggcacaaaaccatcggggaaccacatgttgactgtgagcaaagtgtcttccgattagcagcctcagggatgccctggtggc

SEQ ID NO: 382572 - DNA, 120 bp, Artificial Sequence
  ENSG00000143772_28 (sequence is synthesized)
ctctccagggctgctcaggcaaggccccccacccatctggtatggaaacctgccggctccaggccagacccaggagccaagagaaggctgaagccagcttggctgtgttctctgatctag

SEQ ID NO: 382573 - DNA, 120 bp, Artificial Sequence
  ENSG00000143772_29 (sequence is synthesized)
gccttcccagaggaggcgagcagaagctgtgccacttggaattgcaacccatgagttcagaaggcacactctgccatgctgagctccaagggtgctaccaggggaagatgggatctatag

SEQ ID NO: 382574 - DNA, 120 bp, Artificial Sequence
  ENSG00000143772_30 (sequence is synthesized)
agtctctgggccctggccccagggaggagcacatttttcttgaccctcacctacctggtgctagttggtcaaccctgcctgcatacatgggctcctgtcatggggcccagagtcccttgc

SEQ ID NO: 382575 - DNA, 120 bp, Artificial Sequence
  ENSG00000143772_31 (sequence is synthesized)
agatatagaaataggggaggagctcaggtctgcgccaggcaggaagaaggcaggcttctggcttccagaggtgccgcggtggcctcctggcatcatttgttattgcctctgaaacaagcc

SEQ ID NO: 382576 - DNA, 120 bp, Artificial Sequence
  ENSG00000143772_32 (sequence is synthesized)
ttactgcctggagggcttagattcctgcttctccaatgtagtgtgggtatcttgtagggtatgtggtggatgccagggcgtgctccaggcacctcttcctgaagtctctgcatttggaga

SEQ ID NO: 382577 - DNA, 120 bp, Artificial Sequence
  ENSG00000143772_33 (sequence is synthesized)
ttcgtggagaacctatttaagcccaattttaactgaaagccagtgagtctgatatggaagggaatgtaaaatttgcctgacttcttaagaacaaaacccccagctctgtgccccatgctc

SEQ ID NO: 382578 - DNA, 120 bp, Artificial Sequence
  ENSG00000143772_34 (sequence is synthesized)
cttggggcttgccacccactcctttgctgtcagaggtacaggagctgggagagtccaggagctagggacacagagggagactatggaccaaggtgtgtgtgtctggaggaaccactgccc

SEQ ID NO: 382579 - DNA, 120 bp, Artificial Sequence
  ENSG00000143772_35 (sequence is synthesized)
accccaccaccccggggtctctggggaactgtcaacctgcccacgggacatgtacatttccccttttgtgctggaagtgtgagtgacacttgctgggggtggagggtgggacacatgagg

SEQ ID NO: 382580 - DNA, 120 bp, Artificial Sequence
  ENSG00000143772_36 (sequence is synthesized)
atgtataagtacagattttaaaaaaggaaatcaacttacacttcctggctcttgtttaaaacagtggtgagctcctgtgtgggccgacttgctaaaggtcacacacgcgcccggtggagc

SEQ ID NO: 382581 - DNA, 120 bp, Artificial Sequence
  ENSG00000143772_37 (sequence is synthesized)
acgagagacctcgtggcagcatgtgatctggaaggcaggcaggacgggggcgttggggagccaaagtcaactctgggcctctggagctatagtgacttttgggctagaagggaccctggt

SEQ ID NO: 382582 - DNA, 120 bp, Artificial Sequence
  ENSG00000143772_38 (sequence is synthesized)
ggtctgtgcttcagccatttgcagggcaggggcatcattaattcagacgtaaagattctatgaatatggactggccaaaagttatccttactccatctgtgaaagaagtttgctaaagca

SEQ ID NO: 382583 - DNA, 120 bp, Artificial Sequence
  ENSG00000143772_39 (sequence is synthesized)
aatcatgatatgaacaaaaattacaggggacctgtttaagagaacaaaatgttccaagcactttaggcagacaccagctgtttgcaaacaatgtgctaatatgcaaatgatgtgcttatt

SEQ ID NO: 382584 - DNA, 120 bp, Artificial Sequence
  ENSG00000143772_40 (sequence is synthesized)
aaaggaggcccatggggcctcttattggcaatacttggctgtgggttacattaaatatgtgaacatagtatgaagtagcatcattttagggttattctgttacttagggtttttgttttc

SEQ ID NO: 382585 - DNA, 120 bp, Artificial Sequence
  ENSG00000143772_41 (sequence is synthesized)
tgttttttttttctctttttttgtatttaccgtgctagttctcttctacacctactctgtctctcaagccattttgccactcgcttccctgccatctggcccttccctttgtctcagtgg

SEQ ID NO: 382586 - DNA, 120 bp, Artificial Sequence
  ENSG00000143772_42 (sequence is synthesized)
gatagatggattgtgaaatggaatctcccagaacccctgccctggcagcctggaagaccgtgcctgcccagccctcgtcaccacagggactccttgggtcctggcagtgcatgtgccagc

SEQ ID NO: 382587 - DNA, 120 bp, Artificial Sequence
  ENSG00000143772_43 (sequence is synthesized)
aggcaggacaaactctgtgtacctgtgcccaggtgaatgggcgcagggtcctcttgccctgtcctgcggggggccccacgagttcctggcattcagcactgcttagcattctcggaaggt

SEQ ID NO: 382588 - DNA, 120 bp, Artificial Sequence
  ENSG00000143772_44 (sequence is synthesized)
ttcttcaactgcttgcttttcccaggcttgcctttagtgtcatgtaagacatttttaagttatatttattttgttgggttttaaaattgcacagaacactaagaccgaaaggctggactc

SEQ ID NO: 382589 - DNA, 120 bp, Artificial Sequence
  ENSG00000143772_45 (sequence is synthesized)
ttgtttctccttgaaagctttgcctttgttttgaacttcctttcccacttggtagaaagagcccagaagcagccctggccctgtaagatggactctttcatccttcagttgtatttagct

SEQ ID NO: 382590 - DNA, 120 bp, Artificial Sequence
  ENSG00000143772_46 (sequence is synthesized)
ttgagtttctctgcatctgtccaccccatgtgtatataacccagcccctggctctggggtggtcacctcgtcagtgccttttgttctggaggagaggaccccccccgcctgccgagaggc

SEQ ID NO: 382591 - DNA, 120 bp, Artificial Sequence
  ENSG00000143772_47 (sequence is synthesized)
tctcttcctgttctgcacccctctccccatgggaccttggagaaaactgaactgttacaaacccctgcacagtgcctgtcaaacagatgcaaaccttcctgaataaagccttggagacca

SEQ ID NO: 382592 - DNA, 120 bp, Artificial Sequence
  ENSG00000143772_48 (sequence is synthesized)
cctcttttttgtcttccatagcttgtgagaaaataatttctgagcatttttacttttaaagccatctcgtccctacgaggtttgcgcctctgggcatgtagtctacacaggacctgagaa

SEQ ID NO: 382593 - DNA, 120 bp, Artificial Sequence
  ENSG00000143772_49 (sequence is synthesized)
tctgagaaactgcagccgcacggttgtttatggagctttgggcgggggctgagcccgcggtcgtgcccccagcccgctgcccaggccatgccgccccatctgcgcgcggagccgcggctg

SEQ ID NO: 382594 - DNA, 120 bp, Artificial Sequence
  ENSG00000143772_50 (sequence is synthesized)
attgaacaaacactgaagtagcccggagcagacactgacaggggcagtatctccacggtcgaaaagggcgtgcagggccggcttggcgtcgccactgccgggatcgccgggcccctgaac

SEQ ID NO: 382595 - DNA, 120 bp, Artificial Sequence
  ENSG00000143772_51 (sequence is synthesized)
cttgggaagtgttcccctcagtggtactgctggggcaacgtccaataccaagaatgatgtatagcatatttcatcttcctacactactctctggaaagactgagccaattacggggtcat

SEQ ID NO: 382596 - DNA, 120 bp, Artificial Sequence
  ENSG00000143772_52 (sequence is synthesized)
ctgtaaagtctaagtgctgcagtttccctacgaccattggattttgtttgtagtttgatattgtcttactgtcccttgaagttgtaatttgtaattctttagttttcaagagggactcta

SEQ ID NO: 382597 - DNA, 120 bp, Artificial Sequence
  ENSG00000143772_53 (sequence is synthesized)
catgtttccttgtgatgatggccttgagttactcatgtgtacactgcctatttatccccattgagcccccactgcccgaacatgttgatggcattttatatagtaagctgtcagttactt

SEQ ID NO: 382598 - DNA, 120 bp, Artificial Sequence
  ENSG00000143772_54 (sequence is synthesized)
catgttgatggcattttatatagtaagctgtcagttacttaatgtacaaatattcttccattccatgtttttctcttaaaattttactttattggccaggcgcagtggctcacatctgta

SEQ ID NO: 382599 - DNA, 120 bp, Artificial Sequence
  ENSG00000143774_0 (sequence is synthesized)
gaggtggccccggatgctgcggcgcccgctggccgggctggctgcggccgccctgggccgggccccaccggacggcttgctctgctctttacctggggttgctgtcgaggaccctgtgca

SEQ ID NO: 382600 - DNA, 120 bp, Artificial Sequence
  ENSG00000143774_1 (sequence is synthesized)
agactcggccggtttttctttctccctgatggacagacccaaacatagccgcgcagcatcgtgaagggctggggccttcactcctctgtggctctggaagagcccgatttcctcaggagg

SEQ ID NO: 382601 - DNA, 120 bp, Artificial Sequence
  ENSG00000143774_2 (sequence is synthesized)
catgtcgggccccaggcctgtggtgctgagcgggccttcgggagctgggaagagcaccctgctgaagaggctgctccaggagcacagcggcatctttggcttcagcgtgtcccataccac

SEQ ID NO: 382602 - DNA, 120 bp, Artificial Sequence
  ENSG00000143774_3 (sequence is synthesized)
gaggaacccgaggcccggcgaggagaacggcaaagattactactttgtaaccagggaggtgatgcagcgtgacatagcagccggcgacttcatcgagcatgccgagttctcggggaacct

SEQ ID NO: 382603 - DNA, 120 bp, Artificial Sequence
  ENSG00000143774_4 (sequence is synthesized)
ggcacgagcaaggtggcggtgcaggccgtgcaggccatgaaccgcatctgtgtgctggacgtggacctgcagggtgtgcggaacatcaaggccaccgatctgcggcccatctacatctct

SEQ ID NO: 382604 - DNA, 120 bp, Artificial Sequence
  ENSG00000143774_5 (sequence is synthesized)
gtgcagccgccttcactgcacgtgctggagcagcggctgcggcagcgcaacactgaaaccgaggagagcctggtgaagcggctggctgctgcccaggccgacatggagagcagcaaggag

SEQ ID NO: 382605 - DNA, 120 bp, Artificial Sequence
  ENSG00000143774_6 (sequence is synthesized)
cccggcctgtttgatgtggtcatcattaacgacagcctggaccaggcctacgcagagctgaaggaggcgctctctgaggaaatcaagaaagctcaaaggaccggcgcctgaggcttgctg

SEQ ID NO: 382606 - DNA, 120 bp, Artificial Sequence
  ENSG00000143774_7 (sequence is synthesized)
tctgttctcggcaccccgggcccatacaggaccagggcagcagcattgagccacccccttggcaggcgatacggcagctctgtgcccttggccagcatgtggagtggaggagatgctgcc

SEQ ID NO: 382607 - DNA, 120 bp, Artificial Sequence
  ENSG00000143774_8 (sequence is synthesized)
cctgtggttggaacatcctggggtgacccccgacccagcctcgctgggctgtcccctgtccctatctctcactctggacccagggctgacatcctaataaaataactgttggattagaaa

SEQ ID NO: 382608 - DNA, 120 bp, Artificial Sequence
  ENSG00000143774_9 (sequence is synthesized)
cgcctcgcctgagttgtgtccaaggtgtgcgtgtggccaggggtccatccgcttccctctagcccagcccctgaacacagctgcagtgcacggccccactcctcagctctgctccccatc

SEQ ID NO: 382609 - DNA, 120 bp, Artificial Sequence
  ENSG00000143774_10 (sequence is synthesized)
ccaactcgaagacgctgccctggccctgtgtgtgcagctcatgtggactgggagggcagggcaggtgcaggtcttggggcaagagctggagctgtcttttccttcctgcacagccgcaga

SEQ ID NO: 382610 - DNA, 120 bp, Artificial Sequence
  ENSG00000143774_11 (sequence is synthesized)
gcaggtggatggggctgcttccctgcaagggcccagggccaggccccctggggatttattcgtggcttagaagggtggggccagaagcaggcgtagtggggattagggactcagcacccc

SEQ ID NO: 382611 - DNA, 120 bp, Artificial Sequence
  ENSG00000143774_12 (sequence is synthesized)
cttctctgagtgacaagcgggacaagtacgccgtgggcggggccggcgggtcgtgatgttagttcgcgctgtgtggaggcgggccggcgtggcgctgtgacgcagcgggagaagacgggc

SEQ ID NO: 382612 - DNA, 80 bp, Artificial Sequence
  ENSG00000143774_13 (sequence is synthesized)
agtctcgcgcgcgggcggaggtgggccggtgcggcgctgtcacgtaggttcagtgggcggaagaggtggccccggatgct

SEQ ID NO: 382613 - DNA, 120 bp, Artificial Sequence
  ENSG00000143774_14 (sequence is synthesized)
gtaggctcctgcgccttcccagtggtgtgcttcactggctgcctgcatcctggggctcaagtgctgtcgggactgcaagggaaacgctgggtggggcattgggctccgagcagcccccga

SEQ ID NO: 382614 - DNA, 120 bp, Artificial Sequence
  ENSG00000143774_15 (sequence is synthesized)
tgtgtgtgtagaggatagtgtagcccctaaccagagtcctgatgggtgctggtgtccagacccaagttctggggctccagagagagcaggagtggtgcctgaggactgaggcccaggggg

SEQ ID NO: 382615 - DNA, 120 bp, Artificial Sequence
  ENSG00000143774_16 (sequence is synthesized)
cggcccttccctaccctgcacaggcccggctgggctggaaagctgtcccacagccgcagtgaggacagccgcaggccagtgggctgctctgggggtcgtgtgggacctggggtggggctg

SEQ ID NO: 382616 - DNA, 120 bp, Artificial Sequence
  ENSG00000143774_17 (sequence is synthesized)
ccctcctcttccccagattactactttgtaaccagggaggtgatgcagcgtgacatagcagccggcgacttcatcgagcatgccgagttctcggggaacctgtatggcacgaggtggcgg

SEQ ID NO: 382617 - DNA, 120 bp, Artificial Sequence
  ENSG00000143774_18 (sequence is synthesized)
atcacagataggagtcccaagtcctatgagaagttcctggaataggtgtagattcagtagatctttacaagaccatatctgcagggcaaggtaccagaggacagaggcggggacagggac

SEQ ID NO: 382618 - DNA, 120 bp, Artificial Sequence
  ENSG00000143774_19 (sequence is synthesized)
acttccattccagacctagcagcccagcactcagcaccatgcatgggagcaaatggctggactcctgggtggggtgggggtctcagagcaggctcccagagggcttggaggtgactccac

SEQ ID NO: 382619 - DNA, 120 bp, Artificial Sequence
  ENSG00000143774_20 (sequence is synthesized)
caggtggggacggcagctcccaggtagggtgtcatcagagtagacagcattgcttgctagggacccctggggaggctgacagggtcagtgggtttcagttggggggctcccctgctgaga

SEQ ID NO: 382620 - DNA, 120 bp, Artificial Sequence
  ENSG00000143774_21 (sequence is synthesized)
acccagtaaagccggccttccattcgtctcccgtgtgcccagagcctggtctgagggccgccctgtgcatgccggcccttccaacgtggcagagctcagggggaagaacacccaggctct

SEQ ID NO: 382621 - DNA, 120 bp, Artificial Sequence
  ENSG00000143774_22 (sequence is synthesized)
caggagactctcaggccaatgtctccatccctgggtcagccctttcctgccatgaattcaggaaggcagaggcagctcagcagatggggactagaggccgcactgctatccacagcctct

SEQ ID NO: 382622 - DNA, 120 bp, Artificial Sequence
  ENSG00000143774_23 (sequence is synthesized)
tgtccgaactcttgcacactcccccccacacagaacctgaggttatcacactcctgctgtcctgcgtgcctgtgtctcccttccctgggtctgttgagtactgataactgggccacagtg

SEQ ID NO: 382623 - DNA, 120 bp, Artificial Sequence
  ENSG00000143774_24 (sequence is synthesized)
ccctgcagctgtgttggctgtgctgcccgtctcctgcccccatcaatccctaatctgtgagatgggtccttgcctccaagggccggtgaactcaatcagggtgtcagcgccacagcgtgg

SEQ ID NO: 382624 - DNA, 120 bp, Artificial Sequence
  ENSG00000143774_25 (sequence is synthesized)
tgtcgccttccttgggtacagtgtgagaggccggccaaggcctggggctgtcttcctcccaccttggaggcggccacagtgctgctgtccccagccctgtcctggactcggcacttatca

SEQ ID NO: 382625 - DNA, 120 bp, Artificial Sequence
  ENSG00000143774_26 (sequence is synthesized)
gcacttttgagctgtcttctggagtcctggtaaaaagggctactctgcctgcctgattcaagacaagggacccccttcccaacagcacccccgccccttgccgtgcaacccagtggtctc

SEQ ID NO: 382626 - DNA, 120 bp, Artificial Sequence
  ENSG00000143774_27 (sequence is synthesized)
cagtcaccccaccacatcgtcccctctgtaacctgacggtctccagttcccccaccaccttcccccagaacctgttggtctccagtccccaccccatcaccaccaactcccaactcccca

SEQ ID NO: 382627 - DNA, 120 bp, Artificial Sequence
  ENSG00000143774_28 (sequence is synthesized)
ctggaacccagcagtctcgtatctccatcagtgaggacagtgtgagaaatggtgtctggctcaggcacttggcagcacttgaggggtcctcagatgtctcctgcccagcaaggatctgac

SEQ ID NO: 382628 - DNA, 120 bp, Artificial Sequence
  ENSG00000143774_29 (sequence is synthesized)
taaagcagtcgtgggtgtgggaggggcctgcaggcatgcctgggttgggggcagctggccctgggcaccctggtgcaggtccagtctgccctctggatggcccctcctcttccccagatt

SEQ ID NO: 382629 - DNA, 120 bp, Artificial Sequence
  ENSG00000143774_30 (sequence is synthesized)
tgaaggccaggatgcgtgctacccggatgtgtgcccagaaaccctgcagccaagagcagccgcctggaccaccagcctccccttcatccacctggcccagcccagagcccaggcccacgt

SEQ ID NO: 382630 - DNA, 120 bp, Artificial Sequence
  ENSG00000143774_31 (sequence is synthesized)
ctggtggtttgtgtcttacgagaggccaggcgggggctgaattctctcggttctcagaaggtcaagccctctgttagcatctcctcgaacagtgggccgggggcaaggtggtgactctgt

SEQ ID NO: 382631 - DNA, 120 bp, Artificial Sequence
  ENSG00000143774_32 (sequence is synthesized)
tcagtccttaggatggctggaagccagaaggaggagattatgccgccacagcagggagtgcctttccaggaaagcggctgctggggcagcatgggagcccagtccagggagcgttctggc

SEQ ID NO: 382632 - DNA, 120 bp, Artificial Sequence
  ENSG00000143774_33 (sequence is synthesized)
ggcgctctctgaggtgggcccatccttgtgcctacctgggcaaggcccaaggggaggcctgggggccaggcctttgttgtccatgaggccactgaggaaatcaagaaagctcaaaggacc

SEQ ID NO: 382633 - DNA, 120 bp, Artificial Sequence
  ENSG00000143774_34 (sequence is synthesized)
actgaggttagatgggacagtcctacccaagcactggcatgagacaccgaggtccacggtggagggagagcaggaagcccagcccttcctggataccagccctcccaactccctttcttc

SEQ ID NO: 382634 - DNA, 120 bp, Artificial Sequence
  ENSG00000143776_0 (sequence is synthesized)
tccgcaagcctccgcctctgtgcggcgggactggaggagcctcgctgagcccagggcgcgagcgcgagaggagagggaaggcgggggagggctggaagggagaggaagggagtggttggg

SEQ ID NO: 382635 - DNA, 120 bp, Artificial Sequence
  ENSG00000143776_1 (sequence is synthesized)
agccgggctgccgcagcctctagtctcctcagccgcggaagcgacccctcctcctgcgccgggccgcctccctcctcgctgtggaaagatgcccttagcccaggggtgtgaagaaggggg

SEQ ID NO: 382636 - DNA, 120 bp, Artificial Sequence
  ENSG00000143776_2 (sequence is synthesized)
agaagtagctgccagagccgcccgcgccgccgccgcagctgctgctgcttgtgtcctttgaattcagagaagcacccccccgcctggggcgtcgggagcctccggcgcggcggcccggtg

SEQ ID NO: 382637 - DNA, 120 bp, Artificial Sequence
  ENSG00000143776_3 (sequence is synthesized)
cgggtgtcggggagaccgggctctctgcccggcgcggcgcggcgcggctcggcccacgagcgaccaccgacatggagtgggctcgggcggccaagtagccgcttctccggagcccggtgc

SEQ ID NO: 382638 - DNA, 120 bp, Artificial Sequence
  ENSG00000143776_4 (sequence is synthesized)
cagtgccgcccgcagcccgccttccacccccggccgcgccgccggtcaggccctagggtgaagccgggaggaaaatgaagagttttcaccggaatccgttgaaaataggactgactgcaa

SEQ ID NO: 382639 - DNA, 120 bp, Artificial Sequence
  ENSG00000143776_5 (sequence is synthesized)
agccttaaagaaagaaggacctcgggaggagaaacgaaaagccgcctccgggcaagacttggcgtgctccgagccgaggggctgcttcagggacctcgccccctccctttcccgctggag

SEQ ID NO: 382640 - DNA, 120 bp, Artificial Sequence
  ENSG00000143776_6 (sequence is synthesized)
aaattgccgctgatgcattatccaagtggtggttgggaggatttgcagcaacatttttggttttccctcccccttctatgcattctgtttttttcctcccttttctgtttttcttcttcc

SEQ ID NO: 382641 - DNA, 120 bp, Artificial Sequence
  ENSG00000143776_7 (sequence is synthesized)
cgggaagtgaattgctgatgcaaatcggactttattcattaatgatgcaaccggattcgtttcaggattacgttgcacgagttgaattttgaatgaaggagaagagtttttttttttttt

SEQ ID NO: 382642 - DNA, 120 bp, Artificial Sequence
  ENSG00000143776_8 (sequence is synthesized)
aggagaagagtttttttttttttttttaaagaagtgttgactctctagttcgttgtacttttaattattattttatttaaatatacgacttaattgtattcttttaaaaatgcattaagt

SEQ ID NO: 382643 - DNA, 120 bp, Artificial Sequence
  ENSG00000143776_9 (sequence is synthesized)
caaaatatatgtatatgggtgaaattgaagacgcttcagttaagtgaggttactggtgtgttggatgtttaattcagcaccagcattgcatgacagttgtttgaataacaagtggtttat

SEQ ID NO: 382644 - DNA, 120 bp, Artificial Sequence
  ENSG00000143776_10 (sequence is synthesized)
ttttaaaaccataccttttaaaatttaggttcagataatagtaaaagtcatcataataatttaaaggaaaaccagcagaaatcgaagcaaacatgtctggagaagtgcgtttgaggcagt

SEQ ID NO: 382645 - DNA, 120 bp, Artificial Sequence
  ENSG00000143776_11 (sequence is synthesized)
tggagcagtttattttggacgggcccgctcagaccaatgggcagtgcttcagtgtggagacattactggatatactcatctgcctttatgatgaatgcaataattctccattgagaagag

SEQ ID NO: 382646 - DNA, 120 bp, Artificial Sequence
  ENSG00000143776_12 (sequence is synthesized)
agaagaacattctcgaatacctagaatgggctaaaccatttacttctaaagtgaaacaaatgcgattacatagagaagactttgaaatattaaaggtgattggtcgaggagcttttgggg

SEQ ID NO: 382647 - DNA, 120 bp, Artificial Sequence
  ENSG00000143776_13 (sequence is synthesized)
aggttgctgtagtaaaactaaaaaatgcagataaagtgtttgccatgaaaatattgaataaatgggaaatgctgaaaagagctgagacagcatgttttcgtgaagaaagggatgtattag

SEQ ID NO: 382648 - DNA, 120 bp, Artificial Sequence
  ENSG00000143776_14 (sequence is synthesized)
tgaatggagacaataaatggattacaaccttgcactatgctttccaggatgacaataacttatacctggttatggattattatgttggtggggatttgcttactctactcagcaaatttg

SEQ ID NO: 382649 - DNA, 120 bp, Artificial Sequence
  ENSG00000143776_15 (sequence is synthesized)
aagatagattgcctgaagatatggctagattttacttggctgagatggtgatagcaattgactcagttcatcagctacattatgtacacagagacattaaacctgacaatatactgatgg

SEQ ID NO: 382650 - DNA, 120 bp, Artificial Sequence
  ENSG00000143776_16 (sequence is synthesized)
atatgaatggacatattcggttagcagattttggttcttgtctgaagctgatggaagatggaacggttcagtcctcagtggctgtaggaactccagattatatctctcctgaaatccttc

SEQ ID NO: 382651 - DNA, 120 bp, Artificial Sequence
  ENSG00000143776_17 (sequence is synthesized)
aagccatggaagatggaaaagggagatatggacctgaatgtgactggtggtctttgggggtctgtatgtatgaaatgctttacggagaaacaccattttatgcagaatcgctggtggaga

SEQ ID NO: 382652 - DNA, 120 bp, Artificial Sequence
  ENSG00000143776_18 (sequence is synthesized)
catacggaaaaatcatgaaccacaaagagaggtttcagtttccagcccaagtgactgatgtgtctgaaaatgctaaggatcttattcgaaggctcatttgtagcagagaacatcgacttg

SEQ ID NO: 382653 - DNA, 120 bp, Artificial Sequence
  ENSG00000143776_19 (sequence is synthesized)
gtcaaaatggaatagaagactttaagaaacacccatttttcagtggaattgattgggataatattcggaactgtgaagcaccttatattccagaagttagtagcccaacagatacatcga

SEQ ID NO: 382654 - DNA, 120 bp, Artificial Sequence
  ENSG00000143776_20 (sequence is synthesized)
attttgatgtagatgatgattgtttaaaaaattctgaaacgatgcccccaccaacacatactgcattttctggccaccatctgccatttgttggttttacatatactagtagctgtgtac

SEQ ID NO: 382655 - DNA, 120 bp, Artificial Sequence
  ENSG00000143776_21 (sequence is synthesized)
tttctgatcggagctgtttaagagttacggctggtcccacctcactggatcttgatgttaatgttcagaggactctagacaacaacttagcaactgaagcttatgaaagaagaattaagc

SEQ ID NO: 382656 - DNA, 120 bp, Artificial Sequence
  ENSG00000143776_22 (sequence is synthesized)
gccttgagcaagaaaaacttgaactcagtagaaaacttcaagagtcaacacagactgtccaagctctgcagtattcaactgttgatggtccactaacagcaagcaaagatttagaaataa

SEQ ID NO: 382657 - DNA, 120 bp, Artificial Sequence
  ENSG00000143776_23 (sequence is synthesized)
aaaacttaaaagaagaaattgaaaaactaagaaaacaagtaacagaatcaagtcatttggaacagcaacttgaagaagctaatgctgtgaggcaagaactagatgatgcttttagacaaa

SEQ ID NO: 382658 - DNA, 120 bp, Artificial Sequence
  ENSG00000143776_24 (sequence is synthesized)
tcaaggcttatgaaaaacaaatcaaaacgttacaacaagaaagagaagatctaaataaggaactagtccaggctagtgagcgattaaaaaaccaatccaaagagctgaaagacgcacact

SEQ ID NO: 382659 - DNA, 120 bp, Artificial Sequence
  ENSG00000143776_25 (sequence is synthesized)
gtcagaggaaactggccatgcaggaattcatggagatcaatgagcggctaacagaattgcacacccaaaaacagaaacttgctcgccatgtccgagataaggaagaagaggtggacctgg

SEQ ID NO: 382660 - DNA, 120 bp, Artificial Sequence
  ENSG00000143776_26 (sequence is synthesized)
tgatgcaaaaagttgaaagcttaaggcaagaactgcgcagaacagaaagagccaaaaaagagctggaagttcatacagaagctctagctgctgaagcatctaaagacaggaagctacgtg

SEQ ID NO: 382661 - DNA, 120 bp, Artificial Sequence
  ENSG00000143776_27 (sequence is synthesized)
aacagagtgagcactattctaagcaactggaaaatgaattggagggactgaagcaaaaacaaattagttactcaccaggagtatgcagcatagaacatcagcaagagataaccaaactaa

SEQ ID NO: 382662 - DNA, 120 bp, Artificial Sequence
  ENSG00000143776_28 (sequence is synthesized)
agactgatttggaaaagaaaagtatcttttatgaagaagaattatctaaaagagaaggaatacatgcaaatgaaataaaaaatcttaagaaagaactgcatgattcagaaggtcagcaac

SEQ ID NO: 382663 - DNA, 120 bp, Artificial Sequence
  ENSG00000143776_29 (sequence is synthesized)
ttgctctcaacaaagaaattatgattttaaaagacaaattggaaaaaaccagaagagaaagtcaaagtgaaagggaggaatttgaaagtgagttcaaacaacaatatgaacgagaaaaag

SEQ ID NO: 382664 - DNA, 120 bp, Artificial Sequence
  ENSG00000143776_30 (sequence is synthesized)
tgttgttaactgaagaaaataaaaagctgacgagtgaacttgataagcttactactttgtatgagaacttaagtatacacaaccagcagttagaagaagaggttaaagatctagcagaca

SEQ ID NO: 382665 - DNA, 120 bp, Artificial Sequence
  ENSG00000143776_31 (sequence is synthesized)
agaaagaatcagttgcacattgggaagcccaaatcacagaaataattcagtgggtcagcgatgaaaaggatgcacgagggtatcttcaggccttagcttctaaaatgactgaagaattgg

SEQ ID NO: 382666 - DNA, 120 bp, Artificial Sequence
  ENSG00000143776_32 (sequence is synthesized)
aggcattaagaaattccagcttgggtacacgagcaacagatatgccctggaaaatgcgtcgttttgcgaaactggatatgtcagctagactggagttgcagtcggctctggatgcagaaa

SEQ ID NO: 382667 - DNA, 120 bp, Artificial Sequence
  ENSG00000143776_33 (sequence is synthesized)
taagagccaaacaggccatccaagaagagttgaataaagttaaagcatctaatatcataacagaatgtaaactaaaagattcagagaagaagaacttggaactactctcagaaatcgaac

SEQ ID NO: 382668 - DNA, 120 bp, Artificial Sequence
  ENSG00000143776_34 (sequence is synthesized)
agctgataaaggacactgaagagcttagatctgaaaagggtatagagcaccaagactcacagcattctttcttggcatttttgaatacgcctaccgatgctctggatcaatttgaaactg

SEQ ID NO: 382669 - DNA, 120 bp, Artificial Sequence
  ENSG00000143776_35 (sequence is synthesized)
tagactccactccactttcagttcacacaccaaccttaaggaaaaaaggatgtcctggttcaactggctttccacctaagcgcaagactcaccagttttttgtaaaatcttttactactc

SEQ ID NO: 382670 - DNA, 120 bp, Artificial Sequence
  ENSG00000143776_36 (sequence is synthesized)
ctaccaagtgtcatcagtgtacctccttgatggtgggtttaataagacagggctgttcatgtgaagtgtgtggattctcatgccatataacttgtgtaaacaaagctccaaccacttgtc

SEQ ID NO: 382671 - DNA, 120 bp, Artificial Sequence
  ENSG00000143776_37 (sequence is synthesized)
cagttcctcctgaacagacaaaaggtcccctgggtatagatcctcagaaaggaataggaacagcatatgaaggtcatgtcaggattcctaagccagctggagtgaagaaagggtggcaga

SEQ ID NO: 382672 - DNA, 120 bp, Artificial Sequence
  ENSG00000143776_38 (sequence is synthesized)
gagcactggctatagtgtgtgacttcaaactctttctgtacgatattgctgaaggaaaagcatctcagcccagtgttgtcattagtcaagtgattgacatgagggatgaagaattttctg

SEQ ID NO: 382673 - DNA, 120 bp, Artificial Sequence
  ENSG00000143776_39 (sequence is synthesized)
tgagttcagtcttggcttctgatgttatccatgcaagtcggaaagatataccctgtatatttagggtcacagcttcccagctctcagcatctaataacaaatgttcaatcctgatgctag

SEQ ID NO: 382674 - DNA, 120 bp, Artificial Sequence
  ENSG00000143776_40 (sequence is synthesized)
cagacactgagaatgagaagaataagtgggtgggagtgctgagtgaattgcacaagattttgaagaaaaacaaattcagagaccgctcagtctatgttcccaaagaggcttatgacagca

SEQ ID NO: 382675 - DNA, 120 bp, Artificial Sequence
  ENSG00000143776_41 (sequence is synthesized)
ctctacccctcattaaaacaacccaggcagccgcaatcatagatcatgaaagaattgctttgggaaacgaagaagggttatttgttgtacatgtcaccaaagatgaaattattagagttg

SEQ ID NO: 382676 - DNA, 120 bp, Artificial Sequence
  ENSG00000143776_42 (sequence is synthesized)
gtgacaataagaagattcatcagattgaactcattccaaatgatcagcttgttgctgtgatctcaggacgaaatcgtcatgtacgactttttcctatgtcagcattggatgggcgagaga

SEQ ID NO: 382677 - DNA, 120 bp, Artificial Sequence
  ENSG00000143776_43 (sequence is synthesized)
ccgatttttacaagctgtcagaaactaaagggtgtcaaaccgtaacttctggaaaggtgcgccatggagctctcacatgcctgtgtgtggctatgaaaaggcaggtcctctgttatgaac

SEQ ID NO: 382678 - DNA, 120 bp, Artificial Sequence
  ENSG00000143776_44 (sequence is synthesized)
tatttcagagcaagacccgtcacagaaaatttaaagaaattcaagtcccatataatgtccagtggatggcaatcttcagtgaacaactctgtgtgggattccagtcaggatttctaagat

SEQ ID NO: 382679 - DNA, 120 bp, Artificial Sequence
  ENSG00000143776_45 (sequence is synthesized)
actatcatttattgcacatcaaccaatggatgctatctgcgcagttgagatctccagtaaagaatatctgctgtgttttaacagcattgggatatacactgactgccagggccgaagatc

SEQ ID NO: 382680 - DNA, 120 bp, Artificial Sequence
  ENSG00000143776_46 (sequence is synthesized)
tagacaacaggaattgatgtggccagcaaatccttcctcttgttgttacaatgcaccatatctctcggtgtacagtgaaaatgcagttgatatctttgatgtgaactccatggaatggat

SEQ ID NO: 382681 - DNA, 120 bp, Artificial Sequence
  ENSG00000143776_47 (sequence is synthesized)
tcagactcttcctctcaaaaaggttcgacccttaaacaatgaaggatcattaaatcttttagggttggagaccattagattaatatatttcaaaaataagatggcagaaggggacgaact

SEQ ID NO: 382682 - DNA, 120 bp, Artificial Sequence
  ENSG00000143776_48 (sequence is synthesized)
ggtagtacctgaaacatcagataatagtcggaaacaaatggttagaaacattaacaataagcggcgttattccttcagagtcccagaagaggaaaggatgcagcagaggagggaaatgct

SEQ ID NO: 382683 - DNA, 120 bp, Artificial Sequence
  ENSG00000143776_49 (sequence is synthesized)
acgagatccagaaatgagaaataaattaatttctaatccaactaattttaatcacatagcacacatgggtcctggagatggaatacagatcctgaaagatctgcccatgaaccctcggcc

SEQ ID NO: 382684 - DNA, 120 bp, Artificial Sequence
  ENSG00000143776_50 (sequence is synthesized)
tcaggaaagtcggacagtattcagtggctcagtcagtattccatctatcaccaaatcccgccctgagccaggccgctccatgagtgctagcagtggcttgtcagcaaggtcatccgcaca

SEQ ID NO: 382685 - DNA, 120 bp, Artificial Sequence
  ENSG00000143776_51 (sequence is synthesized)
gaatggcagcgcattaaagagggaattctctggaggaagctacagtgccaagcggcagcccatgccctccccgtcagagggctctttgtcctctggaggcatggaccaaggaagtgatgc

SEQ ID NO: 382686 - DNA, 120 bp, Artificial Sequence
  ENSG00000143776_52 (sequence is synthesized)
cccagcgagggactttgacggagaggactctgactctccgaggcattccacagcttccaacagttccaacctaagcagccccccaagcccagcttcaccccgaaaaaccaagagcctctc

SEQ ID NO: 382687 - DNA, 120 bp, Artificial Sequence
  ENSG00000143776_53 (sequence is synthesized)
cctggagagcactgaccgcgggagctgggacccgtgagctgcctcagcactgggacctctcgctctccgctccctgccactcgcctcctctcactttcatctcttccctccacctcgcct

SEQ ID NO: 382688 - DNA, 120 bp, Artificial Sequence
  ENSG00000143776_54 (sequence is synthesized)
gctcggcctgaaagccaccaggggctggcagcagtagcaggacagggattcaggagttctgacgacacgactctcagatccacgcccccagcctaacagcaacaacaaagacagactttc

SEQ ID NO: 382689 - DNA, 120 bp, Artificial Sequence
  ENSG00000143776_55 (sequence is synthesized)
cgtagcagcttagattaacgttgatttcattccatgcacttagagttgctttcagtaacattttacccctactcccaaaggtagcttaaatagacagattacacaaatgtaagtgataag

SEQ ID NO: 382690 - DNA, 120 bp, Artificial Sequence
  ENSG00000143776_56 (sequence is synthesized)
aataagattagacagattttgctttcacagtagagtctcattatagtcctaaaatagctcatgggcttctccgcatccagaagggagaattggtccctggagtggctcactaagctctta

SEQ ID NO: 382691 - DNA, 120 bp, Artificial Sequence
  ENSG00000143776_57 (sequence is synthesized)
atcagcaaacgcagtgagtatcaacctgattgttgccaggaaatccttatgaattaaaacaatgcatattttactacagtacagagtttaaatgaatacataaatgtagaagtactgaat

SEQ ID NO: 382692 - DNA, 120 bp, Artificial Sequence
  ENSG00000143776_58 (sequence is synthesized)
gtatatatttaaaaggagcctcttgtattcaacaaaagatggatgcatatataagagagatgatttaatttaaagaaatatgttgtttcttgtctgtaatgtaatgtaaagggtggaaag

SEQ ID NO: 382693 - DNA, 120 bp, Artificial Sequence
  ENSG00000143776_59 (sequence is synthesized)
gcctcaagctcacatttgtagagagagagcgagagaaatcagagttccctttattgccctgtcctcaaactggtcataggctctagtcacctggggagctgtagaaaacacttgcagagc

SEQ ID NO: 382694 - DNA, 120 bp, Artificial Sequence
  ENSG00000143776_60 (sequence is synthesized)
caggttttgctggtttggggcatgccctgggcaccagagctttaacatttgaagccacttcagcagcagcagcaaaaggcgaactcatctctacccaagatgtttcttttcctagtggtg

SEQ ID NO: 382695 - DNA, 120 bp, Artificial Sequence
  ENSG00000143776_61 (sequence is synthesized)
gaatttgaacacttctcactttttattgtattttatcttccgcagataaatgtagaaatacacgattctgtcacctctgatcccttccatctgaaaggttacaaggagtgttgtagcttc

SEQ ID NO: 382696 - DNA, 120 bp, Artificial Sequence
  ENSG00000143776_62 (sequence is synthesized)
tgaaggtgcagaaaacaatttctaaaaatgcttttattcctgggctaatcctgtccctccctaagtcacagcgaggtgtctgtcccagggctggagatgcttcccaaggaggagtctgtt

SEQ ID NO: 382697 - DNA, 120 bp, Artificial Sequence
  ENSG00000143776_63 (sequence is synthesized)
ttgttgagagtgggcgtgggcttcttcacataagcctggggaaggaagaaaaaacggctttcattaccaaataatgtaaaacctcaaaagcaagggcttcaacagccttaaccaaatatt

SEQ ID NO: 382698 - DNA, 120 bp, Artificial Sequence
  ENSG00000143776_64 (sequence is synthesized)
attccccatagccagtggaaaatggatgtgacaaccccagtgcgcaggccagagtgagtgagcccagcacggcgctccgactggcttcctctctcaggtgctggattgtggggttagtgg

SEQ ID NO: 382699 - DNA, 120 bp, Artificial Sequence
  ENSG00000143776_65 (sequence is synthesized)
catttccagctggattcctcctgttgtagttgccataaggaaatgagatgcagaatcagaaggatctatttctacagaatcatttcaccagttaagcacatgagtagagaaagagataaa

SEQ ID NO: 382700 - DNA, 120 bp, Artificial Sequence
  ENSG00000143776_66 (sequence is synthesized)
aataaaagtatctcatgaaggaaagagattttgcctctcttttacttttcacctaagtttctctgagaaatagagacaggattctctctttaaaattcagtgaaaatgaagaaagttttc

SEQ ID NO: 382701 - DNA, 120 bp, Artificial Sequence
  ENSG00000143776_67 (sequence is synthesized)
ctgcagttgctaacctgagttgcagtgtttaaggccatcatttcactgctgctgtctgtgactccacgtctgtgtcactgaggtgacctgcgtgtcactgaggtggccaccatgctggcc

SEQ ID NO: 382702 - DNA, 120 bp, Artificial Sequence
  ENSG00000143776_68 (sequence is synthesized)
tgcggcatgtgcagggagctgaggctgtttccaggtgatgctgctgtgtggagaaggttctgagatgcagtgagggaagaaaggatcctgctggggattccattgtaagcacctataatc

SEQ ID NO: 382703 - DNA, 120 bp, Artificial Sequence
  ENSG00000143776_69 (sequence is synthesized)
gggaattttcatgtaacagctttgacatttaaacattctgagtttggtgccagctcagatttgattatattttattttggatgggtgtaattcacagcacagttctaatctcccaaatct

SEQ ID NO: 382704 - DNA, 120 bp, Artificial Sequence
  ENSG00000143776_70 (sequence is synthesized)
ttctgctttttagaatgaagtataaaaatacttttctcacctgaataccaagggttggccctttagttggatcattgtcatatgacttggtagatccttgtcctcagcacctcacgtgag

SEQ ID NO: 382705 - DNA, 120 bp, Artificial Sequence
  ENSG00000143776_71 (sequence is synthesized)
agaagggagtcagccagccggccccctgcttggtgctcgtgaccagctcgcaccccttctgtccacccttctctcctctcctccccactctccccaccctcctcactctccccaccctcc

SEQ ID NO: 382706 - DNA, 120 bp, Artificial Sequence
  ENSG00000143776_72 (sequence is synthesized)
tcactctccccaccctcccctcctctcctcctcactcttcccaccctccccatccccaccctccccatcctcctcttccctttccccttgccttctcctctctcccttctcttctcaggc

SEQ ID NO: 382707 - DNA, 120 bp, Artificial Sequence
  ENSG00000143776_73 (sequence is synthesized)
agggaggaggccatcccaagccgagattaacaggacttgacataagccattagtttgtagctttgacaagtaattatgaatttttgttgcttataggtgcttattttgcaaaggatgctt

SEQ ID NO: 382708 - DNA, 120 bp, Artificial Sequence
  ENSG00000143776_74 (sequence is synthesized)
ttaagatcaaaataataaccctacctaaagtctagctccactgctatgggtcatactcttcagcctcccaacagggcagagagagagagctactgaggcttgtctaggttgccaggctaa

SEQ ID NO: 382709 - DNA, 120 bp, Artificial Sequence
  ENSG00000143776_75 (sequence is synthesized)
ctgggcgacttgtccatattcaccccatggattgcaccatggcactctttgatttttccactgcaatggcaagtaatctcatcagtcataatagagcagtcccgaatgcgtgcagattct

SEQ ID NO: 382710 - DNA, 120 bp, Artificial Sequence
  ENSG00000143776_76 (sequence is synthesized)
aaaagcagggctttaggagagaaacactgccagggggaatagttttggggagggttttcccaaaataacggtcatcctactgggtttatcccacccttaaatatgaagcctgttacctcc

SEQ ID NO: 382711 - DNA, 120 bp, Artificial Sequence
  ENSG00000143776_77 (sequence is synthesized)
agaagcttctgagaagaatgatgtgaaaagacagggagtgggttctaggcaaagaaaacataatgaccattcagaggagtcagtagcacagctcacagataaagtattttattactatct

SEQ ID NO: 382712 - DNA, 120 bp, Artificial Sequence
  ENSG00000143776_78 (sequence is synthesized)
gaagttttcttttgttttcatgcaggacattttaaaaacgtatatggcagcagaaacctgtttctcaatagaaaaaatacattcagaggcatttctgggatagtctatctgtgttagtat

SEQ ID NO: 382713 - DNA, 120 bp, Artificial Sequence
  ENSG00000143776_79 (sequence is synthesized)
ttggtgctatctatgtccagccaagttatctaccctcaaattctgactaatcatgtttgtgctttgggtatttaaaattacatacatatatattctttttgccaaaaacaaaagtcttgc

SEQ ID NO: 382714 - DNA, 120 bp, Artificial Sequence
  ENSG00000143776_80 (sequence is synthesized)
ttcttgtcaaatgattgctaaagtagatcttacattttttgttattatgtatgtatttatacacatccccaacacacttagtgatttctgttatttcctagggagcacagctttaaggct

SEQ ID NO: 382715 - DNA, 120 bp, Artificial Sequence
  ENSG00000143776_81 (sequence is synthesized)
atgagatacaactaaaaggagcccatctatttggttttccagccaattattgtactcacatttcaggggagaatctgaaattcctgtcatgtttacagcaacaatctatcattcctggct

SEQ ID NO: 382716 - DNA, 120 bp, Artificial Sequence
  ENSG00000143776_82 (sequence is synthesized)
agctctcagcctctctctccttccataggttagaattatgtcattttgttacttagtggccacgtctatttctgagaaagactggttacatttatgtggcatctcaggtatcattaagga

SEQ ID NO: 382717 - DNA, 120 bp, Artificial Sequence
  ENSG00000143776_83 (sequence is synthesized)
aaagccagagcaggggtgagcagaggtcaaaaccacagacgcagcagggccatttgccgcctttggccgggatcacaaccactgcagtctcccagcaggtaggccttgccaagcctaagg

SEQ ID NO: 382718 - DNA, 120 bp, Artificial Sequence
  ENSG00000143776_84 (sequence is synthesized)
ctccccatccaatctagacagaggggcgctcagagcagactttgccgtagcccatgtctggtgagcacaacagggaatgaattgggcactccactcccccgtctctctggcccagccctg

SEQ ID NO: 382719 - DNA, 120 bp, Artificial Sequence
  ENSG00000143776_85 (sequence is synthesized)
aactagatgagctgcatttcatggagcccattttaaaatctctttccttatgactttgttactcaagtccagagttctctgtgcacttctgctagataaggagtgtaagccctgcccccc

SEQ ID NO: 382720 - DNA, 120 bp, Artificial Sequence
  ENSG00000143776_86 (sequence is synthesized)
agcactggcagcacgctgggccctccccacacaggacaccgtgcagttccgggggaagctgactcaaatcaaccttgaaatctcatgaaaacaaaatgacttgtctttttatttgatagt

SEQ ID NO: 382721 - DNA, 120 bp, Artificial Sequence
  ENSG00000143776_87 (sequence is synthesized)
gtaatatcattcattttataaattttttagggtttttctcgtaatattgtacagttttgcatggcctggtgtgatcattttttggttagaatataatgctgacaaatgtggatggagggg

SEQ ID NO: 382722 - DNA, 120 bp, Artificial Sequence
  ENSG00000143776_88 (sequence is synthesized)
aagatactgctttagcctatcactccttattttattttgtttggttttatgccctcagtgtcttagggaactttttaagagatcctctgctaccaaacaatgatgtggattcttttgcac

SEQ ID NO: 382723 - DNA, 120 bp, Artificial Sequence
  ENSG00000143776_89 (sequence is synthesized)
agaaatatttaaggtgggatggtaaaaaatgtcacaaaagactcctcaccaatactttatgttgatatcacttaatattaaccagactttgctgtattgcaataaaacagagaactgtta

SEQ ID NO: 382724 - DNA, 120 bp, Artificial Sequence
  ENSG00000143776_90 (sequence is synthesized)
ccattgcattctcaagtggctgcagtgtctcagaccctgctgggtaatgcctaataggcacaaatgcagttgttaagaaaatagtcccagagtccttctagagtgtacaggccatctggg

SEQ ID NO: 382725 - DNA, 120 bp, Artificial Sequence
  ENSG00000143776_91 (sequence is synthesized)
agacagacaaatatgattacaaattgtgatgataaaggctctgaaggaagtaaacagcatacattaatagagaataacaaggggtagctgttagggatgaatccctacttggcagaataa

SEQ ID NO: 382726 - DNA, 120 bp, Artificial Sequence
  ENSG00000143776_92 (sequence is synthesized)
ttaggaaaatcactccctagaggtggagtcatgtttgagtaatgtttggttaactgaaagaaggctagtatggctacatggtagtggtgaggaagtaacaaaaattagagcggggtagca

SEQ ID NO: 382727 - DNA, 120 bp, Artificial Sequence
  ENSG00000143776_93 (sequence is synthesized)
ggtaagggtcagaccagcagggacttgaagaccaaggtaagacattttttactttattcaaaaggaaaaggaagacttttaagtagggaagaattttctttcaatttacattcttaaaac

SEQ ID NO: 382728 - DNA, 120 bp, Artificial Sequence
  ENSG00000143776_94 (sequence is synthesized)
aatcctgcgggctgccaagtggagaatggactagaggcaggaagagtggaagccagcatccagataggagactcctagagtggtcccaatggaaaccaatgagggcttgggatgcagcag

SEQ ID NO: 382729 - DNA, 120 bp, Artificial Sequence
  ENSG00000143776_95 (sequence is synthesized)
gggcagaaggagagaagatggtagattctccagatatattttcagagttaaaagcagtaagacttgatgatgaattagtcatggaaaagtaagggagagagttaaagatgactcccagac

SEQ ID NO: 382730 - DNA, 120 bp, Artificial Sequence
  ENSG00000143776_96 (sequence is synthesized)
ttcctgctagggccttagtatgataccatttactcccatttaccaccgtttaagaaggggctgaggcaggacattccacgcatgtccaaaggtcccgaggtagcaaaaaaaaaaaaaaaa

SEQ ID NO: 382731 - DNA, 120 bp, Artificial Sequence
  ENSG00000143776_97 (sequence is synthesized)
tgtaatttaaagttcacttataataaaaccattttattgcttcccacatcagaggacctagaatcttaaataaacaaaaacatattagcagaggaatatgttctgcattcttatggagac

SEQ ID NO: 382732 - DNA, 120 bp, Artificial Sequence
  ENSG00000143776_98 (sequence is synthesized)
tataatcccacctctgtttaacaaaacatctaagaaagatttaatcatgagagtcattataagatttaaaagcaatttcatctcccttaagaaacattaagagcagaacaaatcccaact

SEQ ID NO: 382733 - DNA, 120 bp, Artificial Sequence
  ENSG00000143776_99 (sequence is synthesized)
gaaaatgtcaaagctgacaataaggtattgctggttcttatttcaaatcaattcatcttttaaaaactatacagtaagaagtgcttttgttaaaaggtgttacatagactctgttaggca

SEQ ID NO: 382734 - DNA, 120 bp, Artificial Sequence
  ENSG00000143776_100 (sequence is synthesized)
tatcacacagtaatgaaattgtgattatgtaactcttgatcattcgttggtatttaaattctttgctttaaaaaaatcaacttactgttatcaagtatatttttgtctcagtaaatttaa

SEQ ID NO: 382735 - DNA, 120 bp, Artificial Sequence
  ENSG00000143776_101 (sequence is synthesized)
gtgtgattatatctttattgaacaaataataatcatgtagctttgtgcaaggcactgttgtaagtgctggagatatagtagtgaccaaaatagacaaagtccttcccactagaacttaca

SEQ ID NO: 382736 - DNA, 120 bp, Artificial Sequence
  ENSG00000143776_102 (sequence is synthesized)
ttccagtgggaagaattagaagcctcaggaattccattgcttacttttagttgttacttcaaaagtacttacatttaatttgattattaattatttgtcatgagcttcattttattacat

SEQ ID NO: 382737 - DNA, 120 bp, Artificial Sequence
  ENSG00000143776_103 (sequence is synthesized)
tttgggcacagtatgtgaattgtgtttcgttcctttaggaaaaggaaaaataatcactctttaaaaagtaattaatgaatctcttaagtttctcaagaacaatgatagtgactgcttttc

SEQ ID NO: 382738 - DNA, 120 bp, Artificial Sequence
  ENSG00000143776_104 (sequence is synthesized)
tcatttatttatttgaattaatgtcatttgcctttcaattgttttacaaagtttttgatttattattcttattaaattgcttcatccatattttctatttttttattgctgtattcgtta

SEQ ID NO: 382739 - DNA, 120 bp, Artificial Sequence
  ENSG00000143776_105 (sequence is synthesized)
aataggattccttttcttcttcctcatcttcactgattgattttttggatgacgtaagtctttgattttcaaaccaatgcatccttcagtaaaaaagatcagtgaattgatttgaagaat

SEQ ID NO: 382740 - DNA, 120 bp, Artificial Sequence
  ENSG00000143776_106 (sequence is synthesized)
ttgcctagtaatgcagtcagttttagaaataccacatttgaaaatttatgtgagccaaaatatgcttctttcttatcttaaatataatgaaggatttatcagtattaaacataatgaagt

SEQ ID NO: 382741 - DNA, 120 bp, Artificial Sequence
  ENSG00000143776_107 (sequence is synthesized)
attgtacctggctgtgagttaccatgtaatatctagcaacagaggcctatttcttgccagatttattaattatggtcttggatacatttatcgtcaaccaaaaaaaattattttgagatg

SEQ ID NO: 382742 - DNA, 120 bp, Artificial Sequence
  ENSG00000143776_108 (sequence is synthesized)
ctaaaccatttacttctaaagtgaaacaaatgcgattacatagagaagactttgaaatattaaaggtgattggtcgaggagcttttggggaggaaaacctttaacttacgccctgggtgt

SEQ ID NO: 382743 - DNA, 120 bp, Artificial Sequence
  ENSG00000143776_109 (sequence is synthesized)
gtgcagtgaaaactagcctttcttcaaacctactattcataattctcgttcttaccagtaggaagctaatacagatttcttaattatgctgaagaaaatggaggactatgtttagtggga

SEQ ID NO: 382744 - DNA, 120 bp, Artificial Sequence
  ENSG00000143776_110 (sequence is synthesized)
aatatgaatctatcaggagggagttagaatgtttatgcagacctacacaagatgtactggtaatctgcatgggagtcatggttagatatccagaccctctatatatctcataaatgactc

SEQ ID NO: 382745 - DNA, 120 bp, Artificial Sequence
  ENSG00000143776_111 (sequence is synthesized)
gatctcctctccgatcaactttgaacacatctatcacatgactgttaattctgctgaaaaatttctctctcctgattccataaaccctgaatattccccgtctctgcgctctgtccctgg

SEQ ID NO: 382746 - DNA, 120 bp, Artificial Sequence
  ENSG00000143786_0 (sequence is synthesized)
gcagtggcaaaggcggcggcggcggcggcggcagcggcagcagcaggtggagcgagctacagcgtttggcctgaaacccactgctgcagccacccgggctggagttggcccgttgggtgg

SEQ ID NO: 382747 - DNA, 120 bp, Artificial Sequence
  ENSG00000143786_1 (sequence is synthesized)
agccagtgctcgccccggtccgacccccggtttccgggacacttgggttgcggaggccggctggccggagtcacggttggggacgggcgcgcctcggagcgcacggctgcgctggaagcc

SEQ ID NO: 382748 - DNA, 120 bp, Artificial Sequence
  ENSG00000143786_2 (sequence is synthesized)
gcgtctggggcgcaggaccaacgggacctacctcctcccggctacctaaagactccttctctcgggaaagagcgctgcccggctctgggatttgggaggagctcggaggccgctcgggca

SEQ ID NO: 382749 - DNA, 120 bp, Artificial Sequence
  ENSG00000143786_3 (sequence is synthesized)
cctcgctggacactatccgtttgcgccccggtggcgcgggagggtccggagcggagcgctcgtctctcctcagcggtttagtggagaaaagcagagagctcttcctggggcgaatgggac

SEQ ID NO: 382750 - DNA, 120 bp, Artificial Sequence
  ENSG00000143786_4 (sequence is synthesized)
ctcctccctcggtcctccgtggagtcgtcgcatcgcttgtcgtgttggtctcgaggggctcacagcttggcactaatttgcaggtgttcgctgctgatttggtttcttcttcgatttgcg

SEQ ID NO: 382751 - DNA, 120 bp, Artificial Sequence
  ENSG00000143786_5 (sequence is synthesized)
gacggttccctccagcgactctcgacacacgttttcctgtcttcgccggagggccgggtctggggtcgccggagcctgcgggaatccagcgcttattcgctgaccctcgagtcgcttcgc

SEQ ID NO: 382752 - DNA, 120 bp, Artificial Sequence
  ENSG00000143786_6 (sequence is synthesized)
tagctgtgcgccctcctgggcactagcctggagaggagcgtgcagacgcggctccttggagggagtgcggtcctctagggaggcatcgggctcctaggggcttcttggcgtgtgtggtgg

SEQ ID NO: 382753 - DNA, 120 bp, Artificial Sequence
  ENSG00000143786_7 (sequence is synthesized)
gattggggtccgccggccatggccttcactttcgctgcgttctgctacatgctgtctctggtgctgtgcgctgcgctcatcttcttcgccatctggcacataattgcctttgatgagtta

SEQ ID NO: 382754 - DNA, 120 bp, Artificial Sequence
  ENSG00000143786_8 (sequence is synthesized)
aggacagattttaagagccccatagaccagtgcaatcctgttcatgcgagggaacggttgaggaacatcgagcgcatctgcttccttctgcgaaagctggtgctgccagaatactccatc

SEQ ID NO: 382755 - DNA, 120 bp, Artificial Sequence
  ENSG00000143786_9 (sequence is synthesized)
catagcctcttctgcattatgttcctgtgtgcgcaagagtggctcacgctggggctgaatgtccctctacttttctatcacttctggaggtatttccactgtccagcagatagctcagaa

SEQ ID NO: 382756 - DNA, 120 bp, Artificial Sequence
  ENSG00000143786_10 (sequence is synthesized)
tggtcatgaatgccgacactttgagttactgtcagaaggaggcctggtgtaagctggccttctatctcctctccttcttctactacctttactgcatgatctacactttagtgagctctt

SEQ ID NO: 382757 - DNA, 120 bp, Artificial Sequence
  ENSG00000143786_11 (sequence is synthesized)
aacgcaaagaccatgcacatcatcagagactgagatgggagaggcctgagacggagaggtgcatttctgctggtgactggaggagggaccagaatgaggatacgtgagaaatagacccgg

SEQ ID NO: 382758 - DNA, 120 bp, Artificial Sequence
  ENSG00000143786_12 (sequence is synthesized)
caggcagtcagactgaatgggagctggaatcacgcagcagctgggagccgagttaaccctgcgtgtctgtgtcaccctgtttgtcaatctttggcattcgaattccacacacggggtcct

SEQ ID NO: 382759 - DNA, 120 bp, Artificial Sequence
  ENSG00000143786_13 (sequence is synthesized)
agagcccttctgagcatcagtggtgtgggggagtaggtgacgaaacactagacctctcctgagagagaattgctgcttcctgaatccacttcattgaacagcaccttgcaagttcaaatg

SEQ ID NO: 382760 - DNA, 120 bp, Artificial Sequence
  ENSG00000143786_14 (sequence is synthesized)
agttcctgggagcggaggctggaaggccacaaggtgcttgctaaggaacagaatgacccagagtcaaggccaagtctgcagggacctgttgaaagcctcgagaatgtcttggctgcccaa

SEQ ID NO: 382761 - DNA, 120 bp, Artificial Sequence
  ENSG00000143786_15 (sequence is synthesized)
gactcttgttgcctttcttccaagccatggccatgccctttttctcaaatgggaggggctggagggtgtgtgggatttgtcttcagctgcaaccagccttgagcctgctgggctattttc

SEQ ID NO: 382762 - DNA, 120 bp, Artificial Sequence
  ENSG00000143786_16 (sequence is synthesized)
agctgaggaggggtgaatataggaaaaatgcatttttgaaacgtttgcaacatgatcaaggtgttagttctccaccacacaagttgtattcttcttttgccacctcaaaccatcacagag

SEQ ID NO: 382763 - DNA, 120 bp, Artificial Sequence
  ENSG00000143786_17 (sequence is synthesized)
tctttaaatgcaaatcaattggtcaatgctagtcaaagctatgttcttacaaaaaccccagacagctcagagctcagaaaatcctgtggagtggctgctctgtaccgtgggcatccggca

SEQ ID NO: 382764 - DNA, 120 bp, Artificial Sequence
  ENSG00000143786_18 (sequence is synthesized)
gccaggaagtgagacaacataattataactttgttttatgatgctgcatcatttgtactgtttaggtcgacgtgaggacatcatcttatttagaattttccgtttggcattctcttttgg

SEQ ID NO: 382765 - DNA, 120 bp, Artificial Sequence
  ENSG00000143786_19 (sequence is synthesized)
gtgggagttatgctgggggttgtaaataatgacaaggctgagatttttatgatgtttaaattgggcacaatgattttgaccttattccccaaacttcttttcttttctactgtttaacat

SEQ ID NO: 382766 - DNA, 120 bp, Artificial Sequence
  ENSG00000143786_20 (sequence is synthesized)
acacaggctatttatacacgtccccagctcccatctgaaacctgtgactcaggtttatgaatggtgtttgtgtagcaacacattgtgtgctatgtttattaaaatgcagcgacaacttga

SEQ ID NO: 382767 - DNA, 120 bp, Artificial Sequence
  ENSG00000143786_21 (sequence is synthesized)
tagatgagctgtatgagtcaggagttctgctctccaggtctgaggctgttcattgcctgggtttgtccagcgggcctgaagccatggagagcataatatttagaggtggcgaacccgaca

SEQ ID NO: 382768 - DNA, 120 bp, Artificial Sequence
  ENSG00000143786_22 (sequence is synthesized)
ccaccctgcttgcattctttgctccaggccttctgacctagttgtccttttcctgtaccccatgcttgctccctgagccctacgcttgctgttctccagattgaggctttctcctcttgc

SEQ ID NO: 382769 - DNA, 120 bp, Artificial Sequence
  ENSG00000143786_23 (sequence is synthesized)
ttcatactcccctccctcagcccactatgcactatgtcaggccaactggtcttactctgcaggagagtctgagattcactgttgcttcctgtggggaggcttttctgagcccccaggcct

SEQ ID NO: 382770 - DNA, 120 bp, Artificial Sequence
  ENSG00000143786_24 (sequence is synthesized)
tcctggttataaagcaaagccaaactggagagaccagtgccagagcctttattactaaaaggcacatgcaaagtgctgtaagatttcacaggatggagagaacatctgtggcagtggaca

SEQ ID NO: 382771 - DNA, 120 bp, Artificial Sequence
  ENSG00000143786_25 (sequence is synthesized)
gagtcgtgagtgaccacagaaggctttctggaggcaggacttgagggcctttgcctcagacatgcatacggcaggagtgtgagatctatggagtgggctcagctcatggagcaaggagga

SEQ ID NO: 382772 - DNA, 120 bp, Artificial Sequence
  ENSG00000143786_26 (sequence is synthesized)
cggcaggggctccaatgatgatgtctgcgtaagaattcccatttaagatctttccaagcacaagagtcatggcccaatggcagagtgtcctatgcccacgaataaatcaaggatgaagaa

SEQ ID NO: 382773 - DNA, 120 bp, Artificial Sequence
  ENSG00000143786_27 (sequence is synthesized)
gttacactggtatccagtgatccattggcacagagacacagtttctactttgatacaatctgtgtcagcctggcagttaatttatttagcagcatcttaaatttttttgtttttgcataa

SEQ ID NO: 382774 - DNA, 120 bp, Artificial Sequence
  ENSG00000143786_28 (sequence is synthesized)
gggagggaggccagcgggccggcggggtccgccccgaccccatccacgaccccgactcctatccgatcctatccccggccccgctcgggcctttccccttgcgccctggctcggctggct

SEQ ID NO: 382775 - DNA, 120 bp, Artificial Sequence
  ENSG00000143786_29 (sequence is synthesized)
cgacgagcagtaagttcgtagccgccctccgaagccgggcgtgcatgggatggcagagttggcgtgcgtgcgtgagtccaccagtgtggcatgggcatgtaaggtgcgcggagggactgc

SEQ ID NO: 382776 - DNA, 120 bp, Artificial Sequence
  ENSG00000143786_30 (sequence is synthesized)
accttctccatcaggtgcagaaggtgcgtttttgcaagactgcgcactcacacgaccattgagaggctcactttgcagtggccctcccaggccctccgtggttgggtgtccgtctttgtc

SEQ ID NO: 382777 - DNA, 120 bp, Artificial Sequence
  ENSG00000143786_31 (sequence is synthesized)
ggccacatcatgctgaacaagagccgagaagtagaatcgccagtgtcaagccgtccacgttgtgggatgcccactgttcccccaggatcactcaagaccctgtgacttgtggtcactgat

SEQ ID NO: 382778 - DNA, 120 bp, Artificial Sequence
  ENSG00000143786_32 (sequence is synthesized)
gagtggaccaagtgaagtccacaagatggctgctgtggctccaggcatcacgtccacatgcaaatccatccagaggcaggaactgggaataggcttggaggtggccaggacagcaagtgg

SEQ ID NO: 382779 - DNA, 120 bp, Artificial Sequence
  ENSG00000143786_33 (sequence is synthesized)
gctgtctgtataaacctcccctccacttgggaaggaaaatcaccccccaagtcgattttctgtccatcttattgatcagagagcgttataaattcacccattaaataatctggacaaggg

SEQ ID NO: 382780 - DNA, 120 bp, Artificial Sequence
  ENSG00000143786_34 (sequence is synthesized)
agctcctgcaggatatttatcagcatctttgcaagagaggatgaattcaaaataaagtacaagagaagaaacattcagtgatcctcatggaacacctttcctgaagagatgatgatgggg

SEQ ID NO: 382781 - DNA, 120 bp, Artificial Sequence
  ENSG00000143786_35 (sequence is synthesized)
aggagcaggcaatagtgaagagtcaaggtttgggaggggaaccagagaccccagacttcagaactgcagcttttggggtcaacacaacatcccagaacatcaagacaccaagacatatca

SEQ ID NO: 382782 - DNA, 120 bp, Artificial Sequence
  ENSG00000143786_36 (sequence is synthesized)
gctaggaccctgcagtaggacatcggtgtccagatgagaccagaagcaacccagtagaagccaggggacagtgtgtggaccacagaattcatgcttgatgccatcaagggcctttgcctc

SEQ ID NO: 382783 - DNA, 120 bp, Artificial Sequence
  ENSG00000143786_37 (sequence is synthesized)
caggaagaaggggtaaggatgatgaatattgggtaggcacatgataggggttgtcacaagttttaagatgctttcaattagtaaataactgtcaagattaccttttgttttcacctgccc

SEQ ID NO: 382784 - DNA, 120 bp, Artificial Sequence
  ENSG00000143786_38 (sequence is synthesized)
agtctccattgtgcctccttcagaaacacacactgggttttctttgggtgtgaaggggcctctgtgtccatcattccagtgtgagcacatgatctgagcccggtcagtgaggtttaattt

SEQ ID NO: 382785 - DNA, 120 bp, Artificial Sequence
  ENSG00000143786_39 (sequence is synthesized)
tggagagaccagtgccagagcctttattactaaaagtagaagttgatacacatttgaagttgcccatcccactaccaccaaatgatgtggaagagaatgagtcccctgtgacctagtgac

SEQ ID NO: 382786 - DNA, 120 bp, Artificial Sequence
  ENSG00000143786_40 (sequence is synthesized)
gagaatgaagtaaatcctgtctcaaaagaagaaaatccacttccaagggacaaggtctcactctgtcgcccaagctggagcacagtggcacaataatagttcactgcagccttgaagtcc

SEQ ID NO: 382787 - DNA, 69 bp, Artificial Sequence
  ENSG00000143786_41 (sequence is synthesized)
ataattgcctttgatgagttaaggacagattttaagagccccatagaccagtgcaatcctgttcatgcg

SEQ ID NO: 382788 - DNA, 120 bp, Artificial Sequence
  ENSG00000143786_42 (sequence is synthesized)
cgccgctgggctgagccccggcagtggctgcggcggcggcggcggcgggcggcagcggaggcagctgccgcctctgtcctcggatccgctccgctctgctccctggtgtgttgattcttc

SEQ ID NO: 382789 - DNA, 120 bp, Artificial Sequence
  ENSG00000143786_43 (sequence is synthesized)
atggtcgcatctgtgaaaggaaattcaatctcgggaccccaaaatcctacaccaaagagaaaagtcaagctgggaactgcatcaggcaaacctgcctcccatttaattgctaaataagat

SEQ ID NO: 382790 - DNA, 120 bp, Artificial Sequence
  ENSG00000143786_44 (sequence is synthesized)
aaagattttttaaaaaggaaaaaaaaactacatatctccatcacaatttgcccgcaaggaaatttttatgggcctcaagatctttaccctgaaacggttctgttgaatttcactttggaa

SEQ ID NO: 382791 - DNA, 79 bp, Artificial Sequence
  ENSG00000143786_45 (sequence is synthesized)
tctttaccctgaaacggttctgttgaatttcactttggaaatgtaagttgatagctgatcttcacaactgcgggacaaa

SEQ ID NO: 382792 - DNA, 120 bp, Artificial Sequence
  ENSG00000143786_46 (sequence is synthesized)
aactgcagatgcactgaggctaagtgatcattcctctacccacccctcacatgtaaatcgtgtattcagtgaaaggctgataaaagactggaaagactgcaaccatttgtctcttaccta

SEQ ID NO: 382793 - DNA, 120 bp, Artificial Sequence
  ENSG00000143786_47 (sequence is synthesized)
ctgcaaccatttgtctcttacctacctgtgatctggaagcccccgcccccgtgctttgagttgtcctgcctttccagaccaaaccaatgtacgtcttacacatattgattgatgtctcat

SEQ ID NO: 382794 - DNA, 120 bp, Artificial Sequence
  ENSG00000143786_48 (sequence is synthesized)
ttatgatttatgccctgaaattggacatattgccaagcaagcgaaattgagattccatcagccaggaagaaggggattgtggtgaggagcaaatgaatcaacgcatgagcaaaggatggt

SEQ ID NO: 382795 - DNA, 120 bp, Artificial Sequence
  ENSG00000143793_0 (sequence is synthesized)
ggggtcgggcctgggtccgacggtagtgggtagcgggtctcgggttgcgggttgcaggttgcaagccgcaggccccaggcaactgccttcccggcgccatgttcggctccagtcgtggag

SEQ ID NO: 382796 - DNA, 120 bp, Artificial Sequence
  ENSG00000143793_1 (sequence is synthesized)
gcgtgcgcggcgggcaggaccagttcaactgggaggacgtgaagactgacaagcagcgggagaactacctgggcaactcgctgatggcgccggtaggccgctggcagaagggccgcgacc

SEQ ID NO: 382797 - DNA, 120 bp, Artificial Sequence
  ENSG00000143793_2 (sequence is synthesized)
tcacctggtacgccaagggccgggcgccatgcgcgggcccgagccgcgaggaggaactggcagccgtgcgggaggcggagcgcgaggcgctgctggccgcccttggctacaagaacgtga

SEQ ID NO: 382798 - DNA, 120 bp, Artificial Sequence
  ENSG00000143793_3 (sequence is synthesized)
agaagcagcccacgggcctgagcaaggaggacttcgcggaggtctgcaagcgggaaggaggcgaccccgaggagaagggcgtggaccggctgctggggctggggagcgcaagtggctccg

SEQ ID NO: 382799 - DNA, 120 bp, Artificial Sequence
  ENSG00000143793_4 (sequence is synthesized)
tgggccgcgtggcgatgtcccgagaggacaaggaggccgccaaactggggctgtctgtgttcacgcatcaccgcgtagagagcggcgggcccgggacctcggcagcctcggccaggagga

SEQ ID NO: 382800 - DNA, 120 bp, Artificial Sequence
  ENSG00000143793_5 (sequence is synthesized)
agaaagagaagaagaagaaagacaaagagcacaggcggccagctgaggccacctcctctcccacatctcctgagaggcccaggcaccaccaccatgactccgactccaactccccctgct

SEQ ID NO: 382801 - DNA, 120 bp, Artificial Sequence
  ENSG00000143793_6 (sequence is synthesized)
gtaagaggaggaagcggggacacagtggggacaggaggagcccgtctcgcaggtggcatgacagaggctctgaggcctgatggctggaccctgctcactgctgttgtgggaccctgaacc

SEQ ID NO: 382802 - DNA, 120 bp, Artificial Sequence
  ENSG00000143793_7 (sequence is synthesized)
ctcccttcaccttgcttgcctcctgcctcggaagctccttgggtgtgggtgaagcccgaggctgctcctgtggaagtggctctgggcaccagcctgtggggctaaagacttgacagctag

SEQ ID NO: 382803 - DNA, 120 bp, Artificial Sequence
  ENSG00000143793_8 (sequence is synthesized)
ctctggagcagccggcttcctggaaaacctccaggtttcgcataccagggatggcccctggcttggcctgcgaaggtgaacctgcccagatttatcagtagaggctggactccctctgtg

SEQ ID NO: 382804 - DNA, 120 bp, Artificial Sequence
  ENSG00000143793_9 (sequence is synthesized)
tcctgcccatggttgcagcagccatgggcctatgagcggtctaactgtggccaagtatggtgacctctatttttctttatattgactctttgtatttcaataaatatattttaaaaggaa

SEQ ID NO: 382805 - DNA, 120 bp, Artificial Sequence
  ENSG00000143793_10 (sequence is synthesized)
aaggaggccgccaaactggggctgtctgtgttcacggtaatcccccgccccgcctgaccgcagcaggggctaacaggggtggggcggggcgggggcactgaacggagctccccggggcgc

SEQ ID NO: 382806 - DNA, 120 bp, Artificial Sequence
  ENSG00000143793_11 (sequence is synthesized)
tgcggggcgtggtgtggggccggcccgcagactcctccgcagagctcgcttctcccgcagcatcaccgcgtagagagcggcgggcccgggacctcggcagcctcggccaggaggaagccg

SEQ ID NO: 382807 - DNA, 120 bp, Artificial Sequence
  ENSG00000143793_12 (sequence is synthesized)
cgggcggaggatcagacggaaagcaggtgaggctgtgccacctgggctagctgtgccccggggtggggggtctcgggaggaccggagcggctcccactcgggcaggtggcagcttctctt

SEQ ID NO: 382808 - DNA, 120 bp, Artificial Sequence
  ENSG00000143793_13 (sequence is synthesized)
gagaggtcctaagtactggcagtggtcgggcgctgtgccgtgggagggcactcaggacctggggcggggccttttcctgccgtgggtggcacctccagggcttctcctggatggtgagcc

SEQ ID NO: 382809 - DNA, 120 bp, Artificial Sequence
  ENSG00000143793_14 (sequence is synthesized)
tgggcctgaccctaagagtggcctggtgggtgcaggtaggaaggtgtcaacctgccaagggcacggctggggtggggcaggggcgtgctgtggagatggggatattgcatctgtttctaa

SEQ ID NO: 382810 - DNA, 120 bp, Artificial Sequence
  ENSG00000143793_15 (sequence is synthesized)
cccacgtagccactggccacgtgactacgtaactgaggagtggaatttgtagtttgatttaactgatttaaagacgcacttgtgggtggtggcttcatctggatggggcctgcttgtgtt

SEQ ID NO: 382811 - DNA, 120 bp, Artificial Sequence
  ENSG00000143793_16 (sequence is synthesized)
atgcaacctccaccctggtgacccctcctcctgtggcctacggcttgtcaggctaatgggctcaaaactgaccaggtcttccccacaaacctggtcctcatgttgacaggtggctgcttc

SEQ ID NO: 382812 - DNA, 120 bp, Artificial Sequence
  ENSG00000143793_17 (sequence is synthesized)
atcctcacagttgcccagaccagagcctcagagccgtcctggactcctgcccaatgtccacctggccctgctatcccctctccaccacacctgacatccagtcagtggtcagactccaca

SEQ ID NO: 382813 - DNA, 120 bp, Artificial Sequence
  ENSG00000143793_18 (sequence is synthesized)
gctgggccctgcccacatggcccaagtccaccctggcctggcaagctgcaatggcacccaggagatgatgccctacaccccagggagccttcctgggagtcggccagtcaccttctgtgt

SEQ ID NO: 382814 - DNA, 120 bp, Artificial Sequence
  ENSG00000143793_19 (sequence is synthesized)
gcctggctgtggcctgctgctctgccctcgccatgcacctgctccatgatgaaagctcatgcagtgcctcatgagggagatggcagccagtacttgctaagtagatagatgagccagacg

SEQ ID NO: 382815 - DNA, 120 bp, Artificial Sequence
  ENSG00000143793_20 (sequence is synthesized)
tgtggctgtctgccagcctgctctaacagcctgacccatggactgggtcactaagaaacagaaatttcccacaggacagtagacctgtatttcatccagttcaacctgtggctggaattg

SEQ ID NO: 382816 - DNA, 120 bp, Artificial Sequence
  ENSG00000143793_21 (sequence is synthesized)
ccccaaaagtggtggcagtagagttcccacaagggagtgccccacaccatcctgagatggggctggttaggattctacagattgagcatgccagggtgattcgcccagagcatttattcg

SEQ ID NO: 382817 - DNA, 120 bp, Artificial Sequence
  ENSG00000143793_22 (sequence is synthesized)
tggggcttttgtacagagtgggctgcagcagttcttgcaataggcagtgagagaaatgaagttctctctaggtatgtccgtgggggagggggttggtgaatggaatttatatgagggttt

SEQ ID NO: 382818 - DNA, 120 bp, Artificial Sequence
  ENSG00000143793_23 (sequence is synthesized)
gaggaatctggctcaggctgagtccagtttctttctgtgttttgagcaacaacctagttactgtcatctgtgcctgggaacgttcatggctatggctcgggttcaagtctgcagaggaaa

SEQ ID NO: 382819 - DNA, 120 bp, Artificial Sequence
  ENSG00000143793_24 (sequence is synthesized)
ttatacagttggcgaagtcacagagtggccaagggactctgtttctcagtcagcactgggaatgaaagtggaaaggggaagcaggggtacgtcacaacctccaaaatcagggtgcccagc

SEQ ID NO: 382820 - DNA, 120 bp, Artificial Sequence
  ENSG00000143793_25 (sequence is synthesized)
acgctgaggttctggtaaggggtttcttccagactgcagacttccttcccgctgccttcacacagtagaaagctgcacaaagctcttggggtcccttttatgaaggctctgtcctcatga

SEQ ID NO: 382821 - DNA, 120 bp, Artificial Sequence
  ENSG00000143793_26 (sequence is synthesized)
cctagtcacctccgaagcaccaacgccttggggtgaggatttcacatgggagttagggtgcacattcagtttaacacggcagggataggaccagtgctctgagggtgtctgggtagctgc

SEQ ID NO: 382822 - DNA, 120 bp, Artificial Sequence
  ENSG00000143793_27 (sequence is synthesized)
tggttcatccagaagtttactgggtaatactcagaaattccacaaatcattaaggtcattaccttgttaagctcccgatatggaatcgcgactagcagtgaccaattggcggtgttaact

SEQ ID NO: 382823 - DNA, 120 bp, Artificial Sequence
  ENSG00000143793_28 (sequence is synthesized)
aggcgcatcttgtgtgttttcttttttctttttttatgagacagggtccgctcactcgttcaggttggagtgcagtggcgcgaagtcctgggttcgagatcctcccgcctcagcctcaaa

SEQ ID NO: 382824 - DNA, 90 bp, Artificial Sequence
  ENSG00000143793_29 (sequence is synthesized)
cgaagtcctgggttcgagatcctcccgcctcagcctcaaagcgttggggctacaggggcgcgcgcgcgcctggcccattttaacttctta

SEQ ID NO: 382825 - DNA, 89 bp, Artificial Sequence
  ENSG00000143793_30 (sequence is synthesized)
accacacccggctaatttttgtatttgagtagagaccgggtttcaccatgttggacaggctagtctcgaactcccgaccttgctgggat

SEQ ID NO: 382826 - DNA, 120 bp, Artificial Sequence
  ENSG00000143793_31 (sequence is synthesized)
agagccactccgcccggccccgttttaaccatttttaaacttccagttcagaggcgttcccgcgcccggcagggtaggcgcagtgcgcaggcgcccaaagccgacgtggaggtgatgcgc

SEQ ID NO: 382827 - DNA, 120 bp, Artificial Sequence
  ENSG00000143797_0 (sequence is synthesized)
gcgagcggcgcgggcggccggagcgccgaggcccggccatggccaccaccagcaccacgggctccaccctgctgcagcccctcagcaacgccgtgcagctgcccatcgaccaggtcaact

SEQ ID NO: 382828 - DNA, 120 bp, Artificial Sequence
  ENSG00000143797_1 (sequence is synthesized)
cgccgtgcagctgcccatcgaccaggtcaactttgtagtgtgccaactctttgccttgctagcagccatttggtttcgaacttatctacattcaagcaaaactagctcttttataagaca

SEQ ID NO: 382829 - DNA, 120 bp, Artificial Sequence
  ENSG00000143797_2 (sequence is synthesized)
tgtagttgctacccttttgggcctttatcttgcacttttttgctttggatggtatgccttacactttcttgtacaaagtggaatttcctactgtatcatgatcatcataggagtggagaa

SEQ ID NO: 382830 - DNA, 120 bp, Artificial Sequence
  ENSG00000143797_3 (sequence is synthesized)
catgcacaattactgctttgtgtttgctctgggatacctcacagtgtgccaagttactcgagtctatatctttgactatggacaatattctgctgatttttcaggcccaatgatgatcat

SEQ ID NO: 382831 - DNA, 120 bp, Artificial Sequence
  ENSG00000143797_4 (sequence is synthesized)
tactcagaagatcactagtttggcttgcgaaattcatgatgggatgtttcggaaggatgaagaactgacttcctcacagagggatttagctgtaaggcgcatgccaagcttactggagta

SEQ ID NO: 382832 - DNA, 120 bp, Artificial Sequence
  ENSG00000143797_5 (sequence is synthesized)
tttgagttacaactgtaacttcatggggatcctggcaggcccactttgctcttacaaagactacattactttcattgaaggcagatcataccatatcacacaatctggtgaaaatggaaa

SEQ ID NO: 382833 - DNA, 120 bp, Artificial Sequence
  ENSG00000143797_6 (sequence is synthesized)
agaagagacacagtatgaaagaacagagccatctccaaatactgcggttgttcagaagctcttagtttgtgggctgtccttgttatttcacttgaccatctgtacaacattacctgtgga

SEQ ID NO: 382834 - DNA, 120 bp, Artificial Sequence
  ENSG00000143797_7 (sequence is synthesized)
gtacaacattgatgagcattttcaagctacagcttcgtggccaacaaagattatctatctgtatatctctcttttggctgccagacccaaatactattttgcatggacgctagctgatgc

SEQ ID NO: 382835 - DNA, 120 bp, Artificial Sequence
  ENSG00000143797_8 (sequence is synthesized)
cattaataatgctgcaggctttggtttcagagggtatgacgaaaatggagcagctcgctgggacttaatttccaatttgagaattcaacaaatagagatgtcaacaagtttcaagatgtt

SEQ ID NO: 382836 - DNA, 120 bp, Artificial Sequence
  ENSG00000143797_9 (sequence is synthesized)
tcttgataattggaatattcagacagctctttggctcaaaagggtgtgttatgaacgaacctccttcagtccaactatccagacgttcattctctctgccatttggcacggggtataccc

SEQ ID NO: 382837 - DNA, 120 bp, Artificial Sequence
  ENSG00000143797_10 (sequence is synthesized)
aggatattatctaacgtttctaacaggggtgttaatgacattagcagcaagagctatgagaaataactttagacattatttcattgaaccttcccaactgaaattattttatgatgttat

SEQ ID NO: 382838 - DNA, 120 bp, Artificial Sequence
  ENSG00000143797_11 (sequence is synthesized)
aacatggatagtaactcaagtagcaataagttacacagttgtgccatttgtgcttctttctataaaaccatcactcacgttttacagctcctggtattattgcctgcacattcttggtat

SEQ ID NO: 382839 - DNA, 120 bp, Artificial Sequence
  ENSG00000143797_12 (sequence is synthesized)
cttagtattattgttgttgccagtgaaaaaaactcaaagaagaaagaatacacatgaaaacattcagctctcacaatccaaaaagtttgatgaaggagaaaattctttgggacagaacag

SEQ ID NO: 382840 - DNA, 120 bp, Artificial Sequence
  ENSG00000143797_13 (sequence is synthesized)
tttttctacaacaaacaatgtttgcaatcagaatcaagaaatagcctcgagacattcatcactaaagcagtgatcgggaaggctctgagggctgttttttttttttgatgttaacagaaa

SEQ ID NO: 382841 - DNA, 120 bp, Artificial Sequence
  ENSG00000143797_14 (sequence is synthesized)
ccaatcttagcaccttttcaaggggtttgagtttgttggaaaagcagttaactggggggaaatggacagttatagataaggaatttcctgtacaccagattggaaatggagtgaaacaag

SEQ ID NO: 382842 - DNA, 120 bp, Artificial Sequence
  ENSG00000143797_15 (sequence is synthesized)
ccctcccatgccatgtctccgtgggccacgccttatgtaagaatatttccatatttcagtgggcactcccaacctcagcacttgtccgtagggtcacacgcgtgccctgttgctgaatgt

SEQ ID NO: 382843 - DNA, 120 bp, Artificial Sequence
  ENSG00000143797_16 (sequence is synthesized)
atgttgcgtatcccaaggcactgaagaggtggaaaaataatcgtgtcaatctggatgatagagagaaattaacttttccaaatgaatgtcttgccttaaaccctctatttcctaaaatat

SEQ ID NO: 382844 - DNA, 120 bp, Artificial Sequence
  ENSG00000143797_17 (sequence is synthesized)
tgttcctaaatggtattttcaagtgtaatattgtgagaacgctactgcagtagttgatgttgtgtgctgtaaaggattttaggaggaatttgaaacaggatatttaagagtgtggatatt

SEQ ID NO: 382845 - DNA, 120 bp, Artificial Sequence
  ENSG00000143797_18 (sequence is synthesized)
tttaaaatgcaataaacatctcagtatttgaagggttttcttaaagtatgtcaaatgactacaatccatagtgaaactgtaaacagtaatggacgccaaattataggtagctgattttgc

SEQ ID NO: 382846 - DNA, 120 bp, Artificial Sequence
  ENSG00000143797_19 (sequence is synthesized)
tggagagtttaattaccttgtgcagtcaaagagcgcttccagaaggaatctcttaaaacataatgagaggtttggtaatgtgatattttaagcttattctttttcttaaaagagagaggt

SEQ ID NO: 382847 - DNA, 120 bp, Artificial Sequence
  ENSG00000143797_20 (sequence is synthesized)
gacgaaggaaggcaggaatgaagaagcactgcgtggcctccggtggaatgcacggggcacagccgcgactctgcaggcagcttcccccccatgccagggctctgcgccgtcatgtgagac

SEQ ID NO: 382848 - DNA, 120 bp, Artificial Sequence
  ENSG00000143797_21 (sequence is synthesized)
ttaaaaaaaaagttgaatgacttcgtgatactttggacttctaaattaaatttatcaggcataaattatgtagaattagaggctttgaaaataatactggtaggttgctcaaaggttttg

SEQ ID NO: 382849 - DNA, 120 bp, Artificial Sequence
  ENSG00000143797_22 (sequence is synthesized)
aaagagaaatcgctaggtaggttactatctggctaatccatttcttatccttgacaatttaattcatatttgggaaacttttagggaaatgaaaaataaaagtcactgagtctgggtgac

SEQ ID NO: 382850 - DNA, 120 bp, Artificial Sequence
  ENSG00000143797_23 (sequence is synthesized)
attttttaagaataatataaattcagtttcaaactcttctcacattaaaattttgctgtgaactcttactaaaatgagttttaggttctgtaagtggaaaaatgtgcttttattttatgg

SEQ ID NO: 382851 - DNA, 120 bp, Artificial Sequence
  ENSG00000143797_24 (sequence is synthesized)
gccatttttaccacaactaatcttgccttggattactaagcatctcctgcgatcccacagaggactgtggtggccacaggagctgaaagcagaagagtgggatttgatgccaggcagtgg

SEQ ID NO: 382852 - DNA, 120 bp, Artificial Sequence
  ENSG00000143797_25 (sequence is synthesized)
agtggcctcagccccagattgtacctcctgccctgtaggaggggagggggcaaagccttctgacttcacctttgtttgacctatgtatggaacttacttttactttttgccttaaatttt

SEQ ID NO: 382853 - DNA, 120 bp, Artificial Sequence
  ENSG00000143797_26 (sequence is synthesized)
taatgaaatgcaaattttctgtgatggggttctctctctctttttttcggggggtggagtcactaataaatttgcaaatgaagttaaagacaaggcaaccatctggcttatgctatataa

SEQ ID NO: 382854 - DNA, 120 bp, Artificial Sequence
  ENSG00000143797_27 (sequence is synthesized)
tacttcatttaaagaagaaaggaaaagcaaatgcacttgcagcttttgaggtctcagcaaaaatgggcatgtgtcttttttgaagtttagaaatatcctaatctatttttatttatctaa

SEQ ID NO: 382855 - DNA, 120 bp, Artificial Sequence
  ENSG00000143797_28 (sequence is synthesized)
aagtaagtgttttccggctgataaggctaaccctacccaggaaaggattgataactaaataaatttcctctgttttcccatgcattgaaattatgttggctgagcatggtggctcacacc

SEQ ID NO: 382856 - DNA, 120 bp, Artificial Sequence
  ENSG00000143797_29 (sequence is synthesized)
tgtgagagaatagaaagaatgttcatggaatgtacctgccctgtaaaatgtttgatcattttcattaatgttgcagagaatccgactgctattaagagaaagtgaacaaattaagaattt

SEQ ID NO: 382857 - DNA, 120 bp, Artificial Sequence
  ENSG00000143797_30 (sequence is synthesized)
taagagaaagtgaacaaattaagaatttaaaagacaggttcaggcatgtcataagtgaaaacaagaaggcttaatacaaacttgttgggttttgttcgtgtgtgtgtgtgtgtgtgtgtg

SEQ ID NO: 382858 - DNA, 120 bp, Artificial Sequence
  ENSG00000143797_31 (sequence is synthesized)
gccacctacaaataatcacatttctgttacctgaatttatttctcagcctgtaaaccttagtcactgttacctgtttcttgctcagtgaatatgatcttggcactgtcatctagaaagca

SEQ ID NO: 382859 - DNA, 120 bp, Artificial Sequence
  ENSG00000143797_32 (sequence is synthesized)
agatatttgattggttttctggttccttcgaagataataattccatatccagtttgactgattttcatacccctgaatcaactagttattttcatgaaatggtttttggatatctctcct

SEQ ID NO: 382860 - DNA, 120 bp, Artificial Sequence
  ENSG00000143797_33 (sequence is synthesized)
ctagtttggagaagtaataatcacaaagattaatattttgcttctagtacttacagtagaagaattttaaactggtacgtctactcctgttaaatagaaaggggattcgttgtattatgt

SEQ ID NO: 382861 - DNA, 120 bp, Artificial Sequence
  ENSG00000143797_34 (sequence is synthesized)
gcttgcttttttttaatcaatagaataagattcaatgcatatttatgttttatattttccactattcaggtatcatgaaatcactctagagatgatcaatcaacatcatatttatacttt

SEQ ID NO: 382862 - DNA, 120 bp, Artificial Sequence
  ENSG00000143797_35 (sequence is synthesized)
tggttaattatatactactcagggaaaaaatgaacaaaaataactactcatccttcaatttcattttcttgaaacagtaagagtataatttggtatgcctcagctgtcaccattttataa

SEQ ID NO: 382863 - DNA, 120 bp, Artificial Sequence
  ENSG00000143797_36 (sequence is synthesized)
gtggctcattctgttcttaaagtaagtatttttattggaactcagggtaattgggggaatttatttagcttctaaaatatccggcaggatagagaagatttatttggcttcaaaaatgtc

SEQ ID NO: 382864 - DNA, 120 bp, Artificial Sequence
  ENSG00000143797_37 (sequence is synthesized)
tggtgaccacttctcttattagccactactgcccatttgcttcaaaaatatatttattggtctccaccatgtgtgacacacacaggatttccaaacataccacttttgagaaaaatgtgc

SEQ ID NO: 382865 - DNA, 120 bp, Artificial Sequence
  ENSG00000143797_38 (sequence is synthesized)
agtaaaaaggaggtttctagaaagtgacagtaactcacatttaagcactagctgacctaggaggagacctggatcttcattctggttctgcctttcatgagacttaagacttggaggagc

SEQ ID NO: 382866 - DNA, 120 bp, Artificial Sequence
  ENSG00000143797_39 (sequence is synthesized)
cacctgtcctgtagaccccaagttcctcagccataagcaaacgggttaatcctaagagttcaggaccagttgggtgtcgtgaacggagccattagcaaggtctgtaggattcaaggactt

SEQ ID NO: 382867 - DNA, 120 bp, Artificial Sequence
  ENSG00000143797_40 (sequence is synthesized)
gggcacattcacagtccacactattgtcatggtcattgacttactacttgagctcaaagccctgacatttcaaaaggttgtcatgataacagtgaaacctctgaatcccttaaatcagaa

SEQ ID NO: 382868 - DNA, 120 bp, Artificial Sequence
  ENSG00000143797_41 (sequence is synthesized)
ggcatggcaacatactttttctactggcaatagctcttacaatgagtgtttcataatgaaatagtctctgctgaagaaaacatgttttccttttgctctctctgctttgttggtttctgt

SEQ ID NO: 382869 - DNA, 120 bp, Artificial Sequence
  ENSG00000143797_42 (sequence is synthesized)
gctgtgtggaattggagaagatatatgctctgaaatattttatacagattactgactactggacagggtttaccactatataacatctcaaagttattcaaggatatttaaagcatattt

SEQ ID NO: 382870 - DNA, 120 bp, Artificial Sequence
  ENSG00000143797_43 (sequence is synthesized)
agtttagttacaccttattttaaaccgcagaaaacaatagctttaaaatttttgccattaaaataattataaatttatacttttactcaaggactagatcacagttttaggacaaaaatc

SEQ ID NO: 382871 - DNA, 120 bp, Artificial Sequence
  ENSG00000143797_44 (sequence is synthesized)
tctcctatttaaagttcataccttgtaagtatttagtttgtatattcatgaacaaatctggacatttatactttttttgtttccttatcaactgttcacaattattagttaattggtctt

SEQ ID NO: 382872 - DNA, 120 bp, Artificial Sequence
  ENSG00000143797_45 (sequence is synthesized)
aacagttctacattataattgaaagaaaaattacttgagaaaataattgtttcagaatagtgcctactatatctgtgtcagctaaaaatttgtccagagttttagatataagctagtatt

SEQ ID NO: 382873 - DNA, 120 bp, Artificial Sequence
  ENSG00000143797_46 (sequence is synthesized)
ttgtggagttttatccaggcgttaatagttcttcctggctgaaatttaatataggtgcagaatcctaaataacactgtgagatgtaatcttaactgccctcaataccttataaaactgct

SEQ ID NO: 382874 - DNA, 120 bp, Artificial Sequence
  ENSG00000143797_47 (sequence is synthesized)
gcatttaacccagtgtgcatttaatgagtggctggtcgttgatacactcatcttagatgctgaaatttctgttttctccagcccttgtaaaagtgggtttcttgatgaacgcgtgctccc

SEQ ID NO: 382875 - DNA, 120 bp, Artificial Sequence
  ENSG00000143797_48 (sequence is synthesized)
aatgctgaagcaaaagatttgcatttaaggagagaaatacaccctgaaatttgagtttgaaagattagaacatagagggtctctacagtgtttttctgcaacaccaagtagtcaaatcta

SEQ ID NO: 382876 - DNA, 120 bp, Artificial Sequence
  ENSG00000143797_49 (sequence is synthesized)
tttatagaaactctgattacaacagaaattttaaaatgaaattttccacatcggtattttgtaggaaagctcttataatcaatgcttaagctgctttttgaggcttttcttgtacagagg

SEQ ID NO: 382877 - DNA, 120 bp, Artificial Sequence
  ENSG00000143797_50 (sequence is synthesized)
ttgcagccaattacattttaattggtaggctgctgaataatgtttttgtatgttttaaaataatatttattttaataggttttttaacattatgcaaatcccaataaagaactgacacgt

SEQ ID NO: 382878 - DNA, 120 bp, Artificial Sequence
  ENSG00000143797_51 (sequence is synthesized)
tccataggccattgactgggaaattttgtgaaacacagcctaaatacacagtttttacaccaactaatttgtcttgcctttaaaactgattataactcttctttaagtacaacttttata

SEQ ID NO: 382879 - DNA, 120 bp, Artificial Sequence
  ENSG00000143797_52 (sequence is synthesized)
aagaaaaaatacaacactaagactgtatgttctgtaaattatagtgtgatgacccatgcagaaccgctgtctgaagcttactcagcgattcatagccatctccagccatgttttatcaaa

SEQ ID NO: 382880 - DNA, 120 bp, Artificial Sequence
  ENSG00000143797_53 (sequence is synthesized)
tcacacactaaaaataaatggaaatgctacagtgaaaaaccaaaagttacagagcaacataagtaaaatgactaggcagtttcttagtaacatgtttgaaatgggaaaggtgactgactg

SEQ ID NO: 382881 - DNA, 120 bp, Artificial Sequence
  ENSG00000143797_54 (sequence is synthesized)
cctttcaccagagtcttagctgtttcacgttcactattttaggttaattttcttgggaaatcaatttgaatattcccccctgtccttttgcattaaaggacgaaaatatatgttgagagt

SEQ ID NO: 382882 - DNA, 120 bp, Artificial Sequence
  ENSG00000143797_55 (sequence is synthesized)
ttgacagactttttaaatatgcctctttcccaattttatgtatttttggttctgcgcacacagatttatcaatgaagtacatttgcctctggctttatcacaaggaaaaaggaatcaaac

SEQ ID NO: 382883 - DNA, 120 bp, Artificial Sequence
  ENSG00000143797_56 (sequence is synthesized)
attgaacacaaatgtgttccaaaccagtcttgtccatcttgtcacttttatgtgactgctcctctgaaccagaaggggcacgatagaaggccataggaatgaaagtaaatcattcaggtg

SEQ ID NO: 382884 - DNA, 120 bp, Artificial Sequence
  ENSG00000143797_57 (sequence is synthesized)
aagtgagaaattcttccatatacagagtgaaaatgtgtgatttcattcctgccttcctttaaacgttgtcttgatctctgcctagtagtagttgagccctcagtcgcccaaacatgagga

SEQ ID NO: 382885 - DNA, 120 bp, Artificial Sequence
  ENSG00000143797_58 (sequence is synthesized)
gagacccaactccagcagccagaatttagtatttacatttgccttcccaagttgagaatagaatgtggtgttctgtgctttctgtttttattattccaaaatatttttttaaagaagtgt

SEQ ID NO: 382886 - DNA, 120 bp, Artificial Sequence
  ENSG00000143797_59 (sequence is synthesized)
tatttttcaacagattcataaattagttcctgatgtacggtaaattaaaactcccactgtgtcagtcaaactgagatgtgctcatttcataaccactcatttctagtctgtcagagctgc

SEQ ID NO: 382887 - DNA, 120 bp, Artificial Sequence
  ENSG00000143797_60 (sequence is synthesized)
actggtggcttattgctggtttttaaaggtgtttttaacttacatgtaacatgtttaggacatgttttttttttctaatttgtgtgtctttacaactgattaaacagtagtttaaaaata

SEQ ID NO: 382888 - DNA, 120 bp, Artificial Sequence
  ENSG00000143797_61 (sequence is synthesized)
acagcatgtattgactgcggttgttcagaagctcttagtttgtgggctgtccttgttatttcacttgaccatctgtacaacattacctgtggagtacaacattgatgagcattttcaagc

SEQ ID NO: 382889 - DNA, 120 bp, Artificial Sequence
  ENSG00000143797_62 (sequence is synthesized)
tcctttccactagaagcgaggtgtgtactgcgtgcatgtttgctgagcgctcaccacgggctaggctccatgcccagttcctgtgaggagaaaacacgtttctatgtgcccggcaggtag

SEQ ID NO: 382890 - DNA, 120 bp, Artificial Sequence
  ENSG00000143797_63 (sequence is synthesized)
atttttcagggtccttgggctaggtcagtctgagtttcctagagaaggcgctcaagagtgcgttttacttctatgcatttcacctattttcagtgttctccattcaacaccagtattcag

SEQ ID NO: 382891 - DNA, 120 bp, Artificial Sequence
  ENSG00000143797_64 (sequence is synthesized)
ttgagtagtggaaataatttctggcatttgttccttcaaaggggatgtattttcttcctggtactagatgaatctttttgtcctgtaacaaaactgattatatgtctgttgtgaaataaa

SEQ ID NO: 382892 - DNA, 120 bp, Artificial Sequence
  ENSG00000143797_65 (sequence is synthesized)
gatttaaggatctctaggcagtgttgtcttaaacttttcttttttttttggaaacttttattttaatacagaatctaatctacagaaaagttgcaaagaacttctatatgccctttaccc

SEQ ID NO: 382893 - DNA, 120 bp, Artificial Sequence
  ENSG00000143797_66 (sequence is synthesized)
agactcaccagtcatttatgttttccctgttacttcctcatctcccctctctctgtcttttatacacagtgtgtacaatgtgtattcgcttttttagaacgaactttatccatagtagca

SEQ ID NO: 382894 - DNA, 120 bp, Artificial Sequence
  ENSG00000143797_67 (sequence is synthesized)
gaccaggctgcccgccacatgattcccgggtgtctttccccttccgtgtgtctcacgtacctggcagagtccacaggcgaaaagtatgccttacactttcttgtacaaagtggaatttcc

SEQ ID NO: 382895 - DNA, 120 bp, Artificial Sequence
  ENSG00000143799_0 (sequence is synthesized)
agcaatctatcagggaacggcggtggccggtgcggcgtgttcggtggcggctctggccgctcaggcgcctgcggctgggtgagcgcacgcgaggcggcgaggcggcagcgtgtttctagg

SEQ ID NO: 382896 - DNA, 120 bp, Artificial Sequence
  ENSG00000143799_1 (sequence is synthesized)
tcgtggcgtcgggcttccggagctttggcggcagctaggggaggatggcggagtcttcggataagctctatcgagtcgagtacgccaagagcgggcgcgcctcttgcaagaaatgcagcg

SEQ ID NO: 382897 - DNA, 120 bp, Artificial Sequence
  ENSG00000143799_2 (sequence is synthesized)
agagcatccccaaggactcgctccggatggccatcatggtgcagtcgcccatgtttgatggaaaagtcccacactggtaccacttctcctgcttctggaaggtgggccactccatccggc

SEQ ID NO: 382898 - DNA, 120 bp, Artificial Sequence
  ENSG00000143799_3 (sequence is synthesized)
accctgacgttgaggtggatgggttctctgagcttcggtgggatgaccagcagaaagtcaagaagacagcggaagctggaggagtgacaggcaaaggccaggatggaattggtagcaagg

SEQ ID NO: 382899 - DNA, 120 bp, Artificial Sequence
  ENSG00000143799_4 (sequence is synthesized)
cagagaagactctgggtgactttgcagcagagtatgccaagtccaacagaagtacgtgcaaggggtgtatggagaagatagaaaagggccaggtgcgcctgtccaagaagatggtggacc

SEQ ID NO: 382900 - DNA, 120 bp, Artificial Sequence
  ENSG00000143799_5 (sequence is synthesized)
cggagaagccacagctaggcatgattgaccgctggtaccatccaggctgctttgtcaagaacagggaggagctgggtttccggcccgagtacagtgcgagtcagctcaagggcttcagcc

SEQ ID NO: 382901 - DNA, 120 bp, Artificial Sequence
  ENSG00000143799_6 (sequence is synthesized)
tccttgctacagaggataaagaagccctgaagaagcagctcccaggagtcaagagtgaaggaaagagaaaaggcgatgaggtggatggagtggatgaagtggcgaagaagaaatctaaaa

SEQ ID NO: 382902 - DNA, 120 bp, Artificial Sequence
  ENSG00000143799_7 (sequence is synthesized)
aagaaaaagacaaggatagtaagcttgaaaaagccctaaaggctcagaacgacctgatctggaacatcaaggacgagctaaagaaagtgtgttcaactaatgacctgaaggagctactca

SEQ ID NO: 382903 - DNA, 120 bp, Artificial Sequence
  ENSG00000143799_8 (sequence is synthesized)
tcttcaacaagcagcaagtgccttctggggagtcggcgatcttggaccgagtagctgatggcatggtgttcggtgccctccttccctgcgaggaatgctcgggtcagctggtcttcaaga

SEQ ID NO: 382904 - DNA, 120 bp, Artificial Sequence
  ENSG00000143799_9 (sequence is synthesized)
gcgatgcctattactgcactggggacgtcactgcctggaccaagtgtatggtcaagacacagacacccaaccggaaggagtgggtaaccccaaaggaattccgagaaatctcttacctca

SEQ ID NO: 382905 - DNA, 120 bp, Artificial Sequence
  ENSG00000143799_10 (sequence is synthesized)
agaaattgaaggttaaaaaacaggaccgtatattccccccagaaaccagcgcctccgtggcggccacgcctccgccctccacagcctcggctcctgctgctgtgaactcctctgcttcag

SEQ ID NO: 382906 - DNA, 120 bp, Artificial Sequence
  ENSG00000143799_11 (sequence is synthesized)
cagataagccattatccaacatgaagatcctgactctcgggaagctgtcccggaacaaggatgaagtgaaggccatgattgagaaactcggggggaagttgacggggacggccaacaagg

SEQ ID NO: 382907 - DNA, 120 bp, Artificial Sequence
  ENSG00000143799_12 (sequence is synthesized)
cttccctgtgcatcagcaccaaaaaggaggtggaaaagatgaataagaagatggaggaagtaaaggaagccaacatccgagttgtgtctgaggacttcctccaggacgtctccgcctcca

SEQ ID NO: 382908 - DNA, 120 bp, Artificial Sequence
  ENSG00000143799_13 (sequence is synthesized)
ccaagagccttcaggagttgttcttagcgcacatcttgtccccttggggggcagaggtgaaggcagagcctgttgaagttgtggccccaagagggaagtcaggggctgcgctctccaaaa

SEQ ID NO: 382909 - DNA, 120 bp, Artificial Sequence
  ENSG00000143799_14 (sequence is synthesized)
aaagcaagggccaggtcaaggaggaaggtatcaacaaatctgaaaagagaatgaaattaactcttaaaggaggagcagctgtggatcctgattctggactggaacactctgcgcatgtcc

SEQ ID NO: 382910 - DNA, 120 bp, Artificial Sequence
  ENSG00000143799_15 (sequence is synthesized)
tggagaaaggtgggaaggtcttcagtgccacccttggcctggtggacatcgttaaaggaaccaactcctactacaagctgcagcttctggaggacgacaaggaaaacaggtattggatat

SEQ ID NO: 382911 - DNA, 120 bp, Artificial Sequence
  ENSG00000143799_16 (sequence is synthesized)
tgggtacggtgatcggtagcaacaaactggaacagatgccgtccaaggaggatgccattgagcacttcatgaaattatatgaagaaaaaaccgggaacgcttggcactccaaaaatttca

SEQ ID NO: 382912 - DNA, 120 bp, Artificial Sequence
  ENSG00000143799_17 (sequence is synthesized)
cgaagtatcccaaaaagttctaccccctggagattgactatggccaggatgaagaggcagtgaagaagctgacagtaaatcctggcaccaagtccaagctccccaagccagttcaggacc

SEQ ID NO: 382913 - DNA, 120 bp, Artificial Sequence
  ENSG00000143799_18 (sequence is synthesized)
tcatcaagatgatctttgatgtggaaagtatgaagaaagccatggtggagtatgagatcgaccttcagaagatgcccttggggaagctgagcaaaaggcagatccaggccgcatactcca

SEQ ID NO: 382914 - DNA, 120 bp, Artificial Sequence
  ENSG00000143799_19 (sequence is synthesized)
tcctcagtgaggtccagcaggcggtgtctcagggcagcagcgactctcagatcctggatctctcaaatcgcttttacaccctgatcccccacgactttgggatgaagaagcctccgctcc

SEQ ID NO: 382915 - DNA, 120 bp, Artificial Sequence
  ENSG00000143799_20 (sequence is synthesized)
tgaacaatgcagacagtgtgcaggccaaggtggaaatgcttgacaacctgctggacatcgaggtggcctacagtctgctcaggggagggtctgatgatagcagcaaggatcccatcgatg

SEQ ID NO: 382916 - DNA, 120 bp, Artificial Sequence
  ENSG00000143799_21 (sequence is synthesized)
tcaactatgagaagctcaaaactgacattaaggtggttgacagagattctgaagaagccgagatcatcaggaagtatgttaagaacactcatgcaaccacacacaatgcgtatgacttgg

SEQ ID NO: 382917 - DNA, 120 bp, Artificial Sequence
  ENSG00000143799_22 (sequence is synthesized)
aagtcatcgatatctttaagatagagcgtgaaggcgaatgccagcgttacaagccctttaagcagcttcataaccgaagattgctgtggcacgggtccaggaccaccaactttgctggga

SEQ ID NO: 382918 - DNA, 120 bp, Artificial Sequence
  ENSG00000143799_23 (sequence is synthesized)
tcctgtcccagggtcttcggatagccccgcctgaagcgcccgtgacaggctacatgtttggtaaagggatctatttcgctgacatggtctccaagagtgccaactactgccatacgtctc

SEQ ID NO: 382919 - DNA, 120 bp, Artificial Sequence
  ENSG00000143799_24 (sequence is synthesized)
agggagacccaataggcttaatcctgttgggagaagttgcccttggaaacatgtatgaactgaagcacgcttcacatatcagcaagttacccaagggcaagcacagtgtcaaaggtttgg

SEQ ID NO: 382920 - DNA, 120 bp, Artificial Sequence
  ENSG00000143799_25 (sequence is synthesized)
gcaaaactacccctgatccttcagctaacattagtctggatggtgtagacgttcctcttgggaccgggatttcatctggtgtgaatgacacctctctactatataacgagtacattgtct

SEQ ID NO: 382921 - DNA, 120 bp, Artificial Sequence
  ENSG00000143799_26 (sequence is synthesized)
atgatattgctcaggtaaatctgaagtatctgctgaaactgaaattcaattttaagacctccctgtggtaattgggagaggtagccgagtcacacccggtggctctggtatgaattcacc

SEQ ID NO: 382922 - DNA, 120 bp, Artificial Sequence
  ENSG00000143799_27 (sequence is synthesized)
cgaagcgcttctgcaccaactcacctggccgctaagttgctgatgggtagtacctgtactaaaccacctcagaaaggattttacagaaacgtgttaaaggttttctctaacttctcaagt

SEQ ID NO: 382923 - DNA, 120 bp, Artificial Sequence
  ENSG00000143799_28 (sequence is synthesized)
cccttgttttgtgttgtgtctgtggggaggggttgttttggggttgtttttgttttttcttgccaggtagataaaactgacatagagaaaaggctggagagagattctgttgcatagact

SEQ ID NO: 382924 - DNA, 120 bp, Artificial Sequence
  ENSG00000143799_29 (sequence is synthesized)
agtcctatggaaaaaaccaagcttcgttagaatgtctgccttactggtttccccagggaaggaaaaatacacttccacccttttttctaagtgttcgtctttagttttgattttggaaag

SEQ ID NO: 382925 - DNA, 120 bp, Artificial Sequence
  ENSG00000143799_30 (sequence is synthesized)
atgttaagcatttatttttagttaaaaataaaaactaatttcatactatttagattttcttttttatcttgcacttattgtcccctttttagttttttttgtttgcctcttgtggtgagg

SEQ ID NO: 382926 - DNA, 120 bp, Artificial Sequence
  ENSG00000143799_31 (sequence is synthesized)
ggtgtgggaagaccaaaggaaggaacgctaacaatttctcatacttagaaacaaaaagagctttccttctccaggaatactgaacatgggagctcttgaaatatgtagtattaaaagttg

SEQ ID NO: 382927 - DNA, 120 bp, Artificial Sequence
  ENSG00000143799_32 (sequence is synthesized)
catttgaaattcttgactttcttatgggcacttttgtcttccaaattaaaactctaccacaaatatacttacccaagggctaatagtaatactcgattaaaaatgcagatgccttctcta

SEQ ID NO: 382928 - DNA, 120 bp, Artificial Sequence
  ENSG00000143799_33 (sequence is synthesized)
ccactgcagcttctcttgatggcaggcagttcccaagatatgagcagtagcaatatttgttggaggtgactgatctgaaagggacagcattgatttgaatgtaagtccataagttcagga

SEQ ID NO: 382929 - DNA, 120 bp, Artificial Sequence
  ENSG00000143799_34 (sequence is synthesized)
gtgtgtcctttttaaaaatagtgttcaacacttgaaaactcttggttcttttccaggtgggaacccaggggtgcacttaactaactgccttggctctgggaccccagggaaggccgctgg

SEQ ID NO: 382930 - DNA, 120 bp, Artificial Sequence
  ENSG00000143799_35 (sequence is synthesized)
gtggggtggtcagcatgatttatgagccctcatctgcacatcagaattggatgggaattatgctatatcttcgtccagacgtgctggactgtttgaaactgggcataggggcagaggaga

SEQ ID NO: 382931 - DNA, 120 bp, Artificial Sequence
  ENSG00000143799_36 (sequence is synthesized)
catggttggctaagcccagccgtaaaggaagtgagcaagaatcttcagacacactgccatccctcatggtggggtggggctacagactctggatttgggtcactggtgtcctcaggaaat

SEQ ID NO: 382932 - DNA, 120 bp, Artificial Sequence
  ENSG00000143799_37 (sequence is synthesized)
cccagcaggctcctgactgctcctgttgggggcctgagggtgggctgcccggtccagctctcctgcgatcacactgcacagtgcccagctttcagagcgaaatcccctgtctcctcagat

SEQ ID NO: 382933 - DNA, 120 bp, Artificial Sequence
  ENSG00000143799_38 (sequence is synthesized)
atcttaacctctcatcctgagagcagcggtcccaaacttccatgtgtgttaggatctcctggaaagcttgttaaaacacaggtggctggcgcccaataattcacttttctaacaagttcc

SEQ ID NO: 382934 - DNA, 120 bp, Artificial Sequence
  ENSG00000143799_39 (sequence is synthesized)
cggacattgctgctggtggtcctttgagaacctttgggcgtttcacgtgtagataatgcaccttgtttgcaaggcagccttccaagccagcacctcagcttggcgtacaaatttattttt

SEQ ID NO: 382935 - DNA, 120 bp, Artificial Sequence
  ENSG00000143799_40 (sequence is synthesized)
gagggtcttaccaaaagttcttttttgtttgtttgtttgtttgtttcctctccttaatctagagaggagctctgtttttctaaacccttgtagcgtgaacttttagaagacttattaccg

SEQ ID NO: 382936 - DNA, 120 bp, Artificial Sequence
  ENSG00000143799_41 (sequence is synthesized)
gtgtccatttcagaagtggaaatgcttgatggcacctgtaataaaaacacaatgcttgcgttcatttttctctggtgctgaagtggactgtgttggcacacacagtctctgaacaccccg

SEQ ID NO: 382937 - DNA, 120 bp, Artificial Sequence
  ENSG00000143799_42 (sequence is synthesized)
cttagaccaactagaggagggatttttgcctcagcttctagatggcccggtccttgagcctatctccacactcatgtgccccattgtcctcagcccattccctgcagtgttgcaggggtt

SEQ ID NO: 382938 - DNA, 120 bp, Artificial Sequence
  ENSG00000143799_43 (sequence is synthesized)
gctaaagaaagagccttggcttctttcctaggacaaagtatagacctatgggtccaagcagggtaagacaccacatgtcatttgttttgcccctagagcaccttcctgatgggaaaactg

SEQ ID NO: 382939 - DNA, 120 bp, Artificial Sequence
  ENSG00000143799_44 (sequence is synthesized)
taggtgtggttcttcgtgaagggattcttattctctttttacaattctgaagccttttaattaaaagacagggaggtagaccagcattctaggttttctgaagtttgaatataaatatga

SEQ ID NO: 382940 - DNA, 120 bp, Artificial Sequence
  ENSG00000143799_45 (sequence is synthesized)
aaataaaacataactagtctcctccgtaatactcaggcttactgagcatagattacatcagctatttgacagatgcttgttaggcctgtgctctgagccagggataattttcattgcaca

SEQ ID NO: 382941 - DNA, 120 bp, Artificial Sequence
  ENSG00000143799_46 (sequence is synthesized)
tcatagctgtgacttcctctggcccattgtgttttaactcatgctgagctggactctcttccaggagccaattgcttgttctggagatgccctgttcactgacagtgaatcccacattct

SEQ ID NO: 382942 - DNA, 120 bp, Artificial Sequence
  ENSG00000143799_47 (sequence is synthesized)
agcttccctgatatcccaaaacatagaattttaagacaaaaaggaaccctgagattctctagcagcccaagtagatgaagaggtggaggcttaggtaagtggagccactggcccaggatc

SEQ ID NO: 382943 - DNA, 120 bp, Artificial Sequence
  ENSG00000143799_48 (sequence is synthesized)
tgcccagcccacaggcctgggacacaggctctcggtcatgcccggcttcctttgaggagtgtggtgttgagctatgcattgactgagcctgagcattcctcctctgtagctctcctgggt

SEQ ID NO: 382944 - DNA, 120 bp, Artificial Sequence
  ENSG00000143799_49 (sequence is synthesized)
agtcacaccattgcactccggcctgggcgacagtgagactccatctcaaaaaggaaaaaaaaaaaaaagaaagaccacatggacccaacatcaaatagagctcatctccctggaagcttt

SEQ ID NO: 382945 - DNA, 120 bp, Artificial Sequence
  ENSG00000143799_50 (sequence is synthesized)
acctccaataccatgtggaatagaagtgatgggaagatagcttcgtcttattcctaatcttaggcaaaggccaggatggaattggtagcaaggcagagaagactctgggtgactttgcag

SEQ ID NO: 382946 - DNA, 120 bp, Artificial Sequence
  ENSG00000143799_51 (sequence is synthesized)
gagtgacaggtgtgtacatactggggcagcatgggcattcagcccccaccctgaagctcccaggagggcctcgtctcagagagcaaagcaaacctcccccagcttgccctctcccacatg

SEQ ID NO: 382947 - DNA, 120 bp, Artificial Sequence
  ENSG00000143799_52 (sequence is synthesized)
tgcagatcaagcgtatggtgcccatgttatttcagcaacacctcctggactcagcatcatctgttgcatgatatttggtattttgtttttccaggtgcttggaatgtagcctttaaagtt

SEQ ID NO: 382948 - DNA, 120 bp, Artificial Sequence
  ENSG00000143799_53 (sequence is synthesized)
gagctcattccgtcctcatggcagctccatgagactgtgttccccatttgagaaaagaggcaagtagagtccagagaggttacgtagcttcttgcagctccttggcacctggcagagcta

SEQ ID NO: 382949 - DNA, 120 bp, Artificial Sequence
  ENSG00000143799_54 (sequence is synthesized)
ggatctgacagcctggcttgtgagctaaaactttggtatttcctcaccatgggcattgtgagaattagaagtgatggattgcagcacttagctgggtggcttgctcaagttggcactcag

SEQ ID NO: 382950 - DNA, 120 bp, Artificial Sequence
  ENSG00000143799_55 (sequence is synthesized)
tgaaatgatacctttagtacatatttaattcttacatatacttgtgtctgacttatatcaaaatatttcctttaattcaacactttggtaaatagaagtataatggaaattagaagcctt

SEQ ID NO: 382951 - DNA, 120 bp, Artificial Sequence
  ENSG00000143799_56 (sequence is synthesized)
gtgtgagcacaaagggatgttctcgagctacagagtcacttatgtgctgtcagattacctggggcagacaaggattagaggctgtcctgtagtgtgtcccatggtgactgtttcccttct

SEQ ID NO: 382952 - DNA, 120 bp, Artificial Sequence
  ENSG00000143799_57 (sequence is synthesized)
gtggtccctccctgtgcatagcctggcttacagggtatgagccttcccccagtttccagaggatgatctcctctcctcagtctgcctgaagaagacttagagtaactttcaggctggcat

SEQ ID NO: 382953 - DNA, 120 bp, Artificial Sequence
  ENSG00000143801_0 (sequence is synthesized)
gcgtaaactccgctggagcgcggcggcagagcaggcatttccagcagtgaggagacagccagaagcaagcttttggagctgaaggaacctgagacagaagctagtcccccctctgaattt

SEQ ID NO: 382954 - DNA, 120 bp, Artificial Sequence
  ENSG00000143801_1 (sequence is synthesized)
tactgatgaagaaactgaggccacagagctaaagtgacttttcccaaggtcgcccagcgaggacgtgggacttctcagacgtcaggagagtgatgtgagggagctgtgtgaccatagaaa

SEQ ID NO: 382955 - DNA, 120 bp, Artificial Sequence
  ENSG00000143801_2 (sequence is synthesized)
gtgacgtgttaaaaaccagcgctgccctctttgaaagccagggagcatcattcatttagcctgctgagaagaagaaaccaagtgtccgggattcagacctctctgcggccccaagtgttc

SEQ ID NO: 382956 - DNA, 120 bp, Artificial Sequence
  ENSG00000143801_3 (sequence is synthesized)
gtggtgcttccagaggcagggctatgctcacattcatggcctctgacagcgaggaagaagtgtgtgatgagcggacgtccctaatgtcggctgagagccccacgccgcgctcctgccagg

SEQ ID NO: 382957 - DNA, 120 bp, Artificial Sequence
  ENSG00000143801_4 (sequence is synthesized)
agggcaggcagggcccagaggatggagagaacactgcccagtggagaagccaggagaacgaggaggacggtgaggaggaccctgaccgctatgtctgtagtggggttcccgggcggccgc

SEQ ID NO: 382958 - DNA, 120 bp, Artificial Sequence
  ENSG00000143801_5 (sequence is synthesized)
caggcctggaggaagagctgaccctcaaatacggagcgaagcacgtgatcatgctgtttgtgcctgtcactctgtgcatgatcgtggtggtagccaccatcaagtctgtgcgcttctaca

SEQ ID NO: 382959 - DNA, 120 bp, Artificial Sequence
  ENSG00000143801_6 (sequence is synthesized)
cagagaagaatggacagctcatctacacgccattcactgaggacacaccctcggtgggccagcgcctcctcaactccgtgctgaacaccctcatcatgatcagcgtcatcgtggttatga

SEQ ID NO: 382960 - DNA, 120 bp, Artificial Sequence
  ENSG00000143801_7 (sequence is synthesized)
ccatcttcttggtggtgctctacaagtaccgctgctacaagttcatccatggctggttgatcatgtcttcactgatgctgctgttcctcttcacctatatctaccttggggaagtgctca

SEQ ID NO: 382961 - DNA, 120 bp, Artificial Sequence
  ENSG00000143801_8 (sequence is synthesized)
agacctacaatgtggccatggactaccccaccctcttgctgactgtctggaacttcggggcagtgggcatggtgtgcatccactggaagggccctctggtgctgcagcaggcctacctca

SEQ ID NO: 382962 - DNA, 120 bp, Artificial Sequence
  ENSG00000143801_9 (sequence is synthesized)
gatctcgtggctgtgctgtgtcccaaagggcctctgagaatgctggtagaaactgcccaggagagaaatgagcccatattccctgccctgatatactcatctgccatggtgtggacggtt

SEQ ID NO: 382963 - DNA, 120 bp, Artificial Sequence
  ENSG00000143801_10 (sequence is synthesized)
ggcatggcgaagctggacccctcctctcagggtgccctccagctcccctacgacccggagatggaagaagactcctatgacagttttggggagccttcataccccgaagtctttgagcct

SEQ ID NO: 382964 - DNA, 120 bp, Artificial Sequence
  ENSG00000143801_11 (sequence is synthesized)
cccttgactggctacccaggggaggagctggaggaagaggaggaaaggggcgtgaagcttggcctcggggacttcatcttctacagtgtgctggtgggcaaggcggctgccacgggcagc

SEQ ID NO: 382965 - DNA, 120 bp, Artificial Sequence
  ENSG00000143801_12 (sequence is synthesized)
ggggactggaataccacgctggcctgcttcgtggccatcctcattggcttgtgtctgaccctcctgctgcttgctgtgttcaagaaggcgctgcccgccctccccatctccatcacgttc

SEQ ID NO: 382966 - DNA, 120 bp, Artificial Sequence
  ENSG00000143801_13 (sequence is synthesized)
gggctcatcttttacttctccacggacaacctggtgcggccgttcatggacaccctggcctcccatcagctctacatctgagggacatggtgtgccacaggctgcaagctgcagggaatt

SEQ ID NO: 382967 - DNA, 120 bp, Artificial Sequence
  ENSG00000143801_14 (sequence is synthesized)
ttcattggatgcagttgtatagttttacactctagtgccatatatttttaagacttttctttccttaaaaaataaagtacgtgtttacttggtgaggaggaggcagaaccagctctttgg

SEQ ID NO: 382968 - DNA, 120 bp, Artificial Sequence
  ENSG00000143801_15 (sequence is synthesized)
tgccagctgtttcatcaccagactttggctcccgctttggggagcgcctcgcttcacggacaggaagcacagcaggtttatccagatgaactgagaaggtcagattagggcggggagaag

SEQ ID NO: 382969 - DNA, 120 bp, Artificial Sequence
  ENSG00000143801_16 (sequence is synthesized)
agcatccggcatgagggctgagatgcgcaaagagtgtgctcgggagtggcccctggcacctgggtgctctggctggagaggaaaagccagttccctacgaggagtgttcccaatgctttg

SEQ ID NO: 382970 - DNA, 120 bp, Artificial Sequence
  ENSG00000143801_17 (sequence is synthesized)
tccatgatgtccttgttattttattgcctttagaaactgagtcctgttcttgttacggcagtcacactgctgggaagtggcttaatagtaatatcaataaatagatgagtcctgttagaa

SEQ ID NO: 382971 - DNA, 120 bp, Artificial Sequence
  ENSG00000143801_18 (sequence is synthesized)
ggatggcccctggcctcggggtcaatgtgtagagatttggacttacacatgcagtcaacaaaggcacatcaagtccccattttgtgacaggcactgtgctaggcattgggggacccagca

SEQ ID NO: 382972 - DNA, 120 bp, Artificial Sequence
  ENSG00000143801_19 (sequence is synthesized)
ggaaagaagaccacagggtcccaggcctcatggagctcacggccctgtgattgtgatgccctcggtctgttgatggcggggcttaaatagcctgaatttctggagctctggcgtctgcaa

SEQ ID NO: 382973 - DNA, 120 bp, Artificial Sequence
  ENSG00000143801_20 (sequence is synthesized)
gcctgcagcgtggccccacgggaaagcacattccaggcgcattccgaggatgagcggagaccatgtatggaaagctgccatggtgtggacggttggcatggcgaagctggacccctcctc

SEQ ID NO: 382974 - DNA, 120 bp, Artificial Sequence
  ENSG00000143801_21 (sequence is synthesized)
tcagggtgccctccagctcccctacgacccggagatgggtgaaagaagactcctatgacagttttggggagccttcataccccgaagtctttgagcctcccttgactggctacccagggg

SEQ ID NO: 382975 - DNA, 120 bp, Artificial Sequence
  ENSG00000143801_22 (sequence is synthesized)
tcactcagcctctggacagcgatcactcagcctctggacagacagcgatcactcagcctctggacagcgatcactcagcctctggacagcgatcactcagcctctggacagcgataactc

SEQ ID NO: 382976 - DNA, 120 bp, Artificial Sequence
  ENSG00000143801_23 (sequence is synthesized)
gctgggccggcccggaactgggtcgtggaaggatcgcggggagcggccctcaggccttcggcctcactgcgtccccacttccctgcgcccgcctgccgccgagccccggctgggggtggg

SEQ ID NO: 382977 - DNA, 120 bp, Artificial Sequence
  ENSG00000143801_24 (sequence is synthesized)
ggggtgggcgcggcgcgagcggttaaagggccggtgcatttaaaggagcggtgcacgtgggtctctgaggcgtgtagcaggcgggggcgttttgttcttcttctctctcgccggagacct

SEQ ID NO: 382978 - DNA, 120 bp, Artificial Sequence
  ENSG00000143801_25 (sequence is synthesized)
ccgttgcgccgagtccattcggcctctagcaccgggtcctgggcatgctttccccgggaaggaggcgcgcgggggctctgcccgcacgtgaggggcagggccgcaggctcaagcctagag

SEQ ID NO: 382979 - DNA, 120 bp, Artificial Sequence
  ENSG00000143801_26 (sequence is synthesized)
aattttatgcagagctcctggtggctctgaagcgccctagggaacagaccaggaacattctcatggtgttagctcacattgggccattagtgctcctttaatgtgagaacaaccgggagg

SEQ ID NO: 382980 - DNA, 120 bp, Artificial Sequence
  ENSG00000143801_27 (sequence is synthesized)
aggaggggatgtggacccaaaactacaagaaagagtgtcctcgaagcctatgtcctaccgccccacgctgctgccaggcccgcaggaagatgacaggcccggcctccactccttctaagg

SEQ ID NO: 382981 - DNA, 120 bp, Artificial Sequence
  ENSG00000143811_0 (sequence is synthesized)
atcccagaagctgctgttagctcgccggtcctcggcacgccgcccgttcgcccctgcgctgtccgcccttcccctagcgttacttccggtccctcgctgagggggttcgtgcggctccca

SEQ ID NO: 382982 - DNA, 120 bp, Artificial Sequence
  ENSG00000143811_1 (sequence is synthesized)
ggaggcgtgaaccgcggaccatgagcgtgggcttcatcggggccggccagctggcctatgctctggcgcggggcttcacggccgcaggcatcctgtcggctcacaagataatagccagct

SEQ ID NO: 382983 - DNA, 120 bp, Artificial Sequence
  ENSG00000143811_2 (sequence is synthesized)
ccccagaaatgaacctgcccacggtgtccgcgctcaggaagatgggtgtgaacctgacacgcagcaacaaggagacggtgaagcacagcgacgtcctgtttctggctgtgaagccacata

SEQ ID NO: 382984 - DNA, 120 bp, Artificial Sequence
  ENSG00000143811_3 (sequence is synthesized)
tcatccccttcatcctggatgagattggggccgacgtgcaagccagacacatcgtggtctcctgtgcggctggtgtcaccatcagctctgtggagaagaagctgatggcattccagccag

SEQ ID NO: 382985 - DNA, 120 bp, Artificial Sequence
  ENSG00000143811_4 (sequence is synthesized)
cccccaaagtgattcgctgcatgaccaacacacctgtggtagtgcaggaaggcgctacagtgtacgccacgggcacccatgccctggtggaggatgggcagctcctggagcagctcatga

SEQ ID NO: 382986 - DNA, 120 bp, Artificial Sequence
  ENSG00000143811_5 (sequence is synthesized)
gcagcgtgggcttctgcactgaggtggaagaggacctcatcgatgccgtcacggggctcagtggcagcgggcctgcctatgcattcatggctctggacgcattggctgatggtggggtga

SEQ ID NO: 382987 - DNA, 120 bp, Artificial Sequence
  ENSG00000143811_6 (sequence is synthesized)
agatgggtttgccacggcgcctggcaatccaactcggggcccaggctttgctgggagctgccaagatgctgctggactcggagcagcatccatgccagcttaaggacaatgtctgctccc

SEQ ID NO: 382988 - DNA, 120 bp, Artificial Sequence
  ENSG00000143811_7 (sequence is synthesized)
ctgggggagccaccatccacgccctgcactttctagagagtgggggcttccgctctctgctcatcaatgcagttgaggcctcctgtatccgaacacgagagctacagtccatggccgacc

SEQ ID NO: 382989 - DNA, 120 bp, Artificial Sequence
  ENSG00000143811_8 (sequence is synthesized)
aagaaaagatctccccagctgcccttaagaagaccctcttagacagagtgaagctggaatcccccacagtctccacactgaccccctccagcccagggaagctcctcacaagaagcctgg

SEQ ID NO: 382990 - DNA, 120 bp, Artificial Sequence
  ENSG00000143811_9 (sequence is synthesized)
ccctgggaggcaagaaggactaaggcagcatctgtcccctctgtgattcagagcccttagttgagagcccctgccgcccctgccacccccctgccccgctcccaccattgcccctcctca

SEQ ID NO: 382991 - DNA, 120 bp, Artificial Sequence
  ENSG00000143811_10 (sequence is synthesized)
gctgtgcaaggagaaagcatgcttaggaagttttcaggtccttgtgataaaacctccttaaatctgttcagaccaagcaatgcgagcttcctctcctgtcccatgttggaagttgctctg

SEQ ID NO: 382992 - DNA, 120 bp, Artificial Sequence
  ENSG00000143811_11 (sequence is synthesized)
aaggggtggtagatgctggaagccagacacaaccctgcgtacgctgctcagttggtggagactggggctgggactggagtcagcccagctgggaggaggggctggggaggatctgcagct

SEQ ID NO: 382993 - DNA, 120 bp, Artificial Sequence
  ENSG00000143811_12 (sequence is synthesized)
gaagcccgaggcagggttggtgtgatgccaaggcaaagtggtgaggagaaaacaggaaacgggctttctctgaattggtaaatgggaaagaagtgagcaacttaagattgtcacaattaa

SEQ ID NO: 382994 - DNA, 120 bp, Artificial Sequence
  ENSG00000143811_13 (sequence is synthesized)
tcacaagtgtacaggattagactgggtttatatttaactcttgcttcataggtgtaccatttaaagagtgttatttaatgctaagtttaactgctttaataaagtttatttttaaatatc

SEQ ID NO: 382995 - DNA, 120 bp, Artificial Sequence
  ENSG00000143811_14 (sequence is synthesized)
tgggtttgccacggcgcctggcaatccaactcggggcccaggctttgctggtcagtatctttcccccgcatgttcaggaccagggtgtagaatgggggttcttgtgcatcactgaactga

SEQ ID NO: 382996 - DNA, 120 bp, Artificial Sequence
  ENSG00000143811_15 (sequence is synthesized)
tagcagttgggcaggagcagtgggtatgggaagcctgttccaacgcacaccagcaactttctcctaatgtgcccttccccatagggagctgccaagatgctgctggactcggagcagcat

SEQ ID NO: 382997 - DNA, 120 bp, Artificial Sequence
  ENSG00000143811_16 (sequence is synthesized)
tgaggctatttcctcatttacaacagtggccactttgctgttattctgagtcgtgaatgagcatattgggaagaatctggtgagttagttgttctgttctccaaaaacatattccaagtc

SEQ ID NO: 382998 - DNA, 120 bp, Artificial Sequence
  ENSG00000143811_17 (sequence is synthesized)
ttcacccaaaacctgtgctctgtgggagaggatggctgatgaggcaggtgacaggcagtgtctgtgcctagggtgggctgatgtccctagcactggagggtcctgcttctcagtttggag

SEQ ID NO: 382999 - DNA, 120 bp, Artificial Sequence
  ENSG00000143811_18 (sequence is synthesized)
tcatagagggatggatggcttccagcctagccctggaccacatggagactgtgcggtccccacgaacaagcggccagggttaggatagggcctgactcagctgtgcttttaacgaccagg

SEQ ID NO: 383000 - DNA, 120 bp, Artificial Sequence
  ENSG00000143811_19 (sequence is synthesized)
tattagcatttccctttgccctgccactttcaccatagggccttcttacctggcagaggagtgccttagataccagaagattggcagggaagaagggcagccacttcctggttaccatgg

SEQ ID NO: 383001 - DNA, 120 bp, Artificial Sequence
  ENSG00000143811_20 (sequence is synthesized)
agaagcttgtcatgctccaagcctgtgcttacttgtccagtagcaacaatgggaaactgtattatttggggtaggggtagaaccctgagggcataaagctaagaattccaggctgcatct

SEQ ID NO: 383002 - DNA, 120 bp, Artificial Sequence
  ENSG00000143811_21 (sequence is synthesized)
ggcccgagggggcctccgtcccaccagcatgagcgaatgaaaggggagtttgcgtccggtggggtagatgagactctggttgagcagcaagcatcctgtcggctcacaagataatagcca

SEQ ID NO: 383003 - DNA, 120 bp, Artificial Sequence
  ENSG00000143811_22 (sequence is synthesized)
ccctgcgcccaagtgctggtctttggccggcggtgacctttactccaggaacgtgacaatctttccaccttctcttgggcagctcaatgtggtgggaacacccagggagacataactggg

SEQ ID NO: 383004 - DNA, 120 bp, Artificial Sequence
  ENSG00000143811_23 (sequence is synthesized)
tcagatccagacactggagtggtagaggattaactgaggtgattatgtgatgaaagcacctggcacatagtaggtacctaataaatactcattttttaaattttttttcagacagggtct

SEQ ID NO: 383005 - DNA, 120 bp, Artificial Sequence
  ENSG00000143811_24 (sequence is synthesized)
tgtgtgaggggagggttgacccacgaatggcagctaatgggtgggtgctggtgggagccgtgccctggccactcattcggctctctccctcaccctagaagctgatggcattccagccag

SEQ ID NO: 383006 - DNA, 120 bp, Artificial Sequence
  ENSG00000143811_25 (sequence is synthesized)
agagggttgagggggagagggagactggcactgttaggacggctctgggttttagagccagggaaagcgtggtaacgggctgggccgcgacccctagttgaaaagctctgtcttctgcag

SEQ ID NO: 383007 - DNA, 120 bp, Artificial Sequence
  ENSG00000143815_0 (sequence is synthesized)
agcgtcgcgcgcgtggatctgccgccgggttgctgtgcgactattctccgggagccgtccgtgtcaccgccggaacctggcgcaggttaattatagaaaatgccaagtaggaaatttgcc

SEQ ID NO: 383008 - DNA, 120 bp, Artificial Sequence
  ENSG00000143815_1 (sequence is synthesized)
gatggtgaagtggtaagaggtcgatggcctgggagttcactttattatgaagtagaaattctgagccacgacagcacctcccagctttacactgtgaagtataaagatggaacagagctt

SEQ ID NO: 383009 - DNA, 120 bp, Artificial Sequence
  ENSG00000143815_2 (sequence is synthesized)
gaattgaaagagaatgatattaagcctttaacttcctttaggcaaaggaaaggtggctcaacttccagttccccttccagacgccgagggagtcgatcaaggtcacgctcccgatcccct

SEQ ID NO: 383010 - DNA, 120 bp, Artificial Sequence
  ENSG00000143815_3 (sequence is synthesized)
ggtcgaccacctaaaagtgcccgccgatctgcttctgcttcccaccaggccgacattaaggaagcaaggagggaagtggaagttaaattgactccgctgattctgaagccatttggaaat

SEQ ID NO: 383011 - DNA, 120 bp, Artificial Sequence
  ENSG00000143815_4 (sequence is synthesized)
agcatcagcagatataatggggagcctgagcatattgagagaaatgacgcacctcataaaaatacacaggaaaaattcagtttgtcacaagaaagcagttacatagcaacacagtatagc

SEQ ID NO: 383012 - DNA, 120 bp, Artificial Sequence
  ENSG00000143815_5 (sequence is synthesized)
cttcgtccaagaagagaagaagtcaaattaaaagaaatagattctaaggaagaaaaatacgttgcaaaagaactggcagtgagaacctttgaagtgacccccatccgggcaaaggacttg

SEQ ID NO: 383013 - DNA, 120 bp, Artificial Sequence
  ENSG00000143815_6 (sequence is synthesized)
gagtttggaggagtacctggtgtgtttctcatcatgtttggcctgcctgtgttcctcttcctgttgctgttgatgtgtaaacagaaagatcccagtcttctgaatttccctcctcctttg

SEQ ID NO: 383014 - DNA, 120 bp, Artificial Sequence
  ENSG00000143815_7 (sequence is synthesized)
ccagctttgtatgagttatgggaaaccagagtatttggggtctacctcctgtggtttttgattcaagtcctgttctacctactgccaattggaaaggttgtagaaggaacgcctcttatt

SEQ ID NO: 383015 - DNA, 120 bp, Artificial Sequence
  ENSG00000143815_8 (sequence is synthesized)
gatggaagaagactcaagtatagattaaatggattctatgcttttatcctgacatctgcagtcatcggaacatctctcttccagggcgtagagtttcattacgtgtacagtcattttctt

SEQ ID NO: 383016 - DNA, 120 bp, Artificial Sequence
  ENSG00000143815_9 (sequence is synthesized)
cagtttgcacttgcggccactgttttttgtgtggtcttgagtgtgtatctctacatgcgctctttgaaagcgccccggaatgacctgtcgcctgccagctctggaaatgctgtctatgat

SEQ ID NO: 383017 - DNA, 120 bp, Artificial Sequence
  ENSG00000143815_10 (sequence is synthesized)
ttcttcattggccgtgaattaaaccctcgaattggtacttttgatctcaaatacttttgtgaattgcgccccggattgattggatgggtggttattaacttggtgatgcttttggctgaa

SEQ ID NO: 383018 - DNA, 120 bp, Artificial Sequence
  ENSG00000143815_11 (sequence is synthesized)
atgaaaatacaggaccgcgctgttccatccttggccatgattttagttaatagtttccagcttctctatgtggtggatgctctctggaatgaggaagcgttgttgacgaccatggacatc

SEQ ID NO: 383019 - DNA, 120 bp, Artificial Sequence
  ENSG00000143815_12 (sequence is synthesized)
atccacgatggatttggattcatgctggcttttggagacttggtgtgggttccctttatttacagcttccaagccttttatttagtcagtcatccaaatgaagtgtcttggccaatggct

SEQ ID NO: 383020 - DNA, 120 bp, Artificial Sequence
  ENSG00000143815_13 (sequence is synthesized)
tctctaattattgttctgaaactttgtggttatgtaatcttccgaggtgcaaattctcagaaaaatgcattccggaaaaatcccagtgatccaaagcttgcacatttaaaaaccattcat

SEQ ID NO: 383021 - DNA, 120 bp, Artificial Sequence
  ENSG00000143815_14 (sequence is synthesized)
acttcaacgggaaaaaatcttctagtttctggatggtggggctttgttcgccaccccaattacttgggtgatctcatcatggccttggcgtggtccctcccatgtggttttaaccacatt

SEQ ID NO: 383022 - DNA, 120 bp, Artificial Sequence
  ENSG00000143815_15 (sequence is synthesized)
ccatgttgcttgtccaccgagaagctcgtgacgagtaccactgtaagaagaaatacggcgtggcttgggaaaagtactgtcagcgtgtgccctaccgtatatttccatacatctactaat

SEQ ID NO: 383023 - DNA, 120 bp, Artificial Sequence
  ENSG00000143815_16 (sequence is synthesized)
gctcttctggcttttctacaaaatactcctgcaattccagctgccatttgcaaaaacaaggaaaaaaatccgaaactttcttttgttgcactgacagggtctgtacttttttttttcttt

SEQ ID NO: 383024 - DNA, 120 bp, Artificial Sequence
  ENSG00000143815_17 (sequence is synthesized)
ttgagtcaggactatggagccgagtagttgatcttttaatatagccgtgtttacttgtattaacttacagttaacataggaaaaatacaagtaaggatgtgagaatttgcattttaatgg

SEQ ID NO: 383025 - DNA, 120 bp, Artificial Sequence
  ENSG00000143815_18 (sequence is synthesized)
gaaattttcaacccttaatctgaaaacagaagacagtcttaatataaatgtactgtgaagaatgctattgatgtttatggtttctgattacttttcaaattttgatgtttttttgccagt

SEQ ID NO: 383026 - DNA, 120 bp, Artificial Sequence
  ENSG00000143815_19 (sequence is synthesized)
tggcttttcttaaatgaaaacactgttccatttaaagtacatttatgttttattcagtaagagaatagaattttcatttgtttttctttaaatcctttactaattatataatttgaaagc

SEQ ID NO: 383027 - DNA, 120 bp, Artificial Sequence
  ENSG00000143815_20 (sequence is synthesized)
aaaaagaagggcctatattaaatgctgaaagtgaaaagtgatgacattattagcagacactgcttaaaggagaccatttgtagcagttggcttaacctcaacttctaaaactacattgaa

SEQ ID NO: 383028 - DNA, 120 bp, Artificial Sequence
  ENSG00000143815_21 (sequence is synthesized)
aatgtaaatacatagcttagttttttgtaatatatggtgacttcagatttttttgtacagtattttgaatgtgagatgattgtcaggactaactgtctttttaacaaaacattttcagta

SEQ ID NO: 383029 - DNA, 120 bp, Artificial Sequence
  ENSG00000143815_22 (sequence is synthesized)
ttttaaataaaattttgtaaagtaatgtgaattaaaaattttggaacaattagaattcattcactattgtatagaagatgctgttaaaacataggaagggtatttttcttgatccaaagt

SEQ ID NO: 383030 - DNA, 120 bp, Artificial Sequence
  ENSG00000143815_23 (sequence is synthesized)
ttgtgaatttggctttgctacctcaattgcaggtgtttgtttgcctttataaactgttgcaaatagaaaaaaaatagaataagtatatatttttggagtaacatcaatatttaaacattt

SEQ ID NO: 383031 - DNA, 120 bp, Artificial Sequence
  ENSG00000143815_24 (sequence is synthesized)
ttacacagatcggtgtttgaaaatttgccatttcaggctaatatttttatatatttttgactttttaaaagttcatcagtgtttttgctactgttaagcttatgcagtttatactgtatt

SEQ ID NO: 383032 - DNA, 120 bp, Artificial Sequence
  ENSG00000143815_25 (sequence is synthesized)
ttttatgtatcctttatatttaccaaacctgactccctgtaaaggagtgctgtcttaaaaacaactgaaggggttaaagtcgtttcttttagtttaatagatgtgcataaggtagcttta

SEQ ID NO: 383033 - DNA, 120 bp, Artificial Sequence
  ENSG00000143815_26 (sequence is synthesized)
gcaattaaattctagtgaagttgatatagtctcatttttaattgtcctgtaatggaacagtagcaaattcactaaacttttgtgttcagagttaaattgttctcagtactttcaatgtag

SEQ ID NO: 383034 - DNA, 120 bp, Artificial Sequence
  ENSG00000143815_27 (sequence is synthesized)
gggaatgtaataaacatagtgtgtatgtttgggttttaattacacattttatatatgagccatttagatatgcagtgttaattctatactgcatttgaagtgtatgtaacttagcttatg

SEQ ID NO: 383035 - DNA, 120 bp, Artificial Sequence
  ENSG00000143815_28 (sequence is synthesized)
ttaatgcagtcatgaagttggtttgctccagcatccggtagtctttaaacattcttttagtgaaattgtcattgttttatcagtgctaatgtgtgcaagcagtttttttattttgctttt

SEQ ID NO: 383036 - DNA, 120 bp, Artificial Sequence
  ENSG00000143815_29 (sequence is synthesized)
ctcctggcatcagaaagtggtggcgttttctgtactggattgcaccaaggaagcttttggggaggaaggaaggacattaaattctttccctggtaatgaaaagagccctttatcaataca

SEQ ID NO: 383037 - DNA, 120 bp, Artificial Sequence
  ENSG00000143815_30 (sequence is synthesized)
gtgctgcaatttctggatatcagctacactttgtttttaagtttgtttttgacatgtttatttggcaaattttataatgaagttttaagttgaaaataaaatgtagcaacattttgatca

SEQ ID NO: 383038 - DNA, 120 bp, Artificial Sequence
  ENSG00000143815_31 (sequence is synthesized)
gttcaattaaaaccaggcttgtaggttgcaggtcaagttgtgtttcggtgtgtaacgcataaaacttcttgttccacgctccgcggtgttggggattttctactgcatctcgacagcatc

SEQ ID NO: 383039 - DNA, 120 bp, Artificial Sequence
  ENSG00000143815_32 (sequence is synthesized)
cttcttagtcttctctagtctaatagttgtttaggctttccttgtctctcatgaccttgatactttttggaaggtactggttggttattttgtaagtgtccctcagtttgggtcattcca

SEQ ID NO: 383040 - DNA, 120 bp, Artificial Sequence
  ENSG00000143815_33 (sequence is synthesized)
gtgttctctttgattgcggtaaagttacccactgtgacaggaacacagaaatgatagctgtgtccttctcagtgcattgggtccaggggcccatggtgctgagatgtcttattcctggtg

SEQ ID NO: 383041 - DNA, 120 bp, Artificial Sequence
  ENSG00000143815_34 (sequence is synthesized)
gcgggtaggagttacggtggcgtctgccaggtgtctcagctgtgaagctcactcatgcctttgtagtgctaaggtctctggggaggtgctttgaggctatatactttccccttttgtttc

SEQ ID NO: 383042 - DNA, 120 bp, Artificial Sequence
  ENSG00000143815_35 (sequence is synthesized)
gggaggaagcccgaggccggcgcagcggccgggccggggaccctgggcgcggggcctggcgcggcggccttcccctcctctcctcgcctcctcgtctcctcccctcctcgccttttctgg

SEQ ID NO: 383043 - DNA, 120 bp, Artificial Sequence
  ENSG00000143815_36 (sequence is synthesized)
ttttctggcccagtcgggtggtcggggcggcggcgggcgaggctggagctcgcccgagccgggcccgctgcggaaatggagctgggggttttaaactgcggacgtttccctccatgttgg

SEQ ID NO: 383044 - DNA, 120 bp, Artificial Sequence
  ENSG00000143815_37 (sequence is synthesized)
cggcgcggcgcggctgtggagcggcggcggcagggagggttcgtgggcgcctttgtcctgccccaccgcagcctggctcccggcccctccgagcgcccgtctgacagatgagcaggcggc

SEQ ID NO: 383045 - DNA, 120 bp, Artificial Sequence
  ENSG00000143815_38 (sequence is synthesized)
aggaggctgacagggcgcggcggcctggcgggacggggaagggtctgcggccgaggtgggcttagattcgcgctgcttgtcactggctttgagggtcgtggtcgtcgcggtttggtgatt

SEQ ID NO: 383046 - DNA, 120 bp, Artificial Sequence
  ENSG00000143815_39 (sequence is synthesized)
taattattgttctgaaacgtgagtattaattttagtctcagtttaatttattaaatattatgtactgaggcttttatgccctgctgtctacatacttgaaacatgccattttgaatggcc

SEQ ID NO: 383047 - DNA, 120 bp, Artificial Sequence
  ENSG00000143815_40 (sequence is synthesized)
ctgggatcaagtgatcctcttgccgcagcctcctgagtcgctgggaccacaggcctgtgccatgctgcccagccttagagtagtttaaaggttaaaggctgttgttggtcataattccca

SEQ ID NO: 383048 - DNA, 120 bp, Artificial Sequence
  ENSG00000143815_41 (sequence is synthesized)
aaacttagttcatgaagccatttctcttgtgctgtctgtataacacttgcttattaggaggaacttaaaaaaaaatctgattgagatttcttgtgtaacttttcaaaccaaatagaaaag

SEQ ID NO: 383049 - DNA, 120 bp, Artificial Sequence
  ENSG00000143815_42 (sequence is synthesized)
aataggctattttgcaaagtagccgactctcagtggaggttgctatggaaaaaaaattcactcttagtatgtgtcatttcagatgcagcattttaaatgattaattgataggctactggg

SEQ ID NO: 383050 - DNA, 120 bp, Artificial Sequence
  ENSG00000143815_43 (sequence is synthesized)
atctgatccattctcagatcctaacatttcccgtgctgattttagagttaatggtagcagttcctgcctttgttatcctcttctagtgtgggtctgtctgtatgtgttatgatttgtggt

SEQ ID NO: 383051 - DNA, 120 bp, Artificial Sequence
  ENSG00000143816_0 (sequence is synthesized)
ggagctgggagcgcgatggtcggccgccgaggcgcggcaagatgctggatgggtccccgctggcgcgctggctggccgcggccttcgggctgacgctgctgctcgccgcgctgcgccctt

SEQ ID NO: 383052 - DNA, 120 bp, Artificial Sequence
  ENSG00000143816_1 (sequence is synthesized)
ccttcggccgcctacttcgggctgacgggcagcgagcccctgaccatcctcccgctgaccctggagccagaggcggctgcccaggcgcactacaaggcctgcgaccggctgaagctggag

SEQ ID NO: 383053 - DNA, 120 bp, Artificial Sequence
  ENSG00000143816_2 (sequence is synthesized)
cggaagcagcggcgcatgtgccgccgggacccgggcgtggcagagacgctggtggaggccgtgagcatgagtgcgctcgagtgccagttccagttccgctttgagcgctggaactgcacg

SEQ ID NO: 383054 - DNA, 120 bp, Artificial Sequence
  ENSG00000143816_3 (sequence is synthesized)
ctggagggccgctaccgggccagcctgctcaagcgaggcttcaaggagactgccttcctctatgccatctcctcggctggcctgacgcacgcactggccaaggcgtgcagcgcgggccgc

SEQ ID NO: 383055 - DNA, 120 bp, Artificial Sequence
  ENSG00000143816_4 (sequence is synthesized)
atggagcgctgtacctgcgatgaggcacccgacctggagaaccgtgaggcctggcagtgggggggctgcggagacaaccttaagtacagcagcaagttcgtcaaggaattcctgggcaga

SEQ ID NO: 383056 - DNA, 120 bp, Artificial Sequence
  ENSG00000143816_5 (sequence is synthesized)
cggtcaagcaaggatctgcgagcccgtgtggacttccacaacaacctcgtgggtgtgaaggtgatcaaggctggggtggagaccacctgcaagtgccacggcgtgtcaggctcatgcacg

SEQ ID NO: 383057 - DNA, 120 bp, Artificial Sequence
  ENSG00000143816_6 (sequence is synthesized)
gtgcggacctgctggcggcagttggcgcctttccatgaggtgggcaagcatctgaagcacaagtatgagacggcactcaaggtgggcagcaccaccaatgaagctgccggcgaggcaggt

SEQ ID NO: 383058 - DNA, 120 bp, Artificial Sequence
  ENSG00000143816_7 (sequence is synthesized)
gccatctccccaccacggggccgtgcctcgggggcaggtggcagcgacccgctgccccgcactccagagctggtgcacctggatgactcgcctagcttctgcctggctggccgcttctcc

SEQ ID NO: 383059 - DNA, 120 bp, Artificial Sequence
  ENSG00000143816_8 (sequence is synthesized)
ccgggcaccgctggccgtaggtgccaccgtgagaagaactgcgagagcatctgctgtggccgcggccataacacacagagccgggtggtgacaaggccctgccagtgccaggtgcgttgg

SEQ ID NO: 383060 - DNA, 120 bp, Artificial Sequence
  ENSG00000143816_9 (sequence is synthesized)
tgctgctatgtggagtgcaggcagtgcacgcagcgtgaggaggtctacacctgcaagggctgagttcccaggccctgccagccctgctgcacagggtgcaggcattgcacacggtgtgaa

SEQ ID NO: 383061 - DNA, 120 bp, Artificial Sequence
  ENSG00000143816_10 (sequence is synthesized)
gggtctacacctgcacaggctgagttcctgggctcgaccagcccagctgcgtggggtacaggcattgcacacagtgtgaatgggtctacacctgcatgggctgagtccctgggctcagac

SEQ ID NO: 383062 - DNA, 120 bp, Artificial Sequence
  ENSG00000143816_11 (sequence is synthesized)
ctagcagcgtggggtgagtccctgggctcagtcctagctgcatggggtgcaggcattgcacagagcatgaatgggcctacacctgccaaggctgaatccctgggcccagtcagccctgct

SEQ ID NO: 383063 - DNA, 120 bp, Artificial Sequence
  ENSG00000143816_12 (sequence is synthesized)
gcacatggcacaggcattgcacacggtgtgaggagtgtacacctgcaagggctgaggccctgggcccagtcagccctgctgctcagagtgcaggcattgcacatggtgtgagaaggtcta

SEQ ID NO: 383064 - DNA, 120 bp, Artificial Sequence
  ENSG00000143816_13 (sequence is synthesized)
cacctgcaagggacgagtccccgggcctggccaaccctgctgtgcagggtgagggccatgcatgcagtatgaggggtctacacctgcaaggactgagaggcttttctagcacgtcggggc

SEQ ID NO: 383065 - DNA, 120 bp, Artificial Sequence
  ENSG00000143816_14 (sequence is synthesized)
gtacagctggagcagggtgccgggggtcctctgggttggctgtccaagccctgtatctccccctctccaggacccagaggcgggggttggctctggtctggcgtatgcaacctctctgct

SEQ ID NO: 383066 - DNA, 120 bp, Artificial Sequence
  ENSG00000143816_15 (sequence is synthesized)
tgtgccctgggcctcagcttcctccctctgacccgagagcattgcaccaatgctttctgagctttctcccatccctaacacaccagtccctgggaagcggctccccatgccagtccattg

SEQ ID NO: 383067 - DNA, 120 bp, Artificial Sequence
  ENSG00000143816_16 (sequence is synthesized)
ttggtgaccatgcggcctccgtgtgggccacccgttggggactggcctggcccaggctgccccaacaccagcactgtcttcagagactcaaaccactagaagaggacgcagcctgttctg

SEQ ID NO: 383068 - DNA, 120 bp, Artificial Sequence
  ENSG00000143816_17 (sequence is synthesized)
cactcccagggcccggccgtgcgggtgcccaggctcggggggacactgccgacctctgacgttgagcacttctctttggagtaaatatcagtgacttttaaattattatgattatttaac

SEQ ID NO: 383069 - DNA, 120 bp, Artificial Sequence
  ENSG00000143816_18 (sequence is synthesized)
taatataataattattattttctccatccctgccacctccccggctgcagctccccgctctcggccaagccccagtctgggagggccccgccttccgtccctgacatattccctcctaac

SEQ ID NO: 383070 - DNA, 120 bp, Artificial Sequence
  ENSG00000143816_19 (sequence is synthesized)
cctgcctctgatctgcttagttgtttgaaaccactaaatcgagatagatgtgtgtagttaaggaaatacagtgagctgcgtctggccacagcccttggggcttctggaagccagctcccc

SEQ ID NO: 383071 - DNA, 120 bp, Artificial Sequence
  ENSG00000143816_20 (sequence is synthesized)
cagccccatgccagccagccactgccacgtggtgggccagccggcggcccctgccctgcaccctgtgggcagacgcccggcctccaggcagctcagtgcagattctcgagctgggggtgg

SEQ ID NO: 383072 - DNA, 120 bp, Artificial Sequence
  ENSG00000143816_21 (sequence is synthesized)
tggagaggggcgggcatggtgagggggcagggcagccctttgattggttcatgtcatgtcatgaggaagctgcttgctttgtgtcactgggggacagattgggacagatgccggtggagg

SEQ ID NO: 383073 - DNA, 120 bp, Artificial Sequence
  ENSG00000143816_22 (sequence is synthesized)
cagtcttgggctcgcatctggccatggaacgccatgctttatggccctgctgttgtgtgtgctggggacagggtgacctgcactgacctggcttggtttgagggtgtagtgtgtgtgtgt

SEQ ID NO: 383074 - DNA, 120 bp, Artificial Sequence
  ENSG00000143816_23 (sequence is synthesized)
gttgtgagagtgtgtgtgctggcgtggtcagtgtgcatacgtgtgcgtatgttgtgagtgttgtgagtgcgtgtgtgctggcgtggtcaatgtgtgtaagcgtgtgttgtataaatgcat

SEQ ID NO: 383075 - DNA, 120 bp, Artificial Sequence
  ENSG00000143816_24 (sequence is synthesized)
tgtgtgtgtgtgtgtgtgtgtatactggcatggtcagcttggctgtgctgtgctgtcagtggcatggcggtgccttaggttcccagagcctctcgccctgggctccgtcttgtgggtgtc

SEQ ID NO: 383076 - DNA, 120 bp, Artificial Sequence
  ENSG00000143816_25 (sequence is synthesized)
tcgccctgggctccgtcttgtgggtgtcctgatggctgtgggctgggttctgggcgggttgctggtatggatacaggaactactgagtgaataggtgtctcagagccctaagggtctcca

SEQ ID NO: 383077 - DNA, 120 bp, Artificial Sequence
  ENSG00000143816_26 (sequence is synthesized)
gaaagccggggtgtctgtgtttttaaaagaaaacctatttatgttgctgtgggtctctgccgtccctgtgttatagtacataagaacctttattctcctgtggttcagagagcaccccga

SEQ ID NO: 383078 - DNA, 120 bp, Artificial Sequence
  ENSG00000143816_27 (sequence is synthesized)
catgtgcctgcagctgcatccccgtaccacagtgtgggtgcaagacgctgggtttgtcctttgtctggtgaagcctggctagaaggggtgggggtggtagcccctgccctctgcagtgtc

SEQ ID NO: 383079 - DNA, 120 bp, Artificial Sequence
  ENSG00000143816_28 (sequence is synthesized)
cgcatccactggtccctgagcagcatagctggccacaccctcatgacatgacaagactgtcactcagtcactattgggtctatgaagggcgtcaagtcagaggaaggtttttatttttaa

SEQ ID NO: 383080 - DNA, 120 bp, Artificial Sequence
  ENSG00000143816_29 (sequence is synthesized)
tcaaataccacatttagctctatgtcataaatattcagaaaactatttttttaaacaaggcagaccaaaaatgtctgctagctagttggtttctatacaaatacatattcgaatgtcttg

SEQ ID NO: 383081 - DNA, 120 bp, Artificial Sequence
  ENSG00000143816_30 (sequence is synthesized)
ctggatgaagaggccgctcagccggagcctcctgtttcatgcgcttctcttctgaggggcagtagaggagaaagggctgttgggaggggttcagcccgctccttggccaggggatcccag

SEQ ID NO: 383082 - DNA, 120 bp, Artificial Sequence
  ENSG00000143816_31 (sequence is synthesized)
ccaccttctctgcaccaggccctgccttgagggacctggacccccaggtggcttctggccaggtgtgggtgggtgggaggggccctgtctgtgctccgagtctccgtgcgtgcaatgatt

SEQ ID NO: 383083 - DNA, 120 bp, Artificial Sequence
  ENSG00000143816_32 (sequence is synthesized)
tctctacctcatctgtgtggcccgtcccagagggactgtggagaatgtatttatttaacagctttgtgtcacagaaccagaaacaaatggaaacattaaataaatgtattttaaattata

SEQ ID NO: 383084 - DNA, 120 bp, Artificial Sequence
  ENSG00000143819_0 (sequence is synthesized)
gaaaactagccgaggagagccagggagccggagagatcgcgcgcctgccgccgccggagcctgcgagccgagaccgagccatgtggctagaaatcctcctcacttcagtgctgggctttg

SEQ ID NO: 383085 - DNA, 120 bp, Artificial Sequence
  ENSG00000143819_1 (sequence is synthesized)
ccatctactggttcatctcccgggacaaagaggaaactttgccacttgaagatgggtggtgggggccaggcacgaggtccgcagccagggaggacgacagcatccgccctttcaaggtgg

SEQ ID NO: 383086 - DNA, 120 bp, Artificial Sequence
  ENSG00000143819_2 (sequence is synthesized)
aaacgtcagatgaggagatccacgacttacaccagaggatcgataagttccgtttcaccccacctttggaggacagctgcttccactatggcttcaactccaactacctgaagaaagtca

SEQ ID NO: 383087 - DNA, 120 bp, Artificial Sequence
  ENSG00000143819_3 (sequence is synthesized)
tctcctactggcggaatgaatttgactggaagaagcaggtggagattctcaacagataccctcacttcaagactaagattgaagggctggacatccacttcatccacgtgaagccccccc

SEQ ID NO: 383088 - DNA, 120 bp, Artificial Sequence
  ENSG00000143819_4 (sequence is synthesized)
agctgcccgcaggccataccccgaagcccttgctgatggtgcacggctggcccggctctttctacgagttttataagatcatcccactcctgactgaccccaagaaccatggcctgagcg

SEQ ID NO: 383089 - DNA, 120 bp, Artificial Sequence
  ENSG00000143819_5 (sequence is synthesized)
atgagcacgtttttgaagtcatctgcccttccatccctggctatggcttctcagaggcatcctccaagaaggggttcaactcggtggccaccgccaggatcttttacaagctgatgctgc

SEQ ID NO: 383090 - DNA, 120 bp, Artificial Sequence
  ENSG00000143819_6 (sequence is synthesized)
cttgaacatggctttggttttaagcaacttctctaccctgaccctcctcctgggacagcgtttcgggaggtttcttggcctcactgagagggatgtggagctgctgtaccccgtcaagga

SEQ ID NO: 383091 - DNA, 120 bp, Artificial Sequence
  ENSG00000143819_7 (sequence is synthesized)
gaaggtattctacagcctgatgagggagagcggctacatgcacatccagtgcaccaagcctgacaccgtaggctctgctctgaatgactctcctgtgggtctggctgcctatattctaga

SEQ ID NO: 383092 - DNA, 120 bp, Artificial Sequence
  ENSG00000143819_8 (sequence is synthesized)
gaagttttccacctggaccaatacggaattccgatacctggaggatggaggcctggaaaggaagttctccctggacgacctgctgaccaacgtcatgctctactggacaacaggcaccat

SEQ ID NO: 383093 - DNA, 120 bp, Artificial Sequence
  ENSG00000143819_9 (sequence is synthesized)
catctcctcccagcgcttctacaaggagaacctgggacagggctggatgacccagaagcatgagcggatgaaggtctatgtgcccactggcttctctgccttcccttttgagctattgca

SEQ ID NO: 383094 - DNA, 120 bp, Artificial Sequence
  ENSG00000143819_10 (sequence is synthesized)
cacgcctgaaaagtgggtgaggttcaagtacccaaagctcatctcctattcctacatggttcgtgggggccactttgcggcctttgaggagccggagctgctcgcccaggacatccgcaa

SEQ ID NO: 383095 - DNA, 120 bp, Artificial Sequence
  ENSG00000143819_11 (sequence is synthesized)
gttcctgtcggtgctggagcggcaatgacccacccctctccccccgcctgccacctccccccacaagtgccctccaggcttttcttggggaagataccccttttctgaggaatgagtttg

SEQ ID NO: 383096 - DNA, 120 bp, Artificial Sequence
  ENSG00000143819_12 (sequence is synthesized)
cctccgtcccctgcccatgctgggagcccacgctcaccccctcacccctccaagctcactccccaacccccaactccgtgtggtaagcaacatggctttgatgataaacgactttactct

SEQ ID NO: 383097 - DNA, 120 bp, Artificial Sequence
  ENSG00000143819_13 (sequence is synthesized)
acaggcccttagagcatcgccaggtgcagagctccacagctctctttcccaaggagtaatcagagggtgagaacgtggagcctggtggacaggtgaaagcactgggatctttctgcccag

SEQ ID NO: 383098 - DNA, 120 bp, Artificial Sequence
  ENSG00000143819_14 (sequence is synthesized)
ggaattccgcgtcccagactgtgggcggacgccgcagggagggaggctcgcgaccccgagagcgcaccgcgtcccctggcctgggcgagctctgcttccagggccgtggctcgctcggcg

SEQ ID NO: 383099 - DNA, 78 bp, Artificial Sequence
  ENSG00000143819_15 (sequence is synthesized)
ctgggcgagctctgcttccagggccgtggctcgctcggcggtgaaatgcacttaatttgtcacccaagtcggaacact

SEQ ID NO: 383100 - DNA, 80 bp, Artificial Sequence
  ENSG00000143819_16 (sequence is synthesized)
cctgccgccgccggagcctgcgagccgagaccgtaagcgcccggggccggccgggcccgcactccccggacgcagacgcg

SEQ ID NO: 383101 - DNA, 120 bp, Artificial Sequence
  ENSG00000143819_17 (sequence is synthesized)
cggcgggccggggcgccgaggggtcggggctgcggtcggcccgcaggggtgcagagggacttgtagttggtccgcccccagctcctgccccggccaggagactgcgcgtgccgcctactg

SEQ ID NO: 383102 - DNA, 120 bp, Artificial Sequence
  ENSG00000143819_18 (sequence is synthesized)
ttggagagattcagaacccaattataggtgactgagatgtacttatacgttgtaaccttactaaatgcaaaaatattgcagtcacaacaaatctgtccatctttagagctaggcaggaac

SEQ ID NO: 383103 - DNA, 120 bp, Artificial Sequence
  ENSG00000143839_0 (sequence is synthesized)
agaacctcagtggatctcagagagagccccagactgagggaagcatggatggatggagaaggatgcctcgctggggactgctgctgctgctctggggctcctgtacctttggtctcccga

SEQ ID NO: 383104 - DNA, 120 bp, Artificial Sequence
  ENSG00000143839_1 (sequence is synthesized)
cagacaccaccacctttaaacggatcttcctcaagagaatgccctcaatccgagaaagcctgaaggaacgaggtgtggacatggccaggcttggtcccgagtggagccaacccatgaaga

SEQ ID NO: 383105 - DNA, 120 bp, Artificial Sequence
  ENSG00000143839_2 (sequence is synthesized)
ggctgacacttggcaacaccacctcctccgtgatcctcaccaactacatggacacccagtactatggcgagattggcatcggcaccccaccccagaccttcaaagtcgtctttgacactg

SEQ ID NO: 383106 - DNA, 120 bp, Artificial Sequence
  ENSG00000143839_3 (sequence is synthesized)
gttcgtccaatgtttgggtgccctcctccaagtgcagccgtctctacactgcctgtgtgtatcacaagctcttcgatgcttcggattcctccagctacaagcacaatggaacagaactca

SEQ ID NO: 383107 - DNA, 120 bp, Artificial Sequence
  ENSG00000143839_4 (sequence is synthesized)
ccctccgctattcaacagggacagtcagtggctttctcagccaggacatcatcaccgtgggtggaatcacggtgacacagatgtttggagaggtcacggagatgcccgccttacccttca

SEQ ID NO: 383108 - DNA, 120 bp, Artificial Sequence
  ENSG00000143839_5 (sequence is synthesized)
tgctggccgagtttgatggggttgtgggcatgggcttcattgaacaggccattggcagggtcacccctatcttcgacaacatcatctcccaaggggtgctaaaagaggacgtcttctctt

SEQ ID NO: 383109 - DNA, 120 bp, Artificial Sequence
  ENSG00000143839_6 (sequence is synthesized)
gaattcccaatcgctgggaggacagattgtgctgggaggcagcgacccccagcattacgaagggaatttccactatatcaacctcatcaagactggtgtctggcagattcaaatgaaggg

SEQ ID NO: 383110 - DNA, 120 bp, Artificial Sequence
  ENSG00000143839_7 (sequence is synthesized)
ggtgtctgtggggtcatccaccttgctctgtgaagacggctgcctggcattggtagacaccggtgcatcctacatctcaggttctaccagctccatagagaagctcatggaggccttggg

SEQ ID NO: 383111 - DNA, 120 bp, Artificial Sequence
  ENSG00000143839_8 (sequence is synthesized)
agccaagaagaggctgtttgattatgtcgtgaagtgtaacgagggccctacactccccgacatctctttccacctgggaggcaaagaatacacgctcaccagcgcggactatgtatttca

SEQ ID NO: 383112 - DNA, 120 bp, Artificial Sequence
  ENSG00000143839_9 (sequence is synthesized)
ggaatcctacagtagtaaaaagctgtgcacactggccatccacgccatggatatcccgccacccactggacccacctgggccctgggggccaccttcatccgaaagttctacacagagtt

SEQ ID NO: 383113 - DNA, 120 bp, Artificial Sequence
  ENSG00000143839_10 (sequence is synthesized)
tgatcggcgtaacaaccgcattggcttcgccttggcccgctgaggccctctgccacccaggcaggccctgccttcagccctggcccagagctggaacactctctgagatgcccctctgcc

SEQ ID NO: 383114 - DNA, 120 bp, Artificial Sequence
  ENSG00000143839_11 (sequence is synthesized)
tgggcttatgccctcagatggagacattggatgtggagctcctgctggatgcgtgccctgacccctgcaccagcccttccctgctttgaggacaaagagaataaagacttcatgttcaca

SEQ ID NO: 383115 - DNA, 120 bp, Artificial Sequence
  ENSG00000143839_12 (sequence is synthesized)
ggctcatttttgcaagcagctctgatgaggctgttccccttccatcctcaatggatggttagctgatttcaagaggcctctggtgtcattaagggccttcgcacgttctgttcctgctgg

SEQ ID NO: 383116 - DNA, 120 bp, Artificial Sequence
  ENSG00000143839_13 (sequence is synthesized)
gactctatttctttgtcttcagctattcattgccaatgcagccttcagatcacaatgtcaacagaggatagacaaccccctcctcccccagctccctgcttccagaggattatgtaacca

SEQ ID NO: 383117 - DNA, 120 bp, Artificial Sequence
  ENSG00000143842_0 (sequence is synthesized)
agtcgcctcgcagcagcgagccgcgagcgcccttctccagtcccggcttggaactgaactgtgtgagcacgggtcctggaacccgggcccagaaccggcgagcccaggtctgagcccaga

SEQ ID NO: 383118 - DNA, 120 bp, Artificial Sequence
  ENSG00000143842_1 (sequence is synthesized)
gctcagcggtcagcctcgtaggccctgactcggaatcgagccgaggcgctgaggttggagccggagagcgtgagagccgaagagcagggagggcgggccggctgcgcgtccgacgagtcg

SEQ ID NO: 383119 - DNA, 120 bp, Artificial Sequence
  ENSG00000143842_2 (sequence is synthesized)
cagagcaggaccgcggaaggcagggagacggccgcaagcccagggcagagggcagagggcagagagcggcctggctcggcggagagggcgccgcccggccggaaccaagctcgccgcccg

SEQ ID NO: 383120 - DNA, 80 bp, Artificial Sequence
  ENSG00000143842_3 (sequence is synthesized)
cagggtggccgtgggtccgcagcgactccccggccgacggcggggggcgtgccccctcccagcccagcctccccaacccg

SEQ ID NO: 383121 - DNA, 120 bp, Artificial Sequence
  ENSG00000143842_4 (sequence is synthesized)
cgtcgcgggggcatgtgagcgggaagcctaggctgccagccgcgaggaccgcacggaggaggagcaggagcgcggagccgcgagccccgagccccgagcccggcgcctggctgagtagat

SEQ ID NO: 383122 - DNA, 120 bp, Artificial Sequence
  ENSG00000143842_5 (sequence is synthesized)
gtccatgaggagccccatctctgcccagctggccctggatggcgttggcaccatggtgaactgcaccatcaagtcagaggagaagaaagagccttgccacgaggccccccagggctcagc

SEQ ID NO: 383123 - DNA, 120 bp, Artificial Sequence
  ENSG00000143842_6 (sequence is synthesized)
cactgccgctgaacctcagcctggagacccagcccgggcctcccaggatagtgctgacccccaagctccagcccaggggaatttcaggggctcctgggactgtagctctccagagggtaa

SEQ ID NO: 383124 - DNA, 120 bp, Artificial Sequence
  ENSG00000143842_7 (sequence is synthesized)
tgggtccccagaacccaagagaccaggagtgtcggaggctgcctctggaagccaggagaagctggacttcaaccgaaatttgaaagaagtggtgccagccatagagaagctgttgtccag

SEQ ID NO: 383125 - DNA, 120 bp, Artificial Sequence
  ENSG00000143842_8 (sequence is synthesized)
tgactggaaggagaggtttctaggaaggaactctatggaagccaaagatgtcaaagggacccaagagagcctagcagagaaggagctccagcttctggtcatgattcaccagctgtccac

SEQ ID NO: 383126 - DNA, 120 bp, Artificial Sequence
  ENSG00000143842_9 (sequence is synthesized)
cctgcgggaccagctcctgacagcccactcggagcagaagaacatggctgccatgctgtttgagaagcagcagcagcagatggagcttgcccggcagcagcaggagcagattgcaaagca

SEQ ID NO: 383127 - DNA, 120 bp, Artificial Sequence
  ENSG00000143842_10 (sequence is synthesized)
gcagcagcagctgattcagcagcagcataagatcaacctccttcagcagcagatccagcaggttaacatgccttatgtcatgatcccagccttccccccaagccaccaacctctgcctgt

SEQ ID NO: 383128 - DNA, 120 bp, Artificial Sequence
  ENSG00000143842_11 (sequence is synthesized)
cacccctgactcccagctggccttacccattcagcccattccctgcaaaccagtggagtatccgctgcagctgctgcacagcccccctgccccagtggtgaagaggcctggggccatggc

SEQ ID NO: 383129 - DNA, 120 bp, Artificial Sequence
  ENSG00000143842_12 (sequence is synthesized)
cacccaccaccccctgcaggagccctcccagcccctgaacctcacagccaagcccaaggcccccgagctgcccaacacctccagctccccaagcctgaagatgagcagctgtgtgccccg

SEQ ID NO: 383130 - DNA, 120 bp, Artificial Sequence
  ENSG00000143842_13 (sequence is synthesized)
cccccccagccatggaggccccacgcgggacctgcagtccagccccccgagcctgcctctgggcttccttggtgaaggggacgctgtcaccaaagccatccaggatgctcggcagctgct

SEQ ID NO: 383131 - DNA, 120 bp, Artificial Sequence
  ENSG00000143842_14 (sequence is synthesized)
gcacagccacagtggggccttggatggctcccccaacacccccttccgtaaggacctcatcagcctggactcatccccagccaaggagcggctggaggacggctgtgtgcacccactgga

SEQ ID NO: 383132 - DNA, 120 bp, Artificial Sequence
  ENSG00000143842_15 (sequence is synthesized)
ggaagccatgctgagctgcgacatggatggctcccgccacttccccgagtcccgaaacagcagccacatcaagaggcccatgaacgccttcatggtgtgggccaaggatgagcggaggaa

SEQ ID NO: 383133 - DNA, 120 bp, Artificial Sequence
  ENSG00000143842_16 (sequence is synthesized)
tgagccggcagcacctggagaagtatcctgactacaagtacaagccgcggcccaagcgcacctgcatcgtggagggcaagcggctgcgcgtgggagagtacaaggccctgatgaggaccc

SEQ ID NO: 383134 - DNA, 120 bp, Artificial Sequence
  ENSG00000143842_17 (sequence is synthesized)
ggcgtcaggatgcccgccagagctacgtgatccccccgcaggctggccaggtgcagatgagctcctcagatgtcctgtaccctcgggcagcaggcatgccgctggcacagccactggtgg

SEQ ID NO: 383135 - DNA, 120 bp, Artificial Sequence
  ENSG00000143842_18 (sequence is synthesized)
agcactatgtccctcgtagcctggaccccaacatgcctgtgatcgtcaacacctgcagcctcagagaggagggtgagggcacagatgacaggcactcggtggctgatggcgagatgtacc

SEQ ID NO: 383136 - DNA, 120 bp, Artificial Sequence
  ENSG00000143842_19 (sequence is synthesized)
ggtacagcgaggacgaggactcggagggcgaagagaagagcgatggggagttggtggtgctcacagactgatcccggctgggtgggcctggccccttctcctctggggaagaccttgtcc

SEQ ID NO: 383137 - DNA, 120 bp, Artificial Sequence
  ENSG00000143842_20 (sequence is synthesized)
caactcgatgggcacagccagccaacctaagactatgttggtacttggacttgttcgtgccccagagatgggcaaagctgtgcacttgcagatacattcatgaggggagaggcgccctcc

SEQ ID NO: 383138 - DNA, 120 bp, Artificial Sequence
  ENSG00000143842_21 (sequence is synthesized)
cttcctgaggagctgttggcctgggtgggcaggaactgcagtatggccatgggctgagcaggctgagcacctcagcctttagggcttatggccaggggacactgtatgactctcctctcc

SEQ ID NO: 383139 - DNA, 120 bp, Artificial Sequence
  ENSG00000143842_22 (sequence is synthesized)
tgcaggtgtctatccacctggggtatggcatctaccgacctgtctccctggggtcacatgctttgtttccattcttgtcctggctggaccagccactgtgggaccaacacccctcccaca

SEQ ID NO: 383140 - DNA, 120 bp, Artificial Sequence
  ENSG00000143842_23 (sequence is synthesized)
ctcccccagactgctcgtctatcaccaggatcgctttgtactttgtgcaaaagggtctggctgtcccttgctgttttcatctctgccaagcctattgtgcctctggctgctgtatgtgtg

SEQ ID NO: 383141 - DNA, 120 bp, Artificial Sequence
  ENSG00000143842_24 (sequence is synthesized)
cgcgtgcacgtgtgtgtgtttcatctgttcattcactgcacaagatatttattgagtgcccactacgtgccaggcactgttgctgagttcctgtgggtgtgtctctcgatgccactcctg

SEQ ID NO: 383142 - DNA, 120 bp, Artificial Sequence
  ENSG00000143842_25 (sequence is synthesized)
cttctctgggggcctctttctgtgcttctctttgtccccaaattgctacctctttgtcagtctgggtgtctcaggttctgtgtgtccttgtgtgcatttctgtctctctctgtcctcgtc

SEQ ID NO: 383143 - DNA, 120 bp, Artificial Sequence
  ENSG00000143842_26 (sequence is synthesized)
tctctgcaaggccctctatttctctctttcttggtgtctgtcctttgccccctgtgccctctggattctctgggtctatgtaggcccctggtctgccctgggctcatcagccttcctgac

SEQ ID NO: 383144 - DNA, 120 bp, Artificial Sequence
  ENSG00000143842_27 (sequence is synthesized)
ctcctcctgccctccccttcactccctccctggctctgccagtcggttcccacggagccatttttagctctgatcagcatgggaatgtgcctcggcctccaaggggctttgtcctggtgc

SEQ ID NO: 383145 - DNA, 120 bp, Artificial Sequence
  ENSG00000143842_28 (sequence is synthesized)
ccccgcccctggtcccaacctgatcccacgagggagttgggacaggaggattgatggtgctccccttcctgccagcgtcagaggccctggagaggggctgtccatggcagctggtcttta

SEQ ID NO: 383146 - DNA, 120 bp, Artificial Sequence
  ENSG00000143842_29 (sequence is synthesized)
ttcctccctcatgagcacagggtcgggggggtccccattcttggaagaggttgagaagactcctgggcttcagcctctcccacccagccctgcccctcacctgcctgccctcccctcccc

SEQ ID NO: 383147 - DNA, 120 bp, Artificial Sequence
  ENSG00000143842_30 (sequence is synthesized)
cactctatactagggactggatctcagcctctgatcagtttcacaaagtttgttccctaaggaaatcaaatcccattgtcacctaactctgaagatctaaatagcccttggatcagtatg

SEQ ID NO: 383148 - DNA, 120 bp, Artificial Sequence
  ENSG00000143842_31 (sequence is synthesized)
ggaaccccaaatcccacagggccagatgtggagtctgtgtctgcccccgtcttctctccatcctcaaagcccccacttctctccaggctgtttctttttttatgactgtaaacatagata

SEQ ID NO: 383149 - DNA, 120 bp, Artificial Sequence
  ENSG00000143842_32 (sequence is synthesized)
gtgctttattttgttaataataagataatgatgagtaacttaaccagcacatttctcctgtttacactcgggggatttttttgttttctgatgacataataaagacagatcatttcagaa

SEQ ID NO: 383150 - DNA, 120 bp, Artificial Sequence
  ENSG00000143842_33 (sequence is synthesized)
cacccctgactcccagctggccttacccattcagcccattccctgcaaaccaggtgagtgtgagaagggaggttccaccactgcggccagcctgtcctgaggtcagggaaagcgccctgg

SEQ ID NO: 383151 - DNA, 120 bp, Artificial Sequence
  ENSG00000143842_34 (sequence is synthesized)
agccactctcatccattaatttgctatgtggactttctgggcctcagttttggatctgtctggtagaagaatcatcctctttttctgaatcttgctgaatttctctgaacttcactggga

SEQ ID NO: 383152 - DNA, 120 bp, Artificial Sequence
  ENSG00000143842_35 (sequence is synthesized)
gaatgaaaaaccataaagccctttccagatgtaaaatgatgtagcaatccaggtctagtctctccaactctagtacatttactgtgtcagagtattaatatctggaatattgccaggtgt

SEQ ID NO: 383153 - DNA, 120 bp, Artificial Sequence
  ENSG00000143842_36 (sequence is synthesized)
aaatctggaatattaactgggttttacaaatctcccaaattcttttttgtttgtttgtgttttgtgttttgagacagagtcttacttgttctgtcacctgggctctggagtgcagtggtg

SEQ ID NO: 383154 - DNA, 64 bp, Artificial Sequence
  ENSG00000143842_37 (sequence is synthesized)
ctaatttttgtatttttagtagagacgaaatttcgccgcgttgcccaggctggtctcctgacca

SEQ ID NO: 383155 - DNA, 120 bp, Artificial Sequence
  ENSG00000143842_38 (sequence is synthesized)
acagccacgattcctaccttcacactcttgtccctgcctacaccatgtcactctggccttctaccccatcactgaaattcagcagaatggccatgtgtcagacaagggtgtgggacctga

SEQ ID NO: 383156 - DNA, 120 bp, Artificial Sequence
  ENSG00000143842_39 (sequence is synthesized)
cggtacagggcagttggggagggagcatggagtctgggatttattttgtaggctgtggggtgcatgtgaacatttgagaagtgagtgtgtcgttctggctttgaggggtggggagtggag

SEQ ID NO: 383157 - DNA, 120 bp, Artificial Sequence
  ENSG00000143842_40 (sequence is synthesized)
gggagactggccagaagcaggacctgctaggtgattctagcagcaggggatgatacctgaactagggcagtgacagagagttatggggacagggcagagatgctgcccataattacccca

SEQ ID NO: 383158 - DNA, 120 bp, Artificial Sequence
  ENSG00000143842_41 (sequence is synthesized)
ggagtgtggacagctttaaaggcaacacgtgctagatcatcctccctgttccacaggcgagaaagagagagagaagaggaaattccctgaggcctataggccatgggcttgggtagactg

SEQ ID NO: 383159 - DNA, 120 bp, Artificial Sequence
  ENSG00000143842_42 (sequence is synthesized)
ctcagccccactggctctctgctcctgcctggtttgtgccgggcactgtagggtggtgtgaaggggaaacacaaaggactgagaaagccaggccccatcttcatccattcaggggctgta

SEQ ID NO: 383160 - DNA, 120 bp, Artificial Sequence
  ENSG00000143842_43 (sequence is synthesized)
gaaagacaccatggaccgtgtggctcataaacaacagatgttattcctcacatacagttctgggggctgtgaattccaagatcataaagccagcatatttggtgtctggtgagggctgac

SEQ ID NO: 383161 - DNA, 120 bp, Artificial Sequence
  ENSG00000143842_44 (sequence is synthesized)
tttctggttcacagatggcgtctctcactgtgtcctcaggtggtgaaaggggtaaacgggctccctcaggcctctaatctcattcctgagggctccaccctcatgacccaggcacctccc

SEQ ID NO: 383162 - DNA, 120 bp, Artificial Sequence
  ENSG00000143842_45 (sequence is synthesized)
aaaggtcccacctcctaagtctatcacattgggaattagatttcaacataggaattggggtgggggaggcacattcagaccatagcattctgccccagactctccccagttcattttctt

SEQ ID NO: 383163 - DNA, 120 bp, Artificial Sequence
  ENSG00000143842_46 (sequence is synthesized)
gtcatatgcaaaatatattcattccatcccaataggctcccaaatcttaacttgttccagcatcagttcaaaagtttcaagtccagagcctcatctaatctcacctaggccaggcacagt

SEQ ID NO: 383164 - DNA, 120 bp, Artificial Sequence
  ENSG00000143842_47 (sequence is synthesized)
gagcctgcctctgggtaagcctcctgctgcctgcacttgtccctcagccctcttaggggagagccggcggcatgatgcgaccttgagcaggtcccttctcctccctgggttccagatttt

SEQ ID NO: 383165 - DNA, 120 bp, Artificial Sequence
  ENSG00000143842_48 (sequence is synthesized)
atcaaatgaggggttagacttgctcttagcagaagatccccttcttcctctccctcatcatatctgtctgggcattccaagcatcagggattcaggccagagtcacatagttccaggggg

SEQ ID NO: 383166 - DNA, 120 bp, Artificial Sequence
  ENSG00000143842_49 (sequence is synthesized)
tactgttgtcatttctagtctattgacatgcacaataactagccagtgtaagtggcatatccctgaggacatgcaatgcagccgccctgtggaagaacaggagggaacactaactcaggt

SEQ ID NO: 383167 - DNA, 120 bp, Artificial Sequence
  ENSG00000143842_50 (sequence is synthesized)
aagctgatggagtttgggctcatgctgggctgatgccctcagcttctctcgcttctcttccctctcttctgccctctcccacaggcttccttggtgaaggggacgctgtcaccaaagcca

SEQ ID NO: 383168 - DNA, 120 bp, Artificial Sequence
  ENSG00000143842_51 (sequence is synthesized)
acgcgggtcgagcttagggtgcacccccaacccgctcctcgccgaccgcagaggactaggtctttctcatcagcccgactatgcgcctagtttaaggatttctcagcgggaagccgaagc

SEQ ID NO: 383169 - DNA, 120 bp, Artificial Sequence
  ENSG00000143842_52 (sequence is synthesized)
gacctgcgcgcgtcctgcgtggggctcaggtgcctgcgacgaggcgcagagctcctccaccatggttgcgtggggtgctgggggacagacgcgctccccttgccacggtttcagggtcgt

SEQ ID NO: 383170 - DNA, 120 bp, Artificial Sequence
  ENSG00000143842_53 (sequence is synthesized)
aacttgcctaacagctcacagacaggatgggttgaaatgggaatttgaccccagacctgtcttgcttcaaagcctgagtgtgtcccactggatccctccgatgggatggttgtccaccct

SEQ ID NO: 383171 - DNA, 120 bp, Artificial Sequence
  ENSG00000143842_54 (sequence is synthesized)
gaccctgtgtggcgctgagcactcgaggacattgaagaggcctggggctctggggctgacatgtcccactgtcagcattttcagggggcctggaattcatggctaataggggagaacttc

SEQ ID NO: 383172 - DNA, 120 bp, Artificial Sequence
  ENSG00000143845_0 (sequence is synthesized)
acaatcgcggcgggccgcggcgctccggggtcggcggtgggcggcgggccgcgagccggcgatcgaagcgggcagctcgcgcctgagtcatggacttcccctggcccctcctctaccact

SEQ ID NO: 383173 - DNA, 120 bp, Artificial Sequence
  ENSG00000143845_1 (sequence is synthesized)
cccactccctcgccggacccccccgccggggctagcgtctgccgcggctccgagggggtggggctgctgggaatggctgtgcccccttcggcccctcagccgcgcgcgtcctttcacctg

SEQ ID NO: 383174 - DNA, 120 bp, Artificial Sequence
  ENSG00000143845_2 (sequence is synthesized)
aggaggcacacgccttgcccgcagtgctcatggggcatggaggagaaggcggcggccagcgccagctgccgggagccgccgggccccccgagggccgccgccgtcgcgtacttcggcatt

SEQ ID NO: 383175 - DNA, 120 bp, Artificial Sequence
  ENSG00000143845_3 (sequence is synthesized)
tccgtggacccggacgacatccttcccggggccctgcgcctcatccaggagctgcggccgcattggaaacccgagcaagttcggaccaagcgcttcacggatggcatcaccaacaagctg

SEQ ID NO: 383176 - DNA, 120 bp, Artificial Sequence
  ENSG00000143845_4 (sequence is synthesized)
gtggcctgctatgtggaggaggacatgcaggactgcgtgctggtccgggtgtatggggagcggacggagctgctggtggaccgggagaatgaggtcagaaacttccagctgctgcgagca

SEQ ID NO: 383177 - DNA, 120 bp, Artificial Sequence
  ENSG00000143845_5 (sequence is synthesized)
cacagctgtgcccccaaactctactgcaccttccagaatgggctgtgctatgagtacatgcagggtgtggccctggagcctgagcacatccgtgagccccggcttttcaggttaatcgcc

SEQ ID NO: 383178 - DNA, 120 bp, Artificial Sequence
  ENSG00000143845_6 (sequence is synthesized)
ttagaaatggcaaagattcatactatccacgccaacggcagcctgcccaagcccatcctctggcacaagatgcacaattatttcacgcttgtgaagaacgagatcaaccccagcctttct

SEQ ID NO: 383179 - DNA, 120 bp, Artificial Sequence
  ENSG00000143845_7 (sequence is synthesized)
gcagatgtccctaaggtagaggtgttggaacgggagctggcctggctgaaggagcatctgtcccagctggagtcccctgtggtgttttgtcacaatgacctgctctgcaagaatatcatc

SEQ ID NO: 383180 - DNA, 120 bp, Artificial Sequence
  ENSG00000143845_8 (sequence is synthesized)
tatgacagcatcaaaggtcacgtgcggttcattgactatgaatatgctggctacaactaccaagcttttgacattggcaaccatttcaatgagtttgcaggcgtgaatgaggtggattac

SEQ ID NO: 383181 - DNA, 120 bp, Artificial Sequence
  ENSG00000143845_9 (sequence is synthesized)
tgcctgtacccggcgcgggagacccagctgcagtggctgcactactacctgcaggcacaaaaggggatggccgtgacccccagggaggtgcaaaggctctacgtgcaagtcaacaagttt

SEQ ID NO: 383182 - DNA, 120 bp, Artificial Sequence
  ENSG00000143845_10 (sequence is synthesized)
ctcaggtacgcagtgatccgattcaaccagtacttcaaggtgaagcctcaagcgtcagccttggagatgccaaagtgaccagccaccccatccctcccctacccatctgtctggccagac

SEQ ID NO: 383183 - DNA, 120 bp, Artificial Sequence
  ENSG00000143845_11 (sequence is synthesized)
ctgttctccagagctcaattctgcactctgggatccacacccttggacagggtgggagaggggacacatgggtgtccagggagaaggctctgtccctgccgccagaccccagtggttgcc

SEQ ID NO: 383184 - DNA, 120 bp, Artificial Sequence
  ENSG00000143845_12 (sequence is synthesized)
actgaagacctcattctcctgtctggaggggctgataggacccccttccgggggtccccttcaccccaccaggcttgggaggaagtgcctgcagccaggtcctgaaccataaccacccct

SEQ ID NO: 383185 - DNA, 120 bp, Artificial Sequence
  ENSG00000143845_13 (sequence is synthesized)
gggaaacacatcattcccagcctcaggccctgctggaattggggctgccttatatgtgtgtttaccccttcctggcctggggaaggaggcggggagggctcctttctacctccagtgccc

SEQ ID NO: 383186 - DNA, 120 bp, Artificial Sequence
  ENSG00000143845_14 (sequence is synthesized)
tgagcctccagtccgtctccccctgcatgccccatgtgggaggtgctgagctccaaaccagcatcacaccaactctgacacatggatgtacctatcttggtgatgggtgggggccaagaa

SEQ ID NO: 383187 - DNA, 120 bp, Artificial Sequence
  ENSG00000143845_15 (sequence is synthesized)
ttgagcatgacatcttccccagcagccacctcctctgagatccctcaccttctccaaaccagatccaatcaaacctcagcccgaggaaacatgctccccaacgtgctctcctgtgcttct

SEQ ID NO: 383188 - DNA, 120 bp, Artificial Sequence
  ENSG00000143845_16 (sequence is synthesized)
gttttgtccccctgctggggggacaggagagggagtggtgaggccctgggcctccagagcctggctctgctttgtgctgtggcttagccggaggggacgtggccaagggtgaggtggcca

SEQ ID NO: 383189 - DNA, 120 bp, Artificial Sequence
  ENSG00000143845_17 (sequence is synthesized)
aaaccagaaccagcagtctcctgccttgttccctccctggccctcaggccctccttccagggatgtctctccagctctactttatgtcctgaagctgacccgaggtcttcctatctggaa

SEQ ID NO: 383190 - DNA, 120 bp, Artificial Sequence
  ENSG00000143845_18 (sequence is synthesized)
tgactagagggagccaagaggatggggtgggggccagggccccccagggcctatcgtgggagagcctgggcaggatcccatcagaaaggtgctgactaaactggttgcccggacactcaa

SEQ ID NO: 383191 - DNA, 120 bp, Artificial Sequence
  ENSG00000143845_19 (sequence is synthesized)
cagcctccacctccctttctaccctcacagctcctggggccttcctggctctggcccagaaagtgattcatttgtaaattatcatggttttctttctgcattaaaatgctcatttccgga

SEQ ID NO: 383192 - DNA, 120 bp, Artificial Sequence
  ENSG00000143845_20 (sequence is synthesized)
atgactgcatccctccagtgctgtagagtcggaaacaggcatggggagattgccaggctgaccctctctggtctgtttccaggcgtctcacttcttctgggctctctgggccctcatcca

SEQ ID NO: 383193 - DNA, 120 bp, Artificial Sequence
  ENSG00000143845_21 (sequence is synthesized)
ggtgattcctaggggtaggcaggtgttctataaaggcatagtatgcacaatggaaccatttgtgtagaggaggcaaggcaggtttttccagcttgagggcttaattagatggaaccgagg

SEQ ID NO: 383194 - DNA, 120 bp, Artificial Sequence
  ENSG00000143845_22 (sequence is synthesized)
aggcaactcacatggacggagctggacactggggctggagagctgtccccagactagcacagtaaagtgttcacatgatggggccaggccctgtggctcaggatagagaggcatgcccag

SEQ ID NO: 383195 - DNA, 120 bp, Artificial Sequence
  ENSG00000143845_23 (sequence is synthesized)
caggacatacctctgcctcctcaagagagctccattgctccagctccctgccagggcactactcttcctcctggggaggatctttgtgggagtcagctcgacttagggagctgcaccgcc

SEQ ID NO: 383196 - DNA, 120 bp, Artificial Sequence
  ENSG00000143845_24 (sequence is synthesized)
tcctggggagttttcccagcatcctaagatcaggtctgttttgcatctctccccactgctcctgttgcccttgttcttagtctggaatccccaggtctggacactcgttctcacctgcct

SEQ ID NO: 383197 - DNA, 120 bp, Artificial Sequence
  ENSG00000143845_25 (sequence is synthesized)
tgtcctttccctgtgtctccttccttaccctcctgttcctttcacaaagtagcagggatgccctcagtcagtgacttttatgctctgcctcatgctttgacgcccatgtctttatcagct

SEQ ID NO: 383198 - DNA, 120 bp, Artificial Sequence
  ENSG00000143845_26 (sequence is synthesized)
gagattggccatttttccaaggccccctgcagtaagacagagggagtgatgaggctcagattcagggctcttgaggccaagcacctgtctatcagccctcctttcactggctaccttttt

SEQ ID NO: 383199 - DNA, 120 bp, Artificial Sequence
  ENSG00000143845_27 (sequence is synthesized)
ctggcttcacggagctgttcttccggctggcacttggacaagcaaaagttagaccttgatttaggtcttaagttaatttgtaggagggaagggggaaaggaaataaaaaattcccacttt

SEQ ID NO: 383200 - DNA, 89 bp, Artificial Sequence
  ENSG00000143845_28 (sequence is synthesized)
tgtggattgcttaagcccaggaattcaagaccagcccaggcaatgtggtcacgtgcggttcattgactatgaatatgctggctacaact

SEQ ID NO: 383201 - DNA, 120 bp, Artificial Sequence
  ENSG00000143845_29 (sequence is synthesized)
agacggttggggggtgggacagcggaagggaagactggaagaggactgggagggcccagctgggacacagggcctcgggcgatggggtctttatcaaggccctccttctctgaccggtta

SEQ ID NO: 383202 - DNA, 120 bp, Artificial Sequence
  ENSG00000143845_30 (sequence is synthesized)
aaaactaggctcacacctcccttggccctgcacacgcccccctcctcccggggctcttaggcacgcctggtggccacctgcccactgtcggcatgctgcgtgtgcgggccgcaccccctg

SEQ ID NO: 383203 - DNA, 120 bp, Artificial Sequence
  ENSG00000143845_31 (sequence is synthesized)
tcgctgcgtgctggtgcccctcgctgaccagaagcgcgtacccagccagctctgaaacctgaggaggcgggaacttttaagagaccccccgcccccccgacccagccatacatgcataca

SEQ ID NO: 383204 - DNA, 120 bp, Artificial Sequence
  ENSG00000143845_32 (sequence is synthesized)
caggagccaccctgtggaattccagctagcactcagctcctcaccatcgctgcaggctcgggctcagcacccccacacaggccatcttccccagccccagctggacacagagaaccttgc

SEQ ID NO: 383205 - DNA, 120 bp, Artificial Sequence
  ENSG00000143845_33 (sequence is synthesized)
tcgcagcccagttgtctcctgtcttttctgcgcttcacggatggcatcaccaacaagctggtggcctgctatgtggaggaggacatgcaggactgcgtgctggtccgggtgtatggggag

SEQ ID NO: 383206 - DNA, 120 bp, Artificial Sequence
  ENSG00000143845_34 (sequence is synthesized)
ctggaaagggagcagccaggctaaggtcttaattcattctcctctcttctgctgagaccttccttctgcaggacctgtgctcctaagggacttgcaatcatcccatccttggccctctgg

SEQ ID NO: 383207 - DNA, 120 bp, Artificial Sequence
  ENSG00000143847_0 (sequence is synthesized)
cgcgcttgggcggcggaggctgcagctacctcggcgccggctcggctctaggacgtgtcgggctgcacgggtcgggggcggctccctgctgcttccgagcctagccgcctggccttcggc

SEQ ID NO: 383208 - DNA, 120 bp, Artificial Sequence
  ENSG00000143847_1 (sequence is synthesized)
atttgcagacacactgccctccagaaacgatgggtgtcgctagatccagctgggactctgccagcctccggcactcagtctaagagaagggccatcttccagccctgctgtccctgcctg

SEQ ID NO: 383209 - DNA, 120 bp, Artificial Sequence
  ENSG00000143847_2 (sequence is synthesized)
tcatggccacattcggctgctgtctgcatgtctggggacacagggcacccagccccagccctgagaagttaagccaggccttctggctcagttccacaggggcactccagaccccaggcc

SEQ ID NO: 383210 - DNA, 120 bp, Artificial Sequence
  ENSG00000143847_3 (sequence is synthesized)
cctttcagagcaaaagcaactgatgctatgggagaagcccctgcccacctgtccactcgcctggcactgcccactctgagacccatgcactgggttcccctggaggtgccaaccctgtga

SEQ ID NO: 383211 - DNA, 120 bp, Artificial Sequence
  ENSG00000143847_4 (sequence is synthesized)
gtccctccctgtcccctgacgctgagaaggccctgccaacccccaccatgtgtgaggtgatgcccacaatcaatgagggggaccgcctgggtccccctcatggcgccgatgctgacgcca

SEQ ID NO: 383212 - DNA, 120 bp, Artificial Sequence
  ENSG00000143847_5 (sequence is synthesized)
acttcgagcagctgatggtgaacatgctggacgagcgggagaagttgctggagtctcttcgggagagtcaggagaccttggcggccacacagagccggctccaggatgccatacacgagc

SEQ ID NO: 383213 - DNA, 120 bp, Artificial Sequence
  ENSG00000143847_6 (sequence is synthesized)
gggaccagctccagcgccaccttaactccgccctcccccaggaatttgccaccttaacccgggagctgagcatgtgtcgggagcagcttctagagcgggaggaagagatatcagaactga

SEQ ID NO: 383214 - DNA, 120 bp, Artificial Sequence
  ENSG00000143847_7 (sequence is synthesized)
aagcagaacggaataacacacggctgcttctggaacatctggagtgcctggtgtcccgccatgaacggtcactgcggatgactgtggtgaagcgccaggcccagtcaccttcgggggtct

SEQ ID NO: 383215 - DNA, 120 bp, Artificial Sequence
  ENSG00000143847_8 (sequence is synthesized)
ccagtgaggtggaggtgctgaaggccctcaagtcactgtttgagcaccacaaggccctggatgagaaggtgcgagagcggctccgggcagcgctggagcgagtcaccaccttggaggagc

SEQ ID NO: 383216 - DNA, 120 bp, Artificial Sequence
  ENSG00000143847_9 (sequence is synthesized)
agctggcaggtgcccaccagcaggtgtctgccctgcagcagggggcaggggtgcgggatggagcggcagaagaggaggggactgtggagctggggccgaaacgcctgtggaaggaggata

SEQ ID NO: 383217 - DNA, 120 bp, Artificial Sequence
  ENSG00000143847_10 (sequence is synthesized)
cgggccgggtagaggagctgcaggagctcctggagaagcagaactttgagttgagccaggcccgggagcgactggtcaccctaacaacaaccgtgactgaactcgaggaggacctgggca

SEQ ID NO: 383218 - DNA, 120 bp, Artificial Sequence
  ENSG00000143847_11 (sequence is synthesized)
cggcccgccgggacctcatcaagtcggaggagctgagcagcaagcatcagcgggacctccgggaggctctggcccagaaggaggacatggaagagcggattactacactggagaagcgct

SEQ ID NO: 383219 - DNA, 120 bp, Artificial Sequence
  ENSG00000143847_12 (sequence is synthesized)
acctggctgctcagcgtgaggcaacatccatccatgacctcaatgacaagctggagaatgagctggccaacaaggagtccctgcaccgccagtgtgaggagaaggcccgacacctgcagg

SEQ ID NO: 383220 - DNA, 120 bp, Artificial Sequence
  ENSG00000143847_13 (sequence is synthesized)
agctgctggaggtggcagagcagaagctgcagcagacgatgcgcaaggcagagacgctgccagaggtggaggctgagctggcccagagaattgcagccctcaccaaggctgaagaacggc

SEQ ID NO: 383221 - DNA, 120 bp, Artificial Sequence
  ENSG00000143847_14 (sequence is synthesized)
atggcaacattgaggagcacctgcggcagctggagggacagctggaggagaagaaccaggagctggcacgggtgcgccagcgggaaaagatgaatgaggaccacaacaagcggctgtcgg

SEQ ID NO: 383222 - DNA, 120 bp, Artificial Sequence
  ENSG00000143847_15 (sequence is synthesized)
acacagtggaccggctgctcagcgagtccaacgagcgtctgcagctccacctgaaggagcgcatggctgccctggaggagaagggccgcctgtctgaagagattgagaagctgcgccaag

SEQ ID NO: 383223 - DNA, 120 bp, Artificial Sequence
  ENSG00000143847_16 (sequence is synthesized)
aggtggaccagctgaagggccgaggggggccgtttgtggatggcgtccactccaggtcgcacatgggcagtgcagcagacgtgcggttctccctgggcacaaccacacacgcacccccag

SEQ ID NO: 383224 - DNA, 120 bp, Artificial Sequence
  ENSG00000143847_17 (sequence is synthesized)
gcgtgcatcgccgctactcggcattgagggaagagtctgccaaggactgggagacttctccactgcctgggatgctggccccggcagctggccctgcctttgacagtgaccctgagatct

SEQ ID NO: 383225 - DNA, 120 bp, Artificial Sequence
  ENSG00000143847_18 (sequence is synthesized)
ccgacgtggatgaggatgagccagggggtctggtgggctctgcggatgttgtctcccccagcggccactcagatgcccagaccctggccatgatgctgcaggagcagctggatgccatca

SEQ ID NO: 383226 - DNA, 120 bp, Artificial Sequence
  ENSG00000143847_19 (sequence is synthesized)
atgaggaaatcaggatgattcaggaagagaaggagtccacggagctccgcgcggaggagattgagacgcgtgtaaccagtggcagcatggaagccctaaacctgaagcagctgcgcaagc

SEQ ID NO: 383227 - DNA, 120 bp, Artificial Sequence
  ENSG00000143847_20 (sequence is synthesized)
gtggttccatccccacctctctgacggccctgtccctggccagcgcgtccccaccactcagcggccgctccacacctaagctcacctcccgcagtgctgcccaggacctggaccgaatgg

SEQ ID NO: 383228 - DNA, 120 bp, Artificial Sequence
  ENSG00000143847_21 (sequence is synthesized)
gggtcatgaccctgcccagtgacttaagaaagcataggaggaagctgctgtcgccagtgtctcgggaagagaaccgagaggataaagccaccataaaatgtgagacttctcctccttcct

SEQ ID NO: 383229 - DNA, 120 bp, Artificial Sequence
  ENSG00000143847_22 (sequence is synthesized)
cacccaggacgctgcggctagagaagcttggccacccagccctgagccaggaagaaggcaagagtgccttggaggatcagggcagcaaccccagcagcagcaacagcagccaggactccc

SEQ ID NO: 383230 - DNA, 120 bp, Artificial Sequence
  ENSG00000143847_23 (sequence is synthesized)
tgcacaagggcgccaagcgcaagggcatcaagtcgtccattggccgcctgtttgggaagaaggagaagggcaggctgatccagctgagtcgggatggagccacaggccatgttctgctaa

SEQ ID NO: 383231 - DNA, 120 bp, Artificial Sequence
  ENSG00000143847_24 (sequence is synthesized)
cagactccgaattcagtatgcaggagcctatggtgcctgccaagctggggacccaggcagagaaggaccggcggctaaagaagaaacaccagctgcttgaagatgcccgcaggaaaggaa

SEQ ID NO: 383232 - DNA, 120 bp, Artificial Sequence
  ENSG00000143847_25 (sequence is synthesized)
tgccctttgcccagtgggatggtcctactgtggtctcctggttggagctctgggtggggatgcctgcctggtatgtggcagcctgccgggccaacgtcaagagtggtgccatcatgtccg

SEQ ID NO: 383233 - DNA, 120 bp, Artificial Sequence
  ENSG00000143847_26 (sequence is synthesized)
attcaggagatggtgtcattgaccagcccctctgccccacccacctccaggacttcttctgggaatgtctgggtcacccatgaagagatggaaactctggaaacatctactaaaacagac

SEQ ID NO: 383234 - DNA, 120 bp, Artificial Sequence
  ENSG00000143847_27 (sequence is synthesized)
agtgaggagggcagctgggctcagaccctggcctatggggacatgaaccatgagtggattgggaatgaatggctacccagcctggggctcccgcagtaccgcagctacttcatggagtgc

SEQ ID NO: 383235 - DNA, 120 bp, Artificial Sequence
  ENSG00000143847_28 (sequence is synthesized)
ctggtggacgcccgcatgctggaccacctcaccaagaaggacctgcgggtccacctgaagatggtggacagcttccatcgaaccagtcttcagtatggcatcatgtgtctgaagaggctg

SEQ ID NO: 383236 - DNA, 120 bp, Artificial Sequence
  ENSG00000143847_29 (sequence is synthesized)
aattatgaccggaaggagctggagaagaggcgagaggagagccagcatgagatcaaggatgtgttagtctggaccaacgaccaggtggttcattgggtccagtctattgggctccgggac

SEQ ID NO: 383237 - DNA, 120 bp, Artificial Sequence
  ENSG00000143847_30 (sequence is synthesized)
tacgcaggaaacctgcatgagagtggtgtgcatggagccttgctggccctggacgagaacttcgaccacaacacactggccctgatcctccagatccccacacagaacacccaggcacgc

SEQ ID NO: 383238 - DNA, 120 bp, Artificial Sequence
  ENSG00000143847_31 (sequence is synthesized)
caagtgatggaaagagagttcaataacctgttggccttgggcacagaccggaagctggatgacggggatgacaaggtgtttcgccgcgcgccctcctggaggaagcgcttccggccgcgg

SEQ ID NO: 383239 - DNA, 120 bp, Artificial Sequence
  ENSG00000143847_32 (sequence is synthesized)
gagcaccacggtcgcggcggcatgctcagcgcttccgcggagaccctcccggcgggcttccgtgtgtccaccctggggaccctgcagcccccaccggccccgccaaagaagatcatgcct

SEQ ID NO: 383240 - DNA, 120 bp, Artificial Sequence
  ENSG00000143847_33 (sequence is synthesized)
gaagctcactcccactatctctacggacacatgctctccgccttccgggactagccatggcccccagggctggcttcctccttctgggtttcacaggctcctctggccctgacccctctt

SEQ ID NO: 383241 - DNA, 120 bp, Artificial Sequence
  ENSG00000143847_34 (sequence is synthesized)
gctcgttccccttccttccgcagctcctagtctcgtccgtgactttccggttgccctggatctcagaatatattcgtccaccccctcggcaccccattaccccgagtcccaccgtgtgtc

SEQ ID NO: 383242 - DNA, 120 bp, Artificial Sequence
  ENSG00000143847_35 (sequence is synthesized)
cgttgtaagtccggtggatgtggctggggtttcctggtattgtggaggcacccaggttgtccatgcttgggattctgggggaaggagagaagggcagctcagggtggatgtgaagccacc

SEQ ID NO: 383243 - DNA, 120 bp, Artificial Sequence
  ENSG00000143847_36 (sequence is synthesized)
cttcctcttctggacccagcctggtctgcactgcaacctccaccaggaccaggatcctgggccacaggctgggatggtccttccaagaaagggtcatttcagacgcagccctgcttgggc

SEQ ID NO: 383244 - DNA, 120 bp, Artificial Sequence
  ENSG00000143847_37 (sequence is synthesized)
tattcaatcttagggtgtctatccacgtctggctgtgccaaatggtctggcagctggttttggcatccccagcatcaccactctcccaacccatcaccgtgactgcagttcctgccccca

SEQ ID NO: 383245 - DNA, 120 bp, Artificial Sequence
  ENSG00000143847_38 (sequence is synthesized)
ttctcttggggtcagggaggggctgggaagggctactgaaggccccattctcccacaggatggtgaggctgggaggaggaagactgaggtagagattccaggccctggcataagctgaat

SEQ ID NO: 383246 - DNA, 120 bp, Artificial Sequence
  ENSG00000143847_39 (sequence is synthesized)
cccaaatttgagtttgggaagaaccagagagaaatggatccctgagctctgagccaagggtgaggatggggaaactctaagctcccacctaataagaagcataggcagaccagccagagg

SEQ ID NO: 383247 - DNA, 120 bp, Artificial Sequence
  ENSG00000143847_40 (sequence is synthesized)
gagagccaatggcctctggtagccttaagcccaaagggcagtgggaatgtcccctgccccaaccatcgggtggagctcctgctgggctatggggaagggaggttgtgcggatcttgactc

SEQ ID NO: 383248 - DNA, 120 bp, Artificial Sequence
  ENSG00000143847_41 (sequence is synthesized)
tagggcagaacagatctaaccatgcattgctagctctgctcccagcatcccttccccttctctcctcctctgcctcacttctttagtaatcccaaccctataaaaatgaacctaatgggt

SEQ ID NO: 383249 - DNA, 120 bp, Artificial Sequence
  ENSG00000143847_42 (sequence is synthesized)
ggattgaatatacattgagcccaaagtcaagtttggggaaaaggcagactaaggcctcctttctctgacctcccaggaagaaaatagcttctcctacagtgattcatgtcccaggtccag

SEQ ID NO: 383250 - DNA, 120 bp, Artificial Sequence
  ENSG00000143847_43 (sequence is synthesized)
gaaatccaatgttggtgaaggcagccactctcttgcttgtccccaaatcacctaaccctcatccagggctattttggtgggcagggactgcctcctcccggaattcctaagatccgccca

SEQ ID NO: 383251 - DNA, 120 bp, Artificial Sequence
  ENSG00000143847_44 (sequence is synthesized)
gctgccaccattttcattgctttccccagcagcatgatgggaacccaagctgagggatacaggtcctgatttggtaggaatattattcccaagaaatacccgctcctcacctactccctc

SEQ ID NO: 383252 - DNA, 120 bp, Artificial Sequence
  ENSG00000143847_45 (sequence is synthesized)
atcctaccaaggtgcctgaaaatgttcaagacttatgttcagggtgggatgatggaaccgagggcttcatcaaagtgagaggaaaggaaaagcatctggcatgtgtttcttggatagggg

SEQ ID NO: 383253 - DNA, 120 bp, Artificial Sequence
  ENSG00000143847_46 (sequence is synthesized)
ccagtgcagtgccatcctacaggtggctggagcagctgctttgcaacctgatcaccttgagttctgagcagggactaggcttgcaggtgagataatgggccagggcacccagtccagaag

SEQ ID NO: 383254 - DNA, 120 bp, Artificial Sequence
  ENSG00000143847_47 (sequence is synthesized)
gagcaatggcacctgggcagtgccagggcttaaagcccgctgctccttttcggtagaggagaggcccatcactggtgtggtggggtgggctctcccttaggcttgggcaaggcagccacc

SEQ ID NO: 383255 - DNA, 120 bp, Artificial Sequence
  ENSG00000143847_48 (sequence is synthesized)
tgcccttgctctcccttagtgttccctggcctccctgccatcaggttgctgggagtggagatggagggattattgagcagaaaatgagttggatggagataaacagctcccatccctggg

SEQ ID NO: 383256 - DNA, 120 bp, Artificial Sequence
  ENSG00000143847_49 (sequence is synthesized)
taatggatggtaagatgatggagattcctaagattggtggagttgggcaatgcatagccatctgactccttcagggtgctcttgatgggctggctgtaagggagactcagtcccagcctc

SEQ ID NO: 383257 - DNA, 120 bp, Artificial Sequence
  ENSG00000143847_50 (sequence is synthesized)
tcccctctacaactcctgccactgttggccatgtcgtaaggcagcagctgtgccaggatagctgggtccattcagagcaccttgagaagtgttgcagggaggtgttaagaagagaactct

SEQ ID NO: 383258 - DNA, 120 bp, Artificial Sequence
  ENSG00000143847_51 (sequence is synthesized)
gtgcaaacagtgatggaaggctgttgtcttggtgtatcccttgcctcatagtcaatatattttttttttggcgagtcaccagtgacccgagccctccacaccagcctcctgtatctcatc

SEQ ID NO: 383259 - DNA, 120 bp, Artificial Sequence
  ENSG00000143847_52 (sequence is synthesized)
aggtcccttctcagtactgtatttgctcagtgcatcaggaatgggtgtatgggtgtgtgtgggtgggtgtgagtgtgggtgtgtacgtaccaataaacaacctggttttaagacaatgta

SEQ ID NO: 383260 - DNA, 120 bp, Artificial Sequence
  ENSG00000143847_53 (sequence is synthesized)
tttcccatcaatccatccccaggcccgctccctgactgagagggaggatatgggttagacagagaaagggagtaacctcgggatgggtcgcaggcaaggccctggggaaggaggagcatg

SEQ ID NO: 383261 - DNA, 120 bp, Artificial Sequence
  ENSG00000143847_54 (sequence is synthesized)
aggaggctggggtgctctttgtgctggaggcagtaggtctggacatgctgtggctgatgctggatgtgagacaggtggtgtgggaatgtggccccactgaggctctggcttgggggctgt

SEQ ID NO: 383262 - DNA, 120 bp, Artificial Sequence
  ENSG00000143847_55 (sequence is synthesized)
tgggccaggggcctgggatctgcctctgtcccccatgttctgagctctcagggagccaggcagggaagggagcgcgtgggaggcgcactgggccaggagccagaaaactgcttcccgccg

SEQ ID NO: 383263 - DNA, 120 bp, Artificial Sequence
  ENSG00000143847_56 (sequence is synthesized)
atgtctgagagccccaaggacgagggctccgaagagtgtctgtttctgcagcgcctatgggagtggggggcagtggggggaactcagggaagctgcctacaacttgaggccttccccagg

SEQ ID NO: 383264 - DNA, 120 bp, Artificial Sequence
  ENSG00000143847_57 (sequence is synthesized)
ctggaggaggaggacagggaaggccgaggggagctgtcctccggctgccatcaccctgatgaggcggccctgccccgggctgtggtctccgcaggggctggcaaccttgcctttgtccag

SEQ ID NO: 383265 - DNA, 120 bp, Artificial Sequence
  ENSG00000143847_58 (sequence is synthesized)
ctctctccgtggccaggcctgccatctgcctgcccacactcctccccggcaaagccccttgcaaatgcttgctttggggactggcagctttcgcctctgaatcaggacctagcatcagta

SEQ ID NO: 383266 - DNA, 120 bp, Artificial Sequence
  ENSG00000143847_59 (sequence is synthesized)
cgctactcggcattgagggaagagtctgccaagctggccctgcctttgacagtgaccctgagatctccgacgtggatgaggatgagccagggggtctgctgcaacttagagtaccacagt

SEQ ID NO: 383267 - DNA, 120 bp, Artificial Sequence
  ENSG00000143847_60 (sequence is synthesized)
cctgcccagtgacttaagaaagcataggaggaagctgctggacgctgcggctagagaagcttggccacccagccctgagccaggaagaaggcaagagtgccttggaggatcagggcagca

SEQ ID NO: 383268 - DNA, 120 bp, Artificial Sequence
  ENSG00000143847_61 (sequence is synthesized)
tggtggaggaatggggagtgttgggagagctgggcatcttgcctggctcccagtcaagcctgggaggtgtgtgtttttgccacacacacatttgccccacctcaacgcaaacatgggtgc

SEQ ID NO: 383269 - DNA, 120 bp, Artificial Sequence
  ENSG00000143847_62 (sequence is synthesized)
acacaccaaccttgtgttctctcttaaccatcctgacgagctttccccagtcacccagccagatactgggatgtctttttcctctccttgatggggcctagggtagagctgatgggtttc

SEQ ID NO: 383270 - DNA, 120 bp, Artificial Sequence
  ENSG00000143847_63 (sequence is synthesized)
attttctctggcttgtgtttctgacagtgttagggcctcctaaagcttcctaggcataggggtatgcctggcttgaattttaaccagggactcagtccagattatggggagacccgagga

SEQ ID NO: 383271 - DNA, 120 bp, Artificial Sequence
  ENSG00000143847_64 (sequence is synthesized)
aaagtgctgggtagaagaccaaaaaacaaagaccctcagagtgaaaagggcctctagacatcatcccttccaacatctcccagtgcctggagccctcctgcgccacgtgtgtcagatggc

SEQ ID NO: 383272 - DNA, 120 bp, Artificial Sequence
  ENSG00000143847_65 (sequence is synthesized)
cggagagcctctgctcgaatacctctttgatggggagctcaactttttaaaagccaccagttgcatcgtaagccaactcttgccattagaagatccttcttatgccagacggaaaaccgc

SEQ ID NO: 383273 - DNA, 120 bp, Artificial Sequence
  ENSG00000143847_66 (sequence is synthesized)
tctctggaactttctcccctggctcattctgacccctggagcaccagggcatacgtctgctctcttgcttacacggcagcccttcagacatttgtgacagctctgtgtcctgctaagatg

SEQ ID NO: 383274 - DNA, 120 bp, Artificial Sequence
  ENSG00000143847_67 (sequence is synthesized)
tctcttctctgagctgaagatcccttgactctttgggcccactgggtgtgagctgggggtctcagtcctcagggcctgtcttttctctcccccatcaccgctcaaggtcgcacatgggca

SEQ ID NO: 383275 - DNA, 120 bp, Artificial Sequence
  ENSG00000143847_68 (sequence is synthesized)
tggttggtgtccactgttgctaacttcatttatatgcttcataatgggcacattacatatagtcttatatgtatcagctattacattgtaaaagagaacaaaatagactttttctatctg

SEQ ID NO: 383276 - DNA, 120 bp, Artificial Sequence
  ENSG00000143847_69 (sequence is synthesized)
aaaacatcaagtaagggtaaggaaagagtgaggtagggtcgctatgaaaactaaagctttctcaagttgggtggtcacggagcaccctgcccaggtcaggaggccacgtccacatggcac

SEQ ID NO: 383277 - DNA, 120 bp, Artificial Sequence
  ENSG00000143847_70 (sequence is synthesized)
aggccctgcaggaccacacggcagggtgtgcgtgggaaagcaacagaggacctggagtgttcttggagcagaggctcaggccttagagaatgagtgctgctggctattcaggcacaggcc

SEQ ID NO: 383278 - DNA, 120 bp, Artificial Sequence
  ENSG00000143847_71 (sequence is synthesized)
accaccctttatttttttcagtcttctgccaacatttaacttccttgcttcctccatgaagccagccttgtcccggagtgagacaggcttcctttgccacgctgcaggtcctctgtaaca

SEQ ID NO: 383279 - DNA, 120 bp, Artificial Sequence
  ENSG00000143847_72 (sequence is synthesized)
cagcctctcccctgggctcagcgggcttgaggctcactgagagtcaggaaggcacgtctgctgcacaataccgcaaatgcaacccagagtcaacaggaaggatttcatattagctgctgc

SEQ ID NO: 383280 - DNA, 120 bp, Artificial Sequence
  ENSG00000143847_73 (sequence is synthesized)
cgggatagctacttctgttcattagtgtagataattgatatgtgagtggaaccgtatcatttcgagatcttaaaaagttccatttaaaatcctcacctcccaccactaccagccccctta

SEQ ID NO: 383281 - DNA, 120 bp, Artificial Sequence
  ENSG00000143847_74 (sequence is synthesized)
ttgaagataaactgaaattgtattggactgcccttcctccctcatgggtggaggatggattcatgtgtctcccgaccagctataccagcctcagcctgctggctctaccttcctccccca

SEQ ID NO: 383282 - DNA, 120 bp, Artificial Sequence
  ENSG00000143847_75 (sequence is synthesized)
cgctcctgcgctgcagctgcactaacgctccgcggggagcgtgtgtgcgcactaacccgccgctctgtgtgttctcccgcggctgccgacttctcccagctgggacggcggggtcgcaga

SEQ ID NO: 383283 - DNA, 120 bp, Artificial Sequence
  ENSG00000143847_76 (sequence is synthesized)
gactggagacctccacggttcggacctactcctgctgaccccccatcctcccgccccgggtctgacgggggagtgcccgtggctcggggtaagtgggccaggcccggggacgcgggcacc

SEQ ID NO: 383284 - DNA, 120 bp, Artificial Sequence
  ENSG00000143847_77 (sequence is synthesized)
ttgctgctggccctcggccccacgcacctgcccttggctgccggcctggccctgccgctccagtcccgcttaccagcactgcctggcttgccccttcctgcttcgtctggcctggggcgc

SEQ ID NO: 383285 - DNA, 120 bp, Artificial Sequence
  ENSG00000143850_0 (sequence is synthesized)
gcctgggaaagatgctggatcctgcagtaaccacaacagcatcctctccctgcgccagggacctgccagccggagagatgactgattagatcagattagatccggagccccgctctgcag

SEQ ID NO: 383286 - DNA, 120 bp, Artificial Sequence
  ENSG00000143850_1 (sequence is synthesized)
aagggggccccaggggcgggggaggaggaccccagctggcctgagctggggggaggggtgccttggggctcgcagagttagagctttccagcgcggggatcacacctcagaagccgccac

SEQ ID NO: 383287 - DNA, 120 bp, Artificial Sequence
  ENSG00000143850_2 (sequence is synthesized)
aatgaaagacggaacacatttctacacccagtgactggccaggtcccagaggaaaacaaaaaatttgacttgaaaatatcgaccttggacatgtccaataaaacaggtgggaaacgcccg

SEQ ID NO: 383288 - DNA, 120 bp, Artificial Sequence
  ENSG00000143850_3 (sequence is synthesized)
gctaccaccaacagtgacatacccaaccacaacatggtgtccgaggtccctccagagcggcccagcgtccgggcaactcgcacagcccgcaaagccgtcgcctttggcaagcgctcacac

SEQ ID NO: 383289 - DNA, 120 bp, Artificial Sequence
  ENSG00000143850_4 (sequence is synthesized)
tccatgaagcggaaccccaatgcacctgtcaccaaggcgggctggctcttcaaacaggccagctccggggttaagcagtggaacaagcgctggttcgtcctggtggatcgctgcctcttc

SEQ ID NO: 383290 - DNA, 120 bp, Artificial Sequence
  ENSG00000143850_5 (sequence is synthesized)
tactataaagatgagaaggaagagagtatcctgggcagcatccccctcctgagcttccgggtagccgcagtgcagccctcagacaacatcagccggaaacacacgtttaaggctgagcat

SEQ ID NO: 383291 - DNA, 120 bp, Artificial Sequence
  ENSG00000143850_6 (sequence is synthesized)
gccggggtccgcacctacttcttcagtgccgagagccccgaggagcaagaggcctggatccaggccatgggggaggctgctcgagtacagatccctccagcccagaagtcagtgccccaa

SEQ ID NO: 383292 - DNA, 120 bp, Artificial Sequence
  ENSG00000143850_7 (sequence is synthesized)
gctgtgcggcacagccatgagaagccagactcggagaacgtcccacccagcaagcaccaccagcagccaccccacaacagcctccctaagcctgagccagaggccaagactcgaggggag

SEQ ID NO: 383293 - DNA, 120 bp, Artificial Sequence
  ENSG00000143850_8 (sequence is synthesized)
ggtgatggccgaggctgtgagaaggcagagagaaggcctgagaggccagaagtcaagaaagagcctccggtgaaagccaatggcctcccagctggaccggagccagcctcagagccgggc

SEQ ID NO: 383294 - DNA, 120 bp, Artificial Sequence
  ENSG00000143850_9 (sequence is synthesized)
agcccttaccccgagggcccaagagtgccagggggtggggaacagcctgcccagcccaatggctggcagtaccactccccaagccggccagggagcacagctttcccgtctcaggatgga

SEQ ID NO: 383295 - DNA, 120 bp, Artificial Sequence
  ENSG00000143850_10 (sequence is synthesized)
gagactgggggacaccggcggagtttcccaccacgcaccaaccctgacaaaattgcccagcgcaagagctccatgaaccagcttcagcagtgggtgaatctgcgccggggggtacccccg

SEQ ID NO: 383296 - DNA, 120 bp, Artificial Sequence
  ENSG00000143850_11 (sequence is synthesized)
cctgaagaccttcggagtccctctaggttctatcctgtgtctcgcagggtccctgagtactatggcccctactcctcccagtaccccgatgattatcagtactacccgccaggagtgcgg

SEQ ID NO: 383297 - DNA, 120 bp, Artificial Sequence
  ENSG00000143850_12 (sequence is synthesized)
ccggagagcatctgttccatgccggcctatgatcggatcagcccgccctgggccctggaggacaagcgccatgccttccgcaatgggggtggccctgcctaccagctgcgagagtggaag

SEQ ID NO: 383298 - DNA, 120 bp, Artificial Sequence
  ENSG00000143850_13 (sequence is synthesized)
gagcccgccagctacgggcggcaggatgccaccgtctggatcccaagcccctcccggcagccagtctattatgatgagctggatgccgcctctagctccctgcgccgcctgtccctgcag

SEQ ID NO: 383299 - DNA, 120 bp, Artificial Sequence
  ENSG00000143850_14 (sequence is synthesized)
ccccgctcccactctgtgccccgctcacccagccagggctcctacagccgtgcccgcatttactcccctgtccgctcacccagtgcccgttttgagcggctgccacctcgcagtgaggac

SEQ ID NO: 383300 - DNA, 120 bp, Artificial Sequence
  ENSG00000143850_15 (sequence is synthesized)
atctatgctgaccctgctgcctatgtgatgaggcgatccatcagctcccccaaggtccctccatacccagaagtgttccgggacagcctccacacctacaagttaaacgagcaagacaca

SEQ ID NO: 383301 - DNA, 120 bp, Artificial Sequence
  ENSG00000143850_16 (sequence is synthesized)
gataagctgctgggaaaattgtgtgagcagaacaaggtggtgagggagcaggaccggctggtgcagcagctccgagctgagaaggagagcctggaaagtgccttgatggggacccaccag

SEQ ID NO: 383302 - DNA, 120 bp, Artificial Sequence
  ENSG00000143850_17 (sequence is synthesized)
gagctggagatgtttggaagccagcccgcctacccagaaaagctgcgacacaaaaaggattcactgcagaaccagctcatcaacatccgcgtggagctgtctcaggcgaccacggccctg

SEQ ID NO: 383303 - DNA, 120 bp, Artificial Sequence
  ENSG00000143850_18 (sequence is synthesized)
acaaacagcaccatagagtatgagcacctcgagtctgaggtctctgccctgcacgatgacctctgggagcagctcaatttggacacccagaatgaggtgctgaaccggcaaatccaaaag

SEQ ID NO: 383304 - DNA, 120 bp, Artificial Sequence
  ENSG00000143850_19 (sequence is synthesized)
gagatctggaggatccaggacgtgatggaggggctgaggaagaacaacccctcccggggcacggacaccgccaagcacagaggaggacttggcccctcagccacctacagctccaacagc

SEQ ID NO: 383305 - DNA, 120 bp, Artificial Sequence
  ENSG00000143850_20 (sequence is synthesized)
ccggccagccccctcagctctgccagcctcaccagccccctgagccccttttcactggtgtcgggctctcaggggtcccccaccaagcctggctccaacgagcccaaggcaaactatgaa

SEQ ID NO: 383306 - DNA, 120 bp, Artificial Sequence
  ENSG00000143850_21 (sequence is synthesized)
caaagcaagaaagacccccaccagacattgcccctggacacccccagagacatcagccttgtgcccaccaggcaagaggtagaggcagagaagcaggcagctctcaacaaagttggcgtt

SEQ ID NO: 383307 - DNA, 120 bp, Artificial Sequence
  ENSG00000143850_22 (sequence is synthesized)
gtgccccctcggacaaaatcgcccactgatgatgaggtgaccccatcagcagtggtaagaaggaatgccagtgggctcaccaatggactctcctcccaggaacgccccaagagtgctgtg

SEQ ID NO: 383308 - DNA, 120 bp, Artificial Sequence
  ENSG00000143850_23 (sequence is synthesized)
tttcctggcgaggggaaggtcaagatgagcgtggaggagcagattgaccgaatgcggcggcaccagagtggctccatgagggagaagcggaggagcctgcagctcccggccagcccggcc

SEQ ID NO: 383309 - DNA, 120 bp, Artificial Sequence
  ENSG00000143850_24 (sequence is synthesized)
cccgaccccagtccccggccagcctacaaagtggtgcgccgccaccgcagcatccatgaggtagacatctccaacctggaggcagccctgcgggcagaggagcctggcgggcatgcctac

SEQ ID NO: 383310 - DNA, 120 bp, Artificial Sequence
  ENSG00000143850_25 (sequence is synthesized)
gagacaccccgggaggaaattgcccggcttcgcaaaatggagctagagccccagcattatgacgtggacatcaataaggagctctccactccagacaaagtcctcatccctgaacggtac

SEQ ID NO: 383311 - DNA, 120 bp, Artificial Sequence
  ENSG00000143850_26 (sequence is synthesized)
attgacctggagcctgacactcccctgagccctgaggagttgaaggagaagcagaagaaggtggagaggatcaagacactcattgccaaatccagtatgcagaacgtggtgcccatcggc

SEQ ID NO: 383312 - DNA, 120 bp, Artificial Sequence
  ENSG00000143850_27 (sequence is synthesized)
gagggggactctgtggacgtgccccaggactcagagagccagctgcaggagcaggagaagcggattgaaatctcctgcgccctggcgaccgaggcctcccgcaggggccgcatgctgtct

SEQ ID NO: 383313 - DNA, 120 bp, Artificial Sequence
  ENSG00000143850_28 (sequence is synthesized)
gtgcaatgtgccaccccaagccctcccacctcccctgcttccccggctcctccagcaaaccccctgtcgtctgaatccccacggggcgccgacagcagctataccatgcgggtctgagct

SEQ ID NO: 383314 - DNA, 120 bp, Artificial Sequence
  ENSG00000143850_29 (sequence is synthesized)
ctgactgcaagccctggctgaggccaatgctgtgaagctccacagagccacattctgaagccgtcctctgcccacctgaggtcctggctccccaccctggccccctgcccctgcactccc

SEQ ID NO: 383315 - DNA, 120 bp, Artificial Sequence
  ENSG00000143850_30 (sequence is synthesized)
ctggagccatcactactcacaccgtggtcctgggccagggcctgagatgacagtggggagcaccatcctcattaatgtccaagtcacagggagcctcagccttgccctggctggggttgt

SEQ ID NO: 383316 - DNA, 120 bp, Artificial Sequence
  ENSG00000143850_31 (sequence is synthesized)
ggtgactccagtggaacattccctgatgggggacatgccgtggtggagaacacacctgtggctatcttatgtgaggactagaggtgaagaggagatggacactgcctctggagccagcct

SEQ ID NO: 383317 - DNA, 120 bp, Artificial Sequence
  ENSG00000143850_32 (sequence is synthesized)
gacaccaaggacagcacttgtcatcatccctatcctcgtcagccccaccctactgcctcagctggacccagggctttgacacaaacccagtgctttgcttatgggtgctcgctggggtcc

SEQ ID NO: 383318 - DNA, 120 bp, Artificial Sequence
  ENSG00000143850_33 (sequence is synthesized)
ggtggagactgaccaccctgcttgagccaaagacaaggtgatgagagatggggagaggccattggctcccagagggaacagtgctggctgtggctagagaacagcaggtctgtgcagtgt

SEQ ID NO: 383319 - DNA, 86 bp, Artificial Sequence
  ENSG00000143850_34 (sequence is synthesized)
ctcagagtggaaggagggggaagcagcaggacacattggcaagtcaagcaggaaggagggagatggaaaggggatatcagattggt

SEQ ID NO: 383320 - DNA, 120 bp, Artificial Sequence
  ENSG00000143850_35 (sequence is synthesized)
agcaggaaggagggagatggaaaggggatatcagattggtttcccccggtggagccttaggttagtgcccagtgcagtgccagactgtctcctctgctcctcccacctcatccctaggag

SEQ ID NO: 383321 - DNA, 120 bp, Artificial Sequence
  ENSG00000143850_36 (sequence is synthesized)
gacccaccagtggagcacatgcagcctcagtggagatgcttggtgtggggatctgggtgaagggggttgagtagcgactgcctgggagatggctgttagtaggtctgtgcctggtgtctg

SEQ ID NO: 383322 - DNA, 120 bp, Artificial Sequence
  ENSG00000143850_37 (sequence is synthesized)
cctcgccatcctggggtaaggggcagagagaaggacttgtcttatgtagggtgtggtcagccttggggccttacctacccagttccatgatatttcttgccctgttccccctggaatgtg

SEQ ID NO: 383323 - DNA, 120 bp, Artificial Sequence
  ENSG00000143850_38 (sequence is synthesized)
cagtgggccagctgagagtacgccttgaggaggggggatgaggccttaatctgggaggcctatccccctatcccaggcatcccagacgaggactggctgaggctaggcgctctcatgatc

SEQ ID NO: 383324 - DNA, 120 bp, Artificial Sequence
  ENSG00000143850_39 (sequence is synthesized)
cacctgccccgggagggcagcggggaagacagagaaaagcaaacgcattcctcctcagctccacccacctggagacgaatgtagccagagaggaggaaggagggaaactgaagacaccgt

SEQ ID NO: 383325 - DNA, 120 bp, Artificial Sequence
  ENSG00000143850_40 (sequence is synthesized)
ggcccctcggccttctctctgctagagttgccgctcagaggcttcagcctgacttccagcggtcccaagaacacctactaattcctctgcactccttcatggctgggacagttactggtt

SEQ ID NO: 383326 - DNA, 120 bp, Artificial Sequence
  ENSG00000143850_41 (sequence is synthesized)
catatgcaagtaaagatgacaatttactcaacaaatatttatcgagcaccttttatgtaccaggcactgttgtaggtgcttaggatattctcatgtttctgagggattacagcctgggag

SEQ ID NO: 383327 - DNA, 120 bp, Artificial Sequence
  ENSG00000143850_42 (sequence is synthesized)
gattccaccgatcttcacttctagcaggttttttaaacgtgacccttggctgtatttcccatcttcacagttcaagcaccccaaacctgccctttctcccctgcagactggcaggtggga

SEQ ID NO: 383328 - DNA, 120 bp, Artificial Sequence
  ENSG00000143850_43 (sequence is synthesized)
ttggctcccaggtcatttcctctctctctctttctcccaagcctttctccctccacaggaaacagatttttcagggccttccatgcctgccactttgtccgtctctttttttttttttaa

SEQ ID NO: 383329 - DNA, 120 bp, Artificial Sequence
  ENSG00000143850_44 (sequence is synthesized)
agtaatattttttagaaatacatgtaaaataccaagaaataatgtctgcgcctctgccacctctctctcatctcttatttcataaagctggctctttatgttgctttacatgccttaata

SEQ ID NO: 383330 - DNA, 120 bp, Artificial Sequence
  ENSG00000143850_45 (sequence is synthesized)
tatgttttatggagattatacatattatagatctatatatgtaatatatttgtttggatgtctgatcttttcctacagttcctgcccaggcctgtttttctctcccttattttccacatc

SEQ ID NO: 383331 - DNA, 120 bp, Artificial Sequence
  ENSG00000143850_46 (sequence is synthesized)
attcctagcatatcaagaccataccccttgcctttttgatccaaagaaggggagaggaaagacttattttaagacatctattttatgcttttgtttaaaaaaagcaaatctattttcaaa

SEQ ID NO: 383332 - DNA, 120 bp, Artificial Sequence
  ENSG00000143850_47 (sequence is synthesized)
ttgtgcaatgtctgaatggaattggcaaatgaggtgaggagatggggtaactgcctttaggtcccaaccctgtgcctgtccctctgccacagtggcttccttccatcctattccccagtc

SEQ ID NO: 383333 - DNA, 120 bp, Artificial Sequence
  ENSG00000143850_48 (sequence is synthesized)
acgaaagggctggtccccagagctcacccagaaagcatcttgccgggggcagggcattccctcggaagtcctggcctaaggattttattacactgtctgctcctgatgaccctctgcggt

SEQ ID NO: 383334 - DNA, 120 bp, Artificial Sequence
  ENSG00000143850_49 (sequence is synthesized)
tgtcaggcgtgaatcctctggaaggaactgtttgcagttgtatgcacaaaggagacccatgcaggcatgcaccccagatgggctgctagactacccctcttcatcagcctgctggaaaga

SEQ ID NO: 383335 - DNA, 120 bp, Artificial Sequence
  ENSG00000143850_50 (sequence is synthesized)
gcagacagcgtaacagcagcctatgccaaacagcactaaggatgtcagtgtacgagacggtgcgaagcccagaggaggcggcttgggatcctctgggccatccctggccctgtagcacag

SEQ ID NO: 383336 - DNA, 120 bp, Artificial Sequence
  ENSG00000143850_51 (sequence is synthesized)
acacatacaagttccttggacttgtcacactccttttcacttgatccctctctggcctgggtcacatttatgacatcccccctctgcaacctttctctctgggggctgtaccaaaggcat

SEQ ID NO: 383337 - DNA, 120 bp, Artificial Sequence
  ENSG00000143850_52 (sequence is synthesized)
ggtacctcagtctggtatccagactgtgaaatcagcctctgggccaaggagggtcctacagacaaggtggcatctcaacctcacccaagaaacccccgggactttaccccagcaggctgc

SEQ ID NO: 383338 - DNA, 120 bp, Artificial Sequence
  ENSG00000143850_53 (sequence is synthesized)
cactggggcaccgaactaagccagctcagccttccaagctgcttagcctttgtcaaccatcaaagtggggaaagggtctctggccttgcaaggatttgggcaggatggaagtctttgtct

SEQ ID NO: 383339 - DNA, 120 bp, Artificial Sequence
  ENSG00000143850_54 (sequence is synthesized)
aggtctgaaatcaagggcttgggaatctagagcagagctcctggccagcgtttgaagcctggcctcccacctggggcatttactgacaccctgtcgccagcctagaacatcctgctctga

SEQ ID NO: 383340 - DNA, 120 bp, Artificial Sequence
  ENSG00000143850_55 (sequence is synthesized)
atgaacagagcccagatgggggtccagagctaagtgacccacctggggaagctctgattattcatccagggccttctcaatgagcacattacctccatgatcaataaccaagaggctgca

SEQ ID NO: 383341 - DNA, 120 bp, Artificial Sequence
  ENSG00000143850_56 (sequence is synthesized)
gtcaaatactgctactgtcactttgaagattttctaagggcacaagtggcacacttgctctccggcctttgggagaggcatgttcttgggcagggctggctacggcaagagggaaccaat

SEQ ID NO: 383342 - DNA, 120 bp, Artificial Sequence
  ENSG00000143850_57 (sequence is synthesized)
tggctacggcaagagggaaccaattcctttcccctttaggcaccctctacctggcagctcttaaaactaagaaaaaatatgatatacacacacattatatatatatatatatatacacac

SEQ ID NO: 383343 - DNA, 120 bp, Artificial Sequence
  ENSG00000143850_58 (sequence is synthesized)
atttatgcacatattggggccaatttgatttgctagtattagacaataaactgtacaaggaaatttattatctcagtgtctttatttagcataaaagtggccttagaagaagggtgaagg

SEQ ID NO: 383344 - DNA, 120 bp, Artificial Sequence
  ENSG00000143850_59 (sequence is synthesized)
ttagatagatggaatctctgtcaggggacaaacagctgtagcatccccttagcatctttctagccaatgagccccctccccaggaggagggatggcctgactgaaacaggtgagagtttg

SEQ ID NO: 383345 - DNA, 120 bp, Artificial Sequence
  ENSG00000143850_60 (sequence is synthesized)
cttccccctttcagcagcattctttttagatttaggtactgaagaatcccagtgagttctgcatttgtatcttgcaagtttgtataaacccaatacaggaaataaaatgaatggtttgta

SEQ ID NO: 383346 - DNA, 120 bp, Artificial Sequence
  ENSG00000143850_61 (sequence is synthesized)
gattacctgggagacaggcggccagtccctgcaggactgttcccctacaactacccaccatcccccacggtccacgataagatggatgaacttttagatcttcagttgcaaagaaaccta

SEQ ID NO: 383347 - DNA, 120 bp, Artificial Sequence
  ENSG00000143850_62 (sequence is synthesized)
gagtatttggatcagcagatgagtgagagcgagactctcatcagtatggtgaaccgcatggtggaaaactcctcccccaggtcccaactcttcatgcaagtccctccatacccagaagtg

SEQ ID NO: 383348 - DNA, 120 bp, Artificial Sequence
  ENSG00000143850_63 (sequence is synthesized)
gtcgtcttctgtctctccctttggtgtttggttgacctgttctctgcttctcctccttctgaccgcgtgaggacccctcctctggacaggagctctcttctgggttcccgcccgcagtac

SEQ ID NO: 383349 - DNA, 120 bp, Artificial Sequence
  ENSG00000143850_64 (sequence is synthesized)
atgtgaagacaaaatggaataatatagaaagccagaggaactgaaacgtgatatcaaaaagaacatcttggcaggataagatagcagtgggtctggagcctcctttgctagaactcttta

SEQ ID NO: 383350 - DNA, 120 bp, Artificial Sequence
  ENSG00000143850_65 (sequence is synthesized)
cagaaaaccaaggaacttaatgaggattgattggagaacaggcttgcctagaagcagggggatggcagcgatgaccttcggaaggcccttgcagtccaaggatcctaagacatgaaggac

SEQ ID NO: 383351 - DNA, 120 bp, Artificial Sequence
  ENSG00000143850_66 (sequence is synthesized)
attaggaaaggggggagcgctgaccatctttagccgctgaagaattcaggggaattaacatcgatacaaacctccttgcttctgagcagatctgacagtccccagctggaatgtatcatc

SEQ ID NO: 383352 - DNA, 120 bp, Artificial Sequence
  ENSG00000143850_67 (sequence is synthesized)
tcgtgtctgggaagattttcagccataaacacacagtgaccccctctcaagccccatttgctgccctcttccttgcaagccttgagaggaagctctcctttaatattgcctgagcagccc

SEQ ID NO: 383353 - DNA, 120 bp, Artificial Sequence
  ENSG00000143850_68 (sequence is synthesized)
catcctagccaccagctctggttccacagcatccacgcccatctggtcgacttgcttctcatcggtaggactgccacacagggagggaaagcaaccccgtgctgtctgaggggagcaagt

SEQ ID NO: 383354 - DNA, 120 bp, Artificial Sequence
  ENSG00000143850_69 (sequence is synthesized)
cggagggacaggggcagaggaccttcattcattatgctcctgtccacacagaagaaggctgggcaggctgaccgaagagaagggagaactgctcaatcaatctcagcttctcagcagcgg

SEQ ID NO: 383355 - DNA, 120 bp, Artificial Sequence
  ENSG00000143850_70 (sequence is synthesized)
cagcaataacagcagatgaatcgggagcttcatttaacccttatgcccacaggatctgaaggatctctgagaagcaagttgattttcagctcaggagcctgtattgtgggttgagaattg

SEQ ID NO: 383356 - DNA, 120 bp, Artificial Sequence
  ENSG00000143850_71 (sequence is synthesized)
gggaggcaggaggactgtctccctacaggtcgggctggcatgggtttcagccgtgcagatgggaatgcagccccagactccttcacccgtccagctactctgcgtccttagctcactgag

SEQ ID NO: 383357 - DNA, 120 bp, Artificial Sequence
  ENSG00000143850_72 (sequence is synthesized)
gtcggactacctgggagtgctacacctgctccgtgtatgcctgtctctccatttcagcattttctccttggggtgctgaatggggaggatatcatcccctccttgtttattctgcctcca

SEQ ID NO: 383358 - DNA, 120 bp, Artificial Sequence
  ENSG00000143850_73 (sequence is synthesized)
gtcctctgaccagtagcattctggccgaataccaggaagccacaggcctactagggcacctaggcgacccctaccaccacccaaggagagtgccctcctggttctccagagccagagcca

SEQ ID NO: 383359 - DNA, 120 bp, Artificial Sequence
  ENSG00000143850_74 (sequence is synthesized)
atggccgatgagattgactggctggacctgcccggccggtgggcctacggagttgacggcggtgggagaatcttcttcatcaatgatgaggaaaagtcaaccagctgggtgcaccctgga

SEQ ID NO: 383360 - DNA, 120 bp, Artificial Sequence
  ENSG00000143851_0 (sequence is synthesized)
aaaaggaggcgtgcagcgagcatgaaccggctgggctgctggcccgcaaggagcctgccaaggtcaggcaggggcagtgggcagaggagtcttggacttgggggccacccttcaggtccc

SEQ ID NO: 383361 - DNA, 120 bp, Artificial Sequence
  ENSG00000143851_1 (sequence is synthesized)
aggcatccaggcaccccagcagcgaagaggacatgggagtcccctggtgtgagggccagagactgtccactgtctgtaagtcttctaagtagatgtcagggttctgggaggaggcctgca

SEQ ID NO: 383362 - DNA, 120 bp, Artificial Sequence
  ENSG00000143851_2 (sequence is synthesized)
gggggctgagggcccaggggaagcccctcggactccctcccacaagtggactctgctatctgcttcctgctgggctggcctacactcaggccgtgggctgtggagagctgggccgtggca

SEQ ID NO: 383363 - DNA, 120 bp, Artificial Sequence
  ENSG00000143851_3 (sequence is synthesized)
caggcgtggagacgacctttttggcctggccccggccctttccttcacattgtgaggcatggattcttgcttcttctttttccccaccccgagtctgtgccacatctgctctgggaagat

SEQ ID NO: 383364 - DNA, 120 bp, Artificial Sequence
  ENSG00000143851_4 (sequence is synthesized)
gtggtctgtgcttggccatgaattcccaaggcttgaagcagcaagggctttgagggagagggccttgagggagagggccttgagggagagggctgtggggcagaagcagagaaggagaaa

SEQ ID NO: 383365 - DNA, 120 bp, Artificial Sequence
  ENSG00000143851_5 (sequence is synthesized)
taagcctccggccaaggtcaggttgagcaggagagccttgggttctttgtgggacagcacagagctgggggtcaggcgagctgtgcccagcaagtaggcagcggctggatgtgacaaaga

SEQ ID NO: 383366 - DNA, 120 bp, Artificial Sequence
  ENSG00000143851_6 (sequence is synthesized)
cccagaggagaaacacagaagaggggagagggtctggaagctggggaaagcaggatggtcgggaaggcctggcccctcacccattcccagggaacggggccttgggccccagaagggcac

SEQ ID NO: 383367 - DNA, 120 bp, Artificial Sequence
  ENSG00000143851_7 (sequence is synthesized)
aggcgggaggcagccgacccctggtggcagcggcagcaggcacaggagggcagaatgcagctggggtgtgcgtgggtggcagcaaggaggggcggagggaggaagctggcttcctggagc

SEQ ID NO: 383368 - DNA, 120 bp, Artificial Sequence
  ENSG00000143851_8 (sequence is synthesized)
cttctcagccctcaaagacagaccgacagacagacagacagctggcaagaggcagcctgggggccacagctgcttcagcagacctcatggctgagtgagcctcccctgggcccagcaccc

SEQ ID NO: 383369 - DNA, 120 bp, Artificial Sequence
  ENSG00000143851_9 (sequence is synthesized)
cacctcagcatggtccaagcccatggggggcgctccagagcacagccgttgaccttgtctttgggggcagccatgacccagcctccgcctgaaaaaacgccagccaagaagcatgtgcga

SEQ ID NO: 383370 - DNA, 120 bp, Artificial Sequence
  ENSG00000143851_10 (sequence is synthesized)
ctgcaggagaggcggggctccaatgtggctctgatgctggacgttcggtccctgggggccgtagaacccatctgctctgtgaacacaccccgggaggtcaccctacactttctgcgcact

SEQ ID NO: 383371 - DNA, 120 bp, Artificial Sequence
  ENSG00000143851_11 (sequence is synthesized)
gctggacacccccttacccgctgggcccttcagcgccagccacccagccccaagcaactggaagaagaattcttgaagatcccttcaaactttgtcagccccgaagacctggacatccct

SEQ ID NO: 383372 - DNA, 120 bp, Artificial Sequence
  ENSG00000143851_12 (sequence is synthesized)
ggccacgcctccaaggaccgatacaagaccatcttgccaaatccccagagccgtgtctgtctaggccgggcacagagccaggaggacggagattacatcaatgccaactacatccgaggc

SEQ ID NO: 383373 - DNA, 120 bp, Artificial Sequence
  ENSG00000143851_13 (sequence is synthesized)
tatgacgggaaggagaaggtctacattgccacccagggccccatgcccaacactgtgtcggacttctgggagatggtgtggcaagaggaagtgtccctcattgtcatgctcactcagctc

SEQ ID NO: 383374 - DNA, 120 bp, Artificial Sequence
  ENSG00000143851_14 (sequence is synthesized)
cgagagggcaaggagaaatgtgtccactactggcccacagaagaggaaacctatggacccttccagatccgcatccaggacatgaaagagtgcccagaatacactgtgcggcagctcacc

SEQ ID NO: 383375 - DNA, 120 bp, Artificial Sequence
  ENSG00000143851_15 (sequence is synthesized)
tcggcctggccagaccatcagacaccagaatcagctgggcccctgctgcgcctagtggcagaggtggaggagagcccggagacagccgcccaccccgggcctatcgtagtccactgcagt

SEQ ID NO: 383376 - DNA, 120 bp, Artificial Sequence
  ENSG00000143851_16 (sequence is synthesized)
gcagggattggccggacgggctgcttcatcgccacgcgaattggctgtcaacagctgaaagcccgaggagaagtggacattctgggtattgtgtgccaactgcggctagacagagggggg

SEQ ID NO: 383377 - DNA, 120 bp, Artificial Sequence
  ENSG00000143851_17 (sequence is synthesized)
atgatccagacggcagagcagtaccagttcctgcaccacactttggccctgtatgcaggccagctgcctgaggaacccagcccctgacccctgccaccctccggtggcccaggtgcctac

SEQ ID NO: 383378 - DNA, 120 bp, Artificial Sequence
  ENSG00000143851_18 (sequence is synthesized)
ctccctcaagcctgggaaggtgggtctggggaaagtgggccgagtgatctgggggtaccccttgggttggtgtggggaaggagtgcctccttagtggtgcttgcagtcacaggaagcagc

SEQ ID NO: 383379 - DNA, 120 bp, Artificial Sequence
  ENSG00000143851_19 (sequence is synthesized)
agcagtaaggacaaggggccggattccaggtcttcaacactggccactcctctgcttcctctgttggccccagatggacagtaaggggaacctccaatgtctctctgaacttaaagacag

SEQ ID NO: 383380 - DNA, 120 bp, Artificial Sequence
  ENSG00000143851_20 (sequence is synthesized)
gagctggcatttatgacagacaaagaaagaagcccaggtgtcctggtgttctctgagacactctttgtgagcttcagtttcctgttctataacatgaacataagtgcttagctgccatga

SEQ ID NO: 383381 - DNA, 120 bp, Artificial Sequence
  ENSG00000143851_21 (sequence is synthesized)
gggaaaagtaatgagagaagtttctagaagccactccagccactccttcctggggctgacaaaagggtgattccaagatcatccttcacccgaggtcctgcccaagcacaggccagatgc

SEQ ID NO: 383382 - DNA, 120 bp, Artificial Sequence
  ENSG00000143851_22 (sequence is synthesized)
aagaatggggaaaagtctggtcctgatctccaagtctcaacatcctatcagtgactctgctccctgaccacacatcggaagggctggatgaccccaatcaaaagaaagaacaaggactct

SEQ ID NO: 383383 - DNA, 120 bp, Artificial Sequence
  ENSG00000143851_23 (sequence is synthesized)
ggttacccttgcctccacccatgtgtcataagagtaggctacagaggtgaccaggcctggcagttgaaatctctggaagagggaacatgtggggactactcagaggcaaagaggagctgc

SEQ ID NO: 383384 - DNA, 120 bp, Artificial Sequence
  ENSG00000143851_24 (sequence is synthesized)
tcctgcctccatggttgctggccactcccaccaactactcttagggaggctaagcagtctctgttttgcttccatggctcaaataataccctgggtatgcaggacccactataccttgca

SEQ ID NO: 383385 - DNA, 120 bp, Artificial Sequence
  ENSG00000143851_25 (sequence is synthesized)
tttgctgagtacacctagagagcttggctgtttccaaaaacaatcagggtcataaccatccatgcagacatggaggctcggctgaaccaggactcctcactgtctacctgagagaatgag

SEQ ID NO: 383386 - DNA, 120 bp, Artificial Sequence
  ENSG00000143851_26 (sequence is synthesized)
cacccctcatccatctcagcatcaacacaatttccaggggacctcaggtctacctcaggactgaacgccacacctcaggattcctcctccttgaatctgagactggctgcccattctgag

SEQ ID NO: 383387 - DNA, 120 bp, Artificial Sequence
  ENSG00000143851_27 (sequence is synthesized)
atggggatgaaggtaagatgccgcatcaccaggcacgccgcccctgacagctgccttgataccagctctctgtggaaacccccgaggagttggatctggagaacagctgggcctcctcac

SEQ ID NO: 383388 - DNA, 120 bp, Artificial Sequence
  ENSG00000143851_28 (sequence is synthesized)
tcaggacttctctcctgaagaacacgcagtgctaaaactgaggatgatttccctaatgcttctgcttggccttatggaggagctgctccttccttacagccttggggatggacttgccca

SEQ ID NO: 383389 - DNA, 120 bp, Artificial Sequence
  ENSG00000143851_29 (sequence is synthesized)
cacctccacctcccctgagccctgtgagaggcacgactgtctatgccaatgaggctcggtggggggctctcaagtgcctgatcctgccctgggctcagagccagcccagagggaagcaac

SEQ ID NO: 383390 - DNA, 120 bp, Artificial Sequence
  ENSG00000143851_30 (sequence is synthesized)
tgcacagccccacaggccctccctggcactgtccccccaaccccatctcagagctcagagggtacaagctccagaacagtaaccaagtgggaaaataaagacttcttggatgactgactc

SEQ ID NO: 383391 - DNA, 120 bp, Artificial Sequence
  ENSG00000143851_31 (sequence is synthesized)
ccagaaacagacctgggagtggaacagcagcagttaggagaggaccctgctggggtccaggagcccgcctgcctggctgcccaaccagctccaacactgctggaggcctccattctctgt

SEQ ID NO: 383392 - DNA, 120 bp, Artificial Sequence
  ENSG00000143851_32 (sequence is synthesized)
tcaggggaaggcccactggttagctcagagatggcttctgcgtgctttctcccttccgtcctagagaacacatattttctgtttcctcccttgccttctcccacttggacctgctcagag

SEQ ID NO: 383393 - DNA, 120 bp, Artificial Sequence
  ENSG00000143851_33 (sequence is synthesized)
ccctgtgtactctggtgtgtggcctctctcccctctctcttttcctccttctggattctttcctatcttcatccacaatctctaccctttatcttgccgttactctaccccgagactgcc

SEQ ID NO: 383394 - DNA, 120 bp, Artificial Sequence
  ENSG00000143851_34 (sequence is synthesized)
ttctgccctgggtcccaccaaatagatcctgtccttcccttagtgaaaatgaggccacctcttggggaacagaagacgccccagtgaaaacagagtgcaaacctggcctggcatgggagc

SEQ ID NO: 383395 - DNA, 120 bp, Artificial Sequence
  ENSG00000143851_35 (sequence is synthesized)
cctctgtatcagaggcagccagctggaaccattctctcacgggcaccctgggcaagtctcccctttgggccccttaggaaagagaacttcagggctgagggaggggctgcccccaggctt

SEQ ID NO: 383396 - DNA, 120 bp, Artificial Sequence
  ENSG00000143851_36 (sequence is synthesized)
aaagacagaccgacagacagacagacagctggcaagaggcagcctgggggccacagctgcttcaggccctgtctttcaggcagacctcatggctgagtgagcctcccctgggcccagcac

SEQ ID NO: 383397 - DNA, 120 bp, Artificial Sequence
  ENSG00000143851_37 (sequence is synthesized)
ggaggaagctggcttcctggagccttctcagccctcaaagacagaccgacagacagacagacagctggcaagaggcagcctgggggccacagctgcttcaaagatcccttcaaactttgt

SEQ ID NO: 383398 - DNA, 120 bp, Artificial Sequence
  ENSG00000143851_38 (sequence is synthesized)
gagatcttccctgggggaggggtcttccgagccctgagcccccattccgctcctcccttccttccatctgcccctccagctctgacagcagggtccagagggccctcagttgttgactcc

SEQ ID NO: 383399 - DNA, 120 bp, Artificial Sequence
  ENSG00000143851_39 (sequence is synthesized)
aatttggaaaggaaaccagtagtgctcatttgcatgtcttttgcatgtctggagcacagagtttcatatcaaccatgagcctgctccctaaattccaggcaaggcccacagccttcttgg

SEQ ID NO: 383400 - DNA, 86 bp, Artificial Sequence
  ENSG00000143851_40 (sequence is synthesized)
tctcctgagtccaggaattagagaccggcctaggcaatatagtgagacctcctctctctcaaaaaaaaaaaaaaaaagagggcaca

SEQ ID NO: 383401 - DNA, 120 bp, Artificial Sequence
  ENSG00000143851_41 (sequence is synthesized)
acctcctctctctcaaaaaaaaaaaaaaaaagagggcacacagcaggggcccaaaccctaaatttactgggctaccaggttaaaggaaagataaagagcggccccctcagaggtgcctta

SEQ ID NO: 383402 - DNA, 71 bp, Artificial Sequence
  ENSG00000143851_42 (sequence is synthesized)
taaaggaaagataaagagcggccccctcagaggtgccttataacagtaatacttgtaagaaaagcaaatat

SEQ ID NO: 383403 - DNA, 120 bp, Artificial Sequence
  ENSG00000143851_43 (sequence is synthesized)
cagcctgagcaacagaacaagacactgtctctccaaaaaaaaaaaaaacttaaattagccaggtgtggtagcatgtacctgtggtcccagttactctggaggctgaggtgggaggattgc

SEQ ID NO: 383404 - DNA, 83 bp, Artificial Sequence
  ENSG00000143851_44 (sequence is synthesized)
cagaacaagacactgtctctccaaaaaaaaaaaaaacttaaattagccaggtgtggtagcatgtacctgtggtcccagtagga

SEQ ID NO: 383405 - DNA, 120 bp, Artificial Sequence
  ENSG00000143851_45 (sequence is synthesized)
gtttgaggctgctgtgagccataatagtgccatcacactccagacctgggcaacagagagagaccctatctctaaaagaaaagataaaaagaaaagaaaagcaaatatgattgggtgctc

SEQ ID NO: 383406 - DNA, 120 bp, Artificial Sequence
  ENSG00000143851_46 (sequence is synthesized)
accatcaagcactcctgcaagaaaggaagaaaccctttctgcttagagctgtttattttacaactaacaaccaggaaaaaatatctatctggatggccgggtgcggtggctcacacctgt

SEQ ID NO: 383407 - DNA, 120 bp, Artificial Sequence
  ENSG00000143858_0 (sequence is synthesized)
atagagagagggagagactcgagagcgagcgagcgcgggagcgagggccgcagcggcagggccggcggggaagtgggaagagggacctggacttcgggaccccagctgtccccgcccccg

SEQ ID NO: 383408 - DNA, 120 bp, Artificial Sequence
  ENSG00000143858_1 (sequence is synthesized)
cccccgcccccgccctctccaccagctcaggctgaacgcgcccggaacgtcccaggctgtttcctctgccaccatgaggaacattttcaagaggaaccaggagcctattgtggctcctgc

SEQ ID NO: 383409 - DNA, 120 bp, Artificial Sequence
  ENSG00000143858_2 (sequence is synthesized)
caccaccaccgccacgatgcccattggacccgtggacaactccactgagagtgggggtgctggggagagccaggaggacatgtttgccaaactgaaggagaagttattcaatgagataaa

SEQ ID NO: 383410 - DNA, 120 bp, Artificial Sequence
  ENSG00000143858_3 (sequence is synthesized)
caagattcccttaccaccctgggcactgatcgccattgctgtggttgctgggctcctgcttctcacctgctgcttctgcatctgcaagaaatgctgctgcaagaagaagaagaacaagaa

SEQ ID NO: 383411 - DNA, 120 bp, Artificial Sequence
  ENSG00000143858_4 (sequence is synthesized)
ggagaagggcaaaggcatgaagaatgccatgaacatgaaggacatgaaagggggtcaggatgacgacgacgcagagacaggcctgactgagggggaaggtgaaggggaggaggagaaaga

SEQ ID NO: 383412 - DNA, 120 bp, Artificial Sequence
  ENSG00000143858_5 (sequence is synthesized)
gccagagaacctgggcaaactgcagttttccctggactatgattttcaggctaatcagcttactgtgggcgttctgcaggctgctgaactgcctgccctggacatgggaggcacctcaga

SEQ ID NO: 383413 - DNA, 120 bp, Artificial Sequence
  ENSG00000143858_6 (sequence is synthesized)
cccttatgtcaaggtcttcctccttcctgacaagaagaagaaatatgagaccaaagtccatcggaagacactgaaccctgccttcaatgaaaccttcaccttcaaggtgccataccagga

SEQ ID NO: 383414 - DNA, 120 bp, Artificial Sequence
  ENSG00000143858_7 (sequence is synthesized)
gcttgggggcaaaactctggtgatggccatctatgactttgaccgcttctccaaacatgacatcattggagaggtaaaggtgcctatgaacacagtggacctcggccagcccattgagga

SEQ ID NO: 383415 - DNA, 120 bp, Artificial Sequence
  ENSG00000143858_8 (sequence is synthesized)
gtggagagacctgcaaggcggggaaaaggaggagccggagaagctgggcgacatctgcacctccctgcgctatgtgcccacggccgggaagctcactgtctgcatcctggaggctaagaa

SEQ ID NO: 383416 - DNA, 120 bp, Artificial Sequence
  ENSG00000143858_9 (sequence is synthesized)
cctcaagaagatggacgtgggcggcctttcagacccgtacgtgaagatccacctgatgcagaatggcaagaggctcaagaagaagaagacaaccgtgaagaagaagaccctgaacccata

SEQ ID NO: 383417 - DNA, 120 bp, Artificial Sequence
  ENSG00000143858_10 (sequence is synthesized)
cttcaacgagtccttcagctttgagatccccttcgagcagattcagaaagtccaggtagtggtcaccgtgctggactatgacaagctgggcaagaacgaagccataggcaagatcttcgt

SEQ ID NO: 383418 - DNA, 120 bp, Artificial Sequence
  ENSG00000143858_11 (sequence is synthesized)
gggcagcaatgccacgggcacagagctgcggcactggtccgacatgctggccaacccccggaggcccatcgcccagtggcactcgctcaagcctgaggaggaggtggatgcactcctggg

SEQ ID NO: 383419 - DNA, 120 bp, Artificial Sequence
  ENSG00000143858_12 (sequence is synthesized)
caagaacaagtagacagcagcggctgggaccccacacctttcacggacactgacaagatccagagctatcaatacctcagttatgcaaccttagaggttttcttttttctttcatttgtt

SEQ ID NO: 383420 - DNA, 120 bp, Artificial Sequence
  ENSG00000143858_13 (sequence is synthesized)
gggtggttgtgtccttgtttttccttgtttttctctttttaaagaccaacttccctttgatggctgtgtgaggagagtcccctaagaggtgaaagagaagcctggctctgttcacggtcc

SEQ ID NO: 383421 - DNA, 120 bp, Artificial Sequence
  ENSG00000143858_14 (sequence is synthesized)
caggagctgtccttgctgcatgccctgtcacagttccctcgactctttcaaagcttcacatctgcctcaccccaagcgaggctctctactggcacaaacttgcagcagttcctgtttttt

SEQ ID NO: 383422 - DNA, 120 bp, Artificial Sequence
  ENSG00000143858_15 (sequence is synthesized)
aacttgcagcagttcctgttttttgagccttctggaccaacaaaatggcagcacatcctgcttcctgacagggaaggcatcacagtggccaatgatcgtgtgtgtgtgtgtgtgtgtgtg

SEQ ID NO: 383423 - DNA, 120 bp, Artificial Sequence
  ENSG00000143858_16 (sequence is synthesized)
tgtgtgtgtgtgtgtgtgtgtctttgagcatttctcttcattcctggaatgtgtgtgtgtgtgtgtctctttgagcatctctcttcattcctggaatgagccatggacagtaaagttgtg

SEQ ID NO: 383424 - DNA, 120 bp, Artificial Sequence
  ENSG00000143858_17 (sequence is synthesized)
tgggaaaagaaggctctttggggaccctgacatgaagaagtccactaagtgggagatcttctctcatctatggcaaagtctcaggatcctgttcagatatcggggctttcatactcctgt

SEQ ID NO: 383425 - DNA, 120 bp, Artificial Sequence
  ENSG00000143858_18 (sequence is synthesized)
tggtggctatttgggaggcagcaagatgtgaagactggatgtgttcagaactaggaccaaacgatgccatcaaatacttcctcctgccagtcatggtttccccagaagtgtagttcctgg

SEQ ID NO: 383426 - DNA, 120 bp, Artificial Sequence
  ENSG00000143858_19 (sequence is synthesized)
gacattcatggatatgagctattcactagttgggtcagactaacagggactctcagtcccaaaatctcactcttattgacaataaatatcaaactatgaagaaacagaagtcccattacc

SEQ ID NO: 383427 - DNA, 120 bp, Artificial Sequence
  ENSG00000143858_20 (sequence is synthesized)
agaaagaccaaaattaaactcctggatcttcaccccatccagtgggaaacacagatgctttctccctttccagaatataagcagccaagttcatttgcatttattccccattgtgctttt

SEQ ID NO: 383428 - DNA, 120 bp, Artificial Sequence
  ENSG00000143858_21 (sequence is synthesized)
gcttctgtttctcttttaagtggagcaacactgtctgaagacacgttatctgtgcagagccagagaactttaaaaggaaagtttaaatgttcttagttctcctgaggtccaggtaagaag

SEQ ID NO: 383429 - DNA, 120 bp, Artificial Sequence
  ENSG00000143858_22 (sequence is synthesized)
ggggtggtaagaagaggatgggggacagatggctgagatcccttgggaggagatataggggagcactggaattcccccgactcccactccttgctcccttggccctctgccctccatgct

SEQ ID NO: 383430 - DNA, 120 bp, Artificial Sequence
  ENSG00000143858_23 (sequence is synthesized)
ggagagctgataggtagctggagtggcccagggagacctatgggaaggacccgtcctaccattagggggcttctctctatgaatgctaagaaacaaagggcatccattccaaatgagtag

SEQ ID NO: 383431 - DNA, 120 bp, Artificial Sequence
  ENSG00000143858_24 (sequence is synthesized)
cagaggtgaccttctagggtttctacccatgctcagttgtatcccattccctgttcaccttttgtccccagcactgatataaaagccatatatatgttagtcaggtttgcactgagtctt

SEQ ID NO: 383432 - DNA, 120 bp, Artificial Sequence
  ENSG00000143858_25 (sequence is synthesized)
cttccaatccttcagcctggacaacagagtgaggtccccttgtggccagaggccagccctccttgcctgccttcctttgacctctcttttccatccatgaagccctcaggcccttgccat

SEQ ID NO: 383433 - DNA, 120 bp, Artificial Sequence
  ENSG00000143858_26 (sequence is synthesized)
tttttcaccacagaaaactcatggcttctccagaagcctgagtatctctctttcccagcacaaatggcagcatctctatcctgccccatctgggccacttcagcttcctgtagacaccca

SEQ ID NO: 383434 - DNA, 120 bp, Artificial Sequence
  ENSG00000143858_27 (sequence is synthesized)
agacagatggacagtgttggagggaatcaggctttgaggatccagtgtgaagaagttgcagagtgtctttttattttattttaaaaagggggaaggggcttttggttttgctttgttttt

SEQ ID NO: 383435 - DNA, 120 bp, Artificial Sequence
  ENSG00000143858_28 (sequence is synthesized)
tggatgaaggagtgagggaaatgagggaatacccccaccagaaacagactggaaagcctgcctgtctcttggagatccttctttgtcttgttagtggtacatgggaagttatgtttttac

SEQ ID NO: 383436 - DNA, 120 bp, Artificial Sequence
  ENSG00000143858_29 (sequence is synthesized)
gtgtgtgtgtgtgtgtgtgtgtgtacttaatgatgggaaggtaagactctgatcaggattatgaactgcggtccttgggaccaaaggtgtggtcatggtagagagttgtaggacaatagg

SEQ ID NO: 383437 - DNA, 120 bp, Artificial Sequence
  ENSG00000143858_30 (sequence is synthesized)
tagggtgttttcagaatctgggtggccacagagtgggatttcctggtatggacatcagaagtcactggactcttctcccaaccccagagttatgggattttggtgctttctcagggtctc

SEQ ID NO: 383438 - DNA, 120 bp, Artificial Sequence
  ENSG00000143858_31 (sequence is synthesized)
cttgtcaatatcccctctacctttactcctttgccctttcccaattcatcttctaccacctggattcttttccattcatgaacttcattcagcccttccaaagcccaagatttgcattcc

SEQ ID NO: 383439 - DNA, 120 bp, Artificial Sequence
  ENSG00000143858_32 (sequence is synthesized)
cttgacagggaggaaaggcaatggtaggaacctctggtggtctgggtgtctatgtgcctggtgaccagggctggatttttattactctgagcccactgctagtgaggagccttgaggggt

SEQ ID NO: 383440 - DNA, 120 bp, Artificial Sequence
  ENSG00000143858_33 (sequence is synthesized)
ggggacaggttgctgagtgattttgaacgttgacaccagtgtggagccagtgtgggtgtggggagcagtgccttcctcaggtcccagctggtcctgatatgccacgtagtggatggcatc

SEQ ID NO: 383441 - DNA, 120 bp, Artificial Sequence
  ENSG00000143858_34 (sequence is synthesized)
tgtcttggtccatgggcttggtgggaacatgcttctgcttgtgtgttttccatacctgagggctgacgtagcttaaaccacagggcatcatgccaaacactcactgctgggcaggtttat

SEQ ID NO: 383442 - DNA, 120 bp, Artificial Sequence
  ENSG00000143858_35 (sequence is synthesized)
ttctggggatgtcagggtactggggtgtaggcactaagcaggatagagttagggtgtctggctagtaaggggttctggacgcctctggggctgtgagttttcatctcaaagtctgttcca

SEQ ID NO: 383443 - DNA, 120 bp, Artificial Sequence
  ENSG00000143858_36 (sequence is synthesized)
gagaaaggaaagtagtatagaggtgatttttagagaagctgagaccatgaaaacaagcctaatcccatccagaaactggggtaaagtctgaaagttcgttttcttcttcctccctgaata

SEQ ID NO: 383444 - DNA, 120 bp, Artificial Sequence
  ENSG00000143858_37 (sequence is synthesized)
attgttccagaagggatgctaactctgccagagctacaggcagatttttgggctttggaagtggaagctgaggcctggggaaggctgggtaaggaatgctggggcaatctcagacagtag

SEQ ID NO: 383445 - DNA, 120 bp, Artificial Sequence
  ENSG00000143858_38 (sequence is synthesized)
gcaggtgcttggcatgaatgagaagtgactttcctggagtccctcagtagaggatgagatagcagggattaggccacagtctcagatcctgatcttttttcttcctaggaaagcatacat

SEQ ID NO: 383446 - DNA, 120 bp, Artificial Sequence
  ENSG00000143858_39 (sequence is synthesized)
aacttgtgtctgcagaatcagtgtgggatgattttgctggcccaaggcttcagcgagagggagaagagaggtcactacagccctcctgtgggtaaaagcagctctcttataaacctgcct

SEQ ID NO: 383447 - DNA, 120 bp, Artificial Sequence
  ENSG00000143858_40 (sequence is synthesized)
ccatgcagtggggtgggggtaagggtgggtgacagcaaagaggttgaggaacctccctgggtttggggagtgagagcttccatgttcccttaatgtcctaggttaattcataaggcatct

SEQ ID NO: 383448 - DNA, 120 bp, Artificial Sequence
  ENSG00000143858_41 (sequence is synthesized)
gagtcctgggtctcacccagcctcacagagagaaaaactgtccctgagggtgtcccctcccactcaaaggtagaaagagattgagccaggaactgccctcatatcctctgctctgcccct

SEQ ID NO: 383449 - DNA, 120 bp, Artificial Sequence
  ENSG00000143858_42 (sequence is synthesized)
tcccttccctttcctctgcccctcccacctaaagctgtttggggccctttctcagagccctgggtggtggcaggcagggaggagtcccaagatcctggtggccctgagccccatgctatg

SEQ ID NO: 383450 - DNA, 120 bp, Artificial Sequence
  ENSG00000143858_43 (sequence is synthesized)
gttgccagatttggcaaataaaaatacaggatgtccagttacatttgaatttcagttcaacaacaaacaattattaagtgtaaatatgtcctaggcaaatagttgggacatatactaaaa

SEQ ID NO: 383451 - DNA, 120 bp, Artificial Sequence
  ENSG00000143858_44 (sequence is synthesized)
aataatttgttgtttatctgaaattcaaatgtaactggtcatcctgcattgtgtctgggaaccctaccctatgacttttccccctctccctttggtcccaaggggccaggaaccccaagg

SEQ ID NO: 383452 - DNA, 120 bp, Artificial Sequence
  ENSG00000143858_45 (sequence is synthesized)
atttgacttaaccagttttttgaactgcaatattgagaaggggacactgtgacttgaagacacatgaattactttattttttaagcaacaacaaaataagaaccttctgaagccatttga

SEQ ID NO: 383453 - DNA, 120 bp, Artificial Sequence
  ENSG00000143858_46 (sequence is synthesized)
gcctcatctgcccccatccgtgtatatttaattatatataaaagaagataattacctagaaacatatgaacagaatcttgtttaatcaagatgcatgtctataactttctgtaaatagcc

SEQ ID NO: 383454 - DNA, 120 bp, Artificial Sequence
  ENSG00000143858_47 (sequence is synthesized)
gcatggcaatgctgagagtccccttgatccccaacctcaaacccattttacagaactggttgaggctgctcctttgattttatgtcgtgtaaagtctttgttccccagccccacccctgc

SEQ ID NO: 383455 - DNA, 120 bp, Artificial Sequence
  ENSG00000143858_48 (sequence is synthesized)
ctcctcccatcgggaaaccccccatgggagtcatcagtgggcgggagtcggtgcctgctccagtccagccctgccttgggagatgctggaggaccctgtcgccctgaaggcctgtttgct

SEQ ID NO: 383456 - DNA, 120 bp, Artificial Sequence
  ENSG00000143858_49 (sequence is synthesized)
gcacatctgcctgcagagccaaacctcagggcccggtgcagtgtccagcctggtatctggcatcccagtagcttccatgttctgtgtatgtgtgtggtgtgccccttcctcccactgttt

SEQ ID NO: 383457 - DNA, 120 bp, Artificial Sequence
  ENSG00000143858_50 (sequence is synthesized)
gaattcactgaaaagccataaagggggcctcctgctggagatttggcctcccttggctcctcccaggagcccccatgtctctccaactggctccccacagaccacttctgaagggctcac

SEQ ID NO: 383458 - DNA, 120 bp, Artificial Sequence
  ENSG00000143858_51 (sequence is synthesized)
ctgttgtcactccctcctgctccctcagtcccgtgtcatgagaatggacggtgtccagggcttccggtggggtctcaggagatgcccatgctggccctgcccgagctggctttctcggcc

SEQ ID NO: 383459 - DNA, 120 bp, Artificial Sequence
  ENSG00000143858_52 (sequence is synthesized)
tgggttcacagttcagctccatctctacgctgggcgaggagcagacagcagtgggactccatggttctggatacctttcctggggtccctgtggaggcaaccaggattttcaggagcagc

SEQ ID NO: 383460 - DNA, 120 bp, Artificial Sequence
  ENSG00000143858_53 (sequence is synthesized)
cagtcagcagctcagccagggatgacagaaccatccctgcttactcacctctgtagtgtgagggtctgtgggtggtgatggaggagggactcagggagaggccggtgaatacaggggctg

SEQ ID NO: 383461 - DNA, 120 bp, Artificial Sequence
  ENSG00000143858_54 (sequence is synthesized)
acgctcttccctcgtgcatcctcctgcagtctgacagaaagcagcccaatagcggggcaacctcagggctaccagcgatcccctgagagtggggtgggcaggttcagctgtgagagaggc

SEQ ID NO: 383462 - DNA, 120 bp, Artificial Sequence
  ENSG00000143858_55 (sequence is synthesized)
tcaggcagagcaggtgtggactaagtcccctgaccttcacacctgctccccagagaagccccagccagttgcaccaagtagcagaggtgagtagaggggcctgggggcttccaaggcccc

SEQ ID NO: 383463 - DNA, 120 bp, Artificial Sequence
  ENSG00000143858_56 (sequence is synthesized)
aggtcatcctgttgaactgagagggacaggtagcccccctgcctgcggcccctggccccatgggcacctgagggcagtactgcatgggaagagcccaggatgcctcaggcctggcaactg

SEQ ID NO: 383464 - DNA, 120 bp, Artificial Sequence
  ENSG00000143858_57 (sequence is synthesized)
tgacaagtatgaggaaggagagagaacgggaagggaatcaggcagggcgcattcgaggaggccagaggtggcgaggcaggcttgccctgcacaaaccacaacagaagttgcacacagaag

SEQ ID NO: 383465 - DNA, 120 bp, Artificial Sequence
  ENSG00000143858_58 (sequence is synthesized)
tcccagggacctttgtgctgggaactgaaagagtggggaaggtggaggggaccatttcagagcaggctggaatcaggtgcttggaccagtgaagacatgtcttgcttcctccagctctct

SEQ ID NO: 383466 - DNA, 120 bp, Artificial Sequence
  ENSG00000143858_59 (sequence is synthesized)
ctggggccctcccactctccacacccacagcagagacaaattgaggcaagagttgagagagcatctgtctggtgaggtgatgggagcagtgtgcatggggcaccaggagttcctccatcc

SEQ ID NO: 383467 - DNA, 120 bp, Artificial Sequence
  ENSG00000143858_60 (sequence is synthesized)
cacctgccttagcgatcaggactttaggggggcctcttcaaagatagtgacccttctgccctgactcctgcccatctaaggacttgatttgctgctttctgaaaaccctggggctgaaaa

SEQ ID NO: 383468 - DNA, 120 bp, Artificial Sequence
  ENSG00000143858_61 (sequence is synthesized)
cttcaaaatcagggcctggcagagcctagcttcgccaaggtcagcccaccaggagccctgccttcgtctccataggaaggacacatgtacagcccttgcccccggccctctcattcccac

SEQ ID NO: 383469 - DNA, 120 bp, Artificial Sequence
  ENSG00000143858_62 (sequence is synthesized)
ttctgcttggcaatgctctccatctcccttatgtggactcttgttcttgtctgatctcttgtcaaattgttattttgtaatgaactgcgtctccttattaaagaaatgagctgaaagaaa

SEQ ID NO: 383470 - DNA, 120 bp, Artificial Sequence
  ENSG00000143858_63 (sequence is synthesized)
gcagactgctaagctcagcaagtcttgcggcaaaggcacttcggagccgagttggggcagcggtggagcggggacttcgcgcccccaggggaacgggcgcccctgcgaaaccgtcgccag

SEQ ID NO: 383471 - DNA, 120 bp, Artificial Sequence
  ENSG00000143858_64 (sequence is synthesized)
ccacgcgtccttgccgtccgacgccccctcacattggagaccccggatctctcccgcctccttcgggtcgctctccgctgtttcctctgccaccatgaggaacattttcaagaggaacca

SEQ ID NO: 383472 - DNA, 80 bp, Artificial Sequence
  ENSG00000143862_0 (sequence is synthesized)
gagccgattccggggcagcgagtcgtcggcagccgcgctcgagcctccgcccgcaccgagccgcgggacccgggccgtac

SEQ ID NO: 383473 - DNA, 120 bp, Artificial Sequence
  ENSG00000143862_1 (sequence is synthesized)
ggggcggcggggacctggcaccgggcggggccggcggcagcgaccatgatcgctttgttcaacaagctgctggactggttcaaggccctattctggaaggaggagatggagctcacgctg

SEQ ID NO: 383474 - DNA, 120 bp, Artificial Sequence
  ENSG00000143862_2 (sequence is synthesized)
gtcgggcttcagtactcgggcaagaccaccttcgtcaacgtgatcgcgtcaggacagttcaacgaggacatgatccccaccgtgggtttcaacatgcgcaaaatcaccaaagggaatgtg

SEQ ID NO: 383475 - DNA, 120 bp, Artificial Sequence
  ENSG00000143862_3 (sequence is synthesized)
actatcaagctctgggacattgggggacagccgcgtttccgcagcatgtgggagcgctactgccgaggagtgagcgccatcgtgtacatggtggatgctgctgaccaggagaagattgag

SEQ ID NO: 383476 - DNA, 120 bp, Artificial Sequence
  ENSG00000143862_4 (sequence is synthesized)
gcctctaagaacgagctccacaacctactggacaaacctcagctgcagggcatcccggtcttagtcctgggtaacaagcgagaccttccgggagcattggatgagaaggagctgattgag

SEQ ID NO: 383477 - DNA, 120 bp, Artificial Sequence
  ENSG00000143862_5 (sequence is synthesized)
aaaatgaatctgtctgccatccaggaccgagagatctgctgctactccatctcttgcaaagaaaaggacaacattgacatcaccctacagtggcttattcaacactcgaagtcacggaga

SEQ ID NO: 383478 - DNA, 120 bp, Artificial Sequence
  ENSG00000143862_6 (sequence is synthesized)
agctgagactccagcccttctccctcagaccagggaccgtcatcatctaaacctgaagccgagctccccgcccacccctgtcgtccccctaagcccacccctcctcacccagtgtgagga

SEQ ID NO: 383479 - DNA, 120 bp, Artificial Sequence
  ENSG00000143862_7 (sequence is synthesized)
ctgcctttgtcccatcacccagccctgcctccctcccagcagccctgggccacagcccccgcccctggcttttccccggcccgctcttgtacctcccttttcaacactctctgttattgt

SEQ ID NO: 383480 - DNA, 120 bp, Artificial Sequence
  ENSG00000143862_8 (sequence is synthesized)
cctgtgtgtacagtatatatatgtatatatattttaattttttaatttaagcaaagactaaaatcaaccatttgatgctgcaggggcctttcaggatctgggagggggcagtctggagag

SEQ ID NO: 383481 - DNA, 120 bp, Artificial Sequence
  ENSG00000143862_9 (sequence is synthesized)
aaggagggagacgcaggtggacttggggcaagttcagatcagaagaggtgcaggctggcacctgcggcaggtaccagcctgggcactggtggccgcctccctgtcccgtgtgtttccacc

SEQ ID NO: 383482 - DNA, 120 bp, Artificial Sequence
  ENSG00000143862_10 (sequence is synthesized)
gcccaatctggcttgtcctggcagtgcttgaatgccacaggctggcaggggcctctgggggcccctcccctcgacccccagcctgggtagagccaccaggtacgacgaccaggtaccaga

SEQ ID NO: 383483 - DNA, 120 bp, Artificial Sequence
  ENSG00000143862_11 (sequence is synthesized)
aaccaccaggcacacggggcagaaagccagcgtccatgccccagcagccccctcctgcctgttcctggctcccagctcccgcccctccccagggcccccacctccacggcccacttcatt

SEQ ID NO: 383484 - DNA, 120 bp, Artificial Sequence
  ENSG00000143862_12 (sequence is synthesized)
ttctgttctcattttgcagagttgcacaaggagagaactcagcatggggggttggttctttgggttctgtttgtttatttgtttaatttaatgatttgtaaagtgatgttcctcttcctt

SEQ ID NO: 383485 - DNA, 120 bp, Artificial Sequence
  ENSG00000143862_13 (sequence is synthesized)
ttttacacttttcagctcatatttaacctctgtttggaaaatgattcttgtaactgtacatttttttgcttcctaataacaatgacaacaaaaaaaataaatgaccagttttgtgttggg

SEQ ID NO: 383486 - DNA, 120 bp, Artificial Sequence
  ENSG00000143862_14 (sequence is synthesized)
ggagggagctcggctgggaagtcactgggagcaggtaaaagccaggcatggtaggggcgcagagaggaaacgggacccaggaggccagctcaccacccagacaacctgggcacggctgcc

SEQ ID NO: 383487 - DNA, 120 bp, Artificial Sequence
  ENSG00000143867_0 (sequence is synthesized)
gagtgagtcggagctcggcctctccccggcacgttctcagctgctcctggttcagacccagcgagggagccgcgagcgaggctcaccgtccccggcgtgcaggatccggggctgctgagc

SEQ ID NO: 383488 - DNA, 120 bp, Artificial Sequence
  ENSG00000143867_1 (sequence is synthesized)
gctcgctcccgcgtgtccggcgcttggagtccccgcggcaggagaggagtcgggacactagagctccaggggcgcctgtgggctccagggcctccggcttccccagtccccttcagctaa

SEQ ID NO: 383489 - DNA, 120 bp, Artificial Sequence
  ENSG00000143867_2 (sequence is synthesized)
agccccagagacgtgctcagccccaggacctctgcggaacaagatccggattgagaagccactgcaactaccgaaatgggcagcaaaaccttgccggcgccggtgcctatccacccttcc

SEQ ID NO: 383490 - DNA, 120 bp, Artificial Sequence
  ENSG00000143867_3 (sequence is synthesized)
ctgcagctcaccaactactccttccttcaggcagtgaacggcctgcccacagtgccttcggaccatctgcccaacctgtatggtttcagcgcgttgcacgctgtgcacctgcatcagtgg

SEQ ID NO: 383491 - DNA, 120 bp, Artificial Sequence
  ENSG00000143867_4 (sequence is synthesized)
acgctgggctacccggccatgcacttgccgcgctcttctttctccaaagtgccgggcacggtgtccagcttggtggatgcgcgcttccagctgcccgcctttccctggttccctcatgtc

SEQ ID NO: 383492 - DNA, 120 bp, Artificial Sequence
  ENSG00000143867_5 (sequence is synthesized)
attcaacccaagcccgagatcaccgctggaggcagcgttccagcgctcaagaccaagccgcgctttgattttgccaacctggccttggcagcaacgcaagaagatccggccaagctcggt

SEQ ID NO: 383493 - DNA, 120 bp, Artificial Sequence
  ENSG00000143867_6 (sequence is synthesized)
cgcggggagggcccaggctcccctgcaggtgggctgggtgccctcctcgacgtgaccaagctgtctccagaaaagaagcccacaaggggacgtctgccttccaagaccaagaaggaattc

SEQ ID NO: 383494 - DNA, 120 bp, Artificial Sequence
  ENSG00000143867_7 (sequence is synthesized)
ccttccggaggcaagaccacctgcgagaccacagatatattcactccaaagagaagcccttcaagtgtcaagagtgtgggaaaggattctgccagtccaggactctcgctgtccacaaga

SEQ ID NO: 383495 - DNA, 120 bp, Artificial Sequence
  ENSG00000143867_8 (sequence is synthesized)
cgctacactcacaggtgaaggagctcaaaacctccaagatcaaatgctaaatagaacctgtgggtcacaaggaccctaggcccagcggccctctcctccatagggaccagaagcctgact

SEQ ID NO: 383496 - DNA, 120 bp, Artificial Sequence
  ENSG00000143867_9 (sequence is synthesized)
ctggcgggcagcgggagaggcgctcgctcgggaccttccacctctccaacattgtcccctgggtccctggcgcacgcggcacttcagagccccgcccggggccgcgaccccgaccgtccc

SEQ ID NO: 383497 - DNA, 120 bp, Artificial Sequence
  ENSG00000143867_10 (sequence is synthesized)
tgctgctcccctaggacgcggctaaactcttggccaaaaggcggtactcacgtggcggaagggaaactgcattaaaaaaagaacgaaagctccgcggagccgcagcggcgcctctcccag

SEQ ID NO: 383498 - DNA, 120 bp, Artificial Sequence
  ENSG00000143867_11 (sequence is synthesized)
aagtattactttttctattgttattttatacgttttcttttttatttttgtctttgaccatataagcttgtaactctgactgcggagagtgagtggagagaggagaggcaacgaagtcct

SEQ ID NO: 383499 - DNA, 120 bp, Artificial Sequence
  ENSG00000143867_12 (sequence is synthesized)
tagcactggcagctcccacctcctcctcccgcccctgcccccacccccggagcctgcaaaagtgtaatccctgtatctgcttcagcctcctgccctagggaccgcggggcagccccctcc

SEQ ID NO: 383500 - DNA, 120 bp, Artificial Sequence
  ENSG00000143867_13 (sequence is synthesized)
cagctcttgcagctcagctggcggccgtgggctccgggactaggagagcgggacggggacctcgggcctggggtctgcagggggcccggcctccgctgccgcgacactgcgagggagcag

SEQ ID NO: 383501 - DNA, 120 bp, Artificial Sequence
  ENSG00000143867_14 (sequence is synthesized)
ccagccaagagccgggcgttatattgcgattggcactttatgctgaccatcggtaacggacatttatcactggagttttttttttttttaactattaaataaacggttattttacaggca

SEQ ID NO: 383502 - DNA, 120 bp, Artificial Sequence
  ENSG00000143867_15 (sequence is synthesized)
agttaacttgctcacgctcaattagccccgaataaaccactttaatagactctgcacacttcattaatgcccagcataggactggccgcagacctgggattggcgctccaccgcgcgagg

SEQ ID NO: 383503 - DNA, 120 bp, Artificial Sequence
  ENSG00000143867_16 (sequence is synthesized)
gacgcgagtgcccgcactgcgcagggactcgggatcccgagcgcgaattgcgtctgctgtgcgtggtcgggtccccttattctttcccgcaggtcctgaggcccaagctgtttgaggaat

SEQ ID NO: 383504 - DNA, 120 bp, Artificial Sequence
  ENSG00000143867_17 (sequence is synthesized)
gggtgcctagcctggggaagggttttccatcctgtgtttaaagatcgaaagtattcgccctggggttccgcggtctgggaaaccggagccggaggagccgggggctcactcatcctttct

SEQ ID NO: 383505 - DNA, 120 bp, Artificial Sequence
  ENSG00000143867_18 (sequence is synthesized)
ggctggagaggctagggtgagactgtgtttttctcttaaccgacctcctgaaaccggatcgtgctttcggcccattcttgatactagtgtaaagagccacgtttcgaatgaatttcgtcc

SEQ ID NO: 383506 - DNA, 120 bp, Artificial Sequence
  ENSG00000143867_19 (sequence is synthesized)
tggggaaagtcgttggcgggagcctggggagcactggcttccgaatgcttcagaaaacaaggaacgggctgggccgcggaagaaaataaatgtagtgttggggaaaacaagatcgggcag

SEQ ID NO: 383507 - DNA, 120 bp, Artificial Sequence
  ENSG00000143867_20 (sequence is synthesized)
atagcccggaaaggttggctcccaggaaccattatagctgcaagcactcccccttcccggcaccccctacggagcccaagacggctccggtcttggctctaaggaagaaggcgaggaaag

SEQ ID NO: 383508 - DNA, 120 bp, Artificial Sequence
  ENSG00000143867_21 (sequence is synthesized)
gcctagcgaggttggtggtttctcccacccaggcacggagcgggttcgggacagtgtgcaggccagagtcccacagccacggccgctggcttggccttggataggccaagcacccagagg

SEQ ID NO: 383509 - DNA, 120 bp, Artificial Sequence
  ENSG00000143867_22 (sequence is synthesized)
agcagggggaggcctccgcggcgcccagcggggtccgggacccggagataaggatctgatttccagcgcctggaagggaagaagaggtgacagcaattcaaagagcgctcatccctccta

SEQ ID NO: 383510 - DNA, 120 bp, Artificial Sequence
  ENSG00000143867_23 (sequence is synthesized)
agtccaggccgacctttgaagttagacaggcttctcctccttccccttccccaacccaaatgggtctcagcttcctctctggcccaatttgaaatttacttctccttgtgtccgagctct

SEQ ID NO: 383511 - DNA, 120 bp, Artificial Sequence
  ENSG00000143867_24 (sequence is synthesized)
gggatagtctcaatttgtcccgggcacgacccgagcttggcgcagtagagatgaccgttgctgaagccacggcgctgccagcggcaccagcgctctgcttcagaggccagatcacgcaga

SEQ ID NO: 383512 - DNA, 120 bp, Artificial Sequence
  ENSG00000143867_25 (sequence is synthesized)
taatatgcctcctcttgccctgaggctaaattcattgcaacggtttttatccgagtgctaatttaaactgcgcaggcaaatcacggccagctcgtggtgtttttacaccccattcccagg

SEQ ID NO: 383513 - DNA, 120 bp, Artificial Sequence
  ENSG00000143867_26 (sequence is synthesized)
aaggcctctttccttaggtcccaccacacagccagtggcccccgtgccagcttccaggagaaaaggttttcctgggtcaacattgccctcatacctcctgggaaaaggcactgcacatcc

SEQ ID NO: 383514 - DNA, 120 bp, Artificial Sequence
  ENSG00000143867_27 (sequence is synthesized)
ctggacagagccaggctttgaaagcctcgctgcagcgaaaggcagaggagtctatgcctgggccttgccctgggctgagggtcagctcaacctggggagggggcacgccaaactagggag

SEQ ID NO: 383515 - DNA, 120 bp, Artificial Sequence
  ENSG00000143867_28 (sequence is synthesized)
cagagcagaggccagtgcatcccagggaaggggaattgctccatgttagaggaaaggacctaggaagaggagagtaatgaagggtaaaggaagaagtcaacagcaggggattgaagctag

SEQ ID NO: 383516 - DNA, 120 bp, Artificial Sequence
  ENSG00000143867_29 (sequence is synthesized)
gcaagagagaagggagtcccacggaccctgctgtgacaatgacttcttaagtagccccaagctaagagccaggagttcagtgcttgggcttcccaaggctccctgacagtttagactttg

SEQ ID NO: 383517 - DNA, 120 bp, Artificial Sequence
  ENSG00000143867_30 (sequence is synthesized)
ctcaccctgttctttcctccactggacacatctaaattaggagtgtctgggaggtagagatgaaaagcattttgcagagctcagatgtctccacggaggctggagaccatggccaaggag

SEQ ID NO: 383518 - DNA, 120 bp, Artificial Sequence
  ENSG00000143867_31 (sequence is synthesized)
gtctggagatgccaacccctggtcacttcagtgtggctttcctctggccttgctcaagctctccaaccttgcacttggaggtacatagaccacaggaatggaggcctggcctcagtgttc

SEQ ID NO: 383519 - DNA, 120 bp, Artificial Sequence
  ENSG00000143867_32 (sequence is synthesized)
gtgagggcactaacacccccttgtttgtgactgcagttgtttgacagagtaaatgaatgtggatattagcaacctccttgaaagcaaagtggtccccgagggctaaggcaaggcagagag

SEQ ID NO: 383520 - DNA, 120 bp, Artificial Sequence
  ENSG00000143867_33 (sequence is synthesized)
tcagtccacaagcagctgcagagagagtggagccaacaggtttcacttacactaaggcagggaagcagatttaaggtcaaagttgagggttttgaggagaaagatgacagggcttctgga

SEQ ID NO: 383521 - DNA, 120 bp, Artificial Sequence
  ENSG00000143867_34 (sequence is synthesized)
agccaaatcgaaggtcagccagaagaccttaatgaatgggagccaggaggtgcatgcatttgtgcgcctgtgtatgtgtgttgtctgtgaggctcttcatgggtgcaatgtgatcccgtg

SEQ ID NO: 383522 - DNA, 120 bp, Artificial Sequence
  ENSG00000143867_35 (sequence is synthesized)
tgtgtgtgtgtgtgtgtgtgtgtgagattcaggggttcctgcatttttttaaagccagtgttgtactataaaacattggttgtcccagtctttgcaccttgtcaattctgcctcagaatg

SEQ ID NO: 383523 - DNA, 120 bp, Artificial Sequence
  ENSG00000143867_36 (sequence is synthesized)
tcagaatgtctgaatccacgtgtgcaattctgtgtttatctgcaaataaatgtgtaagtatgttccccagctcctgttatctttgcaggagattgtgattctgtgttgacccgggcttac

SEQ ID NO: 383524 - DNA, 120 bp, Artificial Sequence
  ENSG00000143867_37 (sequence is synthesized)
ctggatgtcaatttctacaggacaggcagtttccctttgcttgttcctttctcagtgtcttgcatacagtaggcccttccctctatcaagttgtgtggctctgccagacgccatttggag

SEQ ID NO: 383525 - DNA, 120 bp, Artificial Sequence
  ENSG00000143867_38 (sequence is synthesized)
ggagcccttagaccaaggagggttctgaaaagagggctcccctgcgtcttacattcccaccctctttgtgagggcagtgggttttgggaatggggtcttagactcttagctcctgcgctg

SEQ ID NO: 383526 - DNA, 120 bp, Artificial Sequence
  ENSG00000143867_39 (sequence is synthesized)
ggtgtgaggagagggtgtggctcggctggaattcaggaggaaggcgacccaccctgaacttctttattcctctccacgcccctgccttcttcttttctttgcagatccggattgagaagc

SEQ ID NO: 383527 - DNA, 120 bp, Artificial Sequence
  ENSG00000143867_40 (sequence is synthesized)
ttgacgaagaaggaagggagagggagtgaatggccacagccgcagccgaccgcgccagggacaggtgcatgccccagctcggtagcgctttcgttcaagtttgtcttttgaggagttgcg

SEQ ID NO: 383528 - DNA, 120 bp, Artificial Sequence
  ENSG00000143867_41 (sequence is synthesized)
ctctagtatgaggccgcctagacccgagagcgcagggctgcgagtctgaaccccgccttgcactcgcgctctaacttagggatattctccataggatgattgctctgtgtcgtcaaggcc

SEQ ID NO: 383529 - DNA, 120 bp, Artificial Sequence
  ENSG00000143869_0 (sequence is synthesized)
acttcccccattattaaacactatgttcaaaaggcgccgggggacttcccggagccacggagcccgcgccgcccgcccgcccggcccacggagcccatggacctgagcgccgccgccgcg

SEQ ID NO: 383530 - DNA, 80 bp, Artificial Sequence
  ENSG00000143869_1 (sequence is synthesized)
ctgtgcctttggctgctgagcgcctgccgcccccgcgacgggctggaagcggccgccgtgctgcgagcggcgggggctgg

SEQ ID NO: 383531 - DNA, 120 bp, Artificial Sequence
  ENSG00000143869_2 (sequence is synthesized)
cgcggctgtcccggccgccgcggttccccgggcccgcgccgcgcgccgcgccgcgggctccggcttcaggaacggctcggtggtgccgcaccacttcatgatgtcgctttaccggagcct

SEQ ID NO: 383532 - DNA, 120 bp, Artificial Sequence
  ENSG00000143869_3 (sequence is synthesized)
caccacttcatgatgtcgctttaccggagcctggccgggagggctccggccggggcagccgctgtctccgcctcgggccatggtcgcgcggacacgatcaccggcttcacagaccaggcg

SEQ ID NO: 383533 - DNA, 120 bp, Artificial Sequence
  ENSG00000143869_4 (sequence is synthesized)
acccaagacgaatcggcagccgaaacaggccagagcttcctgttcgacgtgtccagccttaacgacgcagacgaggtggtgggtgccgagctgcgcgtgctgcgccggggatctccagag

SEQ ID NO: 383534 - DNA, 120 bp, Artificial Sequence
  ENSG00000143869_5 (sequence is synthesized)
tcgggcccaggcagctggacttctccgccgttgctgctgctgtccacgtgcccgggcgccgcccgagcgccacgcctgctgtactcgcgggcagctgagcccctagtcggtcagcgctgg

SEQ ID NO: 383535 - DNA, 120 bp, Artificial Sequence
  ENSG00000143869_6 (sequence is synthesized)
gaggcgttcgacgtggcggacgccatgaggcgccaccgtcgtgaaccgcgccccccccgcgcgttctgcctcttgctgcgcgcagtggcaggcccggtgccgagcccgttggcactgcgg

SEQ ID NO: 383536 - DNA, 120 bp, Artificial Sequence
  ENSG00000143869_7 (sequence is synthesized)
cggctgggcttcggctggccgggcggagggggctctgcggcagaggagcgcgcggtgctagtcgtctcctcccgcacgcagaggaaagagagcttattccgggagatccgcgcccaggcc

SEQ ID NO: 383537 - DNA, 120 bp, Artificial Sequence
  ENSG00000143869_8 (sequence is synthesized)
cgcgcgctcggggccgctctggcctcagagccgctgcccgacccaggaaccggcaccgcgtcgccaagggcagtcattggcggccgcagacggaggaggacggcgttggccgggacgcgg

SEQ ID NO: 383538 - DNA, 120 bp, Artificial Sequence
  ENSG00000143869_9 (sequence is synthesized)
acagcgcagggcagcggcgggggcgcgggccggggccacgggcgcaggggccggagccgctgcagccgcaagccgttgcacgtggacttcaaggagctcggctgggacgactggatcatc

SEQ ID NO: 383539 - DNA, 120 bp, Artificial Sequence
  ENSG00000143869_10 (sequence is synthesized)
gcgccgctggactacgaggcgtaccactgcgagggcctttgcgacttccctttgcgttcgcacctcgagcccaccaaccatgccatcattcagacgctgctcaactccatggcaccagac

SEQ ID NO: 383540 - DNA, 120 bp, Artificial Sequence
  ENSG00000143869_11 (sequence is synthesized)
gcggcgccggcctcctgctgtgtgccagcgcgcctcagccccatcagcatcctctacatcgacgccgccaacaacgttgtctacaagcaatacgaggacatggtggtggaggcctgcggc

SEQ ID NO: 383541 - DNA, 120 bp, Artificial Sequence
  ENSG00000143869_12 (sequence is synthesized)
tgcaggtagcgcgagggccggggagggggcagccacgcggccgaggatccccagctgatgagcagcagcgggccaccctgtcaccgagcgtgggtgcatgtccgatgtgacccagcaccc

SEQ ID NO: 383542 - DNA, 120 bp, Artificial Sequence
  ENSG00000143869_13 (sequence is synthesized)
tctcagaggagggagagcacacgttcacactcacacacactcgtgcagtcacgcacacatttaccggggacagcatgtgaaagccttgggaagagatgacctgccggtaccgaatgtcaa

SEQ ID NO: 383543 - DNA, 120 bp, Artificial Sequence
  ENSG00000143869_14 (sequence is synthesized)
agccctgtgtattttgcaaacagataaccatggcgcccactgcccccatttagggagaggaaggtgtttgtgctgatgttgcagttagaggcacgaaaatcaggtagcaacaacgggtta

SEQ ID NO: 383544 - DNA, 120 bp, Artificial Sequence
  ENSG00000143869_15 (sequence is synthesized)
ggaaattcgaagttccagaatgggagaaccaaaggggtactcgagcatgctttatctcacccccttttgtttctggcccgatgtggggcatcgcttccctggggggctgagcgccgcgtg

SEQ ID NO: 383545 - DNA, 120 bp, Artificial Sequence
  ENSG00000143869_16 (sequence is synthesized)
gtgcactccgtgacccactgcaaggctgtaatgcccttcccgagggtttgtgttgcatggggccgtttaccctggaactgctgcaaaaagcatctttctttttttaacttttaaaattta

SEQ ID NO: 383546 - DNA, 120 bp, Artificial Sequence
  ENSG00000143869_17 (sequence is synthesized)
acgtgcccctgcttcatttttgaaagggaagttttgtctgaaagtagctgttgtggagcttcccagatttctgcaaaggtcggtaccgccacccccccccccccccccgccttttttttt

SEQ ID NO: 383547 - DNA, 120 bp, Artificial Sequence
  ENSG00000143869_18 (sequence is synthesized)
tttttttttaatcaattccaataggaaatgttatggaaagtggaaaggatatttttcttttaaacggctgagtctgatctaacaggatattggggtgggataggatctgccaggttcgga

SEQ ID NO: 383548 - DNA, 120 bp, Artificial Sequence
  ENSG00000143869_19 (sequence is synthesized)
agctccccagttggtcagggggaggtgggagccatgcctcgggtggctcaggaggaagttagtgcaatggcccggaatggggaaggtggggctgggggaggggagctactgcttttccta

SEQ ID NO: 383549 - DNA, 120 bp, Artificial Sequence
  ENSG00000143869_20 (sequence is synthesized)
gagacctgccaggaggttttcctaagaagccagggaagaggctctcagggcttgaaaggcaaggaggtgtcctggggcccactccagccgaggactccggcttgccggccaggtaggcgg

SEQ ID NO: 383550 - DNA, 120 bp, Artificial Sequence
  ENSG00000143869_21 (sequence is synthesized)
aagctcccggggccgactcgggcttgtgctagttatcaagtaagtcggcctccgctttttacctgctttcgctgtgttgttgctgtagttgttggcagtgtgatagtaacgggaagtgaa

SEQ ID NO: 383551 - DNA, 120 bp, Artificial Sequence
  ENSG00000143869_22 (sequence is synthesized)
gccactcaaaaatgcttttgtcagacttcaactcacaacccagacctttagagcagggggaaggtctgccccttcccctcatcggctccctggcttggctgctgtgcccttggaagggca

SEQ ID NO: 383552 - DNA, 120 bp, Artificial Sequence
  ENSG00000143869_23 (sequence is synthesized)
gggccttggtgtgggggagcagaggtggaatatcccccagttcccttatttggccccaaagggtcttattgatgggaggattttctaggcatgtaaaagtgagttcgaacattcagactt

SEQ ID NO: 383553 - DNA, 120 bp, Artificial Sequence
  ENSG00000143869_24 (sequence is synthesized)
cactgtttgatttgatttgtttatgcctgggaatcctttgtggctttttgtcaataggctgggagagggaacctagttggactccagctgtccggggtgggggcttcttagaacagcccc

SEQ ID NO: 383554 - DNA, 120 bp, Artificial Sequence
  ENSG00000143869_25 (sequence is synthesized)
gcagccctctcggtgcatctgtgtgatgttgtgtaggactttccccttcagagtcctggggagcattatttccaccctgtgttggatgcaggacaattcatacacattttgattctcagt

SEQ ID NO: 383555 - DNA, 120 bp, Artificial Sequence
  ENSG00000143869_26 (sequence is synthesized)
gattacactcttgagagagagaagacagacttacgatttagatacagctaatttacttaggggccctacctgaatcggttttcatcctgtaaaattctcccaaaagaaaaaaaaatacac

SEQ ID NO: 383556 - DNA, 120 bp, Artificial Sequence
  ENSG00000143869_27 (sequence is synthesized)
gtgtaaattactcttaaaattaagattccccccttcctcctattatgtgaatttatattctgtggctgtatgagtagctataaataaccagaacatgaacagtctcttcaggttaaaaat

SEQ ID NO: 383557 - DNA, 120 bp, Artificial Sequence
  ENSG00000143869_28 (sequence is synthesized)
tttaaaaatatccaaaagtggctgctctggtacaattccatcttattttagtgactgggcaaagatggtccctaaatttgtggattttgccagagatgcctcactctcgtttttaaaatg

SEQ ID NO: 383558 - DNA, 120 bp, Artificial Sequence
  ENSG00000143869_29 (sequence is synthesized)
aagcttgtcataatgaagaattatatattaaaaaaagcactgaagtgttgaaagttgtagtattagaaggtttagaaaggaagttaatgacaaagtgcagttaaatgttattttgaggaa

SEQ ID NO: 383559 - DNA, 120 bp, Artificial Sequence
  ENSG00000143869_30 (sequence is synthesized)
ggtctggggtatttaatatctttggataaaagcaaacattttgatacttttttagtgactagtaaaaacaattttttgggcagaaatgtcttgatttagcctggcctttttatagtaggg

SEQ ID NO: 383560 - DNA, 120 bp, Artificial Sequence
  ENSG00000143869_31 (sequence is synthesized)
aaaaaaactgtcaatttcccctctttccttctgatgacctccttctaacgagatgtgttgtgagtggtgtgggaagtaggtaccttcctgcatcttgagttcaggtggcacccggtggga

SEQ ID NO: 383561 - DNA, 120 bp, Artificial Sequence
  ENSG00000143869_32 (sequence is synthesized)
ggggtgttgtccttggacagtgactgttccttccatggccccataccctcagtgtgctctttgtttactggataaaaggaatgcttcccagatttcctctggagcaggtgaagcccccag

SEQ ID NO: 383562 - DNA, 120 bp, Artificial Sequence
  ENSG00000143869_33 (sequence is synthesized)
gggccactctgcccagccctctggcatctcagtccattcactaggtgaatgcagaggatccatttcacttgtaaaaatgacaacaaagggccaacacatgtggggcagacggctttttgc

SEQ ID NO: 383563 - DNA, 120 bp, Artificial Sequence
  ENSG00000143869_34 (sequence is synthesized)
tgctaagatgtggtttaactagcattgccaaggtgtggagaaaagcgttctgccagcacagttggtagtagcaccctgagctctctgtcttctaggtagcgggggacaggcctgggtgac

SEQ ID NO: 383564 - DNA, 120 bp, Artificial Sequence
  ENSG00000143869_35 (sequence is synthesized)
tggcatgaacccagcttctctgttgcaacccccagctggaatctccagtcaccatggatgggagaactgacaggcagggagaaagcatgtcaagactgtgaggaaaggctgtcccctcaa

SEQ ID NO: 383565 - DNA, 120 bp, Artificial Sequence
  ENSG00000143869_36 (sequence is synthesized)
ccccaacctgaggtcaccaaagtctccctcctaaagtaaacagaattttccattttgtagggagaattgtgcactactagttgacatcacttgaaccaggatttcctgctagtgagtagg

SEQ ID NO: 383566 - DNA, 120 bp, Artificial Sequence
  ENSG00000143869_37 (sequence is synthesized)
atttggcatccctacttagggagctcgggacaggccagctggggcccaacgggggctggtgctgggtctgtcaaacacaatgatagcctggtcactgctgcttgaaaccagggctttcgt

SEQ ID NO: 383567 - DNA, 120 bp, Artificial Sequence
  ENSG00000143869_38 (sequence is synthesized)
gcgggcatttccactgattcccaaacacacttgccttgttgaattctgactttccaaacagccgcactgggtcttccagagaaggtggcaggctttgctgtgttagcttggggaagccag

SEQ ID NO: 383568 - DNA, 120 bp, Artificial Sequence
  ENSG00000143869_39 (sequence is synthesized)
gcttgagctgtgctcagtcattgtatccatgctccccttcaccataccctcctggcaacgatatgaggtgtggattgtgtgatagaagaatccagactccacgaagccaaggacagtcac

SEQ ID NO: 383569 - DNA, 120 bp, Artificial Sequence
  ENSG00000143869_40 (sequence is synthesized)
ttctccctggcagctctcatggtgtcggcaggagtgggcgcctcaccttgggtactgaagagagtaccgataatcccgtggatggaacaggagggagtgtaattcaatccctacacattg

SEQ ID NO: 383570 - DNA, 120 bp, Artificial Sequence
  ENSG00000143869_41 (sequence is synthesized)
tatatgctgttggcaatttcatttaaactcacagcagaaaacaaccaggatttgtagactgattttcttcttagagcagggagaaaaattacgttctttccaagagcagctcgtgcacag

SEQ ID NO: 383571 - DNA, 120 bp, Artificial Sequence
  ENSG00000143869_42 (sequence is synthesized)
ataaggtcagacttttcctgtgcttgaatctggtctccaggaaatccagtggcaggaagagagtgtcctgaggctgcctctgggggcacagaatcactgggcctcgctgattctcatgag

SEQ ID NO: 383572 - DNA, 120 bp, Artificial Sequence
  ENSG00000143869_43 (sequence is synthesized)
aacctgtcatctcagtgagacaggcctcccactggccctcagtgggccataggccaagaggtctgagtcagatcgcgcagtgagctggagggagcgaggctctgaaagcagcagtctagc

SEQ ID NO: 383573 - DNA, 120 bp, Artificial Sequence
  ENSG00000143869_44 (sequence is synthesized)
agagggagtttgggcctgcgcttacccctcagaaagtgtctggattgggaagggaagagaggaagctgccgagcgaacccagcagccaaactttgggtgagtggaaagtaactagatccc

SEQ ID NO: 383574 - DNA, 120 bp, Artificial Sequence
  ENSG00000143869_45 (sequence is synthesized)
tctggtggatggtatatttgagctgcaccagagtcagagcccactgtgggcttccgagtgcccagaggcagctgctcccacagcacggactgcgcccgccaggggaggccgctcaggggc

SEQ ID NO: 383575 - DNA, 120 bp, Artificial Sequence
  ENSG00000143869_46 (sequence is synthesized)
cagggcaccacaaggcgtctcctgagagacgtctgaggcaagttatgggcagtcacctccctgctggagcttcatcttctgccctgtaaaatgatgccctttccagttccaaggttctag

SEQ ID NO: 383576 - DNA, 120 bp, Artificial Sequence
  ENSG00000143869_47 (sequence is synthesized)
gattttaccttgcctcaaaacccactcagatagcttgaaggcagagcaaatgtgatggctcctggagaaggtcctctcccaatcccagtcccagagcctcatcttaccggtttcgcagct

SEQ ID NO: 383577 - DNA, 120 bp, Artificial Sequence
  ENSG00000143869_48 (sequence is synthesized)
cttgcctgtgcatgtgcatgtgtgtgcgtgtgtccattttactcctatccttaataggtgcctcatggatgtgctttgaattcccctgggctgaggtaggtgtggggagggcccgcacct

SEQ ID NO: 383578 - DNA, 120 bp, Artificial Sequence
  ENSG00000143869_49 (sequence is synthesized)
tgagggtggggttcagctccccagagccaggagctggctgagggcactgcccatccagctgcagttcctcctgtgctcagtggggtgggcggagccacactcaagctgagactgtctgag

SEQ ID NO: 383579 - DNA, 120 bp, Artificial Sequence
  ENSG00000143869_50 (sequence is synthesized)
agacctagtgctgggaagggctctacctgctgctggggcctctgcaggcagaagggtaaaggcaaggctgtgcctggttggtcacccaaacgggggcctgggactgtcccagaagccctg

SEQ ID NO: 383580 - DNA, 120 bp, Artificial Sequence
  ENSG00000143869_51 (sequence is synthesized)
gatgaggcaggcaggactgtcccagaatggactccttgggtcctcaccccctcctcaccaccatgcccatgtctggctctgaggtccccttgcagcttcccaggggagtgaccctggggt

SEQ ID NO: 383581 - DNA, 120 bp, Artificial Sequence
  ENSG00000143869_52 (sequence is synthesized)
agcatcagaagagcttgtctctctcttcctttttgtggtctggagaagttaacataaagaagcaccagaagggaggacccaaaaagatgtttatttctaagttttcagacagcttggcat

SEQ ID NO: 383582 - DNA, 120 bp, Artificial Sequence
  ENSG00000143869_53 (sequence is synthesized)
cttgtacctggaacctcctgaccatgtaggctgcagcacagctgtcttcctccctctgtgctgttctggactttaatctgtgtgcacagcttagtgcgtcacaaatagtaactgagtgag

SEQ ID NO: 383583 - DNA, 120 bp, Artificial Sequence
  ENSG00000143869_54 (sequence is synthesized)
gctgttgtgaaagaagcctgtttttttcaggagggccaccgtcctagcctgaggagacacctggtggacacagactgcagggagagggctgaaagttggcctagtgaatcagaggggtga

SEQ ID NO: 383584 - DNA, 120 bp, Artificial Sequence
  ENSG00000143869_55 (sequence is synthesized)
ctgagggcctagaagttgccgcgtgagctctgatcatcattaggggtgctgtctgcccatgacctgcaggtacccaccttaaccagagcttggcttgtggcctgcaacttggcgacaggc

SEQ ID NO: 383585 - DNA, 120 bp, Artificial Sequence
  ENSG00000143869_56 (sequence is synthesized)
ctttggctgggcaaagtttgggctggtgcttcatggcggcaggaccaattacagcagagcaacccaggatgggtggtcattgaaaaatgggtgtgaagtcactgaaaaatcagactgagt

SEQ ID NO: 383586 - DNA, 120 bp, Artificial Sequence
  ENSG00000143869_57 (sequence is synthesized)
ttcaagttatgctcacagttgctgaaaaagcaaaaatatgcccttagagcagcagagcagcgtgcgatggtccacttcctcctgcctctgcagagcttgcaggcctcttctagcatctgt

SEQ ID NO: 383587 - DNA, 120 bp, Artificial Sequence
  ENSG00000143869_58 (sequence is synthesized)
gcatggtgcgcatgtgtctgtgacaacagaaagggtgggtttctctcacacgtttccctgacagtggcaagggggctgcagcggtcacagaaacttccggagagaggtgtttctgtgcag

SEQ ID NO: 383588 - DNA, 120 bp, Artificial Sequence
  ENSG00000143869_59 (sequence is synthesized)
tcaggtgaatttgttggcaggacagcttggtgtgatgatacaagaagtacagtttcactctttttttgtcagatgaacttccttctgctagtttagaaatgcttcactccagagagggcc

SEQ ID NO: 383589 - DNA, 120 bp, Artificial Sequence
  ENSG00000143869_60 (sequence is synthesized)
acctgatagaagctgtattacagaaacttttaatctcttttctatgtcagtaaggggatgctgaaataaactgtctagaaaaacaagaagcttctgtcacacccaggccactttcggcag

SEQ ID NO: 383590 - DNA, 120 bp, Artificial Sequence
  ENSG00000143869_61 (sequence is synthesized)
agtggtccagagcggccagggcacggccagctgctttgcatctgcattcccgtttcattaccttttgtgttgtgggccaacaggagtgctacgtagtgggggctggagatttgtccaggc

SEQ ID NO: 383591 - DNA, 120 bp, Artificial Sequence
  ENSG00000143869_62 (sequence is synthesized)
aggaggtgggcaagtggctgtcttctctgcagaatacctgcactgctccatctgaccagcagtggcaacagccacaaccagttctgcatctagctcctgcccagacctttggctgccaga

SEQ ID NO: 383592 - DNA, 120 bp, Artificial Sequence
  ENSG00000143869_63 (sequence is synthesized)
atctagaaccatggctgaccaaagcgagacttccgagtaaggttcgttaacaggcatcctgctgaattagaaggaaacaggaacgaatccaaagcaaacggggctaaacttccctcgagg

SEQ ID NO: 383593 - DNA, 120 bp, Artificial Sequence
  ENSG00000143869_64 (sequence is synthesized)
acatttcctgagctgcaacatgggaagcgacagcaccgaagctggtgagctggtgcaactgcacacaccttttctctggtttttagtactcacaggtcatcctggggagaccgctcatgg

SEQ ID NO: 383594 - DNA, 120 bp, Artificial Sequence
  ENSG00000143869_65 (sequence is synthesized)
gctatgggcagcccatgcctggattttttggtgaatgagtctgaaaagcagtgaccaggtgtgttgagggcctccccttgcctgcacctttttatctctgagtgactgagggctgccaag

SEQ ID NO: 383595 - DNA, 120 bp, Artificial Sequence
  ENSG00000143869_66 (sequence is synthesized)
gccagacaacgcacatgtgtcctggatcctcccctggcctggggcagcagcagcagcagcagctgggcttggggtgagtaggctggcttgaggaaggggctgcccacaagcagggctcat

SEQ ID NO: 383596 - DNA, 120 bp, Artificial Sequence
  ENSG00000143869_67 (sequence is synthesized)
ttcctgggtcagggcctgtcagactcaaagtcagctcttcagcattctgtttagaaaatgatgatgcagttcagtgagaaagaaagctcaggataaaatatgttttctggaggggaaata

SEQ ID NO: 383597 - DNA, 120 bp, Artificial Sequence
  ENSG00000143869_68 (sequence is synthesized)
ctcaagtgttctaagccaggaacagagactctcaagagaggaattctctggcattctctgccttggataaatcatggattaaacatgagcatccttagaataattttatttttgtatttc

SEQ ID NO: 383598 - DNA, 120 bp, Artificial Sequence
  ENSG00000143869_69 (sequence is synthesized)
actttacactgtaatgcaaacagcttttatgttttctttgacgaagaatcataattgagtcactttaggtcttttagctggaagcatttcaccctaaatgaaaagttaatgcatttttta

SEQ ID NO: 383599 - DNA, 120 bp, Artificial Sequence
  ENSG00000143869_70 (sequence is synthesized)
caaggattaacatgctaactacaacttgccctttcagcagatgacaataagggattctgaaaagtttggactgtctttttctttttgtatacaaataaagcagcagatcctttctctgtg

SEQ ID NO: 383600 - DNA, 120 bp, Artificial Sequence
  ENSG00000143869_71 (sequence is synthesized)
aaggttgttgcagagctcccgtaccagcttataaaatgcggctgtttaagcaggacttgggtgggcagcagaattctgcacatgacgagtggctgcagcttagaaagcaaatttcatctg

SEQ ID NO: 383601 - DNA, 120 bp, Artificial Sequence
  ENSG00000143869_72 (sequence is synthesized)
attccagtactgtgattttaaggaaacggtaaaactcaaagtgccagtaatgccatcaaggctcagtaacatgccatttcctcagcagctaaagacaaaaagaattattttggtgagggg

SEQ ID NO: 383602 - DNA, 120 bp, Artificial Sequence
  ENSG00000143869_73 (sequence is synthesized)
atagaaatcctttcgctttgcagtgacacccactttttcttagcttggcttgggagtaaggagattggagtgtggggggacattagaaactcatttaaggcaaactgaaatctccttcat

SEQ ID NO: 383603 - DNA, 120 bp, Artificial Sequence
  ENSG00000143869_74 (sequence is synthesized)
cagcagtcttcctgctggtgtagccacagcagaactccgaggcttgcaggctgggctgtctccttgctgcctggcttgggtgtttatttgggcaatgcaagctgacattgtgaggtgttg

SEQ ID NO: 383604 - DNA, 120 bp, Artificial Sequence
  ENSG00000143869_75 (sequence is synthesized)
ccgatgcccaggccagctagcagggagccctcccagggctggtagaaacctatgtgtatatatattctcaaatttaaatagattgtacatagtgaaatgtaaatgacatgtaaaacagca

SEQ ID NO: 383605 - DNA, 120 bp, Artificial Sequence
  ENSG00000143869_76 (sequence is synthesized)
tgtaaaacagcaatctctatttttcttaactattatatagcagtatatatttgttgaacatgcttgtatactcttcattaaccattttaatattttgtacagataagttgattaaatatt

SEQ ID NO: 383606 - DNA, 80 bp, Artificial Sequence
  ENSG00000143870_0 (sequence is synthesized)
ggcgggacgtgggcgcgggggcgcggcgtgcggcacgctgcagggctgaagcggcggcggcggtggggactgcacgtagc

SEQ ID NO: 383607 - DNA, 120 bp, Artificial Sequence
  ENSG00000143870_1 (sequence is synthesized)
ggggactgcacgtagcccggcgctcggcatggctctcctggtgctcggtctggtgagctgtaccttctttctggcagtgaatggtctgtattcctctagtgatgatgtgatcgaattaac

SEQ ID NO: 383608 - DNA, 120 bp, Artificial Sequence
  ENSG00000143870_2 (sequence is synthesized)
tccatcgaatttcaaccgagaagttattcagagtgatagtttgtggcttgtagaattctatgctccatggtgtggtcactgtcaaagattaacaccagaatggaagaaagcagcaactgc

SEQ ID NO: 383609 - DNA, 120 bp, Artificial Sequence
  ENSG00000143870_3 (sequence is synthesized)
attaaaagatgttgtcaaagttggtgcagttgatgcagataagcatcattccctaggaggtcagtatggtgttcagggatttcctaccattaagatttttggatccaacaaaaacagacc

SEQ ID NO: 383610 - DNA, 120 bp, Artificial Sequence
  ENSG00000143870_4 (sequence is synthesized)
agaagattaccaaggtggcagaactggtgaagccattgtagatgctgcgctgagtgctctgcgccagctcgtgaaggatcgcctcgggggacggagcggaggatacagttctggaaaaca

SEQ ID NO: 383611 - DNA, 120 bp, Artificial Sequence
  ENSG00000143870_5 (sequence is synthesized)
aggcagaagtgatagttcaagtaagaaggatgtgattgagctgacagacgacagctttgataagaatgttctggacagtgaagatgtttggatggttgagttctatgctccttggtgtgg

SEQ ID NO: 383612 - DNA, 120 bp, Artificial Sequence
  ENSG00000143870_6 (sequence is synthesized)
acactgcaaaaacctagagccagagtgggctgccgcagcttcagaagtaaaagagcagacgaaaggaaaagtgaaactggcagctgtggatgctacagtcaatcaggttctggcctcccg

SEQ ID NO: 383613 - DNA, 120 bp, Artificial Sequence
  ENSG00000143870_7 (sequence is synthesized)
atacgggattagaggatttcctacaatcaagatatttcagaaaggcgagtctcctgtggattatgacggtgggcggacaagatccgacatcgtgtcccgggcccttgatttgttttctga

SEQ ID NO: 383614 - DNA, 120 bp, Artificial Sequence
  ENSG00000143870_8 (sequence is synthesized)
taacgccccacctcctgagctgcttgagattatcaacgaggacattgccaagaggacgtgtgaggagcaccagctctgtgttgtggctgtgctgccccatatccttgatactggagctgc

SEQ ID NO: 383615 - DNA, 120 bp, Artificial Sequence
  ENSG00000143870_9 (sequence is synthesized)
atgtgggggtggctgtggacagaagctggagcccagtctgaacttgagaccgcgttggggattggagggtttgggtaccccgccatggccgccatcaatgcacgcaagatgaaatttgct

SEQ ID NO: 383616 - DNA, 120 bp, Artificial Sequence
  ENSG00000143870_10 (sequence is synthesized)
ctgctaaaaggctccttcagtgagcaaggcatcaacgagtttctcagggagctctcttttgggcgtggctccacggcacctgtaggaggcggggctttccctaccatcgttgagagagag

SEQ ID NO: 383617 - DNA, 120 bp, Artificial Sequence
  ENSG00000143870_11 (sequence is synthesized)
ccttgggacggcagggatggcgagcttcccgtggaggatgacattgacctcagtgatgtggagcttgatgacttagggaaagatgagttgtgagagccacaacagaggcttcagaccatt

SEQ ID NO: 383618 - DNA, 120 bp, Artificial Sequence
  ENSG00000143870_12 (sequence is synthesized)
ttcttttcttgggagccagtggatttttccagcagtgaagggacattctctacactcagatgactctaccagtggccttttaaccaagaagtagtacttgattggtcatttgaaaacact

SEQ ID NO: 383619 - DNA, 120 bp, Artificial Sequence
  ENSG00000143870_13 (sequence is synthesized)
gcaacagtgaacttttgcatctcaagaaaacattgaaaaattctatgaattgttgtagccggtgaattgagtcgtattctgtcacataatattttgaagaaaacttggctgtcgaaacat

SEQ ID NO: 383620 - DNA, 120 bp, Artificial Sequence
  ENSG00000143870_14 (sequence is synthesized)
ttttctctctgactgctgcttgaatgttcttggaggctgtttcttatgtatgggttttttttaatgtgatcccttcatttgaatattaatggctttttccattaaagaataaaatatttt

SEQ ID NO: 383621 - DNA, 120 bp, Artificial Sequence
  ENSG00000143870_15 (sequence is synthesized)
ggacaatgccgataaatgtatgaagttagtatccacatcataaattcagagtgatgtttagcagtaaatcaatattttgaagtgatacacagatgtctttcctccccacaaactttttta

SEQ ID NO: 383622 - DNA, 120 bp, Artificial Sequence
  ENSG00000143870_16 (sequence is synthesized)
aacaaaaaacaagacctcttttctttagatggtgccacctatgcccaccacaacagagattttacatggaaaccgggctcagtgagaactgatttcctgcccaatatttgtctttgggct

SEQ ID NO: 383623 - DNA, 120 bp, Artificial Sequence
  ENSG00000143870_17 (sequence is synthesized)
gtctctagtgactaattattaaggaatctagctggttatacagttcaaggctttctatgttgttaatgaacctcaaaatagccgttaagacatgaaatacagcagcaggttaccaatgcg

SEQ ID NO: 383624 - DNA, 120 bp, Artificial Sequence
  ENSG00000143870_18 (sequence is synthesized)
aacaggtagttcgcatttatgtaaaacattcagaaaatgaagttttgaatttgttggaacattcaaaggacttgagagcattttattgtaacttaaaaaaataaatacaactgtcactaa

SEQ ID NO: 383625 - DNA, 120 bp, Artificial Sequence
  ENSG00000143870_19 (sequence is synthesized)
ctgcacgtagcccggcgctcggcatggctctcctggtgctcgcctgcttgtaacagcatgaagaggagaggactgacgttattgctgtccttgattggcaaagagaagtgaaagtaccta

SEQ ID NO: 383626 - DNA, 120 bp, Artificial Sequence
  ENSG00000143870_20 (sequence is synthesized)
attctgccacagtctacctaatgatgctctgtggattatacccctgcattctccagcccttcggttagaaatttgggtctatctaattatatgatcttaggtctggtgagctgtaccttc

SEQ ID NO: 383627 - DNA, 120 bp, Artificial Sequence
  ENSG00000143870_21 (sequence is synthesized)
attgcactgtgtgagcagaacacaatttatccttccactgctgatgggcatttgggcggtttgcagtttgggatctggccagttctgctgttgtgagcattcttaagcctgcctttcggt

SEQ ID NO: 383628 - DNA, 120 bp, Artificial Sequence
  ENSG00000143870_22 (sequence is synthesized)
gaattcacacgcccgtgggaagttcatatgagccataacaaggattggaagaagttttagaagtaacctcctgggagtccatgaattagcagcagtgagaggctagaggcctgacaaaga

SEQ ID NO: 383629 - DNA, 120 bp, Artificial Sequence
  ENSG00000143870_23 (sequence is synthesized)
attgagaagcagctgctatatcccaagtggcaaatgccagtgtggatggagaagagagagcttcattctgtggcaggaaagcttggctgctgacaatgagactgcacccttgggatttgt

SEQ ID NO: 383630 - DNA, 120 bp, Artificial Sequence
  ENSG00000143870_24 (sequence is synthesized)
cccttggattctttagcatctgagctctaacctctgaaacacaagaaaaaatgagcaagatgtttgctcagcatcaattcagataccgctgaatagaaggcaacacccaaccacacagcc

SEQ ID NO: 383631 - DNA, 120 bp, Artificial Sequence
  ENSG00000143870_25 (sequence is synthesized)
tgctctcctctgacccctctttctcctgcctctaccccttggcttcacagcaattattcattttttaacactcaaatgctgggtacctgttgcctatgtcggggcacgctgttactccct

SEQ ID NO: 383632 - DNA, 120 bp, Artificial Sequence
  ENSG00000143870_26 (sequence is synthesized)
acacacaggtaaaattgattaaccgaatcttgccctccactggcttactgtgcaacggtagagactggaagcaacagacgagggtgagctttggaagagctgatgaggccatgattaatt

SEQ ID NO: 383633 - DNA, 120 bp, Artificial Sequence
  ENSG00000143870_27 (sequence is synthesized)
tcaactgagaggacgctcactctcagagcacagcttccagaggagagaagatacccccagcatccatgagaagagacctccgggagaagcttgtgtgggtgtgccgaccactggccccag

SEQ ID NO: 383634 - DNA, 120 bp, Artificial Sequence
  ENSG00000143870_28 (sequence is synthesized)
ttgaggtcccagccaacatcagctccgacttccagccatgctcaccaacttctcctgcccactccctatcaaggaaaagtcccataatgtatccatcaaccaccatggctaatgcacccg

SEQ ID NO: 383635 - DNA, 120 bp, Artificial Sequence
  ENSG00000143870_29 (sequence is synthesized)
aaccgagggtgcccgctgcaaggttaggtctcctggcctcgtgcttcaaacaggaattaatagaatcccaccaggtggtgtttgtgaggcgtagatggcgaggatatctgcagctgcagt

SEQ ID NO: 383636 - DNA, 80 bp, Artificial Sequence
  ENSG00000143870_30 (sequence is synthesized)
ctgaattttcaacacacttgcacaaatatagaaacatcatggggaaaaatgcaaaatacctatgatttctggaacaagat

SEQ ID NO: 383637 - DNA, 120 bp, Artificial Sequence
  ENSG00000143870_31 (sequence is synthesized)
ggggaaaaatgcaaaatacctatgatttctggaacaagatccaagatgacaaagatattccctgcttattctgctcatgcccgggctcccctgcccacccccagtgcgttcatgtgatat

SEQ ID NO: 383638 - DNA, 120 bp, Artificial Sequence
  ENSG00000143870_32 (sequence is synthesized)
catgaaaaagcagcaggggtggcatgaacttgcacaccaggctgcccaggcttgagacccagctctgccacctagaagcttggagcccctgaacaagctgcaattctgtgcctgggcttt

SEQ ID NO: 383639 - DNA, 120 bp, Artificial Sequence
  ENSG00000143870_33 (sequence is synthesized)
tctgactgcaaaatgaggataatcacagcccctgcctccaaagtgtcccgaggatcaaatgagttgatgatacttgcacggcgctcggatcgtggctcaccaacttctcctgcccactcc

SEQ ID NO: 383640 - DNA, 120 bp, Artificial Sequence
  ENSG00000143878_0 (sequence is synthesized)
atctgccaccgcagtctggttggagctgttgtcttgtatgctcagcgaggcccggagagacccgggagagagctaggccgagtccaccgcccgagtctgctgcccgagcccgcgttacgc

SEQ ID NO: 383641 - DNA, 120 bp, Artificial Sequence
  ENSG00000143878_1 (sequence is synthesized)
cgagcccgcgttacgcacaaagccgccgatccccggcctggggtgagcagagcgaccaccgcccgggagcagcgcggcgagacgcacggtgcgccctatgcccccgcgcccccaccgccc

SEQ ID NO: 383642 - DNA, 120 bp, Artificial Sequence
  ENSG00000143878_2 (sequence is synthesized)
agcgcagcgagagaacgcgccaccgcggggcccgggtgcagctagcgaccctctcgccacctgcgcgcagcccgaggtgagcagtgagcggcgagcgggagggcagcgaggcgttcgcgg

SEQ ID NO: 383643 - DNA, 120 bp, Artificial Sequence
  ENSG00000143878_3 (sequence is synthesized)
gccccctcctgctgcccgggcccggcccgctcatggcggccatccgcaagaagctggtggtggtgggcgacggcgcgtgtggcaagacgtgcctgctgatcgtgttcagtaaggacgagt

SEQ ID NO: 383644 - DNA, 120 bp, Artificial Sequence
  ENSG00000143878_4 (sequence is synthesized)
tccccgaggtgtacgtgcccaccgtcttcgagaactatgtggccgacattgaggtggacggcaagcaggtggagctggcgctgtgggacacggcgggccaggaggactacgaccgcctgc

SEQ ID NO: 383645 - DNA, 120 bp, Artificial Sequence
  ENSG00000143878_5 (sequence is synthesized)
ggccgctctcctacccggacaccgacgtcattctcatgtgcttctcggtggacagcccggactcgctggagaacatccccgagaagtgggtccccgaggtgaagcacttctgtcccaatg

SEQ ID NO: 383646 - DNA, 120 bp, Artificial Sequence
  ENSG00000143878_6 (sequence is synthesized)
tgcccatcatcctggtggccaacaaaaaagacctgcgcagcgacgagcatgtccgcacagagctggcccgcatgaagcaggaacccgtgcgcacggatgacggccgcgccatggccgtgc

SEQ ID NO: 383647 - DNA, 120 bp, Artificial Sequence
  ENSG00000143878_7 (sequence is synthesized)
gcatccaagcctacgactacctcgagtgctctgccaagaccaaggaaggcgtgcgcgaggtcttcgagacggccacgcgcgccgcgctgcagaagcgctacggctcccagaacggctgca

SEQ ID NO: 383648 - DNA, 120 bp, Artificial Sequence
  ENSG00000143878_8 (sequence is synthesized)
tcaactgctgcaaggtgctatgagggccgcgcccgtcgcgcctgcccctgccggcacggctccccctcctggaccagtcccccgcgagcccggagaaggggagacccgtgtcccacaagg

SEQ ID NO: 383649 - DNA, 120 bp, Artificial Sequence
  ENSG00000143878_9 (sequence is synthesized)
gtctgtgtgcgtccagctgtgttgcacaggcctgggctccccactgagtgccaagggtcccctgagcatgcttttctgaagagccgggcctcagagtgtgtggctgtgtgtctgttcgac

SEQ ID NO: 383650 - DNA, 120 bp, Artificial Sequence
  ENSG00000143878_10 (sequence is synthesized)
tcccctcgccccattttcaccccacccccgcctctgatccccgggggcgagattggcgcgggagtgtggccgcgccccatcagatgttcgcccttcaccagcgggagcttgatatccctt

SEQ ID NO: 383651 - DNA, 120 bp, Artificial Sequence
  ENSG00000143878_11 (sequence is synthesized)
gtctgtaacatagaccccgggtactgcgggaggggagggctgctggggaggatggggggatgttatataaatatagatataattttattttcggagctaagatggtgttatttaagggtg

SEQ ID NO: 383652 - DNA, 120 bp, Artificial Sequence
  ENSG00000143878_12 (sequence is synthesized)
gtgatgggtgagcgctctggcccaggctgggccagactcccgcccaagcatgaacaggacttgaccatctttccaacccctggggaagacatttgcaactgacttggggaggacacagct

SEQ ID NO: 383653 - DNA, 120 bp, Artificial Sequence
  ENSG00000143878_13 (sequence is synthesized)
tcagcacagcctctcctgcgggccagcccgctgcgaaccctccaccagctaccggagggaggagggaggatgcgctgtggggttgtttttgccataagcgaactttgtgcctgtcctaga

SEQ ID NO: 383654 - DNA, 120 bp, Artificial Sequence
  ENSG00000143878_14 (sequence is synthesized)
agtgaaaattgttcagtccaagaaactgatgttatttgatttatttaaaggctaaaatttgtttttttattctttgcacaattgtttcattgtttgacacttaatgcactcgtcatttgc

SEQ ID NO: 383655 - DNA, 120 bp, Artificial Sequence
  ENSG00000143878_15 (sequence is synthesized)
atacgacagtagcattctgaccacacttgtacgctgtaacctcatctacttctgatgtttttaaaaaatgacttttaacaaggagagggaaaagaaacccactaaattttgctttgtttc

SEQ ID NO: 383656 - DNA, 120 bp, Artificial Sequence
  ENSG00000143878_16 (sequence is synthesized)
cttgaagaatgtggcaacactgttttgtgattttatttgtgcaggtcatgcacacagttttgataaagggcagtaacaagtattggggcctattttttttttttccacaaggcattctct

SEQ ID NO: 383657 - DNA, 120 bp, Artificial Sequence
  ENSG00000143878_17 (sequence is synthesized)
aaagctatgtgaaattttctctgcacctctgtacagagaatacacctgcccctgtatatccttttttcccctcccctccctcccagtggtacttctactaaattgttgtcttgtttttta

SEQ ID NO: 383658 - DNA, 120 bp, Artificial Sequence
  ENSG00000143878_18 (sequence is synthesized)
ttttttaaataaactgacaaatgacaaaatggtgagcttatgatgtttacataaaagttctataagctgtgtatacagttttttatgtaaaatattaaaagactatgatgatgacattta

SEQ ID NO: 383659 - DNA, 120 bp, Artificial Sequence
  ENSG00000143882_0 (sequence is synthesized)
agccggcagagcgctccggccccgcacccgccgcccgtcgcccgcagccccctaccgcgcggcccgcgccccgccggctcccgtcactgggtaagagaagactggaagcatgtcggagtt

SEQ ID NO: 383660 - DNA, 120 bp, Artificial Sequence
  ENSG00000143882_1 (sequence is synthesized)
ttggttaatttctgcccctggcgataaggaaaatttgcaagctctggagaggatgaatactgtaacctccaagtccaacctgtcttataataccaaattcgctattcctgacttcaaggt

SEQ ID NO: 383661 - DNA, 120 bp, Artificial Sequence
  ENSG00000143882_2 (sequence is synthesized)
ggggaccttggattccctggttggcctctctgatgagttggggaaactcgacacctttgctgaaagcctcataaggagaatggctcagagcgtggtggaagtcatggaggactcaaaggg

SEQ ID NO: 383662 - DNA, 120 bp, Artificial Sequence
  ENSG00000143882_3 (sequence is synthesized)
gaaggtccaggagcacctcctggcaaacggagttgacttaacatcctttgtgacccactttgaatgggacatggccaaatatcctgtcaagcagccgctcgtgagtgtggtggacacaat

SEQ ID NO: 383663 - DNA, 120 bp, Artificial Sequence
  ENSG00000143882_4 (sequence is synthesized)
agccaagcaactggcgcagatcgagatggacctgaagtcccgaacggccgcctacaacactctgaagacaaacctggagaacctggaaaagaaatccatggggaacctcttcacccggac

SEQ ID NO: 383664 - DNA, 120 bp, Artificial Sequence
  ENSG00000143882_5 (sequence is synthesized)
actgagtgatattgtgagcaaagaggacttcgtgctggattctgaatatctcgtcacacttctggtcatcgtccccaaaccaaactactcacaatggcaaaaaacctacgaatctctctc

SEQ ID NO: 383665 - DNA, 120 bp, Artificial Sequence
  ENSG00000143882_6 (sequence is synthesized)
agacatggtggtccctcgatcaaccaaactcattactgaggacaaggaagggggccttttcactgtgactctgtttcgaaaagtgattgaagatttcaaaaccaaggccaaagaaaacaa

SEQ ID NO: 383666 - DNA, 120 bp, Artificial Sequence
  ENSG00000143882_7 (sequence is synthesized)
gttcactgttcgtgaattttactatgatgagaaggaaattgaaagggaaagggaggagatggccagattgctgtctgataagaagcaacagtatggccccctgctgcgctggctcaaggt

SEQ ID NO: 383667 - DNA, 120 bp, Artificial Sequence
  ENSG00000143882_8 (sequence is synthesized)
gaacttcagtgaagccttcattgcctggatccacatcaaggccctgagagtgtttgtggagtccgtgctcaggtatggactaccagtgaacttccaggcagtgctcctgcagccgcataa

SEQ ID NO: 383668 - DNA, 120 bp, Artificial Sequence
  ENSG00000143882_9 (sequence is synthesized)
gaagtcatccaccaagcgtttaagagaggttctaaactctgtcttccgacatctggatgaagtagccgctacaagtatactggatgcatctgtggagatcccgggactgcaactcaataa

SEQ ID NO: 383669 - DNA, 120 bp, Artificial Sequence
  ENSG00000143882_10 (sequence is synthesized)
ccaagactattttccttatgtctacttccatattgaccttagtcttcttgactagaaaggccagctggcacctctgtctcatgttcgtgcagattattacagacacctctttcctttagc

SEQ ID NO: 383670 - DNA, 120 bp, Artificial Sequence
  ENSG00000143882_11 (sequence is synthesized)
cagagaatggttcaaatgtcttacagaactaagatctttttcagagaaattgctcacaaaagttagtgacagttgtatttatttttttaagttacaataaaatgctctcaagtcctttga

SEQ ID NO: 383671 - DNA, 120 bp, Artificial Sequence
  ENSG00000143882_12 (sequence is synthesized)
tattttgaggttcattaacaacatagaaagccttgaactgtataaccagctagattccttaataattagtcactagagacagcccaaagacaaatattgggcaggaaatcagttctcact

SEQ ID NO: 383672 - DNA, 120 bp, Artificial Sequence
  ENSG00000143882_13 (sequence is synthesized)
gagcccggtttccatgtaaaatctctgttgtggtgggcataggtggcaccatctaaagaaaagaggtcttgttttttgtttaaaaaagtttgtggggaggaaagacatctgtgtatcact

SEQ ID NO: 383673 - DNA, 120 bp, Artificial Sequence
  ENSG00000143882_14 (sequence is synthesized)
tcaaaatattgatttactgctaaacatcactctgaatttatgatgtggatactaacttcatacatttatcggcattgtccaaaatattttattctttaatggaaaaagccattaatattc

SEQ ID NO: 383674 - DNA, 120 bp, Artificial Sequence
  ENSG00000143882_15 (sequence is synthesized)
aaatgaagggatcacattaaaaaaaacccatacataagaaacagcctccaagaacattcaagcagcagtcagagagaaaaatgtttcgacagccaagttttcttcaaaatattatgtgac

SEQ ID NO: 383675 - DNA, 120 bp, Artificial Sequence
  ENSG00000143882_16 (sequence is synthesized)
agaatacgactcaattcaccggctacaacaattcatagaatttttcaatgttttcttgagatgcaaaagttcactgttgcagtgttttcaaatgaccaatcaagtactacttcttggtta

SEQ ID NO: 383676 - DNA, 120 bp, Artificial Sequence
  ENSG00000143882_17 (sequence is synthesized)
aaaggccactggtagagtcatctgagtgtagagaatgtcccttcactgctggaaaaatccactggctcccaagaaaagaaaatggtctgaagcctctgttgtggctctcacaactcatct

SEQ ID NO: 383677 - DNA, 120 bp, Artificial Sequence
  ENSG00000143882_18 (sequence is synthesized)
ttccctaagtcatcaagctccacatcactgaggtcaatgtcatcctccacgggaagctgggagacgacagaaagccactgttagatctgcagaaggggacaccctggaaggtcaacatct

SEQ ID NO: 383678 - DNA, 120 bp, Artificial Sequence
  ENSG00000143882_19 (sequence is synthesized)
cattttatggaagagcgactctctggagctactcctgctacaatccaggttctcctcagtctgactcctaccctgaccttcgtacctatgattatacggatggaaaagctcagaactcag

SEQ ID NO: 383679 - DNA, 120 bp, Artificial Sequence
  ENSG00000143882_20 (sequence is synthesized)
gtgaaacatttcaacatcacatcactcaccattttaacactggaagccacttgaacgtgtccttttgaggagggtgggacacaacagtacagaaataagtgctaatttcaaagctatcat

SEQ ID NO: 383680 - DNA, 120 bp, Artificial Sequence
  ENSG00000143882_21 (sequence is synthesized)
tttctatttttctaagataaagtaaatgaattccaggttaaatgttcactttaaggtaataatcaggaaagcaaccttactactgaaatgtatcttggctgtcaagagtatcaaatgcca

SEQ ID NO: 383681 - DNA, 120 bp, Artificial Sequence
  ENSG00000143882_22 (sequence is synthesized)
tgcagcacttaaacttgtgataaggaagatgaagggtcttcagagaagaacctcttaaaaggcccacgggtgcaccagggctgaggtctgatgggaaggacttgactccaggtgcagaga

SEQ ID NO: 383682 - DNA, 120 bp, Artificial Sequence
  ENSG00000143882_23 (sequence is synthesized)
tgcacaggctcaagagagtaaaccaggactgctgcccgcacagcttccctcccgggcactcacctcgccatccctgccgtcccaaggctctctctcaacgatggtagggaaagccccgcc

SEQ ID NO: 383683 - DNA, 120 bp, Artificial Sequence
  ENSG00000143882_24 (sequence is synthesized)
tcctacaggtgccgtggagccacgcccaaaagagagctcccttagggaaaaatgaccaaaacacacacacacatttacaatggactgctggtgcagaagaataaacaactttaaaaataa

SEQ ID NO: 383684 - DNA, 120 bp, Artificial Sequence
  ENSG00000143882_25 (sequence is synthesized)
cctgtgttgctcttaaaaagggatcatccaccttcccggaccacaaggttaaggtaaccccgctaggtaaccctgataggcctgctgcggggcagaccgacagagagagagagagtgagg

SEQ ID NO: 383685 - DNA, 120 bp, Artificial Sequence
  ENSG00000143889_0 (sequence is synthesized)
atccttagattcgctcctccgggcagggagcggagacggaggaggaggagggagaggctgaatgttggctcggtaattgagaggagcggccgctccagagcttcctcccggggcgccccc

SEQ ID NO: 383686 - DNA, 120 bp, Artificial Sequence
  ENSG00000143889_1 (sequence is synthesized)
ctcagtccgtccgcgcttctcagccgccagtctcctggccgcgcagtccccgcggacggccgggccgcggagaccctcgcagaagaggcgctgccggcggcgaggactggccggcggcat

SEQ ID NO: 383687 - DNA, 120 bp, Artificial Sequence
  ENSG00000143889_2 (sequence is synthesized)
ccgaggcgcgcgccccaccgccacccccacccgcctgccagccggtccctccggccgccgccatgtcctcctcctcttcctcccccagggagacgtacgaggaggaccgggagtacgaga

SEQ ID NO: 383688 - DNA, 120 bp, Artificial Sequence
  ENSG00000143889_3 (sequence is synthesized)
gccaggccaagcgtctcaagaccgaggagggggagatcgactactcggccgaggaaggcgagaaccgccgggaagcgacgccccggggcgggggcgatggcggcggcggcggccggagct

SEQ ID NO: 383689 - DNA, 120 bp, Artificial Sequence
  ENSG00000143889_4 (sequence is synthesized)
tctctcagccggaggcaggtggaagtcatcataaagtttctgtttcacccgtcgtccatgttcgaggactctgtgaatctgtggtggaagcagacctcgtggaagcgctggaaaaatttg

SEQ ID NO: 383690 - DNA, 120 bp, Artificial Sequence
  ENSG00000143889_5 (sequence is synthesized)
ggacaatatgctatgtgatgatgatgccatttaaacgacaggctctagtggaatttgaaaacatagatagtgccaaagaatgtgtgacatttgctgcagatgaacccgtgtacattgctg

SEQ ID NO: 383691 - DNA, 120 bp, Artificial Sequence
  ENSG00000143889_6 (sequence is synthesized)
gtcaacaggcttttttcaactattctacaagcaaaaggatcactcggccaggaaatactgatgatccatcaggaggcaacaaagttcttctgctctcaattcagaatccgctttatccaa

SEQ ID NO: 383692 - DNA, 120 bp, Artificial Sequence
  ENSG00000143889_7 (sequence is synthesized)
ttacagtggatgttttatatactgtatgcaaccctgttggcaaagtgcaacgtattgttatattcaagagaaatgggatacaagcaatggttgagtttgaatcagtcctttgtgcccaga

SEQ ID NO: 383693 - DNA, 120 bp, Artificial Sequence
  ENSG00000143889_8 (sequence is synthesized)
aagctaaagcagcactcaatggagctgatatatatgctggatgttgcacactaaaaattgaatatgcacggccaactcgtctaaatgttattaggaatgacaatgacagttgggactaca

SEQ ID NO: 383694 - DNA, 120 bp, Artificial Sequence
  ENSG00000143889_9 (sequence is synthesized)
ctaaaccatatttgggaagacgagatagaggaaagggtcgccagagacaagccattttgggagaacacccttcttcgtttagacatgatggctatggatcccatggtccattattgcctt

SEQ ID NO: 383695 - DNA, 120 bp, Artificial Sequence
  ENSG00000143889_10 (sequence is synthesized)
taccaagtcgttacagaatgggctctcgagatacacctgaacttgttgcttatccattaccacaggcttcttcctcttacatgcatggaggaaatccctctggttcagttgtaatggtta

SEQ ID NO: 383696 - DNA, 120 bp, Artificial Sequence
  ENSG00000143889_11 (sequence is synthesized)
gtggattacatcaactaaaaatgaattgttcaagagtcttcaacctgttctgcttatatggaaatattgagaaggtaaaatttatgaagaccattcctggtacagcactggtagaaatgg

SEQ ID NO: 383697 - DNA, 120 bp, Artificial Sequence
  ENSG00000143889_12 (sequence is synthesized)
gtgatgagtatgctgtagaaagagctgtcacacaccttaataatgtcaaattatttgggaaaagacttaatgtttgcgtgtctaaacaacattcagttgttccaagtcaaatatttgagc

SEQ ID NO: 383698 - DNA, 120 bp, Artificial Sequence
  ENSG00000143889_13 (sequence is synthesized)
tggaggatggtaccagcagctacaaagattttgcaatgagcaaaaataatcgctttacaagtgctggccaagcatctaagaatataatccagccaccctcctgtgttttgcattattata

SEQ ID NO: 383699 - DNA, 120 bp, Artificial Sequence
  ENSG00000143889_14 (sequence is synthesized)
atgttccattgtgtgtcacagaagagaccttcacaaagttgtgtaatgaccatgaagttcttacattcatcaaatataaagtgtttgatgcaaaaccttcagccaaaacactttctgggc

SEQ ID NO: 383700 - DNA, 120 bp, Artificial Sequence
  ENSG00000143889_15 (sequence is synthesized)
tattagaatgggagtgcaaaactgatgcagtagaagcccttacggcactgaatcactatcagataagagtgccgaatggttccaatccctatacattgaagctttgcttttctacatcat

SEQ ID NO: 383701 - DNA, 120 bp, Artificial Sequence
  ENSG00000143889_16 (sequence is synthesized)
cccatttataagaagagaagagcatgttagaatttatgttcacctttattacaatttcaaagctacacttcattaaaaaaaaatctaaaatggttgatctcatgttgccttgcttacttt

SEQ ID NO: 383702 - DNA, 120 bp, Artificial Sequence
  ENSG00000143889_17 (sequence is synthesized)
attgttttcattttaagatagaatatcataatgtagactatctacagcttcattgtagattatacagatatatgatttctaaccttattactggaatttttcttccacagtaaaaatata

SEQ ID NO: 383703 - DNA, 120 bp, Artificial Sequence
  ENSG00000143889_18 (sequence is synthesized)
tttgcattcttaatgctaattatctgcaagtattttttcattgtgtaagagattaatgcaggtgaaagtattgcattttaatatagaattcctattatatgtttagatgtttaagtatgt

SEQ ID NO: 383704 - DNA, 120 bp, Artificial Sequence
  ENSG00000143889_19 (sequence is synthesized)
agatgtttaagtatgttgcagttactcatattaaacataacttgtatatttattattttaatgaagtttgagaataacgttacatatgttgaattttaagtactacagatttaactgatt

SEQ ID NO: 383705 - DNA, 120 bp, Artificial Sequence
  ENSG00000143889_20 (sequence is synthesized)
ctaacagacatggatacacgtgtacagtatgcattcaaacttatttaaattggtgtatttttttttaagtcactgtccatttgtattgacatgcctctgtttctagtccagtttggagat

SEQ ID NO: 383706 - DNA, 120 bp, Artificial Sequence
  ENSG00000143889_21 (sequence is synthesized)
tttataaagttataacaatgagttaatgtgttcattttcatttgttgcatgtgacttaaatacagctagtatttggcattgagattttaatagaggttataattaacagttcctcttata

SEQ ID NO: 383707 - DNA, 120 bp, Artificial Sequence
  ENSG00000143889_22 (sequence is synthesized)
gataataatctgggatccatgggtgggcttcagagaatctgtgtaccccctaaaattgtatgtagaattttggatatttacatttttattttttaactcttggatccatcagtaatatgt

SEQ ID NO: 383708 - DNA, 120 bp, Artificial Sequence
  ENSG00000143889_23 (sequence is synthesized)
atttttctatatggtacaagatttaaggatctaattttatttttattccaaacagatagctatttgtctcaataccatttattaaacattctttctcccactggatctgttttttttttc

SEQ ID NO: 383709 - DNA, 120 bp, Artificial Sequence
  ENSG00000143889_24 (sequence is synthesized)
tttttaagataatagattttatacataggcaagtaagatttaaggaccaaacatggtattaagagactatagcacgattgttaccaagttcacagcttttttacaatagaaaaactgatg

SEQ ID NO: 383710 - DNA, 120 bp, Artificial Sequence
  ENSG00000143889_25 (sequence is synthesized)
tggccattttgttttcatctttaaaagaagggagaatatgtgtcatctacctagaataactgatatcagtagttgacaatatcagttttgtaatcctgacacttttaaacaaatttgtaa

SEQ ID NO: 383711 - DNA, 120 bp, Artificial Sequence
  ENSG00000143889_26 (sequence is synthesized)
atgaaagttccatttagatcttttgtaaagactttattttaaattttaatataaaaaatccttttagaaataaggcaggcatttacaattttagagctgtttaataggaagtttagatgg

SEQ ID NO: 383712 - DNA, 120 bp, Artificial Sequence
  ENSG00000143889_27 (sequence is synthesized)
aaactaaacacacattaacatttatttcccctcattttgatggcagtggaccagcatttagccctctaaagataaagaaaaaattaaatttaatctagaagtattttagacccttatcac

SEQ ID NO: 383713 - DNA, 120 bp, Artificial Sequence
  ENSG00000143889_28 (sequence is synthesized)
agaacccagtaagttatgccaagggtaactgtgtgaactgtgttcgatactgggctatgtatgtttcttattcattgccaatttaatacctaagtttatctaactttacaataaagcttt

SEQ ID NO: 383714 - DNA, 120 bp, Artificial Sequence
  ENSG00000143889_29 (sequence is synthesized)
ttttcccctataaatacttttctacctcttttgaaaaattgaaataccttaattttggtttatgtaatagttgtctacgttccttcctcctctgaaaattaatgtgggttgtcagaatta

SEQ ID NO: 383715 - DNA, 120 bp, Artificial Sequence
  ENSG00000143889_30 (sequence is synthesized)
cagactttttaatgcctaagattttaagaaataaacctgtaggtgttggcaggacttatttcatttagattttaattagtttagatgtgtagaaatgatttttatctgtaaggctctctc

SEQ ID NO: 383716 - DNA, 120 bp, Artificial Sequence
  ENSG00000143889_31 (sequence is synthesized)
tccaccaaaataagtgaattgtttgggagtaaactagttggtaagttgggccttgctgatagatttatacactggtgtgtaagccctatactgctgctgtcactaatgtttttgatagtt

SEQ ID NO: 383717 - DNA, 120 bp, Artificial Sequence
  ENSG00000143889_32 (sequence is synthesized)
tacttaggcatgactgctgttaatgaagtttgctttgtgaatactctctctttccttagccttggcaacattcttctctgtgctatctttatgcttttagaagaactagaaaaagcagat

SEQ ID NO: 383718 - DNA, 120 bp, Artificial Sequence
  ENSG00000143889_33 (sequence is synthesized)
ttaagaactgtaaagaaataatactagctttgagtttttaaaaaaaatattgaaatcccatctctgtatccaaatcctactacacatttgataataaatctgccaaactgagttatggaa

SEQ ID NO: 383719 - DNA, 120 bp, Artificial Sequence
  ENSG00000143889_34 (sequence is synthesized)
aatgctgacagctgttctccaacacccagctaggggcgggagggtccgcccacttctaccagattttgcacacaaaacagtggaaagaccattctcatggctccaagccgttttctccct

SEQ ID NO: 383720 - DNA, 120 bp, Artificial Sequence
  ENSG00000143889_35 (sequence is synthesized)
tcatcgcctgcaattttagggcttttcggggggtatgactgcagggattttagaggtttttttcctcattctctttttaagaggtgataaaaagcatttaaattagcggcagggcggtta

SEQ ID NO: 383721 - DNA, 120 bp, Artificial Sequence
  ENSG00000143889_36 (sequence is synthesized)
cgcctggcctcgggtaggagccgcatagcgccaacggttgcgggtcgcaactactcccaggcggcgcgccttgcgcgccgggcctcccaggaccgcggcgagttcagaaggcgcggggag

SEQ ID NO: 383722 - DNA, 120 bp, Artificial Sequence
  ENSG00000143889_37 (sequence is synthesized)
aggtaggtattttatacattttagaatgtacttgatctgctgacaaatttttatatgcagttagattcttttttcctgagatgagctagttaattcaaatgaaaaccttgttgatgaatg

SEQ ID NO: 383723 - DNA, 120 bp, Artificial Sequence
  ENSG00000143889_38 (sequence is synthesized)
cttttgttgcaaaaggccatgtaatgctggaaaataaccttgaacattagtgccccctactggtatgtactgagctatttatatttagttcaacaaggagcccacacattcaggcacgcc

SEQ ID NO: 383724 - DNA, 120 bp, Artificial Sequence
  ENSG00000143889_39 (sequence is synthesized)
cgcagttcaaggacttgcatttctccaagcagctctctctctttggaggagaggaaactgattcagaatattccttacaaactgcaaacttgcacactgcttctctatggaaaggacttt

SEQ ID NO: 383725 - DNA, 120 bp, Artificial Sequence
  ENSG00000143889_40 (sequence is synthesized)
cccccaagctggacgaggcattaagaaggatagaggactccagcaggctgactctacacttcatcatgcacaacatcggcatcagcaaaaagccctctgaaaaactcagactcgcaattc

SEQ ID NO: 383726 - DNA, 120 bp, Artificial Sequence
  ENSG00000143889_41 (sequence is synthesized)
accttgactgcatactgcatgcaccatcaccccaagtttttaaaggaggacacttaacagtacttcagaattgcatgggatgaacaccatgatagactgtgcccatttatacaagttgta

SEQ ID NO: 383727 - DNA, 120 bp, Artificial Sequence
  ENSG00000143889_42 (sequence is synthesized)
tgtatatattggtctgatttcccttaaggtttcagttgtagaatttaagactttccactaacggaaactagacttcatctgcaatgttgtaaatcttaatgcccattactgtgactgtgt

SEQ ID NO: 383728 - DNA, 120 bp, Artificial Sequence
  ENSG00000143889_43 (sequence is synthesized)
gcagcttagattcaaattgttaattggcaaataaccaggaccagtttattaacaggtcttgggaattgataatgctcaaccaatccacacagatagaaaaataaaaggattagaaaggtg

SEQ ID NO: 383729 - DNA, 120 bp, Artificial Sequence
  ENSG00000143889_44 (sequence is synthesized)
actgtcttgtgcttcttcgttcacatgtttggtaattcattgtaaccgaaaagggttttgcacaacttcagtggtccttcagcccagagaagaaatacctttgtggtcagactgttaaag

SEQ ID NO: 383730 - DNA, 120 bp, Artificial Sequence
  ENSG00000143889_45 (sequence is synthesized)
gtaagtaaaatgctttatttgtgttgtaattatgtagtggcagttaccatcacagaaacattcatggtaatataaaaataacacttaataggcttcttaaaaaatacagataaatacaaa

SEQ ID NO: 383731 - DNA, 120 bp, Artificial Sequence
  ENSG00000143889_46 (sequence is synthesized)
caccctacccaagaaatatttatgctttggatatgcagtttgaacttacattattttcaatcttaacagccaactcgtctaaatgttattaggaatgacaatgacagttgggactacact

SEQ ID NO: 383732 - DNA, 120 bp, Artificial Sequence
  ENSG00000143891_0 (sequence is synthesized)
gctggagtttgaagagcgggcagtggctgcacacgccaaactttccctatggcttcggtgaccagggccgtgtttggagagctgccctcgggaggagggacagtggagaagttccagctg

SEQ ID NO: 383733 - DNA, 120 bp, Artificial Sequence
  ENSG00000143891_1 (sequence is synthesized)
cagtcagacctcttgagagtggacatcatctcctggggctgcacgatcacagccctagaggtcaaagacaggcaggggagagcctcggacgtggtgcttggcttcgccgagttggaagga

SEQ ID NO: 383734 - DNA, 120 bp, Artificial Sequence
  ENSG00000143891_2 (sequence is synthesized)
tacctccaaaagcagccatactttggagcagttattgggagggtggccaaccgaatcgccaaaggaaccttcaaggtggatgggaaggagtatcacctggccattaacaaggaacccaac

SEQ ID NO: 383735 - DNA, 120 bp, Artificial Sequence
  ENSG00000143891_3 (sequence is synthesized)
agtctgcatggaggagtcagagggtttgataaagtgctctggacccctcgggtgctgtcaaatggcgtccagttctcgcgcatcagtccagatggtgaagaaggctaccccggagagtta

SEQ ID NO: 383736 - DNA, 120 bp, Artificial Sequence
  ENSG00000143891_4 (sequence is synthesized)
aaagtctgggtgacatacaccctggatggcggagagctcatagtcaactacagagcacaagccagtcaggccacaccagtcaacctgaccaaccattcttacttcaacctggcaggccag

SEQ ID NO: 383737 - DNA, 120 bp, Artificial Sequence
  ENSG00000143891_5 (sequence is synthesized)
gcttccccaaatataaatgaccatgaagtcaccatagaagcggatacttatttgcctgtggatgaaaccctgattcctacaggagaagttgccccagtgcaaggcactgcattcgacctg

SEQ ID NO: 383738 - DNA, 120 bp, Artificial Sequence
  ENSG00000143891_6 (sequence is synthesized)
agaaagccagtggagcttggaaaacacctgcaggacttccatctcaatggttttgaccacaatttctgtctgaagggatctaaagaaaagcatttttgtgcaagggtgcatcatgctgca

SEQ ID NO: 383739 - DNA, 120 bp, Artificial Sequence
  ENSG00000143891_7 (sequence is synthesized)
agcgggcgggtactagaagtatacaccacccagcccggggtccagttttacacgggcaacttcctggatggcacattaaagggcaagaatggagctgtctatcccaagcactccggtttc

SEQ ID NO: 383740 - DNA, 120 bp, Artificial Sequence
  ENSG00000143891_8 (sequence is synthesized)
tgcctggagactcagaactggcctgatgcagtcaatcagccccgcttccctcctgtgctgctgaggcctggtgaggagtatgaccacaccacctggttcaagttttctgtggcttaagga

SEQ ID NO: 383741 - DNA, 120 bp, Artificial Sequence
  ENSG00000143891_9 (sequence is synthesized)
tggctgttctgagaatcagtctgggtattgatttccttttccagtgactggctccaggccatgtctaatgaccagctcgattccctgtgcagttcagagggcaagtgaacccaaccaaca

SEQ ID NO: 383742 - DNA, 120 bp, Artificial Sequence
  ENSG00000143891_10 (sequence is synthesized)
atgtcgtcatctaagccctgaccctagccagggactcccatgctgctgttggctccatctctccacactgcctctttcttttcaactttttgcccttcctttctttaaagctattctcac

SEQ ID NO: 383743 - DNA, 120 bp, Artificial Sequence
  ENSG00000143891_11 (sequence is synthesized)
attgcttttatttcctcctccttcacctccaaccactgtcagcagcactctggagttttcaaatgtcacattagcctcaccctgcatgctaggagatggacctgtctctatacagcagta

SEQ ID NO: 383744 - DNA, 120 bp, Artificial Sequence
  ENSG00000143891_12 (sequence is synthesized)
gagatggacctgtctctatacagcagtagatgattgataagtgaggaaactgaggcttacagaggttgaagaccaacaagctaataaataaaaagttgaggccgggcacggtggctcacg

SEQ ID NO: 383745 - DNA, 120 bp, Artificial Sequence
  ENSG00000143891_13 (sequence is synthesized)
aaaaaaaagcagctctctctctcgggagagggaggggacttccgagaggaaaaggcctgcaagagcctttgggttaactgagaaagcacagcccggccaacgcttgggaagaaagacagg

SEQ ID NO: 383746 - DNA, 120 bp, Artificial Sequence
  ENSG00000143891_14 (sequence is synthesized)
caagcactggaaacaggagctattagggtgaggagagagccttgcctttcacagcacagtgaggatgacattgcaccagggacagagattgtatgtgacaaggctggggctccttctttc

SEQ ID NO: 383747 - DNA, 120 bp, Artificial Sequence
  ENSG00000143891_15 (sequence is synthesized)
ctagacaatcaaagtatcagtgatgggttttggttggtgattttgaaaaaaaaaaaaaaaagtatgttatactagtgtatgctgtactgaattgaaataaaaccaaaatctgcatcttca

SEQ ID NO: 383748 - DNA, 120 bp, Artificial Sequence
  ENSG00000143891_16 (sequence is synthesized)
atgggatcatttggagacagagaaacctagaggacaatagcagaatcctttgattcacatgtgagtgctgctacttccttattatagtagaataaaccaggccaatcttccaataactaa

SEQ ID NO: 383749 - DNA, 86 bp, Artificial Sequence
  ENSG00000143891_17 (sequence is synthesized)
tgggctcaagcgatcctcccttctggacccctcgggtgctgtcaaatggcgtccagttctcgcgcatcagtccagatggtgaagaa

SEQ ID NO: 383750 - DNA, 120 bp, Artificial Sequence
  ENSG00000143919_0 (sequence is synthesized)
aggtcctggcaggggacgagctgcggcggtggcacctccgggtgtggaaggctccagtgagatggagtcgcgagtcgcggacgctgggaccggcgagaccgcgcgagcagcgggcgggag

SEQ ID NO: 383751 - DNA, 120 bp, Artificial Sequence
  ENSG00000143919_1 (sequence is synthesized)
tccggcagttggctgcaccactcgggggcccgtagtctcggcgcccctgggagccgcccggtggaagctcctgcggcaggttctgaagcaaaaacacctggatgattgcctgcgacatgt

SEQ ID NO: 383752 - DNA, 120 bp, Artificial Sequence
  ENSG00000143919_2 (sequence is synthesized)
atctgtaagaagatttgaatcatttaatctgttttcagtaacagaaggcaaagaaagggaaactgaagaggaggttggtgcatgggtccaatatacaagcatcttctgtcctgaatacag

SEQ ID NO: 383753 - DNA, 120 bp, Artificial Sequence
  ENSG00000143919_3 (sequence is synthesized)
tatctccttaaggcataatagtggatccttgaatgttgaagatgtccttaccagctttgacaatacaggaaatgtttgcatctggccatctgaagaggttttggcttactactgcctcaa

SEQ ID NO: 383754 - DNA, 120 bp, Artificial Sequence
  ENSG00000143919_4 (sequence is synthesized)
gcacaataatatattcagggcccttgctgtgtgtgagctagggggtggcatgacatgcttggctgggctcatggttgctatttctgcagatgtcaaagaagttctgttaactgatgggaa

SEQ ID NO: 383755 - DNA, 120 bp, Artificial Sequence
  ENSG00000143919_5 (sequence is synthesized)
tgaaaaggccatcagaaatgtgcaagacatcatcacaaggaatcagaaggctggtgtgtttaagacccagaaaatatcaagctgcgttttacgatgggataatgagacagatgtctctca

SEQ ID NO: 383756 - DNA, 120 bp, Artificial Sequence
  ENSG00000143919_6 (sequence is synthesized)
tgatgcaataaagagattactccagcccagggggaaagcgatggtatttgccccacgccgagggaatactttaaaccagttttgcaatctagctgaaaaagctggtttctgtatccaaag

SEQ ID NO: 383757 - DNA, 120 bp, Artificial Sequence
  ENSG00000143919_7 (sequence is synthesized)
acatgaaaattatgatgaacacatttcaaacttccactccaagttgaaaaaggaaaacccggacatatatgaagaaaaccttcattacccgcttctgcttattttgaccaaacatggata

SEQ ID NO: 383758 - DNA, 120 bp, Artificial Sequence
  ENSG00000143919_8 (sequence is synthesized)
gaagattaagcttctcaaagacgaagaaacgtatcaagtgcatagggaatatttttacaaaaacggaaatctgtaaggggtataatcgcctgcctgcgccctttgcagcatttcacgtgt

SEQ ID NO: 383759 - DNA, 120 bp, Artificial Sequence
  ENSG00000143919_9 (sequence is synthesized)
gggctatggactccacctgtcctcacccacgttattccccagctgccctctccagctccctccccgcctctttttacactctgcttgttgctcgtcctgccctaaacctttgtttgtctt

SEQ ID NO: 383760 - DNA, 120 bp, Artificial Sequence
  ENSG00000143919_10 (sequence is synthesized)
taaatgtgtataagctgcctgtctgtgacttgaatttgactggtgaacaaactaaatatttttccctgtaattgagacagaatttcttttgatgatacccatccctccttcatttttttt

SEQ ID NO: 383761 - DNA, 120 bp, Artificial Sequence
  ENSG00000143919_11 (sequence is synthesized)
ttttttttggtctttgttctgttttggtggtggtagtttttaatcagtaaacccagcaaatatcatgattctttcctggttagaaaaataaataaagtgtatctttttatctccctccaa

SEQ ID NO: 383762 - DNA, 120 bp, Artificial Sequence
  ENSG00000143919_12 (sequence is synthesized)
ctgttgcccaggctggagtgcagtggtgatcataactcagtgcagcctcaaactcctgaactgctcatatatttaagaaacacttcgtggcagaagattatgatactcttgcttatttat

SEQ ID NO: 383763 - DNA, 120 bp, Artificial Sequence
  ENSG00000143919_13 (sequence is synthesized)
attatgatactcttgcttatttattggcttaaggattaaggatccccaaagtctcagacttcagtaagtaagcctatgtcctacatgatgtctgtaaactccactccctcttagacttac

SEQ ID NO: 383764 - DNA, 120 bp, Artificial Sequence
  ENSG00000143919_14 (sequence is synthesized)
tgaatgttgaagatgtccttaccagctttgacaatacaggaaatgtttatgatgtctcactttattgcccatgttggtcttgatctcctggactcaagcaatccttctgcctcagcctcc

SEQ ID NO: 383765 - DNA, 120 bp, Artificial Sequence
  ENSG00000143919_15 (sequence is synthesized)
ccagctgtgtatgcatttcttgcggacagttgtatagttgggtcttggattttgagcccatctgacaagtttttctttttaattgtactgtttaattgaactgaatttaattattgatat

SEQ ID NO: 383766 - DNA, 120 bp, Artificial Sequence
  ENSG00000143919_16 (sequence is synthesized)
atagattctagaagcaaccaggagaagtgatgccacttgtgctccctctcactctccattaaattagagagtcaacactggaacctctgttaaagctgcttcagaaaaaccaagtatctt

SEQ ID NO: 383767 - DNA, 120 bp, Artificial Sequence
  ENSG00000143919_17 (sequence is synthesized)
tacaactattctaagcagcacaagttggttgtgaattatagttaacaccatctttccttgtttcaaatctcatgttagtgcatctgattagttaaaccaaaatcacatctgaaactttgg

SEQ ID NO: 383768 - DNA, 120 bp, Artificial Sequence
  ENSG00000143919_18 (sequence is synthesized)
gtttaaaggtttaagactttggaatgatactcacctgcatttgacttctggctctgaaattcatcttgagcaatttgtatcatctctatgaacctcaactgttttcatctcttagggctg

SEQ ID NO: 383769 - DNA, 120 bp, Artificial Sequence
  ENSG00000143919_19 (sequence is synthesized)
taagaaaagatgttttggccaaggcatcctacctctgcttgtcttcatgatcttcattacaatcatagcagaaatcctcatgctaaatgtttttcttttccttcttttctgggagatcat

SEQ ID NO: 383770 - DNA, 120 bp, Artificial Sequence
  ENSG00000143919_20 (sequence is synthesized)
taatcagctatcctattttcctattttacgatttctccttctccagcccaattatgttttctacaaagctagtgtctgggatactaactcttaactcattcaagcaagcttctcggctat

SEQ ID NO: 383771 - DNA, 120 bp, Artificial Sequence
  ENSG00000143919_21 (sequence is synthesized)
atcattacaataaattctatttaaaatacttagtgaagtacagtattcataagccagttattgcattaggtgtagctgcagtgacactgattagcattcatcataaagatagttgaatat

SEQ ID NO: 383772 - DNA, 120 bp, Artificial Sequence
  ENSG00000143919_22 (sequence is synthesized)
gatttatttatatttgtatgtaagtatatatattttgaatatgtactatgctcatatgattcaaagttcaaaatggcctcaagagtataaactgtgaaaagtctcctttccatctgtcct

SEQ ID NO: 383773 - DNA, 120 bp, Artificial Sequence
  ENSG00000143919_23 (sequence is synthesized)
tcatcaacccagtttccctctctggaaataaccacaatgactaatttcttttgtattcttccagagttattttctgcatacaaataaaaacatgtatggttgcatatatttctgtatact

SEQ ID NO: 383774 - DNA, 120 bp, Artificial Sequence
  ENSG00000143919_24 (sequence is synthesized)
attccagccttgctgtgcctgcagaaggggtcctacagtctggtgggtctaagagcttgggttgggcttaagtcccagcccagccactcactggcatggagaggacggaaggtgtttggc

SEQ ID NO: 383775 - DNA, 120 bp, Artificial Sequence
  ENSG00000143919_25 (sequence is synthesized)
tatgcacttacaagaaaggaaaggacctgacttacagtcagctctcatttgtctggaattcattaatcttacaggtcttctgagcgttttacgatgggataatgagacagatgtctctca

SEQ ID NO: 383776 - DNA, 120 bp, Artificial Sequence
  ENSG00000143919_26 (sequence is synthesized)
tcacgtctgcgtattgatttattgctgtgtgatatacgacccaaccttctttttatatatttatatttactatggtggaaaacaaaccattttgaaagtgcttacctttaactaggaata

SEQ ID NO: 383777 - DNA, 120 bp, Artificial Sequence
  ENSG00000143919_27 (sequence is synthesized)
gccagtatcttcgagaaagcgtatttttgaaacatacttatttgagttaaaattgtgaaatgcatttaaaaattgaaattgaaagtagaactactggagaagttttaaatatttattgga

SEQ ID NO: 383778 - DNA, 120 bp, Artificial Sequence
  ENSG00000143919_28 (sequence is synthesized)
acagaaagagcaatctccacaagtgtttattaagttcctattatgtgctgtcctgcattttcaattctcaaatgatttatcaactttgaagtacaaagtagtaaaacattctttctacac

SEQ ID NO: 383779 - DNA, 120 bp, Artificial Sequence
  ENSG00000143919_29 (sequence is synthesized)
tatccactcttttctgaaccaaaggcatactctaaaagcttgcagtgactggatgagtcaaattctgtcacttcctctttacaagttgttttgtaatgattaaaccagtgatacattgta

SEQ ID NO: 383780 - DNA, 120 bp, Artificial Sequence
  ENSG00000143921_0 (sequence is synthesized)
aaacagagtgaagacactggccctggcaggcagcagctgggtctaagagagctgcagcccagggtcacagacctgtgggccccatggccgggaaggcggcagaggagagagggctgccga

SEQ ID NO: 383781 - DNA, 120 bp, Artificial Sequence
  ENSG00000143921_1 (sequence is synthesized)
aaggggccactccccaggatacctcgggcctccaggatagattgttctcctctgaaagtgacaacagcctgtacttcacctacagtggccagcccaacaccctggaggtcagagacctca

SEQ ID NO: 383782 - DNA, 120 bp, Artificial Sequence
  ENSG00000143921_2 (sequence is synthesized)
actaccaggtggacctggcctctcaggtcccttggtttgagcagctggctcagttcaagatgccctggacatctcccagctgccagaattcttgtgagctgggcatccagaacctaagct

SEQ ID NO: 383783 - DNA, 120 bp, Artificial Sequence
  ENSG00000143921_3 (sequence is synthesized)
tcaaagtgagaagtgggcagatgctggccatcatagggagctcaggttgtgggagagcctccttgctagatgtgatcactggccgaggtcacggcggcaagatcaagtcaggccagatct

SEQ ID NO: 383784 - DNA, 120 bp, Artificial Sequence
  ENSG00000143921_4 (sequence is synthesized)
ggatcaatgggcagcccagctcgcctcagctggtgaggaagtgtgtggcccacgtgcgccagcacaaccagctgctccccaacttgactgtgcgagagaccttggccttcattgcccaga

SEQ ID NO: 383785 - DNA, 120 bp, Artificial Sequence
  ENSG00000143921_5 (sequence is synthesized)
tgcggctgcccagaaccttctcccaggcccagcgtgacaaaagggtggaggacgtgatcgcggagctgcggcttaggcagtgcgctgacacccgcgtgggcaacatgtacgtgcgggggt

SEQ ID NO: 383786 - DNA, 120 bp, Artificial Sequence
  ENSG00000143921_6 (sequence is synthesized)
tgtcggggggtgagcgcaggagagtcagcattggggtgcagctcctgtggaacccaggaatccttattctcgacgaacccacctctgggctcgacagcttcacagcccacaacctggtga

SEQ ID NO: 383787 - DNA, 120 bp, Artificial Sequence
  ENSG00000143921_7 (sequence is synthesized)
agaccttgtccaggctggccaaaggcaaccggctggtgctcatctccctccaccagcctcgctctgacatcttcaggctgtttgatctggtcctcctgatgacgtctggcacccccatct

SEQ ID NO: 383788 - DNA, 120 bp, Artificial Sequence
  ENSG00000143921_8 (sequence is synthesized)
acttaggggcggcccagcacatggtccagtatttcacagccatcggctacccctgtcctcgctacagcaatcctgctgacttctatgtggacctgaccagcattgacaggcgcagcagag

SEQ ID NO: 383789 - DNA, 120 bp, Artificial Sequence
  ENSG00000143921_9 (sequence is synthesized)
agcaggaattggccaccagggagaaggctcagtcactcgcagccctgtttctagaaaaagtgcgtgacttagatgactttctatggaaagcagagacgaaggatcttgacgaggacacct

SEQ ID NO: 383790 - DNA, 120 bp, Artificial Sequence
  ENSG00000143921_10 (sequence is synthesized)
gtgtggaaagcagcgtgaccccactagacaccaactgcctcccgagtcctacgaagatgcctggggcggtgcagcagtttacgacgctgatccgtcgtcagatttccaacgacttccgag

SEQ ID NO: 383791 - DNA, 120 bp, Artificial Sequence
  ENSG00000143921_11 (sequence is synthesized)
acctgcccaccctcctcatccatggggcggaggcctgtctgatgtcaatgaccatcggcttcctctattttggccatgggagcatccagctctccttcatggatacagccgccctcttgt

SEQ ID NO: 383792 - DNA, 120 bp, Artificial Sequence
  ENSG00000143921_12 (sequence is synthesized)
tcatgatcggtgctctcatccctttcaacgtcattctggatgtcatctccaaatgttactcagagagggcaatgctttactatgaactggaagacgggctgtacaccactggtccatatt

SEQ ID NO: 383793 - DNA, 120 bp, Artificial Sequence
  ENSG00000143921_13 (sequence is synthesized)
tctttgccaagatcctcggggagcttccggagcactgtgcctacatcatcatctacgggatgcccacctactggctggccaacctgaggccaggcctccagcccttcctgctgcacttcc

SEQ ID NO: 383794 - DNA, 120 bp, Artificial Sequence
  ENSG00000143921_14 (sequence is synthesized)
tgctggtgtggctggtggtcttctgttgcaggattatggccctggccgccgcggccctgctccccaccttccacatggcctccttcttcagcaatgccctctacaactccttctacctcg

SEQ ID NO: 383795 - DNA, 120 bp, Artificial Sequence
  ENSG00000143921_15 (sequence is synthesized)
ccgggggcttcatgataaacttgagcagcctgtggacagtgcccgcgtggatttccaaagtgtccttcctgcggtggtgttttgaagggctgatgaagattcagttcagcagaagaactt

SEQ ID NO: 383796 - DNA, 120 bp, Artificial Sequence
  ENSG00000143921_16 (sequence is synthesized)
ataaaatgcctctcgggaacctcaccatcgcggtctcaggagataaaatcctcagtgtcatggagctggactcgtaccctctctacgccatctacctcatcgtcattggcctcagcggtg

SEQ ID NO: 383797 - DNA, 120 bp, Artificial Sequence
  ENSG00000143921_17 (sequence is synthesized)
gcttcatggtcctgtactacgtgtccttaaggttcatcaaacagaaaccaagtcaagactggtgattcacgccagacgtctgcccgctggtgggggacctgagcagacccttcaactgca

SEQ ID NO: 383798 - DNA, 120 bp, Artificial Sequence
  ENSG00000143921_18 (sequence is synthesized)
ctccctcctcaggagccccttcctggggacagtgaggacaatgaccctacagatgctcagctacatccggcccagggtgctgcagtggcacagaccagccacaggatggcagtagaataa

SEQ ID NO: 383799 - DNA, 120 bp, Artificial Sequence
  ENSG00000143921_19 (sequence is synthesized)
agacagtcgaaagggatttctgctcactggcaggagactgcgatgactgggagaaaacctgcactcggtggcacctacaacgttgctaatttatttccttttgatatgcatttatatagg

SEQ ID NO: 383800 - DNA, 120 bp, Artificial Sequence
  ENSG00000143921_20 (sequence is synthesized)
caactcgatataggatgggagcaaactaggaatgaattgggtagctagactgtgcaggaattgttggaacctggagggaacaataacagtagctagcagatttggcttcatcttccaggg

SEQ ID NO: 383801 - DNA, 120 bp, Artificial Sequence
  ENSG00000143921_21 (sequence is synthesized)
gccccacactccgtggtgagccaccatcaatacagaaagtgacctaagatgtaccagcaagatgccatcccttctttttgtgtggggtcatgggctccaaaagccaacgtgaacaattaa

SEQ ID NO: 383802 - DNA, 120 bp, Artificial Sequence
  ENSG00000143921_22 (sequence is synthesized)
aaatgtattgagcatctactctgtagcaggtcctgtgaaaacactttaggtggacaatcccttgaggtaagtggtatcccattttataggtgtgaaaactgaagcaaaaattcattttcc

SEQ ID NO: 383803 - DNA, 120 bp, Artificial Sequence
  ENSG00000143921_23 (sequence is synthesized)
taagggcacatggatactttgtggtggagtcatatggggatcagaaaagcctttgaggcctttggagttagagggcagaaggcaaggcctgagccgctgtaagccttaggagtttaggaa

SEQ ID NO: 383804 - DNA, 120 bp, Artificial Sequence
  ENSG00000143921_24 (sequence is synthesized)
ggctccagaagacaaatggggtctgtagaggctgttaactcagccaggcttcttagagttgcatttcactaactgatatggtttggctctgcgtcctcacccaaatctcaccttgaattg

SEQ ID NO: 383805 - DNA, 120 bp, Artificial Sequence
  ENSG00000143921_25 (sequence is synthesized)
taataatccccaagtgtcaagggcgggaccagatggagataattgaatcataggggtggtttctctgatgctgttctcctgagagtgagtgagttctgatgagatccgacggttttataa

SEQ ID NO: 383806 - DNA, 120 bp, Artificial Sequence
  ENSG00000143921_26 (sequence is synthesized)
ggggcttccctcttcgctcggctctcattctctctcccgctaccctgtgaagaggagccttccaccacgactgcaagtttcctgaggctgccccagccgtgctgaactgtgagtcagtta

SEQ ID NO: 383807 - DNA, 120 bp, Artificial Sequence
  ENSG00000143921_27 (sequence is synthesized)
cttgggtatttcttcatagcagtgtgagagcagatgaatacactggccctgcctgggtttcagaaccagccttgaacctttcacagtggccagaggatggggaggcagaggcccaggttg

SEQ ID NO: 383808 - DNA, 120 bp, Artificial Sequence
  ENSG00000143921_28 (sequence is synthesized)
gaggatggggaggcagaggcccaggttgcacacttcttgcctgagtgttggggactatctgacccaaaacaggtgcacagagggcaggagaggatgttcccaaaggaaaattagagttta

SEQ ID NO: 383809 - DNA, 120 bp, Artificial Sequence
  ENSG00000143921_29 (sequence is synthesized)
gcagaatgggcacagctggagctgattggataggtcccatgagcctcaggccccacccaggctcaatgagtcagagtctgcgtcttaagaagaccccctggtgatctgtgcacattcaag

SEQ ID NO: 383810 - DNA, 120 bp, Artificial Sequence
  ENSG00000143921_30 (sequence is synthesized)
catgctgccgttttccaaagcacttgcaacactcaggatgcttgcacggtcatgttgccaccatccaacctgcagaccccattcttgagattgactgggagttcctatcatgtcctccat

SEQ ID NO: 383811 - DNA, 120 bp, Artificial Sequence
  ENSG00000143921_31 (sequence is synthesized)
agcaaggggatctagaccagaatcaagccttggatctagttctcaagtctcttttgtctctttcagtttaggaacagtttgtcaactttccttcacttttgtgaccttgatacttgagtt

SEQ ID NO: 383812 - DNA, 120 bp, Artificial Sequence
  ENSG00000143921_32 (sequence is synthesized)
tgaaggctgtctctcaatttgtgttctgcccagtgcatcctatcagaaggcatgtgatttcaacttctcccataccaacaacgttcactttgatcacttgattaaaggggtgtctgctag

SEQ ID NO: 383813 - DNA, 120 bp, Artificial Sequence
  ENSG00000143921_33 (sequence is synthesized)
gcttctccacagccaagttactattttccctccctttataattaataagcattttgtaagtgggtactttgaaactatgtaaattgtaaactttccatttatgcattttaaaattttgat

SEQ ID NO: 383814 - DNA, 120 bp, Artificial Sequence
  ENSG00000143921_34 (sequence is synthesized)
tgatgtaaacttgtgaattcccattgtatccttacaaccctttattattgtgattaattctgatgctcagcttgtccctgatttggccagtgggaaccccgtcgagctggcttctgcatc

SEQ ID NO: 383815 - DNA, 120 bp, Artificial Sequence
  ENSG00000143921_35 (sequence is synthesized)
cttttgatatgtcctcatcatcctttgagggctgaaacaaccaagagtttcaggctcattttttgttttgtttttttttttttgagacagaatctcattctgtggcccaggctggagtgc

SEQ ID NO: 383816 - DNA, 63 bp, Artificial Sequence
  ENSG00000143921_36 (sequence is synthesized)
ccttgcctcagcctcccaagtagttgggattaacagtgcccaccaccacacctggctaatttt

SEQ ID NO: 383817 - DNA, 64 bp, Artificial Sequence
  ENSG00000143921_37 (sequence is synthesized)
tttttagtaaagacagtgtttcaccatattggccagactggttgtgaactctacccaccgcacc

SEQ ID NO: 383818 - DNA, 120 bp, Artificial Sequence
  ENSG00000143921_38 (sequence is synthesized)
tggtgtcacaggttcatcttgtattttcccatctcagccctggaatccgatgtttctccagagaatctgggttcctcttagtggaaaatggtatttagaagccaaggttttggtgataag

SEQ ID NO: 383819 - DNA, 120 bp, Artificial Sequence
  ENSG00000143921_39 (sequence is synthesized)
tggtatttagaagccaaggttttggtgataagtatgctctttgcttgtggaacatctctgctcccaggctctctcagtgaacagagttagggagtgtgtgtgtgtgtgcgcgcgcgcgcg

SEQ ID NO: 383820 - DNA, 120 bp, Artificial Sequence
  ENSG00000143921_40 (sequence is synthesized)
tgagtttactctgataacatccatttccaatccagcatcacagagttgatcctaggttcttccctcttctctaattgtgagaaacctggcttccattacccttaggttatttactcattt

SEQ ID NO: 383821 - DNA, 120 bp, Artificial Sequence
  ENSG00000143921_41 (sequence is synthesized)
gattaaccgcctgcaggtaagtaatctcccatctacactgccacgccttctcctgtatggacgtcctgcctaccctgctcaggctctaactcccaagtccagctttccctgagtctgcag

SEQ ID NO: 383822 - DNA, 120 bp, Artificial Sequence
  ENSG00000143921_42 (sequence is synthesized)
ctgtcttcctcacactcccgtggcccaccacaacttccccccacctccttgtcactgtggtcccctaatggcgttaggcctgaatgaagaagggggaaggatgaagaggacattggtagc

SEQ ID NO: 383823 - DNA, 120 bp, Artificial Sequence
  ENSG00000143921_43 (sequence is synthesized)
ttgccttaactccccaggtaattctaatgtgcagtgattgacagccactaagatacatcacctgactttgtgagttcaccattcggtctgcaatgggttttggtaactcagtggctctgt

SEQ ID NO: 383824 - DNA, 120 bp, Artificial Sequence
  ENSG00000143921_44 (sequence is synthesized)
atgccgtgctgaaggggaaaagggcaaagtgcaaaggcaggagggatggagaaaatatagcagctgccatttatttgtgtttttcctacagcggtggttctccaccctggttgcccatgc

SEQ ID NO: 383825 - DNA, 120 bp, Artificial Sequence
  ENSG00000143921_45 (sequence is synthesized)
tggagctttaacaaaagccaatgtggacccattgcccagagactctgatcccatgggtctgttttgtttaaaatgctcttcaaggcattgtgaggccaggaaaacaaagaaccaaggctc

SEQ ID NO: 383826 - DNA, 120 bp, Artificial Sequence
  ENSG00000143921_46 (sequence is synthesized)
ctgtctcaaaaaaaaaaaaaaaaaacccaaggctctcgaggcatgcatgctgttcagcgagccctgccctgcattgcgaaagggtagagatttgtttatttgtcagtattgaaagcatgg

SEQ ID NO: 383827 - DNA, 120 bp, Artificial Sequence
  ENSG00000143921_47 (sequence is synthesized)
gatttgtttatttgtcagtattgaaagcatggcttgcaaagttttcctgttaagagtcagatagtaaatatttgggacttcgtgggccttataggctctgctgcaattacttaactctgc

SEQ ID NO: 383828 - DNA, 120 bp, Artificial Sequence
  ENSG00000143921_48 (sequence is synthesized)
tgttacagtgtgagagcagctgtagactatagtaacgtacagccggtgtggctgtcttctaagaaagtattatttacaaaaacaggcaggttgctagatttgacctgagggtgtagtttg

SEQ ID NO: 383829 - DNA, 120 bp, Artificial Sequence
  ENSG00000143921_49 (sequence is synthesized)
cagagccttggtaaaggttttcaaatttgcattttaagccctccaatttcaagttatgctattggtggggaattttaattaaacagaaaataatcaccaatattggctcaaatatttcct

SEQ ID NO: 383830 - DNA, 120 bp, Artificial Sequence
  ENSG00000143921_50 (sequence is synthesized)
gatttaaaaaaaaatctgctcttgttcctataaatagtatataagatgtaatcttgccctgggttaaaccagtctacagaggtagatctcgcatttgcttttgttttcttctacttcaac

SEQ ID NO: 383831 - DNA, 120 bp, Artificial Sequence
  ENSG00000143921_51 (sequence is synthesized)
tcttgtcatgatcccaaattaaacaactagcaacagaaatgttcaaatctgtcaaatccaagtgttaacagacctgggaccaggggttcctcatagtggcttagcacagcatacagacca

SEQ ID NO: 383832 - DNA, 120 bp, Artificial Sequence
  ENSG00000143921_52 (sequence is synthesized)
ctttcctttggcccaaccggccttggggtctggagcaccaaacaggccctgaggaagcgtgcaaggaactggaatgcggggaaagtgatgaaatattttgttggttggcctttgcttgtt

SEQ ID NO: 383833 - DNA, 120 bp, Artificial Sequence
  ENSG00000143921_53 (sequence is synthesized)
tgcaaaatatatccaatgctcacacctgagagacaacagacatccttatttgtgaatagtctgcactagataattcagatttcaagtcatctgtcattcgtacttgataatgatttgttc

SEQ ID NO: 383834 - DNA, 120 bp, Artificial Sequence
  ENSG00000143921_54 (sequence is synthesized)
ttcatttaaagtggcctgggtacagagcaacatcccctgtctttatcacatgagctctgcctgaggcagcttcagcaggtaggcaggcaggcagatggagcacagcccattctctgctgg

SEQ ID NO: 383835 - DNA, 120 bp, Artificial Sequence
  ENSG00000143921_55 (sequence is synthesized)
tgcactaggaacagcagcacgtgtggtgttagcagctaataattaaaacaacgtttaagcagtgggttgagatttttaaacacaaaccaactcaaaaacacttctctgctttctatgtaa

SEQ ID NO: 383836 - DNA, 120 bp, Artificial Sequence
  ENSG00000143921_56 (sequence is synthesized)
tagtgctcacatcatttgtatgattgtctcgtctctttaaaattggaaatattcttgtttccccaaactgctaataagctctactgacccatgctaaaaataaagctctttcggctgggc

SEQ ID NO: 383837 - DNA, 120 bp, Artificial Sequence
  ENSG00000143921_57 (sequence is synthesized)
cccacctgcaggacgtaggagaagcagtcctggaactgctcccggcgcagcgcccggccgttcacatacacctcccccaggaaggtccccgcgcgccccagcctcccggacatggcgtcc

SEQ ID NO: 383838 - DNA, 120 bp, Artificial Sequence
  ENSG00000143921_58 (sequence is synthesized)
agcagcgtggttttcccggagcctgcggggcgacaacagaaggccctagaggaaccactctgtgccggccttggaggagcttcccgagaccctctgtgcaggcatgaccccgcgggccat

SEQ ID NO: 383839 - DNA, 120 bp, Artificial Sequence
  ENSG00000143921_59 (sequence is synthesized)
gagtgctacatgacggaccctgttctaggtgttaaggacacagcaggatacaggccctgccctatggaacgcgcactgtgcgtgcagcagtctcacgcgcaagtgagtctctggattgtc

SEQ ID NO: 383840 - DNA, 120 bp, Artificial Sequence
  ENSG00000143921_60 (sequence is synthesized)
ccctgagtgagaggggacatgccatttctctcatctgggtcaagaccgaacgtgctttctctgcttgtttatttgtctttaaaactgttttggattgaaaaacaaaatacttataggtat

SEQ ID NO: 383841 - DNA, 120 bp, Artificial Sequence
  ENSG00000143921_61 (sequence is synthesized)
cagaataagaggaaagccaagactcttggaaacgtttggatcctaggacggatttctttttgtgcccccctggggtggtctggttgtacctggatgtaggtgacattgtctagagccttg

SEQ ID NO: 383842 - DNA, 120 bp, Artificial Sequence
  ENSG00000143921_62 (sequence is synthesized)
ctcacaaagcaagcagcatcagcaacccctgagagcttgccagaaatgcagagcctcaagccgcacccaagacctgctgagtcagctctgcttcagtcgagtttgagaagcactggcttg

SEQ ID NO: 383843 - DNA, 120 bp, Artificial Sequence
  ENSG00000143921_63 (sequence is synthesized)
gacaaatggatgcttcttatggagctctttgctgactagtagaataatacagcagaatggctgagaacacaggttctgggtcagacagacctgggctcaaatcctggctcctccatttgc

SEQ ID NO: 383844 - DNA, 120 bp, Artificial Sequence
  ENSG00000143921_64 (sequence is synthesized)
tggcttgagggtaggtgctgttgttaagagtcatgagtgcgcctcttgtccacccgaggctgtggccagagcatctgactttggctaacacctggacggagagatcagcaaacagctcca

SEQ ID NO: 383845 - DNA, 120 bp, Artificial Sequence
  ENSG00000143921_65 (sequence is synthesized)
gcatgtaatgttcttttcagactcctccagccatgaggggcattggttcaggttgttcctccacaatcacattctgattatggccagacagcccctgccacactctcacctctcagacag

SEQ ID NO: 383846 - DNA, 120 bp, Artificial Sequence
  ENSG00000143921_66 (sequence is synthesized)
cctctccagtgtcttacttagcacaactttcactcatctgcaaagagccaggttcttggagtgcctcaaattgtcatttccatggccaaatttaaaatgagagaatgtctgagctgaaag

SEQ ID NO: 383847 - DNA, 120 bp, Artificial Sequence
  ENSG00000143921_67 (sequence is synthesized)
ggggcttggggaacagaggtcattctcatcatgttccacctttctttctccctaccagtttggaagcattttcagaggaaggtgttcaaactccctactcctcagtgtgtctagagtatc

SEQ ID NO: 383848 - DNA, 120 bp, Artificial Sequence
  ENSG00000143921_68 (sequence is synthesized)
tccatttgacagatgaggagactcaaatccaaagaaattgagggattctcgtaaggacacatatttaatgcagagctagaactagaactttggtttcatcattctcggatcaagacattt

SEQ ID NO: 383849 - DNA, 120 bp, Artificial Sequence
  ENSG00000143921_69 (sequence is synthesized)
ctccctgggacacccttacatagtgctggagagagcattttatatcttttaattaatcatttccagaggtagagattactcaattttttaaacattctgctccaaacttttacacccgtc

SEQ ID NO: 383850 - DNA, 120 bp, Artificial Sequence
  ENSG00000143921_70 (sequence is synthesized)
tggtagataagttctgtttaccgtataaccaaagatcaaatgaaatcttatgtataaatgcactttgtaactgaaacagcatcacagtcatgaagtccctctcactctgtccctgtccct

SEQ ID NO: 383851 - DNA, 79 bp, Artificial Sequence
  ENSG00000143921_71 (sequence is synthesized)
atcacagtcatgaagtccctctcactctgtccctgtccctgcaatcctgacctaaataagaaaaaagtagatcccggcc

SEQ ID NO: 383852 - DNA, 90 bp, Artificial Sequence
  ENSG00000143921_72 (sequence is synthesized)
actgcactccagcctgggcaacagagcacgatcccgtctcttagaaaggaatgaataaattacactgaatagtctcctgttttggaggca

SEQ ID NO: 383853 - DNA, 90 bp, Artificial Sequence
  ENSG00000143921_73 (sequence is synthesized)
aaaggaatgaataaattacactgaatagtctcctgttttggaggcagtctctctctgttgcctaggctggattgcagtggtgtgatctcg

SEQ ID NO: 383854 - DNA, 120 bp, Artificial Sequence
  ENSG00000143921_74 (sequence is synthesized)
cccaagtagctgggattacaggtgggtgccactatgcctggctcatttttttttgtattttttgtagagatatggttttgccatggtggccaggctgatctccaactcctggcctcaggt

SEQ ID NO: 383855 - DNA, 89 bp, Artificial Sequence
  ENSG00000143921_75 (sequence is synthesized)
ctgggattacaggcatgagtcactgcaccgagcatctcctggttgtttatagattcagtgttgtttggcttcaggtttacttgcctgtg

SEQ ID NO: 383856 - DNA, 120 bp, Artificial Sequence
  ENSG00000143921_76 (sequence is synthesized)
aacaaaaacaaaaaacaaaacaacaacaaacaactttagacaaataaatagtagagttgtctgagcaaatagtgattaatgaatctggcagcactcaaaaacaggaccagttcagaggct

SEQ ID NO: 383857 - DNA, 120 bp, Artificial Sequence
  ENSG00000143921_77 (sequence is synthesized)
gaccagttcagaggctcccccaagcaatttggtcaggcagtatttatagacagaaaaaggaagtgccctacagaaatagctgattggttacagttgggtgttcaccttatttatttgagg

SEQ ID NO: 383858 - DNA, 120 bp, Artificial Sequence
  ENSG00000143921_78 (sequence is synthesized)
gtgatgtgatcaggtgttgggtatggacaggagctcatcagtcggtagcctgtgattggctgatgcttggctgccatgattggctgagactcagcaacttgtctcagccagtctctgtct

SEQ ID NO: 383859 - DNA, 120 bp, Artificial Sequence
  ENSG00000143921_79 (sequence is synthesized)
taagagaatatactgctaagataagttgcagtttgtttacatactaagtttgcttgcagtttgctctgtgggaactcaaagtatgcaggcagcctcaggccaaatttagtttaactgagc

SEQ ID NO: 383860 - DNA, 120 bp, Artificial Sequence
  ENSG00000143924_0 (sequence is synthesized)
gcggcgctcgcggctgctgcctgggagggaggccgggcaggcggctgagcggcgcggctctcaacgtgacggggaagtggttcgggcggccgcggcttactaccccagggcgaacggacg

SEQ ID NO: 383861 - DNA, 120 bp, Artificial Sequence
  ENSG00000143924_1 (sequence is synthesized)
gacgacggaggcgggagccggtagccgagccgggcgacctagagaacgagcgggtcaggctcagcgtcggccactctgtcggtccgctgaatgaagtgcccgcccctctaagcccggagc

SEQ ID NO: 383862 - DNA, 120 bp, Artificial Sequence
  ENSG00000143924_2 (sequence is synthesized)
ccggcgctttccccgcaagatggacggtttcgccggcagtctcgatgatagtatttctgctgcaagtacttctgatgttcaagatcgcctgtcagctcttgagtcacgagttcagcaaca

SEQ ID NO: 383863 - DNA, 120 bp, Artificial Sequence
  ENSG00000143924_3 (sequence is synthesized)
agaagatgaaatcactgtgctaaaggcggctttggctgatgttttgaggcgtcttgcaatctctgaagatcatgtggcctcagtgaaaaaatcagtctcaagtaaaggccaaccaagccc

SEQ ID NO: 383864 - DNA, 120 bp, Artificial Sequence
  ENSG00000143924_4 (sequence is synthesized)
tcgagcagttattcccatgtcctgtataaccaatggaagtggtgcaaacagaaaaccaagtcataccagtgctgtctcaattgcaggaaaagaaactctttcatctgctgctaaaagtgg

SEQ ID NO: 383865 - DNA, 120 bp, Artificial Sequence
  ENSG00000143924_5 (sequence is synthesized)
tacagaaaaaaagaaagaaaaaccacaaggacagagagaaaaaaaagaggaatctcattctaatgatcaaagtccacaaattcgagcatcaccttctccccagccctcttcacaacctct

SEQ ID NO: 383866 - DNA, 120 bp, Artificial Sequence
  ENSG00000143924_6 (sequence is synthesized)
ccaaatacacagacaaactccagaaagcaagaatgctactcccaccaaaagcataaaacgaccatcaccagctgaaaagtcacataattcttgggaaaattcagatgatagccgtaataa

SEQ ID NO: 383867 - DNA, 120 bp, Artificial Sequence
  ENSG00000143924_7 (sequence is synthesized)
attgtcgaaaataccttcaacacccaaattaataccaaaagttaccaaaactgcagacaagcataaagatgtcatcatcaaccaagaaggagaatatattaaaatgtttatgcgcggtcg

SEQ ID NO: 383868 - DNA, 120 bp, Artificial Sequence
  ENSG00000143924_8 (sequence is synthesized)
gccaattaccatgttcattccttccgatgttgacaactatgatgacatcagaacggaactgcctcctgagaagctcaaactggagtgggcatatggttatcgaggaaaggactgtagagc

SEQ ID NO: 383869 - DNA, 120 bp, Artificial Sequence
  ENSG00000143924_9 (sequence is synthesized)
taatgtttaccttcttccgaccgggaaaatagtttatttcattgcatcagtagtagtactatttaattatgaggagagaactcagcgacactacctgggccatacagactgtgtgaaatg

SEQ ID NO: 383870 - DNA, 120 bp, Artificial Sequence
  ENSG00000143924_10 (sequence is synthesized)
ccttgctatacatcctgacaaaattaggattgcaactggacagatagctggcgtggataaagatggaaggcctctacaaccccacgtcagagtgtgggattctgttactctatccacact

SEQ ID NO: 383871 - DNA, 120 bp, Artificial Sequence
  ENSG00000143924_11 (sequence is synthesized)
gcagattattggacttggcacttttgagcgtggagtaggatgcctggatttttcaaaagcagattcaggtgttcatttatgtattattgatgactccaatgagcatatgcttactgtatg

SEQ ID NO: 383872 - DNA, 120 bp, Artificial Sequence
  ENSG00000143924_12 (sequence is synthesized)
ggactggcagaagaaagcaaaaggagcagaaataaagacaacaaatgaagttgttttggctgtggagtttcacccaacagatgcaaataccataattacatgcggtaaatctcatatttt

SEQ ID NO: 383873 - DNA, 120 bp, Artificial Sequence
  ENSG00000143924_13 (sequence is synthesized)
cttctggacctggagcggcaattcactaacaagaaaacagggaatttttgggaaatatgaaaagccaaaatttgtgcagtgtttagcattcttggggaatggagatgttcttactggaga

SEQ ID NO: 383874 - DNA, 120 bp, Artificial Sequence
  ENSG00000143924_14 (sequence is synthesized)
ctcaggtggagtcatgcttatatggagcaaaactactgtagagcccacacctgggaaaggacctaaaggtgtatatcaaatcagcaaacaaatcaaagctcatgatggcagtgtgttcac

SEQ ID NO: 383875 - DNA, 120 bp, Artificial Sequence
  ENSG00000143924_15 (sequence is synthesized)
actttgtcagatgagaaatgggatgttattaactggaggagggaaagacagaaaaataattctgtgggatcatgatctgaatcctgaaagagaaatagaggttcctgatcagtatggcac

SEQ ID NO: 383876 - DNA, 120 bp, Artificial Sequence
  ENSG00000143924_16 (sequence is synthesized)
aatcagagctgtagcagaaggaaaggcagatcaatttttagtaggcacatcacgaaactttattttacgaggaacatttaatgatggcttccaaatagaagtacagggtcatacagatga

SEQ ID NO: 383877 - DNA, 120 bp, Artificial Sequence
  ENSG00000143924_17 (sequence is synthesized)
gctttggggtcttgccacacatcccttcaaagatttgctcttgacatgtgctcaggacaggcaggtgtgcctgtggaactcaatggaacacaggctggaatggaccaggctggtagatga

SEQ ID NO: 383878 - DNA, 120 bp, Artificial Sequence
  ENSG00000143924_18 (sequence is synthesized)
accaggacactgtgcagattttcatccaagtggcacagtggtggccataggaacgcactcaggcaggtggtttgttctggatgcagaaaccagagatctagtttctatccacacagacgg

SEQ ID NO: 383879 - DNA, 120 bp, Artificial Sequence
  ENSG00000143924_19 (sequence is synthesized)
gaatgaacagctctctgtgatgcgctactcaatagatggtaccttcctggctgtaggatctcatgacaactttatttacctctatgtagtctctgaaaatggaagaaaatatagcagata

SEQ ID NO: 383880 - DNA, 120 bp, Artificial Sequence
  ENSG00000143924_20 (sequence is synthesized)
tggaaggtgcactggacattccagctacatcacacaccttgactggtccccagacaacaagtatataatgtctaactcgggagactatgaaatattgtactgggacattccaaatggctg

SEQ ID NO: 383881 - DNA, 120 bp, Artificial Sequence
  ENSG00000143924_21 (sequence is synthesized)
caaactaatcaggaatcgatcggattgtaaggacattgattggacgacatatacctgtgtgctaggatttcaagtatttggtgtctggccagaaggatctgatgggacagatatcaatgc

SEQ ID NO: 383882 - DNA, 120 bp, Artificial Sequence
  ENSG00000143924_22 (sequence is synthesized)
actggtgcgatcccacaatagaaaggtgatagctgttgccgatgacttttgtaaagtccatctgtttcagtatccctgctccaaagcaaaggctcccagtcacaagtacagtgcccacag

SEQ ID NO: 383883 - DNA, 120 bp, Artificial Sequence
  ENSG00000143924_23 (sequence is synthesized)
ctcacaatgacagtcacctgatatcaactggtggaaaagacatgagcatcattcagtggaaacttgtggaaaagttatctttgcctcagaatgagactgtagcggatactactctaacca

SEQ ID NO: 383884 - DNA, 120 bp, Artificial Sequence
  ENSG00000143924_24 (sequence is synthesized)
aagcccccgtctcttccactgaaagtgtcatccaatctaatactcccacaccgcctccttctcagcccttaaatgagacagctgaagaggaaagtagaataagcagttctcccacacttc

SEQ ID NO: 383885 - DNA, 120 bp, Artificial Sequence
  ENSG00000143924_25 (sequence is synthesized)
tggagaacagcctggaacaaactgtggagccaagtgaagaccacagcgaggaggagagtgaagagggcagcggagaccttggtgagcctctttatgaagagccatgcaacgagataagca

SEQ ID NO: 383886 - DNA, 120 bp, Artificial Sequence
  ENSG00000143924_26 (sequence is synthesized)
aggagcaggccaaagccacccttctggaggaccagcaagacccttcgccctcgtcctaacaccctggcttcagtgcaactcttttccttcagctgcatgtgattttgtgataaagttcag

SEQ ID NO: 383887 - DNA, 120 bp, Artificial Sequence
  ENSG00000143924_27 (sequence is synthesized)
gtaacaggatgggcagtgatggagaatcactgttgattgagattttggtttccatgtgatttgttttcttcaatagtcttattttcagtctctcaaatacagccaacttaaagttttagt

SEQ ID NO: 383888 - DNA, 120 bp, Artificial Sequence
  ENSG00000143924_28 (sequence is synthesized)
ttggtgtttattgaaaattaaccaaacttaatactaggagaagactgaatcattaatgatgtctcacaaattactgtgtacctaagtggtgtgatgtaaatactggaaacaaaaacagca

SEQ ID NO: 383889 - DNA, 120 bp, Artificial Sequence
  ENSG00000143924_29 (sequence is synthesized)
gttgcattgattttgaaaacaaacccccttgttatctgaacatgttttcttcaggaacaaccagaggtatcacaaacactgttactcatctactggctcagactgtactacttttttttt

SEQ ID NO: 383890 - DNA, 120 bp, Artificial Sequence
  ENSG00000143924_30 (sequence is synthesized)
tttttttcctgaaaaagaaaccagaaaaaaatgtactcttactgagataccctctcaccccaaatgtgtaatggaaaatttttaattaagaaaaacttcagttttgccaagtgcaatggt

SEQ ID NO: 383891 - DNA, 120 bp, Artificial Sequence
  ENSG00000143924_31 (sequence is synthesized)
gttgccttctttaaaaaatgccgttttcttacactaccagtggatgtccagacatgctcttagtctactagagaggtgctgccttttctaagtcataatgaggaacagtcccttaatttc

SEQ ID NO: 383892 - DNA, 120 bp, Artificial Sequence
  ENSG00000143924_32 (sequence is synthesized)
ttgtgtgcaactctgttttatcctagaactaagagagcattggtttgttaaagagctttcaatgtatattaaaaccttcaatactcagaaatgatggattcctccaaggagtcctttact

SEQ ID NO: 383893 - DNA, 120 bp, Artificial Sequence
  ENSG00000143924_33 (sequence is synthesized)
agcctaaacattctcaaatgtttgagattcaagtgaatggaaggaaaaccacatgcctttaaaactaaactgtaataattacctggctaatttcagctaagccttcatcataatttgttc

SEQ ID NO: 383894 - DNA, 120 bp, Artificial Sequence
  ENSG00000143924_34 (sequence is synthesized)
cctcagtaataggagaaatataaatacagtaagtttagattattgaattggtgcttgaaatttattggttttgttgtaattttatacagattatatgagggataagatactcatcaaatt

SEQ ID NO: 383895 - DNA, 120 bp, Artificial Sequence
  ENSG00000143924_35 (sequence is synthesized)
gcaaattcttttttttacagaagtgtgggtaacagtcacagcagttttttttaccaacagcatacttaacagacttgctgtgtagcagtttttttctggtggagttgctgtaagtcttgt

SEQ ID NO: 383896 - DNA, 120 bp, Artificial Sequence
  ENSG00000143924_36 (sequence is synthesized)
aagtctaatgtggctatcctactcttttgggcaatgcatgtattatgcattggaaaggtattttttttaagttctgttggctagctatggttttcagtacatttcctactttaagagtaa

SEQ ID NO: 383897 - DNA, 120 bp, Artificial Sequence
  ENSG00000143924_37 (sequence is synthesized)
ttactgacaaatatgtatttcctatatgtttatactttgattataaaaaagtattttgttttgattttttaacttgctgcattgttttgatactttctatttttttggtcaaatcatgtt

SEQ ID NO: 383898 - DNA, 120 bp, Artificial Sequence
  ENSG00000143924_38 (sequence is synthesized)
tagaaactttggatgagttaagaagtcttaagtatgcaggcgtttacgtgattgtgccattccaaagtgcatcagaactgtcattcccttctaatatcttctcaggagtaatacaaatca

SEQ ID NO: 383899 - DNA, 120 bp, Artificial Sequence
  ENSG00000143924_39 (sequence is synthesized)
ggtatttcatcatcatttggtaatatgaaaactccagtgaactcccaaggacatttacaacatttatattcacacgctgtatggaagggtgtgggtgtgtgtgaaggggcgagtggagac

SEQ ID NO: 383900 - DNA, 120 bp, Artificial Sequence
  ENSG00000143924_40 (sequence is synthesized)
actgtgtgtatctctagataagaagatatgcaccacgttgaaaatactcagtgtagatctctatgtgtataggtatctgtatatctttccttttgtttacaactgttaaaaaacctcaaa

SEQ ID NO: 383901 - DNA, 120 bp, Artificial Sequence
  ENSG00000143924_41 (sequence is synthesized)
atagttctcttcaaaagaagagagattccaagcaacccatctttcttcagtatgtatgttctgtacatacttatcggagcgcgccagtaagtatcaggcatatatatctgtctgttagca

SEQ ID NO: 383902 - DNA, 120 bp, Artificial Sequence
  ENSG00000143924_42 (sequence is synthesized)
atgattattacatcatcagatcagcatgtgctatactccctgcaagaaatatactgacatgaacaggcagttcttggagaagaaagagcatttctttaagtacctggggaatacagctct

SEQ ID NO: 383903 - DNA, 120 bp, Artificial Sequence
  ENSG00000143924_43 (sequence is synthesized)
cagtgatcagcagggagtttatttgaggacatcagtcacctttggggttgccatgtacaatgagatttataatcatgatactcttcggtggtagtttcaaaagacactactaatacgcag

SEQ ID NO: 383904 - DNA, 120 bp, Artificial Sequence
  ENSG00000143924_44 (sequence is synthesized)
gaagcgttccagctatttaatgctggcaactactgtttaatggtcagttaaatctgtgataatggttggaagtgggtggggttatgaaattgtagatgtttttagaaaaacttgtgaatg

SEQ ID NO: 383905 - DNA, 120 bp, Artificial Sequence
  ENSG00000143924_45 (sequence is synthesized)
aaaatgaatccaagtgtttcatgtgaagatgttgagccattgctatcatgcattcctgtctcatggcagaaaattttgaagattaaaaaataaaataatcaaaatgtttcctctttctaa

SEQ ID NO: 383906 - DNA, 120 bp, Artificial Sequence
  ENSG00000143924_46 (sequence is synthesized)
cactttgggcaagttatttaaatctctgtattccaatttcttcatctgttaaatgataattataatagtgtacctgtagtgcataggattaaatgaattaatatgtgtaatacttagaat

SEQ ID NO: 383907 - DNA, 120 bp, Artificial Sequence
  ENSG00000143924_47 (sequence is synthesized)
agtatgtgtaacatagtaaatacacaagttatttgctgctattttcttattttcacagtataagaaaatacctacttaagattcatttggaggcatgtctaaatctagtaatttattaga

SEQ ID NO: 383908 - DNA, 120 bp, Artificial Sequence
  ENSG00000143924_48 (sequence is synthesized)
agcttatccatccctattacttttttaaatggcattagttctgtgtgctattggtgtttatttgcatccacctgtccagttgctctgctgtcttgtgtttttgcagcctctacaacccca

SEQ ID NO: 383909 - DNA, 120 bp, Artificial Sequence
  ENSG00000143924_49 (sequence is synthesized)
gaatgctactcccaccaaaaggttttaactgtccccaagtacagagctagggaatggttgtaatgatacctaaattctgtgacttgggaaaaagttagctatccaaggattctgagagaa

SEQ ID NO: 383910 - DNA, 120 bp, Artificial Sequence
  ENSG00000143924_50 (sequence is synthesized)
aaagctggtggctttatttttcccttcttcattgcttataatttatgctttatagcccattggggaataaagaattaaggtcacaatttctcagttaaaactggaaaaaaaaaaaaaaaa

SEQ ID NO: 383911 - DNA, 120 bp, Artificial Sequence
  ENSG00000143924_51 (sequence is synthesized)
tatgtagtctctgaaaatggaagaaaatatagcagatatggaaggtgcactctttcagttcttgctgcctatttccaccggctggtcttatagtcagtcccctgcttttatctattgtct

SEQ ID NO: 383912 - DNA, 120 bp, Artificial Sequence
  ENSG00000143924_52 (sequence is synthesized)
gctgttatataggacaggcaaaactgggtcaacactgtctctgctgcttactagtttgtgactttaggcaagttaacttctcagagttttaattttattatcttaaaactggagtttata

SEQ ID NO: 383913 - DNA, 120 bp, Artificial Sequence
  ENSG00000143924_53 (sequence is synthesized)
ggtctttttaaaacataacaactagaactactctcaaagttccaaatacaaatgctattttctgtttctagtaattttcctgttaactactcaacatttaggtgactgttatagctgcag

SEQ ID NO: 383914 - DNA, 120 bp, Artificial Sequence
  ENSG00000143924_54 (sequence is synthesized)
aagcacagtacgcttagagctttaggaagtgtcactaataaactatgatatctctaattaaatgtctgtaaattataaatgtctctaataaaaataataaagtaaatcttataacttaca

SEQ ID NO: 383915 - DNA, 120 bp, Artificial Sequence
  ENSG00000143924_55 (sequence is synthesized)
agtattgtgttttagagtacgttacttgttttgcaggtatttggaactatattggtattagaactatctattcgtaagtcgcaaaagcagatctactagccaaattcagcaaatttagtg

SEQ ID NO: 383916 - DNA, 120 bp, Artificial Sequence
  ENSG00000143924_56 (sequence is synthesized)
atttgtcataatcgttaagatattaacactatagttatacaagataaaatagtcaagcaacttgaagcaatttcaatatttcagacattactatagtcctgaaatgccagagtagatgga

SEQ ID NO: 383917 - DNA, 120 bp, Artificial Sequence
  ENSG00000143924_57 (sequence is synthesized)
tgtgtgatctcataattaagactgaacacacttcttggttttcttctttaataaaacatgtaatttcattccatctttaaagctttagaaatctagaggaaaaattcagtaggaatacga

SEQ ID NO: 383918 - DNA, 120 bp, Artificial Sequence
  ENSG00000143924_58 (sequence is synthesized)
ctgatgtaactgaagggcttatgttaagttttttggtcttaattgtgtttgtaggattattttagaaaattcaatagcatttataattgctataattgcattataactctttacagtaca

SEQ ID NO: 383919 - DNA, 120 bp, Artificial Sequence
  ENSG00000143924_59 (sequence is synthesized)
agggttgatctctgtgtagatcaagctgtacgttgtaagagaagaatgtaaaatgcattgaagctgggtttatatgagccagaaatggacttctccctctgacaggcatttaaaaagatt

SEQ ID NO: 383920 - DNA, 120 bp, Artificial Sequence
  ENSG00000143924_60 (sequence is synthesized)
atggctttaaaaagtctgtgtaatatttgccatactcttaaataacatcacattactctccaactcctctcttaacagttttgttttgagtaagcttcaagcttttagcttgttgggcag

SEQ ID NO: 383921 - DNA, 120 bp, Artificial Sequence
  ENSG00000143924_61 (sequence is synthesized)
aaagatgatgtgatgtttaacttaacattttgaaagaagtagatttgattgtacttaaaaggaatataagttgtcagaaaacctcaaactttaaaaaacataaatgaagatatagattga

SEQ ID NO: 383922 - DNA, 120 bp, Artificial Sequence
  ENSG00000143924_62 (sequence is synthesized)
cttccagttattcagagtaatttaacattgaaacatagggaagttgcatgaaaatgaaatatatcaattttgattcttcatagtaaggtttaccagatgaagtcttgtggttttcctcct

SEQ ID NO: 383923 - DNA, 120 bp, Artificial Sequence
  ENSG00000143924_63 (sequence is synthesized)
actggcgatttctcgatctcctttccaggactttaaatgttggtgttcttcagagttttattccacatgctccactgatactatatgctgctcccatggcctcattttctatctgctgag

SEQ ID NO: 383924 - DNA, 120 bp, Artificial Sequence
  ENSG00000143924_64 (sequence is synthesized)
tcccgtatcagttatctccagcccagatctctaacaggtttaactcatatttctagttgcatcctagacatctttatttgaatgtcctctaccacaaatgaaaatcaccatgttcaaatc

SEQ ID NO: 383925 - DNA, 120 bp, Artificial Sequence
  ENSG00000143924_65 (sequence is synthesized)
tgtacataatcatctttcctagcccccaaccaccagtttcatcccttagtgattgactccgcatttcacctagctacctaagctagaaacttggacatcattcatggctctttttacctc

SEQ ID NO: 383926 - DNA, 120 bp, Artificial Sequence
  ENSG00000143924_66 (sequence is synthesized)
acttctcacatccaggtagtcaggaagttctctaaacaccgtgtcccaaatatctgcattatagcactttctagtacaagcgactgcaaaacaattgaaattaacttaatctggccaggg

SEQ ID NO: 383927 - DNA, 84 bp, Artificial Sequence
  ENSG00000143924_67 (sequence is synthesized)
gtagtcagtgggtagatcattagatgtcaggagttcaagaccaccccggccaacatcgtgaagccccatctctactaaaaatac

SEQ ID NO: 383928 - DNA, 120 bp, Artificial Sequence
  ENSG00000143933_0 (sequence is synthesized)
agtccgagtggagagagcgagctgagtggttgtgtggtcgcgtctcggaaaccggtagcgcttgcagcatggctgaccaactgactgaagagcagattgcagaattcaaagaagcttttt

SEQ ID NO: 383929 - DNA, 120 bp, Artificial Sequence
  ENSG00000143933_1 (sequence is synthesized)
cactatttgacaaagatggtgatggaactataacaacaaaggaattgggaactgtaatgagatctcttgggcagaatcccacagaagcagagttacaggacatgattaatgaagtagatg

SEQ ID NO: 383930 - DNA, 120 bp, Artificial Sequence
  ENSG00000143933_2 (sequence is synthesized)
ctgatggtaatggcacaattgacttccctgaatttctgacaatgatggcaagaaaaatgaaagacacagacagtgaagaagaaattagagaagcattccgtgtgtttgataaggatggca

SEQ ID NO: 383931 - DNA, 120 bp, Artificial Sequence
  ENSG00000143933_3 (sequence is synthesized)
atggctatattagtgctgcagaacttcgccatgtgatgacaaaccttggagagaagttaacagatgaagaagttgatgaaatgatcagggaagcagatattgatggtgatggtcaagtaa

SEQ ID NO: 383932 - DNA, 120 bp, Artificial Sequence
  ENSG00000143933_4 (sequence is synthesized)
actatgaagagtttgtacaaatgatgacagcaaagtgaagaccttgtacagaatgtgttaaatttcttgtacaaaattgtttatttgccttttctttgtttgtaacttatctgtaaaagg

SEQ ID NO: 383933 - DNA, 120 bp, Artificial Sequence
  ENSG00000143933_5 (sequence is synthesized)
ctgtcaaaaaaatatgcatgtatagtaattaggacttcattcctccatgttttcttcccttatcttactgtcattgtcctaaaaccttattttagaaaattgatcaagtaacatgttgca

SEQ ID NO: 383934 - DNA, 120 bp, Artificial Sequence
  ENSG00000143933_6 (sequence is synthesized)
tgtggcttactctggatatatctaagcccttctgcacatctaaacttagatggagttggtcaaatgagggaacatctgggttatgccttttttaaagtagttttctttaggaactgtcag

SEQ ID NO: 383935 - DNA, 120 bp, Artificial Sequence
  ENSG00000143933_7 (sequence is synthesized)
catgttgttgttgaagtgtggagttgtaactctgcgtggactatggacagtcaacaatatgtacttaaaagttgcactattgcaaaacgggtgtattatccaggtactcgtacactattt

SEQ ID NO: 383936 - DNA, 120 bp, Artificial Sequence
  ENSG00000143933_8 (sequence is synthesized)
ttttgtactgctggtcctgtaccagaaacattttcttttattgttacttgctttttaaactttgtttagccacttaaaatctgcttatggcacaatttgcctcaaaatccattccaagtt

SEQ ID NO: 383937 - DNA, 120 bp, Artificial Sequence
  ENSG00000143933_9 (sequence is synthesized)
gtatatttgttttccaataaaaaaattacaatttacccaatggttgctctgcatctgagtcatttaactgttgaagtctaataattttgaaaataaaatatggcattggtttctgcttgg

SEQ ID NO: 383938 - DNA, 120 bp, Artificial Sequence
  ENSG00000143933_10 (sequence is synthesized)
agattgctcatgtaactcttgagtttacatgtaatcaacatatgctcattgaaaacgggattgcttcaagaggactttgagtgcagggtgattaggtaagtaaaagatgtaaaaaggtag

SEQ ID NO: 383939 - DNA, 120 bp, Artificial Sequence
  ENSG00000143933_11 (sequence is synthesized)
aaaatttttgtcacttgagtctaaataattgttcttataagtgccaacgcctgtttctgttaggctcagaagatcaaaggatttggctcttttaaaatatagaaagctctagcttcagct

SEQ ID NO: 383940 - DNA, 120 bp, Artificial Sequence
  ENSG00000143933_12 (sequence is synthesized)
agaatttaggcctttagtaatagccctaatttttatgaagccattttgttccagtgatcttttggtgagagatgctatgtaagtactattcttcagaattaggtgtctttttaccctaat

SEQ ID NO: 383941 - DNA, 120 bp, Artificial Sequence
  ENSG00000143933_13 (sequence is synthesized)
gaaataatttagattgcttttgatacaggtaaaacaaatatcctggcttccataattgtagaaaaaacttcatataggaatccttgttgtatcaaagtagcacctgatgggaatgaacag

SEQ ID NO: 383942 - DNA, 120 bp, Artificial Sequence
  ENSG00000143933_14 (sequence is synthesized)
acaggaatggatgaaggatagcagtttgcgttccatttcaagcctatgggctcacacatttattcagataagaacaccacctttcactagataaactccaacagtattcatgcatacttt

SEQ ID NO: 383943 - DNA, 120 bp, Artificial Sequence
  ENSG00000143933_15 (sequence is synthesized)
tgaatggcatgtaggaaatgtttgataggtacataatgtattcacttcaggtcactaatgtaatacggggtcgtgctccttagtgttgacagatcacctatggttctccaaaatgaacat

SEQ ID NO: 383944 - DNA, 120 bp, Artificial Sequence
  ENSG00000143933_16 (sequence is synthesized)
tctagtacaggaggtctagggaggaacctgagagtatactaatgcctaggaactttctctggagtggcaagagcagtgggaagaattatgtcaatagctacagaaataagggagtaagaa

SEQ ID NO: 383945 - DNA, 120 bp, Artificial Sequence
  ENSG00000143933_17 (sequence is synthesized)
caagtcatctctctagtgaattcttcttcactttactgagataaacatacatgttaatgagcttgagttttcccaaaagtataattcttctggttcttctaagaaaatggcactccctgg

SEQ ID NO: 383946 - DNA, 120 bp, Artificial Sequence
  ENSG00000143933_18 (sequence is synthesized)
aaacaaggaagaaccaaatttattcgcctttgtagcagttgggaaagttagtgctaggaagtcttcttgatttatagtaggctttaatctggatattgctggtaaaagtttattctaaaa

SEQ ID NO: 383947 - DNA, 120 bp, Artificial Sequence
  ENSG00000143933_19 (sequence is synthesized)
cctgaactctggataagtaatacaaaaagcttctcaaccttccaagcaaaattgagagctttcaggttatgtgagtaatttggtctcttgggtgcttaattcattccttgaagctcattt

SEQ ID NO: 383948 - DNA, 120 bp, Artificial Sequence
  ENSG00000143933_20 (sequence is synthesized)
ttgtgatctcttccaagattgcatttgcttggaggtagggagttagacaagatggtatgaggtccctaaattttgactttccaagcaaaattggacagtggttcctaaattgctaacatc

SEQ ID NO: 383949 - DNA, 120 bp, Artificial Sequence
  ENSG00000143933_21 (sequence is synthesized)
ctcgtttcttcctaaggcttctcatgtttcatatatagtagccttcccaaagtcccatttcccaccccccccccccccccaacccatgtagagagaacgaacctgtctcccttcctgtac

SEQ ID NO: 383950 - DNA, 120 bp, Artificial Sequence
  ENSG00000143933_22 (sequence is synthesized)
agagtacgggatccttcaactttcacacaggctgcagtgtctgccacacatttagctcaacttttttttagccttaaagtgatgtccgctgcatctgtcgctgggttgcaccttgtggat

SEQ ID NO: 383951 - DNA, 120 bp, Artificial Sequence
  ENSG00000143933_23 (sequence is synthesized)
ttagtttgcataaattttctcagcttaaacaaagttaacattgaatagagtaagcttaccataaagggcttaataaatgccatgcatgtctacattcggtgtggaaattgagctagtcag

SEQ ID NO: 383952 - DNA, 120 bp, Artificial Sequence
  ENSG00000143933_24 (sequence is synthesized)
gttgatatttaacattgtaggttctttgttaatttatatgaaataatggttatcatttaactctttaggttagctttgtacatagcatctcactttgcacaacaaccctgcaaggtaagt

SEQ ID NO: 383953 - DNA, 120 bp, Artificial Sequence
  ENSG00000143933_25 (sequence is synthesized)
attgttattcttgtgctacaaatgaagttgactgagaggaggagtaccacgtccaaggtcacacagctattaaatggcagggctgggatactggcctgtgactcagaacttgatgctttc

SEQ ID NO: 383954 - DNA, 120 bp, Artificial Sequence
  ENSG00000143933_26 (sequence is synthesized)
cccccacgccacgcatgccaggttgcccttcctttcagaaatggtggaagtcctgcaaaatgcaataaactgaagtaatgtagcttctattaatacaaagtaaataactcagatttactg

SEQ ID NO: 383955 - DNA, 120 bp, Artificial Sequence
  ENSG00000143933_27 (sequence is synthesized)
gattttaaaccttattccttgggtaaacaatctgtgactgacttcacaccaaatatttgttggcggaggatttggactttagggataaaagtggatacattttttattttacaaactctg

SEQ ID NO: 383956 - DNA, 120 bp, Artificial Sequence
  ENSG00000143933_28 (sequence is synthesized)
tttaatgaatttgatttacatcatggtcaaacaaaaattgttgagcagggaaaataaactgctttctggattccttcttgaattttctcatgtgccctagagaaaatgtgttccacatta

SEQ ID NO: 383957 - DNA, 120 bp, Artificial Sequence
  ENSG00000143933_29 (sequence is synthesized)
aggtgttactttttccaggggtgtgttcatttaaaaagaatgaagccaggcaatgtttatttttcttttacctataaataaatgaatggattaatcattgtatacttgactcccatgttg

SEQ ID NO: 383958 - DNA, 120 bp, Artificial Sequence
  ENSG00000143933_30 (sequence is synthesized)
gtagggattttagataggaggctatttcttgtctgtgcttctcaataccccataagcagttgcttcatggatgtatatactaataagcagtgaaagaaagtgcatgttcaaagaatacaa

SEQ ID NO: 383959 - DNA, 120 bp, Artificial Sequence
  ENSG00000143933_31 (sequence is synthesized)
caaggagtctggatattttgcaatcatctttatatattacggtgctctgaattaaaagctaaaagttactgggtatgtctgacaccttagtgctttatctttgttctactaattttctgt

SEQ ID NO: 383960 - DNA, 120 bp, Artificial Sequence
  ENSG00000143933_32 (sequence is synthesized)
gccccaatcccacttaaccctagcctcattccttatctgtaagataggggataataccactgtaaggttattattaagattgaataaggataaaatttataatgggttttagcaaatggc

SEQ ID NO: 383961 - DNA, 120 bp, Artificial Sequence
  ENSG00000143933_33 (sequence is synthesized)
agaaaatattttctgaagaaaaccaagtgctattaaaaaaacatcacaagccttgggcttactttgggattttaaaaaccaagagaaaatggatggctgaactttcaaacatttggtaaa

SEQ ID NO: 383962 - DNA, 120 bp, Artificial Sequence
  ENSG00000143933_34 (sequence is synthesized)
tattatagtactgtagttcagagctctggattctttgcattttgcctgctgggtgagaaggaataaaagtttgtgcctttttttttttttaatcactttaatttcaaaacaatgtgttta

SEQ ID NO: 383963 - DNA, 120 bp, Artificial Sequence
  ENSG00000143933_35 (sequence is synthesized)
accatttgtgggagtaattttcattttgtgagcctgaagcattttgattcagtgggaatttctggtgatttatatctggaatagaagtgagcttaagtttagctattctaacgttgaaaa

SEQ ID NO: 383964 - DNA, 120 bp, Artificial Sequence
  ENSG00000143933_36 (sequence is synthesized)
aggaagcaatgtttctattggattctaaagtatattttcaaaaatattctgaagtatttgtatatcttaaacttggagttaagacagcttagctttgaagataagagaaactagatgtgt

SEQ ID NO: 383965 - DNA, 120 bp, Artificial Sequence
  ENSG00000143933_37 (sequence is synthesized)
gcattttctatccagatgtgtttgttgctggaactaaatgaaacagtacatggtaacccttgaaaggttttaaacttgtttctgtaactgctaatctacatactctcaagtcactaacct

SEQ ID NO: 383966 - DNA, 68 bp, Artificial Sequence
  ENSG00000143933_38 (sequence is synthesized)
gcccggcctgagacggggtttcaccctgttgttcaggctggtctggaactcaccctgagctcaggcag

SEQ ID NO: 383967 - DNA, 120 bp, Artificial Sequence
  ENSG00000143933_39 (sequence is synthesized)
acctggcttgttttagtttatctgtaaatggtgaatgaagccaggtagtctggagtgttgcaccagcaggaggtttccatgtaatctagtgatgtattagaaggaacatatagccgggca

SEQ ID NO: 383968 - DNA, 120 bp, Artificial Sequence
  ENSG00000143933_40 (sequence is synthesized)
tccagcctggacaacaagagcgaaagtccatctcaaaaaaaaaaacaacagcaggaaggaacatactatcacaacaagatgttgaggaataatcagtttcactatataaggttggggttt

SEQ ID NO: 383969 - DNA, 120 bp, Artificial Sequence
  ENSG00000143933_41 (sequence is synthesized)
taatattccaaagaaagctcaaaatgatctttgttctcagtgacatgcatttagctaaaactggacatttatatcttgatcagcccattgttatagactctttatatagtcccttctcct

SEQ ID NO: 383970 - DNA, 120 bp, Artificial Sequence
  ENSG00000143933_42 (sequence is synthesized)
gccttactagaaagggaaagtagcctgttttaatttagtaggtgattgatttagacatagtggctaactctaaacacagtatacagaaacagtttaattactctgtagaaatacgtattt

SEQ ID NO: 383971 - DNA, 120 bp, Artificial Sequence
  ENSG00000143933_43 (sequence is synthesized)
gccagtcatttggggatttggttcttttcctctgtaaacctaggataattttacttaggtcagcatgaaagtacagtggtatgattggtcaaagatatatttgaaatattatcataaggt

SEQ ID NO: 383972 - DNA, 120 bp, Artificial Sequence
  ENSG00000143933_44 (sequence is synthesized)
atcataaagattggttaatctttaggagtcaaagtcacatttcaattgctacctccattggtatttttccgttaaaagtttttgggtttttctgagacgtggggtcttacagtttggcca

SEQ ID NO: 383973 - DNA, 120 bp, Artificial Sequence
  ENSG00000143933_45 (sequence is synthesized)
ggctgaagtgcagtggctgttcactggcacgatcccaccactgagtaggctttaagagttaatacgtttcatttaggttacattttattattaatctgtgtatttggattgtggtctttc

SEQ ID NO: 383974 - DNA, 120 bp, Artificial Sequence
  ENSG00000143933_46 (sequence is synthesized)
agtccgagtggagagagcgagctgagtggttgtgtggtcgcgtctcggaaaccggtagcgcttgcagcatggtgagtgcatcgctgagctgccggcgctgggcctgtggggggaagagac

SEQ ID NO: 383975 - DNA, 120 bp, Artificial Sequence
  ENSG00000143933_47 (sequence is synthesized)
tggagcgaactgactaaacaaaggaaactcgcctcccttacaccttcaaggagtggtttctgccagagggatggcgcgaaagaggccagggatgccggcgacggttgtgtcgcaggtgct

SEQ ID NO: 383976 - DNA, 120 bp, Artificial Sequence
  ENSG00000143933_48 (sequence is synthesized)
agtccgagtggagagagcgagctgagtggttgtgtggtcgcgtctcggaaaccggtagcgcttgcagcatggctgaccaactgactgaagagcagattgcagacggagcttcactctctt

SEQ ID NO: 383977 - DNA, 72 bp, Artificial Sequence
  ENSG00000143933_49 (sequence is synthesized)
agacggagcttcactctttgctgtccaacttcaagcaattctcctggctcagtctcccaagtagctgggatt

SEQ ID NO: 383978 - DNA, 120 bp, Artificial Sequence
  ENSG00000143933_50 (sequence is synthesized)
tacccttgaagtcaggggcgcgtcctcgcaatacacatcttgttagggaaagtgttcggctccagctagggttctacaaggcgtttcttgttcaccgccggagggaagcaggctccggag

SEQ ID NO: 383979 - DNA, 120 bp, Artificial Sequence
  ENSG00000143933_51 (sequence is synthesized)
tgactgccttctgaaagtcggtcttgtaacaattggatggatgcctttgaagagcccctgtccctattctatgcttgaaaacagcgtgcagtcctaatgttcaagaaccacgaccacata

SEQ ID NO: 383980 - DNA, 120 bp, Artificial Sequence
  ENSG00000143933_52 (sequence is synthesized)
gaattagtccgagtggagagagcgagctgagtggttgtgtggtcgcgtctcggaaaccggtagcgcttgcagcatggttagctttgtacatagcatctcactttgcacaacaaccctgca

SEQ ID NO: 383981 - DNA, 120 bp, Artificial Sequence
  ENSG00000143933_53 (sequence is synthesized)
gcggcccgagcagcaacggcagaagccgcaccgcgtcccggcggcggctgcgagtcccagtgacgcattgcaggctgaccaactgactgaagagcagattgcagaattcaaagaagcttt

SEQ ID NO: 383982 - DNA, 120 bp, Artificial Sequence
  ENSG00000143933_54 (sequence is synthesized)
ccggacgcacagttcccgaggtggtgaagctcctcgggggcttggctggaggaggatgggtccgggatgagggacagcccagtgcacgggaaggagagaaagtgaaggaagggagagagg

SEQ ID NO: 383983 - DNA, 120 bp, Artificial Sequence
  ENSG00000143933_55 (sequence is synthesized)
gagcgtagagagccttctgtcgggcgtctggaaaggtcaagcagggggcgaattcaatccacccgaccgacggctgaccaactgactgaagagcagattgcagaattcaaagaagctttt

SEQ ID NO: 383984 - DNA, 120 bp, Artificial Sequence
  ENSG00000143942_0 (sequence is synthesized)
actcgcttaccggaggcttcagtccccggcggcgcggcgacagctagggttcacggccactggggcagaggagccgcgagaagatgtgggtttttggttacgggtccctgatctggaagg

SEQ ID NO: 383985 - DNA, 120 bp, Artificial Sequence
  ENSG00000143942_1 (sequence is synthesized)
tggatttcccctatcaggacaagctggtcggatacatcaccaactacagcaggcgcttctggcagggcagcacggaccaccgcggggtccccggcaagcctggaagagttgtgactcttg

SEQ ID NO: 383986 - DNA, 120 bp, Artificial Sequence
  ENSG00000143942_2 (sequence is synthesized)
ttgaagatcctgcgggatgtgtatggggtgttgcttacagattgccagtaggaaaggaagaagaagtaaaagcataccttgacttcagagaaaaaggaggctacagaaccacaacagtca

SEQ ID NO: 383987 - DNA, 120 bp, Artificial Sequence
  ENSG00000143942_3 (sequence is synthesized)
ttttttatccaaaagatcccacaacaaaaccattcagtgtattgctatatattggaacatgtgataatcctgattatcttggtcctgcacctctggaagacattgctgaacaaattttta

SEQ ID NO: 383988 - DNA, 120 bp, Artificial Sequence
  ENSG00000143942_4 (sequence is synthesized)
atgcagctggtccaagtggaagaaatacagaatatctttttgaacttgcaaattctattaggaaccttgtgccagaagaagcagatgagcatcttttcgctttggaaaaattagtaaagg

SEQ ID NO: 383989 - DNA, 120 bp, Artificial Sequence
  ENSG00000143942_5 (sequence is synthesized)
tatttttaatgtagtgaggatattatttaaacttttattttaactggaaatgtcctgaaacacatatttaaaatattgggatacagtgaaagaaaaattcaaattttaataacataaaga

SEQ ID NO: 383990 - DNA, 120 bp, Artificial Sequence
  ENSG00000143942_6 (sequence is synthesized)
tttcctaactttatgttattgaacacttactcactagaagtgagttctttagaaaaatacagtgaaggactcagttcagtcttgtttttatcagagtgataatcatcctgtttcacatcc

SEQ ID NO: 383991 - DNA, 120 bp, Artificial Sequence
  ENSG00000143942_7 (sequence is synthesized)
caatactattttgaaattctaaacaattaaaccaaaattccaataaatataaggttatgccttcaatatattcctatacaattctgtaaccatggtttaaaatacacaagcttaaaataa

SEQ ID NO: 383992 - DNA, 120 bp, Artificial Sequence
  ENSG00000143942_8 (sequence is synthesized)
catgcttagaaatacacaataatatgaacagtatttcagccttaattgtgaatttccttgttattcaagtattaaatgaaatcttttgagtttttagccaaaaattggcatttttaaaat

SEQ ID NO: 383993 - DNA, 120 bp, Artificial Sequence
  ENSG00000143942_9 (sequence is synthesized)
acgaaaatttccttggaattataatgtactgtacctcttcttttttaaataaaggcattttactatatggaaaataactcactaaagcataaattacattatacaaatcatgatcactaa

SEQ ID NO: 383994 - DNA, 120 bp, Artificial Sequence
  ENSG00000143947_0 (sequence is synthesized)
cccctcgacctccttttaaaaattctcttagccacgttgattgtacgggaaaagcctttttaaaacatcttttacgttgcttaaacctacagtttcgaaagcattccgaaggctaaagtg

SEQ ID NO: 383995 - DNA, 120 bp, Artificial Sequence
  ENSG00000143947_1 (sequence is synthesized)
agaaataagcccaggctagggagaggagaaacgaagttcacgtcctagtctggcaccgggttggattgtcgctgggacggcagtcaggcatttggtgtggtcgcctaaggggtgggtcct

SEQ ID NO: 383996 - DNA, 120 bp, Artificial Sequence
  ENSG00000143947_2 (sequence is synthesized)
tcggcgggagctccgggaaaccccgtgggcctgcgcggcgttcttccttttcgatccgccatctgcggtggagccgccaccaaaatgcagattttcgtgaaaacccttacggggaagacc

SEQ ID NO: 383997 - DNA, 120 bp, Artificial Sequence
  ENSG00000143947_3 (sequence is synthesized)
atcaccctcgaggttgaaccctcggatacgatagaaaatgtaaaggccaagatccaggataaggaaggaattcctcctgatcagcagagactgatctttgctggcaagcagctggaagat

SEQ ID NO: 383998 - DNA, 120 bp, Artificial Sequence
  ENSG00000143947_4 (sequence is synthesized)
aagaataagcacaagagaaagaaggttaagctggctgtcctgaaatattataaggtggatgagaatggcaaaattagtcgccttcgtcgagagtgcccttctgatgaatgtggtgctggg

SEQ ID NO: 383999 - DNA, 120 bp, Artificial Sequence
  ENSG00000143947_5 (sequence is synthesized)
gtgtttatggcaagtcactttgacagacattattgtggcaaatgttgtctgacttactgtttcaacaaaccagaagacaagtaactgtatgagttaataaaagacatgaactaacattta

SEQ ID NO: 384000 - DNA, 120 bp, Artificial Sequence
  ENSG00000143947_6 (sequence is synthesized)
ttgttgggttttattgcagtaaaaagaatggtttttaagcaccaaattgatggtcacaccatttccttttagtagtgctactgctatcgctgtgtgaatgttgcctctggggattatgtg

SEQ ID NO: 384001 - DNA, 120 bp, Artificial Sequence
  ENSG00000143947_7 (sequence is synthesized)
acccagtggttctgtatacctgccaggtgccaaccacttgtaaaggtcttgatattttcaattcttagactacctatactttggcagaagttatatttaatgtaagttgtctaaatataa

SEQ ID NO: 384002 - DNA, 120 bp, Artificial Sequence
  ENSG00000143947_8 (sequence is synthesized)
aagacccagactcttccctaggctgggagagactcggcggttgaaagcagggaggcgctacaggagagaaagggctgaacccccgcttccgcagatttcacctatttttcagtttgcctg

SEQ ID NO: 384003 - DNA, 120 bp, Artificial Sequence
  ENSG00000143947_9 (sequence is synthesized)
gagcaggccacgcaaattcccttcccttgaaggcccaaggagcgtctggtagattgctgattctctgcccatcaccgcttctggaagtggagccgccaccaaaatgcagattttcgtgaa

SEQ ID NO: 384004 - DNA, 120 bp, Artificial Sequence
  ENSG00000143947_10 (sequence is synthesized)
ggcgttcttccttttcgatccgccatctgcggtgggtgtctgcacttcggctgctctcgggttagcaccctatggtgccttctcttgtgatccctgacctaacctgtctcttccttttcc

SEQ ID NO: 384005 - DNA, 120 bp, Artificial Sequence
  ENSG00000143947_11 (sequence is synthesized)
gttcttccttttcgatccgccatctgcggtggagccgccaccaaaatgcagattttcgtgaaaacccttacggggaagaccatcaccctcgaggtacgggccgggtggtcatgaggaagc

SEQ ID NO: 384006 - DNA, 120 bp, Artificial Sequence
  ENSG00000143947_12 (sequence is synthesized)
caaggtccgaataaggtcctgaggtggattttaggaccggcgctgctttccatgtcttagaccatgattccgaatttgggttctaaaacttaagctttgaaatgagtaccttttgctgag

SEQ ID NO: 384007 - DNA, 120 bp, Artificial Sequence
  ENSG00000143947_13 (sequence is synthesized)
gcccgccgggtgcgagcacgtgtggccctgcggccgccgcccgctctgggctggggagatgaaggtgctttccggtagccgacttgggaggttgcccactgggtgggtaataggtctctc

SEQ ID NO: 384008 - DNA, 120 bp, Artificial Sequence
  ENSG00000143947_14 (sequence is synthesized)
gagtaggtctcagccctgtcgctggttcggttcagtggtaattgtcaaactaaatgagttctgctgtagttccttaatgtgtaaccaacatgctttcactttaacactcataggttgaac

SEQ ID NO: 384009 - DNA, 120 bp, Artificial Sequence
  ENSG00000143947_15 (sequence is synthesized)
ttgtctgactacaatattcaaaaggtctgtctaggggaagagcagcctcttttaaaaaaaaatgttattttggaaattttttattttactttttttgagacaggctctgactctgtcacc

SEQ ID NO: 384010 - DNA, 120 bp, Artificial Sequence
  ENSG00000143947_16 (sequence is synthesized)
tggtctcaaactcctgggcataagtgatcttcccaccgtggcctcccagcgctgggattacagacgtgagccactccatgtggtgtattctggacattttgacacacaaaaagggaaaat

SEQ ID NO: 384011 - DNA, 120 bp, Artificial Sequence
  ENSG00000143947_17 (sequence is synthesized)
ggcattcgaatagcagtagatttttaggagtctactcttcatcttgtgttgagacttcgtggtggtgctaagaaaaggaagaagaagtcttacaccactcccaagaagaataagcacaag

SEQ ID NO: 384012 - DNA, 120 bp, Artificial Sequence
  ENSG00000143947_18 (sequence is synthesized)
cctcttttaaaaaaaaaatgttattttggaaattttttattttactttttttgagacaggctctgactctgtcacctagggtggagtgagtggcgcagtcactgcaacctccacctctca

SEQ ID NO: 384013 - DNA, 120 bp, Artificial Sequence
  ENSG00000143947_19 (sequence is synthesized)
tagcagtagatttttaggtaactcctatactgatacttgagaagcactgctatagttctcccattatgaattttgcaagttgtatcccatggtgtaatgtaatgcattctttaatgtccc

SEQ ID NO: 384014 - DNA, 120 bp, Artificial Sequence
  ENSG00000143947_20 (sequence is synthesized)
tataaactgtcagttaagaatctgatactttattgggtttgggggctgcaagattccctcaaatgttattgtgtgctgctactgcttttaattagaaaatgcataatgttgggtgtgccc

SEQ ID NO: 384015 - DNA, 120 bp, Artificial Sequence
  ENSG00000143947_21 (sequence is synthesized)
attcttagtggaatcatgaaagcttgcttcattcttccattaacaggagtctactcttcatcttgtgttgagacttcgtggtggtgctaagaaaaggaagaagaagtcttacaccactcc

SEQ ID NO: 384016 - DNA, 120 bp, Artificial Sequence
  ENSG00000143947_22 (sequence is synthesized)
gccacgttgattgtacgggaaaagcctttttaaaacatcttttacgttgcttaaacctacagtttcgaaagcattccgaaggctaaagtggagccgccaccaaaatgcagattttcgtga

SEQ ID NO: 384017 - DNA, 120 bp, Artificial Sequence
  ENSG00000143947_23 (sequence is synthesized)
gctagacatacctgctcttggtgatgggggaaggggtcagattgacaaagcgaaatacttgtggaataacacaatagacattggtgatcggggagcacagtacctagattggaatccttg

SEQ ID NO: 384018 - DNA, 120 bp, Artificial Sequence
  ENSG00000143947_24 (sequence is synthesized)
aggtgtatttcacttgcgtgaatttggacacttatttatttattttgtgtgagatggagtctcctctgtcgcccaggctggagtgcattcgcttgtcccggcttactgcagcctccgcct

SEQ ID NO: 384019 - DNA, 120 bp, Artificial Sequence
  ENSG00000143947_25 (sequence is synthesized)
gtcctgaaatattataaggtgagccagttaaagggcagaatgtcagcaaagtcttggcttatttggaaaacttaatctttatagtacttgtcaatattttcttggacttaaacacccaat

SEQ ID NO: 384020 - DNA, 120 bp, Artificial Sequence
  ENSG00000143947_26 (sequence is synthesized)
attatcccactttggtttaaatgaggtattctggaaatgagaaattcagactttctggggtttttcctgtttggtatttgaaatcagttatgtaatagggttctgagtttaaagtcgggt

SEQ ID NO: 384021 - DNA, 120 bp, Artificial Sequence
  ENSG00000143951_0 (sequence is synthesized)
gataagttgggacgaccggacagcttctcaggttgctaagcgacgaggcgggagcgcacgcacaccctggctgctttgtagcacctgaggaaactgtggcggcggcggcggcgtcctgga

SEQ ID NO: 384022 - DNA, 120 bp, Artificial Sequence
  ENSG00000143951_1 (sequence is synthesized)
gacccaagagaccaagcgagcgtgtcgctccctctcgggtccgaggacctagcctaggaaccttctgcccggggtagtgtctggtgatgaggcgagagttttgctgggacgcctactcca

SEQ ID NO: 384023 - DNA, 120 bp, Artificial Sequence
  ENSG00000143951_2 (sequence is synthesized)
aagcggccgggagtcgcgcttcttccccactcccgagacaggatagagattccttctgccatcagatgtctttctgcttgactgaactgcacctgtggtctttgaagaataccttacaca

SEQ ID NO: 384024 - DNA, 120 bp, Artificial Sequence
  ENSG00000143951_3 (sequence is synthesized)
ttgcggatagagacattgggatctaccagtattatgacaagaaagatccaccagcgacagagcatggtaacttagaaaagaagcagaagctggcagagtcacgagattatccttggacgc

SEQ ID NO: 384025 - DNA, 120 bp, Artificial Sequence
  ENSG00000143951_4 (sequence is synthesized)
tcaaaaacagacgcccagaaaaactccgagactcgctcaaagagttggaggagctgatgcaaaacagtcggtgtgtgctgagcaaatggaagaacaaatatgtctgtcagctcctttttg

SEQ ID NO: 384026 - DNA, 120 bp, Artificial Sequence
  ENSG00000143951_5 (sequence is synthesized)
gttcaggtgtgctggtgtctctaagcctttctgggccgcagctggagaaagtggtgattgacagaagcctggtggggaagctcatctcagacaccatcagtgatgctcttctcacagaca

SEQ ID NO: 384027 - DNA, 120 bp, Artificial Sequence
  ENSG00000143951_6 (sequence is synthesized)
gttttatcatcttatcatttttggcacaaaacaaactatgttttattcagtttaccaagaagatggagtcttctgatgtaaacaaaagactggaaaaactctcagccttggattataaga

SEQ ID NO: 384028 - DNA, 120 bp, Artificial Sequence
  ENSG00000143951_7 (sequence is synthesized)
ttttctattatgaaatacccggcccaataaacaagacaacagagcgacatctagctatcaactgtgttcatgatagagttgtttgctggtggccactggtcaacgatgatgcttggcctt

SEQ ID NO: 384029 - DNA, 120 bp, Artificial Sequence
  ENSG00000143951_8 (sequence is synthesized)
gggcccccatttcttctgagaaggacagagccaatctactcctcctgggttatgctcaaggaagactagaggttctgagttctgtccgcacagaatgggacccactggatgttcgctttg

SEQ ID NO: 384030 - DNA, 120 bp, Artificial Sequence
  ENSG00000143951_9 (sequence is synthesized)
gcaccaaacagccttatcaggtgttcacagtggagcactccgtaagtgtagacaaagagcccatggctgacagctgcatctatgaatgcattcggaataaaatccagtgtgtgtcagtca

SEQ ID NO: 384031 - DNA, 120 bp, Artificial Sequence
  ENSG00000143951_10 (sequence is synthesized)
ccagaataccactaaagtcaaaggccatcagctgctgcaggaatgttactgaagacaaactgattctgggctgtgaagattcttcgctaattctttatgaaactcaccgtagagtgactc

SEQ ID NO: 384032 - DNA, 120 bp, Artificial Sequence
  ENSG00000143951_11 (sequence is synthesized)
tcttagcacagactgaacttttgccttcattaataagctgccacccaagtggtgccattctgctagttggcagcaaccaaggggagttgcaaatttttgatatggctctatcccctatta

SEQ ID NO: 384033 - DNA, 120 bp, Artificial Sequence
  ENSG00000143951_12 (sequence is synthesized)
acatccaactgttggctgaagaccgcttacccagggagactctgcaattcagtaaattatttgatgcctccagcagtcttgttcaaatgcaatggatagctcctcaggttgtttctcaga

SEQ ID NO: 384034 - DNA, 120 bp, Artificial Sequence
  ENSG00000143951_13 (sequence is synthesized)
agggtgaaggtagtgatatctatgatctcctcttcctcaggtttgaaagaggacctttgggtgtgctgttgtttaaactaggcgtcttcactcgaggacagctgggcctgatagacatca

SEQ ID NO: 384035 - DNA, 120 bp, Artificial Sequence
  ENSG00000143951_14 (sequence is synthesized)
tcttccagtacattcactgtgatgagatctatgaggcaataaacatcctgagcagcatgaactgggacactctgggccaccagtgctttatcagcatgagcgccattgtaaaccatcttc

SEQ ID NO: 384036 - DNA, 120 bp, Artificial Sequence
  ENSG00000143951_15 (sequence is synthesized)
ttagacagaagctcactccagagagagaagcacagcttgagacaagccttggaaccttctatgctccaacaagaccacttctggattccactatattggaatatagagatcaaatcagca

SEQ ID NO: 384037 - DNA, 120 bp, Artificial Sequence
  ENSG00000143951_16 (sequence is synthesized)
aatatgcaaggagattcttccatcacttgctcaggtaccagaggtttgaaaaggcatttctcctagctgttgacgttggtgctcgtgacctctttatggatattcattaccttgcactag

SEQ ID NO: 384038 - DNA, 120 bp, Artificial Sequence
  ENSG00000143951_17 (sequence is synthesized)
ataaaggtgaattggcactagctgaagtggcaagaaaaagagctagtgacattgatgcagaatcaataacctctggggttgaactcctgggacccttggacagaggggatatgctaaatg

SEQ ID NO: 384039 - DNA, 120 bp, Artificial Sequence
  ENSG00000143951_18 (sequence is synthesized)
aagcatttattggcctgtctttagcacctcaaggagaagactcatttccagataacctccctccctcttgcccaacccacagacatattttacaacaaagaatactgaatggctcttcta

SEQ ID NO: 384040 - DNA, 120 bp, Artificial Sequence
  ENSG00000143951_19 (sequence is synthesized)
acagacaaataattgacagaaggaatgaacttgaaaaagacatctgttctggatttttgatgactaatacctgtaatgcagaagacggagaactgagagaagacggcagagaacaggaaa

SEQ ID NO: 384041 - DNA, 120 bp, Artificial Sequence
  ENSG00000143951_20 (sequence is synthesized)
tggcctgatacagacttaaaatcccccgtgtggatttttaacaagagacagtatgaatcatataaattagttaagagttttgagttgagtgtttgttttcaaaataaagttttattattt

SEQ ID NO: 384042 - DNA, 120 bp, Artificial Sequence
  ENSG00000143951_21 (sequence is synthesized)
caaaaacatgcagcataacagcaaagtgatcgtaagtaaaagtcttcaacctacttattttcaataatgtaaaattttgaaagtgtcttaaattgtatgttaattaggtgctacaaaaat

SEQ ID NO: 384043 - DNA, 120 bp, Artificial Sequence
  ENSG00000143951_22 (sequence is synthesized)
agaatatttaaactttgttctcccaggtactttaaaaaaggggcagtagggggcaggcatagtgctcatgcctgtagtcccagtgctttaggaggccaaggctgaaggatcacttgagcc

SEQ ID NO: 384044 - DNA, 88 bp, Artificial Sequence
  ENSG00000143951_23 (sequence is synthesized)
gtgcaacatagtgaaacgctgtctctagtacatgcttgtgaagctgaggcagaagaattgcttgagcccaggagttcaaggctacagt

SEQ ID NO: 384045 - DNA, 87 bp, Artificial Sequence
  ENSG00000143951_24 (sequence is synthesized)
aagctgaggcagaagaattggtgatcgcgccactgcactctaacctgggcaacagagagtgaccctgtctccaaaaaaaaaaaaaaa

SEQ ID NO: 384046 - DNA, 120 bp, Artificial Sequence
  ENSG00000143951_25 (sequence is synthesized)
tcctcttctgctcttgtttacattattaatttacattacaaatacagtatttattatgcaaatttttcagcccagatccattgttagaagacaattctccatggttctctcgaattactg

SEQ ID NO: 384047 - DNA, 120 bp, Artificial Sequence
  ENSG00000143951_26 (sequence is synthesized)
ctatgagtaatttgccctgactgccccttagaacacagatactgtttccctctggagaaaggggcaggcatgcttatcaacttttatatgagatttgagttctttaaactcagaatgcct

SEQ ID NO: 384048 - DNA, 120 bp, Artificial Sequence
  ENSG00000143951_27 (sequence is synthesized)
ctcctttacactgcccattgagtgtgcaggtgtcatctagccctcttaacattgctctataggaatagggctcagagaatccatgaagaaaagaaaaaaatgccgataccctggttacta

SEQ ID NO: 384049 - DNA, 120 bp, Artificial Sequence
  ENSG00000143951_28 (sequence is synthesized)
tcatttgtctctgactcaggagtctcatgtcttctaacagcatccatgaaactatagtgtggtaacttgttagctagtaagtagggtaaaatctcatacccttcacagttattgacaccc

SEQ ID NO: 384050 - DNA, 80 bp, Artificial Sequence
  ENSG00000143951_29 (sequence is synthesized)
gtagggtaaaatctcatacccttcacagttattgacacccattctttagcagataactgatatttcacaattatagacat

SEQ ID NO: 384051 - DNA, 120 bp, Artificial Sequence
  ENSG00000143951_30 (sequence is synthesized)
aggagaatggcgtgaacccggagggcggaggctgcagtgagctgaggtcgcaccattacgctccagcctgggtgacaaagtaagactccgttgcaaaaaaaaaaaaaaaaaaaattatag

SEQ ID NO: 384052 - DNA, 120 bp, Artificial Sequence
  ENSG00000143951_31 (sequence is synthesized)
ataatcaacattgtttaatattagacaataattacattatataattaaatcttagagttcaaagttaatcagactgaaggcttttatacttcaaatttttctttctacttcccatttatc

SEQ ID NO: 384053 - DNA, 120 bp, Artificial Sequence
  ENSG00000143951_32 (sequence is synthesized)
ttcccatttatctgtacctctaccagagggtatgacaaaaaaaggtgaaactcaaattagatttttcattttgttattgctctgaaaaaattttaataatgcataacatgtaagccaaac

SEQ ID NO: 384054 - DNA, 120 bp, Artificial Sequence
  ENSG00000143951_33 (sequence is synthesized)
tgagttaccagcaaattttcattctcctattcccaaccttctttatcacacagataatcaaaagttaactaatttttagagaaaaaattgtatttaaaaaaatagggttttgtcaagatt

SEQ ID NO: 384055 - DNA, 120 bp, Artificial Sequence
  ENSG00000143951_34 (sequence is synthesized)
gcagaattttctccagattttccgggtaaatagtcattaacccaaaatacctttcctgtgagatactaaagataaaatatggatattgatacatctatgtttttctacataatgataata

SEQ ID NO: 384056 - DNA, 120 bp, Artificial Sequence
  ENSG00000143951_35 (sequence is synthesized)
ataatgaaaatgtttgccagttatgtaggtgaaaattaaacaaatcatagttcttaaagtacccattttccccacttcacatacctctagaaaagttaaatgtacagaaaaccaagttta

SEQ ID NO: 384057 - DNA, 120 bp, Artificial Sequence
  ENSG00000143951_36 (sequence is synthesized)
gatagtaagaatatattatgaatgatctttgataatgtccatgatttataaatgctgttatttcccagatgttgtaaatctgagaatattaattaaattgatattcctcctctgctagaa

SEQ ID NO: 384058 - DNA, 120 bp, Artificial Sequence
  ENSG00000143951_37 (sequence is synthesized)
cctgaaaggattatgaaggggctaccatagctctaaagtaagaagagtggtataggcaggaacagctaggtagtatctgtcctagcactgacaggttcacaggttgtcctttaggaatag

SEQ ID NO: 384059 - DNA, 120 bp, Artificial Sequence
  ENSG00000143951_38 (sequence is synthesized)
acccatgagctttttcaactattttccagatttctcagatctgaggtaatttccacagtaatttatattagctgtcacattgtgtcttattgctagaataaactttgcttggaatgctaa

SEQ ID NO: 384060 - DNA, 120 bp, Artificial Sequence
  ENSG00000143951_39 (sequence is synthesized)
aaattttttaaataaatagactggtagagaacactgatcagtatcccctaataaatccactttatcctcggatggtttctatcatgtaaacataggattaaactcttagcacaaataaaa

SEQ ID NO: 384061 - DNA, 120 bp, Artificial Sequence
  ENSG00000143951_40 (sequence is synthesized)
attggcactttcatactatgttaaggtttggttttttatttctctagagttctcagcattgtaacttgttattattttaagcatttctgtttttagtgttgtaaaaaaattttcttaagg

SEQ ID NO: 384062 - DNA, 120 bp, Artificial Sequence
  ENSG00000143951_41 (sequence is synthesized)
tccattattagacttttaagataattaatgttttaatcttttactttagacggagaactgagagaagacggcagagaacaggaaatcagagatggtggttctctcaaaatgattcacttt

SEQ ID NO: 384063 - DNA, 120 bp, Artificial Sequence
  ENSG00000143951_42 (sequence is synthesized)
atctctgcaagacaaaagtcagaaatggcttccctggggactgagagcccatagttctcttcccactgctgcttctacccttttgttttgcttggctctctaaaattgtctcagctccag

SEQ ID NO: 384064 - DNA, 120 bp, Artificial Sequence
  ENSG00000143951_43 (sequence is synthesized)
tatttgaatattatttgggggttttatataaccaatactttttaatataccttcctctttaatatgaaagctatgtaaagtcaatgtagaaatattaactgaattgtgctactcgcacta

SEQ ID NO: 384065 - DNA, 120 bp, Artificial Sequence
  ENSG00000143951_44 (sequence is synthesized)
agtaaatattttctttttaattgaagctaatgatgtgaatgttctgtaaagctctgagacagtcattagtttgtttttctttaagaattactgtagaaaaacttgtccattgtctgctta

SEQ ID NO: 384066 - DNA, 120 bp, Artificial Sequence
  ENSG00000143951_45 (sequence is synthesized)
tataatgtggcaagtttctagcttcaccataccccattttctctgctttaaatgggtataataaattttgttaacctagaaaatatgtgaaaaataatgtcaagagatttctctaagaaa

SEQ ID NO: 384067 - DNA, 120 bp, Artificial Sequence
  ENSG00000143951_46 (sequence is synthesized)
acaactctctgaaggcactggagagtgaccatagcaggcataaactgaaaggaagtctatacttggaaagagggagtatcaccgaataaacaaaaatgaggttttgttgccagcagacct

SEQ ID NO: 384068 - DNA, 120 bp, Artificial Sequence
  ENSG00000143951_47 (sequence is synthesized)
tcactgcaagaaatgctaaaggaaattcttcaggctgaaaggaaatgataccagatggaaacttggatctgaggaatggagaactccagaaatggatagagattccttctgccatcagat

SEQ ID NO: 384069 - DNA, 120 bp, Artificial Sequence
  ENSG00000143951_48 (sequence is synthesized)
agagtgaactgcatctgcagacccaccatactcctgatcaagacagttgttgacctcaaactccagactgtcccctgctgatgacctcatcatgcttcttgtcagcaagcttggctctct

SEQ ID NO: 384070 - DNA, 120 bp, Artificial Sequence
  ENSG00000143951_49 (sequence is synthesized)
ttagtttggcaaggattaaaagacatacagtgcctatattcactgtattaagtaactggcctttaaggacatttgattatagtaccagcagaaattagtatgtactggagatggctatag

SEQ ID NO: 384071 - DNA, 120 bp, Artificial Sequence
  ENSG00000143951_50 (sequence is synthesized)
acacttctgttacaaagctacagttgtattaaagctgtgggatgaggacagcctttaccaacatggtcaaaatcaaagatttttttttttctactatgtagtgaagggcatacatagtat

SEQ ID NO: 384072 - DNA, 120 bp, Artificial Sequence
  ENSG00000143951_51 (sequence is synthesized)
gtgcaaactgcagctattaagagagatatgatgatttttggctgtttacattcatgaatactttataaaatccaggaaaaattttgttagatattctactctattgaagtctgaaaagaa

SEQ ID NO: 384073 - DNA, 120 bp, Artificial Sequence
  ENSG00000143951_52 (sequence is synthesized)
acatgcagagaaaatataatcaagaatttatttggcagatttataacatctgcagagctcagagctcaaggaaagaccataacacataaaatatgaacatcaataaatgttcagaatgtg

SEQ ID NO: 384074 - DNA, 120 bp, Artificial Sequence
  ENSG00000143951_53 (sequence is synthesized)
cacttcctgtcgtaagaaggaggttccccacagacattgaattaacaactggatgaaaacttcaaggaaactgggtccatagttcacaacaagcctagatctgggagatgccagcaagca

SEQ ID NO: 384075 - DNA, 120 bp, Artificial Sequence
  ENSG00000143951_54 (sequence is synthesized)
gaaaaactgtggctgaaattgaggcagtgttagcagagtcccaaaagcatgcactgcacatttgctgaattgaatattccaaaaccacaggttacagaattctaacagtgaaattccgaa

SEQ ID NO: 384076 - DNA, 120 bp, Artificial Sequence
  ENSG00000143951_55 (sequence is synthesized)
gcatacctaaatgtataaatgctacaagttaaccaggctgaacttggcttctgtcatctaatgaaatgagaaaatgaaatttccaaaaatattcttgacaagttgacccttataatgaag

SEQ ID NO: 384077 - DNA, 120 bp, Artificial Sequence
  ENSG00000143951_56 (sequence is synthesized)
actgcgctctgcgccgattgcaaagtagtccctgaggatgagcccctgtgattggaggacgacaacaaacggatggtttgggctcaggaggaaaggacctgcctgatggagcccggcaat

SEQ ID NO: 384078 - DNA, 120 bp, Artificial Sequence
  ENSG00000143951_57 (sequence is synthesized)
tggcgggagagatagcgtgtgtaactctagggaggggagaatcaccccttagcgacatcacccccacgcgcgtgactgagactgcatcctcccatgagggtaaacgtgggaggtaaagag

SEQ ID NO: 384079 - DNA, 120 bp, Artificial Sequence
  ENSG00000143951_58 (sequence is synthesized)
acaaacagctgctgcccttcagagctattgacctagagattcctcaccttgctgcttagtgatgttacctagacatgttaagatccctcttgttaggaattccatgaagcctgaaaatga

SEQ ID NO: 384080 - DNA, 120 bp, Artificial Sequence
  ENSG00000143951_59 (sequence is synthesized)
agccagcgtagtggagaatgaagagacagagttttgattacaaggtttgaaccgtttaactgagatccgcctctgcaggctatccatggacttttaaattatgtttttgagacatctgtg

SEQ ID NO: 384081 - DNA, 120 bp, Artificial Sequence
  ENSG00000143951_60 (sequence is synthesized)
gctcctgttctattctctcaccttccaacaccatgaagtccatgccagctggtcagttgctaagaaaactacctatggttaccaagaaggacctccaggaaacttcagattgcccaagga

SEQ ID NO: 384082 - DNA, 120 bp, Artificial Sequence
  ENSG00000143951_61 (sequence is synthesized)
agtaaatgcaaagcaactcttcagtttcttttctgaatcatgtgcctggaatctgttaggcagtgaggaatggtggtctgtctttatattaccctggtccctcatgctgcttatctttca

SEQ ID NO: 384083 - DNA, 120 bp, Artificial Sequence
  ENSG00000143951_62 (sequence is synthesized)
cacatgtccaaatatgtctcaacacagaatcatcctctctagctgggacatgatgcctaggtgggtgggggattcccctgttttgtttaaaatcaaagttgtctttgaatttggctagca

SEQ ID NO: 384084 - DNA, 120 bp, Artificial Sequence
  ENSG00000143951_63 (sequence is synthesized)
ggctccatgaggccagggagggcaagggcattgtctgttttgttcattgctgtattctcagcacttggaacagtgcctggctcatatgatatactaaatatatatattttggggtaaatg

SEQ ID NO: 384085 - DNA, 120 bp, Artificial Sequence
  ENSG00000143951_64 (sequence is synthesized)
agtgaatttatgaaaaagtggctgtacctattctttgagaaggattctgaaggaatgtccaacctcacttggcaggatccatagtctccaaatcactgctcctgcctccatgcatagatc

SEQ ID NO: 384086 - DNA, 120 bp, Artificial Sequence
  ENSG00000143951_65 (sequence is synthesized)
agttatctaaccagtgtatgcatgcttttggctccatgacactcacccctctgaatcttttccggcataagttccctcatttacttactctcacaggctgtactttccttcttcatctca

SEQ ID NO: 384087 - DNA, 120 bp, Artificial Sequence
  ENSG00000143951_66 (sequence is synthesized)
taaaagtgggtttttaaaagaattttataacaaacgctcatacatagaaaaagcagtttttgttaggatatgagatttatttcatgagagcagtggtgagaacagaaaacaaggtaaaag

SEQ ID NO: 384088 - DNA, 120 bp, Artificial Sequence
  ENSG00000143951_67 (sequence is synthesized)
aaattagacacttggaaaaattaaattccagagttctgaaggaacttgcaaatattttggagataatatccttgtgaaatcatagccaatgggagaggcaacaaaagattgcatttttta

SEQ ID NO: 384089 - DNA, 120 bp, Artificial Sequence
  ENSG00000143951_68 (sequence is synthesized)
ctaattgtaactcacctgagtgtcacacatctaacattgagtccaacctgggttacaaggtttttaaaaagacaaatgtgctcagagttggttaacaacgtagtgaggatatttgttatt

SEQ ID NO: 384090 - DNA, 120 bp, Artificial Sequence
  ENSG00000143951_69 (sequence is synthesized)
tgatataggattcaaagggatgaacgtcatggaggcaagagcatgcatacattggttagataactaatctatgcctggaggcaggagcagtgatttggagactatggacagcatcctaca

SEQ ID NO: 384091 - DNA, 120 bp, Artificial Sequence
  ENSG00000143951_70 (sequence is synthesized)
attaatggttgaataataataataattgcaaacactgtgtgccaggcattattctaaatgttttttgtaaaaagttatttaatcctcatcctatgaagtagatactatcatgtttatttt

SEQ ID NO: 384092 - DNA, 120 bp, Artificial Sequence
  ENSG00000143951_71 (sequence is synthesized)
caggtgaggaaatgaagggacagagaggttaaattacactgtcagtgtcacacagctagtaacaagtagccaatattgattttattctgatttcagagtctgtgctcttaaccactgtgt

SEQ ID NO: 384093 - DNA, 120 bp, Artificial Sequence
  ENSG00000143951_72 (sequence is synthesized)
tattatccttgaatatttgaggtgggtgctactgaagaataattggggtgactgttgaagttgtagggagtcagttgtatcctcagcctcaatctcaagagtcaccacctccttctcagt

SEQ ID NO: 384094 - DNA, 120 bp, Artificial Sequence
  ENSG00000143951_73 (sequence is synthesized)
cagactctgagtctacccagtatgtacttctataataggtctggtaaactggtaacagcactttattagttatttgctttgatctcgacctctttctattaacctactttatttaaccta

SEQ ID NO: 384095 - DNA, 120 bp, Artificial Sequence
  ENSG00000143951_74 (sequence is synthesized)
ctttaagaattatatttgatttctttttgagcccttaaatttaatttagtgcttggcatataatgaatattcagtttttggtgaattaaaaaaatgaatgaaggatctttaaattgatta

SEQ ID NO: 384096 - DNA, 120 bp, Artificial Sequence
  ENSG00000143951_75 (sequence is synthesized)
caactgacccatggtagaatagttttcctgtgaagcagtgagctcctgatcactggcaatattcaagcatgggctagatgcttgaagggatgctgcagaaggaacatccatgtcatatga

SEQ ID NO: 384097 - DNA, 120 bp, Artificial Sequence
  ENSG00000143951_76 (sequence is synthesized)
aaatggaaaattagaccaagtttttttttttttgtaactgcaaattatctggtgttccattgagttagttgtgattctttctccaaacatttgttgagcacctactgtattcctggcact

SEQ ID NO: 384098 - DNA, 120 bp, Artificial Sequence
  ENSG00000143951_77 (sequence is synthesized)
acaaagataaatgtggccaagccaacatccataaggagctggtagtcagtgagtaattaggaaaagaagtgcttaagagtataggtgtaaagctttagtagataaaaataaatagaaaag

SEQ ID NO: 384099 - DNA, 120 bp, Artificial Sequence
  ENSG00000143951_78 (sequence is synthesized)
ggtagattttagagatgttttgaataaaggaggaaggggagaagtagatataaaagatgtccctaaaattgcccgtctgagaaggaatttggggagttaagaccacctgctgtgttgcta

SEQ ID NO: 384100 - DNA, 120 bp, Artificial Sequence
  ENSG00000143951_79 (sequence is synthesized)
tggggggattcttcaaaagggaaatatcaccatttgccattaaggtatgtggtagggctgggtgtaattcagtagagattaagttgtgaagcattttaaatttcttgaaacaaatgtgcc

SEQ ID NO: 384101 - DNA, 120 bp, Artificial Sequence
  ENSG00000143951_80 (sequence is synthesized)
ttctcttagtagtctccaaaacccataaagatgattaagtaccctccccccaactctctgcccctgtagaggtattaacgcaaaatggaataatctgttaagtcaaataaaggtaagctt

SEQ ID NO: 384102 - DNA, 120 bp, Artificial Sequence
  ENSG00000143951_81 (sequence is synthesized)
gtgaaacaatttcttccaatgttgatatttcataatctcatagataacaagcatacgcatatgcatagtcctttcagaagttttaaacatttggagatgaatgaattatgctgccacaaa

SEQ ID NO: 384103 - DNA, 120 bp, Artificial Sequence
  ENSG00000143951_82 (sequence is synthesized)
agcagtataaaattataatggtgatatccaatcatcttttgttgagtggttttgtgaacactgacattgataaagcctggatgctctactatattcctttatttctccttgtgaaattgt

SEQ ID NO: 384104 - DNA, 120 bp, Artificial Sequence
  ENSG00000143951_83 (sequence is synthesized)
ttctgatatgtgttgtttatgattttaaaaatttaacattttacttaattgccttgatttacatgtattttaacattttagactgacaagatctttatttttagaagtaaatagtgttta

SEQ ID NO: 384105 - DNA, 120 bp, Artificial Sequence
  ENSG00000143951_84 (sequence is synthesized)
acttccaaataaatgcataacattagctgtttatattgtaatagtggcatctcttctatatttaatgtgtagcaatgactattcaaacctcaagaaatgttttagtttataatagtaatt

SEQ ID NO: 384106 - DNA, 120 bp, Artificial Sequence
  ENSG00000143951_85 (sequence is synthesized)
tttcaaaataatagaatacattacattttctgaatccaaaacaaagcagttatgtctgcatatgtgctttctaagtatttagaagattagatttctaataaacatggcctaaattaggtt

SEQ ID NO: 384107 - DNA, 120 bp, Artificial Sequence
  ENSG00000143951_86 (sequence is synthesized)
tctgcatgtagctttaatcaatgcatttattgtgttgcatcctttagccacctttctctttttactcacaatgtcagtaattgtttttcagtgaagaaaatctttataattttgtagtgt

SEQ ID NO: 384108 - DNA, 120 bp, Artificial Sequence
  ENSG00000143951_87 (sequence is synthesized)
agatgcatgtgtaaaatatctgtataagttgtatatttggagagaggttttttaaagattctaaatcacagcatgtcttcctccctctctcccccacttacctggttttagctccttttt

SEQ ID NO: 384109 - DNA, 120 bp, Artificial Sequence
  ENSG00000143951_88 (sequence is synthesized)
gtgtgctgttgtttaaactaggtaagtcaaggaaagtgatgagtaagtaaattaaaatgtttaggatagtgacataattaaggcaataaaactattcttagaatgtagatttttctattt

SEQ ID NO: 384110 - DNA, 120 bp, Artificial Sequence
  ENSG00000143951_89 (sequence is synthesized)
atcatcccataaatatgtttgcctttcaaatatccatatagttcccttttgtggatgactttctaactgccaaaggaacactagatattgaataatttgtaaattgcactaattgtcaat

SEQ ID NO: 384111 - DNA, 120 bp, Artificial Sequence
  ENSG00000143951_90 (sequence is synthesized)
catgatgcttcaaaagccctaatttttacatttgatacgctctaaaataaactacactactaaataattccttaagaaatagacatgtgaatattttagaaggacttactttgtccattg

SEQ ID NO: 384112 - DNA, 120 bp, Artificial Sequence
  ENSG00000143951_91 (sequence is synthesized)
gacaaaacaaagtgccctgccctcaagggagcccacattctaacagagcatattgacatttttaaaagatagatggggtctcactatgttgtccaggctgacctggaactcctgggctga

SEQ ID NO: 384113 - DNA, 120 bp, Artificial Sequence
  ENSG00000143952_0 (sequence is synthesized)
ggattgtgggctgggggctgcggcggcctccggcgctgtctccccgcacccgaccgggccgagccggctgggccggcggggtgagggaaagcagtggagtcgggagcagaagcgctagag

SEQ ID NO: 384114 - DNA, 120 bp, Artificial Sequence
  ENSG00000143952_1 (sequence is synthesized)
gcagtggtcgtggcgcggcggcggcggctcccctggaggccggggatgtgggagaggcggtggcagcagcggcggaggcggcgctgcggacccgggggaaactgctggctgacaggacac

SEQ ID NO: 384115 - DNA, 120 bp, Artificial Sequence
  ENSG00000143952_2 (sequence is synthesized)
ccgggagagacgtgagggagccgccgctgccacctctcacccctgagtgaagctgggctcgagagggcggccctgtgctccccgggccgactggccagcgggcgcggggcgggggcggga

SEQ ID NO: 384116 - DNA, 120 bp, Artificial Sequence
  ENSG00000143952_3 (sequence is synthesized)
gccgggcggcggcggccgtggagcagcagcctcggtgcgacgtggagggctggaggcggcggcgatgcactaggcctcgctcagggcggctgccccgggacccgcagttgagtggtgatt

SEQ ID NO: 384117 - DNA, 120 bp, Artificial Sequence
  ENSG00000143952_4 (sequence is synthesized)
gggacccgcagttgagtggtgattttatgcaatggcttcaagccacagttcttcaccagtgcctcaaggaagcagcagtgatgttttctttaaaatagaggtagatccgtcaaaacacat

SEQ ID NO: 384118 - DNA, 120 bp, Artificial Sequence
  ENSG00000143952_5 (sequence is synthesized)
tcgacctgtgccatcactgccagatgtgtgtcccaaggaacccacaggtgattcacatagtttatatgttgccccatctctagttacagatcaacatagatggactgtatatcattccaa

SEQ ID NO: 384119 - DNA, 120 bp, Artificial Sequence
  ENSG00000143952_6 (sequence is synthesized)
agtaaatctcccagcagcattaaacgatcctagattagcaaaaagagaatctgacttcttcacaaaaacatggggattggactttgtggacactgaagtcataccttcattctacctccc

SEQ ID NO: 384120 - DNA, 120 bp, Artificial Sequence
  ENSG00000143952_7 (sequence is synthesized)
acagatcagcaaggaacattttacagtatatcaacaggaaatctctcagagagagaagattcatgagagatgcaagaatatttgtcctcctaaagataccttcgaaaggactcttttaca

SEQ ID NO: 384121 - DNA, 120 bp, Artificial Sequence
  ENSG00000143952_8 (sequence is synthesized)
tactcatgataaatccaggacagatctggagcaagtacctaagatttttatgaaaccagattttgccttggatgattccttaacttttaattcagttttaccatggtctcattttaatac

SEQ ID NO: 384122 - DNA, 120 bp, Artificial Sequence
  ENSG00000143952_9 (sequence is synthesized)
tgctggtggaaaaggaaatcgtgatgcagcttcctcaaagttgcttcaagaaaagctgagccattatctggatattgtggaagtaaacattgctcaccagatctctctacgttcagaagc

SEQ ID NO: 384123 - DNA, 120 bp, Artificial Sequence
  ENSG00000143952_10 (sequence is synthesized)
attttttcatgcaatgacctctcaacacgagttgcaggactacctcaggaaaacttcccaggctgtaaaaatgcttcgagataaaattgcacagattgataaagtaatgtgtgaaggatc

SEQ ID NO: 384124 - DNA, 120 bp, Artificial Sequence
  ENSG00000143952_11 (sequence is synthesized)
actccacattttaagactggcacttaccagaaataattgtgttaaagtatacaataagctgaagttaatggccactgtacaccagactcagcctacagtacaggtgttattatctacttc

SEQ ID NO: 384125 - DNA, 120 bp, Artificial Sequence
  ENSG00000143952_12 (sequence is synthesized)
tgaatttgttggagcattggacttaatagcaacaacacaagaggttctacagcaggaacttcagggcattcacagtttccggcatttgggatcacagctttgtgaattagaaaaactgat

SEQ ID NO: 384126 - DNA, 120 bp, Artificial Sequence
  ENSG00000143952_13 (sequence is synthesized)
agataaaatgatgattgcagaattttctacttattctcacagtgacttaaatagaccactggaagatgactgtcaagttttagaagaggaaagactaatatctcttgtatttggactttt

SEQ ID NO: 384127 - DNA, 120 bp, Artificial Sequence
  ENSG00000143952_14 (sequence is synthesized)
aaaacaaagaaagcttaattttttagaaatctatggtgaaaaaatggttattacagcaaagaatatcattaaacagtgtgtgattaataaagtttcacaaacagaagaaatagacacaga

SEQ ID NO: 384128 - DNA, 120 bp, Artificial Sequence
  ENSG00000143952_15 (sequence is synthesized)
tgttgttgtgaagcttgcagatcagatgagaatgttgaattttccccagtggtttgatctgctcaaggatattttctctaagtttacaattttcctacagagagtgaaggcaacattaaa

SEQ ID NO: 384129 - DNA, 120 bp, Artificial Sequence
  ENSG00000143952_16 (sequence is synthesized)
tatcattcacagtgttgttctctcagttcttgacaaaaaccaaaggactagagaattggaagagatttcacaacagaagaatgctgcaaaagataattcactggacacagaggtggctta

SEQ ID NO: 384130 - DNA, 120 bp, Artificial Sequence
  ENSG00000143952_17 (sequence is synthesized)
tttaatccatgaaggcatgtttataagtgatgcattcggtgagggtgagctaacacctatagcagttgacactacctctcaaagaaatgcatctccaaatagtgagccctgcagcagtga

SEQ ID NO: 384131 - DNA, 120 bp, Artificial Sequence
  ENSG00000143952_18 (sequence is synthesized)
ttctgtatccgagccagaatgtactactgattcttcatccagcaaagagcacacatcatcatctgctattccaggaggtgtggatattatggtcagtgaagatatgaaattaactgactc

SEQ ID NO: 384132 - DNA, 120 bp, Artificial Sequence
  ENSG00000143952_19 (sequence is synthesized)
tgcctcagatatatgccatgatcgagctgtcaaatttctcatgtcaagagcaaaggatggttttcttgagaagctaaattccatggaattcataacactttctagattaatggaaacatt

SEQ ID NO: 384133 - DNA, 120 bp, Artificial Sequence
  ENSG00000143952_20 (sequence is synthesized)
cattttagacaccgaacagatctgtggaagaaaaagcacgtcattacttggagcacttcagagccaagctattaagtttgtaaataggtttcatgaagagagaaaaaccaagctcagcct

SEQ ID NO: 384134 - DNA, 120 bp, Artificial Sequence
  ENSG00000143952_21 (sequence is synthesized)
cctcttagacaatgagcgctggaagcaagcagatgttcctgcagaatttcaggatcttgttgattctctgtcagatgggaagattgctttacctgaaaaaaaatcaggagccacagaaga

SEQ ID NO: 384135 - DNA, 120 bp, Artificial Sequence
  ENSG00000143952_22 (sequence is synthesized)
aaggaaaccagctgaagttcttattgtcgagggacaacagtatgcagttgttggaaccgtattgctgttaataagaattatccttgaatattgccagtgtgtggataacatcccatctgt

SEQ ID NO: 384136 - DNA, 120 bp, Artificial Sequence
  ENSG00000143952_23 (sequence is synthesized)
tactactgacatgcttactcgtctgtcagatttattgaagtacttcaattcaagaagttgccagttagttcttggagctggtgcactgcaagttgttggactaaaaacgataactacaaa

SEQ ID NO: 384137 - DNA, 120 bp, Artificial Sequence
  ENSG00000143952_24 (sequence is synthesized)
aaatttggctctttcttcacgatgtttgcagttaattgtgcactacattcctgtgatccgggctcattttgaagctcgactaccacctaagcaatatagcatgcttaggcattttgatca

SEQ ID NO: 384138 - DNA, 120 bp, Artificial Sequence
  ENSG00000143952_25 (sequence is synthesized)
tatcactaaggactaccatgatcacatagctgaaatatcagctaagcttgtagcgataatggatagcttatttgacaagctgttatctaagtatgaagtgaaggctcctgttccttctgc

SEQ ID NO: 384139 - DNA, 120 bp, Artificial Sequence
  ENSG00000143952_26 (sequence is synthesized)
ctgtttcaggaatatttgtaagcaaatgacaaaaatgcacgaagctatatttgatctccttccagaagaacaaacacagatgttatttttaagaattaatgcaagttataaactccactt

SEQ ID NO: 384140 - DNA, 120 bp, Artificial Sequence
  ENSG00000143952_27 (sequence is synthesized)
gaaaaagcagttatctcacttaaatgtgataaatgatggaggacctcaaaatgggttggtcacagcagatgtagctttttacactggaaatcttcaagccttaaaaggccttaaagattt

SEQ ID NO: 384141 - DNA, 120 bp, Artificial Sequence
  ENSG00000143952_28 (sequence is synthesized)
ggacctaaatatggccgaaatttgggagcagaagaggtgatgtcatcctggaaaactgggtagttcatctgaccatgggatgtgtttgttatgaagaaaatctggatgcctgtgattcga

SEQ ID NO: 384142 - DNA, 120 bp, Artificial Sequence
  ENSG00000143952_29 (sequence is synthesized)
gaattgaacctgaaacccaaagtgaactggggtgggggaagggaaaaaggaaagtatcaagtgttgggaaactggattcagtgggatctacaaggaatgtcatttttgtgcatcctacag

SEQ ID NO: 384143 - DNA, 120 bp, Artificial Sequence
  ENSG00000143952_30 (sequence is synthesized)
tgaggagtaactgatcaggtgtctataacatttttcattctctctggaaacagactcaggtttctttggaccaaatccaaaagaacacatagctgtaacacagctgtagttgactagaat

SEQ ID NO: 384144 - DNA, 120 bp, Artificial Sequence
  ENSG00000143952_31 (sequence is synthesized)
gctctgtatactttatattaaaaaatgctttgcatttcttccagtgcaatgaaattcatatggtgtcccaccttatttaatgatggtacaatttaaaatcttagtcaacttctgtagaaa

SEQ ID NO: 384145 - DNA, 120 bp, Artificial Sequence
  ENSG00000143952_32 (sequence is synthesized)
gttttctctatgaaagtaaagctgtttgaaaaattattatttttttacagatctttctataaaaaataaacatcttttgattgcttggatttaggaattcaatttttgtttcagtgacca

SEQ ID NO: 384146 - DNA, 120 bp, Artificial Sequence
  ENSG00000143952_33 (sequence is synthesized)
atgtcaagttgcaggctttgtgtgttgcatatttaatatttctactaccaccgtatgtcaactgggtaaagccttccagagctctctaaatacctgaaagacttaagcctttttttaagt

SEQ ID NO: 384147 - DNA, 120 bp, Artificial Sequence
  ENSG00000143952_34 (sequence is synthesized)
aattaatacttaaaaaaaaagatcctggcatctatttatgcaactaaatacttttcagaaatggtatataaaaggctacagtttaatatctgtatttttataaaagtatgatgaagggtt

SEQ ID NO: 384148 - DNA, 120 bp, Artificial Sequence
  ENSG00000143952_35 (sequence is synthesized)
tggggtgtttttatttgtagcagaggtaagaatatgtattcatataatctgcctacttttgagttctcatattaacatttagataacatatgaagtatggcccccttggatccttgtttt

SEQ ID NO: 384149 - DNA, 120 bp, Artificial Sequence
  ENSG00000143952_36 (sequence is synthesized)
taagttactttcgatgtgtatacgaacaaagaccagggagaaacagaacttttaaaactataggctgctgtgttggggccagaaataaggtgacaagtaaagacttttataatacctacc

SEQ ID NO: 384150 - DNA, 120 bp, Artificial Sequence
  ENSG00000143952_37 (sequence is synthesized)
ttcaaaattagaatcagcagcactgtacaaataaagtgcctgtgcttcacctcacaccaagaatcttgcctaaccctgtcagagtgcctaatatcctgtggtgattatgtataatgaaac

SEQ ID NO: 384151 - DNA, 120 bp, Artificial Sequence
  ENSG00000143952_38 (sequence is synthesized)
agtcttattttgtgctctttggtttcttaaaaggaaagcttgttttctttcctttatcattacagaggtatgtctttggttcttaaactatctgtctaaaataaagctgtaaaaaattaa

SEQ ID NO: 384152 - DNA, 120 bp, Artificial Sequence
  ENSG00000143952_39 (sequence is synthesized)
tcagttcctgggtggggccaacaagatcaaatgaggcagtttattgatctgggtggtaccagctgatccgtcgagtacagggtctgcaaaatatctcaagcatggatcttaggagcagtt

SEQ ID NO: 384153 - DNA, 120 bp, Artificial Sequence
  ENSG00000143952_40 (sequence is synthesized)
tgcaaaatatctcaagcatggatcttaggagcagtttagggggagggtcagaatcttgtagtctccagttgcatgactcgactcctaaaccgtaatttctaatcttgtggctaatttgtt

SEQ ID NO: 384154 - DNA, 120 bp, Artificial Sequence
  ENSG00000143952_41 (sequence is synthesized)
gtggtttgttttgggaaaggactgttatcatctttgttttaaactataagctaagttcctcccaaagttagttcaccctatgcccaagaatggacaagaacagcttggaggttagaagca

SEQ ID NO: 384155 - DNA, 83 bp, Artificial Sequence
  ENSG00000143952_42 (sequence is synthesized)
ctacaaaaactctgtagctaatggggaaactagatgcttcccactaagaacaggatcaagagagagaagattcatgagagatg

SEQ ID NO: 384156 - DNA, 120 bp, Artificial Sequence
  ENSG00000143954_0 (sequence is synthesized)
atccctgagatctttttataaaaaacccagtctttgctgaccagacaaagcataccagatctcaccagagagtcctaggggactacagaaggaaaaagacaagaggcagtaggatatctg

SEQ ID NO: 384157 - DNA, 120 bp, Artificial Sequence
  ENSG00000143954_1 (sequence is synthesized)
tgtgtcctcccgctgaccacacttcctttagtgacccgattgcctcctcaagtcgcagacactatgctgcctcccatggccctgcccagtgtgtcctggatgctgctttcctgcctcatt

SEQ ID NO: 384158 - DNA, 120 bp, Artificial Sequence
  ENSG00000143954_2 (sequence is synthesized)
ctcctgtgtcaggttcaaggtgaagaaacccagaaggaactgccctctccacggatcagctgtcccaaaggctccaaggcctatggctccccctgctatgccttgtttttgtcaccaaaa

SEQ ID NO: 384159 - DNA, 120 bp, Artificial Sequence
  ENSG00000143954_3 (sequence is synthesized)
gtgaggagcattagtaacagctattcatacatctggattgggctccatgaccccacacagggctctgagcctgatggagatggatgggagtggagtagcactgatgtgatgaattacttt

SEQ ID NO: 384160 - DNA, 120 bp, Artificial Sequence
  ENSG00000143954_4 (sequence is synthesized)
gcatgggagaaaaatccctccaccatcttaaaccctggccactgtgggagcctgtcaagaagcacaggatttctgaagtggaaagattataactgtgatgcaaagttaccctatgtctgc

SEQ ID NO: 384161 - DNA, 120 bp, Artificial Sequence
  ENSG00000143954_5 (sequence is synthesized)
aagttcaaggactagggcaggtgggaagtcagcagcctgagcttggcgtgcagctcatcatggacatgagaccagtgtgaagactcaccctggaagagaatattctccccaaactgccct

SEQ ID NO: 384162 - DNA, 120 bp, Artificial Sequence
  ENSG00000143954_6 (sequence is synthesized)
acctgactaccttgtcatgatcctccttctttttcctttttcttcaccttcatttcaggcttttctctgtcttccatgtcttgagatctcagagaataataataaaaatgttactttata

SEQ ID NO: 384163 - DNA, 120 bp, Artificial Sequence
  ENSG00000143954_7 (sequence is synthesized)
attcactccagtgaccatccctgagatctttttataaaaaacccagtctttgctgaccagacaaagcataccagatctcaccagagagtcgcagacactatgctgcctcccatggccctg

SEQ ID NO: 384164 - DNA, 120 bp, Artificial Sequence
  ENSG00000143954_8 (sequence is synthesized)
aaagcataccagatctcaccagagaggtaagtgggagctgagagaagatgagacctgtggaagggcaacctcacataatacaggagaacgcatgggagggtcccttcctcagggagcaca

SEQ ID NO: 384165 - DNA, 120 bp, Artificial Sequence
  ENSG00000143954_9 (sequence is synthesized)
ggttagatgtggggttggaggtgataggggaaagtccatgcaggtctcagggggaggagggtctccttcaggagagttccttgggaatgaggatgaacacgcttatctttcacacagtcc

SEQ ID NO: 384166 - DNA, 120 bp, Artificial Sequence
  ENSG00000143954_10 (sequence is synthesized)
tcgcagacactatgctgcctcccatggccctgcccagtgtgtcctggatgctgctttcctgcctcattctcctgtgtcaggttcaaggtgagatttctctgcctctagcactgggttccc

SEQ ID NO: 384167 - DNA, 120 bp, Artificial Sequence
  ENSG00000143954_11 (sequence is synthesized)
tatgaatcctcagagccaagaaaaggaggaaggctcctgtgtgtcacgtgaggtaatgacgtggtgtctaatgaaactgcctgcagttcctgcatcatcactccttccttcatgttaact

SEQ ID NO: 384168 - DNA, 120 bp, Artificial Sequence
  ENSG00000143954_12 (sequence is synthesized)
tgcagtgggaggctccactgtggtccactaacaatggaatgagatggcttccatttagtcagtggactctaatatacactggtgggaaagtgtggagggtcagcaatgagatgtggggag

SEQ ID NO: 384169 - DNA, 120 bp, Artificial Sequence
  ENSG00000143954_13 (sequence is synthesized)
ggacaatgattggaggacccaatatagagatagcccacagtgaagagagtgttgaatggttgaataaggggaaagggtaataacagactagatggtggcccatttagtagggctattttg

SEQ ID NO: 384170 - DNA, 120 bp, Artificial Sequence
  ENSG00000143954_14 (sequence is synthesized)
agaacttctgaaaacacaagggaagatgaagagctgtcaggaatgtggtcttcctccccaagggcagacctagatattccccaaggtcatctcccacccaccccctactcttcattttac

SEQ ID NO: 384171 - DNA, 120 bp, Artificial Sequence
  ENSG00000143954_15 (sequence is synthesized)
gctattcatacatctggattgggctccatgaccccacacaggtgcgagtatatcctcccctctctgttacctctcaaggtactgttgttgcccaggcgcactccctgtccccagtccctg

SEQ ID NO: 384172 - DNA, 120 bp, Artificial Sequence
  ENSG00000143970_0 (sequence is synthesized)
acatgaccgtagcggcagcctgtacagtaagaacccaatatggcagcggcggtagcagtggcaacggcagcaagaggaccggccgccccatagacccccccgcgcaccacccccgccgct

SEQ ID NO: 384173 - DNA, 120 bp, Artificial Sequence
  ENSG00000143970_1 (sequence is synthesized)
tcctctgcttgggtgcccccccggtctgacttcccttttctcccacctttcccggcaccgcgggaaaagcagcgcagggcagagcaggcagggagggcggccggagcccggacacgggag

SEQ ID NO: 384174 - DNA, 120 bp, Artificial Sequence
  ENSG00000143970_2 (sequence is synthesized)
cctcccagtcagttcaagacccgacatgagggaaaagggacgtaggaagaagggcaggacctgggcggaggccgccaagacggtcttagaaaaataccccaatacacccatgagtcataa

SEQ ID NO: 384175 - DNA, 120 bp, Artificial Sequence
  ENSG00000143970_3 (sequence is synthesized)
agaaattcttcaagttatccagagagaaggactaaaagaaatcagaagtgggacttctcctcttgcatgcctgaatgcaatgcttcacacaaactccagaggtgaagagggcatcttcta

SEQ ID NO: 384176 - DNA, 120 bp, Artificial Sequence
  ENSG00000143970_4 (sequence is synthesized)
taaggttccaggtagaatgggagtatatactttgaagaaagatgtgccggatggggtgaaagagctgtcagaaggttcagaagaaagcagtgatggtcagtcagattcccagagttctga

SEQ ID NO: 384177 - DNA, 120 bp, Artificial Sequence
  ENSG00000143970_5 (sequence is synthesized)
gaacagcagcagcagcagtgatggtggcagcaacaaggagggaaaaaagagcaggtggaaaaggaaagtatcgtcgtcctccccgcagtcaggctgcccatcacccaccattccagcagg

SEQ ID NO: 384178 - DNA, 120 bp, Artificial Sequence
  ENSG00000143970_6 (sequence is synthesized)
taaagtcatttctccatcacagaagcacagcaagaaggcactaaagcaggcgctaaagcagcaacagcagaagaagcagcagcagcaatgcaggccaagcatatccatctcctccaacca

SEQ ID NO: 384179 - DNA, 120 bp, Artificial Sequence
  ENSG00000143970_7 (sequence is synthesized)
gcatctctcactaaagactgtcaaagcagccagtgactctgtacctgccaaacctgcaacatgggaaggaaagcaatctgatggacagacaggcagccctcaaaactcaaactccagctt

SEQ ID NO: 384180 - DNA, 120 bp, Artificial Sequence
  ENSG00000143970_8 (sequence is synthesized)
ttcttcctcagttaaagtggaaaatactttactaggcttggggaagaagtcattccagagatctgagagactccataccagacaaatgaaaagaactaaatgtgctgacattgacgttga

SEQ ID NO: 384181 - DNA, 120 bp, Artificial Sequence
  ENSG00000143970_9 (sequence is synthesized)
gacaccggactccattctggttaatacaaatctgcgagcactgatcaacaagcacacattttcagtccttcctggagattgccagcaacgactgcttttactactcccagaggtagatcg

SEQ ID NO: 384182 - DNA, 120 bp, Artificial Sequence
  ENSG00000143970_10 (sequence is synthesized)
acaggttggtccagatggtttaatgaagttaaatggctcagcccttaacaatgaattcttcacttcagcagcccaaggctggaaggaaagactctcagaaggtgagtttacacctgagat

SEQ ID NO: 384183 - DNA, 120 bp, Artificial Sequence
  ENSG00000143970_11 (sequence is synthesized)
gcaggtgagaattcgacaagagattgagaaggagaaaaaagtggagccatggaaagaacaattctttgaaagctactatgggcagagttctggcctgagccttgaagattctaagaaatt

SEQ ID NO: 384184 - DNA, 120 bp, Artificial Sequence
  ENSG00000143970_12 (sequence is synthesized)
gacagcttctcccagtgatcccaaagtaaagaaaaccccagctgaacaaccaaaatccatgcctgtgtcagaggcctctcttatcagaatagttccagtagtctcccagtcagagtgtaa

SEQ ID NO: 384185 - DNA, 120 bp, Artificial Sequence
  ENSG00000143970_13 (sequence is synthesized)
agaagaagcattgcaaatgtcatcaccaggcagaaaagaagagtgtgaaagccaaggtgaagtgcagccgaacttctccacatcttcagagcccctgctttcctcagctctcaatacaca

SEQ ID NO: 384186 - DNA, 120 bp, Artificial Sequence
  ENSG00000143970_14 (sequence is synthesized)
tgagcttagcagcattcttcccatcaagtgcccaaaggatgaggatctcttggagcagaagccagtcacctctgctgaacaggaatctgagaagaaccatctcaccacagcttctaatta

SEQ ID NO: 384187 - DNA, 120 bp, Artificial Sequence
  ENSG00000143970_15 (sequence is synthesized)
taacaaaagtgaaagccaagaatctttagttacatcgccaagcaaacccaagagtcctggggttgaaaaaccaatagtgaagcccacagcaggagcgggtccacaggagactaatatgaa

SEQ ID NO: 384188 - DNA, 120 bp, Artificial Sequence
  ENSG00000143970_16 (sequence is synthesized)
agaacctctagcaactcttgttgatcagagcccagaaagcctcaagaggaagtcttccctcacccaagaagaggcccctgtgagctgggagaagaggccacgtgtcactgagaatcgcca

SEQ ID NO: 384189 - DNA, 120 bp, Artificial Sequence
  ENSG00000143970_17 (sequence is synthesized)
gcaccagcagccatttcaggtctcaccacagccctttctcaatagaggggacagaatccaggtgcgaaaagtaccacctctcaagatcccggtctccagaatctcccccatgccgtttca

SEQ ID NO: 384190 - DNA, 120 bp, Artificial Sequence
  ENSG00000143970_18 (sequence is synthesized)
tccatcgcaggtctctcccagggctcgttttccagtctccatcactagtcctaacagaacaggagccagaactcttgcagacatcaaagcaaaagcccaactggtcaaagcacagagggc

SEQ ID NO: 384191 - DNA, 120 bp, Artificial Sequence
  ENSG00000143970_19 (sequence is synthesized)
agcagctgccgctgccgccgcagctgctgcagccgcctcagttggagggaccattccaggacctggcccagggggtggacaaggtccaggagagggtggtgaagggcagactgctagagg

SEQ ID NO: 384192 - DNA, 120 bp, Artificial Sequence
  ENSG00000143970_20 (sequence is synthesized)
aggcagtccaggctcagacagagtcagtgaaactggaaagggccccacactggaactggcaggaactggaagcaggggaggtacgagagagcttttaccctgtggtccagagactcagcc

SEQ ID NO: 384193 - DNA, 120 bp, Artificial Sequence
  ENSG00000143970_21 (sequence is synthesized)
ccagtctgagaccaagaccaccccaagccaggcacagcctcatagtgtctctggagcacaactacagcaaacccccccagtgcctccaacacctgccgtcagtggagcatgcacaagtgt

SEQ ID NO: 384194 - DNA, 120 bp, Artificial Sequence
  ENSG00000143970_22 (sequence is synthesized)
cccatcaccagcccacatagagaaattggataatgaaaaactgaaccccaccagagcaacagccacagtggcctctgtcagccatccacaagggcccagtagttgcagacaggagaaagc

SEQ ID NO: 384195 - DNA, 120 bp, Artificial Sequence
  ENSG00000143970_23 (sequence is synthesized)
accttctccaacaggtcctgctctaatctcaggtgcctcacctgttcattgtgcagctgatggcacagttgagctcaaagcaggtcctagtaagaatatacctaacccttcagcctcatc

SEQ ID NO: 384196 - DNA, 120 bp, Artificial Sequence
  ENSG00000143970_24 (sequence is synthesized)
aaagacagatgctagtgtgccagtggctgtaactccctcccctttaacatctttattgaccacagccactttagaaaagcttcctgtaccccaggtcagtgcaactacagcacctgctgg

SEQ ID NO: 384197 - DNA, 120 bp, Artificial Sequence
  ENSG00000143970_25 (sequence is synthesized)
atcagctccaccctcgagcactttgccagcagcttctagccttaaaaccccaggaacttctttaaacatgaatggacccactttaagaccaacctctagtatccctgctaataatccttt

SEQ ID NO: 384198 - DNA, 120 bp, Artificial Sequence
  ENSG00000143970_26 (sequence is synthesized)
agtgactcagctgcttcaaggcaaagatgttcccatggagcaaattctgcctaaacctctcaccaaagttgaaatgaaaacggttccactgactgcaaaagaggaaagggggatgggagc

SEQ ID NO: 384199 - DNA, 120 bp, Artificial Sequence
  ENSG00000143970_27 (sequence is synthesized)
gctcatagctaccaacacaacagaaaatagcaccagagaggaagttaatgagagacagtcccatccagctacgcagcagcagctgggcaaaaccttgcaaagtaagcagctcccccaggt

SEQ ID NO: 384200 - DNA, 120 bp, Artificial Sequence
  ENSG00000143970_28 (sequence is synthesized)
tccaaggccccttcagctcttttcagctaaggagctgagggactccagcattgacacacaccaataccacgaaggactaagtaaagcaacccaagatcagatccttcagactctcattca

SEQ ID NO: 384201 - DNA, 120 bp, Artificial Sequence
  ENSG00000143970_29 (sequence is synthesized)
gagggttcggaggcagaatcttctctcagttgtgccgccctcacagttcaacttcgctcactcaggtttccagctggaagacatctccacaagccagaggttcatgctgggttttgctgg

SEQ ID NO: 384202 - DNA, 120 bp, Artificial Sequence
  ENSG00000143970_30 (sequence is synthesized)
cagaaggacatccaaacctgcaatggcagggcactacttactgaatatttctacctacggccggggctcagagagctttaggaggacccattctgtaaaccctgaagatcgtttttgtct

SEQ ID NO: 384203 - DNA, 120 bp, Artificial Sequence
  ENSG00000143970_31 (sequence is synthesized)
aagcagccccactgaagccttgaaaatgggatatacagactgtaaaaatgcaacaggagagagtagcagcagcaaagaagatgacactgatgaggaaagtactggtgatgagcaggaatc

SEQ ID NO: 384204 - DNA, 120 bp, Artificial Sequence
  ENSG00000143970_32 (sequence is synthesized)
tgtcacagtgaaagaggagccccaggtttcccagagtgctggcaagggtgacacaagttcaggacctcacagcagggaaactctatctaccagtgattgcttagctagcaagaatgtgaa

SEQ ID NO: 384205 - DNA, 120 bp, Artificial Sequence
  ENSG00000143970_33 (sequence is synthesized)
ggctgagataccattgaatgagcaaaccactttaagtaaggagaattacctgttcactagaggccaaacatttgatgaaaagaccctagccagagatttaattcaggcagcacagaagca

SEQ ID NO: 384206 - DNA, 120 bp, Artificial Sequence
  ENSG00000143970_34 (sequence is synthesized)
gatggctcatgcagtgagaggtaaggcaatccgtagcagccccgagcttttcagttctactgttcttcctctgcctgcagacagccccacccaccagcccctactccttccacccctgca

SEQ ID NO: 384207 - DNA, 120 bp, Artificial Sequence
  ENSG00000143970_35 (sequence is synthesized)
aaccccgaagttgtatggaagccccacccagatagggccaagctatagaggcatgatcaatgtctccacctcatctgacatggaccataactctgctgtaccaggtagccaggtatctag

SEQ ID NO: 384208 - DNA, 120 bp, Artificial Sequence
  ENSG00000143970_36 (sequence is synthesized)
caatgtaggtgatgtcatgtcattttcagtgactgtcactaccatccctgctagccaagctatgaatcccagcagccatggccagaccattcctgttcaggcgttctccgaagagaacag

SEQ ID NO: 384209 - DNA, 120 bp, Artificial Sequence
  ENSG00000143970_37 (sequence is synthesized)
catagagggcacgccttcgaaatgttactgccgcttgaaagccatgatcatgtgcaaaggctgtggcgctttctgccatgatgattgcatcggcccctccaaactgtgcgtctcctgcct

SEQ ID NO: 384210 - DNA, 120 bp, Artificial Sequence
  ENSG00000143970_38 (sequence is synthesized)
tgtcgttcggtaatgagactagaaagagatacactgtaaaggagggggaagggaagggttgaccagttgggttttttgcgtccttttggaatcacagaaataaacaagtaggtttcagtt

SEQ ID NO: 384211 - DNA, 120 bp, Artificial Sequence
  ENSG00000143970_39 (sequence is synthesized)
gtcttcagagacaaatgttacttaatcaggaatacaaagtacagattttttacattttagaggaagagcaccttgtatagtaagtctaagtcaagcaagactttgtgaatttgtgacaag

SEQ ID NO: 384212 - DNA, 120 bp, Artificial Sequence
  ENSG00000143970_40 (sequence is synthesized)
tttgcacttacaaaatcatgtaaatatgtcacattttgtttaacattatttttccaagtgtttaggtaataatgtattactttgaattcagattaatgttctactacttgtgactgagaa

SEQ ID NO: 384213 - DNA, 120 bp, Artificial Sequence
  ENSG00000143970_41 (sequence is synthesized)
aagtttaatgccggcatggtaaaaggaagctgtctcccttctgacatttcctaggaagctaggaaaaggaaagtgaaggaatggtctaaagaaatgaccattcacactgattttgtctgg

SEQ ID NO: 384214 - DNA, 120 bp, Artificial Sequence
  ENSG00000143970_42 (sequence is synthesized)
acagtctggccgcaggttattcatagattattcagcctttgcaggacttggattcagggttttactcagtccctttaccttaggtggaatcttcttaaattgaaatttttggtaaggaat

SEQ ID NO: 384215 - DNA, 120 bp, Artificial Sequence
  ENSG00000143970_43 (sequence is synthesized)
tcatttcacaggtagtgtttcagactctgaaagccctgacttggttcttggcttctactgtactagttactagttactggtactgttgccaagcaatctgcttggaatttgtggatccct

SEQ ID NO: 384216 - DNA, 120 bp, Artificial Sequence
  ENSG00000143970_44 (sequence is synthesized)
gctgttccctaatcccaccccctgccctgagacagtgaatgtagtccgtgaagggagtgcctctctgggaccccctgtgttgttacaggctgtgcagtgcaacaattccagcaaaaatac

SEQ ID NO: 384217 - DNA, 120 bp, Artificial Sequence
  ENSG00000143970_45 (sequence is synthesized)
cctatccccgcacttagtcattcgtggtaactaacaattttgaaatactcatataaaatgaacaggaaagtgttagtgattgggtgatttgagctacatcttgttgagcaaggggagtga

SEQ ID NO: 384218 - DNA, 120 bp, Artificial Sequence
  ENSG00000143970_46 (sequence is synthesized)
aaccacagaaactgttaaattgaacgtaaataactttggaaaacagttttgacactagaacaaggtcgcttctcttttcctcttctctcccaacctgttaacctagtgctagatagtcag

SEQ ID NO: 384219 - DNA, 120 bp, Artificial Sequence
  ENSG00000143970_47 (sequence is synthesized)
ctgctgttgcaggtagaaaagctcaccaatgccacatttgttcattctgttcaacctgttttgacctcccaggcatctgaacaggatgacatcatcttattatatcttactttacacata

SEQ ID NO: 384220 - DNA, 120 bp, Artificial Sequence
  ENSG00000143970_48 (sequence is synthesized)
cgtgtatgtacacacacacacacaatacaagacatttttcctgttttagaaaatatagcccttgtttggattactgctgtctgagcactagaaatttctaatggaaagaggcctctgaat

SEQ ID NO: 384221 - DNA, 120 bp, Artificial Sequence
  ENSG00000143970_49 (sequence is synthesized)
ggctaagggaacatctggaaaggaaggaaaatgagccctaaaggttttttggttgcttgtttttgtttctttttctttcttgtttccttttttgtttttaaatccttctctagtgactga

SEQ ID NO: 384222 - DNA, 120 bp, Artificial Sequence
  ENSG00000143970_50 (sequence is synthesized)
agaaattgtgagtacataatatttaggtcatggttaaggaacattaaaataaacctgcagtttaacagaattttgtattaaatgggggagtgtcaatttgcatcatttgcatattgattt

SEQ ID NO: 384223 - DNA, 120 bp, Artificial Sequence
  ENSG00000143970_51 (sequence is synthesized)
caagtctcctaatttggaatgggtaaagtacaaatgttaatgcaacatagtacagttgtatttgtccttcatattcaggatgtgatatttacaaaatgcagaacagtttaaacttgttaa

SEQ ID NO: 384224 - DNA, 120 bp, Artificial Sequence
  ENSG00000143970_52 (sequence is synthesized)
gtcacattccagattaggagaaaatgggcaataatcatctctgttttgcccccattctactacccaccactgcccaccccacccccacatcacacactcttcgatgctttcccacagccc

SEQ ID NO: 384225 - DNA, 120 bp, Artificial Sequence
  ENSG00000143970_53 (sequence is synthesized)
tcctctccgtaagaaactcacttcactgtttttcacttttcacttctggcttttttgtggcccaaggccaatataggattaatatctgtgttccagcttcagccagaacgatatgtctgt

SEQ ID NO: 384226 - DNA, 120 bp, Artificial Sequence
  ENSG00000143970_54 (sequence is synthesized)
ccatctttctcctttcttccagcacacacagctaagagataagaaggctgcaaggattggggataaggagtatattttcaagccaagaaccagtagaaaacagaaataatggtgctccca

SEQ ID NO: 384227 - DNA, 120 bp, Artificial Sequence
  ENSG00000143970_55 (sequence is synthesized)
aatattcagtaccttgggcaatccaggaagggtttaaagagacctgttgctgcatagaactctccctgccctaccccttaactccaccttagtgccagggccgagggctggtctgcatgc

SEQ ID NO: 384228 - DNA, 120 bp, Artificial Sequence
  ENSG00000143970_56 (sequence is synthesized)
tggaagaggttgagagttttggaattgattccatgctaaatgtcagttaccagtttggattgatgaaagtgatttttctgctttacctttttcctgtcagaaaggttttcctctgtgcta

SEQ ID NO: 384229 - DNA, 120 bp, Artificial Sequence
  ENSG00000143970_57 (sequence is synthesized)
cccttaacttagggatgaacagactataactaggaaaggaggaaaggtatcagggatttttaagtccgtttagagagcaaaccatattgtgcctcttcatcttgacccaggctcttatag

SEQ ID NO: 384230 - DNA, 120 bp, Artificial Sequence
  ENSG00000143970_58 (sequence is synthesized)
ataggtcctaaacattgctgttcactagattatcttaacaaataatactcagctaaatatttgcatttaggaatactcctaaaacagatattgccaactagatacactgcctcaatcttg

SEQ ID NO: 384231 - DNA, 120 bp, Artificial Sequence
  ENSG00000143970_59 (sequence is synthesized)
accagacaagagaacagttaagttctctcagttgggtagtaacttgaataccagtctatttatcagttggtttcaacacagaggtttcaagtggaaagccattcatcttaaaagctgaac

SEQ ID NO: 384232 - DNA, 120 bp, Artificial Sequence
  ENSG00000143970_60 (sequence is synthesized)
agaaaaattaaaaaaaaaaaaaacacattacaatctggccttttagaaaatgaagcagtagaaacaaaacctttattagtatggtattccagcagcacctttaaagcaatctttacctta

SEQ ID NO: 384233 - DNA, 120 bp, Artificial Sequence
  ENSG00000143970_61 (sequence is synthesized)
gttttttgagttgttttacctttcatcccaatctgaaaagttttaataaatgctgagcttattcttagggtatgacctggcattatttccagtgactagtcaggcattatgcctgatgca

SEQ ID NO: 384234 - DNA, 120 bp, Artificial Sequence
  ENSG00000143970_62 (sequence is synthesized)
tacgcctcccgtgcacccctatctagccttcagatgtcctccactgcaggtcaccccaggagatagcatcaataatatagtctcagtcttgtttataaagattctaagttgtctagtaaa

SEQ ID NO: 384235 - DNA, 120 bp, Artificial Sequence
  ENSG00000143970_63 (sequence is synthesized)
taagtctccctgaatcttaaataattttggagaattagaattctccatcctattaaacagaaagtaaagccaaatagcctggagttgtttgtcctacttgttccataacccctatgctca

SEQ ID NO: 384236 - DNA, 120 bp, Artificial Sequence
  ENSG00000143970_64 (sequence is synthesized)
agatactgaagctatctgtggtatttcatgtaacatttctaagaataagagctggcaaatgggaaacttggggtggagagagcatacttattgggctgtgaaggcatacggatgtacatg

SEQ ID NO: 384237 - DNA, 120 bp, Artificial Sequence
  ENSG00000143970_65 (sequence is synthesized)
ttttagagcttatctcagatttaaatagccaaaggaagacctcattgccttccaggtgaaggtgcaaagtcatacatattaatgacctgacagttaacattctgttgtttattattgcct

SEQ ID NO: 384238 - DNA, 120 bp, Artificial Sequence
  ENSG00000143970_66 (sequence is synthesized)
ttctccaccttagagagccataaataactctctggtgaagtgatttgctataatgggggtgaggagtggggagacttctctggtcattacactgctatttatttctagaactcactatca

SEQ ID NO: 384239 - DNA, 120 bp, Artificial Sequence
  ENSG00000143970_67 (sequence is synthesized)
gtgagcagtgccagagtgttttctctttgacctagaggtttcacatcatagcaaggagggaaaagtctccccatctccttacaactgtgtgctaagtaagtaacttggccaagggtagtt

SEQ ID NO: 384240 - DNA, 120 bp, Artificial Sequence
  ENSG00000143970_68 (sequence is synthesized)
ttcagctcaatttatagaatagtccaaagagactttgagaaacatggtgataggcaggggcctttcctaccatgtttcaatacctacaaacctattgaaagagaacagtaggtaaaacat

SEQ ID NO: 384241 - DNA, 120 bp, Artificial Sequence
  ENSG00000143970_69 (sequence is synthesized)
ttcctaaagttgaagcaatagcttcgtagattcttggttactttattttttttaatgctttacatttgatacaactattgaagatcaattttaaaaatagctttccagtaatatatttta

SEQ ID NO: 384242 - DNA, 120 bp, Artificial Sequence
  ENSG00000143970_70 (sequence is synthesized)
agtaatatatattttaatatctgtaaaaagtgacagtggaagactttgaatttctcatatatggtatgtttgatgtaggacctcactgttaaggcacaaattatttcaaaggaagttact

SEQ ID NO: 384243 - DNA, 120 bp, Artificial Sequence
  ENSG00000143970_71 (sequence is synthesized)
ctaaagacactcagattatttcagaaaaatgcaataaggggaatagttttggggtttattttttattttaaaagaaaattgacttatttaccacaagctatttttttcccttctggctgt

SEQ ID NO: 384244 - DNA, 120 bp, Artificial Sequence
  ENSG00000143970_72 (sequence is synthesized)
aaggtttgtacagactggtttggtaaatgctaaacttttgtgtcttttgcctttttaaaggaattgttaacattggaattgagggtatgtacagagaagttggtgtcaacaccatttaaa

SEQ ID NO: 384245 - DNA, 120 bp, Artificial Sequence
  ENSG00000143970_73 (sequence is synthesized)
agagaagttggtgtcaacaccatttaaaaagtcatattttttcacaaatatagaaaatcattttacataagaattttaagtatttgcaataaatatatgtatatagattgtatgtattcc

SEQ ID NO: 384246 - DNA, 120 bp, Artificial Sequence
  ENSG00000143970_74 (sequence is synthesized)
agtaaaagatcattaaaagtgaaaataaaaaccttggagttttttggtgaatcttgaggtttaacatacatctgagagtggcgtgggtaagagtcctcagttactgccttatactcctat

SEQ ID NO: 384247 - DNA, 120 bp, Artificial Sequence
  ENSG00000143970_75 (sequence is synthesized)
gggatggttcccacagattgtatggaagagagtaaaatgaggaacttggtgataaatcagggtagtgtatttcttttggaatttaagtaaaactgattaaattttccttatctgtctgtc

SEQ ID NO: 384248 - DNA, 120 bp, Artificial Sequence
  ENSG00000143970_76 (sequence is synthesized)
tccatgttttctcccttaatctgttttgtctcctaaccccctaacattactggaaaagtgaagaaatgcggtgcagcctctttattaatgtgcccattgtttgctcctaaatcaaagaat

SEQ ID NO: 384249 - DNA, 120 bp, Artificial Sequence
  ENSG00000143970_77 (sequence is synthesized)
ggtaaggaaatatctcgggggaaaaaataggttttcctttctccacagtggttgacatttactgccaccactttccaggccttaggggagtgtgaagaaatagtttcttgaagatgatag

SEQ ID NO: 384250 - DNA, 120 bp, Artificial Sequence
  ENSG00000143970_78 (sequence is synthesized)
aaatttttttttttccgtttcccagttctctcagaagtgagtttcatagccagtcatgtccttcctgcccgtctaatctggagaggtcaaagagcaaggaaaataatgtgaagagaaaca

SEQ ID NO: 384251 - DNA, 120 bp, Artificial Sequence
  ENSG00000143970_79 (sequence is synthesized)
cctgtgccttgattaggttctatttcagcatttgacacttgaattttgaactcctctgggtcaggaagggtagctatggaaatgaggtctgagccagttggtaggagaggttgtctatgt

SEQ ID NO: 384252 - DNA, 120 bp, Artificial Sequence
  ENSG00000143970_80 (sequence is synthesized)
tcccataccgagattgctgtctaatccacgagaactcattttgtggctgcaaagtaaatacttgattttaggatatgataggagcaaaatggtgcctacatcgtctttataaagaaaagt

SEQ ID NO: 384253 - DNA, 120 bp, Artificial Sequence
  ENSG00000143970_81 (sequence is synthesized)
atatagcccattttttaacaaatgaataatatatcgaatcattgatgacctaaaagaaaaattgttaaggtcagattttcgagagtgtatcttgatgacccataaaactgactttttatt

SEQ ID NO: 384254 - DNA, 120 bp, Artificial Sequence
  ENSG00000143970_82 (sequence is synthesized)
gtagttcactagttcccataattgcccagctgtggttactttcactgaaaagaaaaaatatattttggaagttaatgtaaggatacattggctttttttttttttctttacattggcttt

SEQ ID NO: 384255 - DNA, 120 bp, Artificial Sequence
  ENSG00000143970_83 (sequence is synthesized)
ttaaaagacagtttttatttttcagatactggaatgtcaagtatctgggttgtcccaagacgttggagataattcagccttccaagagaacagcagtctagatcttagctgaaaatgtgc

SEQ ID NO: 384256 - DNA, 120 bp, Artificial Sequence
  ENSG00000143970_84 (sequence is synthesized)
tgtttctaaaggaagcttcttaagtctcaggggacattagcatcttcataatttccatatataataagaatgaaggtaaaatatttaaatgtgtataaactaatccataatgaccattta

SEQ ID NO: 384257 - DNA, 120 bp, Artificial Sequence
  ENSG00000143970_85 (sequence is synthesized)
caaagattgactccccatttctggtacatatttatcattatttagatgggtctcctatcttgtgggaagataaatttatattcaggtgatgacatgggtgcctgcaagtagagttggtct

SEQ ID NO: 384258 - DNA, 120 bp, Artificial Sequence
  ENSG00000143970_86 (sequence is synthesized)
gcagctgagggagaaggcaacataccagaagacaaggcagcttcaacctggatccccagctaccctttatttacttcactgagtcagaaacccgtgttcattgcttctgagactacttga

SEQ ID NO: 384259 - DNA, 120 bp, Artificial Sequence
  ENSG00000143970_87 (sequence is synthesized)
cctcagctggtctttagaagtctggtaactttttatgtacaaatcatgttatttactaattcaagtatttatagagcacctactgtgcactaagcactaaagtgctggttatgcaaaggt

SEQ ID NO: 384260 - DNA, 120 bp, Artificial Sequence
  ENSG00000143970_88 (sequence is synthesized)
aagcaaaaatagtcatgtaagttgcagaaaggttttcctaaagtagtgactatacagcatgtttttagttctaggctcaaggagtaatactacctttttcccaagataggttgaaaattt

SEQ ID NO: 384261 - DNA, 120 bp, Artificial Sequence
  ENSG00000143970_89 (sequence is synthesized)
aaatgagttatgaaatggaagtgtttgagacactggacacagtagtggcaaatacatgaagaaagaaggtccctagatgaaaaaagtgtggaaatgaggagccatattaataaaatgcac

SEQ ID NO: 384262 - DNA, 120 bp, Artificial Sequence
  ENSG00000143970_90 (sequence is synthesized)
cttttttgagaactattgttggaatagctaaagttgtctatagaaatttcaagaaatctcttaacatctaaattagaagcaggccaacagcaatctctgtcagtagttaatttaggtcag

SEQ ID NO: 384263 - DNA, 120 bp, Artificial Sequence
  ENSG00000143970_91 (sequence is synthesized)
taagttagtgttttgttaaactaaccctttcaaacacagttgggtaaataatgcagctttcctgtcactgttcaaacctaaaagaagctaaagggaatttttcttaaaacatgattttca

SEQ ID NO: 384264 - DNA, 120 bp, Artificial Sequence
  ENSG00000143970_92 (sequence is synthesized)
tcttatagatgataagtaactgtatctcttcatttggaattgttgcatcccagtttttctccataatggataaaattacttttgtgtccttttctattctaatgtagaagtggcttttcc

SEQ ID NO: 384265 - DNA, 120 bp, Artificial Sequence
  ENSG00000143970_93 (sequence is synthesized)
ttttttctcttgagtcacaacttgaattaaaaagggcttcagcaggactctagcgctttttaaagaagaatttggtgtattccactatgtaacgtagtctctgtccaggaaccaggagga

SEQ ID NO: 384266 - DNA, 120 bp, Artificial Sequence
  ENSG00000143970_94 (sequence is synthesized)
tgagtgtcctcagttttcctaatacttggtaacatttaataatagattgagttttgcttttgtttttcatagagactgtatagactctgtacttccatgtaactttctgccttaacctaa

SEQ ID NO: 384267 - DNA, 120 bp, Artificial Sequence
  ENSG00000143970_95 (sequence is synthesized)
aaaggcattccctggaaggagatcttgtaacaggaagaaaaagcgaaaccaggaaaagagccagaaaggatcaacttggagatgggctgtggctaaatagtgggttttcctgaaaagtaa

SEQ ID NO: 384268 - DNA, 120 bp, Artificial Sequence
  ENSG00000143970_96 (sequence is synthesized)
ctgcaaccttgcttttcgtgcttcttcaaacccaaaagaacctaaagggaatttttaaaaatcctgattttcttcttaattgtaaaacctagaggatgccttagggagaagaaagataac

SEQ ID NO: 384269 - DNA, 120 bp, Artificial Sequence
  ENSG00000143970_97 (sequence is synthesized)
ctggaatttggttttaaatggatttaagtaaactttgaattaagtagcttattccatttttgagagatttctttttaagattttagattcacttaatgtaatgttgaattgccatgaatg

SEQ ID NO: 384270 - DNA, 120 bp, Artificial Sequence
  ENSG00000143970_98 (sequence is synthesized)
taacctggagtttgatttgagacattctgtgggataaggaatagttttctattgaactgtggtggcttttgccactaatcaggatttagggctgtgcacctccatctgttaagtgaaatg

SEQ ID NO: 384271 - DNA, 120 bp, Artificial Sequence
  ENSG00000143970_99 (sequence is synthesized)
gaacttggcttcctaaacactatattagaccaacttgagtcaatacttttattaagtttaatcagggattctcaaaatatttaggattcaaattagcccaattagaaagcagtgcattaa

SEQ ID NO: 384272 - DNA, 120 bp, Artificial Sequence
  ENSG00000143970_100 (sequence is synthesized)
atgttaccaaaatatctgaagatactttagaactattttacacaaagcttatgtctttcctatggaaagtatcatacataaaattttacattcttttaaaaaacagaatctaatgtcttc

SEQ ID NO: 384273 - DNA, 120 bp, Artificial Sequence
  ENSG00000143970_101 (sequence is synthesized)
agatacctagagcttggaaattataatagagttgggctttgacccgaagtcagcagttcttttcattttagattttcaggcaagtttcagtagtttggagacttcttcagtagtgacccc

SEQ ID NO: 384274 - DNA, 120 bp, Artificial Sequence
  ENSG00000143970_102 (sequence is synthesized)
agcttaacctacatataatcactttgcacacattttaagttaatcagatgcttccagagtcttggatttggttacccctttgttagataaggagacagattctaggttgggacaaacatc

SEQ ID NO: 384275 - DNA, 120 bp, Artificial Sequence
  ENSG00000143970_103 (sequence is synthesized)
ttaatttattctctaataataaagtactgattaaagagcaagttctcagagaattcacaaaatttctagaatccatgaaagatctagagaacataacaaatgaaactctagaaatttgaa

SEQ ID NO: 384276 - DNA, 120 bp, Artificial Sequence
  ENSG00000143970_104 (sequence is synthesized)
agaaaaaaaaacacttagctgtaagtgctttgacctattttttttaaaaaaaaaaaacctgtcttaattctgtgactgcattgcacccttcaccagcactaagagaagtcggaatggaag

SEQ ID NO: 384277 - DNA, 120 bp, Artificial Sequence
  ENSG00000143970_105 (sequence is synthesized)
aaattaccgtatgtaattcttattcacttaaaatctttgtgcgcataggccttagcactttgacaaataaactctgccttttagctcctcactattgtcttctttcctgtcacttttagg

SEQ ID NO: 384278 - DNA, 120 bp, Artificial Sequence
  ENSG00000143970_106 (sequence is synthesized)
ctgtttcattggtcgtataaaaacaaccttcttcgaagttgaatgtatgtttctgcacatagacaaaccatattttactgactcattctatgttgaataaaggcatacagttttacccta

SEQ ID NO: 384279 - DNA, 120 bp, Artificial Sequence
  ENSG00000143970_107 (sequence is synthesized)
ttcagccaaataggaacagagaatagaactttgaaattcagtccaatattaaaactagtttattgatttctgtgtaaagtggaagacttaaaagtttgtagttttggttgctagttttca

SEQ ID NO: 384280 - DNA, 120 bp, Artificial Sequence
  ENSG00000143970_108 (sequence is synthesized)
gacaggatacacaatgttcagagaagagttttatggaattccaaataaaggacttacagaaaatagtggaacagacatggtactatcaattatccttttcattctctacctttaagtatc

SEQ ID NO: 384281 - DNA, 120 bp, Artificial Sequence
  ENSG00000143970_109 (sequence is synthesized)
attgagtaaattgtattgacctgttcttaagctcactgattctgtcctctgttgtctccactctcttactgatttcatctgtgggacttctcctcttgcatgcctgaatgcaatgcttca

SEQ ID NO: 384282 - DNA, 120 bp, Artificial Sequence
  ENSG00000143971_0 (sequence is synthesized)
accgaccaaaatggcggctgccgttggtgcggggtgcggtttgtagtgctgttgccctactcatccctttgcaaaatgtgaaagaagaagcggctggtggaggcgggccataggcaatga

SEQ ID NO: 384283 - DNA, 120 bp, Artificial Sequence
  ENSG00000143971_1 (sequence is synthesized)
gtcggcgaaggaaacatgatgacagccctagcccgaagaaaacgccgcacaaaacagtggcggcggaggaatgcggctcggtggtcgagccagggaggaggcggctgagatcggcccgcg

SEQ ID NO: 384284 - DNA, 120 bp, Artificial Sequence
  ENSG00000143971_2 (sequence is synthesized)
gttcgtggccctgcggggctagagaggggcctcccgggccagtgcggcagcgagagcagcctccgaccgccgccctgtgcagtaaaagtaaccccgaggaaaggtatgaaacaccaaaga

SEQ ID NO: 384285 - DNA, 120 bp, Artificial Sequence
  ENSG00000143971_3 (sequence is synthesized)
gagcgctgaaaatggactcactgtcatcttccttcagttctcctaatgatccagatggacagaatgatatcttttgggatcagaattctccattgacaaagcagttaggtaaaggaagaa

SEQ ID NO: 384286 - DNA, 120 bp, Artificial Sequence
  ENSG00000143971_4 (sequence is synthesized)
aaaaacagatttacaccacagatagtgatgagatttcacatattgttaatcgtattgctcctcaggatgaaaaaccaacaacaaattctatgctggacatgtggattggtgaaactgcta

SEQ ID NO: 384287 - DNA, 120 bp, Artificial Sequence
  ENSG00000143971_5 (sequence is synthesized)
ttccttgtactcccagtgtagcaaaaggaaaatcaagagcaaaaatcagctgcacaaagttaaaaacacaaagtcaagaagaagaacttatgaaactggctaaacaatttgataaaaata

SEQ ID NO: 384288 - DNA, 120 bp, Artificial Sequence
  ENSG00000143971_6 (sequence is synthesized)
tggaagagctagatgtgattcaagagcaaaacaagaggaattatgattttacccagatgatttcagaaacagagattttaagtaattataaagataatatacagatgtggtcattacata

SEQ ID NO: 384289 - DNA, 120 bp, Artificial Sequence
  ENSG00000143971_7 (sequence is synthesized)
atatagttcccgaaatagataatgctacaaaaaagccaatcaaaggaaacaccaagatatctgtggcaaataatcaaaatagcagtcagaagccatttgaccaaattgctgaagcagcct

SEQ ID NO: 384290 - DNA, 120 bp, Artificial Sequence
  ENSG00000143971_8 (sequence is synthesized)
ttaatgctatttttgatggttctactcagaaatgtagcggacagttaagccaagaactgccagaggctttttggagcaccagtaatactacctttgtaaagacaaatgctttgaaagagg

SEQ ID NO: 384291 - DNA, 120 bp, Artificial Sequence
  ENSG00000143971_9 (sequence is synthesized)
agaaaatcattactaatgaaactctggtcattgaaaaactgtcaaataaaaccccacgatcactttcttctcaagtagatacacccataatgacaaaatcatgtgtgacttcctgtacta

SEQ ID NO: 384292 - DNA, 120 bp, Artificial Sequence
  ENSG00000143971_10 (sequence is synthesized)
aggagccagaaacttctaataagtacattgatgcatttactacaagtgattttgaggatgattgggaaaacttactaggtagtgaaccttttgctatgcaaaatatcgacatgcctgaac

SEQ ID NO: 384293 - DNA, 120 bp, Artificial Sequence
  ENSG00000143971_11 (sequence is synthesized)
tctttccttctaaaacagcccatgttactgatcaaaaggaaatttgtacctttaatagtaaaactgttaaaaatacgtcaagagcaaatacaagtccagatgccaggttaggagattcaa

SEQ ID NO: 384294 - DNA, 120 bp, Artificial Sequence
  ENSG00000143971_12 (sequence is synthesized)
aagtattacaagatctttcttcaaagacatatgacagagaattaatagatgcagaatatagattttcaccaaattcaaataaatcaaacaaattatccactggaaataaaatgaaatttg

SEQ ID NO: 384295 - DNA, 120 bp, Artificial Sequence
  ENSG00000143971_13 (sequence is synthesized)
agaactcttccaataaaattgttattcaagacgaaattcaaaattgtatagttacatctaatctgacaaaaataaaggaagatattcttactaactctactgaagcttctgaaaggaagt

SEQ ID NO: 384296 - DNA, 120 bp, Artificial Sequence
  ENSG00000143971_14 (sequence is synthesized)
cagctttgaacacaaggtattctaatgaacagaaaaataagtgcattttaaatcagtctattaaagcccctgttaatactgatctttttggctctgcaaatctaggcagtaaaaccagtg

SEQ ID NO: 384297 - DNA, 120 bp, Artificial Sequence
  ENSG00000143971_15 (sequence is synthesized)
ttagtaacccaaatcagactagtgcatcaaaagtaggttctttctttgatgattggaatgatccctcatttgccaatgaaattattaaagcatgtcatcaattagataatacctgggaag

SEQ ID NO: 384298 - DNA, 120 bp, Artificial Sequence
  ENSG00000143971_16 (sequence is synthesized)
cagatgatgtagatgatgatttgttgtaccaagcatgtgatgatattgaaagactaactcagcaacaagacattagaaaggacagtaagacatcagaaagtatatgtgagatcaataata

SEQ ID NO: 384299 - DNA, 120 bp, Artificial Sequence
  ENSG00000143971_17 (sequence is synthesized)
attccgaacatggagccaaactaactcagcaacaagacattagaaaggacagtaagacatcagaaagtatatgtgagatcaataataattccgaacatggagccaaaaacatgtttgcta

SEQ ID NO: 384300 - DNA, 120 bp, Artificial Sequence
  ENSG00000143971_18 (sequence is synthesized)
tatctaaacaaggaagtaatttggtacaatcaaagcatttgaatccaggcagcatttcagtgcagacatctttgacaaatagctcacaaatagataagccaatgaagatggagaaagggg

SEQ ID NO: 384301 - DNA, 120 bp, Artificial Sequence
  ENSG00000143971_19 (sequence is synthesized)
aaatgtatggaaattctccaagatttttaggtgccacaaatttgactatgtattctaagatctcaaactgtcagataaataatctgcatgtgtcttatactaacactgatgttccaatac

SEQ ID NO: 384302 - DNA, 120 bp, Artificial Sequence
  ENSG00000143971_20 (sequence is synthesized)
aggaagttcaagtttgaatgtaacttcagatcatatgaatacagaaattactacttataagaagaaattgagtactaatcagccatgccataagactgtaacagatgaagctcagagcaa

SEQ ID NO: 384303 - DNA, 120 bp, Artificial Sequence
  ENSG00000143971_21 (sequence is synthesized)
ccttaacacaacagttggattttcaaagtttacatttacaaggatgaaaaattctcagattctttctcagtttaatcaaaattgtataactggaagtatgtctgataccaaaattacaca

SEQ ID NO: 384304 - DNA, 120 bp, Artificial Sequence
  ENSG00000143971_22 (sequence is synthesized)
gggtgtggagaaaaagaaaggtgtcaacccattactggaggaagctgttggacagcaatctttggtgaaactttctgaatctttgaaacaatcttcaaaagaggaagaagagaaaaatag

SEQ ID NO: 384305 - DNA, 120 bp, Artificial Sequence
  ENSG00000143971_23 (sequence is synthesized)
aaagtgttctcctgaagaaattcagagaaaaagacaagaagcactggttcggagaatggctaaagcacgagcctcatctgtaaatgcagctcccacttcatttctttaatgaaatattag

SEQ ID NO: 384306 - DNA, 120 bp, Artificial Sequence
  ENSG00000143971_24 (sequence is synthesized)
ttggaagacttcacgaagactgctgataactatctgtgattgataggaaattttttttcttgatttctctgtgagaaatgtaatgctgacttttataaagcctggacttctactttattt

SEQ ID NO: 384307 - DNA, 120 bp, Artificial Sequence
  ENSG00000143971_25 (sequence is synthesized)
aataaatcaatgtttgcaatggtaaatgaaacatttccttggacatgtatttgaaagtcattaaatacaaaagttttggaaattcaggaaagttagcaattatgtacggatattatacag

SEQ ID NO: 384308 - DNA, 120 bp, Artificial Sequence
  ENSG00000143971_26 (sequence is synthesized)
aggaaagtagttatatttttaaatgctattattgcagaggatcatcaaaaaagaggtaatctacgttatttcctattctaatgtcttttcctaataaaaaacttcaactttctaagttag

SEQ ID NO: 384309 - DNA, 120 bp, Artificial Sequence
  ENSG00000143971_27 (sequence is synthesized)
tagagactgtttttgtagttttactttcattaactgttgcttaaggtttttatacacttccagattttaattaatactttcatatttctaggaacatggttgatatgaaataaaggactt

SEQ ID NO: 384310 - DNA, 120 bp, Artificial Sequence
  ENSG00000143971_28 (sequence is synthesized)
tttatttgtaaggaaattatgttcagttcttagaagtggatttgaattttaataattctaaaatgtgacacattttggaaactttccaccatatttaggaaaactttgattttagaagtc

SEQ ID NO: 384311 - DNA, 120 bp, Artificial Sequence
  ENSG00000143971_29 (sequence is synthesized)
taacatagaggaaaagaagtagtggattgtctacaaaagtaatgtggcatcattaacatttagaactggcagaaacttcatatgtcatctggtccagcttccttattgtatcggtgagaa

SEQ ID NO: 384312 - DNA, 120 bp, Artificial Sequence
  ENSG00000143971_30 (sequence is synthesized)
aaagtaatactgttttcaaagtcataggcaagttaatgctgtgctacaattagaatgatttatttggacacctaaacaattatactatttgtttcaaagtatcagtacataaaataactt

SEQ ID NO: 384313 - DNA, 120 bp, Artificial Sequence
  ENSG00000143971_31 (sequence is synthesized)
gagggagtattattttctagtataaaacaaaagatgtaattaaaagcacaataaggactgtttgataataatgctcattgttccttattttgctttaaagaattagtctttccaggatat

SEQ ID NO: 384314 - DNA, 120 bp, Artificial Sequence
  ENSG00000143971_32 (sequence is synthesized)
aaaaatgagaatcttttttcttttcagtttttctgtaactgtaattttcccctcaattaatttacttagttgactcatcttttcttctctattactgttttgtttttttctttttttgcc

SEQ ID NO: 384315 - DNA, 120 bp, Artificial Sequence
  ENSG00000143971_33 (sequence is synthesized)
attttgcctatttggaatttgctaaaccagtaatagaagtccaactagagggcgtaaggcagggaggatgctttattcctcttaaatggttttaggagatctagagaaagttagagatat

SEQ ID NO: 384316 - DNA, 120 bp, Artificial Sequence
  ENSG00000143971_34 (sequence is synthesized)
gaaacacctgtcatggtgtggcatttatcactatcaagtgtctcaaagctgtgataatatggtagttactgccctatagctatacagatactcctcaacttaccgtgtagttacatccca

SEQ ID NO: 384317 - DNA, 120 bp, Artificial Sequence
  ENSG00000143971_35 (sequence is synthesized)
ataaacccatcatgagttgaaaataccttaagttaaaaatgcatttactacacttaatctaccagacaacatagcttagcttagcctaccttaaacatgctcaaatcacttatattagcc

SEQ ID NO: 384318 - DNA, 120 bp, Artificial Sequence
  ENSG00000143971_36 (sequence is synthesized)
tagagttgggcacatcatctggcaatacggcacactgtagagtatcagttgagctgatgcccagcatcgtgagaatgttgtaccacatatctctagcctgggaaagaatcaaactttaaa

SEQ ID NO: 384319 - DNA, 120 bp, Artificial Sequence
  ENSG00000143971_37 (sequence is synthesized)
gtatggtttctattggacgcatatcacttttgcatcacgttagagttgaaaaattgtaagtcaaccattttaagttggagactgtacatcaaaaatggtattttcatatctacagtggag

SEQ ID NO: 384320 - DNA, 120 bp, Artificial Sequence
  ENSG00000143971_38 (sequence is synthesized)
tactggagtttagctaacctatattatttttccaggaatatataataacctagataaatgcaagtagtttctatgtacaaaaataaagagctgagaatcttttactaaaagtggcttcac

SEQ ID NO: 384321 - DNA, 120 bp, Artificial Sequence
  ENSG00000143971_39 (sequence is synthesized)
tgtgttctgactatgctttggatatctctgtccttgcttaagctcctccctgcttactgcttgcttttttaagagtacttttagcctattctgttcattcatttagactcagcctaataa

SEQ ID NO: 384322 - DNA, 120 bp, Artificial Sequence
  ENSG00000143971_40 (sequence is synthesized)
gtctgtttgaacctcgtacctaaccatcttcactggaattgattgcttctctctgatcataatggtactaattattgtgtctttcattgagcaatactataatgcctttatgtgttgttt

SEQ ID NO: 384323 - DNA, 120 bp, Artificial Sequence
  ENSG00000143971_41 (sequence is synthesized)
ttgaggccaggagtttaagaccctgtctcttaaaaaaaatttttttttgagtgtttcgtttctttttttcatttctgttcttttattgtttgagtgaaatagaaatatgttcaagtcaat

SEQ ID NO: 384324 - DNA, 120 bp, Artificial Sequence
  ENSG00000143971_42 (sequence is synthesized)
catttgacacaaagcaatccagtaactctaatattataattactaagaagcaaaggctcaatacgtgaaactgttctgaacttctttactttttgttctctttttcttatttaacattta

SEQ ID NO: 384325 - DNA, 120 bp, Artificial Sequence
  ENSG00000143971_43 (sequence is synthesized)
aatccagagaacatttttgcttagtgtcttctctgaaggaagtatgccatttttccttaacctgcgcttgaatagttactatatgttgaccataaacaatagatggcactggcccaaaac

SEQ ID NO: 384326 - DNA, 120 bp, Artificial Sequence
  ENSG00000143971_44 (sequence is synthesized)
atggtttgaagaattactgtcacccaggtggaagagacagaaaatgaagtttttcttagcagctataaaatatccaaaattacacctagcacagtcaaaacaactctgttgctactagct

SEQ ID NO: 384327 - DNA, 120 bp, Artificial Sequence
  ENSG00000143971_45 (sequence is synthesized)
ctacattccatttttagcatgtcatagaaattcattttacttacagttaattagttaaatagcatttatgccataatagtacttactctataagttaacaatagatcttcattaattgtg

SEQ ID NO: 384328 - DNA, 120 bp, Artificial Sequence
  ENSG00000143971_46 (sequence is synthesized)
ggtttcacatgaaagaagcataataaaatgtgtttgggtgggccagtctaaatagtgataaaaagatagttgtgaataaattattggactctttacctaagtgggctagaaataatagct

SEQ ID NO: 384329 - DNA, 120 bp, Artificial Sequence
  ENSG00000143971_47 (sequence is synthesized)
catataaagaaatgacaacagtacgcaagtggtaacttgtataaaagaaaaaaatatagtgaaattagtagctttaaaatgttaccctcttaaactgagtacttttaaagcatataaatc

SEQ ID NO: 384330 - DNA, 120 bp, Artificial Sequence
  ENSG00000143971_48 (sequence is synthesized)
tttagcagtttcaaggtctgtttgaaagcttgtcatgttctcagaatgacaaatacttatattgtttatttttaggtgagtcattctcaaatcatttagttttaacattttcagagatag

SEQ ID NO: 384331 - DNA, 120 bp, Artificial Sequence
  ENSG00000143971_49 (sequence is synthesized)
catttttttaaatatgcgcttttattttggttggacagtcagttcactttttgcagggatacttttatacaatgttgtttatttgaagatggtatgtatcttcatttatacagctttgca

SEQ ID NO: 384332 - DNA, 120 bp, Artificial Sequence
  ENSG00000143971_50 (sequence is synthesized)
cagtatactttttataatgaaatgaagtaatgcatttagataccttatacagcacctggattatggttgaaaatcaataaattatgtaattattcatgaagaaatatgtaataacatgta

SEQ ID NO: 384333 - DNA, 120 bp, Artificial Sequence
  ENSG00000143971_51 (sequence is synthesized)
taaatagtatacaaacatacataggacccatgtatatgtaaagttgggtacataaagtcataatttagttctctgaaaattgaatgaatttaaaattacttttgtaaatggcagagttca

SEQ ID NO: 384334 - DNA, 120 bp, Artificial Sequence
  ENSG00000143971_52 (sequence is synthesized)
taattaagactatgattgtctttaaattcaagattgttgaaataaaagggaaaatatattgagtctgaaagtgaaattactgattttcttgagtatttgcaaagctaaaggcaactaggt

SEQ ID NO: 384335 - DNA, 120 bp, Artificial Sequence
  ENSG00000143971_53 (sequence is synthesized)
tcaagttgacattaagaaaacttttttgattcattgaggatttgaagtaccaaactgtagggatcttttcacctaaatcttctagtaaataaatgtatactgacactggtatgcccaata

SEQ ID NO: 384336 - DNA, 120 bp, Artificial Sequence
  ENSG00000143971_54 (sequence is synthesized)
ttgtgctggatgctgagttattctaagaagagtccttgcctttgagtagcctataatctagtagtaaaattattttttaaattgtgtgatatttatgttcattctaggtactataaaata

SEQ ID NO: 384337 - DNA, 120 bp, Artificial Sequence
  ENSG00000143971_55 (sequence is synthesized)
gagtgaaaatggttacttgatttgatttgttggtttggtttgcaattaatgcctaaagctcattctgtaatttttttgtgtgatcaagtgactgaaaggtacagcaaaagtatccaggtc

SEQ ID NO: 384338 - DNA, 120 bp, Artificial Sequence
  ENSG00000143971_56 (sequence is synthesized)
taaaatgccttttttctgtatattatctgggctaaacttttctgttttctctatttttttattcttattcctgtctcattcttagcatcagttctaaccttgctcttatctcttaattca

SEQ ID NO: 384339 - DNA, 120 bp, Artificial Sequence
  ENSG00000143971_57 (sequence is synthesized)
ttcctgatcttaattctgagtgttcttaatttaggtcaacatggattgtccaactttagataaagattataataaggataaagaaaatttggagaaacagatgatacagaaagaattcca

SEQ ID NO: 384340 - DNA, 120 bp, Artificial Sequence
  ENSG00000143971_58 (sequence is synthesized)
tatgtatctcctctcaattctgatgatttctgccacacagtttctgacactaatgtttttataagtatcttaggacaattaaaatgtcaattttcttttgataaaaacatgcttctgtta

SEQ ID NO: 384341 - DNA, 120 bp, Artificial Sequence
  ENSG00000143971_59 (sequence is synthesized)
aaataagcaatttgtaattctgaatgttttcattctctgaaacataagtggatcaattattgtagcttattattgctatctcccaacttcctattgtttttgagtttggtaagtgttacc

SEQ ID NO: 384342 - DNA, 120 bp, Artificial Sequence
  ENSG00000143971_60 (sequence is synthesized)
tcaccagaatttaggaaattaattcaaaatcattagtttttattgtcttttttctttcttttgtttttttggaagacgggggatgctacactggtactttatacctctttttttccctat

SEQ ID NO: 384343 - DNA, 120 bp, Artificial Sequence
  ENSG00000143971_61 (sequence is synthesized)
ctgccaaaggatgaaaaaccaacaacaaattctatgctggacatgtggattggtgaaactgctattccttgtactcccagtgtagcaaaaggaaaatcaagagcaaaaatcagctgcaca

SEQ ID NO: 384344 - DNA, 120 bp, Artificial Sequence
  ENSG00000143977_0 (sequence is synthesized)
gccagacgcaagacgccgggcctacagcgggagcgtgaggaaagccgtgcgttgcgttccaaggcatctgtgagcccgcggagtatacaccatgagcaaagctcaccctcccgagttgaa

SEQ ID NO: 384345 - DNA, 120 bp, Artificial Sequence
  ENSG00000143977_1 (sequence is synthesized)
aaaatttatggacaagaagttatcattgaaattaaatggtggcagacatgtccaaggaatattgcggggatttgatccctttatgaaccttgtgatagatgaatgtgtggagatggcgac

SEQ ID NO: 384346 - DNA, 120 bp, Artificial Sequence
  ENSG00000143977_2 (sequence is synthesized)
tctctccatagggcctgttttactatgatgtaaaaattaggtcatgtacattttcatattagactttttgttaaataaacttttgtaatagtcaaaaatgctttctcagatgttctgaat

SEQ ID NO: 384347 - DNA, 120 bp, Artificial Sequence
  ENSG00000143977_3 (sequence is synthesized)
atagaatatcagctctcattccagttttttctaacatgaattttcctggttgacattgatttcaaagggttttatgcattaaagtgaaagaatcttattaaatgtgaaacatggcaagga

SEQ ID NO: 384348 - DNA, 120 bp, Artificial Sequence
  ENSG00000143977_4 (sequence is synthesized)
gtgaaccaaaaaggacaacttacttttagcaaattattaagcataaagacctccaaggagtggtaatacgaggaaatagtatcatcatgttagaagccttggaacgagtataaataatgg

SEQ ID NO: 384349 - DNA, 120 bp, Artificial Sequence
  ENSG00000143977_5 (sequence is synthesized)
acaagagttctcttggagatttcatttttcttttggaatgtgtattaactttcctggttagtaacccccagaaatggcaaataacaggcaagattagactttccatctcctttttagttg

SEQ ID NO: 384350 - DNA, 120 bp, Artificial Sequence
  ENSG00000143977_6 (sequence is synthesized)
gcgcgtcggtgtggttacagccggcagccacggcacctccttccggccgactagtctccaggtcccgcggtctggcccctggtcacccggcgctgtccctcgttccttgaagatctccag

SEQ ID NO: 384351 - DNA, 120 bp, Artificial Sequence
  ENSG00000143977_7 (sequence is synthesized)
tgctaccttttgttgaacatctcgaatagtatcatgttctagatagacggctagagggggaaattctctgaaggaactaaggaggggctggaagggaaggaagtgtttttaaaactacgt

SEQ ID NO: 384352 - DNA, 120 bp, Artificial Sequence
  ENSG00000143977_8 (sequence is synthesized)
gaggcatcagaatccgaaagccactttagtcttagcaaatgtgtttgtaggtgtttgagcttttacttagaaacctcattcctttttcttgccttcttttacgttaagcttgaatgtcat

SEQ ID NO: 384353 - DNA, 120 bp, Artificial Sequence
  ENSG00000143977_9 (sequence is synthesized)
gtgttatcttgctctgatgttgaaactatataagaacattcatttttctttttttttaagaacattaattttttctagtcagagaaggctaattttttgaagttttttctacacacccag

SEQ ID NO: 384354 - DNA, 120 bp, Artificial Sequence
  ENSG00000143977_10 (sequence is synthesized)
ctttaagtaggagagccttactttaggtaggactcaacgtaaagctttgaattcctcaaatactttttgagtggacttaacaggttatgtgtttcctgactacgtttctgttttgcttat

SEQ ID NO: 384355 - DNA, 120 bp, Artificial Sequence
  ENSG00000143977_11 (sequence is synthesized)
acttcctgatgctggaattctacatgtattagttggattgcacaaaggatgcaaaatttttacagggatcagttttttctggcgtagcatgtggttggctttgtgtatagttagttcatt

SEQ ID NO: 384356 - DNA, 120 bp, Artificial Sequence
  ENSG00000143977_12 (sequence is synthesized)
agttactcagctgtagtaatatcctggttacctgtaggtaagatctcaactatacagaacctaaggtcctagcgcttgaaatagctgttggaaatcctttttgagctttattctgcaata

SEQ ID NO: 384357 - DNA, 120 bp, Artificial Sequence
  ENSG00000143994_0 (sequence is synthesized)
agcagcgcaaactgcctgcagcggggaccggacctgcacaggccgcctatggcgggcggcgggtgggaccgcgagttacagccggccaactggggccagccaggagcctgagggtcggaa

SEQ ID NO: 384358 - DNA, 120 bp, Artificial Sequence
  ENSG00000143994_1 (sequence is synthesized)
gcccccaacacaagatgctgagctccttcctgagcccccagaatggcacctgggcagacaccttctctctgctcttggctcttgccgttgccctctacttgggctactactgggcatgtg

SEQ ID NO: 384359 - DNA, 120 bp, Artificial Sequence
  ENSG00000143994_2 (sequence is synthesized)
tgcttcagaggcctcggctggtggctgggccgcagtttctggccttcctggagccacactgttccatcaccaccgagactttctacccaacgctgtggtgttttgaggggcgactacaaa

SEQ ID NO: 384360 - DNA, 120 bp, Artificial Sequence
  ENSG00000143994_3 (sequence is synthesized)
gcatcttccaagtcctcctgcagtctcagcccctagtcctttatcagagtgacatcctccaaacaccagatggaggccagctcctgctagactgggccaagcagcctgacagcagccaag

SEQ ID NO: 384361 - DNA, 120 bp, Artificial Sequence
  ENSG00000143994_4 (sequence is synthesized)
accctgatcctactacccagcccattgtgctgctgcttcctggcatcactggcagtagccaggagacatacgtcttgcacctagttaaccaagctctgagggatggctaccaggctgtcg

SEQ ID NO: 384362 - DNA, 120 bp, Artificial Sequence
  ENSG00000143994_5 (sequence is synthesized)
gcatcgttatccccaagctccactgctggccgtgggcatctcttttggagggatactggtgctgaatcacctggcacaggccaggcaggctgcagggctggtggcagcactgactctgtc

SEQ ID NO: 384363 - DNA, 120 bp, Artificial Sequence
  ENSG00000143994_6 (sequence is synthesized)
tgcatgctgggattcctttgagaccactcgctccctggaaaccccactcaactcactgctcttcaatcagcccctcactgctgggctctgccaacttgtggaacgaaacagaaaggtgat

SEQ ID NO: 384364 - DNA, 120 bp, Artificial Sequence
  ENSG00000143994_7 (sequence is synthesized)
tgaaaaggtggtggacatagactttgtactacaggcccgtacaatccgccagtttgatgagcgctacacatctgtggcctttggatatcaagactgtgttacctactacaaagcagcaag

SEQ ID NO: 384365 - DNA, 120 bp, Artificial Sequence
  ENSG00000143994_8 (sequence is synthesized)
ccctagaaccaagatagatgccatccggatccctgtgctctatctcagtgcagcagatgaccccttctcccccgtctgtgcccttcccatacaggccgcccaacactccccctacgttgc

SEQ ID NO: 384366 - DNA, 120 bp, Artificial Sequence
  ENSG00000143994_9 (sequence is synthesized)
gctgctcatcacagcccggggtggccacatcggcttcctggaagggctgctcccgtggcagcactggtacatgagccgcctcttgcatcagtacgccaaagccatcttccaggacccaga

SEQ ID NO: 384367 - DNA, 120 bp, Artificial Sequence
  ENSG00000143994_10 (sequence is synthesized)
ggggctgcctgacctcagggctctcttaccttctgaggacagaaacagctgacaagagtaccatttggggtctcagttcactctttccttgtttattaaatatcaacttttcctgcctaa

SEQ ID NO: 384368 - DNA, 120 bp, Artificial Sequence
  ENSG00000143994_11 (sequence is synthesized)
gaagggtctggctaagatgtacctgtgtgtgccacagggctgtcgtgtttaacaaccggggctgccgtggggaggaactgcggacccacagggctttttgtgccagcaatactgaagatc

SEQ ID NO: 384369 - DNA, 120 bp, Artificial Sequence
  ENSG00000143994_12 (sequence is synthesized)
gtgattgaaaaggtggtggacatagactttgtactacaggtataatattcagccatgcccctggttcccccaaatgagtcttccactatcttcctattctttatcatcttagcctatcct

SEQ ID NO: 384370 - DNA, 120 bp, Artificial Sequence
  ENSG00000143994_13 (sequence is synthesized)
tttgggtgtagggggcagcttccagacacgggcttgggcccttggtgggaactgggatggttgggcttccccacaggtgaaatttgctaccaccgaatggagagtcggctctgcctctct

SEQ ID NO: 384371 - DNA, 120 bp, Artificial Sequence
  ENSG00000143994_14 (sequence is synthesized)
agtgcctctgcatcccatgtgatccccatgccagctgggccttttgggtaccggagggtgctgctccctataatgtggacaagcatttggggaaaggtggggtggaaggcatcctgaggt

SEQ ID NO: 384372 - DNA, 120 bp, Artificial Sequence
  ENSG00000143994_15 (sequence is synthesized)
atcagagatgtgcacactttgcgttcctttttaggtggtttagctgagtctttcagctgcactgaaggaaggaaccagaggtctgtgggtcatggctaactcccaataccacccaccccc

SEQ ID NO: 384373 - DNA, 120 bp, Artificial Sequence
  ENSG00000143994_16 (sequence is synthesized)
caaatagcttagtaggacctcccttcccttaagggctggctgaggtcagaactggcctagctcagaactgatggatgaccccaactgtccttgctcattcagccgttttatgttccaggc

SEQ ID NO: 384374 - DNA, 120 bp, Artificial Sequence
  ENSG00000143994_17 (sequence is synthesized)
tctccatatagtgagtgtgatgagaaagtttgaagaggttgattttgatgaatttggagacttttctcactgaaatttagatatatacataatttacatatccaggaaaagccaaatctc

SEQ ID NO: 384375 - DNA, 120 bp, Artificial Sequence
  ENSG00000143994_18 (sequence is synthesized)
ttcatcttcattaaactctgttctaggtagctgagtctaacaagacacctactggttcgagtcctttaaaaaggtctataggagactttagtgttacctagacttttccatattttcaga

SEQ ID NO: 384376 - DNA, 81 bp, Artificial Sequence
  ENSG00000143994_19 (sequence is synthesized)
ggagactttagtgttacctagacttttccatattttcagagctttctacattagcatatattgtttactaaatgtcttcct

SEQ ID NO: 384377 - DNA, 120 bp, Artificial Sequence
  ENSG00000143994_20 (sequence is synthesized)
aaaaactccaagcctcacaatactctgtaggcctcactttatacatcagatttggaaggtcacttcagaacaaaactgcccctaaggaaacactttcctttacttgcaactagctgcaca

SEQ ID NO: 384378 - DNA, 120 bp, Artificial Sequence
  ENSG00000143994_21 (sequence is synthesized)
tggattggccagcactgtaatggatctatactgatttaagcatagcaaccagtgccatattgtaatactaattcattctcaggagggagtcaagaaacattttcttgagttaaaatcaaa

SEQ ID NO: 384379 - DNA, 120 bp, Artificial Sequence
  ENSG00000143994_22 (sequence is synthesized)
ttaacccacataaatcaaacctgtgaacaaatttataagtcttgttccacactactgggccgtttgaccaaggaattaataaactgatagtaactcagccgagcacagtggctcatgcct

SEQ ID NO: 384380 - DNA, 120 bp, Artificial Sequence
  ENSG00000143994_23 (sequence is synthesized)
ccgtctcaaaaaaaaaaaaaaaaaaaggatagcaactcaaaatcttggcaattaggaggcaatacccgacagtgactagacagcgcaggctctagagtcagacagacctgggtttgaatc

SEQ ID NO: 384381 - DNA, 120 bp, Artificial Sequence
  ENSG00000143994_24 (sequence is synthesized)
tgggtttgaatctcctgctctgccactaactagctctggcaagcttctggcccttgacaagttattcagcattcaaatccgttcacatagggggatcacagaacctatttcatggaactg

SEQ ID NO: 384382 - DNA, 120 bp, Artificial Sequence
  ENSG00000143994_25 (sequence is synthesized)
ttatgaaaatcacaagacaaaatttgtgtgaagtgcttagcagaatgcctggagcttaatgagaactcaacaaatcttacctacaagtactggtggtaatgtcatagttaataattttgt

SEQ ID NO: 384383 - DNA, 120 bp, Artificial Sequence
  ENSG00000143994_26 (sequence is synthesized)
tttgcctcttgcttgctgtgtaactggacaaaccacttaatctctgtcagtcataacttcttcacttataaaatatctcataagtttgggcttagcccagtgccttcacacgactgacag

SEQ ID NO: 384384 - DNA, 120 bp, Artificial Sequence
  ENSG00000143994_27 (sequence is synthesized)
ctgtcgtaattccagggcttaaggactagggtccaaagtcacatctcccaacagttgcactatcgacttggcatctctaccatttgcccctgtagactataggaactgtactggagatag

SEQ ID NO: 384385 - DNA, 120 bp, Artificial Sequence
  ENSG00000143994_28 (sequence is synthesized)
aaatctggtcctcatgttccttagggcccactgcggatatgcagtttctattcttgaacctatggcatactcctccttcacatgccttccacgtggctaggctctctcattcacttgatg

SEQ ID NO: 384386 - DNA, 120 bp, Artificial Sequence
  ENSG00000143994_29 (sequence is synthesized)
tctgtccagaacacagcagagaagctgaaagtcagggcttagtgcccactgacctcatctgtccctgttatttcatccttgtcaccttccccctagctggcatgaaggaagaaaaaaatc

SEQ ID NO: 384387 - DNA, 120 bp, Artificial Sequence
  ENSG00000143994_30 (sequence is synthesized)
gattcacattagggctgttcttcctttagagcacaatctaacagcaggggccccacaagtaagagaagataaggtccccggtagaaagaagccccttaggccagacgcagtggcttacac

SEQ ID NO: 384388 - DNA, 120 bp, Artificial Sequence
  ENSG00000143995_0 (sequence is synthesized)
attctggtcggaatccacctctccgcctgtgcaacacacactttacacacgcacggggactgcaagcgggcagcatcgatcgtggctcctttaagacaaactcagacagacatttttttt

SEQ ID NO: 384389 - DNA, 120 bp, Artificial Sequence
  ENSG00000143995_1 (sequence is synthesized)
aaccctccttctctaatctccttccagtgcagcacttgcaaagagggagagagagggagagaaagaaagagagagagagaagagagaaactgattaggaattaggactgattcaagggaa

SEQ ID NO: 384390 - DNA, 120 bp, Artificial Sequence
  ENSG00000143995_2 (sequence is synthesized)
gcgagcgctagggctttgtgcatttgaatattaacatttgaggtgttctgaccagaagaagacagagcggatgatcattcattcaccacgttgacaacctcgcctgtgattgacagctgg

SEQ ID NO: 384391 - DNA, 120 bp, Artificial Sequence
  ENSG00000143995_3 (sequence is synthesized)
accacgttgacaacctcgcctgtgattgacagctggagtggcagaaagccatgagatttggtagttgggtctgaggggcgctcttttttttccttttctttctttctttctttttttttt

SEQ ID NO: 384392 - DNA, 120 bp, Artificial Sequence
  ENSG00000143995_4 (sequence is synthesized)
tttttgcccccgctgctgtcttggaaacggagcgcttttatgctcagtgactcgggcgctttgcttcaggtcccgtagaccgaagatctgggaccagtagctcacgttgctggagacgtt

SEQ ID NO: 384393 - DNA, 120 bp, Artificial Sequence
  ENSG00000143995_5 (sequence is synthesized)
tttttttttttttttttttttttccgggggagtttgaatatttgtttcttttcacactggccttaaagaggatatattagaagttgaagtaggaagggagccagagaggccgatggcgca

SEQ ID NO: 384394 - DNA, 120 bp, Artificial Sequence
  ENSG00000143995_6 (sequence is synthesized)
ccagagaggccgatggcgcaaaggtacgacgatctaccccattacgggggcatggatggagtaggcatcccctccacgatgtatggggacccgcatgcagccaggtccatgcagccggtc

SEQ ID NO: 384395 - DNA, 120 bp, Artificial Sequence
  ENSG00000143995_7 (sequence is synthesized)
caccacctgaaccacgggcctcctctgcactcgcatcagtacccgcacacagctcataccaacgccatggcccccagcatgggctcctctgtcaatgacgctttaaagagagataaagat

SEQ ID NO: 384396 - DNA, 120 bp, Artificial Sequence
  ENSG00000143995_8 (sequence is synthesized)
gccatttatggacaccccctcttccctctcttagcactgatttttgagaaatgtgaattagctacttgtaccccccgcgagccgggggtggcgggcggggacgtctgctcgtcagagtca

SEQ ID NO: 384397 - DNA, 120 bp, Artificial Sequence
  ENSG00000143995_9 (sequence is synthesized)
ttcaatgaagatatagccgtgttcgccaaacagattcgcgcagaaaaacctctattttcttctaatccagaactggataacttgatgattcaagccatacaagtattaaggtttcatcta

SEQ ID NO: 384398 - DNA, 120 bp, Artificial Sequence
  ENSG00000143995_10 (sequence is synthesized)
ttggaattagagaaggtacacgaattatgtgacaatttctgccaccggtatattagctgtttgaaagggaaaatgcctatcgatttggtgatagacgatagagaaggaggatcaaaatca

SEQ ID NO: 384399 - DNA, 120 bp, Artificial Sequence
  ENSG00000143995_11 (sequence is synthesized)
gacagtgaagatataacaagatcagcaaatctaactgaccagccctcttggaacagagatcatgatgacacggcatctactcgttcaggaggaaccccaggcccttccagcggtggccac

SEQ ID NO: 384400 - DNA, 120 bp, Artificial Sequence
  ENSG00000143995_12 (sequence is synthesized)
acgtcacacagtggggacaacagcagtgagcaaggtgatggcttggacaacagtgtagcttcccccagcacaggtgacgatgatgaccctgataaggacaaaaagcgtcacaaaaagcgt

SEQ ID NO: 384401 - DNA, 120 bp, Artificial Sequence
  ENSG00000143995_13 (sequence is synthesized)
ggcatctttcccaaagtagccacaaatatcatgagggcgtggctgttccagcatctaacacacccttacccttctgaagaacagaaaaagcagttggcacaagacacgggactcaccatc

SEQ ID NO: 384402 - DNA, 120 bp, Artificial Sequence
  ENSG00000143995_14 (sequence is synthesized)
cttcaagtgaacaattggtttattaatgcccggagaagaatagtgcagcccatgatagaccagtccaaccgagcagtaagtcaaggaacaccttataatcctgatggacagcccatggga

SEQ ID NO: 384403 - DNA, 120 bp, Artificial Sequence
  ENSG00000143995_15 (sequence is synthesized)
ggtttcgtaatggacggtcagcaacatatgggaattagagcaccaggacctatgagtggaatgggcatgaatatgggcatggaggggcagtggcactacatgtaaccttcatctagttaa

SEQ ID NO: 384404 - DNA, 120 bp, Artificial Sequence
  ENSG00000143995_16 (sequence is synthesized)
ccaatcgcaaagcaagggggaaggctgcaaagtatgccaggggagtatgtagcccggggtggtccaatgggtgtgagtatgggacagccaagttatacccaaccccagatgcccccccat

SEQ ID NO: 384405 - DNA, 120 bp, Artificial Sequence
  ENSG00000143995_17 (sequence is synthesized)
cctgctcagctgcgtcatgggccccccatgcatacgtacattcctggacaccctcaccacccaacagtgatgatgcatggaggaccgccccaccctggaatgccaatgtcagcatcaagc

SEQ ID NO: 384406 - DNA, 120 bp, Artificial Sequence
  ENSG00000143995_18 (sequence is synthesized)
cccacagttcttaatacaggagacccaacaatgagtggacaagtcatggacattcatgctcagtagcttaagggaatatgcattgtctgcaatggtgactgatttcaaatcatgtttttt

SEQ ID NO: 384407 - DNA, 120 bp, Artificial Sequence
  ENSG00000143995_19 (sequence is synthesized)
tgactgtggagttccattcttggcatctactctggaccaaggagcatccctaattcttcatagggacctttaaaaagcaggaaataccaactgaagtcaatttgggggacatgctaaata

SEQ ID NO: 384408 - DNA, 120 bp, Artificial Sequence
  ENSG00000143995_20 (sequence is synthesized)
actatataagacattaagagaacaaagagtgaaatattgtaaatgctattatactgttatccatattacgttgtttcttatagattttttaaaaaaaatgtgaaatttttccacactatg

SEQ ID NO: 384409 - DNA, 120 bp, Artificial Sequence
  ENSG00000143995_21 (sequence is synthesized)
tgtgttgtttccatagctcttcacttcctccagaagcctccttacattaaaaagccttacagttatcctgcaagggacaggaaggtctgatttgcaggatttttagagcattaaaataac

SEQ ID NO: 384410 - DNA, 120 bp, Artificial Sequence
  ENSG00000143995_22 (sequence is synthesized)
tatcaggcagaagaatctttcttctcgcctaggatttcagccatgcgcgcgctctctctctttctctctcttttcctctctctccctctttctagcctggggcttgaatttgcatgtcta

SEQ ID NO: 384411 - DNA, 120 bp, Artificial Sequence
  ENSG00000143995_23 (sequence is synthesized)
attcatttactcaccatatttgaattggcctgaacagatgtaaatcgggaaggatgggaaaaactgcagtcatcaacaatgattaatcagctgttgcaggcagtgtcttaaggagactgg

SEQ ID NO: 384412 - DNA, 120 bp, Artificial Sequence
  ENSG00000143995_24 (sequence is synthesized)
taggaggaggcatggaaaccaaaaggccgtgtgtttagaagcctaattgtcacatcaagcatcattgtccccatgcaacaaccaccaccttatacatcacttcctgttttaagcagctct

SEQ ID NO: 384413 - DNA, 120 bp, Artificial Sequence
  ENSG00000143995_25 (sequence is synthesized)
aaaacatagactgaagatttatttttaatatgttgactttatttctgagcaaagcatcggtcatgtgtgtattttttcatagtcccaccttggagcatttatgtagacattgtaaataaa

SEQ ID NO: 384414 - DNA, 120 bp, Artificial Sequence
  ENSG00000143995_26 (sequence is synthesized)
ttttgtgcaaaaaggactggaaaaatgaactgtattattgcaatttttttttgtaaaagtagcagtttggtatgagttggcatgcatacaagatttactaagtgggataagctaattata

SEQ ID NO: 384415 - DNA, 120 bp, Artificial Sequence
  ENSG00000143995_27 (sequence is synthesized)
ctttttgttgtggataaacaaatgcttgttgatagcctttttctatcaagaaaccaaggagctaattattaataacaatcattgcacactgagtcttagcgtttctgatggaaacagttt

SEQ ID NO: 384416 - DNA, 120 bp, Artificial Sequence
  ENSG00000143995_28 (sequence is synthesized)
ggattgtataataacgccaagcccagttgtagtcgtttgagtgcagtaatgaaatctgaatctaaaataaaaacaagattatttttgtcatgctgactccactgcttgaaaaatttgttt

SEQ ID NO: 384417 - DNA, 120 bp, Artificial Sequence
  ENSG00000143995_29 (sequence is synthesized)
actgccccccagatttttaaagattaatacagtaaatataaaaattaattttggctccctaagccatatatgtatttgacaattttaaccgcaaagtaagttgtttaataataaccactg

SEQ ID NO: 384418 - DNA, 120 bp, Artificial Sequence
  ENSG00000143995_30 (sequence is synthesized)
atttctttaagctgacttaatgaactcctaatatcagcaaatttgaggcctaaaggcactaaactaactctagactcagaattacatccaacagaattactcatctaatatcagtgaaat

SEQ ID NO: 384419 - DNA, 120 bp, Artificial Sequence
  ENSG00000143995_31 (sequence is synthesized)
tattcttgcacataaaggcaaacctaagtacaaagttaagtcttttactaaaggatgttacctaggatgagcagtatatgtttattaggaaattaactacatgaattgaagagaccagac

SEQ ID NO: 384420 - DNA, 120 bp, Artificial Sequence
  ENSG00000143995_32 (sequence is synthesized)
ttcaaaatctaatttttataaatatgctctatgttctcattggataaaactggttattaaccaattttccagaacagctgtacaagatttctgcatggcagccggctaaatggtagaaaa

SEQ ID NO: 384421 - DNA, 120 bp, Artificial Sequence
  ENSG00000143995_33 (sequence is synthesized)
taatatgtttaagctggaatagcttataattttatttaaataaaattgctgctataaaaagtgcttcccaaagctaaggaaaatatacaaatattttaattaaggcaaattcgttttaaa

SEQ ID NO: 384422 - DNA, 120 bp, Artificial Sequence
  ENSG00000143995_34 (sequence is synthesized)
aaataagcctttcagtagtgattgctttgtaaacaaaggatgggtcggaggagagagagccttaaactcaagtctgacattcaggcccaagtcaccctataaaccggcccttagcaattc

SEQ ID NO: 384423 - DNA, 120 bp, Artificial Sequence
  ENSG00000143995_35 (sequence is synthesized)
tattttctattcgaaaagagaaaccagctgtgggttggctttactaggtgatgtgtgattgactgactcacctgctggagtagcaatgcattctcaccttttgctgatggggccttgttt

SEQ ID NO: 384424 - DNA, 120 bp, Artificial Sequence
  ENSG00000143995_36 (sequence is synthesized)
ctaaacacgtggatgcgcagagagcaaggctcagcctactgcagccatctctggcagcgcttctacccctccccagcccatagatgggattgtttaaatctcccttgttgacctagtggc

SEQ ID NO: 384425 - DNA, 120 bp, Artificial Sequence
  ENSG00000143995_37 (sequence is synthesized)
aattcttcctctacctaaatagtcgatgtgagtgaaatcattctcttttgataggtggttgctagcagttaacaaccatttatttactttaacaattaataataaactttataaactgtc

SEQ ID NO: 384426 - DNA, 120 bp, Artificial Sequence
  ENSG00000143995_38 (sequence is synthesized)
gagacatgcccgtttcaccttctaccctcgggagaatgcttctctttctctctttctttcttctttccttcttgccaaaggagcctgaatttctaaactagttgatagggacacaagtta

SEQ ID NO: 384427 - DNA, 120 bp, Artificial Sequence
  ENSG00000143995_39 (sequence is synthesized)
gggcaagatcattcatcccagacgagtctcgctgagaattctgtattttttacttaaagctttaattttaaaataagaaaaactcagctttatagatgcaaggccaccgaattccgggtg

SEQ ID NO: 384428 - DNA, 120 bp, Artificial Sequence
  ENSG00000143995_40 (sequence is synthesized)
gaaggacccagctgtattgaccttatataagctcggtgccttgccgttctcccatttgcccgcctggcctcctgaaccttctttctctcctgtttgtcatgcagtacgacgatctacccc

SEQ ID NO: 384429 - DNA, 120 bp, Artificial Sequence
  ENSG00000143995_41 (sequence is synthesized)
cactttcaaaagtagccagcacgtagtcggccttaagccatgcatgttacctccaacctcagattttctctctgtctgagtgtctgtttgcagataacttaaaatcacccatctgcatcc

SEQ ID NO: 384430 - DNA, 120 bp, Artificial Sequence
  ENSG00000143995_42 (sequence is synthesized)
ccactcaccctccagaaagcaaacgtggagagctcactctgcagaataaaatcaagaacaccacggttgtagctgctgtggactcggcggtctgagcagcctccccgagagccgtagttg

SEQ ID NO: 384431 - DNA, 120 bp, Artificial Sequence
  ENSG00000143995_43 (sequence is synthesized)
ccctgctgatcgattatttgataattgattttccccgcagccaatgcgcggcggcctgggcgggggcgcctcctgattggccgagcactcctccacggctgcctaccgagatttggtacg

SEQ ID NO: 384432 - DNA, 120 bp, Artificial Sequence
  ENSG00000143995_44 (sequence is synthesized)
tcatttttgactccaagagtgtcatcccctcatcaacacaggtaaatccgcctcatccttttctgttatctcaagctggctgccttgccttgtctgctatctgtgcatctaagatattgc

SEQ ID NO: 384433 - DNA, 120 bp, Artificial Sequence
  ENSG00000143995_45 (sequence is synthesized)
agaggggaagccaggatctttatgcactgaagatctcactatttctcaaccctctagatcctgttttttttttaagggtcttttggcactatctgttgactttgctcattttctggcctc

SEQ ID NO: 384434 - DNA, 120 bp, Artificial Sequence
  ENSG00000143995_46 (sequence is synthesized)
ttcttggatttttatctcccttctaggacctatgagtggaatgggcatgaatatgggcatggaggggcagtggcactacatgtaaccttcatctagttaaccaatcgcaaagcaaggggg

SEQ ID NO: 384435 - DNA, 120 bp, Artificial Sequence
  ENSG00000143995_47 (sequence is synthesized)
aagtaagtacaaatggggtctttgttttcactttgtcctaggaatatttttcctcttgcattttcttatgttctccttgcccatagcttcatgcttgttcattcctttccattaaactcc

SEQ ID NO: 384436 - DNA, 120 bp, Artificial Sequence
  ENSG00000143995_48 (sequence is synthesized)
tggtttcttgcttccatcattttctttttggttgtgatcaagcttttaagcttataaatactgtgtatgatgtacatttatcctgtgtgttgctattgtacagtactgaccacatgacaa

SEQ ID NO: 384437 - DNA, 120 bp, Artificial Sequence
  ENSG00000143995_49 (sequence is synthesized)
aacaagaagcagtcaggaggtgggggagtgggttgtcatagcaacagactgatttgcaaaatgtaagcagtctgcagcagtgcaaggagagggaagagcatgtccccaaagtgtcataaa

SEQ ID NO: 384438 - DNA, 120 bp, Artificial Sequence
  ENSG00000143995_50 (sequence is synthesized)
tctgtctaaccgcagttgatgcatgagttacatttctacactaacctgcaagacaccgaaaagctaaacagagacttcttttaggtaaaataaacacaagctttacttagggtaagtaaa

SEQ ID NO: 384439 - DNA, 120 bp, Artificial Sequence
  ENSG00000143995_51 (sequence is synthesized)
ggcatattttgagctccagtcaactaaactttgattttttttcttagtttattcctttgtctgtccatcataatgggattacgtgtggcaatgggaaaagggagaatacaaaatagaggt

SEQ ID NO: 384440 - DNA, 120 bp, Artificial Sequence
  ENSG00000143995_52 (sequence is synthesized)
gtgcacagcaggctgcggggcttagcccaggctaattgactatatccaaattaagtatgccatcacttgcagtgtgacaaatggatttgacttattcagtatacaaaaatagagatcatt

SEQ ID NO: 384441 - DNA, 120 bp, Artificial Sequence
  ENSG00000143995_53 (sequence is synthesized)
ttctctcctataaagacactccagcaattcgagttcaaacaagtaaaactgttttgaacaccaaggctcttgttcacttcctaaattacccctaatagcactgttcttgctttgtttttg

SEQ ID NO: 384442 - DNA, 120 bp, Artificial Sequence
  ENSG00000143995_54 (sequence is synthesized)
aaattaaaagcagttatttcagagtcttgcttgtgtctctgattatatttatgcactatttaaaatcactgctgaggccaggggtaattcgtactggtcatcttctctgggtgtgagtca

SEQ ID NO: 384443 - DNA, 120 bp, Artificial Sequence
  ENSG00000143995_55 (sequence is synthesized)
aatataagtttaacaattagctctgaaaacattccattgagctggggaatgcaacagtcttattacctcatcatggaattctctagcttagttaatttaaatattgtttcttagtttctg

SEQ ID NO: 384444 - DNA, 120 bp, Artificial Sequence
  ENSG00000143995_56 (sequence is synthesized)
ggtcaattaaatttaaatgatgtattttatgcttcgtgaccaattaaattactaggttattacaaaaaaaattatcatcttttttgattaaagagctgtgggtacagtatattttataag

SEQ ID NO: 384445 - DNA, 120 bp, Artificial Sequence
  ENSG00000143995_57 (sequence is synthesized)
caattttcattagttcaaaaatgttcctttaggctagattaagcagccattcattgttagagcctggagaccttattcgaaggtgttcatcgtattcacagtgcactattacttagaact

SEQ ID NO: 384446 - DNA, 120 bp, Artificial Sequence
  ENSG00000143995_58 (sequence is synthesized)
aaagccaattgaacctacttagcaatagcgttatgcctttcacccttgatgattatggagcttatagctctcagaaacaatacacctgtcagtttccatcaactatagcaatccatgcag

SEQ ID NO: 384447 - DNA, 120 bp, Artificial Sequence
  ENSG00000143995_59 (sequence is synthesized)
aagacaagaggccccctcaaagcaggaggggtattgttttaggtccaatttttcttattgttctcaaaatcattataaggtggacagtgttttgtgaagattttcttttccccagctcta

SEQ ID NO: 384448 - DNA, 120 bp, Artificial Sequence
  ENSG00000143995_60 (sequence is synthesized)
agaaaccatgtggaaagaattcattgataactgttttgatttttttctttttttaagtacaggttttgctaagtaatcacccttagtgagcctgtgtagttcagctgcctgtgagatgtt

SEQ ID NO: 384449 - DNA, 120 bp, Artificial Sequence
  ENSG00000143995_61 (sequence is synthesized)
tggtgaccagctcagtgtattcttgtattcttgatagagaatatttcaggagacaaaagtgcttcttcagaccagacctcaaataacaattttattctttttaataaataagacctcagt

SEQ ID NO: 384450 - DNA, 120 bp, Artificial Sequence
  ENSG00000143995_62 (sequence is synthesized)
aggcggacctgataacagtgacaatgaaaggaaaatagtggcaaaatgtgagtttccagcatgatgtttctcattttattttcttctgtatgaatcaaaagaatgctttacaaaaccatg

SEQ ID NO: 384451 - DNA, 120 bp, Artificial Sequence
  ENSG00000143995_63 (sequence is synthesized)
ttcccttaatcacagggttctctggcttttataggattgtcatagccaggaccacactattgctttttcataacattttctttttgtttctttcttttgaatttcttacagggctgcaaa

SEQ ID NO: 384452 - DNA, 120 bp, Artificial Sequence
  ENSG00000143995_64 (sequence is synthesized)
gcgcttttcaatttcaacatccctgggaaaaaaaaaaatctgtatgcatattgcttgctgggtcactaccacctccttttattatttgcatatgattaagtcccttttagatacatttcc

SEQ ID NO: 384453 - DNA, 120 bp, Artificial Sequence
  ENSG00000143995_65 (sequence is synthesized)
atcgaaatgaaaatttttgaataatgtggctattattgcttcattaaggctggctctgggattcgacctgaagagatgagcttgtaaaagctttgctagcaaacttgacctgtttcttgt

SEQ ID NO: 384454 - DNA, 120 bp, Artificial Sequence
  ENSG00000143995_66 (sequence is synthesized)
cgcttttaatttttgtctttattttatttaccctctataataatgggagtgttaactgccagtgaccgcctctgattgtaggggctttgttccggagcatttttcccccttctatcttca

SEQ ID NO: 384455 - DNA, 120 bp, Artificial Sequence
  ENSG00000143995_67 (sequence is synthesized)
agaaaagacaagtgtagggtctgcttatttcttattttattaggaataaatccaagataggtggtctaagaaagacagcgagagtttgaaatctagcaaatgctggctattttctccctg

SEQ ID NO: 384456 - DNA, 120 bp, Artificial Sequence
  ENSG00000143995_68 (sequence is synthesized)
tctgtacggttcattagcctgtcttgtcagttttcctcggccgaacgcttctagacctcactgaacattgctttgtgtggtgttcactgcaagctcacccattttattgtacttaataga

SEQ ID NO: 384457 - DNA, 120 bp, Artificial Sequence
  ENSG00000143995_69 (sequence is synthesized)
aaaaataagaccaggccgaggttataaaaacagataaatatggacttttctcctccttctttccactcatcctccagctggtatgtgctctgggccctctgggttggcagcttgtggaca

SEQ ID NO: 384458 - DNA, 120 bp, Artificial Sequence
  ENSG00000143995_70 (sequence is synthesized)
acagatcatagcggaatcagaatttccagcaaggaaaatcttttcatggtgaattaagtggtggatgaagaaaaatggtgatgaaaaaagccctcttggaacagagatcatgatgacacg

SEQ ID NO: 384459 - DNA, 120 bp, Artificial Sequence
  ENSG00000143995_71 (sequence is synthesized)
gcatctactcgttcaggaggaaccccaggcccttccagcggtggccacacgtcacacagtggggacaacagcagtgagcaagcacccttacccttctgaagaacagaaaaagcagttggc

SEQ ID NO: 384460 - DNA, 120 bp, Artificial Sequence
  ENSG00000143995_72 (sequence is synthesized)
acaggagagcagtattcagttctggggaaagaaagggctgggccaggggaggggaagagagattcccagccagctgatgttggagagaagactagatccagaagaggaccaagagcagag

SEQ ID NO: 384461 - DNA, 120 bp, Artificial Sequence
  ENSG00000143995_73 (sequence is synthesized)
ggaggtccgctacctggtaaataaactgggagtgagtataggaacgcctggcaattaaaattaaaccagtttcgtttcataacaacactaatcaatttaacatcattataaaacgtttgg

SEQ ID NO: 384462 - DNA, 120 bp, Artificial Sequence
  ENSG00000143995_74 (sequence is synthesized)
agaaggtggaaaaaaaaagccaacagagaaaagtaactcttaaataatatgctcagttacaatattctttgtacacattcaatatattaatgttattttttttctgagtttgccttccca

SEQ ID NO: 384463 - DNA, 120 bp, Artificial Sequence
  ENSG00000143995_75 (sequence is synthesized)
gctctttctgctactatgaccactccctggtgcatggcttggtgtggaattgctgtaaactttattacctgtcaaaagggcaaaggggtcaggattgcttgtgggactcagtaaagttca

SEQ ID NO: 384464 - DNA, 120 bp, Artificial Sequence
  ENSG00000143995_76 (sequence is synthesized)
aagacattcaatgaggtagagcttttgtgtgctttaataacccaaggcagcttacttctgaagcagcttttcatgtacagttaaaacacgggattcaggtagtggtataaatacatggtt

SEQ ID NO: 384465 - DNA, 120 bp, Artificial Sequence
  ENSG00000143995_77 (sequence is synthesized)
cttatttctcagaccttctcttgttaatatccatcttctggtgttcgactttttttttttttaataacagtctttttgttttgtttttaaattatgagcttaaaatggcgatacttctat

SEQ ID NO: 384466 - DNA, 120 bp, Artificial Sequence
  ENSG00000143995_78 (sequence is synthesized)
gggatcctggcttgtggatctaaaaatccaagaaacatctctctaggatttgtttttgcattataatatgccagtaagataacaagagtatttgctaggggtgatgtgagtctttacttt

SEQ ID NO: 384467 - DNA, 120 bp, Artificial Sequence
  ENSG00000143995_79 (sequence is synthesized)
ctttatgaaatactctctcatctcttagggagcactatggaaaactatgttagcatcgcattgaggcaacacacatttactcctgtaactttttttcttccaacacccattatgtggtca

SEQ ID NO: 384468 - DNA, 120 bp, Artificial Sequence
  ENSG00000143995_80 (sequence is synthesized)
ccagacaaaacccaagcagaaagtttccacaccttaactgttccctctttgagctagatgttttaaaaactcagtcacagaggtgtgtagatctagtctgagagaaatttcactttgaat

SEQ ID NO: 384469 - DNA, 120 bp, Artificial Sequence
  ENSG00000143995_81 (sequence is synthesized)
aggacaattgccctgtgtttcccctatttggaagtttggatctcacaaggggggtggattgcacttgtcaatgtcatttatgcactcctgattatattcccatttttttatttctgtcat

SEQ ID NO: 384470 - DNA, 120 bp, Artificial Sequence
  ENSG00000143995_82 (sequence is synthesized)
ggagaagtcagctccaggaatgaagtcactgctgacattttacaaatgtggttcagagctgctgcctgctgccgtgtggtcggccggcggttctccaagtttgtttagtgatctcaaaag

SEQ ID NO: 384471 - DNA, 120 bp, Artificial Sequence
  ENSG00000143995_83 (sequence is synthesized)
gttgacagtcggccccacggccatggacgtcctttccccaagttagctgagcgcctgccaccgagatcccccgagcctgggcttcgcgcggccgcctaggaggaacccgcaggaaccagc

SEQ ID NO: 384472 - DNA, 120 bp, Artificial Sequence
  ENSG00000143995_84 (sequence is synthesized)
cctccccaactctccgcccggcgcctttctcctccaccggatcctggatgtgcagtggaggggacgagggcttgtcgggtgggaaacttaattcaaaatggctgctggaaacgcttgggt

SEQ ID NO: 384473 - DNA, 120 bp, Artificial Sequence
  ENSG00000143995_85 (sequence is synthesized)
tttattcgtagcaaatgttgccaatttctccggccagatacgctaaaccgatcctcagataccgtccatggctcagggcctccgacttcagggctccaggaggaaggggagacaccccct

SEQ ID NO: 384474 - DNA, 120 bp, Artificial Sequence
  ENSG00000143995_86 (sequence is synthesized)
gaaaagggcaaaggtttattaatgcccggagaagaatagtgcagcccatgatagaccagtccaaccgagcagtaagtcaaggaacaccttataatcctgatggacagcccatgggaggtt

SEQ ID NO: 384475 - DNA, 120 bp, Artificial Sequence
  ENSG00000143995_87 (sequence is synthesized)
tttggctgagctcgtggcgctgttggcctatgcgcctgggctcgcttgtgtgaccccctggggctcacccaagtttcagctggtcggaggacagcaaacccaagaacaaggagcactgat

SEQ ID NO: 384476 - DNA, 120 bp, Artificial Sequence
  ENSG00000143995_88 (sequence is synthesized)
agaccggtcttcccgtgcctgcaggttggctgcaaatgtttctgtacacggacaactggtccgggacaagatcccggggaaataaattcatctcgagaggggccgggcgagccagcgcgg

SEQ ID NO: 384477 - DNA, 120 bp, Artificial Sequence
  ENSG00000143995_89 (sequence is synthesized)
ggaaacgcgagcttttgttttttatgacagccgggctgcgcagctctaatcagcgcggggatttatctcccggcctgtcagcatgtgtgcttaaactttgcggacttcctagccctctaa

SEQ ID NO: 384478 - DNA, 120 bp, Artificial Sequence
  ENSG00000144010_0 (sequence is synthesized)
atggactcagacttctcacatgccttccagaaggaactcacctgtgtcatctgtttgaactacctggtagaccctgtcaccatctgctgtgggcacagcttctgtaggccctgtctctgc

SEQ ID NO: 384479 - DNA, 120 bp, Artificial Sequence
  ENSG00000144010_1 (sequence is synthesized)
ctttcgtgggaggaagcccaaagtcctgcaaactgccctgcatgcagggaaccatcaccgaaaatggacttcaaaaccaatattcttctgaagaatttagtgaccattgccagaaaagcc

SEQ ID NO: 384480 - DNA, 120 bp, Artificial Sequence
  ENSG00000144010_2 (sequence is synthesized)
agtctctggcaattcctgagctctgagaaacaaatatgtgggacccataggcaaacaaagaagatgttctgtgacatggacaagagtctcctctgcttgctgtgctccaactctcaggag

SEQ ID NO: 384481 - DNA, 120 bp, Artificial Sequence
  ENSG00000144010_3 (sequence is synthesized)
cacggggctcacaaacactatcccatcgaagaggcagctgaggaagaccgggagaaactcttaaagcaaatgaggattttatggaaaaagattcaagaaaatcagagaaatctatatgag

SEQ ID NO: 384482 - DNA, 120 bp, Artificial Sequence
  ENSG00000144010_4 (sequence is synthesized)
gagagaagaacagccttcctcttgaggggcgatgtggttttacgggcacagatgatcaggaatgagtataggaagctgcatccggttctccataaggaagaaaaacaacatttagagaga

SEQ ID NO: 384483 - DNA, 120 bp, Artificial Sequence
  ENSG00000144010_5 (sequence is synthesized)
atttttcagcaactccagagaagttgggtcaaaatggatcaaaagagtaaacacttgaaagaaatgtatcaggaactaatggaaatgtgtcataaaccagaggtggagctgctccaggat

SEQ ID NO: 384484 - DNA, 120 bp, Artificial Sequence
  ENSG00000144010_6 (sequence is synthesized)
ccgtgctgctgcacatgccccagcctgtgaatccagagctcactgcaggacccatcactggactggtgtacaggctcaaccgcttccgagtggaaatttccttccattttgaagtaacca

SEQ ID NO: 384485 - DNA, 120 bp, Artificial Sequence
  ENSG00000144010_7 (sequence is synthesized)
gaaatttccttccattttgaagtaaccaatcacaatatcaggctctttgaggatgtgagaagttggatgtttagacgtggacctttgaattctgacagatctgactattttgctgcatgg

SEQ ID NO: 384486 - DNA, 120 bp, Artificial Sequence
  ENSG00000144010_8 (sequence is synthesized)
ggagccagggtcttctcctttgggaaacactactgggagctggatgtggacaactcttgtgactgggctctgggagtctgtaacaactcctggataaggaagaatagcacaatggttaac

SEQ ID NO: 384487 - DNA, 120 bp, Artificial Sequence
  ENSG00000144010_9 (sequence is synthesized)
tctgaggacatatttcttcttttgtgtctgaaggtggataatcatttcaatctcttgaccacctccccagtgtttcctcactacatagagaaacctctgggccgggttggtgtgtttctt

SEQ ID NO: 384488 - DNA, 120 bp, Artificial Sequence
  ENSG00000144010_10 (sequence is synthesized)
gattttgaaagtggaagtgtgagttttttgaatgtcaccaagagttccctcatatggagttacccagctggctccttaacttttcctgtcaggcctttcttttacactggccacagatga

SEQ ID NO: 384489 - DNA, 120 bp, Artificial Sequence
  ENSG00000144010_11 (sequence is synthesized)
tagctttgcaactggctttggggacttccgaaagctaccagcactgcactgtgagactctcatccctgagctgaatccatctgattcgacagcaagctttggtgagaacatagatatatt

SEQ ID NO: 384490 - DNA, 120 bp, Artificial Sequence
  ENSG00000144010_12 (sequence is synthesized)
tgttcaggcttttttgtactttagtgtcacttcatttttattgctattaaataaaaaatttgtaaaaggcaaaactttttgtacattttcttacaattaaaataatctcttatggaccat

SEQ ID NO: 384491 - DNA, 120 bp, Artificial Sequence
  ENSG00000144015_0 (sequence is synthesized)
attcttctccagagcccacagagtagctttgcaactggctttggggacttccgaaagctaccagcactgcactgtgagactctcatccctgagctgaattcatctgattcgacggcaagc

SEQ ID NO: 384492 - DNA, 120 bp, Artificial Sequence
  ENSG00000144015_1 (sequence is synthesized)
tttggtgagaacatagatatatttctgaggaaaatggactcagacttctcacatgccttccagaaggaactcacctgcgtcatctgtttgaactacctggtagaccctgtcaccatctgc

SEQ ID NO: 384493 - DNA, 120 bp, Artificial Sequence
  ENSG00000144015_2 (sequence is synthesized)
tgtgggcacagcttctgtaggccctgtctctgcctttcgtgggaggaagcccaaagtcctgcaaactgccctgcatgcagggaaccatcaccgaaaatggacttcaaaaccaatattctt

SEQ ID NO: 384494 - DNA, 120 bp, Artificial Sequence
  ENSG00000144015_3 (sequence is synthesized)
cagtctctggcaattcctgagctctgagaaacaaatatgtgggacccataggcaaacaaagaagatgttctgtgacatggacaagagtctcctctgcttgctgtgctccaactctcagga

SEQ ID NO: 384495 - DNA, 120 bp, Artificial Sequence
  ENSG00000144015_4 (sequence is synthesized)
ctcctctgcttgctgtgctccaactctcaggagcacggggctcacaaacaccatcccatcgaagaggcagctgaggaacaccgggagaaactcttaaagcaaatgaggattttatggaaa

SEQ ID NO: 384496 - DNA, 120 bp, Artificial Sequence
  ENSG00000144015_5 (sequence is synthesized)
aagattcaagaaaatcagagaaatctatatgaggagggaagaacagccttcctctggaggggcaatgtggttttacgggcacagatgatcaggaatgagtataggaagctgcatccggtt

SEQ ID NO: 384497 - DNA, 120 bp, Artificial Sequence
  ENSG00000144015_6 (sequence is synthesized)
ctccataaggaagaaaaacaacatttagagagactgaacaaggaataccaagagatttttcagcaactccagagaagttgggtcaaaatggatcaaaagagtaaacacttgaaagaaatg

SEQ ID NO: 384498 - DNA, 120 bp, Artificial Sequence
  ENSG00000144015_7 (sequence is synthesized)
agtaaacacttgaaagaaatgtatcaggaactaatggaaatgtgtcataaaccagatgtggagctgctccaggatttgggagacatcgtggcaaggagtgagtccgtgctgctgcacatg

SEQ ID NO: 384499 - DNA, 120 bp, Artificial Sequence
  ENSG00000144015_8 (sequence is synthesized)
ctggactggtgtacaggctcaaccgcttccgagtggaaatttccttccattttgaagtaaccaatcacaatatcaggctctttgaggatgtgagaagttggatgtttagacgtggacctt

SEQ ID NO: 384500 - DNA, 120 bp, Artificial Sequence
  ENSG00000144015_9 (sequence is synthesized)
tgaattctgacagatctgactattttgctgcatggggagccagggtcttctcctttgggaaacactactgggagctggatgtggacaactcttgtgactgggctctgggagtctgtaaca

SEQ ID NO: 384501 - DNA, 120 bp, Artificial Sequence
  ENSG00000144015_10 (sequence is synthesized)
actcctggataaggaagaatagcacaatggttaactctgaggacatatttcttcttttgtgtctgaaggtggataatcatttcaatctcttgaccacctccccagtgtttcctcactaca

SEQ ID NO: 384502 - DNA, 120 bp, Artificial Sequence
  ENSG00000144015_11 (sequence is synthesized)
tagagaaacctctgggccgggttggtgtgtttcttgattttgaaagtggaagtgtgagttttttgaatgtcaccaagagttccctcatatggagttacccagctggctccttaacttttc

SEQ ID NO: 384503 - DNA, 120 bp, Artificial Sequence
  ENSG00000144015_12 (sequence is synthesized)
ctgtcaggcctttcttttacactggccacagatgatcaggattaagaaaacttactgtttgggaactccatatacaagggagcccttcactgttgatacaaagaaatcatactgttcagg

SEQ ID NO: 384504 - DNA, 120 bp, Artificial Sequence
  ENSG00000144015_13 (sequence is synthesized)
cttttttgtactttagtgtcacttcattttattgctattaaataaaaaatttgtaaaaggcaaaactttttgtacattttcttacaattaaaataatctcttatggaccattacctaaaa

SEQ ID NO: 384505 - DNA, 120 bp, Artificial Sequence
  ENSG00000144021_0 (sequence is synthesized)
ggcggaagcgggagcctctgtcggccgcggaagcctggagtgggcggtacgcagacgcgcgcggtgagacccgctgtctgctcagcggactctgcccgcccccacctccccctgcgtcgg

SEQ ID NO: 384506 - DNA, 120 bp, Artificial Sequence
  ENSG00000144021_1 (sequence is synthesized)
gccgacatgaaggactcgctggtgctgctgggccgtgtcccggcgcacccggactcccgctgctggttcctggcctggaaccccgcggggaccctgctggcctcgtgcggcggcgaccgg

SEQ ID NO: 384507 - DNA, 120 bp, Artificial Sequence
  ENSG00000144021_2 (sequence is synthesized)
agaatccgcatctggggcacggagggtgacagctggatctgcaagtctgtcctttctgaaggccaccagcgcaccgtgcggaaggtagcctggtccccctgcggtaattacctggcctct

SEQ ID NO: 384508 - DNA, 120 bp, Artificial Sequence
  ENSG00000144021_3 (sequence is synthesized)
gccagctttgatgctaccacttgcatttggaagaagaaccaggatgactttgagtgtgtaaccactctcgagggccatgaaaatgaggtcaagtcagtggcttgggccccatctggcaac

SEQ ID NO: 384509 - DNA, 120 bp, Artificial Sequence
  ENSG00000144021_4 (sequence is synthesized)
ctcctggccacttgcagccgagataagagcgtttgggtctgggaagttgatgaagaggatgagtatgaatgtgtcagtgttctcaactcccacacacaggatgtcaagcatgtggtttgg

SEQ ID NO: 384510 - DNA, 120 bp, Artificial Sequence
  ENSG00000144021_5 (sequence is synthesized)
cacccaagtcaggagctcttagcttctgccagctatgatgacacagtgaagctgtaccgggaggaagaggatgactgggtatgctgtgccacccttgagggccatgaatccactgtgtgg

SEQ ID NO: 384511 - DNA, 120 bp, Artificial Sequence
  ENSG00000144021_6 (sequence is synthesized)
agcttggcctttgacccgagtggccagcgcctggcgtcttgtagtgatgaccgtactgtgcgtatctggcgtcagtatctaccaggcaatgaacaaggggtggcatgcagcggctctgac

SEQ ID NO: 384512 - DNA, 120 bp, Artificial Sequence
  ENSG00000144021_7 (sequence is synthesized)
cccagttggaaatgtatctgtactttgtccggcttccactcaaggaccatttatgacattgcttggtgtcagctgacaggggctctggccacagcttgtggggatgacgcgatccgcgtg

SEQ ID NO: 384513 - DNA, 120 bp, Artificial Sequence
  ENSG00000144021_8 (sequence is synthesized)
tttcaggaggatcccaactcggatccacagcagcccaccttctccctgacagcccacttgcatcaggcccattcccaggatgtcaactgtgtggcctggaaccccaaggagccagggcta

SEQ ID NO: 384514 - DNA, 120 bp, Artificial Sequence
  ENSG00000144021_9 (sequence is synthesized)
ctggcctcctgcagtgatgatggggaggtggccttctggaagtatcagcggcctgaaggcctctgagctacctcgactttggacagagtaatgactccccagaaaacgtcatataagact

SEQ ID NO: 384515 - DNA, 120 bp, Artificial Sequence
  ENSG00000144021_10 (sequence is synthesized)
ttaccagcccctgagaggaccaggaggagcatccttgaccttcatttaacttggctcacttctcttcagacttgggtagaagtgcagagccacagaattgctttccttccccgcctttga

SEQ ID NO: 384516 - DNA, 120 bp, Artificial Sequence
  ENSG00000144021_11 (sequence is synthesized)
catgaggccttcagtaaagagctacagaacatgagtacattgttataccacagatttttcttgcattagggcacagtgttaaattttttggaggtaaatatactatttataatcactata

SEQ ID NO: 384517 - DNA, 120 bp, Artificial Sequence
  ENSG00000144021_12 (sequence is synthesized)
tatagtaggagggggtatgtgtctcaggcttttctgaagttgcaagacttaaagaaataatccatctgcatcccaagtcctattttataaggatattcataaaaattccatggtgaatcc

SEQ ID NO: 384518 - DNA, 120 bp, Artificial Sequence
  ENSG00000144021_13 (sequence is synthesized)
ttgtctgaaataggtcctcccttcccagtttctgtgtaagtctttgcatttaagacatccaatcaataatgaaggaaatttttttctgaatgtaggtttgagtgaggggcacctctgctt

SEQ ID NO: 384519 - DNA, 120 bp, Artificial Sequence
  ENSG00000144021_14 (sequence is synthesized)
tcccttagcaaccctcatatacctccctgcaccgttacgctgtgatggcaactggggatagaaaaaaaatggggaaagacaggaatcctaaaagggagagttattactggccacaagccc

SEQ ID NO: 384520 - DNA, 120 bp, Artificial Sequence
  ENSG00000144021_15 (sequence is synthesized)
tgtattctcaacagggatgcaaattggttcttcagtaaggataaaaaaaaatcacaagcagttgtttgtggccctcctaaggcccacagcacatatagtgtgtctgtgatattccatttt

SEQ ID NO: 384521 - DNA, 120 bp, Artificial Sequence
  ENSG00000144021_16 (sequence is synthesized)
ggagtgatcaggaagaaggcttcctaggggactggcgatttaaaccagttgagaaacactgccatcagcaggcagtttcagactcactcaagttgtctcttgacagtcacttctaaatgg

SEQ ID NO: 384522 - DNA, 120 bp, Artificial Sequence
  ENSG00000144021_17 (sequence is synthesized)
gttctaatgtgacaatggcctccaaaactacagccttccctgaagtttaagctgtgaccttagattttagaaggacagtggggctgtacctagaatagtggttctcgaagaatgcggcct

SEQ ID NO: 384523 - DNA, 120 bp, Artificial Sequence
  ENSG00000144021_18 (sequence is synthesized)
gcagatcctgggagtcccaagaccctttcagggaggatctgtgaggtcaactgttggcactgtggcatgaatcaaggtggtggcagcaaacttctagtagttttgatatgtccttgatag

SEQ ID NO: 384524 - DNA, 77 bp, Artificial Sequence
  ENSG00000144021_19 (sequence is synthesized)
tggcagcaaacttctagtagttttgatatgtccttgatagaacaaatagcaatggttaactattaaatgttgaccta

SEQ ID NO: 384525 - DNA, 120 bp, Artificial Sequence
  ENSG00000144021_20 (sequence is synthesized)
cactccagcccaggcaacaagagtgaaaccctgtctcaaaaagaaaaaaaaagttgaccttgagaatttataatattctgagaaaactggaagcatgcataaagcccctctgctgtgcac

SEQ ID NO: 384526 - DNA, 120 bp, Artificial Sequence
  ENSG00000144021_21 (sequence is synthesized)
agaaaactggaagcatgcataaagcccctctgctgtgcactgaagtatgggtgccttgaggaaaagcagttacacagttgagttgcaagctgaattggctgtgttcaaggcatgcccttt

SEQ ID NO: 384527 - DNA, 120 bp, Artificial Sequence
  ENSG00000144021_22 (sequence is synthesized)
agaattgaaagaactagcagattacggtatttagacttgaatatttggctgatattttctggaaattaatggaatgagcctctcacctcaagggaaacaactgatagtgttgccagtgat

SEQ ID NO: 384528 - DNA, 120 bp, Artificial Sequence
  ENSG00000144021_23 (sequence is synthesized)
aaagctttcaagcaaaaattggaatttccgaaaatctgtactccaccatgagctttattgttggggatattaacaaatgtgatttgtataatgaaatgcatttcatttggaagaattcaa

SEQ ID NO: 384529 - DNA, 120 bp, Artificial Sequence
  ENSG00000144021_24 (sequence is synthesized)
tgaaccatttttccaagtgaccagtacgtgatgttacaaaatcatgcatggctcaaagattgattcaaaagtgtaagacaggccagtggattttaatgtattaacaatataagagtgcat

SEQ ID NO: 384530 - DNA, 87 bp, Artificial Sequence
  ENSG00000144021_25 (sequence is synthesized)
ggccagtggattttaatgtattaacaatataagagtgcattaagttttcggagtctacattgcctttaagaaactatgacttgtagt

SEQ ID NO: 384531 - DNA, 120 bp, Artificial Sequence
  ENSG00000144021_26 (sequence is synthesized)
tagtcttggtgtggtatcaaagaatagccacaattagctgaaaaggctattttaaaaacttttccaactgcgtatctgtgtgaagtcaacttacttcaacaaaaaagtttggatgtagaa

SEQ ID NO: 384532 - DNA, 120 bp, Artificial Sequence
  ENSG00000144021_27 (sequence is synthesized)
gcagctgtaagaattcaactgtttattataacaagatactaaagagactgtaaaatgccacccttctccttggattgttttggaagttattcttcataaaaaatgttaacgtgggctggg

SEQ ID NO: 384533 - DNA, 120 bp, Artificial Sequence
  ENSG00000144021_28 (sequence is synthesized)
tgaggtgggcggatcacttgagctcaggaattcaaggtcagcctgggcaacatggctaaactctgtctctattaagaaaaaaaatgttaacattatgatttaaaagtgcattaaccttaa

SEQ ID NO: 384534 - DNA, 120 bp, Artificial Sequence
  ENSG00000144021_29 (sequence is synthesized)
aaaatgttaacattatgatttaaaagtgcattaaccttaatctagataataaaagctttttggggcaacctccagaactgtgaaaaataaatttgttatttaaaaagaaaaaaaaaaaaa

SEQ ID NO: 384535 - DNA, 120 bp, Artificial Sequence
  ENSG00000144021_30 (sequence is synthesized)
aggccaggtccctccaggtggattgggaaccacctgacagccccctctgtgtccctgacagggtcggctcttgggtcccctttttctctcccacagttgatgaagaggatgagtatgaat

SEQ ID NO: 384536 - DNA, 120 bp, Artificial Sequence
  ENSG00000144021_31 (sequence is synthesized)
gtgtcagtgttctcaactcccacacacaggatgtcaagcatgtggtttggcacccaagtcaggaggtaagagtcaagcagggactcttgtgggaagggctctggtgtgcaggcttgtgcc

SEQ ID NO: 384537 - DNA, 120 bp, Artificial Sequence
  ENSG00000144021_32 (sequence is synthesized)
catgagtcagagcaaatgggggtaaaaggtaagatgtgctacaagagggctctggatagagtgctggaagaatcaggaaagttttgtagaatgggttgtttcatctgaatttaaaagggt

SEQ ID NO: 384538 - DNA, 120 bp, Artificial Sequence
  ENSG00000144021_33 (sequence is synthesized)
atgtaggattttaacatgagaatttcacgtgagaattcaagtgaaaactcaacagtgtgagtaaagataacaatggcgggaatgcttagactgaggggtggtaatgcatttaaatggggc

SEQ ID NO: 384539 - DNA, 120 bp, Artificial Sequence
  ENSG00000144021_34 (sequence is synthesized)
ataggacgtctggggtttggagaggaataaagtgggttgggtcggctggtgggtggccttcacaggcacgcaaagtagttacatacagtctgcaacagaacagggatgtttcctcggaat

SEQ ID NO: 384540 - DNA, 120 bp, Artificial Sequence
  ENSG00000144021_35 (sequence is synthesized)
tctgcttgagaaacgccagtctggctatagtgtgtaaggcagataagcagggatggggacacgaacggagacacagactcataatcagttgaagatgagggtgagggaaggtaagttagg

SEQ ID NO: 384541 - DNA, 80 bp, Artificial Sequence
  ENSG00000144026_0 (sequence is synthesized)
agcttcgccgcgccagcaccccgccaccggcgctggctctgaagggccccggcggcggccgcgtctgcgcaagctcggga

SEQ ID NO: 384542 - DNA, 120 bp, Artificial Sequence
  ENSG00000144026_1 (sequence is synthesized)
tggcgcggggtggcgggcggggcctggtcctgtgagcgttcggagactgcgggcgcgcagacctgtactgggcccgcgccccggccccttacagagctgggtgtgtccctccgagtgccc

SEQ ID NO: 384543 - DNA, 120 bp, Artificial Sequence
  ENSG00000144026_2 (sequence is synthesized)
cccgctagggactgtgcaggccggagctaggcagggacagcggggcgaaccgggctgatagagtcggtccctgctcctgtgaggctctcaccgaatccctgctgtttccgggcagctgaa

SEQ ID NO: 384544 - DNA, 120 bp, Artificial Sequence
  ENSG00000144026_3 (sequence is synthesized)
gagcgctgggccctcgcgtcgcgggcgtggctgtggccgtgtctcctggtagtctgagcccactgtgcgtgtggatccacgtgggagctgggttccagagcctggtcctgaggaggagcc

SEQ ID NO: 384545 - DNA, 120 bp, Artificial Sequence
  ENSG00000144026_4 (sequence is synthesized)
gagccggggcttccccttctcagaatcctgctcttcctccagagagattcccaggagaagagggaacaaccaattcattcctgaaagccaggcctcgggacctgatgacatttgaagatg

SEQ ID NO: 384546 - DNA, 120 bp, Artificial Sequence
  ENSG00000144026_5 (sequence is synthesized)
tggctgtggaattcagccagtgggagtgggggcagctgaaccctgctcagaaggacctctacagggaggtgatgctggagaacttcaggaacttggccattctgggccttctagtatcca

SEQ ID NO: 384547 - DNA, 120 bp, Artificial Sequence
  ENSG00000144026_6 (sequence is synthesized)
aaccatatgtgatctgccagttggaggaagggggtgagcccttcatggtggagagagaaatctcaacaggagcccactcagactggaagagaaggtctaaatccaaggaatcaatgccaa

SEQ ID NO: 384548 - DNA, 120 bp, Artificial Sequence
  ENSG00000144026_7 (sequence is synthesized)
gttggggaatttccaaagaagaattattccaggtagtatcagtggaaaaacacattcaagatgtgctgcagttctcgaagttgaaagcagcctgcggttgtgatggccagttagagatgc

SEQ ID NO: 384549 - DNA, 120 bp, Artificial Sequence
  ENSG00000144026_8 (sequence is synthesized)
agcagataaaacaggagagacacctgaaacaaatgtcaaccattcacaaatctgccaccacccttagcagagattataaatggaatggatttgggagaagcttaggtttaagatcagtcc

SEQ ID NO: 384550 - DNA, 120 bp, Artificial Sequence
  ENSG00000144026_9 (sequence is synthesized)
ttgttaaccaacacagcattctcatgggagaaggatcttataaatgtgatacagaattcaggcagactttagggggaaacaactctcagagaacccacccagaaaagaaatcttgtaaat

SEQ ID NO: 384551 - DNA, 120 bp, Artificial Sequence
  ENSG00000144026_10 (sequence is synthesized)
gtaatgagtgtgggaagtcctttcacttccagtcagaacttaggcgccatcagcgatgtcacactggagaaaagccgtatgaatgcagtgactgtggaagagcctttggtcatatttcat

SEQ ID NO: 384552 - DNA, 120 bp, Artificial Sequence
  ENSG00000144026_11 (sequence is synthesized)
cccttattaaacatcaaagaactcatactggagaaaagccctatgaatgcagtgaatgtgggagagccttcagccagagttcgtctcttgttctgcactatagatttcacactggagaga

SEQ ID NO: 384553 - DNA, 120 bp, Artificial Sequence
  ENSG00000144026_12 (sequence is synthesized)
aaccctacaaatgtaatgaatgtggacgagcctttggtcacacttcatcccttattaagcatcagaggactcatactggagaaaagccctatgaatgccgggaatgtgggagaaccttca

SEQ ID NO: 384554 - DNA, 90 bp, Artificial Sequence
  ENSG00000144026_13 (sequence is synthesized)
atactggagagaaaccttacaaatgtaataaatgtgggagagccttcagccagagttcatctctcactcaacattacagatatgagtgtg

SEQ ID NO: 384555 - DNA, 120 bp, Artificial Sequence
  ENSG00000144026_14 (sequence is synthesized)
acactggagagaaaccctacaaatgtaatgagtgtggaagggcctttgctcatactgcatcccttattaaacatcagagaagtcatgctggaaaaaaaaccctataaattcagtgaatat

SEQ ID NO: 384556 - DNA, 120 bp, Artificial Sequence
  ENSG00000144026_15 (sequence is synthesized)
agaagggctttcagctggagtgcagacatcactggaacttaaagaattcatatcagagagagatcctaaaggtgtaatgtatgtgggaagaccacatcttgttccacatcaggcaataat

SEQ ID NO: 384557 - DNA, 120 bp, Artificial Sequence
  ENSG00000144026_16 (sequence is synthesized)
tactaaagagaatccctgtcaatgtcaagagggggtgggcttcccctctcttaccaaacatgggagaatccatactagtgagaaaccacgtgaatgtaatgaatgtgggaacgctttgat

SEQ ID NO: 384558 - DNA, 120 bp, Artificial Sequence
  ENSG00000144026_17 (sequence is synthesized)
cagaggatgcatattattcagcatcagacagccgacactggggaggagccttatcaatgcagtgagtgtggcaagccttcagttacatactgattctttaagaaaatcagataacttgta

SEQ ID NO: 384559 - DNA, 120 bp, Artificial Sequence
  ENSG00000144026_18 (sequence is synthesized)
ctggagagaaatcctacaagtgtggtaagtatggaaaaatcttcagttgtatctcttcctttactaagcatcaagaacacatactagagagaggccctatgaaagcaggaaatagaggaa

SEQ ID NO: 384560 - DNA, 120 bp, Artificial Sequence
  ENSG00000144026_19 (sequence is synthesized)
ggccttcagtcagggctcatcccttattaagcatcagaaaattcatacctgagaaaaacctgtgaatgtgggtaatgtgggagagccttcagccaaacctcattgctttataaacccctt

SEQ ID NO: 384561 - DNA, 120 bp, Artificial Sequence
  ENSG00000144026_20 (sequence is synthesized)
agaactctccctactagctggaaactctggtgacgtgatgaatgtgggaagggctttggtggatgttccaccaaaacacgttagagaatttgtacattagagaatttgtgctagagcaac

SEQ ID NO: 384562 - DNA, 120 bp, Artificial Sequence
  ENSG00000144026_21 (sequence is synthesized)
tcttcaaatttagtgaaactgggaaaacccattagtagagttcaagcttcagtattcatctcaaagagaaaccttgggaacatgatgaatgtgaggaaagttcctttccaacttgagatg

SEQ ID NO: 384563 - DNA, 120 bp, Artificial Sequence
  ENSG00000144026_22 (sequence is synthesized)
tataaaactagagctgaaaagaagctgagaaatcaccttgtctggtgattttctgcctggtggggccatttgtataacgacacttgtgcattgcctcctcatgctgttactgacggggca

SEQ ID NO: 384564 - DNA, 120 bp, Artificial Sequence
  ENSG00000144026_23 (sequence is synthesized)
gggtgtcatgcatgggtgcagaggatggaggctgagaaaggtagacagctacccatgatctagcccagtcgtattttagagctaataaaactgatgttcagaaagtgacatgccttggcc

SEQ ID NO: 384565 - DNA, 120 bp, Artificial Sequence
  ENSG00000144026_24 (sequence is synthesized)
tctttgcagtacaacacctctatgcacttctttctctgtagcacatgttacctttctttgtgaggcaatggagtggtctaggattgagcaaaaagcaatttttgttacatctttatgcta

SEQ ID NO: 384566 - DNA, 120 bp, Artificial Sequence
  ENSG00000144026_25 (sequence is synthesized)
tgagcaaaaagcaatttttgttacatctttatgctaatagatttggaatttttgaaatgaaatgaaaccttgtttaaacattaaaattactaaaataggctgggcgcggtggctcacgcc

SEQ ID NO: 384567 - DNA, 120 bp, Artificial Sequence
  ENSG00000144026_26 (sequence is synthesized)
acaactaaaatatgggtattatgcacaatccagatctcaaaaacgtgattctaagtgaaagaaggcagatgccagagaccaggtattttctagtaccattttaggaaatgtccagaaatg

SEQ ID NO: 384568 - DNA, 120 bp, Artificial Sequence
  ENSG00000144026_27 (sequence is synthesized)
gcagatcttcagaaacaaagtaactgcaaatgttacaaggaatctttttagggtgacgaaaatgttctaaaactagatggtggtgatggttgaacgatttggtaacttcactaaaaatca

SEQ ID NO: 384569 - DNA, 120 bp, Artificial Sequence
  ENSG00000144026_28 (sequence is synthesized)
ttgaattgttcactttatatgggcagattttatggtaaatatacctcaataaaatcatttttcaaaatcaaatttacacatataccaaccattgctaaacaagtattcctgttttgtttg

SEQ ID NO: 384570 - DNA, 120 bp, Artificial Sequence
  ENSG00000144026_29 (sequence is synthesized)
ttacttcaagccatctatgcatttttggtatcactttttattttctgtaacagttacccctacatttactgggtctcagaaccttgtcaggctctgctttaaagttcctaccatgttggc

SEQ ID NO: 384571 - DNA, 120 bp, Artificial Sequence
  ENSG00000144026_30 (sequence is synthesized)
tctgtaactcaggtggagaagcctagaccaggagctggcgtagaccaaaggatacttgcctaataaggattagcttatactgaggaaaatactttaagcatttaaagtccagatgaggaa

SEQ ID NO: 384572 - DNA, 120 bp, Artificial Sequence
  ENSG00000144026_31 (sequence is synthesized)
gttgagcccagaattcagggaaccagctcaaagtgggcccatgcagacaggctgggtctaagagtccacaaggttggccagggcaggtaggatgcacaggaggcatctggatctggaagt

SEQ ID NO: 384573 - DNA, 120 bp, Artificial Sequence
  ENSG00000144026_32 (sequence is synthesized)
acttggacagctgaggtcaagatcacacagaaatttattcctggacagccaaggtttacaggagcagaaatagcaaatattttcttgctccgtctctcccttttttcccagtgccctttt

SEQ ID NO: 384574 - DNA, 120 bp, Artificial Sequence
  ENSG00000144026_33 (sequence is synthesized)
ctgtacctacccagatcactttatacctagacatctgtcacaattttgtaactggtcttcgtccaaaatctgtctcctcttctcatgtatccttgccatattaaccatacttaccagttt

SEQ ID NO: 384575 - DNA, 120 bp, Artificial Sequence
  ENSG00000144026_34 (sequence is synthesized)
gaacccagtgtcctgccctccaaaaatcctttgcacggcctacaagataaatcctcaccccccgtgtgtggtatataatgccctctttaggctgctccaacctcctgctgctcctgacag

SEQ ID NO: 384576 - DNA, 120 bp, Artificial Sequence
  ENSG00000144026_35 (sequence is synthesized)
aagcctccattgcacacaaatgctctcttgtcatccctcagacatgcctttccacatctcagcctgcaaacctttaccttagctgttctatcagccgggggcaccttctctacttaccta

SEQ ID NO: 384577 - DNA, 120 bp, Artificial Sequence
  ENSG00000144026_36 (sequence is synthesized)
aagcctacataatcagtcagaaacctgtgtaaatttcccttccttggagaggtgttctcttgaaaactgatatgaagtcatatcttaccatttgtaatcataaacatatttgtttgtgta

SEQ ID NO: 384578 - DNA, 120 bp, Artificial Sequence
  ENSG00000144026_37 (sequence is synthesized)
agtttttaaaaatggacaatatctagacttgtggtaaatcgtatcactgtcttgatctatttaaataattttttatcactttaccactttcttgtttcctgaaccagatgacaatggaaa

SEQ ID NO: 384579 - DNA, 120 bp, Artificial Sequence
  ENSG00000144026_38 (sequence is synthesized)
aagtcaaatggtaaaatattttaagagatttattctgagataaatatgagtgacctgtaggcacagttgaccagcatttgccttaaaacagagaccttaagactaacaaaaacagactct

SEQ ID NO: 384580 - DNA, 120 bp, Artificial Sequence
  ENSG00000144026_39 (sequence is synthesized)
ttgtagcaataacaacatgacagtaagtcctgagagaaatcaaagtgttttacgccaaaatagatttaagtctgataagaaacaagtctgacacagccccaggagatcctgagaacatgt

SEQ ID NO: 384581 - DNA, 120 bp, Artificial Sequence
  ENSG00000144026_40 (sequence is synthesized)
gcccaaggtggctcttgtcaggagcagcagcaggttggggcagcctaaagaggacattaccaaacacgggagtgaggatttatcttgtaggaagtgcaaaggatttttggagggcaggac

SEQ ID NO: 384582 - DNA, 120 bp, Artificial Sequence
  ENSG00000144026_41 (sequence is synthesized)
actgggttcaaactgacgagtatggttaacatggcaaaggtacgtgagaggaagagacaattgtgctgtcaggctacagcttggtttcatgcatttttacattttaggggaatgtaagac

SEQ ID NO: 384583 - DNA, 120 bp, Artificial Sequence
  ENSG00000144026_42 (sequence is synthesized)
atcaatacatgtaagatttacattggttcgatggagaaaggcaggacaacttgaagctggtggggaagggacagggacagagggagggccttctgggttataggtggattcaaagatttt

SEQ ID NO: 384584 - DNA, 120 bp, Artificial Sequence
  ENSG00000144026_43 (sequence is synthesized)
ctgattggcagtgggtttatccaaagacctggaatcaatagaagggaatgtctgggttaagataaggtgttgtggagaccaaggttcttactgtgagatgaagccagaaggtagcaggct

SEQ ID NO: 384585 - DNA, 120 bp, Artificial Sequence
  ENSG00000144026_44 (sequence is synthesized)
gattgtaaatgtttcttatcagacttaagagaaatttattttaggataaaatacttagatttctctcagggcctgttatctgtcatgttatcttattgctacaaagagcctgtttttgtc

SEQ ID NO: 384586 - DNA, 120 bp, Artificial Sequence
  ENSG00000144026_45 (sequence is synthesized)
cctgtttttgtcagtcttaaggtctctgttttaatgttaatgctggtccactgtgcctgaattccaaagagaggaaggtataatgaggtatgtctgaccacccattcccatcatggcctg

SEQ ID NO: 384587 - DNA, 120 bp, Artificial Sequence
  ENSG00000144026_46 (sequence is synthesized)
agctagtgtttcaggtttactttagaatgctcttggccaagtggaagggtcgattcagttggttgtgtgcttagaattttatttttgacttacatagactatcagctgcttcatgtcaca

SEQ ID NO: 384588 - DNA, 120 bp, Artificial Sequence
  ENSG00000144026_47 (sequence is synthesized)
tctcatgcttctcttatgttgcccagttttctcagtgcttccgactgcatgtttttgtactatatgaaaagccttctttctagaagactaccaattaaatatttctttagaaaaatgtaa

SEQ ID NO: 384589 - DNA, 120 bp, Artificial Sequence
  ENSG00000144026_48 (sequence is synthesized)
tgtggccgtgtctcctggtagtctgagcccactgtgcgtgtggatccacgtgggagctgggttccagagcctggtcctgaggaggagccgagccgggggtaggaggccggacttggcgag

SEQ ID NO: 384590 - DNA, 120 bp, Artificial Sequence
  ENSG00000144026_49 (sequence is synthesized)
ggacttggcgagggaagagcacgaccccgggcagcagtgcgccgcgctgggcgcaccggggtttgccggccctgctctgggccctgcaggtccgctggccccgccgcgcctagtggggat

SEQ ID NO: 384591 - DNA, 120 bp, Artificial Sequence
  ENSG00000144026_50 (sequence is synthesized)
ccaggcagccccagcctgcgtcccgctccctgaaccctcgggaggaccacagggctgtggccgaaagacagagatttggacctagtgaaaggacgccgctccttagccccagctatggac

SEQ ID NO: 384592 - DNA, 120 bp, Artificial Sequence
  ENSG00000144026_51 (sequence is synthesized)
tccacagcatcaggtttggctctggagcgtgcagagggccaggagccctcttggggagctagtaccgagcccgatatcaggaggaccccaggaagaggccggggaatcccactgaaggct

SEQ ID NO: 384593 - DNA, 120 bp, Artificial Sequence
  ENSG00000144026_52 (sequence is synthesized)
attcatctatcactgtatattttcttacccatagatgttcacttccctctctcctgcacacaaaatgccctccaagagaaataacccaagagctgcatccagtcagagcatcatgatcaa

SEQ ID NO: 384594 - DNA, 120 bp, Artificial Sequence
  ENSG00000144026_53 (sequence is synthesized)
agtcctggatggcgcgatagtctggatggagatcctgtgggtctggatacctataaactaaaaggacaattacctgaatccatatatccaatatacaatgagcaatggggacaggatggc

SEQ ID NO: 384595 - DNA, 120 bp, Artificial Sequence
  ENSG00000144026_54 (sequence is synthesized)
catggtagacactcctttgcagaagagggaagcatgggaagagtcagtcccgggtccataacagtcgtgaaattccactggacagacactgtgaggacccttggtcttgggagtgggaaa

SEQ ID NO: 384596 - DNA, 120 bp, Artificial Sequence
  ENSG00000144026_55 (sequence is synthesized)
gtctgtaggttacaccctggttctgctccctgggtggagctccctggcctagtgttttccttggctgttggctttgccattgggaagttccttcgttttgatacctccttggtgtcatat

SEQ ID NO: 384597 - DNA, 120 bp, Artificial Sequence
  ENSG00000144026_56 (sequence is synthesized)
gaagatgatactggagaataagctttcttgggggcaaagcagctttttcatcctgctggagtaggttggtggcccaggattgttttaagtgcaactctaaaaaacttaatcagcttttta

SEQ ID NO: 384598 - DNA, 120 bp, Artificial Sequence
  ENSG00000144026_57 (sequence is synthesized)
tgaatttgtttccagttggctccatgtgtcagtggtttgacccacagttctttttgaaatatgcccccttctttagccttaattgtggagtttttggatttccttgggaaatctatactt

SEQ ID NO: 384599 - DNA, 120 bp, Artificial Sequence
  ENSG00000144026_58 (sequence is synthesized)
ttttcactctgaacaatttggtcccactgaaagcctttattgggagccttttgaaattactgggagatttactgggagccttttgaaattactcagaggtttaaacaaaaaggtttgaca

SEQ ID NO: 384600 - DNA, 120 bp, Artificial Sequence
  ENSG00000144026_59 (sequence is synthesized)
accacatccatgatttggtccctgataatgggctgagttttaattagctgttgtcacgcagaagctgatgtatattgtctttggccagttggaaatgagaattggttgtctccaaccctg

SEQ ID NO: 384601 - DNA, 120 bp, Artificial Sequence
  ENSG00000144026_60 (sequence is synthesized)
caagccctagcatttctggacatttcctattgccttccatttttgttttgcaaaccacaaactcttgagctcattttttcttgtaatactttgtcaaactcagccaataacaaccagctc

SEQ ID NO: 384602 - DNA, 120 bp, Artificial Sequence
  ENSG00000144026_61 (sequence is synthesized)
acactactaatgttatgtttccagcctcttctcataacatcacaagctcatgctttcattgttcatctttcaagttactgaaggcaatagtttcaccaaacagttcaccaccaaattaca

SEQ ID NO: 384603 - DNA, 120 bp, Artificial Sequence
  ENSG00000144026_62 (sequence is synthesized)
tgggttgccaccttgccaataagtttcttcactgcctggcctggatgccagtgtcatctatttttggctttttgttatggcagaactccactgtgagtaccagttttttaaggagtcagt

SEQ ID NO: 384604 - DNA, 120 bp, Artificial Sequence
  ENSG00000144026_63 (sequence is synthesized)
ataggctagttatgccatgatagcaacagcaaaccctcagagacttacaccatgaaaggttccctcttgcccatgttacgtgacagctgtggctttgcccacatcttcactcagatcatt

SEQ ID NO: 384605 - DNA, 120 bp, Artificial Sequence
  ENSG00000144026_64 (sequence is synthesized)
tgccatttgcaaggcagacaggaaaggacaattgcagaacccccactggctctgaaggcttttgctcacctgtagctcgtgtctttcacgttcagtttgagaaagcagatgacatcgccc

SEQ ID NO: 384606 - DNA, 120 bp, Artificial Sequence
  ENSG00000144026_65 (sequence is synthesized)
cacctggggcagggtgaggcagaagctcaattctttagggagggtcagtggatattttggacaaataatataacctatcaaaagaggtcactatagtagtgaatttttcatgtttgatta

SEQ ID NO: 384607 - DNA, 120 bp, Artificial Sequence
  ENSG00000144026_66 (sequence is synthesized)
ttttggatgattttatattataaaattgttacttcagcttttctgtggaatcagtatctaaatgggatttgatttttaaatactttggtgtaaaagtaacaggaatttgtagtacttact

SEQ ID NO: 384608 - DNA, 120 bp, Artificial Sequence
  ENSG00000144026_67 (sequence is synthesized)
ttcacctattttgctctttagtggattgccatacaatataagctaaatgggaggtgttctaattactgagattgaaggtgacaggatagttctggccaggacctgtagaataattatgct

SEQ ID NO: 384609 - DNA, 120 bp, Artificial Sequence
  ENSG00000144026_68 (sequence is synthesized)
ttataatggtgacctgggatccagggtctcatgctcagctttataaacttaggaactgaataatgagtaggctttgggggaaaggatcatgctagtcaaacgcacaaaacttattgtttc

SEQ ID NO: 384610 - DNA, 120 bp, Artificial Sequence
  ENSG00000144026_69 (sequence is synthesized)
atcataaagccacttgtgatttacttttgctgaactgtgtgctggcaggcaggtggaggataaattatcataagccccagattacttgatttggccttattgttgtcagaatcataggtc

SEQ ID NO: 384611 - DNA, 120 bp, Artificial Sequence
  ENSG00000144026_70 (sequence is synthesized)
acaagtttcaaaaatactttattagaaaactgttgatccttgtgtatttgagaatgcaaagcatattcatttgttaattctaattgattccaattaaatgtaactagattgagaataaaa

SEQ ID NO: 384612 - DNA, 120 bp, Artificial Sequence
  ENSG00000144026_71 (sequence is synthesized)
ccttttgacaaatgaggaaatgtattacatttacctccacctgagaagaatgtctctgtaggcctgattcacctgagaccctgattatatttcctagcagtttcatattgataagcatat

SEQ ID NO: 384613 - DNA, 120 bp, Artificial Sequence
  ENSG00000144026_72 (sequence is synthesized)
gcttgcccactttcaggaatttgattctgagagcagggctgcggttccaggcagggtttgtacacatatttgcgttggaaggagagaggagcctaggacacatatgtattaactgtgcag

SEQ ID NO: 384614 - DNA, 120 bp, Artificial Sequence
  ENSG00000144026_73 (sequence is synthesized)
ctggtccgactcccgacagcttcagcgcacaccagccagccttggagttgctggaacggccctggctgcaagctggaatcacccggagagctttcgacattgatgcctgaggcccagctg

SEQ ID NO: 384615 - DNA, 120 bp, Artificial Sequence
  ENSG00000144028_0 (sequence is synthesized)
agtgcgtctttcctgcgtcgttccggcgcggcgggagcagagatctgcggccgtttgcagcttgcggtagggaggcgtggtggtctgaagcctccgagcagccgcggccatggcggatgt

SEQ ID NO: 384616 - DNA, 120 bp, Artificial Sequence
  ENSG00000144028_1 (sequence is synthesized)
aaccgcccgtagtctgcaatacgagtacaaggcgaactcgaatcttgtgctccaagctgaccgttctctcattgaccggacccgccgggatgaacccacaggagaggtgctgtcccttgt

SEQ ID NO: 384617 - DNA, 120 bp, Artificial Sequence
  ENSG00000144028_2 (sequence is synthesized)
tgggaagctggagggcacccgtatgggagacaaggctcaacggaccaaaccgcagatgcaggaggaaagaagagccaagcgaagaaagcgtgatgaggaccggcatgacatcaacaagat

SEQ ID NO: 384618 - DNA, 120 bp, Artificial Sequence
  ENSG00000144028_3 (sequence is synthesized)
gaagggttatactctgctgtcggagggcattgatgagatggtgggcatcatctacaagcccaaaactaaagagactcgggagacctatgaggtgctactcagcttcatccaggctgctct

SEQ ID NO: 384619 - DNA, 120 bp, Artificial Sequence
  ENSG00000144028_4 (sequence is synthesized)
tggggaccagccacgtgatatcctttgtggggcagctgatgaagttctagctgttctaaagaatgaaaagctgcgggacaaggaaaggcgaaaggagattgacctgctgctgggtcaaac

SEQ ID NO: 384620 - DNA, 120 bp, Artificial Sequence
  ENSG00000144028_5 (sequence is synthesized)
agatgataccagataccatgtgctagtgaacctgggcaaaaagatcacagactatggtggagataaggaaatccaaaatatggatgacaacattgatgagacatacggtgtgaatgtgca

SEQ ID NO: 384621 - DNA, 120 bp, Artificial Sequence
  ENSG00000144028_6 (sequence is synthesized)
gtttgagtctgatgaggaggaaggtgatgaagacgtatacggggaggttcgagaagaggcatctgatgatgacatggaaggggacgaggctgtcgtgcgctgcaccctctcggctaatct

SEQ ID NO: 384622 - DNA, 120 bp, Artificial Sequence
  ENSG00000144028_7 (sequence is synthesized)
cgtagcctcaggtgaactgatgagttccaagaagaaggatttgcaccctcgggatattgatgcattttggctgcagcggcagctcagtcgtttctatgatgatgccatcgtgtcgcagaa

SEQ ID NO: 384623 - DNA, 120 bp, Artificial Sequence
  ENSG00000144028_8 (sequence is synthesized)
gaaggcagatgaagtattggagattttgaagacggccagtgatgatcgggaatgtgaaaatcagctggttctgctgcttggtttcaacacctttgatttcattaaagtgttgcggcagca

SEQ ID NO: 384624 - DNA, 120 bp, Artificial Sequence
  ENSG00000144028_9 (sequence is synthesized)
caggatgatgattttatactgtaccttgctggccagtgcacaaagtgaagctgaaaaggaaaggattatgggaaagatggaagctgacccagagctatccaagttcctctaccagcttca

SEQ ID NO: 384625 - DNA, 120 bp, Artificial Sequence
  ENSG00000144028_10 (sequence is synthesized)
tgaaaccgagaaggaggatctgatccgagaggaaaggtcccggagagagcgagtgcgtcagtctcgaatggacacagatctggaaaccatggatctcgaccagggtggagaggcactggc

SEQ ID NO: 384626 - DNA, 120 bp, Artificial Sequence
  ENSG00000144028_11 (sequence is synthesized)
tccacggcaggttctggacttggaggacctggtttttacccaagggagccactttatggccaataaacgctgtcagcttcctgatggatccttccgtcgccagcgtaagggctatgaaga

SEQ ID NO: 384627 - DNA, 120 bp, Artificial Sequence
  ENSG00000144028_12 (sequence is synthesized)
ggtgcatgtgcctgctctgaagcccaagccctttggctcagaagaacaactgcttccagtggaaaagctgccaaagtatgcccaggctgggtttgagggcttcaaaacactgaatcggat

SEQ ID NO: 384628 - DNA, 120 bp, Artificial Sequence
  ENSG00000144028_13 (sequence is synthesized)
ccagagtaagctctaccgtgctgcccttgagacggatgagaatctgctgctgtgtgctcctactggtgctgggaagaccaacgtggccctgatgtgcatgctccgagagattgggaaaca

SEQ ID NO: 384629 - DNA, 120 bp, Artificial Sequence
  ENSG00000144028_14 (sequence is synthesized)
cataaacatggacggcaccatcaatgtggatgacttcaagattatctacattgcccccatgcgctccttggtgcaggagatggtgggcagctttggaaagcgcctggccacttatggcat

SEQ ID NO: 384630 - DNA, 120 bp, Artificial Sequence
  ENSG00000144028_15 (sequence is synthesized)
cactgttgctgaactgactggggaccaccagctgtgcaaagaagagatcagtgccactcagatcatcgtctgcacccccgagaagtgggacatcatcacccgcaagggtggtgagcgcac

SEQ ID NO: 384631 - DNA, 120 bp, Artificial Sequence
  ENSG00000144028_16 (sequence is synthesized)
ctacacccagctggtgcggctcatcattctggatgagattcatcttctccacgatgacagaggtcctgtcttagaagctttagtggccagggccatccgaaacattgagatgacccaaga

SEQ ID NO: 384632 - DNA, 120 bp, Artificial Sequence
  ENSG00000144028_17 (sequence is synthesized)
ggatgtccgactcattggtctcagtgccaccctacccaactatgaagatgtagccacctttctacgtgttgaccctgccaagggtctcttttactttgacaacagcttccgtccagtgcc

SEQ ID NO: 384633 - DNA, 120 bp, Artificial Sequence
  ENSG00000144028_18 (sequence is synthesized)
tctggaacagacatatgtgggtatcacagagaaaaaagctatcaagcgtttccagatcatgaatgaaatcgtctatgaaaaaatcatggaacatgctggaaaaaatcaggtgctggtgtt

SEQ ID NO: 384634 - DNA, 120 bp, Artificial Sequence
  ENSG00000144028_19 (sequence is synthesized)
tgtccactcccggaaggagactggaaagacagccagggccatccgggacatgtgcctagaaaaggacactctgggtctgtttctgagggagggctcagcctccacagaagtcctgcgaac

SEQ ID NO: 384635 - DNA, 120 bp, Artificial Sequence
  ENSG00000144028_20 (sequence is synthesized)
agaagctgagcagtgcaagaacctagagctgaaggatcttctgccttatggctttgctattcatcacgcaggcatgaccagggttgaccgaacactcgtggaggatctttttgctgataa

SEQ ID NO: 384636 - DNA, 120 bp, Artificial Sequence
  ENSG00000144028_21 (sequence is synthesized)
acatattcaggttttagtttccacagcaactctagcttggggtgtgaatctccctgcacatacagtcatcatcaaaggcacccaggtgtacagtccagagaaggggcgttggacagaact

SEQ ID NO: 384637 - DNA, 120 bp, Artificial Sequence
  ENSG00000144028_22 (sequence is synthesized)
gggagcactggacattctgcagatgctgggacgtgccggaagaccccagtatgacaccaagggtgaaggcatactcatcacatctcatggggagctacagtactacctgtccctcctcaa

SEQ ID NO: 384638 - DNA, 120 bp, Artificial Sequence
  ENSG00000144028_23 (sequence is synthesized)
tcaacaacttcctattgaaagccagatggtttcaaagcttcctgacatgctcaatgcagaaatcgtgctaggaaatgtccagaatgccaaggatgcggtgaactggctgggctatgccta

SEQ ID NO: 384639 - DNA, 120 bp, Artificial Sequence
  ENSG00000144028_24 (sequence is synthesized)
cctctatatccgaatgctgcgatccccaaccctctatggcatctctcatgatgacctcaagggagatcccctgctggaccagcgccgactagatctggttcatacagctgccctgatgct

SEQ ID NO: 384640 - DNA, 120 bp, Artificial Sequence
  ENSG00000144028_25 (sequence is synthesized)
ggacaagaacaatctggtcaagtacgacaagaagacgggcaacttccaggtgacagaactgggccgtatagccagccactactacatcaccaatgatacagtgcagacttacaaccagct

SEQ ID NO: 384641 - DNA, 120 bp, Artificial Sequence
  ENSG00000144028_26 (sequence is synthesized)
gctgaagcccaccctgagtgagattgagcttttcagggtcttctcattgtcctctgagttcaagaacatcacagtgagagaggaggagaagctggagctgcagaagttgctggagagggt

SEQ ID NO: 384642 - DNA, 120 bp, Artificial Sequence
  ENSG00000144028_27 (sequence is synthesized)
gcctatccctgtaaaggagagcattgaggaacccagtgctaagatcaacgttcttctgcaagccttcatctcacagctgaaattggagggctttgcactgatggctgacatggtgtatgt

SEQ ID NO: 384643 - DNA, 120 bp, Artificial Sequence
  ENSG00000144028_28 (sequence is synthesized)
cacacagtcggctggccggttgatgcgagcgatatttgaaattgtcctgaaccgaggttgggcacagcttacagacaagaccctgaacctctgcaagatgatcgacaaacgcatgtggca

SEQ ID NO: 384644 - DNA, 120 bp, Artificial Sequence
  ENSG00000144028_29 (sequence is synthesized)
ggagcttatccgcatgccaaagatggggaagaccatccacaaatatgtccatctgtttcccaagttggagttgtcagtgcacctgcagcctatcacacgctccaccctgaaggtggagct

SEQ ID NO: 384645 - DNA, 120 bp, Artificial Sequence
  ENSG00000144028_30 (sequence is synthesized)
gaccatcacgccagacttccagtgggatgaaaaggtgcatggttcatccgaggctttttggattctggtggaggatgtggacagcgaggtgattctgcaccatgagtattttctcctcaa

SEQ ID NO: 384646 - DNA, 120 bp, Artificial Sequence
  ENSG00000144028_31 (sequence is synthesized)
ggccaagtacgcccaggacgagcacctcattacattcttcgtgcctgtctttgaaccgctgccccctcagtacttcatccgagtggtgtctgaccgctggctctcttgtgagacccagct

SEQ ID NO: 384647 - DNA, 120 bp, Artificial Sequence
  ENSG00000144028_32 (sequence is synthesized)
gcctgtctccttccggcacctgatcttgccggagaagtacccccctccaaccgaacttttggacctgcagcccttgcccgtgtctgctctgagaaacagtgcctttgagagtctttacca

SEQ ID NO: 384648 - DNA, 120 bp, Artificial Sequence
  ENSG00000144028_33 (sequence is synthesized)
agataaatttcctttcttcaatcccatccagacccaggtgtttaacactgtatacaacagtgacgacaacgtgtttgtgggggcccccacgggcagcgggaagactatttgtgcagagtt

SEQ ID NO: 384649 - DNA, 120 bp, Artificial Sequence
  ENSG00000144028_34 (sequence is synthesized)
tgccatcctgcgaatgctgctgcagagctcggaggggcgctgtgtgtacatcacccccatggaggccctggcagagcaggtatacatggactggtacgagaagttccaggacaggctcaa

SEQ ID NO: 384650 - DNA, 120 bp, Artificial Sequence
  ENSG00000144028_35 (sequence is synthesized)
caagaaggtggtactcctgacaggcgagaccagcacagacctgaagctgctgggcaaagggaacattatcatcagcacccctgagaagtgggacatactttcccggcgatggaagcagcg

SEQ ID NO: 384651 - DNA, 120 bp, Artificial Sequence
  ENSG00000144028_36 (sequence is synthesized)
caagaacgtgcagaacatcaacctcttcgtggtggatgaggtccaccttatcgggggcgagaatgggcctgtcttagaagtgatctgctcccgaatgcgctacatctcctcccagattga

SEQ ID NO: 384652 - DNA, 120 bp, Artificial Sequence
  ENSG00000144028_37 (sequence is synthesized)
gcggcccattcgcattgtggcactcagctcttcgctctccaatgccaaggatgtggcccactggctgggctgcagtgccacctccaccttcaacttccatcccaatgtgcgtcccgtccc

SEQ ID NO: 384653 - DNA, 120 bp, Artificial Sequence
  ENSG00000144028_38 (sequence is synthesized)
cttggagctgcacatccagggcttcaacatcagccatacacaaacccgcctgctctccatggccaagcctgtgtaccatgctatcaccaagcactcgcccaagaagcctgtcattgtctt

SEQ ID NO: 384654 - DNA, 120 bp, Artificial Sequence
  ENSG00000144028_39 (sequence is synthesized)
tgtgccgtctcgcaagcagacccgcctcactgccattgacatcctcaccacctgtgcagcagacatccaacggcagaggttcttgcactgcaccgagaaggatctgattccgtacctgga

SEQ ID NO: 384655 - DNA, 120 bp, Artificial Sequence
  ENSG00000144028_40 (sequence is synthesized)
gaagctaagtgacagcacgctcaaggaaacgctgctaaatggggtgggctacctgcatgaggggctcagccccatggagcgacgcctggtggagcagctcttcagctcaggggctatcca

SEQ ID NO: 384656 - DNA, 120 bp, Artificial Sequence
  ENSG00000144028_41 (sequence is synthesized)
ggtggtggtggcttctcggagtctctgctggggcatgaacgtggctgcccacctggtaatcatcatggatacccagtactacaatggcaagatccacgcctatgtggattaccccatcta

SEQ ID NO: 384657 - DNA, 120 bp, Artificial Sequence
  ENSG00000144028_42 (sequence is synthesized)
tgacgtgcttcagatggtgggccacgccaaccgccctttgcaggacgatgaggggcgctgtgtcatcatgtgtcagggctccaagaaggatttcttcaagaagttcttatatgagccatt

SEQ ID NO: 384658 - DNA, 120 bp, Artificial Sequence
  ENSG00000144028_43 (sequence is synthesized)
gccagtagaatctcacctggaccactgtatgcatgaccacttcaatgctgagatcgtcaccaagaccattgagaacaagcaggatgctgtggactacctcacctggacctttctgtaccg

SEQ ID NO: 384659 - DNA, 120 bp, Artificial Sequence
  ENSG00000144028_44 (sequence is synthesized)
ccgcatgacacagaaccccaattactacaacctgcagggcatctcccatcgtcacttgtcggaccacttgtcagagctggtggagcagaccctgagtgacctggagcagtccaagtgcat

SEQ ID NO: 384660 - DNA, 120 bp, Artificial Sequence
  ENSG00000144028_45 (sequence is synthesized)
cagcatcgaggacgagatggacgtggcgcctctgaacctaggcatgatcgccgcctactattacatcaactacaccaccattgagctcttcagcatgtccctcaatgccaagaccaaggt

SEQ ID NO: 384661 - DNA, 120 bp, Artificial Sequence
  ENSG00000144028_46 (sequence is synthesized)
gcgagggcttatcgagatcatctccaatgcagcagagtatgagaacattcccatccggcaccatgaagacaatctcctgaggcagttggctcagaaggtcccccacaagctgaataaccc

SEQ ID NO: 384662 - DNA, 120 bp, Artificial Sequence
  ENSG00000144028_47 (sequence is synthesized)
taagttcaatgatccgcacgtcaagaccaacctgctcctgcaggctcacttgtctcgcatgcagctgagtgctgagttgcagtcagatacggaggaaatccttagtaaggcaatccggct

SEQ ID NO: 384663 - DNA, 120 bp, Artificial Sequence
  ENSG00000144028_48 (sequence is synthesized)
catccaggcctgcgtggatgtcctttccagcaatgggtggctcagccctgctctggcagctatggaactggcccagatggtcacccaagccatgtggtccaaggactcatacctgaagca

SEQ ID NO: 384664 - DNA, 120 bp, Artificial Sequence
  ENSG00000144028_49 (sequence is synthesized)
gctgccacacttcacctctgagcatatcaaacgttgcacagacaagggagtggagagtgttttcgacatcatggagatggaggatgaagaacggaacgcgttgcttcagctgactgacag

SEQ ID NO: 384665 - DNA, 120 bp, Artificial Sequence
  ENSG00000144028_50 (sequence is synthesized)
ccagattgcagatgtggctcgcttttgtaaccgctaccctaatatcgaactatcttatgaggtggtagataaggacagcatccgcagtggcgggccagttgtggtgctggtgcagctgga

SEQ ID NO: 384666 - DNA, 120 bp, Artificial Sequence
  ENSG00000144028_51 (sequence is synthesized)
gcgagaggaggaagtcacaggccctgtcattgcgcctctcttcccgcagaaacgtgaagagggctggtgggtggtgattggagatgccaagtccaatagcctcatctccatcaagaggct

SEQ ID NO: 384667 - DNA, 120 bp, Artificial Sequence
  ENSG00000144028_52 (sequence is synthesized)
gaccttgcagcagaaggccaaggtgaagttggactttgtggccccagccactggtgcccacaactacactctgtacttcatgagtgacgcttacatgggatgtgaccaggagtacaaatt

SEQ ID NO: 384668 - DNA, 120 bp, Artificial Sequence
  ENSG00000144028_53 (sequence is synthesized)
cagcgtggatgtgaaagaagctgagacagacagtgattcagattgagtcctgaggcatttacttttgggtaaaggagagttgagcctgaattaggaatgtgtacattgtaggaatcctgg

SEQ ID NO: 384669 - DNA, 120 bp, Artificial Sequence
  ENSG00000144028_54 (sequence is synthesized)
ttgtggggaccaggtctgtgggcctcaggtctggccagccagggctggtgctgtccccgcctacctccacttcctttcccttgctcactctggatccagtgacagcaggtgtcatgggtc

SEQ ID NO: 384670 - DNA, 120 bp, Artificial Sequence
  ENSG00000144028_55 (sequence is synthesized)
aagcataaatcatatatagcattttcaggcatgttcctggtagttcttttgagtctgacattctaataaaataatttgtagaaaccatttgtctttgtagtgattccaaattaaaagttt

SEQ ID NO: 384671 - DNA, 120 bp, Artificial Sequence
  ENSG00000144028_56 (sequence is synthesized)
tctttctccaacctgagggcacggccaaaaagatctggttattttttagccaggaacgtgcttgttaatgagtatgtctggaggacagacctgctcattaggtgtgctgtcccctgtagc

SEQ ID NO: 384672 - DNA, 120 bp, Artificial Sequence
  ENSG00000144028_57 (sequence is synthesized)
ctcgtgagtcagcccagaggagggtacatgcgactgtggcctggcctcagtggtacccacacatcagcactaccacaagaaccaacactgagcctcggaagctagatcacaggttagggg

SEQ ID NO: 384673 - DNA, 120 bp, Artificial Sequence
  ENSG00000144028_58 (sequence is synthesized)
tttctctagatgggggttctgaaatttgcagtgtctgctcctgggaggcagcaccagaaagggcactgaaatgtactagctggatgtgacccagtcttaataaacaggttttctaatcca

SEQ ID NO: 384674 - DNA, 120 bp, Artificial Sequence
  ENSG00000144028_59 (sequence is synthesized)
ttttgtagcttggttcatggcacttgagcagcaaattcatggcccttacactgaatactaaaatgttatacaggccagccagtgaagctagttgtaagtgcagagattcataaacagagt

SEQ ID NO: 384675 - DNA, 120 bp, Artificial Sequence
  ENSG00000144028_60 (sequence is synthesized)
cgtcccgtgatttgtccgtgtctccccgtattaacattttactcttacttggcgaagggagttgggcttcctgagcatggtctccgtgttgaggtggcttttccttctttccctgcttct

SEQ ID NO: 384676 - DNA, 120 bp, Artificial Sequence
  ENSG00000144028_61 (sequence is synthesized)
agaggctgctatgggattagaacgtagcttgagatctgcaggtcaacaggtctgtttggcatctcaggttttcctcacataagtgaaagatgcctggtatggcctagtgttgttctgcct

SEQ ID NO: 384677 - DNA, 88 bp, Artificial Sequence
  ENSG00000144028_62 (sequence is synthesized)
actcaggaggttgagtctgcagcgagccgagattgccccactgcacaccagcccagaaacgtgaagagggctggtgggtggtgattgg

SEQ ID NO: 384678 - DNA, 120 bp, Artificial Sequence
  ENSG00000144028_63 (sequence is synthesized)
ggtggatgaggtccaccttatcgggggcgagaatggggtatggcgtgaccttgcagcacagatgagggactgggactgaccaagtggccttggcattggacctaatgtttgggtctgagg

SEQ ID NO: 384679 - DNA, 120 bp, Artificial Sequence
  ENSG00000144028_64 (sequence is synthesized)
acggaggctcggggcttctccccagaggattctacctgctgccctattccaaagggacaatgttaacttttttggtagtactttaggaaaacagtattgtttagtggaggttggctgccg

SEQ ID NO: 384680 - DNA, 120 bp, Artificial Sequence
  ENSG00000144028_65 (sequence is synthesized)
tggaggaggtagaaccaaacacatgagagctcctagttagaaggaagaatgaggtcattttgaggctgttgggctgttcacaaaggggacctccaggcagaggatgggagccttggcctg

SEQ ID NO: 384681 - DNA, 120 bp, Artificial Sequence
  ENSG00000144028_66 (sequence is synthesized)
gtggtgttaaacttgaggggtgcgggtggcagtgttttctctacagcataccagagattttcaaaatactgtttaggactcttggctgttaactcatttgatcctcccaagaacctcgtg

SEQ ID NO: 384682 - DNA, 120 bp, Artificial Sequence
  ENSG00000144028_67 (sequence is synthesized)
aggcaggtgagacaaacactatccctacttgccaggtgagaaaacaggcagacacatcaggttgtgctatttcagaacctggttttctagagtccaggacctttggccaccagaccgctg

SEQ ID NO: 384683 - DNA, 120 bp, Artificial Sequence
  ENSG00000144028_68 (sequence is synthesized)
tgctataaagaaatacctgatactgggtcatttataaagaaaggaggtttaattgactcagttctgcaggctgtacatgaaacatggtgttatctgcttctgggaaggcctcagggaagg

SEQ ID NO: 384684 - DNA, 120 bp, Artificial Sequence
  ENSG00000144028_69 (sequence is synthesized)
caaaggggaagcaggcatcttatatggcaggagtcaggaccgagagagtgagtggggaggtgctacacacttttgaacaaccagatctcgtgagaactcattcactagacagtaccaagg

SEQ ID NO: 384685 - DNA, 120 bp, Artificial Sequence
  ENSG00000144028_70 (sequence is synthesized)
gtgggtggtgctaaaccattcatgagaactctgcctccattagccagtcatctcccaccaggcccttcctccaacactggagactacaggtcgacgagatttggtggagacacagatcca

SEQ ID NO: 384686 - DNA, 120 bp, Artificial Sequence
  ENSG00000144028_71 (sequence is synthesized)
aaccgtctcaccaagatagttagactttagagattagcacagaggagagctctgattctcccttgagctcactcttgctggccactgtctcttgttgccctgtggcattttgtgcaaaga

SEQ ID NO: 384687 - DNA, 120 bp, Artificial Sequence
  ENSG00000144028_72 (sequence is synthesized)
tttacgttttaatactgtttattggagcctcattggagattcttctgccagaatcacttcctgtcactctttggcccttgaatctgcctgtttggggcatgcttagagtgatctctgttt

SEQ ID NO: 384688 - DNA, 120 bp, Artificial Sequence
  ENSG00000144028_73 (sequence is synthesized)
tgctggcatggctgagccagcccgtggctgcatgagtgttagcactttctggtcagaggagcagtccatcagctgtagttttgccttggtgttcctgggctttgggttctgttctatgat

SEQ ID NO: 384689 - DNA, 120 bp, Artificial Sequence
  ENSG00000144028_74 (sequence is synthesized)
gacttgttttctcctggatagtcccagagcaaggcaccagcagcgtggagctacctcatagcaatgtgttagctctcattcatgttagaccttgttcctagccagccttgctgtgagttc

SEQ ID NO: 384690 - DNA, 120 bp, Artificial Sequence
  ENSG00000144028_75 (sequence is synthesized)
cagacctccttcctaaaatgaatgtgaatctgcagatacacagaaagtaagctaggatgaagaaaaggtgttagggaagttaacagctgagatgccaccagagccaagtgtttgagagtt

SEQ ID NO: 384691 - DNA, 120 bp, Artificial Sequence
  ENSG00000144028_76 (sequence is synthesized)
ttgtgtctcaatacctaggctcacatttgctttttagtcattgtgcttccttattcagcagctgggagaggtaggaaattagagccaggaggaatgtttgacgttacgtcattaatctca

SEQ ID NO: 384692 - DNA, 120 bp, Artificial Sequence
  ENSG00000144028_77 (sequence is synthesized)
tacgtcattaatctcagacatcttgtagattaggaaaagtgacttggtcgaggtcatacacctatatagtgacaagtaagaagctagaggagtgccgagcgcagtggctcatgcctgtaa

SEQ ID NO: 384693 - DNA, 68 bp, Artificial Sequence
  ENSG00000144028_78 (sequence is synthesized)
gttaaacctgggaggcagaggctacagtgagctgagatcccaccattgcactctagcctgggcaacag

SEQ ID NO: 384694 - DNA, 120 bp, Artificial Sequence
  ENSG00000144028_79 (sequence is synthesized)
ggagaaagagctctgggagcagggcttagagcctcgtctcgcctcctgccaactcggtccggcaaggttccgaacctccctgagcctcagcttcctaatctggcaaacatgacgacaaaa

SEQ ID NO: 384695 - DNA, 120 bp, Artificial Sequence
  ENSG00000144028_80 (sequence is synthesized)
acgtggcgctgtgtcatgtgaatttcccaagaagcatttcatctgtgattccgtatgaaggctttctaagccctgaaatttgcagggtcatttcctcagtttgtgtattaaagaaaagct

SEQ ID NO: 384696 - DNA, 120 bp, Artificial Sequence
  ENSG00000144028_81 (sequence is synthesized)
cttggatccgtagcctcagaatggattctttaatctttcttttgatagatgtcttcagtaactttagtctcttaacttctgcctctcttatttacacaattcttttgtgacgagcctgcc

SEQ ID NO: 384697 - DNA, 120 bp, Artificial Sequence
  ENSG00000144028_82 (sequence is synthesized)
acccacatggaattttgctgccttttgcttttgctgctgccgttggctccacgtgttgaggtcttcaccctctacttggttctctccttcctccttgggctgctcactgctctgccctcg

SEQ ID NO: 384698 - DNA, 120 bp, Artificial Sequence
  ENSG00000144029_0 (sequence is synthesized)
gcggctcggactccagcatggcgaccgcggtgcgcgctgtgggctgcctccccgtgctgtgtagcgggacggcaggtcatttattggggaggcagtgttccctaaacaccttaccagcag

SEQ ID NO: 384699 - DNA, 120 bp, Artificial Sequence
  ENSG00000144029_1 (sequence is synthesized)
cttccattttggcatggaagagtgttctcggcaatggccatttgtcatcactgggaaccagagacacccatccctacgccagcttgagccgtgcactgcagacacaatgctgtatttctt

SEQ ID NO: 384700 - DNA, 120 bp, Artificial Sequence
  ENSG00000144029_2 (sequence is synthesized)
ctcccagtcacctgatgagccagcagtatagaccatatagtttcttcactaaattgactgcagatgagctgtggaaaggcgctttagcagagactggtgctggagcaaaaaaaggaagag

SEQ ID NO: 384701 - DNA, 120 bp, Artificial Sequence
  ENSG00000144029_3 (sequence is synthesized)
gcaaaagaactaaaaagaagaaaagaaaggatctgaacaggggtcagatcattggtgaagggcgttatggttttctatggcccggactgaatgtccctcttatgaaaaatggagcagtgc

SEQ ID NO: 384702 - DNA, 120 bp, Artificial Sequence
  ENSG00000144029_4 (sequence is synthesized)
agaccattgcccaaagaagcaaggaagagcaggagaaggtggaggcagacatgatccagcagagagaagagtgggaccgaaagaagaagatgaaggttaaacgggagcgaggatggagtg

SEQ ID NO: 384703 - DNA, 120 bp, Artificial Sequence
  ENSG00000144029_5 (sequence is synthesized)
gaaactcatggggaggcatcagtcttggcccccctgaccctggtccctgtggagaaacatatgaggattttgataccaggatacttgaggtaagaaacgttttcactatgactgcgaaag

SEQ ID NO: 384704 - DNA, 120 bp, Artificial Sequence
  ENSG00000144029_6 (sequence is synthesized)
agggaagaaagaaatcgatccgtgtcttggtggctgtggggaacggaaaaggagctgcaggtttttctattgggaaagctactgatcggatggatgctttcaggaaagcaaagaacagag

SEQ ID NO: 384705 - DNA, 120 bp, Artificial Sequence
  ENSG00000144029_7 (sequence is synthesized)
cagttcaccatttgcattatatagaacgatatgaagaccatacaatattccatgatatttcattaagatttaaaaggacgcatatcaagatgaagaaacaacccaaaggttacggcctcc

SEQ ID NO: 384706 - DNA, 120 bp, Artificial Sequence
  ENSG00000144029_8 (sequence is synthesized)
gctgccacagggccatcatcaccatctgccggctcattggcatcaaagacatgtatgccaaggtctctgggtccattaatatgctcagcctcacccagggcctcttccgtgggctctcca

SEQ ID NO: 384707 - DNA, 120 bp, Artificial Sequence
  ENSG00000144029_9 (sequence is synthesized)
gacaggaaacccatcaacagctggctgataagaagggcctccatgttgtggaaatccgggaggaatgtggccctctgcccattgtggttgcgtccccccgggggcccttgaggaaggatc

SEQ ID NO: 384708 - DNA, 120 bp, Artificial Sequence
  ENSG00000144029_10 (sequence is synthesized)
cagagccagaagatgaggttccagacgtcaaactggactgggaagatgtgaagactgcacagggaatgaagcgctctgtgtggtctaatttgaagagagccgccacgtaacctctctggc

SEQ ID NO: 384709 - DNA, 120 bp, Artificial Sequence
  ENSG00000144029_11 (sequence is synthesized)
cttgtgcagccagttcctgtgctgccctgcacctaggagagactcagcccctcacagcttgggatgttaccttgccttttgtttgttttgagggaagtttaatctttaaactctttggaa

SEQ ID NO: 384710 - DNA, 120 bp, Artificial Sequence
  ENSG00000144029_12 (sequence is synthesized)
ataaataattatagctttcatttgttgagcacatgttatatgccaatgtgatagaacctttacatacatatctcagttcaagactactttaaatattcatccaaagtaacaaaagtaaat

SEQ ID NO: 384711 - DNA, 120 bp, Artificial Sequence
  ENSG00000144029_13 (sequence is synthesized)
attgctgtagtaattatagctaatatatatgaactcattcatccaaagtgaatgtgattaacttcattttacagagcagttaagtaacttgactaccgtgaggaacttccaaaccgtttt

SEQ ID NO: 384712 - DNA, 120 bp, Artificial Sequence
  ENSG00000144029_14 (sequence is synthesized)
ccacagtggaaatggaagttgtaggctactattgggaatgttaaatggtatattaattgtataccattgcaattttgacttgtatttccctgatggctgatgatgttgaacatcttttca

SEQ ID NO: 384713 - DNA, 120 bp, Artificial Sequence
  ENSG00000144029_15 (sequence is synthesized)
tgtgctgattggccatttgtatatgttttttggagaaatgtctattcagagcctttgcccatttaaaaagttattttttattattattgagttccttatagtttctagatataagccccc

SEQ ID NO: 384714 - DNA, 120 bp, Artificial Sequence
  ENSG00000144029_16 (sequence is synthesized)
ctatcatacatgctttacagaagtttttacccattctgtggaatatatatatttttatttctttgcatactctttctgccccacccacatcctctttctgggacactgatgaccaaaatg

SEQ ID NO: 384715 - DNA, 120 bp, Artificial Sequence
  ENSG00000144029_17 (sequence is synthesized)
ttgaatcttttactattgtcccgtgagtccctgaggcgctgtttattttttttccagtctgttttctctgtgttgctcagtttaggtaatttctattgttttatcttcagaataactggt

SEQ ID NO: 384716 - DNA, 120 bp, Artificial Sequence
  ENSG00000144029_18 (sequence is synthesized)
tatttactctttcctttccattctgctcttgaaccatccatgcagtactttaactttgactgtcattgtatatttcagttaaaatttccatttggtttattttttatgtcttctctttat

SEQ ID NO: 384717 - DNA, 120 bp, Artificial Sequence
  ENSG00000144029_19 (sequence is synthesized)
ttgctgaggctatttgctgagactttttttttctttaaatggcttcaagagtgtttataattgctcactgaagcatttttatggtggctgctttaaaatctttgtcatcaggtaggtgtg

SEQ ID NO: 384718 - DNA, 90 bp, Artificial Sequence
  ENSG00000144029_20 (sequence is synthesized)
atggtggctgctttaaaatctttgtcatcaggtaggtgtggtggctcacgcctataaccccagcactttgtgaaggtgaggcatcagcct

SEQ ID NO: 384719 - DNA, 120 bp, Artificial Sequence
  ENSG00000144029_21 (sequence is synthesized)
ggtggtgtatgcctgtagtcccagctacataggaggctgaagtgggaggatcatttgattgcaggaggttgaggctgcagtgagccttgttcatgccactccagcctgggtggcagagtg

SEQ ID NO: 384720 - DNA, 120 bp, Artificial Sequence
  ENSG00000144029_22 (sequence is synthesized)
agaccttgtctccaaaaaaaaaaaaaaaattgtcataaagtttcaacatctgtgtcatcttagtgttgacatcccttgaggttttttctcattcaagtttacaatgtcctagttcttgtt

SEQ ID NO: 384721 - DNA, 120 bp, Artificial Sequence
  ENSG00000144029_23 (sequence is synthesized)
gtttacaatgtcctagttcttgttatgatgagtgactttggctgtatcctggtcatcttcactgttatgaagctctgggagttatttaaatctctcagcatgcttcctctgacggtgctg

SEQ ID NO: 384722 - DNA, 120 bp, Artificial Sequence
  ENSG00000144029_24 (sequence is synthesized)
gtatgggatggggcactgcctcgttactgcctggtgaggatggagatccaggtttcctcctgtcgctgtcctcgggacctctgctgaggcctttctgctggaagtaggaggagcacccta

SEQ ID NO: 384723 - DNA, 120 bp, Artificial Sequence
  ENSG00000144029_25 (sequence is synthesized)
atggcaccgtgggatagggagcaggccatgttaggctggatggtgaaagttttcagcctgtgacgttgtctggtgtgggtgggtcccctttttttgtgtgtggtattttgctagagtaag

SEQ ID NO: 384724 - DNA, 120 bp, Artificial Sequence
  ENSG00000144029_26 (sequence is synthesized)
gtagttatttcctaaaacttatctgtcctgttagttttccttcttaagtacctaacaaatataaagacaatgaactttaagcaataaaagacaatgatcctttggagaggggaaacaaaa

SEQ ID NO: 384725 - DNA, 120 bp, Artificial Sequence
  ENSG00000144029_27 (sequence is synthesized)
actgagtttatgaacttaactggtggagcagtctctagtgatgaggggtgactggggcatggccttgagagtgggaccaaaagatctgagattctttctccccgaaaggtctgtgatggt

SEQ ID NO: 384726 - DNA, 120 bp, Artificial Sequence
  ENSG00000144029_28 (sequence is synthesized)
gcctgtgttgaaaatgctttcatgttaattgtgtacacacatttcatctgtatccctgtttcttttctccctacagaaacatatgaggattttgataccaggatacttgaggtttttcta

SEQ ID NO: 384727 - DNA, 90 bp, Artificial Sequence
  ENSG00000144029_29 (sequence is synthesized)
gatatgagtgtggaagggcctttgctcatactgcatcccttattaaacatcagagaagtcatgctggaaaaaaaaccctataaattcagt

SEQ ID NO: 384728 - DNA, 120 bp, Artificial Sequence
  ENSG00000144029_30 (sequence is synthesized)
cagagaagtcatgctggaaaaaaaaccctataaattcagtgaatatagaagggctttcagctggagtgcagacatcactggaacttaaagaattcatatcagagagagatcctaaaggtg

SEQ ID NO: 384729 - DNA, 120 bp, Artificial Sequence
  ENSG00000144029_31 (sequence is synthesized)
atccatactagtgagaaaccacgtgaatgtaatgaatgtgggaacgctttgatcagaggatgcatattattcagcatcagacagccgacactggggaggagccttatcaatgcagtgagt

SEQ ID NO: 384730 - DNA, 120 bp, Artificial Sequence
  ENSG00000144029_32 (sequence is synthesized)
gtggcaagccttcagttacatactgattctttaagaaaatcagataacttgtactggagagaaatcctacaagtgtggtcatttattggggaggcagtgttccctaaacaccttaccagc

SEQ ID NO: 384731 - DNA, 120 bp, Artificial Sequence
  ENSG00000144029_33 (sequence is synthesized)
ctcccacctcagcctcctaaagtgctgagattacggatgtgaatcattacacccagcctattaatggttttgtatagcaagtcttttgtgggtggtggaaagatgaagtgctgtgaaata

SEQ ID NO: 384732 - DNA, 120 bp, Artificial Sequence
  ENSG00000144029_34 (sequence is synthesized)
ggaaagatgaagtgctgtgaaatattgtaggagcagaaacttgaaatgtggcaaaaaccacatgggcaaaatttctgtctcttttcttatttttgcttttttgtttaaaggtttttctat

SEQ ID NO: 384733 - DNA, 120 bp, Artificial Sequence
  ENSG00000144029_35 (sequence is synthesized)
cagtagaggctgcagagcagcaaatattgcagaagagcaaatattactgcctgatccttcctctggaatctacgtctcagagggacacctggctgtatgaggtgtcggtcggtccctagt

SEQ ID NO: 384734 - DNA, 73 bp, Artificial Sequence
  ENSG00000144029_36 (sequence is synthesized)
agaagtttctgctgccttttgtttagctatgccctgtgcacagaggtggagtctacagaggcaggtgggcctc

SEQ ID NO: 384735 - DNA, 120 bp, Artificial Sequence
  ENSG00000144029_37 (sequence is synthesized)
ctcagcaatggcggacacccctcccctagccagggctgctgcctcacagtttgatctcggactgctgcgctagcagtgagcaaggttccatgggcgtgggacctgctgagccatgcctgg

SEQ ID NO: 384736 - DNA, 120 bp, Artificial Sequence
  ENSG00000144029_38 (sequence is synthesized)
gatataatctcctggtgtgccgtttgctaccaccattggaaagacacagtatttaggtggcagtgtcccggttttcccggtacagtctgtcacagcttcccttggctaggcaagggaaat

SEQ ID NO: 384737 - DNA, 120 bp, Artificial Sequence
  ENSG00000144029_39 (sequence is synthesized)
gtctgtcacagcttcccttggctaggcaagggaaatccctggaccacttgtgcttcccgggtgaggcgatgccctgccctgctccatgggcagcacccactgtccaaccagtcccagtga

SEQ ID NO: 384738 - DNA, 120 bp, Artificial Sequence
  ENSG00000144029_40 (sequence is synthesized)
aatgcagaaatcacctgtcttctgcgtcagtcacactgggagctgcagactggagctgttactattcggccatcttggaacggaatcctattcaaatgactgctgtaattttaatttaat

SEQ ID NO: 384739 - DNA, 120 bp, Artificial Sequence
  ENSG00000144029_41 (sequence is synthesized)
tgactgctgtaattttaatttaattgaagaacctaccttttaaaatctttcctgtcttctaatcaaagctgtatttttcaggtttttgtatgatctagaccattacctatgtatcggggt

SEQ ID NO: 384740 - DNA, 120 bp, Artificial Sequence
  ENSG00000144029_42 (sequence is synthesized)
taatattctgattttgaagctaaaacagtatataatacttttagacgtttcctgaatacatacacatttatagacattttgtacatacgtgtacaaataggcatttcctaaatgatgtgc

SEQ ID NO: 384741 - DNA, 120 bp, Artificial Sequence
  ENSG00000144029_43 (sequence is synthesized)
ctatgtgttactagttctgtaggagatagaaaaggttttactccaaaaaggatgccagatggcagaactggattaaggaaaggcaccaaaagtatttttgcatctttgtgaatgttgcaa

SEQ ID NO: 384742 - DNA, 120 bp, Artificial Sequence
  ENSG00000144029_44 (sequence is synthesized)
tctttaatgcactgccatgcaatatgaatctcccaagagaaatggagggtgtggtgttcccaaatgtatttaaccatggaacacttctacttcggctatagaacagtattcagttccaca

SEQ ID NO: 384743 - DNA, 120 bp, Artificial Sequence
  ENSG00000144029_45 (sequence is synthesized)
cacagcactgcaaaactttgccatatttattaaacaagtgttttttgacagtctgtgcctggaaggtagtcaaatcattaccatcggactatgaccactgtcacgtgggtgtttgtgtat

SEQ ID NO: 384744 - DNA, 120 bp, Artificial Sequence
  ENSG00000144029_46 (sequence is synthesized)
gtgtcacacagtggccagtgttcatgcagtgtctgtgctggtccaggtactgtgtattacacatctcagtgctcatcagcagcactgccaagtaggtgttgtagggagggatcttcttgc

SEQ ID NO: 384745 - DNA, 120 bp, Artificial Sequence
  ENSG00000144029_47 (sequence is synthesized)
cacagtcattcagcgagcagtggcagggtagaggctgcctctcagctccttccagaatctgcatgatacccccttccacgtgtacctctctctaggtgtgtgcacaccagtgctcatcca

SEQ ID NO: 384746 - DNA, 120 bp, Artificial Sequence
  ENSG00000144029_48 (sequence is synthesized)
attgtgacctgtctttagctatccccttaagttcttgcatgctctggcataattatggaggccacagttcattggccctttcaagtagaaggaatagtttttgaccataaaaagtcaaac

SEQ ID NO: 384747 - DNA, 120 bp, Artificial Sequence
  ENSG00000144029_49 (sequence is synthesized)
tagaaagccattaatgtccaacttccagagtagattttctgccttggagcagaagaggtgtgtgccgagttttatgtctggcaaataatgttagaggccaaacttgggccctgcagctcc

SEQ ID NO: 384748 - DNA, 120 bp, Artificial Sequence
  ENSG00000144029_50 (sequence is synthesized)
ctcactccacctgcatttgccaggtactgctctgggctctggggacaccgcggtaaacaatatcctggccctcatgggagccatcttctactcaggggaagcattggataaacaggtttc

SEQ ID NO: 384749 - DNA, 120 bp, Artificial Sequence
  ENSG00000144029_51 (sequence is synthesized)
gttgagtgccctaatcagggtactgtgttagagtaggagggaggaaggcagaaggaaggatgccaccttgaatagcatggtcacagaaggcctgtctgaagaggagcaatttgagtggga

SEQ ID NO: 384750 - DNA, 120 bp, Artificial Sequence
  ENSG00000144029_52 (sequence is synthesized)
ccttgaaggtgagaaggagccaagggggcagagctgggaggacattccaggcagagggaatcccaagtgcagtccttaaggtgaggaagccagcaggaggtggcgtgtctctagatgagg

SEQ ID NO: 384751 - DNA, 120 bp, Artificial Sequence
  ENSG00000144029_53 (sequence is synthesized)
tcagggaggtgggcgggcaggactcaggcacagaaggctctgaataggccatggtgctctttatattaatctcgagaacagtgggaaggagggatctttaaatggggagcaacttgtttg

SEQ ID NO: 384752 - DNA, 120 bp, Artificial Sequence
  ENSG00000144029_54 (sequence is synthesized)
gtttgtgtttttaaagctctctggagaaggaattacaggcagaaaagggtagggccagtggctggaggggagaccccccaagatttagaggccagcaaggaggagaggacaggccaatag

SEQ ID NO: 384753 - DNA, 120 bp, Artificial Sequence
  ENSG00000144029_55 (sequence is synthesized)
ctaggaggaaatccaggagaggatgtgttaccaaaacgaaaagaggagcttcttcaggaggaggaagtggaccctctgctcagggcaacggaactatcaaggagggtgagaagagacgtg

SEQ ID NO: 384754 - DNA, 120 bp, Artificial Sequence
  ENSG00000144029_56 (sequence is synthesized)
tccctccatccttagttaaatgagtctggggtgccaagaattttcatgcatgtttattaatctcaataacaatcctgtttttttgccctcaaaatgtgttcaagatatttgtagatgtca

SEQ ID NO: 384755 - DNA, 120 bp, Artificial Sequence
  ENSG00000144029_57 (sequence is synthesized)
tcttcttaatccttgtagtatcctgtttgagtaagtgtcatcttggaagttaagtaagttgtcaagggtcagctcactaggaagtggtgataccagaatatgaaccagtttcccgaagcc

SEQ ID NO: 384756 - DNA, 120 bp, Artificial Sequence
  ENSG00000144029_58 (sequence is synthesized)
tggcacgggccatgctgtggagcccatgggctcatgctgctggccggactttttccattgattaaaccttttagtggtttgggttcacaaagcttgtggtaagtccatgacttcccttag

SEQ ID NO: 384757 - DNA, 120 bp, Artificial Sequence
  ENSG00000144029_59 (sequence is synthesized)
agagaaaagagagaatagattctactgtacttgccttttcctctgaggaaaaggaatattataaaaggctgaagacattattttattatgtataatagtggaaaattagggagaaaaact

SEQ ID NO: 384758 - DNA, 120 bp, Artificial Sequence
  ENSG00000144029_60 (sequence is synthesized)
acacaaaaacgttatataagaccatataaaatcctagttttgtttttttcttttttaaaagtatatttatgtgccaagaaaagactggaaaactgtacactgtaaaggttaatagtgttt

SEQ ID NO: 384759 - DNA, 120 bp, Artificial Sequence
  ENSG00000144029_61 (sequence is synthesized)
actccaattagtaggtttgctgatgatttaaattttctcctatgtatagttaacatagtggacacctgtttttgaaatgtattcatgtctgttgaaggaaaagaacacaggaaaatggcc

SEQ ID NO: 384760 - DNA, 120 bp, Artificial Sequence
  ENSG00000144029_62 (sequence is synthesized)
tagttagcccatactgacatttaacaaaagtaatacatatatatatagtatgtggccaaaggaaaccaggcctaacagctacttttgtaattttcctaaattttatgttcatattattat

SEQ ID NO: 384761 - DNA, 120 bp, Artificial Sequence
  ENSG00000144029_63 (sequence is synthesized)
catacatctttaaaaaatttacataaagggatcacattatagccataattttgcaccttgattttctgacatagtattatattcagagatattaatactcagattaacataaacattctc

SEQ ID NO: 384762 - DNA, 120 bp, Artificial Sequence
  ENSG00000144031_0 (sequence is synthesized)
ctgagtttcccgggcagcaggactgggaggttgagtgggggttttggctcagaccgggagcagagcggcgggtggggagcggcaggcgggcagggtccccggaggcccccgggctctgcc

SEQ ID NO: 384763 - DNA, 120 bp, Artificial Sequence
  ENSG00000144031_1 (sequence is synthesized)
cctccagctagagaggcagccgaaccctagcggcctggaaggggccgggaaaccgcggccagctggcaaggagtggcccccgggggcggggcgccggcgggtgtgtgagtagcccgcccg

SEQ ID NO: 384764 - DNA, 120 bp, Artificial Sequence
  ENSG00000144031_2 (sequence is synthesized)
gcccgggtccgagttccagccccgcgatggcctccgcgggcagcaccgctcggcgggcgggctccggaagctggcactcagaaaggggagaagggagaggtgctcggccgcagccaactc

SEQ ID NO: 384765 - DNA, 120 bp, Artificial Sequence
  ENSG00000144031_3 (sequence is synthesized)
caagtggctccatgcagcaggcgaacaaagtctccttgaaggccacctggactgacgcggagtccaagcagcccagccagcccctgcccgacctcgcagaccacctcagtgcgcaggcga

SEQ ID NO: 384766 - DNA, 120 bp, Artificial Sequence
  ENSG00000144031_4 (sequence is synthesized)
ctgccctcgccaggccgcgccgccctgcctcgctcaccccgccccgcgctgaccccagccccagcaaggagtccgaccagacggcaatcgaccagacggcgatcgggagctactaccagc

SEQ ID NO: 384767 - DNA, 120 bp, Artificial Sequence
  ENSG00000144031_5 (sequence is synthesized)
tgttcgcagcggctgtgggcaacgtggaatggctgcgattctgtctgaaccagagcctcagggaaatccccaccgacgacaagggcttcactgccatccacttcgccgcccaatggggca

SEQ ID NO: 384768 - DNA, 120 bp, Artificial Sequence
  ENSG00000144031_6 (sequence is synthesized)
agcttgcatgcctgcaggtcctggtagaggagtacaagtttcccgtggacctgctgaccaacaatagccagacacccctgcacctcgtcatccacagggacaacaccaccgtggccctcc

SEQ ID NO: 384769 - DNA, 120 bp, Artificial Sequence
  ENSG00000144031_7 (sequence is synthesized)
cctgcatctactacctgctggagaaaggcgcagacctcaatgctcagacatgcaacggctccacgcccctgcacctggcagcccgtgacggcttgctggactgtgtgaaggtcctggtgc

SEQ ID NO: 384770 - DNA, 120 bp, Artificial Sequence
  ENSG00000144031_8 (sequence is synthesized)
agagtggcgccaacgtccatgcccaagatgccatgggctacaaacccattgacttctgcaaaatatggaaccaccgtgcctgtgcccggttcttgaaggatgccatgtggaaaaaggaca

SEQ ID NO: 384771 - DNA, 120 bp, Artificial Sequence
  ENSG00000144031_9 (sequence is synthesized)
gaaaatgaagatgttcaagagccagctgaccctcatggagcacaactacctgattgagtatcaaggtcaaggatgcagtgtgcacttcccatttgccttttcccccatcacaccagagac

SEQ ID NO: 384772 - DNA, 120 bp, Artificial Sequence
  ENSG00000144031_10 (sequence is synthesized)
tctcctatggcaggacatttctctactatcagactgtggattcctttggagaagaagggaattgtctttctaaagagcacaaaattctcagagaagctgctatcagaaagtggctccacg

SEQ ID NO: 384773 - DNA, 120 bp, Artificial Sequence
  ENSG00000144031_11 (sequence is synthesized)
gcaagctgcacccaggccactctctggtctccaataccaagcaagcccgggccaccgccctctccaagaccccagagcaacgggaatcgcagcgttccaggagcttccacccctctgtgg

SEQ ID NO: 384774 - DNA, 120 bp, Artificial Sequence
  ENSG00000144031_12 (sequence is synthesized)
atgcacgcctgcaatgcattccacagcccacggagatgcccaagcccatctacaggaagcccacggtcaagcggcccacaatgtggaatgttagcaacaaccccgccagaccccccacca

SEQ ID NO: 384775 - DNA, 120 bp, Artificial Sequence
  ENSG00000144031_13 (sequence is synthesized)
cccagatcagccactcgcagggcatccgcctgggcgtgcatccagaccccactccggagcacgacttcagcagcttcctggaggtgaggcctgatgggcacggcggtgcgcggctgcaca

SEQ ID NO: 384776 - DNA, 120 bp, Artificial Sequence
  ENSG00000144031_14 (sequence is synthesized)
cagtggacggccactgggtggcgcccgtgccgcggctgccttttgaggtgctgctgcgcatgctgtacccacgtgtatggccatacagaatgaaggtgccccagggcttttaccccatca

SEQ ID NO: 384777 - DNA, 120 bp, Artificial Sequence
  ENSG00000144031_15 (sequence is synthesized)
gcatgagggaagtgcccaggaagcggcacctgggtgacaacaccttctggaccgacactctggccatgaacctgcgtgacacattcgatgaagccttcctggcagctgtgcgatctcatc

SEQ ID NO: 384778 - DNA, 120 bp, Artificial Sequence
  ENSG00000144031_16 (sequence is synthesized)
aaggactccccaccctgccctccccacaaaccaacccataaagttattatggctacctctccccctgaggcagcccagtgaaggctgaagtgtggcaattcacgttgtgggtggcgagga

SEQ ID NO: 384779 - DNA, 120 bp, Artificial Sequence
  ENSG00000144031_17 (sequence is synthesized)
aagggggaggggtgcctatgggcttcccactcccaagctcgaggagtcacccttcccaatcaaaagcccagaccccaggcctcccttttctctgcaaataaatctcttggcaccccccca

SEQ ID NO: 384780 - DNA, 120 bp, Artificial Sequence
  ENSG00000144031_18 (sequence is synthesized)
gcccaccagccaggcgggggccagggatcgcctcccgagaggtgcccgggccgtggcccagagtcgcttccccactgccccgccctccagccagcccctgcccgacctcgcagaccacct

SEQ ID NO: 384781 - DNA, 120 bp, Artificial Sequence
  ENSG00000144031_19 (sequence is synthesized)
tcctttcctgccctggggcccctggctcctcagcaggagggtggtgaccaggtcatcaaggactttcgtctttcacctaaaggaagtagggagccagagggccccgggcaatggggatgg

SEQ ID NO: 384782 - DNA, 120 bp, Artificial Sequence
  ENSG00000144034_0 (sequence is synthesized)
gtttcggagcgggagctcttccgagacgcactgggggccggatgtagaatcctgcttatctgtgaaatgcagttaacacatcagctggacctatttcccgaatgcagggtaacccttctg

SEQ ID NO: 384783 - DNA, 120 bp, Artificial Sequence
  ENSG00000144034_1 (sequence is synthesized)
ttatttaaagatgtaaaaaatgcgggagacttgagaagaaaggccatggaaggcaccatcgatggatcactgataaatcctacagtgattgttgatccatttcagatacttgtggcagca

SEQ ID NO: 384784 - DNA, 120 bp, Artificial Sequence
  ENSG00000144034_2 (sequence is synthesized)
aggctttgaaaaaatttggtatctcagcaaatgacacttcaattctaattgtttacattgaagagggagaaaaacaaataaatcaagaatacctaatatctcaagtagaaggtcatcagg

SEQ ID NO: 384785 - DNA, 120 bp, Artificial Sequence
  ENSG00000144034_3 (sequence is synthesized)
tttctctgaaaaatcttcctgaaataatgaatattacagaagtcaaaaagatatataaactctcttcacaagaagaaagtattgggacattattggatgctatcatttgtagaatgtcaa

SEQ ID NO: 384786 - DNA, 120 bp, Artificial Sequence
  ENSG00000144034_4 (sequence is synthesized)
caaaagatgttttatgaaatgtcagaaatattaacaaaaattctcagcattaaagaaaacattgattttcctttcctgactataaaactaattgtgcattatagaaaagtttaaatcaca

SEQ ID NO: 384787 - DNA, 120 bp, Artificial Sequence
  ENSG00000144034_5 (sequence is synthesized)
tctctgaaaaatcttcctgaaataatgaatattacagaagtcaaaaagagatgtggtctcactatgttgcccagattggtctcaaaatcctggactcaagtgatgcttctgctgcgcctc

SEQ ID NO: 384788 - DNA, 120 bp, Artificial Sequence
  ENSG00000144034_6 (sequence is synthesized)
aagacggggattggccatcgcttccggaagttgtgagctttgtttcggagcgggagctcttccgagacgcactgggggccggatgaatcctgcttatctgtgaaatgcagttaacacatc

SEQ ID NO: 384789 - DNA, 120 bp, Artificial Sequence
  ENSG00000144034_7 (sequence is synthesized)
tcagcagccaagccatgaggagaagggacatgcgagcagaggacaaagcttgagcacaggcagaagggcatgaaatgtgactggatccccaggcaggctggactggccagaaggcagaag

SEQ ID NO: 384790 - DNA, 120 bp, Artificial Sequence
  ENSG00000144034_8 (sequence is synthesized)
cgcctggctggagggccacttggcaccagagggaggaggtgtttttgtgcagcgccaagaggctgggcttgattccataggaacaaggcgtacctttaagcagggagtgcttttgaggaa

SEQ ID NO: 384791 - DNA, 120 bp, Artificial Sequence
  ENSG00000144034_9 (sequence is synthesized)
gtgccaatggatgttggaaaggaatcattaaagtgaaaaagtaggcagtgagaactgttaggacatgaaaaataagagcctgaccaaggaagaaggcagatcaggaaatgtttcagacgt

SEQ ID NO: 384792 - DNA, 120 bp, Artificial Sequence
  ENSG00000144034_10 (sequence is synthesized)
atttctgttgaccgtgtcataataacatatgtgttcctcagtgttgggttggaggctaaattcctgcaagccagtggttagtaataaacccaaataatagtgaagagagctctggacaga

SEQ ID NO: 384793 - DNA, 120 bp, Artificial Sequence
  ENSG00000144034_11 (sequence is synthesized)
gagttgaggtttaaccctgcctcttactaagacagtttacatatgagtaaacaaaaatttagctaaattaagcgaggttaattttatctgttcttaccatatagggtcaggaagacccct

SEQ ID NO: 384794 - DNA, 120 bp, Artificial Sequence
  ENSG00000144034_12 (sequence is synthesized)
cgtttgcctattgatcaccagagctccttgttttttgaacttttgagaaagttaatctaattttaaaaattacttaaaaattacagatacaaagaactgggaggtgtgatggtttatgta

SEQ ID NO: 384795 - DNA, 120 bp, Artificial Sequence
  ENSG00000144034_13 (sequence is synthesized)
aaatataattacaaactcagctgacataaccattctccacattaagaaagagaatacctttaaatatcaaacttacatagtatatttaaaatgtaaaataaatttagtatgcttttaaaa

SEQ ID NO: 384796 - DNA, 120 bp, Artificial Sequence
  ENSG00000144034_14 (sequence is synthesized)
ggaattacaggcatgagccactgagcccagctggttattgtttctgtttttaaattttttgccttggtgattttatatcctcagttcacctccctctccatacttaccatggctactcca

SEQ ID NO: 384797 - DNA, 120 bp, Artificial Sequence
  ENSG00000144035_0 (sequence is synthesized)
agtctactttccaggggtgagcaagccccagacggtatctcctggatgccagtgagcggctgagagctgaagctccctggacactcaaggctcttgtggtgacagtctgacgtaaaggcg

SEQ ID NO: 384798 - DNA, 120 bp, Artificial Sequence
  ENSG00000144035_1 (sequence is synthesized)
tgcagggaggcctagctctgtctcctggacttagagatttcagacacagaagtctgtccatggctccttgtcacatccgcaaataccaggagagcgaccgccagtgggttgtgggcttgc

SEQ ID NO: 384799 - DNA, 120 bp, Artificial Sequence
  ENSG00000144035_2 (sequence is synthesized)
tctcccgggggatggccgagcatgccccagccaccttccggcaattgctgaagctgcctcgaaccctcatactcttacttggggggcccctcgccctactcctggtctctggatcctggc

SEQ ID NO: 384800 - DNA, 120 bp, Artificial Sequence
  ENSG00000144035_3 (sequence is synthesized)
ttctagccctcgtgttcagcatcagcctcttccctgccctgtggttccttgccaaaaaaccctggacggagtatgtggacatgacattgtgcacagacatgtctgacattaccaaatcct

SEQ ID NO: 384801 - DNA, 120 bp, Artificial Sequence
  ENSG00000144035_4 (sequence is synthesized)
agtgagcgtggctcctgcttctgggtggctgagtctgaagagaaggtggtgggcatggtaggagctctgcctgttgatgatcccaccttgagggagaagcggttgcagctgtttcatctc

SEQ ID NO: 384802 - DNA, 120 bp, Artificial Sequence
  ENSG00000144035_5 (sequence is synthesized)
tttgtggacagtgagcaccgtcgtcaggggatagcaaaagccctggtcaggactgtcctccagtttgcccgggaccagggctacagtgaagttatcctggacaccggcaccatccagctc

SEQ ID NO: 384803 - DNA, 120 bp, Artificial Sequence
  ENSG00000144035_6 (sequence is synthesized)
tctgctatggccctctaccagagcatgggcttcaagaagacgggccagtccttcttctgtgtgtgggccaggctagtggctcttcatacagttcatttcatctaccacctcccttcttct

SEQ ID NO: 384804 - DNA, 120 bp, Artificial Sequence
  ENSG00000144035_7 (sequence is synthesized)
aaggtagggagtctgtgatctctttctgtgtgtattggtcagaatagaatccattcagctgtagcagcaagcaatccccaacctttcactgcaatgacctttcaatgcaataaaagctta

SEQ ID NO: 384805 - DNA, 120 bp, Artificial Sequence
  ENSG00000144035_8 (sequence is synthesized)
ttgtccattcacatctgagtcccatgtgattgcttgtggggtagcttctgggtttctgcttcattcagtctttttgattcccatctgtttcatttttctagtgccagcataatgttgcat

SEQ ID NO: 384806 - DNA, 120 bp, Artificial Sequence
  ENSG00000144036_0 (sequence is synthesized)
agggaggggtcggcctgcgggtagccagaggctggggcggctgtggagcctgtggtgggagcggcattgtggggcagggaaaaggtgagccgagccgacggaggggacgcgctgcggggc

SEQ ID NO: 384807 - DNA, 120 bp, Artificial Sequence
  ENSG00000144036_1 (sequence is synthesized)
gcccccagtctatggagcggggtaagatggcggaggcggagagcctggagacagcggcagagcacgagcggatcctgcgagagatcgagagcactgacacggcctgcatcgggcccacgc

SEQ ID NO: 384808 - DNA, 120 bp, Artificial Sequence
  ENSG00000144036_2 (sequence is synthesized)
tcaggtctgtttatgatggtgaagaacatggacgtttcatggagaagcttgaaactcgtatccgtaatcacgaccgagaaattgagaaaatgtgcaactttcattaccagggctttgtgg

SEQ ID NO: 384809 - DNA, 120 bp, Artificial Sequence
  ENSG00000144036_3 (sequence is synthesized)
actctataactgaactgctgaaagtgagaggagaagcccagaaactcaaaaatcaagtgacggatactaatagaaaactacaacatgagggaaaggaactggtaatagcaatggaagagc

SEQ ID NO: 384810 - DNA, 120 bp, Artificial Sequence
  ENSG00000144036_4 (sequence is synthesized)
tgaagcagtgtcgactacaacagagaaatatttctgccactgttgataaattaatgctgtgtcttccagtcctagagatgtacagcaaactgagggaccagatgaaaactaaaaggcatt

SEQ ID NO: 384811 - DNA, 120 bp, Artificial Sequence
  ENSG00000144036_5 (sequence is synthesized)
atcctgcactgaaaactctggaacatctagagcatacctacctgcctcaagtaagccactatcgattctgcaaggtgatggtggacaacatccccaagcttcgagaagaaataaaagatg

SEQ ID NO: 384812 - DNA, 120 bp, Artificial Sequence
  ENSG00000144036_6 (sequence is synthesized)
tttctatgtccgatctcaaagactttctggagagcatccgcaaacattcagacaaaattggagagactgccatgaagcaagcccagcagcaaagaaacctggataacatcgtcttgcaac

SEQ ID NO: 384813 - DNA, 120 bp, Artificial Sequence
  ENSG00000144036_7 (sequence is synthesized)
aacccagaataggtagcaagaggaaatctaagaaagatgcatatataatctttgatacagagatagaaagtactagtccgaagtctgaacaggattcaggaattctggatgttgaagacg

SEQ ID NO: 384814 - DNA, 120 bp, Artificial Sequence
  ENSG00000144036_8 (sequence is synthesized)
aggaagatgatgaagaggtacctggggcccaagatttggtggatttctctccagtttatcgatgtctacatatatattctgtcctgggtgcccgggaaacatttgagaattactaccgaa

SEQ ID NO: 384815 - DNA, 120 bp, Artificial Sequence
  ENSG00000144036_9 (sequence is synthesized)
aacagaggcgaaaacaggctcgtttggtacttcaacctccatctaacatgcatgaaactttagatggctacaggaagtattttaatcaaattgtaggcttttttgtggttgaagatcaca

SEQ ID NO: 384816 - DNA, 120 bp, Artificial Sequence
  ENSG00000144036_10 (sequence is synthesized)
ttttacatacaacccagggcttagtaaatagagcctacattgatgaactgtgggaaatggcactttcaaaaaccatcgcagcactccgtacccactcgtcttactgttctgatccaaacc

SEQ ID NO: 384817 - DNA, 120 bp, Artificial Sequence
  ENSG00000144036_11 (sequence is synthesized)
ttgtgttagatttgaagaacctcattgtgctttttgctgacacacttcaggtgtatggtttccctgtaaatcagctttttgacatgctgttagaaatcagagaccaatatagtgaaactc

SEQ ID NO: 384818 - DNA, 120 bp, Artificial Sequence
  ENSG00000144036_12 (sequence is synthesized)
tgctaaagaagtgggcaggtattttcagaaacatacttgattctgacaactacagtcctataccagtaacaagtgaagagatgtacaaaaaggtggtaggacaattcccatttcaagata

SEQ ID NO: 384819 - DNA, 120 bp, Artificial Sequence
  ENSG00000144036_13 (sequence is synthesized)
tagaactggaaaagcaaccatttccaaaaaagtttcctttctctgaatttgtgccaaaagtttacaaccaaattaaagaatttatctacgcttgtctgaagttttcagaagatcttcatc

SEQ ID NO: 384820 - DNA, 120 bp, Artificial Sequence
  ENSG00000144036_14 (sequence is synthesized)
taagctcaactgaagttgatgacatgattcggaaatcaacaaacctgttgctaaccaggactctgagcaactctctgcagaatgtaattaaaaggaagaatattgggcttactgagcttg

SEQ ID NO: 384821 - DNA, 120 bp, Artificial Sequence
  ENSG00000144036_15 (sequence is synthesized)
ttcagattattatcaatacaacacatttggagaaatcctgtaagtacttggaagaatttatcaccaacatcactaatgtgcttccagagacagttcacactaccaagctctatggcacca

SEQ ID NO: 384822 - DNA, 120 bp, Artificial Sequence
  ENSG00000144036_16 (sequence is synthesized)
caacttttaaggatgctagacatgcagctgaagaagagatttataccaacttaaaccagaagattgaccagttcctacagctggcagactatgactggatgaccggagatttgggcaaca

SEQ ID NO: 384823 - DNA, 120 bp, Artificial Sequence
  ENSG00000144036_17 (sequence is synthesized)
aagctagtgattacctggtagacctcattgcctttcttcgtagcacctttgctgtattcacacaccttcctggaaaggtggcccagacagcgtgtatgtcagcttgcaagcatttagcca

SEQ ID NO: 384824 - DNA, 120 bp, Artificial Sequence
  ENSG00000144036_18 (sequence is synthesized)
catccttgatgcaacttttgttggaagctgaagtgcggcagctcaccttgggagcattacagcagttcaacttggacgtcagagaatgtgaacagtttgccagatccggcccggtgcctg

SEQ ID NO: 384825 - DNA, 120 bp, Artificial Sequence
  ENSG00000144036_19 (sequence is synthesized)
ggttccaggaggacacgctgcagttggccttcatcgacttgagacaacttttggatcttttcatccagtgggattggtcaacctaccttgctgactatggtcagcccaactgcaagtacc

SEQ ID NO: 384826 - DNA, 120 bp, Artificial Sequence
  ENSG00000144036_20 (sequence is synthesized)
tccgggtaaacccagtgactgctctgaccctgcttgagaagatgaaggatactagccgcaagaacaacatgtttgcacagtttcggaaaaatgagcgagacaagcagaaactcattgaca

SEQ ID NO: 384827 - DNA, 120 bp, Artificial Sequence
  ENSG00000144036_21 (sequence is synthesized)
ccgtggccaagcagctccgaggactcatcagcagccaccactcatgaagggtgaccccggacccacagaggcgacctgctgcagcctctgtgtcagtctggggtccagccccagctgacc

SEQ ID NO: 384828 - DNA, 120 bp, Artificial Sequence
  ENSG00000144036_22 (sequence is synthesized)
ctgcatttgtgcattcttcttcaaagagagcatatgtatttttttattaacccctgtgcagtattcacataacatttccctatagtaaaagaggcacaagaataagcaagtacatgagat

SEQ ID NO: 384829 - DNA, 120 bp, Artificial Sequence
  ENSG00000144036_23 (sequence is synthesized)
gttgctaggctgggactcaggggaagttattactacactatctgtgttatcttagagatggtggtatcatcaattccacagtgatgaaccacctttcatccatggctctaaagcttaggt

SEQ ID NO: 384830 - DNA, 120 bp, Artificial Sequence
  ENSG00000144036_24 (sequence is synthesized)
tgggaggtagagtgagtaagcaaaaggatactaaaatatgtcctgttcactcttggatgcccattcaccacatagatgaggctgattcttctcaatacaaggaaagggcatggcaaacat

SEQ ID NO: 384831 - DNA, 120 bp, Artificial Sequence
  ENSG00000144036_25 (sequence is synthesized)
tactatttagtacactaagggcagctctggagggtcatctcctcagtctgctgactttcactggcttgtgaacaagcatggcatatggcaagatgacagcttcattccaatcccccaaga

SEQ ID NO: 384832 - DNA, 120 bp, Artificial Sequence
  ENSG00000144036_26 (sequence is synthesized)
atggcggtttctttagcctgatctaaccccaggcttttattgcaattttttctagggcaggatacagctaagtagacagcagtaataattggatcccatgtttaactgcatattgcccca

SEQ ID NO: 384833 - DNA, 120 bp, Artificial Sequence
  ENSG00000144036_27 (sequence is synthesized)
gctctaggagtgttgagtctcaactcgaagagtttttctggatcttgaaagccagttttcatggaatcagagacccaatcccttccctgttcatctcatttccttcacttacagtcagag

SEQ ID NO: 384834 - DNA, 120 bp, Artificial Sequence
  ENSG00000144036_28 (sequence is synthesized)
cacttggttcaggacataaatcaacagttacttccataggccttcacagggcgtttcagacttagcctcctccagtaatgccattgaaatagttcagatttcggaagcctaaaaatggcc

SEQ ID NO: 384835 - DNA, 120 bp, Artificial Sequence
  ENSG00000144036_29 (sequence is synthesized)
tttaccttacccttaggtgtaacctgaggattagttgggattgttcctttatgttttaaaaccagctttttggttatcatctttaaggaaatgtcaccagctctgcactgtgggggcagc

SEQ ID NO: 384836 - DNA, 120 bp, Artificial Sequence
  ENSG00000144036_30 (sequence is synthesized)
catgcctggactggatgcctctagggatggagacattgttaccataaagtcgacagagccaaccatggcttgtggcttgttgcctctggcccaactgtccttcactaaataatatcctag

SEQ ID NO: 384837 - DNA, 120 bp, Artificial Sequence
  ENSG00000144036_31 (sequence is synthesized)
atattattttgttgctcaagcccaaggttcccaccctcttttgagatccccaaagccatctttggccttgtctaagaaagattgcctataatcctgtcctccaaactctaaagcctggag

SEQ ID NO: 384838 - DNA, 120 bp, Artificial Sequence
  ENSG00000144036_32 (sequence is synthesized)
cagcttagcgtggaggctgcactcattgacccagatggactcctgagacttaacgcaagggctttgctatgaggtcagtcgggggaaactgtactttaagacacttcagaaagatgctac

SEQ ID NO: 384839 - DNA, 120 bp, Artificial Sequence
  ENSG00000144036_33 (sequence is synthesized)
tggctagtagcagaaagatggctagtggcaagagtataattgtgcatcaccaaacaatgacaaataagccacacaggcatttccagcttggattgatgggaggagagactcatcaaacag

SEQ ID NO: 384840 - DNA, 120 bp, Artificial Sequence
  ENSG00000144036_34 (sequence is synthesized)
aattcttcactacctttgtcagctactgagttgcttctggggagggaagtacttccttgcccctccccaacccccctacctcaccatatcctatcatatcttgatagtcatggggaagag

SEQ ID NO: 384841 - DNA, 120 bp, Artificial Sequence
  ENSG00000144036_35 (sequence is synthesized)
gatgtgcacacagacatacaaatttcctcaaagctggagagaccaggctacatgtgagctcatagatgctgctgaggctcatcctgagggctggatggttggccagggtttcagaatgag

SEQ ID NO: 384842 - DNA, 120 bp, Artificial Sequence
  ENSG00000144036_36 (sequence is synthesized)
ggtaagggatgagcactgccacccagaacttgataagccaagagaaggcaggagccaaaatggcatcgccaagctctcatctttgttgaaacaagtgagaaacgattatattaatctgaa

SEQ ID NO: 384843 - DNA, 120 bp, Artificial Sequence
  ENSG00000144036_37 (sequence is synthesized)
gttctattgcttgagaagagttcaaaacacttctctttgctagtacccagtttgcagcaagatctcttcagctttaagtgctgagagactttgaagtggaaatggagagatgtgtaagca

SEQ ID NO: 384844 - DNA, 120 bp, Artificial Sequence
  ENSG00000144036_38 (sequence is synthesized)
tggcacagtgtttgtctttttagaggatcatcattgctggtctggtctcaaacctctgccttggaagaactgtgctatacaggaaaaagtgaacaaggtggaggaataggggttattctg

SEQ ID NO: 384845 - DNA, 120 bp, Artificial Sequence
  ENSG00000144036_39 (sequence is synthesized)
cacagaagtcccatgaaaggaaaagcttattcaagctcaagacataaagatggaccctttgatatatcttctctccattcttagtctgccttcaccttatctaacaaaaaacaacatgca

SEQ ID NO: 384846 - DNA, 120 bp, Artificial Sequence
  ENSG00000144036_40 (sequence is synthesized)
gctactgagttgtatgtagagacatactcttggtgggccagggaaggtaaaaacagggaccagcaatgtcaagtttttgaactagaaaagtgggatgtttttagttttgtctataacctg

SEQ ID NO: 384847 - DNA, 120 bp, Artificial Sequence
  ENSG00000144036_41 (sequence is synthesized)
tagctgggccaacccttgagaggacttgtgcaaagcatgtgtgcccagacccatcagactcctcagatatggcctcaaatacctagagatgtagaagtaccgtggagggcctcaataaga

SEQ ID NO: 384848 - DNA, 120 bp, Artificial Sequence
  ENSG00000144036_42 (sequence is synthesized)
gggcaagcacacagatggctagaagcctgtatggcttctggtcaggatgaacccttggccaagttcttgaggaaaccaggtctatattcctgaagggacagttcagtttgggactctatt

SEQ ID NO: 384849 - DNA, 120 bp, Artificial Sequence
  ENSG00000144036_43 (sequence is synthesized)
aggtttcagtagtaatataggctgcttgcatcattttaacattcatagggaaaatctctttgagcaggctataaatgaagctgttgcaggtagggaagaacaggacctgaaaatgggaac

SEQ ID NO: 384850 - DNA, 120 bp, Artificial Sequence
  ENSG00000144036_44 (sequence is synthesized)
caggaagtgagatcctgttggcaaagggaatgtagagcttccagggtgcattgcccactgttctcattgcataccagtcctccaagtcagtctagccttactgtacacttgacaagtgct

SEQ ID NO: 384851 - DNA, 120 bp, Artificial Sequence
  ENSG00000144036_45 (sequence is synthesized)
tactcagcaagtcccagacccacggccttttatctcccaagactggctttggccatgaccttcctcatcaggcctctgagcacactctctaggaactgctgcagaaattcccctacctta

SEQ ID NO: 384852 - DNA, 120 bp, Artificial Sequence
  ENSG00000144036_46 (sequence is synthesized)
ctctctaggaactgctgcagaaattcccctaccttagcctcccttctcccaggactcctctcttgactgcaattgcctcttcttcttcttcttcttcttcctttttgttttttttttttt

SEQ ID NO: 384853 - DNA, 120 bp, Artificial Sequence
  ENSG00000144036_47 (sequence is synthesized)
gaaatggcatttttattttacacagatagttgcacatatatagagaaaattaggaaagtccatttttaactctaaagggaacttttttctctaaaacttacttgtaaagctactgataca

SEQ ID NO: 384854 - DNA, 120 bp, Artificial Sequence
  ENSG00000144036_48 (sequence is synthesized)
gatgggccgcatggttaggggaaagctcctctgtgaaaagagcatgtttattcctcttgtacattttcctcttttaactgctattaaacaagaaagcctacatacctgtttcaaaagcca

SEQ ID NO: 384855 - DNA, 120 bp, Artificial Sequence
  ENSG00000144036_49 (sequence is synthesized)
gacaatgtggcttgccccaacgctttctcagttgttcttttcatattctactccaaacatagcagtgccccactctcaaacaaacaaggattaaatatcacttttggccatggagcgtag

SEQ ID NO: 384856 - DNA, 120 bp, Artificial Sequence
  ENSG00000144036_50 (sequence is synthesized)
attcaacccagtacacagctcatgagtcagatattattatgtagagcacttctcattttaagcccagaaaccctaaacgaaaagtggggctgtgcaccaggaatcttcatgcttttgttt

SEQ ID NO: 384857 - DNA, 120 bp, Artificial Sequence
  ENSG00000144036_51 (sequence is synthesized)
ttgttttttgggtttaatcctgtgctggattataacctaagggggaatactaatttactgttctcaattcctgcttttttcctgcttcccattgcccctttgttcatgattcatttttat

SEQ ID NO: 384858 - DNA, 120 bp, Artificial Sequence
  ENSG00000144036_52 (sequence is synthesized)
ataatttagtttggtgaaagatgttagtttctgctgtaactacccaggaagattttcagtatataaaggcgcatgctatatttattaacctttaatgatatgtagaggctacttccatca

SEQ ID NO: 384859 - DNA, 120 bp, Artificial Sequence
  ENSG00000144036_53 (sequence is synthesized)
ttttttcattgacctttgcatttttttcatctgaaaatggttcctggtattatgtctgcttatcttcctatgatgttcaaggtaattagtacaaagacaatataaaagccttggtagaat

SEQ ID NO: 384860 - DNA, 120 bp, Artificial Sequence
  ENSG00000144036_54 (sequence is synthesized)
aaagccttggtagaattaaaaaaagaaacttagttagaatttcagatatgtatattttagttttagaatattctttaacttttttatataaactgaaattctttgatgaaatgctccatc

SEQ ID NO: 384861 - DNA, 120 bp, Artificial Sequence
  ENSG00000144036_55 (sequence is synthesized)
tctatgttttctctgttttcttaagcatattaattatagacattcaaaatcattctttactacttcttatatatattatacatacatattggtggattttttttctcttggttttcagtg

SEQ ID NO: 384862 - DNA, 120 bp, Artificial Sequence
  ENSG00000144036_56 (sequence is synthesized)
atatggtcctgtctgtttctaatatttttcggttgatgttagacattgtataaaatatgtagagattccaggtggtgttatcttccaccagaaaaggttcatgttttcctttacttagta

SEQ ID NO: 384863 - DNA, 120 bp, Artificial Sequence
  ENSG00000144036_57 (sequence is synthesized)
aatagaatgggcaggtgggttgtggtttgaagctgaccaccttagtaccatcatggactgatttggattaatattgggttgcagttgtagtgtactttgtttgcccttgttggtaggata

SEQ ID NO: 384864 - DNA, 120 bp, Artificial Sequence
  ENSG00000144036_58 (sequence is synthesized)
tcattgtctttttagcaccaaagaggactatagaaattcctgctcttcacagaaaccttgtctgttcagcctcctgtactctttcgttttagaatctggtaaatgtcttgagaaggagac

SEQ ID NO: 384865 - DNA, 120 bp, Artificial Sequence
  ENSG00000144036_59 (sequence is synthesized)
ttagcagtacccagtatcagcaattgctgatgggaaaaaaagtgttggggattgtcagtgttactttaccatccctaatgaggtttcagctcctatgtgatctgaatgtttgtgtacccc

SEQ ID NO: 384866 - DNA, 120 bp, Artificial Sequence
  ENSG00000144036_60 (sequence is synthesized)
aaaaaatcatatgttgaatctaataaccagtgtgattacattaggaggtgaggccttgggaggtgatagattatgatggtagagcctcgcaaatgggattagtatacttataaaagagac

SEQ ID NO: 384867 - DNA, 120 bp, Artificial Sequence
  ENSG00000144036_61 (sequence is synthesized)
ttcagagagctgccttgttccttgtggccatgtgaggatacggggatacaggaagaagactccttttttatttcgcactaggaaataggccttcatcagacaccgaatctgctgatacct

SEQ ID NO: 384868 - DNA, 120 bp, Artificial Sequence
  ENSG00000144036_62 (sequence is synthesized)
tgatgttggacttccaagcctccagaactgtgagaattcttttgtttataagctaccagtctatgggattttgttacattattctgaatggactaagatagctcctgtcatttttaggca

SEQ ID NO: 384869 - DNA, 120 bp, Artificial Sequence
  ENSG00000144036_63 (sequence is synthesized)
ttcttctactagtgagtctttttctctgaaacactgtgaaactgtgagaaatctccttgcttttcaaagattttggcttaaacccttattttcctcagccgtttagctttagaattcagt

SEQ ID NO: 384870 - DNA, 120 bp, Artificial Sequence
  ENSG00000144036_64 (sequence is synthesized)
aaatatcttgagggtaaaactagtcctcaaacctctaactgtggcactctagtctgttggaagcagcaaagattccaagtttttttcgccccctagtagttagtctctgcctggttttaa

SEQ ID NO: 384871 - DNA, 120 bp, Artificial Sequence
  ENSG00000144036_65 (sequence is synthesized)
gattctcagtctgttgcccttgtctacgttcctcaaatgcccacaaggaaagctgcagattttcacctcacctttaaaaggttttgtcctctctgcagttttattccctttagtcttcat

SEQ ID NO: 384872 - DNA, 120 bp, Artificial Sequence
  ENSG00000144036_66 (sequence is synthesized)
tgcttcacagcacctgatgccttttaatatgttttttctacatgttttacttcctctcctagttgttcctagtgggagcatttatctgcagaaaattatgtcattttgtctagctttatc

SEQ ID NO: 384873 - DNA, 120 bp, Artificial Sequence
  ENSG00000144036_67 (sequence is synthesized)
ctgataccaaagccagacaaaaagagcacacacaaaaaaactatgagttaatctcacaattatggataaaagtaaaataaataaaattttagcaagtcaattcccagtgttttaagaaag

SEQ ID NO: 384874 - DNA, 120 bp, Artificial Sequence
  ENSG00000144036_68 (sequence is synthesized)
taattttgtactagtgtgtaggatttattccagaaatgcaaggatggtttgatattttaaaaaaatatgttaatataatttatcatattactaggtgagggagatacagtttcttgatgt

SEQ ID NO: 384875 - DNA, 120 bp, Artificial Sequence
  ENSG00000144036_69 (sequence is synthesized)
attctagaaagacattttattacatccaggctacattcttgatttaaaaacaaagtttactaaattccaagcagtataatattttaataacaaaataaagaacatctatttgaaatttag

SEQ ID NO: 384876 - DNA, 120 bp, Artificial Sequence
  ENSG00000144036_70 (sequence is synthesized)
tggccaccatagattgaacagtagaacaataaaacatttattttcattgacaacaggaattgggtgaagatgcttctcaccaacactttagaagttctataaaataaatgtaaaaaaaga

SEQ ID NO: 384877 - DNA, 120 bp, Artificial Sequence
  ENSG00000144036_71 (sequence is synthesized)
ataaattacattataatgagccatgcatgtcttagtccattcctgctcccataacaagatactgtagactgagaaatttataaacaacagaaatttgtttctcacagttctggaggctgc

SEQ ID NO: 384878 - DNA, 120 bp, Artificial Sequence
  ENSG00000144036_72 (sequence is synthesized)
aaagtccaatattaagatgtcagcagattcagtgtctgataaagtcctgttactcataaatggcacctctgtatccttacgtggcagagaaggcaaaaaggacaaactcactcccccaat

SEQ ID NO: 384879 - DNA, 120 bp, Artificial Sequence
  ENSG00000144036_73 (sequence is synthesized)
cccttctataaggcactaatccaattaatgagtgatgtaatcacttctgaaatttttgtgccctcccccacaaaaattaaaaattaaaaaaaataacaaagttgcattggggattaaatt

SEQ ID NO: 384880 - DNA, 120 bp, Artificial Sequence
  ENSG00000144036_74 (sequence is synthesized)
tcaatatgaattttggcaaggctcaaacatttcaaaccatagcacatgcatattattattcataggttattattatctaaatagaacatactaaaaattcattaagaccaataagagttt

SEQ ID NO: 384881 - DNA, 120 bp, Artificial Sequence
  ENSG00000144036_75 (sequence is synthesized)
aggttagatgattcacttagaaaacaaataaacttttcttatattagcaatgcccacatagaaaatatagtgtcaaaagtgtcttatttactattgggacatagatataatttttctatg

SEQ ID NO: 384882 - DNA, 120 bp, Artificial Sequence
  ENSG00000144036_76 (sequence is synthesized)
cagctacttagcaagtcaatttagaaataatgtgacaacatcacagagtaatataaaagagactttcttatgcacaaatatatatggtattccaggatgggagtatttcattctgtagaa

SEQ ID NO: 384883 - DNA, 120 bp, Artificial Sequence
  ENSG00000144036_77 (sequence is synthesized)
agttttttcaaatttaatctaattgcagtgagtatcaagtaaatttgtttagggaagaatcttaatgaaatcattctgaaattcatttgtaagcaaaaatggacaatatttggtaaaaaa

SEQ ID NO: 384884 - DNA, 120 bp, Artificial Sequence
  ENSG00000144036_78 (sequence is synthesized)
tgataacatgaacataatttgtaactctattaataagacatacaaattaagcttgtgtgatatttttgactataaactactcagaaataagaaaatggtaacactccttgtttataagaa

SEQ ID NO: 384885 - DNA, 120 bp, Artificial Sequence
  ENSG00000144036_79 (sequence is synthesized)
atatttgtggaaataggtattttcatacctgctgctaggggtctagttattgtagtctttttggagtcagtttttcaatatgcctcagaaaccccttaaaatgtgcttacctttttacta

SEQ ID NO: 384886 - DNA, 120 bp, Artificial Sequence
  ENSG00000144036_80 (sequence is synthesized)
actatgtaattccccttttagaatttgaacttaatgaaataatcatgattgtattataatattcagatgtaactatatttaatacaatgtattttgtatagcgaggagtaggtataaatt

SEQ ID NO: 384887 - DNA, 80 bp, Artificial Sequence
  ENSG00000144036_81 (sequence is synthesized)
gcgaggagtaggtataaattaaaaatccaacaaacaaatgtgttcacaaactaaattattgtatattcatataatgtgat

SEQ ID NO: 384888 - DNA, 120 bp, Artificial Sequence
  ENSG00000144040_0 (sequence is synthesized)
aactacactccccacaacgccttgcgcctcccgctcgctgcggttgattagggccaatcgggagaggcagctgtggcgggggccgaggagggacattttaaaagggccggagattgcggg

SEQ ID NO: 384889 - DNA, 120 bp, Artificial Sequence
  ENSG00000144040_1 (sequence is synthesized)
cgtcagtggccatggcggatacagcgactacagcatcggcggcggcggctagtgccgctagcgcctcgagcgatgcacctcctttccaactgggcaaaccccgcttccagcagacgtcct

SEQ ID NO: 384890 - DNA, 120 bp, Artificial Sequence
  ENSG00000144040_2 (sequence is synthesized)
tctatggccgcttcaggcacttcttggatatcatcgaccctcgcacactctttgtcactgagagacgtctcagagaggctgtgcagctgctggaggactataagcatgggaccctgcgcc

SEQ ID NO: 384891 - DNA, 120 bp, Artificial Sequence
  ENSG00000144040_3 (sequence is synthesized)
cgggggtcaccaatgaacagctctggagtgcacagaaaatcaagcaggctattctacatccggacaccaatgagaagatcttcatgccatttagaatgtcaggttatattccttttggga

SEQ ID NO: 384892 - DNA, 120 bp, Artificial Sequence
  ENSG00000144040_4 (sequence is synthesized)
cgccaattgtagtcggtcttctcttgcccaaccagacactggcatccactgtcttctggcagtggctgaaccagagccacaatgcctgtgtcaactatgcaaaccgcaatgcgaccaagc

SEQ ID NO: 384893 - DNA, 120 bp, Artificial Sequence
  ENSG00000144040_5 (sequence is synthesized)
cttcacctgcatccaagttcatccagggatacctgggagctgtcatcagcgccgtctccattgctgtgggccttaatgtcctggttcagaaagccaacaagttcaccccagccacccgcc

SEQ ID NO: 384894 - DNA, 120 bp, Artificial Sequence
  ENSG00000144040_6 (sequence is synthesized)
ttctcatccagaggtttgtgccgttccctgctgtagccagtgccaatatctgcaatgtggtcctgatgcggtacggggagctggaggaagggattgatgtcctggacagcgatggcaacc

SEQ ID NO: 384895 - DNA, 120 bp, Artificial Sequence
  ENSG00000144040_7 (sequence is synthesized)
tcgtgggctcctccaagatcgcagcccgacacgccctgctggagacggcgctgacgcgagtggtcctgcccatgcccatcctggtgctacccccgatcgtcatgtccatgctggagaaga

SEQ ID NO: 384896 - DNA, 120 bp, Artificial Sequence
  ENSG00000144040_8 (sequence is synthesized)
cggctctcctgcaggcacgcccccggctgctcctccctgtgcaaagcctcgtgtgcctggcagccttcggcctggccctgccgctggccatcagcctcttcccgcaaatgtcagagattg

SEQ ID NO: 384897 - DNA, 120 bp, Artificial Sequence
  ENSG00000144040_9 (sequence is synthesized)
aaacatcccaattagagccggagatagcccaggccacgagcagccggacagtggtgtacaacaaggggttgtgagtgtggtcagcggcctggggacggagcactgtgcagccggggagct

SEQ ID NO: 384898 - DNA, 120 bp, Artificial Sequence
  ENSG00000144040_10 (sequence is synthesized)
gaggggcagggccgtagactcacggctgcacctgcagggagcagcacgccaaccccagcagtcctgggccccctgggagagtgctcaacctacagtggagggagactgacccattcacat

SEQ ID NO: 384899 - DNA, 120 bp, Artificial Sequence
  ENSG00000144040_11 (sequence is synthesized)
tttaacataggcaagaggagttctaacacatttcgtacaaaaaaataatcaagtgcatttctgggccttatgtggggttgtcaaaactccactcagcacaattatgtgtgaagctgaaaa

SEQ ID NO: 384900 - DNA, 120 bp, Artificial Sequence
  ENSG00000144040_12 (sequence is synthesized)
attgtagagtgcccatggggtagaagtagaatccttttatactttggttccttttttatttttattttttatcagaatcaaatctgagccttagtttcagctgaccagaagtggcaggag

SEQ ID NO: 384901 - DNA, 120 bp, Artificial Sequence
  ENSG00000144040_13 (sequence is synthesized)
gacaggtggaggcgagccagattaggcctggagttgggctggtttggtggccaggctggtaaatttaggatattacaatggccagcccagatggctccctgggctggcatggggagggga

SEQ ID NO: 384902 - DNA, 120 bp, Artificial Sequence
  ENSG00000144040_14 (sequence is synthesized)
gagaaggtggtctgcaccccacaggatgaactagccatgactagggtcctcaggcagtggcccagggaatcagggagcactggaggcctctgcaagattctgtgggcagctggctctgaa

SEQ ID NO: 384903 - DNA, 120 bp, Artificial Sequence
  ENSG00000144040_15 (sequence is synthesized)
tgtagccagcccacatccattccagagctgcagaaccagtccctctgagtgaagtccagtgaccctggagctagggtcccccttcgtggagctctaactgattcagggcccctgaagtga

SEQ ID NO: 384904 - DNA, 120 bp, Artificial Sequence
  ENSG00000144040_16 (sequence is synthesized)
ccccagctccaggcaggaaaccccgagaaggaatggtgcttggcaggaaccatggacctgcacttggcctcttcgggaagatcctccttccaggccccaggctggatgctgggttctggg

SEQ ID NO: 384905 - DNA, 120 bp, Artificial Sequence
  ENSG00000144040_17 (sequence is synthesized)
ctgcctgccccatcccatccctttctaagcaggaaggtctcatgcctgagaatgcctaggccagctccttagacacctatcagagaagcagcatcaacctaggagcagtgggccctggct

SEQ ID NO: 384906 - DNA, 120 bp, Artificial Sequence
  ENSG00000144040_18 (sequence is synthesized)
ctgtcactaaatggcagtgagatgtcagacaaattcattcccttctctcagcctccactccctgtctgaaaccagaagactggatcaaggggttcccactggctcctccagcaagacctc

SEQ ID NO: 384907 - DNA, 120 bp, Artificial Sequence
  ENSG00000144040_19 (sequence is synthesized)
gtctttgcttgtcctgctcagatgctggtcatcctgggcatgtccccagtgtggactctggactgggaagggggcaggcccctttggacctgcagttggcctcagcagaaggccttgcct

SEQ ID NO: 384908 - DNA, 120 bp, Artificial Sequence
  ENSG00000144040_20 (sequence is synthesized)
tgtgtatgtgactccatatcccgggagcagttgacctttgccaaacactttacagttctggaggaggaggtaacatagatgcctgggcctgatggtggggccatacccatgtgtcgcctc

SEQ ID NO: 384909 - DNA, 120 bp, Artificial Sequence
  ENSG00000144040_21 (sequence is synthesized)
tcactctggcagcctcagaggccccttgctgctggctcccatctccctcccatttgcagaccaggaaggaagagcaagctgtacaaagggaagcagagcctggggtgggtgtgagcaggg

SEQ ID NO: 384910 - DNA, 120 bp, Artificial Sequence
  ENSG00000144040_22 (sequence is synthesized)
tgacccctcatctgaaaggcccaaaccagggggaagcaccagcctcagtgcagccccctcctgaccccacctagaatggaagcctccacctgcagccccaggcctccctcccccggggtc

SEQ ID NO: 384911 - DNA, 120 bp, Artificial Sequence
  ENSG00000144040_23 (sequence is synthesized)
tccacctcaggggagacttaggccagaggtgaacattcatgtgtaggaagaggccgctgcagggtggcatcttagggtaggggaagtgtgctgaggtgggccttccatgggcatggccgt

SEQ ID NO: 384912 - DNA, 120 bp, Artificial Sequence
  ENSG00000144040_24 (sequence is synthesized)
tgcctctctgccagccgctggtgcccaccagctggctctgcagcacattgccctgaggggcctgccactctcctgaggagcagcccacctgctgcccgtgaggagggggagaagggttag

SEQ ID NO: 384913 - DNA, 120 bp, Artificial Sequence
  ENSG00000144040_25 (sequence is synthesized)
acaagcctggaggacaaaacagcgggagtgtgggggtgccatggtgttggaggggcaggcctttttgagccaatcccaccataatgtgaatatgccagtgactgctgcgctgtgctggtc

SEQ ID NO: 384914 - DNA, 120 bp, Artificial Sequence
  ENSG00000144040_26 (sequence is synthesized)
tctaggcctgaactaggtgctggcatgtctgggtcgtcttttgaaaagctcacttcaagctcaccctgctcctacctatcataaggtcttattcttgtgcactttatcttgggaccaaaa

SEQ ID NO: 384915 - DNA, 120 bp, Artificial Sequence
  ENSG00000144040_27 (sequence is synthesized)
ctgcctacccaccccttcccgccctccccctgccagaggcctggtgccctggcccagcctgtggcctcagcatctcataactcatttgctttgtctcccggatgatttccgtcatgctcc

SEQ ID NO: 384916 - DNA, 120 bp, Artificial Sequence
  ENSG00000144040_28 (sequence is synthesized)
caaatgcagcttcaggtgagccaaggggtctgctcctgtggcggtgcagtggcaaaggatccagatagcctagggtgagggtgacagagggacagtgggctatgccactaggccctggtc

SEQ ID NO: 384917 - DNA, 120 bp, Artificial Sequence
  ENSG00000144040_29 (sequence is synthesized)
tggctttggaaagacctgtgaggggaaaccttcacccagcacccatgccccactctgctgaggccagaggaagggaggcctgaggggcagattggttcatgcctggggtggaggctaagc

SEQ ID NO: 384918 - DNA, 120 bp, Artificial Sequence
  ENSG00000144040_30 (sequence is synthesized)
ctggacacagtcagggcggggctggccagctgtgcgagaacacaagccacgcctgcgatggtgctgcacccctggtgtccctgcctggccctcctctggtcacttcaaacatgccctcag

SEQ ID NO: 384919 - DNA, 120 bp, Artificial Sequence
  ENSG00000144040_31 (sequence is synthesized)
gcttggggatgcccttcttccattcccagacagcagtgtgagggtgcagggaccaagatgtcaagctggccgtggagtcgagctggccgacggacccctttcacctggttatgagccgac

SEQ ID NO: 384920 - DNA, 120 bp, Artificial Sequence
  ENSG00000144040_32 (sequence is synthesized)
ttctttggtgttctggcctctggcctgggaaaagggcaggagcctagaggaggaaaaaggctggtggacagacccagggtggtcttcaagcctggcccagtgagagtgaggcccccgcac

SEQ ID NO: 384921 - DNA, 120 bp, Artificial Sequence
  ENSG00000144040_33 (sequence is synthesized)
gcaagcctcagccactcccaggggcctttgcagcgtctttttaacctcagaaaatttctcaatctatgtgatttgtgtaatactaatgagctttgggcaataaatacgggatttaaagca

SEQ ID NO: 384922 - DNA, 120 bp, Artificial Sequence
  ENSG00000144040_34 (sequence is synthesized)
gagaaaggagagggaaggaagaggaggaaaaaaacagcgggaaggagagcatgatactgagatgagctgaaagaccaataaagaaatgccacaatgaggtgtggctgggggctcttttga

SEQ ID NO: 384923 - DNA, 120 bp, Artificial Sequence
  ENSG00000144040_35 (sequence is synthesized)
agaatggagagagccaggggcaggcagggtgggtgttccagagagagggcaccgtacaagcagaggtgcacaggagagcatgaccaactccgggctcagaacaggagggcggccaccggg

SEQ ID NO: 384924 - DNA, 120 bp, Artificial Sequence
  ENSG00000144040_36 (sequence is synthesized)
gaggcacgtccatccttttgttcactgccctgcccagcatctagcacagttcctgccacacaatagatgctcagacggctctcctgcaggcacgcccccggctgctcctccctgtgcaaa

SEQ ID NO: 384925 - DNA, 120 bp, Artificial Sequence
  ENSG00000144040_37 (sequence is synthesized)
ggagctgccccttgtcctgcacttcagcagctacagggctgtgggtgaaggagggcctgaggattgtgagctcagtgcttttaggcttgagctgcccttggggatcccccctggaggcag

SEQ ID NO: 384926 - DNA, 120 bp, Artificial Sequence
  ENSG00000144040_38 (sequence is synthesized)
gagtgaagagaataggggaggtgagaggtgagaggaaggtaacaaattctctctacctgtagctgtctgtttatgtatctgtgtgtctgtctgtatctgagttgatacattgtgctgtat

SEQ ID NO: 384927 - DNA, 120 bp, Artificial Sequence
  ENSG00000144040_39 (sequence is synthesized)
gctttttacattatatcatttggatctcacaacaaccctttaagatagatattattgttattctttaaaactttcaagaaattattatcaagtacataagttatttgctcattagaaaag

SEQ ID NO: 384928 - DNA, 120 bp, Artificial Sequence
  ENSG00000144040_40 (sequence is synthesized)
ttcaaacagtacaaatatgtttaagtagaaaaaagtatcctttaatcgtcctccctacttagttccctcctcttataggtaacagctgttaatggcttttaacatcaggttattaaggta

SEQ ID NO: 384929 - DNA, 120 bp, Artificial Sequence
  ENSG00000144040_41 (sequence is synthesized)
gtttaattctggctgtacacgtcaagagtagctctgataagtggtaacgccataagagtgacaggatcttctgaaaaaaatgagagcctgttattggaatgagctgcctgactcctggat

SEQ ID NO: 384930 - DNA, 120 bp, Artificial Sequence
  ENSG00000144040_42 (sequence is synthesized)
ttgagggaaatgtctgattagtagacaggccccagaagctgtgaggggcactcgcacgcgaccaaggcacctgtttccaagcagcttgctcaggatctggcataccccagtgccaatatc

SEQ ID NO: 384931 - DNA, 120 bp, Artificial Sequence
  ENSG00000144040_43 (sequence is synthesized)
tccgggttgtgcagctgcccgcccgggacgcaaagttctagtctggccctggatgggaagttggcgtggccgggatgccttctaactttttcccccggtggggactgacgttcctttcga

SEQ ID NO: 384932 - DNA, 120 bp, Artificial Sequence
  ENSG00000144040_44 (sequence is synthesized)
cgttcctttcgagctgctggcggtgccgccgggcagcgtcgcgccccgcggtcactccccagccctggcccccaagccgggctcggcgcgcgcagcaggttgagggggcgagtgccgagg

SEQ ID NO: 384933 - DNA, 120 bp, Artificial Sequence
  ENSG00000144040_45 (sequence is synthesized)
cggcgtcccccgtccctgctctccatctcgggctgaggattcgctgacgcagcaagccggccgatgccctgaggggacgcagccagggcgtgcgggggaaacgctgtgtcatcccctggg

SEQ ID NO: 384934 - DNA, 120 bp, Artificial Sequence
  ENSG00000144040_46 (sequence is synthesized)
tgtgtcatcccctggggccgtcgtccctccgaggggctgccgcctgggaacccccccccagcctcttcctcgctgtgttctccgcggagggtctcccgcgcccgggcccccgcgccgccg

SEQ ID NO: 384935 - DNA, 120 bp, Artificial Sequence
  ENSG00000144040_47 (sequence is synthesized)
acacccgctcaggctcttcggggcacggcgacaggggtcctttccctccgggacctcctctggggcgtcgccgactcggccctagactgcggaggcgggggtggaacgcggagcccgggc

SEQ ID NO: 384936 - DNA, 120 bp, Artificial Sequence
  ENSG00000144040_48 (sequence is synthesized)
gcctggttgggcccggagaccggagccggggaggggccgctcccgcgccgcagaccctcgggctcccgcgcctcccgcaccaatgagacggaatttattaggaaacaggcagagagaccg

SEQ ID NO: 384937 - DNA, 120 bp, Artificial Sequence
  ENSG00000144040_49 (sequence is synthesized)
ctgaagtgaaccggggcttgccaggggtgggcggcagccgaggcggccagaaaagaactttgaaggaagaaaggaaattgtgctaagacgtccttctatggccgcttcaggcacttcttg

SEQ ID NO: 384938 - DNA, 120 bp, Artificial Sequence
  ENSG00000144040_50 (sequence is synthesized)
accctcgcacactctttgtcactgaggctcacagctggaggaaaatttgcctcaggatgaatcacacctttgggtctcatccatacctaatttagaggattctggatgagactctgactt

SEQ ID NO: 384939 - DNA, 120 bp, Artificial Sequence
  ENSG00000144040_51 (sequence is synthesized)
cagacttttgagttgctgctggaatgactgacttttggggctactgagatggaatgaatatttgtgagaaggacataaattttggggggccagggtgagatgctatggctgaaatgtgtc

SEQ ID NO: 384940 - DNA, 120 bp, Artificial Sequence
  ENSG00000144040_52 (sequence is synthesized)
ccatacaaaattcaggtgttgaaacttaatggcaaatgtgatagtattaagaggtgggatctttaagaggcaattaggccatgagggtccctccctcatgaatggaattaaggcccttgt

SEQ ID NO: 384941 - DNA, 73 bp, Artificial Sequence
  ENSG00000144040_53 (sequence is synthesized)
atgagggtccctccctcatgaatggaattaaggcccttgtaaaagaggcctggccgggcaagaatcacttgag

SEQ ID NO: 384942 - DNA, 120 bp, Artificial Sequence
  ENSG00000144040_54 (sequence is synthesized)
ccaactcttaaaaaaatttttcaaaaattagctgggtgtcgtggcatgcacctatagtcccagctactcgaatcggttgagcctgggaggtcgaggttgcagtgaactgtgatcacgcca

SEQ ID NO: 384943 - DNA, 120 bp, Artificial Sequence
  ENSG00000144040_55 (sequence is synthesized)
actccagtctgggtgacagagcaagacactatctcaaaaaataaaagaggtttcacacagggtttggccctcttgccgttctgttctgttgagtacacagccttccttccctcagaaaga

SEQ ID NO: 384944 - DNA, 120 bp, Artificial Sequence
  ENSG00000144040_56 (sequence is synthesized)
cgttctgttctgttgagtacacagccttccttccctcagaaagatgccctcaccagataccaaatgctggttcttgatcttggacttccagcttccagaactgtgagaaataaatttctg

SEQ ID NO: 384945 - DNA, 120 bp, Artificial Sequence
  ENSG00000144040_57 (sequence is synthesized)
cgggtatttgactgaattgttgatttaggataagtcaattcctggagggaaattaccaaataaaatgatatgtatttcttaccacatctcttgatgctgattggcaaacctcttttcata

SEQ ID NO: 384946 - DNA, 120 bp, Artificial Sequence
  ENSG00000144040_58 (sequence is synthesized)
aaaagcctgatgacttaaatccagcgttgagttgaaaattgccttcttccctgcacgttttctgtccccactgttgtcattagcacctgctagtcatagggaagttttctcaaagaactt

SEQ ID NO: 384947 - DNA, 120 bp, Artificial Sequence
  ENSG00000144040_59 (sequence is synthesized)
gggaagtaggagtagaagcatgccttctgaaaaatcaaagtttaaaattaattcagaaagaattttcagcattctttttgttcagttttagaatcaggattatgtttactccttattttt

SEQ ID NO: 384948 - DNA, 120 bp, Artificial Sequence
  ENSG00000144040_60 (sequence is synthesized)
tatgtttactccttatttttattggaataaaacatacagaaaggtgcattcatcataaatgtacagcttggtaaattttcaaaaagcaagcatatccagggctgggcgcggtggctcacg

SEQ ID NO: 384949 - DNA, 120 bp, Artificial Sequence
  ENSG00000144040_61 (sequence is synthesized)
agacgtccttctatggccgcttcaggcacttcttggatatcatcgaccctcgcacactctttgtcactgagatggagtcttgcactgtcccccaggctcactgcaacccctgcctcctgg

SEQ ID NO: 384950 - DNA, 120 bp, Artificial Sequence
  ENSG00000144040_62 (sequence is synthesized)
tgcaggtggatgcttgtctgagggccaggccaggcaaggatttgggagacaggtttctgtgggtggaggagtcaggacaggctttccaagccgagaagaggctccagtagacagagcaca

SEQ ID NO: 384951 - DNA, 120 bp, Artificial Sequence
  ENSG00000144040_63 (sequence is synthesized)
acctggtgctccctgtaatggagagcaggtggggaggtgaggttgtgcctgggggcactgaggcaggacatctgtcttgagtggggctgcggttgcccagcactctgctcggaagagctg

SEQ ID NO: 384952 - DNA, 120 bp, Artificial Sequence
  ENSG00000144040_64 (sequence is synthesized)
ctcctcatgctcggtaacgtggctggagcgagcggggtggggggatgcctctgaatgactctgcaaggcctgcccatgtgcctgctcccctgagctcttgctcagctgccggggcactgc

SEQ ID NO: 384953 - DNA, 120 bp, Artificial Sequence
  ENSG00000144040_65 (sequence is synthesized)
ttttccctctctatggccttactggtgtcacacgtccagctcttcctgaagacctgtcagtgcccgaagccaggggcgttaggctcactctgagtctccacagtactttgaggccagagc

SEQ ID NO: 384954 - DNA, 120 bp, Artificial Sequence
  ENSG00000144040_66 (sequence is synthesized)
agctactcagtaggggaggttcagagactgagcgtgagggtacggcaggtgtggctccctgcttcccagaggaggccaggggcaagtgacacagtcagggccctgggccagagccagagt

SEQ ID NO: 384955 - DNA, 120 bp, Artificial Sequence
  ENSG00000144040_67 (sequence is synthesized)
ggacgctcaagctgccaggaccttctgcatgcttgtcccacccctgagcccgcccctgtacctacgtctggctgtctctggatccccactaggatggccttctatagccgactccagagg

SEQ ID NO: 384956 - DNA, 120 bp, Artificial Sequence
  ENSG00000144040_68 (sequence is synthesized)
gcgaagggccccttcacaactctgtcatttcatccattacacaatacattaatgtaactggtaagaaaaaaaaaattagaaaatgaaaaccaaacaacattcacatagctgagcacagtg

SEQ ID NO: 384957 - DNA, 120 bp, Artificial Sequence
  ENSG00000144040_69 (sequence is synthesized)
gtgttggagtctgtagtgtgctatgattgcagctgtgaacagccactgcactccaacctgggcaacatagcaagaccccatttaaaaaaacaaaaggccgggtgcagtggctcacgcctg

SEQ ID NO: 384958 - DNA, 87 bp, Artificial Sequence
  ENSG00000144040_70 (sequence is synthesized)
agtgagactccatctccttaagaaattaaaaaaccccaaaaccattcagctgggcaagctggtgtgcccctgtaatcccagctactc

SEQ ID NO: 384959 - DNA, 120 bp, Artificial Sequence
  ENSG00000144040_71 (sequence is synthesized)
atgttgggcagcatagcaagatcttatctctaatgaaaaagaaaacattcacatataatgaagaattcacatacaataaccttttggtaaaaccccctttgctcatctttccagtgccat

SEQ ID NO: 384960 - DNA, 120 bp, Artificial Sequence
  ENSG00000144040_72 (sequence is synthesized)
taagtaaatactgtataataactgttcacggctgtataattacccattgtaccatacgccacaatttaattcaccattcttctaaaggagggacttggggttgtcctgaaatggcctcat

SEQ ID NO: 384961 - DNA, 120 bp, Artificial Sequence
  ENSG00000144040_73 (sequence is synthesized)
ttatttcactcccacatagaccaagtcatctccaaatagctgtgaagtgggatgtcccatttcatgcccaagatctctttcccaaatccttatgtcttcacaaaagcaagaagtgagaca

SEQ ID NO: 384962 - DNA, 120 bp, Artificial Sequence
  ENSG00000144040_74 (sequence is synthesized)
ttcaggtggctcaccaagagactgctgacctgccacccagcttgtcctgcagcccagcaggagacttcatttgggagtcagacaaattgggggtccctgatactggggacttggtgggtg

SEQ ID NO: 384963 - DNA, 120 bp, Artificial Sequence
  ENSG00000144040_75 (sequence is synthesized)
aaggccaaaggctcccctgagtgggagaaagaactcttgtcacctcctccttgttccttgtgatgagaggagctgatggtctgcttagcttagcagctcaaaaatccccttccttttttt

SEQ ID NO: 384964 - DNA, 120 bp, Artificial Sequence
  ENSG00000144040_76 (sequence is synthesized)
gagactcaggggcaaggtgagaggaggaggctacatagggaaggatgctgagtggccttgaatggaaaggcctgagtgaaggggatcattgtcctggtggacttccttcacctgcaggcc

SEQ ID NO: 384965 - DNA, 79 bp, Artificial Sequence
  ENSG00000144040_77 (sequence is synthesized)
ggggatcattgtcctggtggacttccttcacctgcaggcctggggctcagagaacaagaatcagcttctcagcctgagt

SEQ ID NO: 384966 - DNA, 120 bp, Artificial Sequence
  ENSG00000144040_78 (sequence is synthesized)
ctacctgggaggctgaggtgggagaatcatttgagcctggaaggtcgaggctgcagtgagccacgattgtgcccctgcactccagactgggcgacagagcaaaaccctgtctcaaaaaaa

SEQ ID NO: 384967 - DNA, 120 bp, Artificial Sequence
  ENSG00000144040_79 (sequence is synthesized)
accaacctcccagctttcaccacctctcaagtacccgggcccttctgctgagcctcacggtccaggggcgtgtgaagagtttaaacagggagactctcctcccatttcccagagacgtct

SEQ ID NO: 384968 - DNA, 120 bp, Artificial Sequence
  ENSG00000144040_80 (sequence is synthesized)
cgggggtcaccaatgaacagctctggagtgcacagaaaatcaagcaggttatattccttttgggacgccaatttcggtcttctcttgcccaaccagacactggcatccactgtcttctgt

SEQ ID NO: 384969 - DNA, 120 bp, Artificial Sequence
  ENSG00000144040_81 (sequence is synthesized)
aagaaaaaccatcaagaaggggaagaagcagccaagggcacagggagaacccagatggagtaacttcatggaagctgaggacttgggcgattcaaagaggaggggctgtctccagagtgg

SEQ ID NO: 384970 - DNA, 65 bp, Artificial Sequence
  ENSG00000144040_82 (sequence is synthesized)
acgtctcagagaggctgtgcagctgctggaggactataagcatgggaccctgcgcccgggggtca

SEQ ID NO: 384971 - DNA, 120 bp, Artificial Sequence
  ENSG00000144040_83 (sequence is synthesized)
cagcaacccctgacccctagatcacaatcactgaaaatgccctcaaacatggccaaatgccccacagaaccgcccctggcagagagcggctgtttagggcaggtgagcatgcctgttgtg

SEQ ID NO: 384972 - DNA, 120 bp, Artificial Sequence
  ENSG00000144040_84 (sequence is synthesized)
gggcaggagagcccgggacacagagggactgcccatggtttccactgcactgagcgtcggtggaagcaggagagatgctcgaagatggtgtgtgtgctctaaatacattttagaactgta

SEQ ID NO: 384973 - DNA, 120 bp, Artificial Sequence
  ENSG00000144043_0 (sequence is synthesized)
gcggcggcggcggtggcggctgtgtgtcgccggagccgaagcgcgcaggcccgtcccggtggccggggagcgggcgggtgggggcgccatgtggttcatgtacctgctgagctggctgtc

SEQ ID NO: 384974 - DNA, 120 bp, Artificial Sequence
  ENSG00000144043_1 (sequence is synthesized)
ggttcatgtacctgctgagctggctgtcgctcttcatccaggtggccttcatcacgctggctgtcgcggctggactctattacctggcagaactgatagaagaatacacagtggccacca

SEQ ID NO: 384975 - DNA, 120 bp, Artificial Sequence
  ENSG00000144043_2 (sequence is synthesized)
gcaggatcataaaatacatgatctggttctccaccgctgtactgattggcctctacgtctttgagcgcttccccaccagcatgattggagtgggcctattcaccaacctcgtctactttg

SEQ ID NO: 384976 - DNA, 120 bp, Artificial Sequence
  ENSG00000144043_3 (sequence is synthesized)
gcctcctccagaccttccccttcatcatgctgacctcgcctaacttcatcctgtcgtgtggactagtggtggtgaatcattacctagcatttcagttttttgcagaagaatattatccct

SEQ ID NO: 384977 - DNA, 120 bp, Artificial Sequence
  ENSG00000144043_4 (sequence is synthesized)
tctcagaggtcctggcctatttcactttctgcctgtggataattccgtttgcgttttttgtgtcactttcggccggggagaacgtcctgccctctaccatgcagccaggagatgatgtcg

SEQ ID NO: 384978 - DNA, 120 bp, Artificial Sequence
  ENSG00000144043_5 (sequence is synthesized)
tctccaattatttcaccaaaggcaagcggggcaaacgcttagggatcctggttgtcttctccttcatcaaagaggccattctacccagtcgtcagaagatatactgacccccatgcaggc

SEQ ID NO: 384979 - DNA, 120 bp, Artificial Sequence
  ENSG00000144043_6 (sequence is synthesized)
aggatgtggggggcaagatcaggagagtcaggcccctgggcctctatgccaggtggggaccagaagtcgggaaggcacctaccacctgccctggctttcttcccctcaactctggagccc

SEQ ID NO: 384980 - DNA, 120 bp, Artificial Sequence
  ENSG00000144043_7 (sequence is synthesized)
catccccaccctccttggggggctcagcttggctcagatctgatgcttcaagaggctgtaacctcagagggcaccaaggagggtggcagagcctgcttagccaggaggccgaggtccctc

SEQ ID NO: 384981 - DNA, 120 bp, Artificial Sequence
  ENSG00000144043_8 (sequence is synthesized)
agtcctcccctgtcccttccaaggtgggtcaggaggttctggccccgctggggcaggcagggcagggtctgtgaagcttaagagcagatggtgacaagttctctgggcaggtggccatgg

SEQ ID NO: 384982 - DNA, 120 bp, Artificial Sequence
  ENSG00000144043_9 (sequence is synthesized)
ggaggggccatggcttggcatgtccaacagaaatagtttttgctgttgaacggtgatttctgtccaagtgcagatttccgtttgaataaagcttcgcttctaggtggcactgtttgcctt

SEQ ID NO: 384983 - DNA, 120 bp, Artificial Sequence
  ENSG00000144043_10 (sequence is synthesized)
aataccctgacagttcatcttcctttcttcctgctaaccttctgctctggactggactcacttttctgctccagggactccttttctgggtttgggtcttgcccttcccaagggactgtt

SEQ ID NO: 384984 - DNA, 120 bp, Artificial Sequence
  ENSG00000144043_11 (sequence is synthesized)
cttgtggcccttaatgggaagggggcaggggtgaggagctgagcctgctcaaggagtgggaagtggggctataggcagcctctctgatgcactctcttccatctctttccccaaggctcc

SEQ ID NO: 384985 - DNA, 120 bp, Artificial Sequence
  ENSG00000144043_12 (sequence is synthesized)
gtgactgtcaaactgggagtaggagaggggacaatttaggactgggctagattttcagaagaacatctacaatatcctatttataaatcttcctctgggaaaaggagtggtttctggctg

SEQ ID NO: 384986 - DNA, 120 bp, Artificial Sequence
  ENSG00000144043_13 (sequence is synthesized)
aatactatcttaggctcaaggagaaacaaaataaaaattagcttccaggcagcctgtttttaaagaaatgggactaatgggagaagctgtttgtcactctaagagcatccaagccctggc

SEQ ID NO: 384987 - DNA, 120 bp, Artificial Sequence
  ENSG00000144043_14 (sequence is synthesized)
tgtgcactcttggctcctggggagatatatctgccttctaagaaggcaggccaggtcttgggcacagacctgcatttgttgaccttgcactccaactatagtgccttgcaagtgctcaac

SEQ ID NO: 384988 - DNA, 120 bp, Artificial Sequence
  ENSG00000144043_15 (sequence is synthesized)
agtacatattggaatgaagtccctatgagagccatttctggccatgttctatacctcaaagtgaggctggcaggtacagagatgaactgtacacatgtgatacatttaagccactggaaa

SEQ ID NO: 384989 - DNA, 120 bp, Artificial Sequence
  ENSG00000144043_16 (sequence is synthesized)
aacccctgtgcttgaaaatatttcctctatatcatgcctggagttccatcatagcccttcatttccttggctttagcatttaccttctcttaagaataccagctttcccctttccctgag

SEQ ID NO: 384990 - DNA, 120 bp, Artificial Sequence
  ENSG00000144043_17 (sequence is synthesized)
aggaagagcacatgttggtctcctcttagtgtgaacgagattgccaggcccttttctcctatgcacaccaggatagacaaggcaggggatactggcagcctgcatcatcctcccattggg

SEQ ID NO: 384991 - DNA, 120 bp, Artificial Sequence
  ENSG00000144043_18 (sequence is synthesized)
ctgacagctggccctactttcctccctctgctgcttggtccctcaccttgatgatgtggcttcgccccctccactctactgccagtgttctcccagggcttgctaaatccagcagacccc

SEQ ID NO: 384992 - DNA, 120 bp, Artificial Sequence
  ENSG00000144043_19 (sequence is synthesized)
tttcctgtcttactagatctgggcagcatttgacatggctgatcaccccttgcttcttggatggcacttccctggcacctctgtggctagttgtcctacctccctggctgttcctttcag

SEQ ID NO: 384993 - DNA, 120 bp, Artificial Sequence
  ENSG00000144043_20 (sequence is synthesized)
gcttccgtgcaggcttctccacttgcccatgcacagtagggtctttcagggttctgctgtgggctccctagggaagcccatccatctggatggtttcaaggatggtgaggaatttagagt

SEQ ID NO: 384994 - DNA, 120 bp, Artificial Sequence
  ENSG00000144043_21 (sequence is synthesized)
tgacctccagccccaacatccttcctgatcacctgaaccacagttttgctgccctctaggtgcacagacaattcaggtccatggcccagatggtacttgctgtcttctgcaaacctgccc

SEQ ID NO: 384995 - DNA, 120 bp, Artificial Sequence
  ENSG00000144043_22 (sequence is synthesized)
cttctgggtacttcccttgaccccgagatcactcaggagccagacaggaaacttattctattcctgttttctctttctgcccaccacatccaatctctcaaaacggtcaggtctacctta

SEQ ID NO: 384996 - DNA, 120 bp, Artificial Sequence
  ENSG00000144043_23 (sequence is synthesized)
acatctcttgatttgagccactcccactgtcatcagctttcacctggattatcgtgacagcctcctactgcttctctatcatgtggccagagctatcttcctaaaatgcattgcatagtt

SEQ ID NO: 384997 - DNA, 120 bp, Artificial Sequence
  ENSG00000144043_24 (sequence is synthesized)
gatcaagtcactctctggcctaaaaccttccttggctccctgctgccctcaggataaagtctggacccctcagcatggcttgtgagactcatggtgtccttgtccctgctcacctctctg

SEQ ID NO: 384998 - DNA, 120 bp, Artificial Sequence
  ENSG00000144043_25 (sequence is synthesized)
gtctcatcacttgccttcttgcattctgggtcccagcctcctgtatccagagatgcagtggctctccattgccactctgattcctcctttcttttggtcacagagaaagggtactttctc

SEQ ID NO: 384999 - DNA, 120 bp, Artificial Sequence
  ENSG00000144043_26 (sequence is synthesized)
tgtcaaatctcaacttagacttgacttcctccaaggagctttggctatactctctcctcccgacccccaccctggcatactacacagatcactctgggctcacttgcctgcctaatggtc

SEQ ID NO: 385000 - DNA, 120 bp, Artificial Sequence
  ENSG00000144043_27 (sequence is synthesized)
atctccccagtagactgtaagctccttgagggcaaggattgtgttggaatttttgtattaacagtgcctggcttggtgcctggcacctagaaagcactcaataaatgtttgtttaatgaa

SEQ ID NO: 385001 - DNA, 120 bp, Artificial Sequence
  ENSG00000144043_28 (sequence is synthesized)
gaacttgcatggtttactttataaacttagctatgatttgaaactgaatctgttcaaggattacatgtttgaaaaaaacaaaacatagatggtttgagaaagctgtgtggatggggacag

SEQ ID NO: 385002 - DNA, 120 bp, Artificial Sequence
  ENSG00000144043_29 (sequence is synthesized)
tactagggtgaccttctctgacacagtcctcacagggcagggatggactgcacccctgagccccagcttttcccagtggccgccaaggttttcttctcccacgatttctccacaccctgc

SEQ ID NO: 385003 - DNA, 120 bp, Artificial Sequence
  ENSG00000144043_30 (sequence is synthesized)
tgctccagtttgaacctctgggaagagcaaggtcacttctttggggggtgtgggtcagtcagtcatggcttagcactttgtctgcctccttcagtccaggggagttgcttgtcctagcga

SEQ ID NO: 385004 - DNA, 120 bp, Artificial Sequence
  ENSG00000144043_31 (sequence is synthesized)
ccaagatatggggtttgtggccacattcagtcattttcagcctccacctttccccacagaaggatttccatgtctgagggtggcgttccctgcttcccaggcctgggccccctttggaga

SEQ ID NO: 385005 - DNA, 120 bp, Artificial Sequence
  ENSG00000144045_0 (sequence is synthesized)
gactacgtgggtctggagctgactgccgtcctgacacgtcctagagctgcaagtcctgccagagagccaccatgacctctcagcctctcaggctagcagaagagtatggcccaagtcctg

SEQ ID NO: 385006 - DNA, 120 bp, Artificial Sequence
  ENSG00000144045_1 (sequence is synthesized)
gggagtctgaactggctgtgaacccctttgatgggcttcccttctcttcccgctactatgagctgctgaagcagcgccaagccttgcccatctgggctgctcgctttaccttcttggagc

SEQ ID NO: 385007 - DNA, 120 bp, Artificial Sequence
  ENSG00000144045_2 (sequence is synthesized)
agttggagagtaaccccactggagtggtgctggtgtctggggagcctggttctggcaagagcacccagatccctcagtggtgtgcagagtttgcgctggccagagggttccagaaaggac

SEQ ID NO: 385008 - DNA, 120 bp, Artificial Sequence
  ENSG00000144045_3 (sequence is synthesized)
aggttactgttactcagccctaccctcttgcagcccggagcctggctctgcgggttgctgatgagatggacctgaccctgggtcatgaggttggatacagcatcccccaggaggactgca

SEQ ID NO: 385009 - DNA, 120 bp, Artificial Sequence
  ENSG00000144045_4 (sequence is synthesized)
cggggcccaacaccctgctcaggttctgctgggacaggctgcttctgcaggaggtggcctcgacccgaggcactggagcctggggcgtgctggtactagatgaggctcaggagcggtcgg

SEQ ID NO: 385010 - DNA, 120 bp, Artificial Sequence
  ENSG00000144045_5 (sequence is synthesized)
tggcatcagattcactccaggggctactgcaagatgccaggctggaaaaacttccgggggacctcagagtggttgtggttactgacccagcccttgaacctaagctccgagctttctggg

SEQ ID NO: 385011 - DNA, 120 bp, Artificial Sequence
  ENSG00000144045_6 (sequence is synthesized)
gcaatcctcctattgtgcatatacccagagagcctggtgagagaccttcccccatctactgggacaccatcccacctgatcgggtggaagctgcctgccaagcagtgcttgaattgtgtc

SEQ ID NO: 385012 - DNA, 120 bp, Artificial Sequence
  ENSG00000144045_7 (sequence is synthesized)
ggaaggagcttccaggagatgtgctagtgttcctgcccagtgaggaggaaatttccctgtgctgtgaatccttgtccagggaggtagagtccttgcttctccaagggcttccaccacgag

SEQ ID NO: 385013 - DNA, 120 bp, Artificial Sequence
  ENSG00000144045_8 (sequence is synthesized)
tactgccccttcacccagactgtggacgagccgttcaggctgtgtatgaggacatggatgcccgaaaggttgtggtcactcactggctggctgacttctccttctccctcccttccatcc

SEQ ID NO: 385014 - DNA, 120 bp, Artificial Sequence
  ENSG00000144045_9 (sequence is synthesized)
aacatgtcatcgactcaggactggagctccgaagtgtttacaatcctaggatccgagcagaattccaagtgttgaggccaatcagcaagtgtcaggcagaggcaagacgattgcgagcaa

SEQ ID NO: 385015 - DNA, 120 bp, Artificial Sequence
  ENSG00000144045_10 (sequence is synthesized)
tgcctctgcctgtatcctaagtccttcttagaactagaagctccaccattgccacaacccagggtgtgtgaggagaatctgagctccctggtgttactactaaaaaggagacagattgca

SEQ ID NO: 385016 - DNA, 120 bp, Artificial Sequence
  ENSG00000144045_11 (sequence is synthesized)
gagccaggggagtgtcacttcctggaccagcctgctccagaagcactgatgcaagccctggaagatttagactatctggcagccctggatgatgatggggacctgtcagatctgggtgtc

SEQ ID NO: 385017 - DNA, 120 bp, Artificial Sequence
  ENSG00000144045_12 (sequence is synthesized)
atactatcagaattccctctggcccctgagctggccaaagccctgctggcctcatgcgagtttgactgtgtggacgagatgctcaccctggctgccatgctcacagctgcccctgggttt

SEQ ID NO: 385018 - DNA, 120 bp, Artificial Sequence
  ENSG00000144045_13 (sequence is synthesized)
acccgtcctccactcagtgcagaagaagctgccctgcgtcgggccctggaacacacggatggtgaccacagttctctgatccaggtgtatgaagcctttatacaaagtggagcagatgag

SEQ ID NO: 385019 - DNA, 120 bp, Artificial Sequence
  ENSG00000144045_14 (sequence is synthesized)
gcttggtgccaggctcgaggtctgaattgggcagcattgtgccaagcccataaacttcggggagaactcctagaactcatgcaacgaattgaacttcccttgtccctaccagcctttggc

SEQ ID NO: 385020 - DNA, 120 bp, Artificial Sequence
  ENSG00000144045_15 (sequence is synthesized)
tctgagcagaatcgcagagaccttcagaaagcactggtgtcaggatactttctcaaggtggccagagacacagacgggactggaaattaccttctcctaacccataagcatgtggcccag

SEQ ID NO: 385021 - DNA, 120 bp, Artificial Sequence
  ENSG00000144045_16 (sequence is synthesized)
ctctcctcatactgctgctaccgaagccgcagagctcctgccagacccccaccatgggtgctctaccacaatttcaccatatccaaagacaactgcctttccattgtttctgagattcaa

SEQ ID NO: 385022 - DNA, 120 bp, Artificial Sequence
  ENSG00000144045_17 (sequence is synthesized)
ccacagatgctggtggaattggcccctccatacttcctgagtaacttgcctcccagtgagagcagagaccttctgaaccagctaagggaaggaatggcagattctacagcagggagcaaa

SEQ ID NO: 385023 - DNA, 120 bp, Artificial Sequence
  ENSG00000144045_18 (sequence is synthesized)
tcatcctcagcccaggagttcagagatccctgtgtcctgcagtgacctgcctgcctatggaatggagctgggttcatctcatcacattagattatccctcagggtgacaccaaagcaccc

SEQ ID NO: 385024 - DNA, 120 bp, Artificial Sequence
  ENSG00000144045_19 (sequence is synthesized)
agacagatttagaagcccaaagtttagggtcaaatgtaaaccctggaacctgagtcccaagaaatggtagactgggaatggaaagaatggggtaaaccacagtctacatagggaaggact

SEQ ID NO: 385025 - DNA, 120 bp, Artificial Sequence
  ENSG00000144045_20 (sequence is synthesized)
ctttccttagccttctcttattgattggagagggactgacatgctcctcattctcttaactttgccaaacccattcttgtactcccttgtgatctataaaagatttttctatgatgccaa

SEQ ID NO: 385026 - DNA, 120 bp, Artificial Sequence
  ENSG00000144045_21 (sequence is synthesized)
ggaatttacctttgtacttcacacggtcagggttggtggtgactacgtgggtctggagctgactgccgtcctgacacgtcctagagctgcaagcaggtcctgccagagagccaccatgac

SEQ ID NO: 385027 - DNA, 120 bp, Artificial Sequence
  ENSG00000144045_22 (sequence is synthesized)
catgtcatcgactcaggactggagctccgaagtgtgagtgagagagagagatagcggtggggtagtaaagacagaaatggcccactctgatctgtcttggccttggttgggggacgggca

SEQ ID NO: 385028 - DNA, 120 bp, Artificial Sequence
  ENSG00000144045_23 (sequence is synthesized)
acaggtttacaatcctaggatccgagcagaattccaagtgttgaggccaatcagcaagtgtcaggcagaggcaagacgattgcgagcaagagggttcccaccaggtaagagcctttgccc

SEQ ID NO: 385029 - DNA, 120 bp, Artificial Sequence
  ENSG00000144045_24 (sequence is synthesized)
acttcacacggtcagggttggtggtgactacgtgggtctggagctgactgccgtcctgacacgtcctagagctgcaagcagatccctcagtggtgtgcagagtttgcgctggccagaggg

SEQ ID NO: 385030 - DNA, 120 bp, Artificial Sequence
  ENSG00000144048_0 (sequence is synthesized)
agtaagccagcgtggctacgccatcacgaccggcggtggcacatgcgcaatagcgagacgctggagcgcggcgtaggtggctgccgagtcttttcctgtttagggtcttatcctggcatt

SEQ ID NO: 385031 - DNA, 120 bp, Artificial Sequence
  ENSG00000144048_1 (sequence is synthesized)
gagggcgccggactggcgcttttggccgacttggcattgggtgggcggcttcttgggacccacatgagccagtggcatcatccccgcagtggctggggccggagacgcgacttttcagga

SEQ ID NO: 385032 - DNA, 120 bp, Artificial Sequence
  ENSG00000144048_2 (sequence is synthesized)
cgctcctcagccaagaagaagggcggaaaccacatccccgaaaggtggaaagactatctcccagttggacagcggatgcctgggactcgtttcattgctttcaaagttcctttgcaaaag

SEQ ID NO: 385033 - DNA, 120 bp, Artificial Sequence
  ENSG00000144048_3 (sequence is synthesized)
agttttgaaaagaaacttgctccagaagaatgcttttcccctttggatctttttaacaaaatccgagaacaaaatgaagaacttggactgattattgatttaacatatactcaacgctat

SEQ ID NO: 385034 - DNA, 120 bp, Artificial Sequence
  ENSG00000144048_4 (sequence is synthesized)
tataaaccagaggatttgccagaaactgttccttacttaaaaatttttacagttggacatcaagtgcctgatgatgagactatttttaaattcaaacacgctgttaatgggtttttgaaa

SEQ ID NO: 385035 - DNA, 120 bp, Artificial Sequence
  ENSG00000144048_5 (sequence is synthesized)
gaaaataaagataatgataaacttattggtgtccactgtacccatggtttaaacaggactggctacctcatttgcagatatttgattgatgtagaaggcgtgaggccagatgatgcaatt

SEQ ID NO: 385036 - DNA, 120 bp, Artificial Sequence
  ENSG00000144048_6 (sequence is synthesized)
agtgtacccaggtcaagtgattttgaagactcagcacatctcatgcaaccagtccacaataagcctgttaaacaaggacctaggtataatctacatcagatccagggtcactcagctcct

SEQ ID NO: 385037 - DNA, 120 bp, Artificial Sequence
  ENSG00000144048_7 (sequence is synthesized)
cgacatttccacacccagacccaaagtttgcaacaatcagtcagaaaattttcagagaatccacatgtttaccagagacaccatctccctcctcctggtccccctggagaggactattca

SEQ ID NO: 385038 - DNA, 120 bp, Artificial Sequence
  ENSG00000144048_8 (sequence is synthesized)
cacaggaggtattcttggaatgtgaagcccaatgccagtcgggcagcccaggatagaagaaggtggtatccttataattactccagactctcctatccagcctgttgggaatggacccag

SEQ ID NO: 385039 - DNA, 120 bp, Artificial Sequence
  ENSG00000144048_9 (sequence is synthesized)
tgatacaaacctgtcctggaattctacctggagaccagagctggcctgaaaattactggtgtgacttttaattagttcaggtctaatcaggtttctttattgttcccttatgtattcaag

SEQ ID NO: 385040 - DNA, 120 bp, Artificial Sequence
  ENSG00000144048_10 (sequence is synthesized)
cttaaggaaaaattgcattgctgtttacctctttgctgataaatttgcagtaattacagcattgcaggaaaaacaatctgttattccagtcttaaatttttctaaaagaagacaatattt

SEQ ID NO: 385041 - DNA, 120 bp, Artificial Sequence
  ENSG00000144048_11 (sequence is synthesized)
tagaactgaagcattgagaacttcccttgcaaattatttttaaaattctatcttgtttttctatgtatttctttctgactagacttgtgatatgcgtgtgtttatgtacagaaattttta

SEQ ID NO: 385042 - DNA, 120 bp, Artificial Sequence
  ENSG00000144048_12 (sequence is synthesized)
gtgtttttgttatgttctgttattgacccaaaggccatctttattttctataactgttcaaaatttatattaaaatctacttaggagataatttctttagaacctagttactacctgtaa

SEQ ID NO: 385043 - DNA, 120 bp, Artificial Sequence
  ENSG00000144048_13 (sequence is synthesized)
agaagtagaagaaaagattaaaaaactctgagtcttagagttatgtgaaagagacaagaaagggcaaagattaagaatgggacggacccctagaagcaaaacaagaaagagtgcaccagt

SEQ ID NO: 385044 - DNA, 68 bp, Artificial Sequence
  ENSG00000144048_14 (sequence is synthesized)
gacggacccctagaagcaaaacaagaaagagtgcaccagtggaattgcccctttgtcatatgtattta

SEQ ID NO: 385045 - DNA, 120 bp, Artificial Sequence
  ENSG00000144048_15 (sequence is synthesized)
aattcccaaaatggaacctcctcaattccttgttacgttggcacggaaagtgtaatggtttgagttaggaacccagcagtagtagcgccctgagatctcacatggaaagttggtggaaag

SEQ ID NO: 385046 - DNA, 78 bp, Artificial Sequence
  ENSG00000144048_16 (sequence is synthesized)
gaaagaaaataaagataatgataaacttattggtgtccactgtacccatggtttaaacaggactggctacctcatttg

SEQ ID NO: 385047 - DNA, 90 bp, Artificial Sequence
  ENSG00000144048_17 (sequence is synthesized)
aagtgctggtgactccttattctttttaaggcctgcgttgttctttgcacaccgatgaacacaaaagtcagaagtttttgatattataaa

SEQ ID NO: 385048 - DNA, 120 bp, Artificial Sequence
  ENSG00000144048_18 (sequence is synthesized)
accgatgaacacaaaagtcagaagtttttgatattataaaacattgaagtagtgaacatttctatgtaaatatttttgaatgcatatctcatagccccggaggtaatttcactcaaaata

SEQ ID NO: 385049 - DNA, 120 bp, Artificial Sequence
  ENSG00000144048_19 (sequence is synthesized)
atagtatgtgtcgttatgctttttatggatgttgccacactgtactgagttatgtttgttcattcagaaaatatctcctgagcatctattatgtgtaagcagtgtgctgcgtgttagcaa

SEQ ID NO: 385050 - DNA, 120 bp, Artificial Sequence
  ENSG00000144048_20 (sequence is synthesized)
agagactttagctgccctttgtgcgtcctaacagtctagggagggagtagatattaaagaatcacacaaatgcctatacaattacaattccaacaagtgctgagaaggggagtgacatgg

SEQ ID NO: 385051 - DNA, 120 bp, Artificial Sequence
  ENSG00000144048_21 (sequence is synthesized)
tacaatgagagcatagaatagggaggatttgacttcaacaagaggactagaggtttctgtggggaggtctgagcaaatatctgaagtataagtaggtgttaaccaggtagggatgttgtg

SEQ ID NO: 385052 - DNA, 120 bp, Artificial Sequence
  ENSG00000144048_22 (sequence is synthesized)
gagagaattctgaacgtaaggatcagcagagaccatattaacaggaaaatatatactgtgttggaggaactggctagggagactgggccatgggggtagtatggcgttaaaatggagctg

SEQ ID NO: 385053 - DNA, 120 bp, Artificial Sequence
  ENSG00000144048_23 (sequence is synthesized)
gaaatatgaataggagctgaaaccatgcagagctatgtttaaggttttagtcactaccttaagagcaatagaaaaccattgaattttttttgttggggatgagtgtggggaacacattca

SEQ ID NO: 385054 - DNA, 120 bp, Artificial Sequence
  ENSG00000144048_24 (sequence is synthesized)
aatttgtattttcaacctatcattttgctgctgagtggagaatacactgcagagggaaagaggtagaagcaaggagacaagttgggaggtgtttgtaggaactgaggcataatggtggat

SEQ ID NO: 385055 - DNA, 120 bp, Artificial Sequence
  ENSG00000144048_25 (sequence is synthesized)
tggaccagggcatggtggtcattttggtagaaagatacagatatactctatagagatatttaggtaatattgttgtcaggagttggtggtgaattgaatatgagagtttggaagaaatgg

SEQ ID NO: 385056 - DNA, 120 bp, Artificial Sequence
  ENSG00000144048_26 (sequence is synthesized)
ctgacagtgatggtgactcccaagtttctggcccattctgttggttatacagtattttttagatataatgttaatatttttcccaatttgtcttttgttcattgttggtttctgataaat

SEQ ID NO: 385057 - DNA, 120 bp, Artificial Sequence
  ENSG00000144048_27 (sequence is synthesized)
tttctgataaatactctgtcatattaaggaagtctctatttttagtgtataaagcattttgataaaaaatgattctgcattttctttccttttgtttattaaattacattaatgtaaata

SEQ ID NO: 385058 - DNA, 120 bp, Artificial Sequence
  ENSG00000144057_0 (sequence is synthesized)
ttccgccggggcaggcgccgggactccctcctggccgcccacagcctgtgcgcattcctgcattcctgccgccgcccgggacccgagtgccccggaggtgtccaggcgcggtgccaggcg

SEQ ID NO: 385059 - DNA, 120 bp, Artificial Sequence
  ENSG00000144057_1 (sequence is synthesized)
ggtactgtgcaggttcattctgccacccatctgcattaagacacaaggtgctgaccgcagagacctgccatgaaaccacacttgaagcaatggagacaacgaatgcttttcggaatattc

SEQ ID NO: 385060 - DNA, 120 bp, Artificial Sequence
  ENSG00000144057_2 (sequence is synthesized)
gcttgggggctcctctttttgctgattttcatctacttcaccgacagcaaccccgctgagcctgtacccagctccctctccttcctggagaccaggaggctcctgccggtgcaggggaag

SEQ ID NO: 385061 - DNA, 120 bp, Artificial Sequence
  ENSG00000144057_3 (sequence is synthesized)
cagcgggccatcatgggcgccgcacatgagccctccccgcctgggggcctggacgcacgccaggcgctgccccgcgcccacccagccggttcctttcatgcggggcctggagacctgcag

SEQ ID NO: 385062 - DNA, 120 bp, Artificial Sequence
  ENSG00000144057_4 (sequence is synthesized)
aaatgggcccagtcccaagatgggtttgaacataaagagtttttttcatcccaggtggggagaaaatctcaaagtgctttctacccggaggatgacgactacttttttgctgctggtcag

SEQ ID NO: 385063 - DNA, 120 bp, Artificial Sequence
  ENSG00000144057_5 (sequence is synthesized)
ccagggtggcacagccacactcaggggacattgggattcccttcccccggggagccaggcccacgggagggggcttttccggctgcacaggtccagaggaggcgggtgaagaagaggcac

SEQ ID NO: 385064 - DNA, 120 bp, Artificial Sequence
  ENSG00000144057_6 (sequence is synthesized)
cggaggcagagaaggagccacgtgttggaggagggcgacgacggcgacaggctgtactcctccatgtccagggccttcctgtaccggctctggaaggggaacgtctcttccaaaatgctg

SEQ ID NO: 385065 - DNA, 120 bp, Artificial Sequence
  ENSG00000144057_7 (sequence is synthesized)
aacccgcgcctgcagaaggcgatgaaggattacctgaccgccaacaagcacggggtgcgcttccgcgggaagcgggaggccgggctgagcagggcacagctgctgtgccagctgcggagc

SEQ ID NO: 385066 - DNA, 120 bp, Artificial Sequence
  ENSG00000144057_8 (sequence is synthesized)
cgtgcggacgctggacggcaccgaggcgcccttttctgcgctgggctggcggcgcctggtgcccgccgtgcccctgagccagctgcacccccgcggcctgcgcagctgcgctgtcgtcat

SEQ ID NO: 385067 - DNA, 120 bp, Artificial Sequence
  ENSG00000144057_9 (sequence is synthesized)
gtcgtcatgtctgcaggcgcaatcctcaactcttccttgggcgaggaaatagattctcatgatgcggttttgagatttaactctgctcctacacgtggttatgagaaagatgttgggaat

SEQ ID NO: 385068 - DNA, 120 bp, Artificial Sequence
  ENSG00000144057_10 (sequence is synthesized)
aaaaccaccatacgcatcattaattcgcagattctgaccaaccccagccatcacttcattgacagttcactgtataaagacgtcattttggtggcctgggaccctgccccatattccgca

SEQ ID NO: 385069 - DNA, 120 bp, Artificial Sequence
  ENSG00000144057_11 (sequence is synthesized)
aatcttaacctgtggtacaaaaaaccggattacaacctgttcactccatatattcagcatcgtcagagaaacccaaatcagccattttacattcttcatcctaaatttatatggcagctc

SEQ ID NO: 385070 - DNA, 120 bp, Artificial Sequence
  ENSG00000144057_12 (sequence is synthesized)
tgggatattatccaggagaacactaaagagaagattcaaccaaacccaccatcttctggtttcattggaatcctcataatgatgtccatgtgcagagaggtgcacgtgtatgaatatatc

SEQ ID NO: 385071 - DNA, 120 bp, Artificial Sequence
  ENSG00000144057_13 (sequence is synthesized)
ccatccgtgcggcagacggagctgtgccactaccacgagctgtactacgacgcagcctgcaccctcggggcgtaccacccactactctatgagaagctcctggtgcagcgcctgaacatg

SEQ ID NO: 385072 - DNA, 120 bp, Artificial Sequence
  ENSG00000144057_14 (sequence is synthesized)
ggcacgcagggggatttgcatcgcaagggcaaggtggttcttcccggcttccaggcggtgcactgccctgcaccaagtccagtcattccacactcttaaaaagggtttcttgggaatcaa

SEQ ID NO: 385073 - DNA, 120 bp, Artificial Sequence
  ENSG00000144057_15 (sequence is synthesized)
tgtgcaataaggtactactgttgtactcaaagtcacaaaagaatacttgaagatagattttagacagtgtagttttgagtctttaaacagtaatttagtggtggtcatgataatccttct

SEQ ID NO: 385074 - DNA, 120 bp, Artificial Sequence
  ENSG00000144057_16 (sequence is synthesized)
ctttctaagccattgagtatgtattactgctttgaacatagaaatggtttttttaaaaaaataaggctcaagaaagatgcaaaaccaaggatagctagaaagaaaacacatgtatgacca

SEQ ID NO: 385075 - DNA, 120 bp, Artificial Sequence
  ENSG00000144057_17 (sequence is synthesized)
tgggtatgatacctccagaaatgttaacaacttattcttctgccatgagtacccctcatcagggttggtttcaatgacaggttttggtgatgttcctgaccatatgaagtggtttatgtt

SEQ ID NO: 385076 - DNA, 120 bp, Artificial Sequence
  ENSG00000144057_18 (sequence is synthesized)
tagaaacattcaaattgagggacatcatttacagcatcgagtgtgtcagttatacatgcattcatcattaaatatcctaggttttatgacagacattgaaattatcactcagatgtgttt

SEQ ID NO: 385077 - DNA, 120 bp, Artificial Sequence
  ENSG00000144057_19 (sequence is synthesized)
aacagcaaaaaattcccagcacatcctggcaaaggcttttatttccaaccgttgcattcttcatctctgcctcccattgcccactgaatgctttgctttctgtgcatcaagacagagttc

SEQ ID NO: 385078 - DNA, 120 bp, Artificial Sequence
  ENSG00000144057_20 (sequence is synthesized)
taaaaccagaaaacatccatcttgaaaggtccaagaaaaagccaaattccatatagcaccacagaggaggccctttgtttccctgcagtatttcaaccaggaacattagtatcacatcca

SEQ ID NO: 385079 - DNA, 120 bp, Artificial Sequence
  ENSG00000144057_21 (sequence is synthesized)
ccaggaggcacatcactggcaagtaacatagaatcacagggctgcaggtgcccctggacactccccggttctggcttttctgccttgtacctcctcacctgcagatctaccctgcagctt

SEQ ID NO: 385080 - DNA, 120 bp, Artificial Sequence
  ENSG00000144057_22 (sequence is synthesized)
ttgcatagtcagtgacacacttgacaattggcacagctgtgctggggaagacgggagacaccttgctccttccaaactagaaggaaagattttggagccatcaccctgtgcttctaggga

SEQ ID NO: 385081 - DNA, 120 bp, Artificial Sequence
  ENSG00000144057_23 (sequence is synthesized)
tgcacgcctgtctttattatacaggtttcttgcaggtttttatcagccagtgggaactccacagtgatgagcactgaatcttcactaaatcttcctacagacatttaggaatccagtcct

SEQ ID NO: 385082 - DNA, 120 bp, Artificial Sequence
  ENSG00000144057_24 (sequence is synthesized)
tgcttttgcagatatgttttatgtcagcagcatgacaaagccatataattaaataatttatgtgaaagcattgcttattaacaaggaaaatatgtagatgcttcagagggaaaggcagct

SEQ ID NO: 385083 - DNA, 120 bp, Artificial Sequence
  ENSG00000144057_25 (sequence is synthesized)
agagggaaattttcatcccaatatgttagctatattcagggttgattttttctttaatctcaactgtcactgatacattgaaaaatttttgctatgaatatagtgaaacagaaacattct

SEQ ID NO: 385084 - DNA, 120 bp, Artificial Sequence
  ENSG00000144057_26 (sequence is synthesized)
gtaataccttaattaaacatgctattatttcaatgtataaccaaaacatatctccatggtacagttaagacttgttgcaatgacaatagcagcttaattaaatgcgttctcccttgcaaa

SEQ ID NO: 385085 - DNA, 120 bp, Artificial Sequence
  ENSG00000144057_27 (sequence is synthesized)
atgtatgaatgtcaggagagtttagtggaaaagttttctttgtttcaggattggtttcttctagactgttctcaggactactttcttgagcaagaatggcttacagagactgaaggcttc

SEQ ID NO: 385086 - DNA, 120 bp, Artificial Sequence
  ENSG00000144057_28 (sequence is synthesized)
cagcagatatggagctggaaaacaagacatctcctatagcttgctataatagtgaaggagaaattggaaagttttaatcacaataatatccaataaaagcccattttgagagttttgtta

SEQ ID NO: 385087 - DNA, 120 bp, Artificial Sequence
  ENSG00000144057_29 (sequence is synthesized)
ttttgttattaagtcaatgagaagggataggtaactttgtcctatatattaacttatgtctaaatagacatggttaagccatgttcctttctaatttcttttcttttctttttttttttt

SEQ ID NO: 385088 - DNA, 67 bp, Artificial Sequence
  ENSG00000144057_30 (sequence is synthesized)
ttttttttttttttttttgagacagtcagctctgcctcccacgttcacaccattctcctgcctcagc

SEQ ID NO: 385089 - DNA, 120 bp, Artificial Sequence
  ENSG00000144057_31 (sequence is synthesized)
aaagtgatgggattataggcgtgagccaccaccgcgcccggtcattcctttctaatttcttgaaaaaactttgtcttgtccttatgtttacatgtgtgtaataatttcagcaactctgga

SEQ ID NO: 385090 - DNA, 120 bp, Artificial Sequence
  ENSG00000144057_32 (sequence is synthesized)
atgtgggtgaggtggctgtggtggatgaatattactccctaccctccttggatctttctagatcttccagaccattaaatgcccctgaagctccttttatagttttgcaagtggatttac

SEQ ID NO: 385091 - DNA, 120 bp, Artificial Sequence
  ENSG00000144057_33 (sequence is synthesized)
ttgtagacatccttactatccagcataatcccccttggctgacatgagaacttggttagaggagaatttattggggtcagtgtaaatattcaagttcaaaagcctcagaacccaacactt

SEQ ID NO: 385092 - DNA, 120 bp, Artificial Sequence
  ENSG00000144057_34 (sequence is synthesized)
taaagatttttaaatggaattttgtcgtagtcattgtacttttaaaatagtactttcagtttcattgaggttacaagaaagactgaagagtacaaaggaaatttagttacaatttttgca

SEQ ID NO: 385093 - DNA, 120 bp, Artificial Sequence
  ENSG00000144057_35 (sequence is synthesized)
tttattatggccttaaagactcttgggaatcaggctctgttcaacagtcaataaatgtaatacacacattaatatagtactgactgggcgttcttctataaaagtttaagttctttggct

SEQ ID NO: 385094 - DNA, 120 bp, Artificial Sequence
  ENSG00000144057_36 (sequence is synthesized)
tctaagaaaatgttgggcagttacagttaacttgatgactacttctagtattagccaaatgggtcctaagtggcagcattttgccagacattgactaaatccttacatgccacatttact

SEQ ID NO: 385095 - DNA, 120 bp, Artificial Sequence
  ENSG00000144057_37 (sequence is synthesized)
gaattccaataaacatatagttcttctgtggagtagttaacagtaagtggcagctcactgaatttctcccaggttctgtctcttccaaaatcctccatcctctcttatgaagggaagctg

SEQ ID NO: 385096 - DNA, 120 bp, Artificial Sequence
  ENSG00000144057_38 (sequence is synthesized)
ataaaaaaaaatcctcttggtgcaagctgaagctgttaaggattccttttttcactctcaggaccaacagacgttcttttgtatttcaagataatttcacctgttgttgttgttgttgtt

SEQ ID NO: 385097 - DNA, 120 bp, Artificial Sequence
  ENSG00000144057_39 (sequence is synthesized)
gttgttgttgttgttgttgttgttgttacaaagaaacaaattttgagcagcaatgacaattcaaccatatctagattctccctaccttatttctccagccagtcacaccaggcagacggg

SEQ ID NO: 385098 - DNA, 120 bp, Artificial Sequence
  ENSG00000144057_40 (sequence is synthesized)
taacctttaacagacctggtgttctcatggaataccgatgctcgtcccagggagctgacctttctcactatgtccttatagagctgctcttacagagaactttgtgctcaggaccaaggg

SEQ ID NO: 385099 - DNA, 120 bp, Artificial Sequence
  ENSG00000144057_41 (sequence is synthesized)
atggtcaattaaaagttgcatgtaagcatcaggcttggatgggcaagggagggcttttatacatctttgaacgaccaggtctttccttgtctgcctgaaggcagagcttcgagaaacagc

SEQ ID NO: 385100 - DNA, 120 bp, Artificial Sequence
  ENSG00000144057_42 (sequence is synthesized)
acttcccatgtgtctggtcctcttggtctctcagccagacacttaatcaatcctggactctccagtagtcctcagtcattgtagccatagcatctgcaaaaaaagaaatgctaaaataat

SEQ ID NO: 385101 - DNA, 120 bp, Artificial Sequence
  ENSG00000144057_43 (sequence is synthesized)
cattagcgttttcaaaattaggaaatcaaagtagctgggtcactctcttacatgtgtatgagccagttaattctgctggacagatcatacttacgctgctgattgactcttctgagcagt

SEQ ID NO: 385102 - DNA, 120 bp, Artificial Sequence
  ENSG00000144057_44 (sequence is synthesized)
aacacatctcctgaattaattaggtaggtcccgtttgggtgctttaagtgggatcagtcttagatgagtgccagtatgtgattgaatttcatacgcacaaatgccatgattcaagttctc

SEQ ID NO: 385103 - DNA, 120 bp, Artificial Sequence
  ENSG00000144057_45 (sequence is synthesized)
tctccagtttttcttatagatcaacacacagtacatgtggtcagttacttggttgaatttctgcttagctgtggtaagagacagagaaagggagtgaggtgggaccaggggaattatcag

SEQ ID NO: 385104 - DNA, 120 bp, Artificial Sequence
  ENSG00000144057_46 (sequence is synthesized)
aaagacatgagtgaacctattggccaggtagcttccaagtatgttctattgtattgtctgttttgattctgatagtttagaactctttctgatagtttagaactcttacccagtggttac

SEQ ID NO: 385105 - DNA, 120 bp, Artificial Sequence
  ENSG00000144057_47 (sequence is synthesized)
atgactgatcaaggcaactccatctggaaattaattgcttgggtaaaatgtccctgagtttcaacttgtcttttatctctggatattctcttatgagattattatgcatgtttctgtcac

SEQ ID NO: 385106 - DNA, 120 bp, Artificial Sequence
  ENSG00000144057_48 (sequence is synthesized)
atgggcattatttacacacttgataaatgaaaggtatttctctgtccgttcaaggaaataaaatgtaagttcttgttttattaaatgaatgaagccttttggttaaaaaaaaagtaatgt

SEQ ID NO: 385107 - DNA, 120 bp, Artificial Sequence
  ENSG00000144057_49 (sequence is synthesized)
aatatgtttctgttcaaacttgagctaatgacatttaaggaattaaagacattgatctagttcttagtatgaaaagtgtacatgtagatatagttatataattgtgtatatacatatcta

SEQ ID NO: 385108 - DNA, 120 bp, Artificial Sequence
  ENSG00000144057_50 (sequence is synthesized)
cacacatggttggttttatattgctttttcatcaatatttttgactgaaacctttacaataaattttattttaattatgtaaccactaatattttgagagaaggaagcaaatgttatatg

SEQ ID NO: 385109 - DNA, 120 bp, Artificial Sequence
  ENSG00000144057_51 (sequence is synthesized)
tccttctgttaaaagaaaaaaaattcagtcctccgccaaccgcttcccacacactcatactctgcacatcttggctacattaaaatggactgacagaattatttaaaaggcactatgaag

SEQ ID NO: 385110 - DNA, 120 bp, Artificial Sequence
  ENSG00000144057_52 (sequence is synthesized)
gtagaacactaccttaatattttatcctagtcagaagcctgatttaacactgaactttgaagggaagcttagctgtagctcatggctttcaaagattagaagaaacatttactggttcta

SEQ ID NO: 385111 - DNA, 120 bp, Artificial Sequence
  ENSG00000144057_53 (sequence is synthesized)
tggaaaatagtcttcttgctaggtagattggaaacaaagaaattgcattggtggtgttaaaatctaacatttataacaaatcctgttttattctagatgaaatacttagacaattcttcc

SEQ ID NO: 385112 - DNA, 120 bp, Artificial Sequence
  ENSG00000144057_54 (sequence is synthesized)
agtggaaaccagtgaacttttttaacagctttgggaattcttttgtatgataatttttaaaatgaaatgtgtactcttcaaactaattaaagcttgaagttttccaggagtcgcatttta

SEQ ID NO: 385113 - DNA, 120 bp, Artificial Sequence
  ENSG00000144057_55 (sequence is synthesized)
aaagtgtttgtacacattttaacacttggatattttctattttggttttgtatatttttatgtatacacaatgtacagacttttttcttgtaaataaaacatgttttcatttgtctagaa

SEQ ID NO: 385114 - DNA, 120 bp, Artificial Sequence
  ENSG00000144057_56 (sequence is synthesized)
ccgcctctccccggggctcggggccgcggttcctctggccgcgggagccgccgccgcgctgcccgaaacaatgaggcgtgcagcgcggggctgagcgtagcctcccgccggctttgaggc

SEQ ID NO: 385115 - DNA, 120 bp, Artificial Sequence
  ENSG00000144057_57 (sequence is synthesized)
gaaacaatgaggcgtgcagcgcggggctgagcgtagcctcccgccggctttgaggccgagccacccgctgtgccccgccgcccgcgcttgcagctgccgccggcgcggagcagcgctggc

SEQ ID NO: 385116 - DNA, 120 bp, Artificial Sequence
  ENSG00000144057_58 (sequence is synthesized)
gggacgggagcgcggggcagctccgagaccccacggtggcaggaggaggactcgagcctgcggcaggacgactcccgccgcgcactcgccttctgcagcccccaagttccgcggcgtgag

SEQ ID NO: 385117 - DNA, 120 bp, Artificial Sequence
  ENSG00000144057_59 (sequence is synthesized)
tcggggaccccggccagggtcccagctctagcgggcgccagcgtgagtgtgggagcgcgtagcgcgcgcacccgagcggctgccggggaataaaatgtgacacgcacgccttggactcca

SEQ ID NO: 385118 - DNA, 64 bp, Artificial Sequence
  ENSG00000144057_60 (sequence is synthesized)
tggtttcattggctcatttgtaaaaattggccatatcagagcttgcagtgagccgagatcacgc

SEQ ID NO: 385119 - DNA, 120 bp, Artificial Sequence
  ENSG00000144057_61 (sequence is synthesized)
acactccgtgtttaggagcgagacccgtgtgtggggaatgttgaaggtggtttggggaaaagcaggaaattctggagaagcgaacgggaggacggcttgcgctttggggacgggcggata

SEQ ID NO: 385120 - DNA, 120 bp, Artificial Sequence
  ENSG00000144061_0 (sequence is synthesized)
gatggcgtcaccttctggcgccgccggttggtttccctggcaactggagcaatcagagcaccgcagccagggagatgctggcgagacgacagcgagatcctctccaggccctgcggcgcc

SEQ ID NO: 385121 - DNA, 120 bp, Artificial Sequence
  ENSG00000144061_1 (sequence is synthesized)
gcaatcaggagctgaagcaacaggttgatagtttgctttctgagagccaactgaaagaagctctagaacccaataaaagacaacatatttatcaaagatgtatccagttaaagcaggcaa

SEQ ID NO: 385122 - DNA, 120 bp, Artificial Sequence
  ENSG00000144061_2 (sequence is synthesized)
tagatgaaaataaaaatgctcttcaaaaattaagcaaagctgatgaatctgcacctgttgcaaactataatcagagaaaagaagaggagcatactcttttggacaagcttacccaacaac

SEQ ID NO: 385123 - DNA, 120 bp, Artificial Sequence
  ENSG00000144061_3 (sequence is synthesized)
tgcagggccttgctgtgacaataagcagagaaaatataactgaagttggggcacctactgaagaagaggaagaaagtgaaagtgaagatagtgaagacagtggtggggaggaagaagatg

SEQ ID NO: 385124 - DNA, 120 bp, Artificial Sequence
  ENSG00000144061_4 (sequence is synthesized)
cagaggaggaagaggaagagaaagaggaaaatgaatctcacaaatggtcaaccggtgaagaatacatcgctgttggagattttactgctcagcaagttggagatcttacatttaagaaag

SEQ ID NO: 385125 - DNA, 120 bp, Artificial Sequence
  ENSG00000144061_5 (sequence is synthesized)
gggaaattctccttgtaattgaaaaaaaacctgatggttggtggatagctaaggatgccaaaggaaatgaaggtcttgttcccagaacctacctagagccttatagtgaagaagaagaag

SEQ ID NO: 385126 - DNA, 120 bp, Artificial Sequence
  ENSG00000144061_6 (sequence is synthesized)
gccaagagtcaagtgaagagggcagtgaagaagatgtagaggcggtggatgaaacagcagatggagcagaagttaagcaaagaactgatccccactggagtgctgttcagaaagcgattt

SEQ ID NO: 385127 - DNA, 120 bp, Artificial Sequence
  ENSG00000144061_7 (sequence is synthesized)
cagaggcgggcatcttctgtcttgttaatcatgtctcgttttgctacctaatagttctgatgcgaaataggatggagactgtggaagacaccaatggatctgaaacagggttcagggcat

SEQ ID NO: 385128 - DNA, 120 bp, Artificial Sequence
  ENSG00000144061_8 (sequence is synthesized)
ggaatgtacagagcagaggacgtatatttctggtttctaagcctgtgctccaacagataaacactgttgatgtgttaactacgatgggagctattcctgcagggttcaggccttccacgc

SEQ ID NO: 385129 - DNA, 120 bp, Artificial Sequence
  ENSG00000144061_9 (sequence is synthesized)
tctcacagcttctggaggaagggaatcaatttcgagcaaattacttcttacaaccagagctcatgccttcacaactggccttcagagatctgatgtgggatgctacagaaggcactatta

SEQ ID NO: 385130 - DNA, 120 bp, Artificial Sequence
  ENSG00000144061_10 (sequence is synthesized)
ggtcgagaccaagtcgtatttcattgattctgacattatggagctgtaaaatgattcctcttccaggaatgagcatacaggttctcagcagacatgtacgcctctgtctatttgatggta

SEQ ID NO: 385131 - DNA, 120 bp, Artificial Sequence
  ENSG00000144061_11 (sequence is synthesized)
ataaggttctgagcaacattcatacagtcagagccacatggcaacctaaaaagcccaaaacatggaccttttctccccaggttactcgcatcttaccatgtttgcttgatggtgattgct

SEQ ID NO: 385132 - DNA, 120 bp, Artificial Sequence
  ENSG00000144061_12 (sequence is synthesized)
ttatcaggtctaattctgcatctccagatcttggaatattatttgaacttggaatttcttatattcgcaattcaactggtgaaagaggagagttaagctgtggctgggtgtttcttaaac

SEQ ID NO: 385133 - DNA, 120 bp, Artificial Sequence
  ENSG00000144061_13 (sequence is synthesized)
tttttgatgccagtggagttcctattccagcaaaaacttatgagcttttcttgaatggtggtactccttatgaaaaaggtattgaagtggacccttcaatatccagaagagcacacggca

SEQ ID NO: 385134 - DNA, 120 bp, Artificial Sequence
  ENSG00000144061_14 (sequence is synthesized)
gtgttttctaccagattatgacaatgagaaggcagcctcaacttctagtgaaactgagatccttgaacagaagatcaagaaatgtactaagtctactgccagaaacattaattggaaata

SEQ ID NO: 385135 - DNA, 120 bp, Artificial Sequence
  ENSG00000144061_15 (sequence is synthesized)
ttcttggagatgtgctcctgaaagacaggatgagcttgcaaagtactgatttaattagccatcccatgctggccaccttccccatgctcttggagcagcctgatgtgatggatgctctca

SEQ ID NO: 385136 - DNA, 120 bp, Artificial Sequence
  ENSG00000144061_16 (sequence is synthesized)
ggagttcgtgggctggaaaagaaagcacattaaaaagatcagagaagagagacaaagagttcctgaagtccacgtttctcctggtttaccatgactgcgtgctcccacttctccactcca

SEQ ID NO: 385137 - DNA, 120 bp, Artificial Sequence
  ENSG00000144061_17 (sequence is synthesized)
cacgcctacccccattcaggtgggcagaagaagagactgagactgcacggtggaaagttatcactgacttccttaagcaaaaccaagaaaaccagggcgccctccaagctctgctgtcac

SEQ ID NO: 385138 - DNA, 120 bp, Artificial Sequence
  ENSG00000144061_18 (sequence is synthesized)
cagacggagttcatgaaccttttgacctttcagagcagacctatgacttcttgggtgaaatgagaaagaatgcagtgtgacagtggcagcctctagccctcagcttcccacggaatcaga

SEQ ID NO: 385139 - DNA, 120 bp, Artificial Sequence
  ENSG00000144061_19 (sequence is synthesized)
tggatcctccacgattacgtgaataaaatgatggaaccaaaaatcactgtcactttacaacttaggttttactcttttctttctacagaccatatttttaaagaaatgtttatacaataa

SEQ ID NO: 385140 - DNA, 120 bp, Artificial Sequence
  ENSG00000144061_20 (sequence is synthesized)
aagcaagattttgtcaaaaactaaatttatgattattcaagaaagtgaaaaaaacaacctacagaatgggaaaacatatttgcaaatcatctaactgataaaggtctagtatccaaaata

SEQ ID NO: 385141 - DNA, 120 bp, Artificial Sequence
  ENSG00000144061_21 (sequence is synthesized)
tttaaatttatgagtgttaataaaatttatcttgttcaatgaagaggaagttaaagtgatccatttgagaaagttgtatcacttaattcagtctgatacttgaatgtgatttacccctaa

SEQ ID NO: 385142 - DNA, 120 bp, Artificial Sequence
  ENSG00000144061_22 (sequence is synthesized)
ttaagtacaaaaacagagtcgcttttgccttttcaaatcaagaaaataagtgctctgtcaaaagcacaaaaagaaactttcaggcactggagagtggagtcgactcaccctttcaggcct

SEQ ID NO: 385143 - DNA, 120 bp, Artificial Sequence
  ENSG00000144061_23 (sequence is synthesized)
tgttgcatctcagataaacctgtgactgctggtaaaataatgtcccaagcctttccttttagtgataaacagtagcagcctgcgttaattgagcacctactgtgtgtctgagcatttctc

SEQ ID NO: 385144 - DNA, 120 bp, Artificial Sequence
  ENSG00000144061_24 (sequence is synthesized)
attagcccagttaatcctcacacctactgtaggagataggtactgttgttttttattaccgccgaagaaacaggccagataagtgaagtaatttgcctaaggtcacagctaataagtggc

SEQ ID NO: 385145 - DNA, 120 bp, Artificial Sequence
  ENSG00000144061_25 (sequence is synthesized)
acagctaatattcccagtaaagataccatgtataattttctacaacctaagatgttctgccttatcggggcgaaccttttaggattccatgtgaaaataaaatatgaggaaaagtttaac

SEQ ID NO: 385146 - DNA, 120 bp, Artificial Sequence
  ENSG00000144061_26 (sequence is synthesized)
ctaaataattagaatcccattagaggtacttttttttgatggcatgctgccttaaaagagccatttatttttagagatctgtcatattatgaaagttctgggctatcttagctaacttat

SEQ ID NO: 385147 - DNA, 120 bp, Artificial Sequence
  ENSG00000144061_27 (sequence is synthesized)
aagttctgggctatcttagctaacttatcctaaacccttaacctaaatttaacttgagccccagtctcagaaattaacatggtatgaaggtgtttccaggccaggcgcggtggctcacgc

SEQ ID NO: 385148 - DNA, 120 bp, Artificial Sequence
  ENSG00000144061_28 (sequence is synthesized)
attaaaaagatcagagaagctctcaaagcctgtatcaccaagagaagggaaaaaaaaatggcctgagctgtaccatatattgaaaacaatgcattgctcctgcttaccttgctataaaat

SEQ ID NO: 385149 - DNA, 120 bp, Artificial Sequence
  ENSG00000144061_29 (sequence is synthesized)
atttctggtttctaagcctgtgctccaagtaacatttctcattagtttttttttttttttgtacaaaaagaatagataattcatggtgtcacttgaggacttggaaacattctcattgat

SEQ ID NO: 385150 - DNA, 120 bp, Artificial Sequence
  ENSG00000144061_30 (sequence is synthesized)
cctgctttcctatcatttgagtggaaacagatgttaaattttatttactattcgaaaaatcctgaaagcctttaataaaaagtaagaaattggccaggcatggtgattcacactggtaat

SEQ ID NO: 385151 - DNA, 76 bp, Artificial Sequence
  ENSG00000144061_31 (sequence is synthesized)
acattttgggaattgagcaacatagtgagaccctatcctacaaaaaataagaaaaattagccaggtgtggtggctc

SEQ ID NO: 385152 - DNA, 85 bp, Artificial Sequence
  ENSG00000144061_32 (sequence is synthesized)
ggaggattgcatgagtttgggaagtcaaggagcatgagtgacagggcaagaccctgtcttaaaaaaaaaaaagtaattaattaca

SEQ ID NO: 385153 - DNA, 120 bp, Artificial Sequence
  ENSG00000144061_33 (sequence is synthesized)
gcaagaccctgtcttaaaaaaaaaaaagtaattaattacatttttttaaaggagaaatgatccataattctgtcattaaaaaaaaattacaggccgggcacagtggctcatgggcacagt

SEQ ID NO: 385154 - DNA, 89 bp, Artificial Sequence
  ENSG00000144061_34 (sequence is synthesized)
gccaaggcgggtggatcacctggggtcaagagttcaagaccagcctagtcaacacagcgaaacctcacctcgagcgcatgtctgtagtc

SEQ ID NO: 385155 - DNA, 120 bp, Artificial Sequence
  ENSG00000144061_35 (sequence is synthesized)
gagactccgtctcaaaaaacaaaaaaataattacatagccaaatgaaaattctcttcctcaaactcataagtaatcaccattaacaatttagtacgtgtccttcctgacctttttcgtta

SEQ ID NO: 385156 - DNA, 120 bp, Artificial Sequence
  ENSG00000144061_36 (sequence is synthesized)
ctgacctttttcgttatttattacttataagtacatccttgtatgtgtgagggtgtgtgtctatgagtagtgtgtatgtgtatacaaaaaaaatccattaattcttcagtgcatgtgatt

SEQ ID NO: 385157 - DNA, 120 bp, Artificial Sequence
  ENSG00000144061_37 (sequence is synthesized)
tgccaatagacattaacttacctgtgaaatggaagcgcagggtggagcaggacaggagcagggacattttgataagggtatacttgaagcagctgctccggaacacacagctctgcacgc

SEQ ID NO: 385158 - DNA, 120 bp, Artificial Sequence
  ENSG00000144061_38 (sequence is synthesized)
tgggcactgtatggggcttaggtccttaggagaggccagggtgctgtgatggcatcctctcaggaatttggggccaaatcgtattattcttccactaaagtctgtatgtttatatttttc

SEQ ID NO: 385159 - DNA, 120 bp, Artificial Sequence
  ENSG00000144061_39 (sequence is synthesized)
ttttttgggttatagttactctagtgataaagtattatagagatgcagaaacatgactgaaaacaaatccattttgatgttactgtcttcagcagataaacactgttgatgtgttaacta

SEQ ID NO: 385160 - DNA, 120 bp, Artificial Sequence
  ENSG00000144061_40 (sequence is synthesized)
ttttacttgaattcacacttttaaaaatatgtcatttgatataaaaattttaatcatttttaagtacttattttcttggtaacacatatgagactctaagacatcatgaagaatgaaatc

SEQ ID NO: 385161 - DNA, 120 bp, Artificial Sequence
  ENSG00000144061_41 (sequence is synthesized)
atgaagaatgagaactaatgcattagttccttttcattgaccactgaactgatacttgtgactaatacagagactgcctattgctgggtcaaaggatgcagacatttgaaacagtaatat

SEQ ID NO: 385162 - DNA, 120 bp, Artificial Sequence
  ENSG00000144061_42 (sequence is synthesized)
gcatgccaaattgccctctagaaatattgagcatcttttactatgttcattaaccaggcactgtgctagataatgggagaatgaagagcaagacagatatggtcattgcctcatggggct

SEQ ID NO: 385163 - DNA, 120 bp, Artificial Sequence
  ENSG00000144061_43 (sequence is synthesized)
cagagcctgacagatttggaattccatttccactcctcagccacccctctatttgtttggtgattcaagacatgccacctctgctgaccccacaacgccagtcctgccttcttggaacag

SEQ ID NO: 385164 - DNA, 120 bp, Artificial Sequence
  ENSG00000144061_44 (sequence is synthesized)
aaaggagtttggggtctgggatgcagttggttctacctggagtcagacatgctgttttcctttgtaatctggcagcaataatgctgtaactcatgtgatttagcaaacaatcctgtgccc

SEQ ID NO: 385165 - DNA, 120 bp, Artificial Sequence
  ENSG00000144061_45 (sequence is synthesized)
ttagggaggtctctcagctcatttagggtatatggatgactcttgcctttcattcaattcagcactactgggtggtatattttcatgaaatacttgttttattatactcactgtctcaag

SEQ ID NO: 385166 - DNA, 120 bp, Artificial Sequence
  ENSG00000144061_46 (sequence is synthesized)
ggcttatggaagcagttatacactctgtgttaatgagttctgtctaggcctttttttttgttactaggatgatgtctcccaatccctatccattgtctaggtaactcagtcctcatcttt

SEQ ID NO: 385167 - DNA, 120 bp, Artificial Sequence
  ENSG00000144061_47 (sequence is synthesized)
cccatcttagcataaattcccaagggctgccttccctgacccagggagcaggtggagtgcctgctatgtacactattgcaatctttgcccattttttccttgacttaggatggccactga

SEQ ID NO: 385168 - DNA, 120 bp, Artificial Sequence
  ENSG00000144061_48 (sequence is synthesized)
ttgtgtcctaagagcaaaaatccaaaatggtctgtaagataaatcaattgaatttgcaggggagaatcagggcatgcacatcatctttaattccatgtgtgctgtttgctgtctgaaata

SEQ ID NO: 385169 - DNA, 120 bp, Artificial Sequence
  ENSG00000144061_49 (sequence is synthesized)
actgttgagtgttatgttaaatcgtatgaaatctccaattttcagccatttttggcctaagtggcagtttcatatggtttagcctaatacatcagggtcaataagtagaagagctgcatg

SEQ ID NO: 385170 - DNA, 120 bp, Artificial Sequence
  ENSG00000144061_50 (sequence is synthesized)
catgcaaggcagatacacaggtaacatcacaagtgccatgggggaggtataacccaggaccttgaagatttaaagaaggcagcaaagaaggatccaaattctgtttcactagagaggtcc

SEQ ID NO: 385171 - DNA, 120 bp, Artificial Sequence
  ENSG00000144061_51 (sequence is synthesized)
tgcatgagagagcctaataaaggccagggccaagaggattttgacctgctgagatgggggtgaagacgttgcaggtagaaggcttagcatgagcagacgtttgaggcaggaaggaataga

SEQ ID NO: 385172 - DNA, 120 bp, Artificial Sequence
  ENSG00000144061_52 (sequence is synthesized)
ggtagatgggcaaggtaagcctgagtctcggtgtggggctgagggcggtggtaggtggtgggtaacccaggaaggtttcttctttaggcaaactctgccaagtgcaaagaggcagaacat

SEQ ID NO: 385173 - DNA, 120 bp, Artificial Sequence
  ENSG00000144061_53 (sequence is synthesized)
gtgcaggagggaggtgagcatattagggggtgactcctgctgataaaaactaggccatatgcacctgacagcagaaacagaaggaggactcagtcatctacaaagattcttattagactt

SEQ ID NO: 385174 - DNA, 120 bp, Artificial Sequence
  ENSG00000144061_54 (sequence is synthesized)
tgaaaccaattcatatgctagcttggctgggttggggggtgtcaatagtaataatgacattttcaacagagatgtttaagaaaatgttcatggtacatatgatctcctgtaattttagat

SEQ ID NO: 385175 - DNA, 120 bp, Artificial Sequence
  ENSG00000144061_55 (sequence is synthesized)
aagttcgtctggcactatagctagataatgcagaatttctctttcttctcctataaagtcactagtatcataataattattcattacacagaacatatatacactgattcttcaacaaag

SEQ ID NO: 385176 - DNA, 120 bp, Artificial Sequence
  ENSG00000144061_56 (sequence is synthesized)
atttcacaagagcctactatgtattaatataaggcactgtgctggccacaggaatatttccctaggtgtgtaacaggaatctgcaccttgttcttaggaggaaacttaggatccctaatc

SEQ ID NO: 385177 - DNA, 120 bp, Artificial Sequence
  ENSG00000144061_57 (sequence is synthesized)
tagtctaaaatctgcatttccctgatgagcagacagcttggagatgtgcagtgacttggccggccatggagctcagccatgacccagccggggctgtccctgcgggtcagctctgggtgc

SEQ ID NO: 385178 - DNA, 120 bp, Artificial Sequence
  ENSG00000144061_58 (sequence is synthesized)
acccagaatgtgccacgggctgcttgaaagcatgagggtaaagttgtgcacatatgttatttagcaaaaagaccccatttgagccataataagtataaatatatatacatttatatacct

SEQ ID NO: 385179 - DNA, 120 bp, Artificial Sequence
  ENSG00000144061_59 (sequence is synthesized)
gcctgtgaaaagatctggaagaatatattccagagaggtattggtgaatatctctggatcttggattattttatctacattttcttaattttttcacattgaattatttgtgttatgata

SEQ ID NO: 385180 - DNA, 120 bp, Artificial Sequence
  ENSG00000144061_60 (sequence is synthesized)
attttaaaaaagaaagtggtggttgtttctacacccatgagccttcttctctccgtggcatagtgtattacttaggagaagcttggctgtgctgtggtggttagcacaggtttatttctt

SEQ ID NO: 385181 - DNA, 120 bp, Artificial Sequence
  ENSG00000144061_61 (sequence is synthesized)
acccatggtatgtatccagcatggatcagtggaagatgctgctccacagtcacccaagggtacaggctggtggagcctctactgtctcacagcaccatctggaacaagtagctgcctctg

SEQ ID NO: 385182 - DNA, 120 bp, Artificial Sequence
  ENSG00000144061_62 (sequence is synthesized)
ttgccagtttccctgcagaagagggagaatggagaattgttcttgggctttcactgcctttgcttcaaaggggcctgggccacttctgctcacattgcattggccaaaaccagtcacacg

SEQ ID NO: 385183 - DNA, 120 bp, Artificial Sequence
  ENSG00000144061_63 (sequence is synthesized)
gtccatttaacttcaaaggaggtatagtcttctttttgttccagaagaaaggaagtggatcttggtgaggtaatagtgacctttaacacgtttgctattcccaaatgagttactctaagt

SEQ ID NO: 385184 - DNA, 120 bp, Artificial Sequence
  ENSG00000144061_64 (sequence is synthesized)
gaaacatcctactatttgctggtggctgaatgaaaaataaggtgggacattgacatgtaactaacaaaaatagacaaattttaccagacactaagtctacatttgctaagtgatactcac

SEQ ID NO: 385185 - DNA, 120 bp, Artificial Sequence
  ENSG00000144061_65 (sequence is synthesized)
gttaaaccatattattaggttggtgcaagagaactgtggtttttgccataaaagtagtagcaaaaaccacaattacttttgcaccaactgaataaaatttaaaatgtacagcatgtgagc

SEQ ID NO: 385186 - DNA, 120 bp, Artificial Sequence
  ENSG00000144061_66 (sequence is synthesized)
ctcctagagtttacttacctagcacagttcagtttgtggatgacattttaataataagaagaatggcacttggcctgtttagtaaaacactctggttctgtaagggtcctcttcaaactc

SEQ ID NO: 385187 - DNA, 120 bp, Artificial Sequence
  ENSG00000144061_67 (sequence is synthesized)
ctaaggacccatagcacagcagttaatagggtggaggaccatagtcccctcacgtggtaataggtatgaacattccaaaatgttctcatgagtggcatagtctgttatctcctgctgaga

SEQ ID NO: 385188 - DNA, 120 bp, Artificial Sequence
  ENSG00000144061_68 (sequence is synthesized)
aacgctctatcaatgcatcatttattttatggagaatctctttattggtgccatatgttatgttcatcccagggcctccctgctgagaaaggtctgatgctttcaggttactcatgatat

SEQ ID NO: 385189 - DNA, 120 bp, Artificial Sequence
  ENSG00000144061_69 (sequence is synthesized)
caggtgccaacaggaggatatctactgacatgcacagaacccagaccctggaacaggcagccgtgagactggtcatattccacccacgcattcagtttgccaggaaatggcacagtgaaa

SEQ ID NO: 385190 - DNA, 120 bp, Artificial Sequence
  ENSG00000144061_70 (sequence is synthesized)
gtcttaaattcatacttctgtgggactaattgaactctggggtttttatttatttgaggaaatttctgtgaagccctgtggacagattagaaatatttactcacaaaattgtacttcagt

SEQ ID NO: 385191 - DNA, 120 bp, Artificial Sequence
  ENSG00000144061_71 (sequence is synthesized)
ctgtctcattctgaccattgtcatcatcatgacagagagaattgtagaaaagtttggtatttggcagtgttttctattttcattactgtcttacttggaaagcttaatactattttatta

SEQ ID NO: 385192 - DNA, 120 bp, Artificial Sequence
  ENSG00000144061_72 (sequence is synthesized)
ttcaggtgctgtggttgtatagttttcatggatgtgttagtgtttcgctgattctattcttaagttagttttgatttataattatcatgggcttctacggcatttttcacagatacatct

SEQ ID NO: 385193 - DNA, 120 bp, Artificial Sequence
  ENSG00000144061_73 (sequence is synthesized)
gcctggtcattctggtgctgggtcatttgcaatagattcctaattacagattcacttcttgcttgtatagaatctgtacagcatttttaaccctgtccataagtttatttacagagtaaa

SEQ ID NO: 385194 - DNA, 120 bp, Artificial Sequence
  ENSG00000144061_74 (sequence is synthesized)
tttgcataagtgttgcaaggacttgttactacttggactaacataatatttctgtttgctctttagagttcgtgggctggaaaagaaagcacattaaaaagatcagagaaggtaaaatat

SEQ ID NO: 385195 - DNA, 120 bp, Artificial Sequence
  ENSG00000144061_75 (sequence is synthesized)
gagtctccacactgaactccatatttgcagtacctggtgtttgcttgcctattctaatcatgtctcttttttagcaaaagtagccatagtcataatccctcttaaccagggaaactgttt

SEQ ID NO: 385196 - DNA, 120 bp, Artificial Sequence
  ENSG00000144061_76 (sequence is synthesized)
cattatggctgcaaaaacacattccaagagggttacgcatgatcgttagctaatgtgagaaggaatacttgttcaagacagccatttcagattactgagttttatttaaataaaggggaa

SEQ ID NO: 385197 - DNA, 120 bp, Artificial Sequence
  ENSG00000144061_77 (sequence is synthesized)
gtttctaagccaaagtctctcagttgtgtatcaaatttcttttatttttaaaaaacttctctagctctcaaagcctgtatcaccaagagaagggaaaaaaaaatggcctgagctgtacca

SEQ ID NO: 385198 - DNA, 120 bp, Artificial Sequence
  ENSG00000144061_78 (sequence is synthesized)
tatattgaaaacaatgcattgctcctgcttaccttgctataaaatcatggtaattaccaatccgaacttgctttaatcggtgagtcgtggtttgactgctctcatccaggatttggcaaa

SEQ ID NO: 385199 - DNA, 120 bp, Artificial Sequence
  ENSG00000144061_79 (sequence is synthesized)
tgggaagggctatagatggaaaatcttcttggcttttcaggtcttgtggtctctgtcacactactcagctctggtgttgtaacacaaaagcagccacagacaatatgtaaatgaccaaat

SEQ ID NO: 385200 - DNA, 120 bp, Artificial Sequence
  ENSG00000144061_80 (sequence is synthesized)
gtgactgttttcctataaaactttatttatgaaaagaggtgagagtccacatttggcccacagtccatactttaccagtcctgatctaaagtattcattatctacaaggaaaatgaagta

SEQ ID NO: 385201 - DNA, 120 bp, Artificial Sequence
  ENSG00000144061_81 (sequence is synthesized)
acaaatgagctgaaaaccctaaaaattaggaaacaatttatacattgtatccttatttcagcctccatttgatcagtaccatctacatacatgtgactttgccaaaactgccaggcttag

SEQ ID NO: 385202 - DNA, 120 bp, Artificial Sequence
  ENSG00000144061_82 (sequence is synthesized)
tgctattctagtacagcagccttgggcctgtagacattgcccttatgtggacatgtgtggtgggatgggtgatatctctgtgtagactctgctgcctgtggacagctctgccctcaactt

SEQ ID NO: 385203 - DNA, 120 bp, Artificial Sequence
  ENSG00000144061_83 (sequence is synthesized)
gctgtgctctctgagattcccaccatggcctgtgggcatcggggcttgacatgggtacagctgatgctgcaccattcttatctgtgaagggtctgacatcctcatcaccaaaggacccct

SEQ ID NO: 385204 - DNA, 120 bp, Artificial Sequence
  ENSG00000144061_84 (sequence is synthesized)
cgacctccatcccaggcattgctggaaataagccaacaactctggatcctatgcagaacacctgctacaattatcttagataacatgacagttacctctgatatgctgtcagtaagtagg

SEQ ID NO: 385205 - DNA, 120 bp, Artificial Sequence
  ENSG00000144061_85 (sequence is synthesized)
ttcagctgacttggcattgttttagttatatttacccctaaccacactggtgtcaccaaaattagactgcaataccttgacagaatgtgtgagacaccctccatggagcttaggagacac

SEQ ID NO: 385206 - DNA, 120 bp, Artificial Sequence
  ENSG00000144061_86 (sequence is synthesized)
cctggtctcatggagccacgtagaggctctcagggagaactgctccactgtactctgtgtaactctgctcacttccacttctgaagtgccatgtcctgcctgagcagctggctcagagcc

SEQ ID NO: 385207 - DNA, 120 bp, Artificial Sequence
  ENSG00000144061_87 (sequence is synthesized)
gatacctgccaggcactaatggcaccctccatcctacctcttaggtggcttttagttaatagagttcacagaatttaacactttaaaaataacaatgttatttgtgggggtggtgttttc

SEQ ID NO: 385208 - DNA, 120 bp, Artificial Sequence
  ENSG00000144061_88 (sequence is synthesized)
ttttttcttttttaaagatatatcaccaatagctttaatgtttaactcaaagacatatagcagtatagatataaacaaatgacactaacaatagaatcagtcaacatttatttattgtgt

SEQ ID NO: 385209 - DNA, 120 bp, Artificial Sequence
  ENSG00000144061_89 (sequence is synthesized)
ataatagaaggtgttagatcccatgagagatggaaagaagtgtaagtcatagtctctgccctcaggcaatttataatttagttgaaacaaaacagagatctgaaaagctaaatgaacaaa

SEQ ID NO: 385210 - DNA, 120 bp, Artificial Sequence
  ENSG00000144061_90 (sequence is synthesized)
tgttagaaaataaagatgatatatttaatgtcaatgttgatgtgtaaaagggaaatgatttggaatgtctacttgcattgttctccctttcataaacattctttaaaaatttgaagcaaa

SEQ ID NO: 385211 - DNA, 120 bp, Artificial Sequence
  ENSG00000144061_91 (sequence is synthesized)
cgagacgacagcgagatcctctccaggccctgcggcgccgcaatcaggagctgaagcaacagaggacacctgaagctgaatatggaacagattttctattcggtgtctgtaggacaagta

SEQ ID NO: 385212 - DNA, 120 bp, Artificial Sequence
  ENSG00000144061_92 (sequence is synthesized)
acttgggattggtgcctgtctcattgactttaaagccgatcttctgtcagaacatatctcttactgactatggaaggtctataatacttagcaagaaaataaaagagaaacctaaaacaa

SEQ ID NO: 385213 - DNA, 120 bp, Artificial Sequence
  ENSG00000144061_93 (sequence is synthesized)
atttaattagccatcccatgctggccaccttccccatgctcttggagcagcctgatgtgatggatgctctcaggagttcgtgggctggaaaagaaagcacattaaaaagatcagagaagg

SEQ ID NO: 385214 - DNA, 120 bp, Artificial Sequence
  ENSG00000144063_0 (sequence is synthesized)
actagaggcagcagccagccagcccagcccttctctggtgcctgccggtgtggtcctctcccagagactggggggccttcatctgccccatgaggaaaagaggagtggaggaccatggaa

SEQ ID NO: 385215 - DNA, 120 bp, Artificial Sequence
  ENSG00000144063_1 (sequence is synthesized)
agggatccagaaaaagaaggaaacaccaagtcccaggggcatgagctggaagggagggctgctcctcccaggggaggctggggactgagagctgtccccaagagtggaaaaggagggagc

SEQ ID NO: 385216 - DNA, 120 bp, Artificial Sequence
  ENSG00000144063_2 (sequence is synthesized)
tgggcaagacccagcattgttagtaaccagctctgtggtcttgacttgacctcactgattctcagtctcctcacttggaaaagggcaaaacagccacgtgcaggccgtggtgggcacccg

SEQ ID NO: 385217 - DNA, 120 bp, Artificial Sequence
  ENSG00000144063_3 (sequence is synthesized)
ggctgtctgcagatagcttggctcattgttggtcctcagtacgcagccctcgtagccaagcagcttgggcctacactctgggcccaggggagtggctgtcgctggcatcccctggaataa

SEQ ID NO: 385218 - DNA, 120 bp, Artificial Sequence
  ENSG00000144063_4 (sequence is synthesized)
catgctccgggggtcaaagattccttagctggaaaggtctaggaggagactcccgctctgctccctcctgcaccagcgctgtgccccccgccggccaggcagagccatccgatgccgctg

SEQ ID NO: 385219 - DNA, 120 bp, Artificial Sequence
  ENSG00000144063_5 (sequence is synthesized)
ggccgcccactgaggatctgctggctgcagcgagtggaaggacctgctcggctggaacgttttttttttttttccctcccaggcgacgtccgatgggtgtgtcgggcaggaggtgatatt

SEQ ID NO: 385220 - DNA, 120 bp, Artificial Sequence
  ENSG00000144063_6 (sequence is synthesized)
tatttgacaggctgcgcgcgggcgagctgccgcggagcacccggcaggggctgacagcatggcctcgcccgacccgcccgccaccagctacgccccgtccgacgtgccctcgggggtcgc

SEQ ID NO: 385221 - DNA, 120 bp, Artificial Sequence
  ENSG00000144063_7 (sequence is synthesized)
ttcctcaccatccctttcgccttcttcctgcccgagctgatatttgggttcttggtctggaccatggtagccgccacccacatagtataccccttgctgcaaggatgggtgatgtatgtc

SEQ ID NO: 385222 - DNA, 120 bp, Artificial Sequence
  ENSG00000144063_8 (sequence is synthesized)
tcgctcacctcgtttctcatctccttgatgttcctgttgtcttacttgtttggattttacaaaagatttgaatcctggagagttctggacagcctgtaccacgggaccactggcatcctg

SEQ ID NO: 385223 - DNA, 120 bp, Artificial Sequence
  ENSG00000144063_9 (sequence is synthesized)
tacatgagcgctgccgtcctacaagtacatgccacgattgtttctgagaaactgctggacccaagaatttactacattaattcggcagcctcgttcttcgccttcatcgccacgctgctc

SEQ ID NO: 385224 - DNA, 120 bp, Artificial Sequence
  ENSG00000144063_10 (sequence is synthesized)
tacattctccatgccttcagcatctattaccactgatgcacaggcgccaggccaagggggaaatgctctttgaaagctccaattattggtccccaaaagcagcttccaacgtttgccatc

SEQ ID NO: 385225 - DNA, 120 bp, Artificial Sequence
  ENSG00000144063_11 (sequence is synthesized)
tggatgacaaacggaagatccactaaaacgtccacgggattaacagaacgtccttgcagactgagcgatgacaccacactttgtttggacatttaaattcactctgctgaataggaggaa

SEQ ID NO: 385226 - DNA, 120 bp, Artificial Sequence
  ENSG00000144063_12 (sequence is synthesized)
tctagacaactcacatcaaagccctcactccactaatggagaatcctagccccactaatgccaagtctgtttggggattttgcctcagctatgggcttccctagagtaggtctaggggaa

SEQ ID NO: 385227 - DNA, 90 bp, Artificial Sequence
  ENSG00000144063_13 (sequence is synthesized)
agacggagtctcgctcttcctccaaggctggagtgcagtgacgcgatctccactcactgcaggctccgcctcccgggttcccgccattct

SEQ ID NO: 385228 - DNA, 68 bp, Artificial Sequence
  ENSG00000144063_14 (sequence is synthesized)
ctcttaaaattgaagaggtgctgccaaggccttcagatctaacgcagatgcatagaccttgttcctgg

SEQ ID NO: 385229 - DNA, 120 bp, Artificial Sequence
  ENSG00000144063_15 (sequence is synthesized)
gccttcagatctaacgcagatgcatagaccttgttcctggtacttgttcagcctgtgctggggagccgtggtcccgagttccctgggaggctgacagggtcaagccaccctgcccaccac

SEQ ID NO: 385230 - DNA, 120 bp, Artificial Sequence
  ENSG00000144063_16 (sequence is synthesized)
cctcccacttcccctcccctttcctctccagcattaggattcaagggaaatttgcatgaagccaattttgagggtagacgtgtggggaaaataaatcattatacagtaagacctggggct

SEQ ID NO: 385231 - DNA, 120 bp, Artificial Sequence
  ENSG00000144063_17 (sequence is synthesized)
tgaggggtggggaatggggagggaagggcatagcctgctcctccatgagtctgacatctcggaaactgagcagctgccggacgcctgggtcaggaatccaagaccccacctcttaaggac

SEQ ID NO: 385232 - DNA, 120 bp, Artificial Sequence
  ENSG00000144063_18 (sequence is synthesized)
tggttcctcagaaagcaccctcagggaaaaaggtgaaaacattacatccgtggattctcctgccacaaccgcattggaagaaaaggctgccgcaacatctcagcgaggagtgaaggaccc

SEQ ID NO: 385233 - DNA, 120 bp, Artificial Sequence
  ENSG00000144063_19 (sequence is synthesized)
atgtcccaggaaccgcgctgcgccacctgcactcacccccctcacattctcttaagcacccggtggccctccgaggcctggcggaatggtggtgcccacggggttgggcaagggctcacc

SEQ ID NO: 385234 - DNA, 120 bp, Artificial Sequence
  ENSG00000144063_20 (sequence is synthesized)
aggacctcaacgggcaaagttgtgcacactaaaatatcaaatcaaggtgcttggttttaaagtaaatgtttttctaaagaaagctgtgctcttctgttgacccagacgaatagggcacag

SEQ ID NO: 385235 - DNA, 120 bp, Artificial Sequence
  ENSG00000144063_21 (sequence is synthesized)
ccctgtaactgcacgtgccttctgtcattgggaatgaaataaattattacgagaaagggacttgtcctaactggtttgaggccttacagttttgtatctacatttttcccctcctggggt

SEQ ID NO: 385236 - DNA, 120 bp, Artificial Sequence
  ENSG00000144063_22 (sequence is synthesized)
cctggggtttgcggggacagggacagaactacaggagtcatgggaaagaaaattctggcttcactactgctcactgctcactttctgatcactctgatactttttttttttttttttttt

SEQ ID NO: 385237 - DNA, 120 bp, Artificial Sequence
  ENSG00000144063_23 (sequence is synthesized)
tgataccttgaaaagcttctatgtgtctctccttttgttgcctggcagctgtctaggatgatcactgattactatttactaagtagccacatgcaaataaaagttgtttggtaaaaagga

SEQ ID NO: 385238 - DNA, 120 bp, Artificial Sequence
  ENSG00000144063_24 (sequence is synthesized)
tcctgcccgagctgggcatcattactcaggcagcgtctgtctcagaacctcagtgtgtgatcccggcccctgcagcagcccctctcccacccatgaggggcttccagctgctctgtgcag

SEQ ID NO: 385239 - DNA, 120 bp, Artificial Sequence
  ENSG00000144115_0 (sequence is synthesized)
attttctttcgctgtaccttactgccttgctcgctcctgccctcactcctgcgatggtttctttggcagctcagtcgtagcgtttaagtctggtcctatgaaggcctttctgttactcca

SEQ ID NO: 385240 - DNA, 120 bp, Artificial Sequence
  ENSG00000144115_1 (sequence is synthesized)
cggtcttgggcagtttgcgttggctctaactcttaccacagaattgcagaaattcctctctttattgagggcaccgctagcacctgccccccgaccctggttctgttttgtgaaatactg

SEQ ID NO: 385241 - DNA, 120 bp, Artificial Sequence
  ENSG00000144115_2 (sequence is synthesized)
cctgctttgcttatccactgcagttaacttttggagttacccatatttcatctctttgacatggactcccatacggagtgaccttgtatcctaggttgccagagagagagttctggctta

SEQ ID NO: 385242 - DNA, 120 bp, Artificial Sequence
  ENSG00000144115_3 (sequence is synthesized)
taccattgtcccagcataatcactttcaaaagattcatggtttgtatgatcaagtttgtctctgtctctaagtgagatacacttaatatttgtagttaagagagtggcacgtggcagccc

SEQ ID NO: 385243 - DNA, 120 bp, Artificial Sequence
  ENSG00000144115_4 (sequence is synthesized)
acgtgagacttgcacgggggcccacagatgtcagagccacagactaggaaatgagaattcctccaggtcagtgctcatatgcctcatgtaggtagagagctttgggtggctttgccctta

SEQ ID NO: 385244 - DNA, 120 bp, Artificial Sequence
  ENSG00000144115_5 (sequence is synthesized)
gagggcaggggatcccctcccaccctggcacagaaagtccaagctaatactgagagctatgtctagtcaaattcatccccatagttactgtggggcgtcaaagccagggcccctaaattc

SEQ ID NO: 385245 - DNA, 120 bp, Artificial Sequence
  ENSG00000144115_6 (sequence is synthesized)
actgtcatgatccagaagaaggtgttcagagttcaagcccagctccttgacatggcatctggctcctgggaaagtaactgatgtggaagtgtgaccagtgttaggcctaaggggtcctgg

SEQ ID NO: 385246 - DNA, 120 bp, Artificial Sequence
  ENSG00000144115_7 (sequence is synthesized)
gcttccccaggaaccagagaactcagtccatgcagggccagttagttttaaagactgcatatcagcacttataacggtcctaggattaggctaagaggtagaacactggttatccactag

SEQ ID NO: 385247 - DNA, 120 bp, Artificial Sequence
  ENSG00000144115_8 (sequence is synthesized)
gatgaccaaccatcttagtttgcctgggattgaggggtttcctaggacatgggacttgcagttttaagaccagaaaactcctgggcgaactgggatgagttggtcaccctcttctcaacc

SEQ ID NO: 385248 - DNA, 120 bp, Artificial Sequence
  ENSG00000144115_9 (sequence is synthesized)
ctggctgcacgttagactctcttgaggagcctctcatttagagtctaatttaattgattcaggtagttgtattttttttaacgctctgaggttgattccaacaagctaccacagttgaga

SEQ ID NO: 385249 - DNA, 120 bp, Artificial Sequence
  ENSG00000144115_10 (sequence is synthesized)
actactaggctgtagacagtgtttccaataaccattgaagatgtttggtttttgagcagaagtggaccgagacgtccctgaaaggggtgtatgactctgtgcgttggtctttcgccttag

SEQ ID NO: 385250 - DNA, 120 bp, Artificial Sequence
  ENSG00000144115_11 (sequence is synthesized)
caagagggatatcaagctggcagttgcctactattgctattatctgtccccaccgccaggccttctttctcattggtgaggaccaagctttctcttttcccggcatgctccgataccctc

SEQ ID NO: 385251 - DNA, 120 bp, Artificial Sequence
  ENSG00000144115_12 (sequence is synthesized)
tccctgaagacaggaggtcagtggaattgcctcattttgattggtggaatcatgatttacacagttgtagatgaagctggcatgagacttgatacaggactgccatctctaggtctggga

SEQ ID NO: 385252 - DNA, 120 bp, Artificial Sequence
  ENSG00000144115_13 (sequence is synthesized)
catgtgccccggagactggtggtctagaggctaactgtgagactgtgtgtgctttggctttgcccggtggggtgtgggagcttggagaccaggtgcttctgggactgtcctctctgcagg

SEQ ID NO: 385253 - DNA, 120 bp, Artificial Sequence
  ENSG00000144115_14 (sequence is synthesized)
cctccaggatcatgtggtatgtcagcaccaggggcgtagccccacgggtcaactttgagggggccctcttctctggctatgcacctgacgggggcctctttatgcctgaagagctcccac

SEQ ID NO: 385254 - DNA, 120 bp, Artificial Sequence
  ENSG00000144115_15 (sequence is synthesized)
cctggtgaaggagctgtgtgccctcttcattggctctgagctccttccaaaagatgaattaaatgatctgatcgaccgagccttcagcagattccgtcacagagaagtggtccatctgtc

SEQ ID NO: 385255 - DNA, 120 bp, Artificial Sequence
  ENSG00000144115_16 (sequence is synthesized)
caggttgaggaatgggctgaacgtgttggagctgtggcatggcgtcacatatgcatttaaggacctgtccctgtcctgcacaacacagttcctgcagtacttcctggagaagagggagaa

SEQ ID NO: 385256 - DNA, 120 bp, Artificial Sequence
  ENSG00000144115_17 (sequence is synthesized)
gcacgtcactgtggttgtaggaacatctggggacacaggaagtgctgccattgagagtgttcaaggggcaaagaacatggacattatcgttctgctgcccaaaggtcactgcacaaagat

SEQ ID NO: 385257 - DNA, 120 bp, Artificial Sequence
  ENSG00000144115_18 (sequence is synthesized)
tcaggagctccagatgacaacggtgctgaagcagaacgtacatgtgtttggagtggagggaaacagcgatgagctcgatgagccgatcaagactgtgtttgccgatgtggcttttgtcaa

SEQ ID NO: 385258 - DNA, 120 bp, Artificial Sequence
  ENSG00000144115_19 (sequence is synthesized)
gaagcacaatctgatgagcctgaattcgatcaactggtcccgggtcctggtgcagatggcccatcacttctttgcttacttccagtgtacgccatccttggacacacatcccctacccct

SEQ ID NO: 385259 - DNA, 120 bp, Artificial Sequence
  ENSG00000144115_20 (sequence is synthesized)
ggtggaggtggttgtgccaacaggggctgccggtaaccttgcagctgggtacattgctcaaaagataggcctgcccatccgtctggtcgtggcagtgaaccgcaatgacatcatccacag

SEQ ID NO: 385260 - DNA, 120 bp, Artificial Sequence
  ENSG00000144115_21 (sequence is synthesized)
gactgtccagcagggagacttctctctctctgaggctgttaaatcaaccttggcatcagctatggacattcaggtgccctacaacatggagagggtgttctggctgctctctggctctga

SEQ ID NO: 385261 - DNA, 120 bp, Artificial Sequence
  ENSG00000144115_22 (sequence is synthesized)
cagccaggtgacaagagccctcatggagcagtttgaaaggacccaaagtgtgaatctgcccaaggaactgcacagcaagctttcagaggcagtgacatccgtgtcagtgtcggatgaagc

SEQ ID NO: 385262 - DNA, 120 bp, Artificial Sequence
  ENSG00000144115_23 (sequence is synthesized)
catcacccagaccatgggccgctgctgggatgagaaccagtacttgctgtgcccccactcagcggtggccgtgaactaccattaccagcagatagacaggcagcagcccagcactccccg

SEQ ID NO: 385263 - DNA, 120 bp, Artificial Sequence
  ENSG00000144115_24 (sequence is synthesized)
gtgctgcctcgcccctgcctctgcagccaagttcccggaagctgtcctggctgctggcctgacccctgagactcccgcggagatcgtagccctggagcacaaggagacacgctgcaccct

SEQ ID NO: 385264 - DNA, 120 bp, Artificial Sequence
  ENSG00000144115_25 (sequence is synthesized)
gatgcggagaggtgacaactggatgctgatgcttcgggacaccattgaggaccttagccgacagtggaggagtcatgccctcaacacctcccagtagcctggctggaggtggctttcttt

SEQ ID NO: 385265 - DNA, 120 bp, Artificial Sequence
  ENSG00000144115_26 (sequence is synthesized)
aggcttcagatcccaggaagatgcaccttctgagctgccttgtgcaccctccccattaagcgtaggttaggaggtttccgggaggctgctcagctggatctggagccagctggctttgct

SEQ ID NO: 385266 - DNA, 120 bp, Artificial Sequence
  ENSG00000144115_27 (sequence is synthesized)
ccgttccctggctagtctgtgcctggtcaccagggaggctgagtgaggggctgtgaacagttgccggaagcaccccctccctccccggcccgtgcagcagtgtctgagctgtagtgaaag

SEQ ID NO: 385267 - DNA, 120 bp, Artificial Sequence
  ENSG00000144115_28 (sequence is synthesized)
tttcagggcctgcaaaagaagaggcttgggcacaggactgaccatggctccaggggtttaggaccccagacctgtgaaggtgggagcagctcaccaccttcacgcaggctttgtatgttc

SEQ ID NO: 385268 - DNA, 120 bp, Artificial Sequence
  ENSG00000144115_29 (sequence is synthesized)
tctgagccttagttgattttggcccccaaaccaaatccaaaggttctggcccaccttgtcagaggcttccaccctgctcacatgttgggaatccctggaataaaatgcttgttcagtgtg

SEQ ID NO: 385269 - DNA, 120 bp, Artificial Sequence
  ENSG00000144115_30 (sequence is synthesized)
tgcagccctgccttaattgggtttgctttgggagatggactggaacaaaattgcacagttgggtagctgactgtcctcctttcatcatcatattcgaggttggtgtgtatgccttggctc

SEQ ID NO: 385270 - DNA, 120 bp, Artificial Sequence
  ENSG00000144115_31 (sequence is synthesized)
agctctgggcagggttctggctacacagtaaactattggaggtgacagatgcataaactgataccaacagtacaacatgctaagtatggattgaaaaccataccccaaaaaatgccacct

SEQ ID NO: 385271 - DNA, 120 bp, Artificial Sequence
  ENSG00000144115_32 (sequence is synthesized)
ccatgcatgtccaacctgcaagtgtcatgtatgtcagcaaccatgcagagtcataacctgagccaagtgatttgggtttttttccaagactctgaagtttagaggacaccaacatgttag

SEQ ID NO: 385272 - DNA, 63 bp, Artificial Sequence
  ENSG00000144115_33 (sequence is synthesized)
tttccaagactctgaagtttagaggacaccaacatgttagataattattttaagagaatgtgt

SEQ ID NO: 385273 - DNA, 120 bp, Artificial Sequence
  ENSG00000144115_34 (sequence is synthesized)
tacaaaaattagccgggcatggtgatgtgcttctgtagtcccagctactccaaaggctgagatgggaggatcgcttaagcccagaaggctgcagtgaaccaagatcatgccatcattgca

SEQ ID NO: 385274 - DNA, 120 bp, Artificial Sequence
  ENSG00000144115_35 (sequence is synthesized)
gagtgagaccctgtctcaaaaaaaaaggaatgtgtcattatatgttgacagttcctgctgttctttacagtatgggaacaactaagccatgcactggttatctggtctaaatatttaaaa

SEQ ID NO: 385275 - DNA, 120 bp, Artificial Sequence
  ENSG00000144115_36 (sequence is synthesized)
gtctaaatatttaaaatagggaactactcagtggtacccaccattggttatactgctacctgagtcacatcatgagaatcacagcattttgtgcttggagaaaggcaaaagccatctttt

SEQ ID NO: 385276 - DNA, 120 bp, Artificial Sequence
  ENSG00000144115_37 (sequence is synthesized)
ttaatatcaggccatctattcctaatggatttaatcattatagggattgagagtggagaaagatggggtgagtgtgggtggagctgtacatttttatttttacctctcacaccccactgg

SEQ ID NO: 385277 - DNA, 120 bp, Artificial Sequence
  ENSG00000144115_38 (sequence is synthesized)
accccaggtagctgcaaggtggggacttggattaagttttggcctgggcgagctgtggccttgggcaggctttccaggaggcctggcttagtttggtcactcacctgacagaacagcaag

SEQ ID NO: 385278 - DNA, 120 bp, Artificial Sequence
  ENSG00000144115_39 (sequence is synthesized)
tgtgatggcagagaatgttccttctacaactggcctggcttcctgtgataatcctgtagaggttatttttgtataacatcagctttgacaaggagcaaaagcacagtgaaaacaaacctt

SEQ ID NO: 385279 - DNA, 120 bp, Artificial Sequence
  ENSG00000144115_40 (sequence is synthesized)
atccaaaggagcagcataaataccctctgtcagtttgttcaagagcaagcgaactgcccctctgctctgttctttagcaggtgcatacacttgccagtgaaaagtccatggtttagctaa

SEQ ID NO: 385280 - DNA, 120 bp, Artificial Sequence
  ENSG00000144115_41 (sequence is synthesized)
tgcaggtgttggtgtcatcttacacatttgccttgctaattgctcatatttggctgcattttcctgcagttgttgcaagactttagtgcacaagattcaggctcctgagggtccttgttg

SEQ ID NO: 385281 - DNA, 120 bp, Artificial Sequence
  ENSG00000144115_42 (sequence is synthesized)
taccctaagcaccaaaattgctagttacagatctaggactgttttttcctagaatcaaagcagagaatagcgttctgtgcctctgtcctgcctcctactcccttgtcttttttgtacaca

SEQ ID NO: 385282 - DNA, 120 bp, Artificial Sequence
  ENSG00000144115_43 (sequence is synthesized)
gacctaagggtgtgagtgaaagctccattcctgacttgtggattggagaacagtgcccagttgtaaagtaatggcagaaatgtggaatctgatgaatgcaataaatcattaaatgctgga

SEQ ID NO: 385283 - DNA, 120 bp, Artificial Sequence
  ENSG00000144115_44 (sequence is synthesized)
gggcagccctgctgcgcaccgggcctcgcgccccgcgccccgcgccccgcgccccgcgccccgcaccgctttgctgaattggcctgggaatgctgcccctggaaggcattggacagaaca

SEQ ID NO: 385284 - DNA, 120 bp, Artificial Sequence
  ENSG00000144115_45 (sequence is synthesized)
tgggaatgctgcccctggaaggcattggacagaacagggacagtcctgttgcgtgaggggcatggagctcccacagttggacagagggaccctgtgccagtggagcacactctcctatcc

SEQ ID NO: 385285 - DNA, 120 bp, Artificial Sequence
  ENSG00000144115_46 (sequence is synthesized)
gagaaaggaaagggtacagccacatagcagacttggggtttggaagtctggtcaagggaagaggacacctgtttcttgagtacctgctatgagcccaccacttttacggccactttacat

SEQ ID NO: 385286 - DNA, 120 bp, Artificial Sequence
  ENSG00000144115_47 (sequence is synthesized)
ggaataatttattgaatgaggagaggtaatagagaacatggtttagagtcaaatgagctcaatcccaagtgagctctgagacattgggctagtttcctaaactctgtgccttggttcctt

SEQ ID NO: 385287 - DNA, 120 bp, Artificial Sequence
  ENSG00000144115_48 (sequence is synthesized)
cgtttataaaatggggataataagaatgcctacctcatagagttgttgtgagatttaagtcaaataatatatgtgaagcactttgcatacttcctggtaatatatggcttgatacattaa

SEQ ID NO: 385288 - DNA, 120 bp, Artificial Sequence
  ENSG00000144115_49 (sequence is synthesized)
ttcattttcttgatagtgtcctttttaaagcacaaaagcttcaaaaagcacaaaagtttcttaattttgatgaagcccaatttacttttttctttttgcttttatttctaaaaagccatt

SEQ ID NO: 385289 - DNA, 120 bp, Artificial Sequence
  ENSG00000144115_50 (sequence is synthesized)
agtgtgaatctgcccaaggaactgcacagcaaggaatctaattgggaaggattgtttttattttaatgcaacctggtgatggtacttattctgtgtttaaaaaaaaaaaaaggatttctg

SEQ ID NO: 385290 - DNA, 120 bp, Artificial Sequence
  ENSG00000144115_51 (sequence is synthesized)
cactgcgaagctgagaaccctagctccggccccgaccggaagccccaccgcaccgtcagggacgcggactcgggagtgcgcacattcgcagcccgggcagccctgctgcgcaccgggcct

SEQ ID NO: 385291 - DNA, 120 bp, Artificial Sequence
  ENSG00000144118_0 (sequence is synthesized)
gaaagcgagcccggcagctcaatgacaaatcggtggaggacggctggggtccggccccgggagggggcggggcgcgtttaagagctgcgggccgggtgcggacggcggaggcggcgggac

SEQ ID NO: 385292 - DNA, 120 bp, Artificial Sequence
  ENSG00000144118_1 (sequence is synthesized)
tggtccctgctcttcagtgggtcatctgtgtgtcacagcctcagaagaccagcgagatggctgccaacaagagtaagggccagagctccttggccctccacaaggtgatcatggttggca

SEQ ID NO: 385293 - DNA, 120 bp, Artificial Sequence
  ENSG00000144118_2 (sequence is synthesized)
gcggaggcgttggcaagtcagccctgacgcttcagttcatgtatgacgagtttgtagaagactatgaacctaccaaagctgacagttatagaaagaaagtggttcttgatggggaagaag

SEQ ID NO: 385294 - DNA, 120 bp, Artificial Sequence
  ENSG00000144118_3 (sequence is synthesized)
ttcagatagatattctggacaccgctgggcaagaggactacgcagccattcgagataactactttcggagtggggaagggtttcttcttgtgttctcaatcacagaacatgaatccttta

SEQ ID NO: 385295 - DNA, 120 bp, Artificial Sequence
  ENSG00000144118_4 (sequence is synthesized)
cagcaactgccgaattcagggaacagattctccgtgtgaaggctgaagaagataaaattccactgctcgtcgtgggaaacaagtctgacctagaggagcggaggcaggtgcctgtggagg

SEQ ID NO: 385296 - DNA, 120 bp, Artificial Sequence
  ENSG00000144118_5 (sequence is synthesized)
aggccaggagtaaagccgaagagtggggcgtgcagtacgtggagacgtcagcgaagacccgggccaacgtggacaaggtgttctttgacctaatgagagaaatcagaacaaagaagatgt

SEQ ID NO: 385297 - DNA, 120 bp, Artificial Sequence
  ENSG00000144118_6 (sequence is synthesized)
cagaaaacaaagacaagaatggcaagaaaagcagcaagaacaagaaaagttttaaagaaagatgttgcttactatgagtgtcaaggtgacggatgaagccagctgctcctaaggacacag

SEQ ID NO: 385298 - DNA, 120 bp, Artificial Sequence
  ENSG00000144118_7 (sequence is synthesized)
ggctgggttggtaaagagaaggctatggttgacttcttgcttgtgcttcccactctccccgacttcattcactcaaacttctttaaatggggaaaaatatttgtgactctgtggctggca

SEQ ID NO: 385299 - DNA, 120 bp, Artificial Sequence
  ENSG00000144118_8 (sequence is synthesized)
gaagaaataagcccatgcaagtggaagggctgctttgtcaggaggttgtggaatttctttcttctccccttcttccctcccaaaagcttagctatgtataaagtgccacagataggaaac

SEQ ID NO: 385300 - DNA, 120 bp, Artificial Sequence
  ENSG00000144118_9 (sequence is synthesized)
agatgttgtagtgggttttggaggagggagtggagtaagatgccctcccacttttatcagtttagtagtagtactgagaaaaatcccttcagctctaagaacactgaaaaatccaccgat

SEQ ID NO: 385301 - DNA, 120 bp, Artificial Sequence
  ENSG00000144118_10 (sequence is synthesized)
tttttgggtaagcttcttggcaataccctgtggatctgaaacagctaaaaaaatgaatttgaattgcgccagataggtcaataccaagcttctgattcctcctcacatatgaaaagtgaa

SEQ ID NO: 385302 - DNA, 120 bp, Artificial Sequence
  ENSG00000144118_11 (sequence is synthesized)
agttgtgagttgttttcctcttatttaaacattggcctattataatctgtgttggttatttttctcctgtaagcatcctgatttttctgtaggaacttttctttggcagaccaagtgaag

SEQ ID NO: 385303 - DNA, 120 bp, Artificial Sequence
  ENSG00000144118_12 (sequence is synthesized)
actcaggaatggtgtgcattataaatgacacacattgccacttgtgtagatatttttaagttctttggctaagtcctctcctaactgcctgtcctctggttaggcccctccctctccact

SEQ ID NO: 385304 - DNA, 120 bp, Artificial Sequence
  ENSG00000144118_13 (sequence is synthesized)
agtggtgaatgcatgtgtctgtctgatcagcatcactgcacacggaggtctagtgagcctcttgctaagtgtcacacacactcttcccaaagacgtgatgagttaaagttgtattctgaa

SEQ ID NO: 385305 - DNA, 120 bp, Artificial Sequence
  ENSG00000144118_14 (sequence is synthesized)
atcatgaagccagagcctgtgccagaccttctgctacctctcatagaattgctctgtaattctaaatttaaaattagaagtagagagagataagccatcgcccctttgcctctgagaatt

SEQ ID NO: 385306 - DNA, 120 bp, Artificial Sequence
  ENSG00000144118_15 (sequence is synthesized)
ggctgctgtttctaatataattattttctaagatagccagatagttagaaaaagattttcattgatgacatatctttaaactttcttgcatcagtattctaaattgagcaaactgaaaga

SEQ ID NO: 385307 - DNA, 120 bp, Artificial Sequence
  ENSG00000144118_16 (sequence is synthesized)
ttttcatcaggaaaggagcactgtgggaagagcccagtattcacattttttccccatttttcagaagcgacatttcatatataggtgccaaaagtgaatcggggtgcggagagtgggaac

SEQ ID NO: 385308 - DNA, 120 bp, Artificial Sequence
  ENSG00000144118_17 (sequence is synthesized)
cttttgaatttatgattgtcacagagatggtagaaattatgatctgactggaaaacaatcctgtatcccctcccaaagaatcatgggctttttttttgaataaaaaagcagacaaataga

SEQ ID NO: 385309 - DNA, 120 bp, Artificial Sequence
  ENSG00000144118_18 (sequence is synthesized)
ctcccgctcgggaccgtccacttcctcagtcctccggccgcggcttgggcagggtcagggctgggaagtgttgcaaaaacttaactgccctcggaacttgcacgcgccgtgaactgggcg

SEQ ID NO: 385310 - DNA, 120 bp, Artificial Sequence
  ENSG00000144118_19 (sequence is synthesized)
gtgttcctaaagggcttcggtttgctggttttgttttggtcctgtcttgcaaatgagcataaagttgtttctcccccagcctcctcccctttcctttctgataggggccagcggcgaagg

SEQ ID NO: 385311 - DNA, 120 bp, Artificial Sequence
  ENSG00000144118_20 (sequence is synthesized)
ggcttctaaggggaagcgcctggactgggcatcgccgtcccggttcttgccgcctgtgggagtgtgaggttaaccgtgctcggtgcagggttgcggggcgcggagcttgctgcgtccaca

SEQ ID NO: 385312 - DNA, 120 bp, Artificial Sequence
  ENSG00000144119_0 (sequence is synthesized)
agagcgcgccgcggagccggggcgccctcactgcgctaggagccccactaaacccagcggagcggagcctggcgggaggcagcgccgcggagccagcgccggacgccgcaagcagactcc

SEQ ID NO: 385313 - DNA, 120 bp, Artificial Sequence
  ENSG00000144119_1 (sequence is synthesized)
ccggccagcgcaagcactccctggccggcgccggaccctcggggcgccggattcgtcttgtgtgccccacgtcatgcgcgcgggcgtccgcggctctcccgaccagccccagcgcggtgg

SEQ ID NO: 385314 - DNA, 120 bp, Artificial Sequence
  ENSG00000144119_2 (sequence is synthesized)
gcccaggctcagaggtcccggcgcctctcgctgaagtagttgggtagccggggctgggggtcgccacgtcgggggcgcggccaggacccgcggagccggtccccgagcgcggggagcggg

SEQ ID NO: 385315 - DNA, 120 bp, Artificial Sequence
  ENSG00000144119_3 (sequence is synthesized)
cccgcgccgccccaccattacctccccgggcggcaaggaggagctggtggcggtcgcctcccggctgtggcagcggcggcggcgtgcctgcctggcggccgtcggcgtactcttggccat

SEQ ID NO: 385316 - DNA, 120 bp, Artificial Sequence
  ENSG00000144119_4 (sequence is synthesized)
ccatggcgctcgggctgctcatcgccgtgccgctgctgctgcaggcggcgccccgaggcgccgcgcactatgagatgatgggcacctgccgcatgatctgcgacccttacactgccgcgc

SEQ ID NO: 385317 - DNA, 120 bp, Artificial Sequence
  ENSG00000144119_5 (sequence is synthesized)
ccggcggggagcccccgggtgcaaaggcgcagccacccggacccagcaccgccgccctggaagtcatgcaggacctcagcgccaaccctcctcctcctttcatccagggacccaagggcg

SEQ ID NO: 385318 - DNA, 120 bp, Artificial Sequence
  ENSG00000144119_6 (sequence is synthesized)
ctttcatccagggacccaagggcgacccggggcgaccgggcaagccagggccgcgggggccccctggagagccgggcccgcctggacccaggggccctccgggagagaagggcgactcgg

SEQ ID NO: 385319 - DNA, 120 bp, Artificial Sequence
  ENSG00000144119_7 (sequence is synthesized)
gcggccccaagatcgccttctatgtgggtctcaagagcccccacgaaggctatgaggtgctgaagttcgatgacgtggtcaccaacctcggcaatcactatgaccccaccacgggcaagt

SEQ ID NO: 385320 - DNA, 120 bp, Artificial Sequence
  ENSG00000144119_8 (sequence is synthesized)
tcagctgccaggtacgcggcatctacttcttcacctaccacatcctcatgcgcggcggcgacggcaccagcatgtgggcggacctctgcaagaacgggcaggtccgggccagcgccattg

SEQ ID NO: 385321 - DNA, 120 bp, Artificial Sequence
  ENSG00000144119_9 (sequence is synthesized)
cacaggacgccgaccagaactacgactacgccagtaacagcgtggtgctgcacttggattcaggggacgaagtgtatgtgaagctggatggcgggaaggctcacggaggcaataataaca

SEQ ID NO: 385322 - DNA, 120 bp, Artificial Sequence
  ENSG00000144119_10 (sequence is synthesized)
agtacagcacgttctcgggctttcttctgtacccggattaggggcgcggggggtgcgaggcggggtggctgcaggccgcccggtctccgcccgggcgcggctccttggcaaaggccactc

SEQ ID NO: 385323 - DNA, 120 bp, Artificial Sequence
  ENSG00000144119_11 (sequence is synthesized)
tcgattcataacacttcctgacatctcctttggaaaagacaaatccctgcgtcctccctgccccgctcctggcctcagtgcgtctgcgacccaccacgctcagggctgtgctcctggtct

SEQ ID NO: 385324 - DNA, 120 bp, Artificial Sequence
  ENSG00000144119_12 (sequence is synthesized)
ccatccccatcccggcaagggaggaagggacgcccgagcccttgaggcggcggcacagactttgcaaacctgattagactggacaggcagggccgggagcctgccctcctcagacagcct

SEQ ID NO: 385325 - DNA, 120 bp, Artificial Sequence
  ENSG00000144119_13 (sequence is synthesized)
cctcccagtgcctagaagcggagggctccgggccctggccagggaggtaggccagagggagcgcgggcttcctggggcgtccttctttgtgacccgaaatacttgtgcagatttccctgt

SEQ ID NO: 385326 - DNA, 120 bp, Artificial Sequence
  ENSG00000144119_14 (sequence is synthesized)
ccatcagccaaaaccccacccacagcagaattccagcaaacagaaaattcacctctccacaccgcattccctcctgactcagactcaccgcgatgcattaaattatgtttttagactatg

SEQ ID NO: 385327 - DNA, 120 bp, Artificial Sequence
  ENSG00000144120_0 (sequence is synthesized)
gtaggcgttccgagcggcggcggaggtgagcgcacggacgagcgggagggacccttctccggcctgatgcgacccgattgtccgcagtgactacactcatggcaggtcccctgtggcgga

SEQ ID NO: 385328 - DNA, 120 bp, Artificial Sequence
  ENSG00000144120_1 (sequence is synthesized)
ccgcagcatttgtgcagagacacaggacaggcctcttggtgggttcctgtgcaggcctgtttggagttccaatctcgtaccacctcttcccggatcccgtggtccaatggctctaccagt

SEQ ID NO: 385329 - DNA, 120 bp, Artificial Sequence
  ENSG00000144120_2 (sequence is synthesized)
actggcctcagggccagccagctccgctccctccacagctgcagagcctcttccaagaggtgctacaggacataggtgttccttcaggccattgctacaagcccttcaccaccttcacct

SEQ ID NO: 385330 - DNA, 120 bp, Artificial Sequence
  ENSG00000144120_3 (sequence is synthesized)
tccaacctgtgagtgcaggcttcccaagactccctgctggggctgtggtgggcatccctgccagtttcttgggagacctagtgatcaacactaaccatcccgtggtcatacatgggcata

SEQ ID NO: 385331 - DNA, 120 bp, Artificial Sequence
  ENSG00000144120_4 (sequence is synthesized)
cagtggactggcggagcccagcaggcgcccggctgagagcttccctgaccttgtcccgtgaagcccagaagttcgccttggccagggaagtggtgtacctggaaagcagtaccactgccg

SEQ ID NO: 385332 - DNA, 120 bp, Artificial Sequence
  ENSG00000144120_5 (sequence is synthesized)
actgggcgtgggtgccaagtacaccctggggctccatgcaggccccatgaatttacgggctgccttcagcttggtggcagcagtggcaggctttgtggcctacgccttctcccaggattc

SEQ ID NO: 385333 - DNA, 120 bp, Artificial Sequence
  ENSG00000144120_6 (sequence is synthesized)
tctcactcatgccgtggagtcctggctggaccgccgcacggcctccctctctgcagcctatgcctgtggtggagtggagttctatgagaagcttctgtcgggcaacctggccctgcgcag

SEQ ID NO: 385334 - DNA, 120 bp, Artificial Sequence
  ENSG00000144120_7 (sequence is synthesized)
tctcttgggcaaagacggggagaagctgtatacacccagcgggaacatcgtccccagacacttgttccgaatcaaacatttaccctacaccacccgccgggactctgtgctgcagatgtg

SEQ ID NO: 385335 - DNA, 120 bp, Artificial Sequence
  ENSG00000144120_8 (sequence is synthesized)
gagggggatgctcaatccgggccgctcctgatgggctcatcacaaggacacttccagcttgtgcagacaccaccctgccattgagtctggagggccctgttggagcctttggacctatag

SEQ ID NO: 385336 - DNA, 120 bp, Artificial Sequence
  ENSG00000144120_9 (sequence is synthesized)
ctcacggccagaaaaatcactggctttggaattaaatagcttagattgtactataaccactacttatgaactcagggactatgagggactattcaggggctatgaatctgagcctttgtt

SEQ ID NO: 385337 - DNA, 120 bp, Artificial Sequence
  ENSG00000144120_10 (sequence is synthesized)
tcttgaactgtaaagtggagatgatgtaaaccgccttgcaagattgtagagttgggtaaggtcatgaacataagggcctggcacaaagggtgcactgtaaataaacagacatccctcctt

SEQ ID NO: 385338 - DNA, 120 bp, Artificial Sequence
  ENSG00000144120_11 (sequence is synthesized)
ggcgtgctttgcggccgccctgccgcgcgcacatgtaggcgttccgagcggcggcggaggtgagcgcacggacgagcgggagggacccttctccggcctgatgcgacccggtaacgcgtt

SEQ ID NO: 385339 - DNA, 120 bp, Artificial Sequence
  ENSG00000144120_12 (sequence is synthesized)
cagactgcggagtagcctaggggcccagagtggaagcgtagcgaggacccctctgcggggctcctgcagcccctcctcccccagccaccggcgggctgcatggtactgtgttctaggccc

SEQ ID NO: 385340 - DNA, 120 bp, Artificial Sequence
  ENSG00000144120_13 (sequence is synthesized)
accccgcagcgcgatggccctagggacgttggactttggtccagacctttcctttcttagcctcactttccgcattgggaaaaaaaaaaagcccgaatgataatgattcttataggagtt

SEQ ID NO: 385341 - DNA, 120 bp, Artificial Sequence
  ENSG00000144120_14 (sequence is synthesized)
cttgattaagataggccaagcggtaccctgcgtttttgtttgcggcaactcattcgttgctcattaagcacttttcacggacaggaatacaattgtccgcagtgactacactcatggcag

SEQ ID NO: 385342 - DNA, 120 bp, Artificial Sequence
  ENSG00000144120_15 (sequence is synthesized)
aggcgttccgagcggcggcggaggtgagcgcacggacgagcgggagggacccttctccggcctgatgcgacccggaaagggaacatcacagaaaggtgaagaaatttgccctaaatcata

SEQ ID NO: 385343 - DNA, 120 bp, Artificial Sequence
  ENSG00000144120_16 (sequence is synthesized)
aaactttgtaagtggcagaacaaggatttgaagctggcagtctggttccaggtatcgttcttaaaacactaaatttatactgtcctatttagcctgaaagtttcatggtgcagacttata

SEQ ID NO: 385344 - DNA, 120 bp, Artificial Sequence
  ENSG00000144120_17 (sequence is synthesized)
ctgtggactccatagcccttttcctcatgctgggttagaagtaactttttcaggctcactatttttattaggaaaaaatagtcactgagcagaacttccgaggagacccctccagctaac

SEQ ID NO: 385345 - DNA, 120 bp, Artificial Sequence
  ENSG00000144120_18 (sequence is synthesized)
agggggaacaggacggaagggcagggtgtcatggagctctaggaggcaccagctgaggaaaggggatctcaggaggtagggagagagcagagtgggcagccagctgtgggttcaaatcct

SEQ ID NO: 385346 - DNA, 120 bp, Artificial Sequence
  ENSG00000144120_19 (sequence is synthesized)
ggcctaccactttaacagggcgatctggaacaagtgacttctggtcctgagtttcctgtctgtaaaatgggtgcattcctatctatctttcaggattgttttgacgatgaaagtgaaaga

SEQ ID NO: 385347 - DNA, 120 bp, Artificial Sequence
  ENSG00000144120_20 (sequence is synthesized)
aagtttgcaaaatgtggagcctggtgagggcatatagtaggctttaaaaaaaagattgattttctaaatgttagtgctcctaaatggcataaggtgttcaggtcttggagttgctgccca

SEQ ID NO: 385348 - DNA, 120 bp, Artificial Sequence
  ENSG00000144120_21 (sequence is synthesized)
aataccagcaatttccagagaactcgctgctgcctaatacagctttattttaaagcttttcaaagccccagttcagttagggcagttttcccagtggctatcagttggcatcttctggaa

SEQ ID NO: 385349 - DNA, 120 bp, Artificial Sequence
  ENSG00000144130_0 (sequence is synthesized)
cctcacaccaacaactgcacctactttcttacagggttggatgcctataacatgcctgcatggatttttgtcaaccgcagcctggcgctggggaagattcgttgctttggcttcgacatg

SEQ ID NO: 385350 - DNA, 120 bp, Artificial Sequence
  ENSG00000144130_1 (sequence is synthesized)
gactacactctggctgcctacaagtccccagcttatgaggccctgaccttcgagctgctgctggagcgcctggtgtgcattgggtacccgcatgagatcctgcgctacacctacgacccc

SEQ ID NO: 385351 - DNA, 120 bp, Artificial Sequence
  ENSG00000144130_2 (sequence is synthesized)
accttccccaccaggcggctggtgttcgatgaactctatgggaacctgctgaaggtggacgcccacgggaatgtgctgctgggtgcctatggcttcaccttcctctcggaggcagagatc

SEQ ID NO: 385352 - DNA, 120 bp, Artificial Sequence
  ENSG00000144130_3 (sequence is synthesized)
tggagcttctaccccagcaagttcattcagagggacgacctgcagtgtttctacatactcaacatgctcttcaacctgcctgaaacctacctctatgcctgcttggtggacttcttctct

SEQ ID NO: 385353 - DNA, 120 bp, Artificial Sequence
  ENSG00000144130_4 (sequence is synthesized)
ggctgctcccgttacactaattgtgacaccggctatcagcatgggaacctcttcatgtccttccgaagcctcttccaggatgtgactgatgccatgaataacatccaccagtcgggctgt

SEQ ID NO: 385354 - DNA, 120 bp, Artificial Sequence
  ENSG00000144130_5 (sequence is synthesized)
ctcaagaagaccctggaggacttggagaaatatgtgaagaaggatccacgcctccccatcctgctggggaagatgaaggaggttgggaaagtgtttctggccaccaacagcagctacaac

SEQ ID NO: 385355 - DNA, 120 bp, Artificial Sequence
  ENSG00000144130_6 (sequence is synthesized)
tacaccaatgccatcatgacctacctgttcagcatcagtgaggctgaagcctcgggcaggccctggaggtcctactttgacctgatcgtggtggacacgcagaagccccacttctttgca

SEQ ID NO: 385356 - DNA, 120 bp, Artificial Sequence
  ENSG00000144130_7 (sequence is synthesized)
tactctggaggctcttcggacatggtgtgcgagctgcttggggttcgggggatggacatcctgtacattggggaccacatttttggggacattctcaagtccaagaagcgtcagggctgg

SEQ ID NO: 385357 - DNA, 120 bp, Artificial Sequence
  ENSG00000144130_8 (sequence is synthesized)
cggacttgcctggtggttcctgagctgtcctgggagctggacatctgggcccaggagaaggagcggttggaggagctgaagagactggacacgcacctggcagacatataccagcacatg

SEQ ID NO: 385358 - DNA, 120 bp, Artificial Sequence
  ENSG00000144130_9 (sequence is synthesized)
gatgggagcagttgtgagctgcaagtcatcaacttcaccaagagagagatccagatgccacatgagtcagttgtggagcaagaacaggccaatctagaccctgcctcctgcctcctctcc

SEQ ID NO: 385359 - DNA, 120 bp, Artificial Sequence
  ENSG00000144130_10 (sequence is synthesized)
tgcaaccagaggtctcttccagcaaagagctgtttgtcttctgccatctaggattccaaggaagtgggacactccagtctaggctgttttggtggaaacaacctttgttcagtattgagt

SEQ ID NO: 385360 - DNA, 120 bp, Artificial Sequence
  ENSG00000144130_11 (sequence is synthesized)
agtgcatttacttgtaataatacaaataagtcagctgatgacaatggctgaaagggccaggtcatggaaaccaagaagtgagaagcatttcaggggatgattcttttcttctttttccta

SEQ ID NO: 385361 - DNA, 120 bp, Artificial Sequence
  ENSG00000144130_12 (sequence is synthesized)
tatgtcctggatgatttttactggtacagctagagaagatgaatttaaattcaaaaataatagtaccttctgtggttctgtttgagtcttgcaagatattaagaacaactttccgcaact

SEQ ID NO: 385362 - DNA, 120 bp, Artificial Sequence
  ENSG00000144130_13 (sequence is synthesized)
cttgtattggctggaaggaaggaagaaaacatacaaaatcttaaaaacattcatgcaaaaaatttgctaaggaactttaacttcaaatacatgttttataataaaagtttccttttaaaa

SEQ ID NO: 385363 - DNA, 120 bp, Artificial Sequence
  ENSG00000144130_14 (sequence is synthesized)
cactactaaatcgtgttcctgcagcatttctgggtagcgggacactgctcgctcaatcctcgacgaacgccgtacaggagtgataaatttcatgtcttgcacttccggcatcccatttat

SEQ ID NO: 385364 - DNA, 120 bp, Artificial Sequence
  ENSG00000144130_15 (sequence is synthesized)
caaaggtgccgggagagtggcaggccaggaggggaggactgctcaccttgggggaggacagagggagggagggaggaaggacgcaggcccacggtggaggctcagcacagaagggatgcg

SEQ ID NO: 385365 - DNA, 120 bp, Artificial Sequence
  ENSG00000144130_16 (sequence is synthesized)
ataagcccagtgaaggccccagtgtggctggtggggttgctctggtgtgggactcagggttggaggtcatttcaggcccccttattggcctccccgtcccctctttgcctgccccagttg

SEQ ID NO: 385366 - DNA, 120 bp, Artificial Sequence
  ENSG00000144130_17 (sequence is synthesized)
cctgttcagcatcagtgaggtgagtgttggagtgttgcgtgcacggctggggtgggctgtgcaaagggccagggtgccaggctgcaccacgatgctgagggcctctcccacgtccagcct

SEQ ID NO: 385367 - DNA, 120 bp, Artificial Sequence
  ENSG00000144130_18 (sequence is synthesized)
ccctttgaggaagacctgagtgtgtgagtggtcatttctcatgagtggaagctccccagtgggtaggagcctggtgacctcagccaggccctgggaggagcctttgggggtgataggagg

SEQ ID NO: 385368 - DNA, 120 bp, Artificial Sequence
  ENSG00000144130_19 (sequence is synthesized)
cagtcaggtatgtggggacgggcggcagaaagtgggtgagacgagggcatggcaggtcaaagggaggggtgctgggagtgacaggtcctgggcactgggagtgaccaggtgtcactgggc

SEQ ID NO: 385369 - DNA, 120 bp, Artificial Sequence
  ENSG00000144130_20 (sequence is synthesized)
aggcagcagggccctaactaggtagccgtgctggtgccacctgtccctgggtctctgtgctgtgaggagctctggagcctggcctgaggctgcacatgatgttcaacacccacctccaca

SEQ ID NO: 385370 - DNA, 120 bp, Artificial Sequence
  ENSG00000144130_21 (sequence is synthesized)
aggtccttttgagcacttcctagtgcccagcttggctggggaagctgggcagcgagaccgggttcccaggggctgaagaggtctcatccagctgggaggttggtggggagaggcaggctg

SEQ ID NO: 385371 - DNA, 120 bp, Artificial Sequence
  ENSG00000144130_22 (sequence is synthesized)
tggtgggtgactggctgtggcaaggtcagatttaccaggctgtgtgtgtgcagcccgtgtgcacccccaacaggctgaagcctcgggcaggccctggaggtcctactttgacctgatcgt

SEQ ID NO: 385372 - DNA, 120 bp, Artificial Sequence
  ENSG00000144130_23 (sequence is synthesized)
ggtggacacgcagaagccccacttctttgcagaggggttggtcctgaggcaggtcaacacggtaatggcaggtgcagaggtcagtccacctgcacccatggaccacggttggggagggca

SEQ ID NO: 385373 - DNA, 120 bp, Artificial Sequence
  ENSG00000144130_24 (sequence is synthesized)
ctggcctgtctgtccctggaggcagggaacccgaggccgccttcagcgccctctgctgcctccttcctcccacaccccccatggttacctctgccactcccagctccctgcgaccctccc

SEQ ID NO: 385374 - DNA, 120 bp, Artificial Sequence
  ENSG00000144130_25 (sequence is synthesized)
ccagaggggttagggcaaagagagaaacgaggatcaggaaagttacatcgaggctgacggaatcctggacatgggctggcatcacgggccatcttctacttgagatatttttcagataac

SEQ ID NO: 385375 - DNA, 120 bp, Artificial Sequence
  ENSG00000144130_26 (sequence is synthesized)
acaagtatggaaaaaggaaaaagcaactgtattgaaatctcctaaatgcagcagatttggagcctgcaaacacttcttttagggaggaggcagtattgctcttaacctagaaggcatcct

SEQ ID NO: 385376 - DNA, 120 bp, Artificial Sequence
  ENSG00000144130_27 (sequence is synthesized)
caatggtctttgagacgtttggaaacgtgtgcacaagtgaaattattttacctacttctcttgaacgcatgatgtctcatatccaattttatttctaaacatttcttttaaaaaatagtt

SEQ ID NO: 385377 - DNA, 120 bp, Artificial Sequence
  ENSG00000144130_28 (sequence is synthesized)
atttctgtgcacttctgattctgttactagtaagaacagtaaaacctgattggctatatattgcctcactaactgctctttcattctgggtcactacgaaagatgttaaatgagatagcc

SEQ ID NO: 385378 - DNA, 120 bp, Artificial Sequence
  ENSG00000144130_29 (sequence is synthesized)
caaatgtctttgagtttgtgtatacacattaaaacacataaaaagtcatactcatgattttaaaacttgactctcgaatgtgttagaagcttctctgtggtattaaagtgctgaagcatc

SEQ ID NO: 385379 - DNA, 120 bp, Artificial Sequence
  ENSG00000144130_30 (sequence is synthesized)
ttggaggagctgaagagactggacacgcacctggcagacatataccagcacatggatgggagcagttgtgagctgcaagtcatcaacttcaccaagagagagatccaggtgggagctggg

SEQ ID NO: 385380 - DNA, 120 bp, Artificial Sequence
  ENSG00000144130_31 (sequence is synthesized)
tggcgagggaagggacaggcccagcaggggcggagccgggttcacttccccactgcttgcctgtcggctttgtcctcggtgccaaaggcccagttaccccattctcctcagcctcgcctg

SEQ ID NO: 385381 - DNA, 120 bp, Artificial Sequence
  ENSG00000144130_32 (sequence is synthesized)
agcggtaccctcttgaagggctgagttgagcctgatttgcaggctttgcctccagtcccacagtctttgccaatcaccctgcccgggaagtgcctgcgtgctagctgggcccttattgac

SEQ ID NO: 385382 - DNA, 120 bp, Artificial Sequence
  ENSG00000144130_33 (sequence is synthesized)
tgactagccagttctgataggaaatgtgatttagggccagtgagcccagggtccttggaaaagagaagaaaagacagtgttcccttgtggcattactgaccggccaccaaaaagctggag

SEQ ID NO: 385383 - DNA, 120 bp, Artificial Sequence
  ENSG00000144130_34 (sequence is synthesized)
gtgcccatgggtcagccaggtggagggagtcaggtcacttggtcatcccaagcccagctggggccgatcacaaagggtctttgcagagccttttacaaagcacagccgtttgatcttccc

SEQ ID NO: 385384 - DNA, 120 bp, Artificial Sequence
  ENSG00000144134_0 (sequence is synthesized)
ggttcgagagcgcgcagagtccagactggcggcagggcccgaggggccgacccgcagcgtccctggtctctccagccctcactcggaaccgcactgacaataccctcccctcccttgggc

SEQ ID NO: 385385 - DNA, 120 bp, Artificial Sequence
  ENSG00000144134_1 (sequence is synthesized)
tggacccctctctacagctaggagccaatggcagaagacaaaaccaaaccgagtgagttggaccaagggaagtatgatgctgatgacaacgtgaagatcatctgcctgggagacagcgca

SEQ ID NO: 385386 - DNA, 120 bp, Artificial Sequence
  ENSG00000144134_2 (sequence is synthesized)
gtgggcaaatccaaactcatggagagatttctcatggatggctttcagccacagcagctgtccacgtacgccctgaccctgtacaagcacacagccacggtagatggcaagaccatcctt

SEQ ID NO: 385387 - DNA, 120 bp, Artificial Sequence
  ENSG00000144134_3 (sequence is synthesized)
gtggacttttgggacacggcaggccaggagcggttccagagcatgcatgcctcctactaccacaaggcccatgcctgcatcatggtgtttgatatacagaggaaagtcacctataggaac

SEQ ID NO: 385388 - DNA, 120 bp, Artificial Sequence
  ENSG00000144134_4 (sequence is synthesized)
aaaaagcttcaattttgccaagaagttctccctgcccctgtatttcgtctcggctgctgatggtaccaatgttgtgaagctcttcaatgatgcaattcgattagctgtgtcttacaaaca

SEQ ID NO: 385389 - DNA, 120 bp, Artificial Sequence
  ENSG00000144134_5 (sequence is synthesized)
gaactcccaggacttcatggatgagatttttcaggagctcgagaacttcagcttggagcaggaagaggaggacgtgccagaccaggaacagagcagcagcatcgagaccccatcagagga

SEQ ID NO: 385390 - DNA, 120 bp, Artificial Sequence
  ENSG00000144134_6 (sequence is synthesized)
ggtggcctctccccacagctgaggggctggggctaggggaatagtttggaccttgtgcctcctgtgggaggctgaggactgcaagaggagagctagcagatatgcctgttcacccctctc

SEQ ID NO: 385391 - DNA, 120 bp, Artificial Sequence
  ENSG00000144134_7 (sequence is synthesized)
tggtacttgtggcttgctagtatgtttttatgataatctcgggcattgtttgcattgtgtttattaatagggttttgtttttattgtttccttttttacagtaaaggctgaatgacataa

SEQ ID NO: 385392 - DNA, 120 bp, Artificial Sequence
  ENSG00000144134_8 (sequence is synthesized)
tcaacaactctccagctctgaatggagaaactctctaggccatcccctcttctacctcctgcaacccacccatcctattagcctcccacattcaaggcccgtgatacagggatgaggtca

SEQ ID NO: 385393 - DNA, 120 bp, Artificial Sequence
  ENSG00000144134_9 (sequence is synthesized)
tggtggaagaattccccaccagatctccttgaagcagaattagggatcagcatcattaacaccttccccaccccctccccccaggcagacagtgaagagaatcagaaaacatgattatgt

SEQ ID NO: 385394 - DNA, 120 bp, Artificial Sequence
  ENSG00000144134_10 (sequence is synthesized)
gtcactttaatacaggaaatttaggtgttttttggtgtttttgtttttgttttctttccaaagctcacctcggggacaattccttgggcttctcctgaggtaatgattacccccccaccc

SEQ ID NO: 385395 - DNA, 120 bp, Artificial Sequence
  ENSG00000144134_11 (sequence is synthesized)
acagctgagtctgtgaggccccatcctttccctacgttttctcccatcttttttcctcttcaatctcccagtcatctggtttgtttgtttctttgttcgtcctgagacggagtctcgctc

SEQ ID NO: 385396 - DNA, 63 bp, Artificial Sequence
  ENSG00000144134_12 (sequence is synthesized)
ttgtttgtttctttgttcgtcgctgcaacctctgactccctggttcaaacgattctcctgcct

SEQ ID NO: 385397 - DNA, 120 bp, Artificial Sequence
  ENSG00000144134_13 (sequence is synthesized)
cgcccggccccaatcatctgtttttaaacaatcgtttttgagcagatagctattcattccagatttccgtgtacccactctgtttcaggagctcttctaggtaaagctgagatcacagga

SEQ ID NO: 385398 - DNA, 120 bp, Artificial Sequence
  ENSG00000144134_14 (sequence is synthesized)
acagcaggtgacaggcctagctatagttaggaatacacaagcggtaaaatcgagtccttacagccataccacaaggtacgtccatttggactacaagaagagcttcctttaaagttccta

SEQ ID NO: 385399 - DNA, 120 bp, Artificial Sequence
  ENSG00000144134_15 (sequence is synthesized)
cgagagcgcgcagagtccagactggcggcagggcccgaggggccgacccgcagcgtccctggtctctccagccctcactcggaaccgcacggtacaggtgaaagggggcagacccctcat

SEQ ID NO: 385400 - DNA, 120 bp, Artificial Sequence
  ENSG00000144134_16 (sequence is synthesized)
catgctttccaggcatctgccacttcccaggaattgtctccctggataaacaaggcgaagtccctggctgtgcagaagcagtagctgtgtggtggcacagtcaggaaaactcgggggccc

SEQ ID NO: 385401 - DNA, 120 bp, Artificial Sequence
  ENSG00000144134_17 (sequence is synthesized)
gcacctggtatacagagcttcgggagttcaggccagagatcccatgcatcgtggtggccaataaaattgatggtggggccatccctgcacctgggtgttagcaattcactggggacctgc

SEQ ID NO: 385402 - DNA, 120 bp, Artificial Sequence
  ENSG00000144134_18 (sequence is synthesized)
attcttcccaccttataaagaagccagctaagccgacctgccctctttccaagacacagatccctattaactgagctctttctaggacatgtttcccaatcatccctgcctatcccactt

SEQ ID NO: 385403 - DNA, 120 bp, Artificial Sequence
  ENSG00000144134_19 (sequence is synthesized)
gtgtgctcctgcaccactgatcccttccacaacatggactgtctgtgatgcacgtgtgcaggatgctgggaatgcccaggtggaaagacacacgtgctgcccccaggaactgactgactg

SEQ ID NO: 385404 - DNA, 120 bp, Artificial Sequence
  ENSG00000144134_20 (sequence is synthesized)
taatgcgtgcgtgctacttgggaggctgaggtaggaggattccttgagcccaggagttttgaggttacagtgagctgtgattgagccactgcattctagcctgggtgacagtgaaaccct

SEQ ID NO: 385405 - DNA, 120 bp, Artificial Sequence
  ENSG00000144134_21 (sequence is synthesized)
gtctctaaaaagtaaataaataaaagtaaatagtaactaaagtaaaactctagaaacatttacagttactacagaggaactttaaaacagtttaagcaataaatacaagaggactaaaaa

SEQ ID NO: 385406 - DNA, 120 bp, Artificial Sequence
  ENSG00000144134_22 (sequence is synthesized)
acacaaaagtttttacaatttctaacagactgcatcaattggcaaattgattccatttatgattgttaaaataggtgaataagattagatgacaagataacaaaaaaggaatacgttatt

SEQ ID NO: 385407 - DNA, 120 bp, Artificial Sequence; identical to SEQ ID NO: 76899
  ENSG00000144134_23 (sequence is synthesized)

SEQ ID NO: 385408 - DNA, 120 bp, Artificial Sequence
  ENSG00000144134_24 (sequence is synthesized)
gcagcctctgcggtcagagaggctgcaattcagagcgttcccacaaacagcaccatgtgctcatgcttacctgcttgggtgtgtgagtcacctggagatggggtgcagaaacattgacat

SEQ ID NO: 385409 - DNA, 120 bp, Artificial Sequence
  ENSG00000144134_25 (sequence is synthesized)
gtggtgaggacagtgaggattcttcccttctgaccctttgcagatggtaaaggaaggaactcgtcacctaattcccccgactgcccgttaagaacaaaatcccttgaaaaattccaaaag

SEQ ID NO: 385410 - DNA, 120 bp, Artificial Sequence
  ENSG00000144134_26 (sequence is synthesized)
ctttaactctgataactgttaaggtactaaacaagaggataatggggcaaggaaaatgggggcagtgtagtgcagaagtctgaccctcaagagcagaggagcttggtcctagccagtttg

SEQ ID NO: 385411 - DNA, 120 bp, Artificial Sequence
  ENSG00000144134_27 (sequence is synthesized)
accctcaggaaagaggaaatgggagacgaggggaggtgaggcaaggttcataaggagagagtccagagggagaaaatgagaccccaggcagggacaaggggtgctagagagaacccagag

SEQ ID NO: 385412 - DNA, 120 bp, Artificial Sequence
  ENSG00000144134_28 (sequence is synthesized)
agccaggagccaggagggtggaagggggcacgcaggggccaagtcccagccctctgacctggcgtccaggccagcacctgtgcaggacagggttcaggaaaggagaagtcagggggctgt

SEQ ID NO: 385413 - DNA, 120 bp, Artificial Sequence
  ENSG00000144134_29 (sequence is synthesized)
acccacctcagggaagaagaacataagaggccttcgacgaggcagtagttttcctagcttcaggggttcttactcagccagtttgaaaaaataaatgtggtcagaacattatctcccaca

SEQ ID NO: 385414 - DNA, 120 bp, Artificial Sequence
  ENSG00000144134_30 (sequence is synthesized)
aaatccaaactcatggagagatttctcatggatggcttgtatccttcaaggtttgaagtactccttgttcctgtgggtcttcccacgctcatgtatcagtgtcccactgcccaccccttt

SEQ ID NO: 385415 - DNA, 120 bp, Artificial Sequence
  ENSG00000144134_31 (sequence is synthesized)
gtaccagcagcccaggaacaggaaggaggattgggtaagtgaacgcacaggttttgttctgcacttgtttcttgccgattgacccacatggcattgcacaatcagtgctgtatattttgg

SEQ ID NO: 385416 - DNA, 120 bp, Artificial Sequence
  ENSG00000144134_32 (sequence is synthesized)
accttactcatatttggattgttttatattaagagggcagtagaatggcaaacagcaaatggtttggatctaatgcctggattcaaaccccacctcctcctcctcagtagcttctgatac

SEQ ID NO: 385417 - DNA, 120 bp, Artificial Sequence
  ENSG00000144134_33 (sequence is synthesized)
aaagcttgggccccctactattgaaaaaaatctctgatatgaatgaactttgtaaaataggagctgccagccccacctttctcccatgaattgttatattacataggtttggagtgagtt

SEQ ID NO: 385418 - DNA, 120 bp, Artificial Sequence
  ENSG00000144134_34 (sequence is synthesized)
cctccccgcaactgggagatttttaaacagcttcccaagtggatccactgagaaccacaggtgagaggagcccctggagcctgctgctgcctgtcctaggctcggcaccccaaggctcag

SEQ ID NO: 385419 - DNA, 120 bp, Artificial Sequence
  ENSG00000144134_35 (sequence is synthesized)
ttgccttaagatctgagtatgtgttactccaccttgtaccaagtgctcctgcacacccagcccacctgcgtcatttggctctgctttttacactgtccagcttcttgcagcctcggaagg

SEQ ID NO: 385420 - DNA, 120 bp, Artificial Sequence
  ENSG00000144134_36 (sequence is synthesized)
tgttaatccccagagtttaaccctttttctcagggtttcacacatagacagactccaaattgattgacagcttgtcaactgtatggcttgtgggagcttctgtccctggaatggtcatgt

SEQ ID NO: 385421 - DNA, 120 bp, Artificial Sequence
  ENSG00000144134_37 (sequence is synthesized)
tgctacctagggttagggtttcctttctagcctgcgaaagctccatccatgattgagttggggtatccacttttgcattttccaactgcatgatgccttttatgacacttgtctgtaaaa

SEQ ID NO: 385422 - DNA, 120 bp, Artificial Sequence
  ENSG00000144134_38 (sequence is synthesized)
tgggtaacgtgaggagcagcatttggggtgcgcaggacttaactatttgtgtataacatattactgatgcctgtgtgtcatcctctgctactccaagtctagtagccaattgcataccat

SEQ ID NO: 385423 - DNA, 120 bp, Artificial Sequence
  ENSG00000144134_39 (sequence is synthesized)
atctcagtctggcactgagggaagcagtctggatggaggtacagctggagatttggttgaggggacttatctctgacaacagcctcttgttgatcttcccagacagtgacaataccctcc

SEQ ID NO: 385424 - DNA, 120 bp, Artificial Sequence
  ENSG00000144134_40 (sequence is synthesized)
ctgtgttcacattgcagacttttgggacacggcaggccaggagcggttccagagcatgcatgcctcctactaccacaaggcccatgcctgcatcatggtacgagacggtggggaggtgga

SEQ ID NO: 385425 - DNA, 120 bp, Artificial Sequence
  ENSG00000144134_41 (sequence is synthesized)
caaaggcactgggcaagtctggcctgaggggtgaggggcctagcagccctgggcccttgtaaccaagtctgggtgttgtgggaggggggcttagggtcacccggggatgtttcaaaccac

SEQ ID NO: 385426 - DNA, 120 bp, Artificial Sequence
  ENSG00000144134_42 (sequence is synthesized)
acctgctccccagagcttcttagtgagaaggtgccaggtgagctctctgtaggcggggatgggtggagaaaaggtggaacagcaagctcagggcttcaacatcaggtgtagcatccaaga

SEQ ID NO: 385427 - DNA, 120 bp, Artificial Sequence
  ENSG00000144134_43 (sequence is synthesized)
ggcaaacatgcctgaaacagggccacagtccctctgatggacctaacctgtcagacaagctcccaaggcctccctccactgttgcctgctgcctttccctagggggcacatgctgggact

SEQ ID NO: 385428 - DNA, 120 bp, Artificial Sequence
  ENSG00000144136_0 (sequence is synthesized)
ggagtgatggctgccggcgctctctgcgtggttcttcttctcggccgctgaaacccccgcggctgcttcctgggaaggtcgtgagtcccgctgagctgtccccggtgccgccgacccggg

SEQ ID NO: 385429 - DNA, 120 bp, Artificial Sequence
  ENSG00000144136_1 (sequence is synthesized)
ccgtgtgcccgtggctccagccgctgtcgcctcgatctcctcgtctcccgctccgccctcccttttccctggatgaacttgcgtcctttctcttctccgccatggaattctgctccgtgc

SEQ ID NO: 385430 - DNA, 120 bp, Artificial Sequence
  ENSG00000144136_2 (sequence is synthesized)
ttttagccctcctgagccaaagaaaccccagacaacagatgcccatacgcagcgtatagcagtaactccccagctcggtttctgtgccgtagtttacagtatttaattttatataatata

SEQ ID NO: 385431 - DNA, 120 bp, Artificial Sequence
  ENSG00000144136_3 (sequence is synthesized)
tattatttattatagcatttttgatacctcatattctgtttacacatcttgaaaggcgctcagtagttctcttactaaacaaccactactccagagaatggcaacgctgattaccagtac

SEQ ID NO: 385432 - DNA, 120 bp, Artificial Sequence
  ENSG00000144136_4 (sequence is synthesized)
tacagctgctaccgccgcttctggtcctttggtggactacctatggatgctcatcctgggcttcattattgcatttgtcttggcattctccgtgggagccaatgatgtagcaaattcttt

SEQ ID NO: 385433 - DNA, 120 bp, Artificial Sequence
  ENSG00000144136_5 (sequence is synthesized)
tggtacagctgtgggctcaggtgtagtgaccctgaagcaagcctgcatcctagctagcatctttgaaacagtgggctctgtcttactgggggccaaagtgagcgaaaccatccggaaggg

SEQ ID NO: 385434 - DNA, 120 bp, Artificial Sequence
  ENSG00000144136_6 (sequence is synthesized)
cttgattgacgtggagatgtacaactcgactcaagggctgctgatggccggctcagtcagtgctatgtttggttctgctgtgtggcaactcgtggcttcgtttttgaagctccctatttc

SEQ ID NO: 385435 - DNA, 120 bp, Artificial Sequence
  ENSG00000144136_7 (sequence is synthesized)
tggaacccattgtattgttggtgcaactattggtttctccctcgtggcaaaggggcaggagggtgtcaagtggtctgaactgataaaaattgtgatgtcttggttcgtgtccccactgct

SEQ ID NO: 385436 - DNA, 120 bp, Artificial Sequence
  ENSG00000144136_8 (sequence is synthesized)
ttctggaattatgtctggaattttattcttcctggttcgtgcattcatcctccataaggcagatccagttcctaatggtttgcgagctttgccagttttctatgcctgcacagttggaat

SEQ ID NO: 385437 - DNA, 120 bp, Artificial Sequence
  ENSG00000144136_9 (sequence is synthesized)
aaacctcttttccatcatgtatactggagcaccgttgctgggctttgacaaacttcctctgtggggtaccatcctcatctcggtgggatgtgcagttttctgtgcccttatcgtctggtt

SEQ ID NO: 385438 - DNA, 120 bp, Artificial Sequence
  ENSG00000144136_10 (sequence is synthesized)
ctttgtatgtcccaggatgaagagaaaaattgaacgagaaataaagtgtagtccttctgaaagccccttaatggaaaaaaagaatagcttgaaagaagaccatgaagaaacaaagttgtc

SEQ ID NO: 385439 - DNA, 120 bp, Artificial Sequence
  ENSG00000144136_11 (sequence is synthesized)
tgttggtgatattgaaaacaagcatcctgtttctgaggtagggcctgccactgtgcccctccaggctgtggtggaggagagaacagtctcattcaaacttggagatttggaggaagctcc

SEQ ID NO: 385440 - DNA, 120 bp, Artificial Sequence
  ENSG00000144136_12 (sequence is synthesized)
agagagagagaggcttcccagcgtggacttgaaagaggaaaccagcatagatagcaccgtgaatggtgcagtgcagttgcctaatgggaaccttgtccagttcagtcaagccgtcagcaa

SEQ ID NO: 385441 - DNA, 120 bp, Artificial Sequence
  ENSG00000144136_13 (sequence is synthesized)
gtacaaagagctactccataaattacatcttgccaaggtgggagattgcatgggagactccggtgacaaacccttaaggcgcaataatagctatacttcctataccatggcaatatgtgg

SEQ ID NO: 385442 - DNA, 120 bp, Artificial Sequence
  ENSG00000144136_14 (sequence is synthesized)
catgcctctggattcattccgtgccaaagaaggtgaacagaagggcgaagaaatggagaagctgacatggcctaatgcagactccaagaagcgaattcgaatggacagttacaccagtta

SEQ ID NO: 385443 - DNA, 120 bp, Artificial Sequence
  ENSG00000144136_15 (sequence is synthesized)
ctgcaatgctgtgtctgaccttcactcagcatctgagatagacatgagtgtcaaggcagagatgggtctaggtgacagaaaaggaagtaatggctctctagaagaatggtatgaccagga

SEQ ID NO: 385444 - DNA, 120 bp, Artificial Sequence
  ENSG00000144136_16 (sequence is synthesized)
taagcctgaagtctctctcctcttccagttcctgcagatccttacagcctgctttgggtcattcgcccatggtggcaatgacgtaagcaatgccattgggcctctggttgctttatattt

SEQ ID NO: 385445 - DNA, 120 bp, Artificial Sequence
  ENSG00000144136_17 (sequence is synthesized)
ggtttatgacacaggagatgtttcttcaaaagtggcaacaccaatatggcttctactctatggtggtgttggtatctgtgttggtctgtgggtttggggaagaagagttatccagaccat

SEQ ID NO: 385446 - DNA, 120 bp, Artificial Sequence
  ENSG00000144136_18 (sequence is synthesized)
ggggaaggatctgacaccgatcacaccctctagtggcttcagtattgaactggcatctgccctcactgtggtgattgcatcaaatattggccttcccatcagtacaacacattgtaaagt

SEQ ID NO: 385447 - DNA, 120 bp, Artificial Sequence
  ENSG00000144136_19 (sequence is synthesized)
gggctctgttgtgtctgttggctggctccggtccaagaaggctgttgactggcgtctctttcgtaacatttttatggcctggtttgtcacagtccccatttctggagttatcagtgctgc

SEQ ID NO: 385448 - DNA, 120 bp, Artificial Sequence
  ENSG00000144136_20 (sequence is synthesized)
catcatggcaatcttcagatatgtcatcctcagaatgtgaagctgtttgagattaaaatttgtgtcaatgtttgggaccatcttaggtattcctgctcccctgaagaatgattacagtgt

SEQ ID NO: 385449 - DNA, 120 bp, Artificial Sequence
  ENSG00000144136_21 (sequence is synthesized)
taacagaagactgacaagagtctttttatttgggagccagaggagggaagtgttacttgtgctataactgcttttgtgctaaatatgaattgtctcaaaattagctgtgtaaaatagccc

SEQ ID NO: 385450 - DNA, 120 bp, Artificial Sequence
  ENSG00000144136_22 (sequence is synthesized)
gggttccactggctcctgctgaggtcccctttccttctgggctgtgaattcctgtacatatttctctactttttgtatcaggcttcaattccattatgttttaatgttgtctctgaagat

SEQ ID NO: 385451 - DNA, 120 bp, Artificial Sequence
  ENSG00000144136_23 (sequence is synthesized)
gacttgtgatttttttttcttttttttaaaccatgaagagccgtttgacagagcatgctctgcgttgttggtttcaccagcttctgccctcacatgcacagggatttaacaacaaaaata

SEQ ID NO: 385452 - DNA, 120 bp, Artificial Sequence
  ENSG00000144136_24 (sequence is synthesized)
taactacaacttcccttgtagtctcttatataagtagagtccttggtactctgccctcctgtcagtagtggcaggatctattggcatattcgggagcttcttagagggatgaggttcttt

SEQ ID NO: 385453 - DNA, 120 bp, Artificial Sequence
  ENSG00000144136_25 (sequence is synthesized)
gaacacagtgaaaatttaaattagtaacttttttgcaagcagtttattgactgttattgctaagaagaagtaagaaagaaaaagcctgttggcaatcttggttatttctttaagatttct

SEQ ID NO: 385454 - DNA, 120 bp, Artificial Sequence
  ENSG00000144136_26 (sequence is synthesized)
ggcagtgtgggatggatgaatgaagtggaatgtgaactttgggcaagttaagtgggacagccttccatgttcatttgtctacctcttaactgaataaaaaagcctacagtttttagaaaa

SEQ ID NO: 385455 - DNA, 120 bp, Artificial Sequence
  ENSG00000144136_27 (sequence is synthesized)
agtctgcatgttgtatttttagtctttgaagatatgaagtcaggtaagcaacatcctaacatagtctatttcttgacatctcttacaaacgtagagtatagcctatcctcaggtgtgtgc

SEQ ID NO: 385456 - DNA, 120 bp, Artificial Sequence
  ENSG00000144136_28 (sequence is synthesized)
tgaagtttatattagggcttttgggtaccttagaatgtgggtattgcaatctttattcaggatgttatcagtcactggtacagttagtcttgttattaaaagaaaaaagaaaaaaaaaca

SEQ ID NO: 385457 - DNA, 120 bp, Artificial Sequence
  ENSG00000144136_29 (sequence is synthesized)
attagccttcgtaggaagaattccagatgcaaatgcaggaaaaactctgttgtccttggaaactactctggagagagttattggcactataattcccaaacctaccctgttaaaagattc

SEQ ID NO: 385458 - DNA, 120 bp, Artificial Sequence
  ENSG00000144136_30 (sequence is synthesized)
gattctaaatcactacagacctttcctctttagtcttcacaggatccactgataatatgatcatctccttccctttctcctgtctatgctaaaaatgctggaattaatactgacctcaac

SEQ ID NO: 385459 - DNA, 120 bp, Artificial Sequence
  ENSG00000144136_31 (sequence is synthesized)
tactgaagtcattagttatatctgatcttcagtaatcagtcatttaggactggtttgctggatattctcatttttctctcccaaatggagatactattgtttctaagtactaaacttcca

SEQ ID NO: 385460 - DNA, 120 bp, Artificial Sequence
  ENSG00000144136_32 (sequence is synthesized)
tgaatctgcttgaatgagaagagttgggatgtttaccacctgctctaagtgcacttggaagaagaaattcatgcagctaagaggaaaaataatttgtgagaatataaaggttgaaatgtt

SEQ ID NO: 385461 - DNA, 120 bp, Artificial Sequence
  ENSG00000144136_33 (sequence is synthesized)
cactttgcttgaattggtggactgaaatttgagagaatcctcttttgaaaagaatagaattgggtacagttcagatttttagtttcagcttatcagccccatggttgagctactttcccc

SEQ ID NO: 385462 - DNA, 120 bp, Artificial Sequence
  ENSG00000144136_34 (sequence is synthesized)
tacagaatgagtcagcagggagctaagaagggttcttatatctgtaaagggttgtaaaaataaaaacaaaacaacaatgtgctacagaagcccgtaaaacctaaaatatttacagaaaaa

SEQ ID NO: 385463 - DNA, 120 bp, Artificial Sequence
  ENSG00000144136_35 (sequence is synthesized)
ttttgggacccctgacatagggtgttctgcattgctggttgttcccaagtgagagttgctggcaaatgataaagcaggcaggaaaaatgttcctgaatgttaattgaagttcacatacat

SEQ ID NO: 385464 - DNA, 120 bp, Artificial Sequence
  ENSG00000144136_36 (sequence is synthesized)
tcttgttttgagatgagttttttgggggtggaggaaaggagacgtggaacaaagtagtatggccacaaccaaaccaaaaaagaccccccttttttttcctaggagaaataaagtgtagtc

SEQ ID NO: 385465 - DNA, 120 bp, Artificial Sequence
  ENSG00000144136_37 (sequence is synthesized)
gcaccgtgaatggtgagttggaattcctggtttcacttttgttacctgcagtggtgaggaggcttattgttttggatttgatgctttttgtattgaatgtcaccttggtgatcttgacta

SEQ ID NO: 385466 - DNA, 120 bp, Artificial Sequence
  ENSG00000144136_38 (sequence is synthesized)
acactgtcgagtgctaacacaaatctctaaagtaaccaagtttgtataagttcatgatgttcttattgtcattgttctttttagattttacttgtctggcccttaaacattttggtcaga

SEQ ID NO: 385467 - DNA, 120 bp, Artificial Sequence
  ENSG00000144136_39 (sequence is synthesized)
cattttacccatttagctctggtggtctctgaagaaaatgacttttctgagaaagctgtgtatgctaagagcggatagttatgtatacttgccttttatttgtcttgggagctaagactc

SEQ ID NO: 385468 - DNA, 120 bp, Artificial Sequence
  ENSG00000144136_40 (sequence is synthesized)
aatgtttaccaaactcttcaaaataaaagtgcaaattttatttaatagtgggattccagaaaaacgtaaaactggaagcctttgaataaggaaactgggcatctgtggcctgatttaaat

SEQ ID NO: 385469 - DNA, 120 bp, Artificial Sequence
  ENSG00000144136_41 (sequence is synthesized)
aaagtagatcttaggggttatagcaaataaagatgtcagtggaggttttgtgactgagtagaacaaagcaggactgtgttaacttgaggtgtagtgttagcttctcaaaaaagtcaaact

SEQ ID NO: 385470 - DNA, 120 bp, Artificial Sequence
  ENSG00000144136_42 (sequence is synthesized)
ttatgtcatgcttattccttgaccctccccacccaaatggtgcccccccttccatcactctcctcttacccttctttatttctcttcacagcatttgtcagtactttacattattccata

SEQ ID NO: 385471 - DNA, 80 bp, Artificial Sequence
  ENSG00000144152_0 (sequence is synthesized)
cttagcccaggggccggcgcctccccgcctcgcgcggactgtctcgtgcgggcagctgcgggcgcacctggaccctcgca

SEQ ID NO: 385472 - DNA, 120 bp, Artificial Sequence
  ENSG00000144152_1 (sequence is synthesized)
cggggcctcccgcctccccccctgccccagccgccccccggccgcgcggcgccccgcaccctgcagggacggctgccgcatcgctgggacaaactcggcagcggaggcaaagttatttcc

SEQ ID NO: 385473 - DNA, 120 bp, Artificial Sequence
  ENSG00000144152_2 (sequence is synthesized)
cctcccaggcagcgggattccgactggcaagatggtgcccagctctccgcgcgcgctcttccttctgctcctgatcctcgcctgccccgagccgcgggcttcccagaactgtctcagcaa

SEQ ID NO: 385474 - DNA, 120 bp, Artificial Sequence
  ENSG00000144152_3 (sequence is synthesized)
acagcagctcctctcggccatccgccagctgcagcagctgctgaagggccaggagacacgcttcgccgagggcatccgccacatgaagagccggctggccgcgctgcagaactctgtggg

SEQ ID NO: 385475 - DNA, 120 bp, Artificial Sequence
  ENSG00000144152_4 (sequence is synthesized)
cagggtgggcccagatgcccttccagtttcctgcccggctctgaacacccccgcagacggcagaaagtttggaagcaagtacttagtggatcacgaagtccattttacctgcaaccctgg

SEQ ID NO: 385476 - DNA, 120 bp, Artificial Sequence
  ENSG00000144152_5 (sequence is synthesized)
gttccggctggtcgggcccagcagcgtggtgtgtcttcccaatggcacctggacaggggagcagccccactgtagaggtatcagtgaatgctccagccagccttgtcaaaatggtggtac

SEQ ID NO: 385477 - DNA, 120 bp, Artificial Sequence
  ENSG00000144152_6 (sequence is synthesized)
atgtgtagaaggagtcaaccagtacagatgcatttgtcctccaggaaggactgggaaccgctgtcagcatcaggcccagactgccgcccccgagggcagcgtggccggcgactccgcctt

SEQ ID NO: 385478 - DNA, 120 bp, Artificial Sequence
  ENSG00000144152_7 (sequence is synthesized)
cagccgcgcgccgcgctgtgcgcaggtggagcgggctcagcactgcagctgcgaggccggattccacctgagcggcgccgccggcgacagcgtctgccaggacgtgaacgagtgtgagct

SEQ ID NO: 385479 - DNA, 120 bp, Artificial Sequence
  ENSG00000144152_8 (sequence is synthesized)
ctacgggcaggaggggcgcccccggctctgcatgcacgcctgcgtgaacaccccgggctcttaccgttgcacctgccccggtggataccgaactctggctgacgggaagagctgtgagga

SEQ ID NO: 385480 - DNA, 120 bp, Artificial Sequence
  ENSG00000144152_9 (sequence is synthesized)
agccggtgtgcccccaggggaccacatgcatcaacaccggtggaagcttccagtgtgtcagccctgagtgccccgagggcagcggcaatgtgagctacgtgaagacgtctccattccagt

SEQ ID NO: 385481 - DNA, 120 bp, Artificial Sequence
  ENSG00000144152_10 (sequence is synthesized)
gtgagcggaacccctgccccatggacagcaggccctgccgccatctgcccaagaccatctccttccattacctctctctgccttccaacctgaagacgcccatcacgctcttccgcatgg

SEQ ID NO: 385482 - DNA, 120 bp, Artificial Sequence
  ENSG00000144152_11 (sequence is synthesized)
ccacagcctctgcccccggccgagctgggcccaacagcctgcggtttgggatcgtgggtgggaacagccgcggccactttgtgatgcagcgttcagaccggcagactggggatctgatcc

SEQ ID NO: 385483 - DNA, 120 bp, Artificial Sequence
  ENSG00000144152_12 (sequence is synthesized)
ttgtgcagaacctggaggggcctcagacgctggaggtggacgtcgacatgtcggaatacctggaccgctccttccaggccaaccacgtgtccaaggtcaccatctttgtatccccctatg

SEQ ID NO: 385484 - DNA, 120 bp, Artificial Sequence
  ENSG00000144152_13 (sequence is synthesized)
acttctgagggtacacaggggcactggggtgtggagagctgacctcatttctcttccccgaaggctcagcttcgggcaccgactgcgtggagcctcccgcctgttcccgccctctcacca

SEQ ID NO: 385485 - DNA, 120 bp, Artificial Sequence
  ENSG00000144152_14 (sequence is synthesized)
gtgcacccaggcttctagggcagcgttgcacggcgccccatggaatagcacggaagagcagccacaaaactcaactgctgccatcactctttttttttttctgctttgaggcccttccct

SEQ ID NO: 385486 - DNA, 120 bp, Artificial Sequence
  ENSG00000144152_15 (sequence is synthesized)
tagattatgcactaactttcttaaaactttttcatccaggggatgggtggctttccaaaatgctgtgcaaatggccttgtgagtttgaactagctggggagagaaaaggtggcaatgtgt

SEQ ID NO: 385487 - DNA, 120 bp, Artificial Sequence
  ENSG00000144152_16 (sequence is synthesized)
gtcaggtgactatcagcccttctgcctttttgtagccaggcttgctatgaatgaaacggttctagtcgtgcggggggccctagtcatgcctctgcgcatgtggcataggaagtggagtct

SEQ ID NO: 385488 - DNA, 120 bp, Artificial Sequence
  ENSG00000144152_17 (sequence is synthesized)
cctcccatgacccagcacgttgttcttatctgccttttcctctgtgacatgcctgcctgcctgccttctcatcagagagtcacaggagggccttaaaccccacgcagatccttctagacc

SEQ ID NO: 385489 - DNA, 120 bp, Artificial Sequence
  ENSG00000144152_18 (sequence is synthesized)
aaggacccattgttaaaagcatggattctgcctgagttacttcccttttgagaaatcatatctcaaatacataacctggtaatataactgaaaaaataaaagtgattgctccttcctgcc

SEQ ID NO: 385490 - DNA, 120 bp, Artificial Sequence
  ENSG00000144152_19 (sequence is synthesized)
aataaaaagtggggtgtgttttctgattttcctactctctctaggggaaaatcccaagtgtttctgagtgggttggcagtggtgcaacagaaattatcctctcctgtaccacggcagtcc

SEQ ID NO: 385491 - DNA, 120 bp, Artificial Sequence
  ENSG00000144152_20 (sequence is synthesized)
tgtcacatctcccctccctgcatcctcacttgctttcgtaaaatctgtatttcccaaagacagaggtcagaggccaggctgcatcacgcccctgcctacatcccacaagtctcctcgccg

SEQ ID NO: 385492 - DNA, 120 bp, Artificial Sequence
  ENSG00000144152_21 (sequence is synthesized)
ctgagaataaagggaaactcctcaccatggagctgacagaatgtattagtttttcattgctgccttctttgattcctttttatctactaaactttctctcccttctatattcatattgtg

SEQ ID NO: 385493 - DNA, 120 bp, Artificial Sequence
  ENSG00000144152_22 (sequence is synthesized)
ttaaatcccaaaaggaaatagacaaaatgtgctgccatttttgctggtaggaggctctcaggttgtgagatgtgaggagaaggctcatatacccggcttgtgtacctaggaggggattgc

SEQ ID NO: 385494 - DNA, 120 bp, Artificial Sequence
  ENSG00000144152_23 (sequence is synthesized)
agctgctggatgccatgtgtgtggaccccaagctccttgcttggcttgggcattggggacctcagagacttgctgaagataataccgaggctgtgaaaggcacaacccaatccacaggtg

SEQ ID NO: 385495 - DNA, 120 bp, Artificial Sequence
  ENSG00000144152_24 (sequence is synthesized)
cagatggcctctggacaaaggttagctgggcagcaagcaggtgaaatggggaaagtgagtttggtggtaagatgagcaagagattgtctttggctcatactgacgccattccttcactcc

SEQ ID NO: 385496 - DNA, 120 bp, Artificial Sequence
  ENSG00000144152_25 (sequence is synthesized)
tcattcactcgttcactcgtttgttcattcaaatgggcatctagtgtactttcaaggggatgctgtgaagtgagaggatgaatgaggcaggactcacgaaggttctctgtgcacccctct

SEQ ID NO: 385497 - DNA, 120 bp, Artificial Sequence
  ENSG00000144152_26 (sequence is synthesized)
ctaaggtgagtccggccatcttgtcacaccagcggctggagaaggcacactgggttttaaatcctggataggccaccgtggctcagagacctatgcggcttccgcccctgccaagtgggt

SEQ ID NO: 385498 - DNA, 120 bp, Artificial Sequence
  ENSG00000144152_27 (sequence is synthesized)
gttgtaatggtgccacgtcctgcgctgtcatgggttcctgtgtgaagtgtggccgcagtgccggctctgggcacccgctgtttttgtcatcgctcctgtggctgttttaaaaaccagact

SEQ ID NO: 385499 - DNA, 120 bp, Artificial Sequence
  ENSG00000144152_28 (sequence is synthesized)
ggaattgcgcatggagtgtaaatgtagagttacaggcagccagcagggttcaaactcaaagtaccctgagcatcctggggtgcagagccccaaagggaggctccagctggagggctgggg

SEQ ID NO: 385500 - DNA, 120 bp, Artificial Sequence
  ENSG00000144152_29 (sequence is synthesized)
tggttaattttatgtgtcaatttagttaagacatggtttccagatatttgctcaaacaccagtccagatgttgctgagaagcgattgtttagatacgactagcatttaaatcagcagcct

SEQ ID NO: 385501 - DNA, 120 bp, Artificial Sequence
  ENSG00000144152_30 (sequence is synthesized)
ttgagaaaagccgattcgcctcctagtgtgggtggccctcatgcaaaagactgaggtcccctgaggagggagttgggcctccacactgccttctgcctttgaccttgagctgcagcatca

SEQ ID NO: 385502 - DNA, 120 bp, Artificial Sequence
  ENSG00000144152_31 (sequence is synthesized)
cctgcaactggccctgggtctccagcctgctcctgccctgcggaggttggacttgccagcccccataactgctcgacagttccttaaaattccttaaaattggacttgccagcccccaca

SEQ ID NO: 385503 - DNA, 120 bp, Artificial Sequence
  ENSG00000144152_32 (sequence is synthesized)
actgcgtgacaatcccttaaaatctctctttctctctccatatattaataagtatgttatatattacaatattacatatgtatacgtatgcatgtgtgtgtatatataatatatatctct

SEQ ID NO: 385504 - DNA, 120 bp, Artificial Sequence
  ENSG00000144152_33 (sequence is synthesized)
ttcttattgcttctgtttctgtagagagttctgactaatccaaaggcctcaggcaactccccaagtgaaattctctcacttcctccagaagcacccactttctctcctcatatatgtggg

SEQ ID NO: 385505 - DNA, 120 bp, Artificial Sequence
  ENSG00000144152_34 (sequence is synthesized)
tgctgagcagaggtctctggcatgaagagtagtcgaggatttataacccgcctctggctcagttgaaaaataaaaataagttctgtagagagcacattcacgaattcgacatgactcaga

SEQ ID NO: 385506 - DNA, 120 bp, Artificial Sequence
  ENSG00000144152_35 (sequence is synthesized)
aggtgaggacatcctgctgtggggagaggaggaccctaggcataggtccccaaatgcagacatgtagggagctcagtcccccactcaaagatgtagcttttcctctctgtttcacatcca

SEQ ID NO: 385507 - DNA, 120 bp, Artificial Sequence
  ENSG00000144152_36 (sequence is synthesized)
ccgatccctctggttttctaaggtggtcacttgacagagcttagctctttgatgcaaccagagttttgacccttcttatagtagaaaacacaagcgcaagaactgactcccaacgtaaaa

SEQ ID NO: 385508 - DNA, 120 bp, Artificial Sequence
  ENSG00000144152_37 (sequence is synthesized)
atcccctagattgggaatgtggcccaagaagtttcactgttgccacctttgcttggtcagcatttcttacgccagcagaaccaccttttctttccagtgttcccattacatcttgcaaaa

SEQ ID NO: 385509 - DNA, 120 bp, Artificial Sequence
  ENSG00000144152_38 (sequence is synthesized)
ttagcagctattgatgcaggcccaagtattttgagagctggataactatacatttgactggttttgagattactattcacatcttgagtctcaacatatctcgacccagagagtctaaga

SEQ ID NO: 385510 - DNA, 120 bp, Artificial Sequence
  ENSG00000144152_39 (sequence is synthesized)
agtcacgtggtgcctggttttgcatatggcaagaaaatccagtgataaggaatctgtggaggatggacaggggttcccgcaccatgatgcaaccaagatttcattcagccccaaagatat

SEQ ID NO: 385511 - DNA, 120 bp, Artificial Sequence
  ENSG00000144152_40 (sequence is synthesized)
cctattccttagccacaaaagtctggtgtgttatgcctgtttgtctttatttctgtatgaaatatctgtggggggaagggacattggggctagtgcagtgtccagtggataagagcttta

SEQ ID NO: 385512 - DNA, 120 bp, Artificial Sequence
  ENSG00000144152_41 (sequence is synthesized)
tcaatacttatgatcctggcactggacccagcccaagctcaggtttaaatagtgccccaagagatttgctgcttaatatgccctgattcagttcagctgagtcagctggctgggcacttt

SEQ ID NO: 385513 - DNA, 120 bp, Artificial Sequence
  ENSG00000144152_42 (sequence is synthesized)
ctcaaaatgaggctgtcctcccgagctcagaggccccttacagctcctgtccctggaactgctttctatggaaactgaggccagagacagggctttcttggagacctcactgcctctccc

SEQ ID NO: 385514 - DNA, 120 bp, Artificial Sequence
  ENSG00000144152_43 (sequence is synthesized)
cttgtttacaaacaagagggaaaaagaaatgggttcccttctgccctaaatatgccagtcctggtcactgaatgttctaaaccccactctttagggtttcctcccactgtgggatttttt

SEQ ID NO: 385515 - DNA, 120 bp, Artificial Sequence
  ENSG00000144152_44 (sequence is synthesized)
ggattacaggtgtgagccaccatgcccgcccaaggatctttagacaattgttgctcaggtccaggggggcctgttataaagtgtccccatggccagaatcttccccaggaatgggaagga

SEQ ID NO: 385516 - DNA, 120 bp, Artificial Sequence
  ENSG00000144152_45 (sequence is synthesized)
aatcttccccaggaatgggaaggaggggaagcaagcaggcatatccaaagccagctcctatcctcatagtctccatgaacagccatcacgcatctgggctcttgctcaccttgtccctca

SEQ ID NO: 385517 - DNA, 120 bp, Artificial Sequence
  ENSG00000144152_46 (sequence is synthesized)
gcctgacaccttccttcccatcagctggcccatgcctttccagttccctggaggagcatccctccaattccttttttaaaaatccattcaccctattttttatgatgataaaacatatat

SEQ ID NO: 385518 - DNA, 120 bp, Artificial Sequence
  ENSG00000144152_47 (sequence is synthesized)
ataacataaaatttaccagtttcatcctttttaactgtacagctcagtggcattaatcacattcacattgttgtgcgaccatcaccaccatccagctccagaattctttttgtcttgcaa

SEQ ID NO: 385519 - DNA, 120 bp, Artificial Sequence
  ENSG00000144152_48 (sequence is synthesized)
aactgagcttctgtacccataacaggacaactccccattgccctccccacagcccctggtaatcaccattcattcttctttctgtctctgtgagtctgactgctctagggacctcatcta

SEQ ID NO: 385520 - DNA, 120 bp, Artificial Sequence
  ENSG00000144152_49 (sequence is synthesized)
agtagaatcatgcaggatttgtccacttgtgtttgattcccatcaatccttgaaaaactttcagaaaaataacattttttcctgattagaaatataatttggccaagcatgatgactcat

SEQ ID NO: 385521 - DNA, 120 bp, Artificial Sequence
  ENSG00000144152_50 (sequence is synthesized)
gcgggctccgccaggacactggggacagcacggggaggacatggggcggggaaggggctctcacccaccgccctcctgccggcacgggtggcttcctgcgcgcggtctcagaaggcctgg

SEQ ID NO: 385522 - DNA, 120 bp, Artificial Sequence
  ENSG00000144152_51 (sequence is synthesized)
cgcttcgccgagggcatccgccacatgaagagccggctggccgcgctgcagaactctgtgggcagggtgggcccagatgcccttccaggtatcagtgaatgctccagccagccttgtcaa

SEQ ID NO: 385523 - DNA, 120 bp, Artificial Sequence
  ENSG00000144161_0 (sequence is synthesized)
actctctcgggttgttactctgtagcttcccggctcgcgaaagggaggacctgtctgggtcatggattttgagaatcttttctcaaaaccccccaacccggccctcggcaaaacggccac

SEQ ID NO: 385524 - DNA, 120 bp, Artificial Sequence
  ENSG00000144161_1 (sequence is synthesized)
ggactctgacgaaagaatcgatgatgaaatagatacagaagttgaagaaacacaagaagagaaaattaaactggagtgcgagcaaattcccaaaaaatttagacactctgcaatatcacc

SEQ ID NO: 385525 - DNA, 120 bp, Artificial Sequence
  ENSG00000144161_2 (sequence is synthesized)
aaaaagttcgctgcatagaaaatcaagaagtaaggactatgatgtatatagtgataatgatatctgcagtcaggaatcagaagataattttgccaaagagcttcaacagtacatacaagc

SEQ ID NO: 385526 - DNA, 120 bp, Artificial Sequence
  ENSG00000144161_3 (sequence is synthesized)
cagagaaatggcaaatgctgctcaacctgaagaatctacaaagaaagaaggagtaaaagataccccacaggctgctaaacaaaaaaataaaaatcttaaagctggtcacaagaatggcaa

SEQ ID NO: 385527 - DNA, 120 bp, Artificial Sequence
  ENSG00000144161_4 (sequence is synthesized)
acagaagaaaatgaagcgaaaatggcctggccctggaaacaaaggatcaaatgctttgctgaggaacagcggctcacaggaagaggatggtaaacctaaagagaagcagcagcatttgag

SEQ ID NO: 385528 - DNA, 120 bp, Artificial Sequence
  ENSG00000144161_5 (sequence is synthesized)
tcaggcattcatcaaccaacatacagtggaacgcaagggaaaacaaatttgtaaatattttcttgaaaggaaatgtattaagggagaccagtgtaaatttgatcatgatgcagagataga

SEQ ID NO: 385529 - DNA, 120 bp, Artificial Sequence
  ENSG00000144161_6 (sequence is synthesized)
aaagaaaaaggaaatgtgtaagttttatgtacaaggatattgtaccagaggtgaaaactgtctgtatttgcataatgaatatccttgtaagttttaccatacaggaacaaaatgttatca

SEQ ID NO: 385530 - DNA, 120 bp, Artificial Sequence
  ENSG00000144161_7 (sequence is synthesized)
gggagaatactgcaagttttctcatgctccactgactcctgaaacacaagaattgttggctaaagttttggatactgaaaagaagtcatgtaaataaaatagacataaaaaggtagcaat

SEQ ID NO: 385531 - DNA, 120 bp, Artificial Sequence
  ENSG00000144161_8 (sequence is synthesized)
gtacagataaagagtactttaacgcccatgcgtgttcaagactgttcaagactggtgatttggagtagtttacaagattcctcattcagagtgccctcttgtgtgactggggtgatgtgc

SEQ ID NO: 385532 - DNA, 120 bp, Artificial Sequence
  ENSG00000144161_9 (sequence is synthesized)
agcttccataatggatgggacagagagctgggatctaatgtacaagtgaagggcttggtcttccctgagacattccagccattggaataggagaggagcatatatggcagaggtgatggc

SEQ ID NO: 385533 - DNA, 120 bp, Artificial Sequence
  ENSG00000144161_10 (sequence is synthesized)
tggtgggtaaatgtgatagtaaattgtagaaacctcttctgattgattggatttccttaataaaatcggaagcaaggttaggctgagtgagggtgagtaaagaggtagaggaggtttgag

SEQ ID NO: 385534 - DNA, 120 bp, Artificial Sequence
  ENSG00000144161_11 (sequence is synthesized)
gagagagaactgctcggaagacattggtagatggaccataaaaacagagttagttctctttatgacattaaatagttttacaacatatttttaatggttcacaatttcattttagggctt

SEQ ID NO: 385535 - DNA, 120 bp, Artificial Sequence
  ENSG00000144161_12 (sequence is synthesized)
aaaataaattatggttctatgatttttttaaaccagtttcctattgttagacatttgtttccagtttcttactattataaataaagtgaaacaatatctcttactataccatttctaaat

SEQ ID NO: 385536 - DNA, 120 bp, Artificial Sequence
  ENSG00000144161_13 (sequence is synthesized)
ttagagttcgtaacttttctgttgttaaaatataagaatatttatctttctcattggtttataaactgtagtcagattatacacttgtgtgagttacaaactttaggagtgtgatggtat

SEQ ID NO: 385537 - DNA, 120 bp, Artificial Sequence
  ENSG00000144161_14 (sequence is synthesized)
cattaacacaagattcaaatactaatgttccaagtacaaataataatgagattctaaatatgcagttttatatagtaatattgattattggttattattagacaaataccatgaaatgga

SEQ ID NO: 385538 - DNA, 120 bp, Artificial Sequence
  ENSG00000144161_15 (sequence is synthesized)
aactcgtcattatattgttttattgttgggaaaagtaatagtattaccaacttgctggacatacagagtacaccaaagctagtgatacttcttagcaaagtcctatttgaaaataggaat

SEQ ID NO: 385539 - DNA, 120 bp, Artificial Sequence
  ENSG00000144161_16 (sequence is synthesized)
caaagttattttcattgttatctaatcctgctaaagcaagaaagggaattgcatatactccaagcaaaggtttatcagacaagacgaaagaaagcaggaaacaagggtaaatcctaggcc

SEQ ID NO: 385540 - DNA, 120 bp, Artificial Sequence
  ENSG00000144161_17 (sequence is synthesized)
cttagaagcaggaaactgaggaatggagagcaagtcatctctcagtgcccttttgctgtctgcccaggttgattggttcgcttctcagctgtggctcgggaggtgggcaaggcacttctt

SEQ ID NO: 385541 - DNA, 120 bp, Artificial Sequence
  ENSG00000144161_18 (sequence is synthesized)
atttaagtctcataacaaccttatacagtggataatgcaattcattgcatagaaagggaataaataggaatgcttaattttttaattttcatgagccttgtcaatacttgtagttaatct

SEQ ID NO: 385542 - DNA, 120 bp, Artificial Sequence
  ENSG00000144161_19 (sequence is synthesized)
tcatgagccttgtcaatacttgtagttaatcttatactacagtctagcagtttacttcctaatattacctcatgtataatagtttgatacttataaagtatagattttatatataaagtt

SEQ ID NO: 385543 - DNA, 120 bp, Artificial Sequence
  ENSG00000144161_20 (sequence is synthesized)
ctgaggcagtacccatctcacttgtaaacttaaaagacaccgcagagatttgagggactcagaagtcaaatagagtaggttaaaaacctcttatttttcaaattaattgttttaagaaac

SEQ ID NO: 385544 - DNA, 120 bp, Artificial Sequence
  ENSG00000144161_21 (sequence is synthesized)
aagcatacctgtgtaagtgaaatatcttaatttgtgttgaatcaagttaggagacagagattctcatgaatgtgtcctgtgttctcaaagcagctgctagcctgtgggtctctcctacct

SEQ ID NO: 385545 - DNA, 120 bp, Artificial Sequence
  ENSG00000144161_22 (sequence is synthesized)
gggttatggcagcacctcacagccaatcactggcctccattctcccctttcctctgtacagtttgctctggttcctcagagcagatttccgagtatactgcttcagccacgcccccactg

SEQ ID NO: 385546 - DNA, 120 bp, Artificial Sequence
  ENSG00000144161_23 (sequence is synthesized)
tgccgttccctgaaccaagagccattcgtctcaagagccattcgtccaaagtactctatcacctagccattgtagccataccaagccgggcttcctacttccctctgctccccttggttt

SEQ ID NO: 385547 - DNA, 120 bp, Artificial Sequence
  ENSG00000144161_24 (sequence is synthesized)
taaatctcactgacccttgatgcagctccaagcatatataatatatatataataaaaccatagtctaaaaaattcaaaccaggagaaataaagccagaaagttgtatgggaaaaatctgc

SEQ ID NO: 385548 - DNA, 120 bp, Artificial Sequence
  ENSG00000144161_25 (sequence is synthesized)
acagatttatttggccagcatggttatcatggctctattgaatttatccttgaccgtctttaaagccaaagcaaacgggataaagtgatcaactacttacctctcaataccagaaaggaa

SEQ ID NO: 385549 - DNA, 81 bp, Artificial Sequence
  ENSG00000144161_26 (sequence is synthesized)
taaagtgatcaactacttacctctcaataccagaaaggaagcaggaggcaaaatctctcaataatttcataaaaacaattc

SEQ ID NO: 385550 - DNA, 120 bp, Artificial Sequence
  ENSG00000144161_27 (sequence is synthesized)
ttatggaaatcacagaatagaatggacagaattctcatttctaaaattctgtgtgacaggtttcatatgggtctttttatggtcagttactaaaagccacataatagtagaactaaattt

SEQ ID NO: 385551 - DNA, 90 bp, Artificial Sequence
  ENSG00000144161_28 (sequence is synthesized)
ggccagaactcaatttttatctgttggtgagataatataggtcaagtatatagccttttggtgttttaacttgatccaattgtagaactt

SEQ ID NO: 385552 - DNA, 120 bp, Artificial Sequence
  ENSG00000144161_29 (sequence is synthesized)
tagccttttggtgttttaacttgatccaattgtagaactttaggaattcagaccccgagatgttaaatgactgtcccctgttttaataggtttcctgagtttcagcataattgtcttagt

SEQ ID NO: 385553 - DNA, 120 bp, Artificial Sequence
  ENSG00000144161_30 (sequence is synthesized)
gtcttagttcactgactagtttcttataagcataaccactggggggttacgtgcaaggatttcttcaggccgggtgcagtggctcacaccttgaatctcggcactttgggaggccaaggc

SEQ ID NO: 385554 - DNA, 120 bp, Artificial Sequence
  ENSG00000144161_31 (sequence is synthesized)
ggagtttgagaccagccttggcaacatagcaagatctcatctttacaaaaaatttttaaattagccaggcatggaggtgcatacctggagtcccagctacttgagagtctgaggcaagag

SEQ ID NO: 385555 - DNA, 120 bp, Artificial Sequence
  ENSG00000144161_32 (sequence is synthesized)
gcatggaggtgcatacctggagtcccagctacttgagagtctgaggcaagaggatcactggagcccatgaattcgaggttgcagtgagtcctgattgtgccactgcactccagcctgggc

SEQ ID NO: 385556 - DNA, 120 bp, Artificial Sequence
  ENSG00000144161_33 (sequence is synthesized)
aaagcatttcttctgagttgtgcttgctgaactcaaaatactaggtgatttggtaatgcgcctaaagagcatggggctcctcctgccaattataagcaaagacatcacatttggagtttg

SEQ ID NO: 385557 - DNA, 120 bp, Artificial Sequence
  ENSG00000144161_34 (sequence is synthesized)
gcaagatcagaatatctcaggttgagcacctgctgaatgctaggattgtgtctatgcattttaaatctatttttaatctttattacagtcttataatagggattatgacaccagaacaga

SEQ ID NO: 385558 - DNA, 120 bp, Artificial Sequence
  ENSG00000144161_35 (sequence is synthesized)
gacagctgtcttaagatttcaaggggtgctagctgaagaaaacagagaggaaagttgggaagaagctggatccttgataacagctgagccatggacttaaccagtcttagatgagcgata

SEQ ID NO: 385559 - DNA, 120 bp, Artificial Sequence
  ENSG00000144161_36 (sequence is synthesized)
cctcaccttcagatttcatgtcataccacctgaaataatatattttcattattgttgaagccattttgatttgggttgtctactatgctacctgcagccaaagggaaactaataaatgtg

SEQ ID NO: 385560 - DNA, 120 bp, Artificial Sequence
  ENSG00000144161_37 (sequence is synthesized)
aactaagaagcaaacctacattcttcttcccaaagtccatgtttctccccctcgccatcctcttcaccaaaaactacattcattgtattcagctcctgcaaagagcacacattaagaaac

SEQ ID NO: 385561 - DNA, 120 bp, Artificial Sequence
  ENSG00000144161_38 (sequence is synthesized)
aggtttaaggaagtgttagacactgaatgtattcgacccccaaaattcatgtgttgaaatcctgactcctaggactaactgttaggaggtagggcctttgggagatgattgggttttgag

SEQ ID NO: 385562 - DNA, 120 bp, Artificial Sequence
  ENSG00000144161_39 (sequence is synthesized)
ggattagtgcccttataaaagaggccctggggagctgtctcccttttccaccatgtgaggacacggcaagaaaatggctgtctacaaagcaggaagcaggccctcaccacacactaatat

SEQ ID NO: 385563 - DNA, 120 bp, Artificial Sequence
  ENSG00000144161_40 (sequence is synthesized)
ccctcaccacacactaatataccagcaccttgaccttgacctccccccatctccagaactgtgaggagtaagtgttgtttaagccacctagtctgtggtatttttgttataatagcccaa

SEQ ID NO: 385564 - DNA, 120 bp, Artificial Sequence
  ENSG00000144161_41 (sequence is synthesized)
atggactaagaaatgaagagaaattaagatggggagggctattttcataataaggagcagaaaactaggaagagtagatatatttagaagggttaagaggagaggggagaatgtatatgt

SEQ ID NO: 385565 - DNA, 120 bp, Artificial Sequence
  ENSG00000144161_42 (sequence is synthesized)
ttggatagggagggacaagatgcccaactcatcttaaaagtgctgttgattcctgtgaaatttgtaacactcatttacattatttaaaaataaactaaattcgaacttgtcttggaggca

SEQ ID NO: 385566 - DNA, 120 bp, Artificial Sequence
  ENSG00000144161_43 (sequence is synthesized)
tgaaagaaaaaaaaagacatgtttttagttattgtatgttactctgagctacacattatttaacatctctgaaactggaatatattttacaattgatagactcattttaattagcaggtt

SEQ ID NO: 385567 - DNA, 120 bp, Artificial Sequence
  ENSG00000144161_44 (sequence is synthesized)
attgttttcttagcagtacataagaaatggtgaatcttattgattcagtggcatttagattctattaaatataatttttaactgaagttgtacatagttaaataaaagtttactatgaaa

SEQ ID NO: 385568 - DNA, 120 bp, Artificial Sequence
  ENSG00000144161_45 (sequence is synthesized)
ctgtagcttcccggctcgcgaaagggaggacctgtctgggtcatggattttgagaatcttttctcaaaaccccccaacccggccctcggcaaaacggccacggactctgacgaaaggtga

SEQ ID NO: 385569 - DNA, 120 bp, Artificial Sequence
  ENSG00000144161_46 (sequence is synthesized)
tccccttgtgctttacatgaaataaatcacttaatcctcaaaacaaacttaaagagaagatgatgccgtcctcgttttacagatgggaaaactgaggcacggagaggctaaataacctgc

SEQ ID NO: 385570 - DNA, 120 bp, Artificial Sequence
  ENSG00000144161_47 (sequence is synthesized)
ttttctcatgctccactgactcctgaaacacaagaattgttggctaaagttttggatactgaaaagaagtcatgtaaataaaatagacataaaaaggtaaaattagaatttaccacattt

SEQ ID NO: 385571 - DNA, 120 bp, Artificial Sequence
  ENSG00000144161_48 (sequence is synthesized)
ctttttttcttgtctgaacatctccagaagttggcatgcaacctcaatagggttctcaaatagaagtatttttcttcttcctccgccactaaaaaagaattataaaatatttgatatatt

SEQ ID NO: 385572 - DNA, 120 bp, Artificial Sequence
  ENSG00000144161_49 (sequence is synthesized)
ggtgcagcgcatgcgcggggcagaatcgatgatgaaatagatacagaagttgaagaaacacaagaagagaaaattaaactggagtgcgagcaaattcccaaaaaaatgcactgaagaaaa

SEQ ID NO: 385573 - DNA, 120 bp, Artificial Sequence
  ENSG00000144161_50 (sequence is synthesized)
tctcacctctatgtatttgattaagctaaacttcataggagctgctgcatactgaataatctttttggttcccccatgcctactaaataaaattaaaggccaaaaccaagtttagacact

SEQ ID NO: 385574 - DNA, 120 bp, Artificial Sequence
  ENSG00000144182_0 (sequence is synthesized)
agcatcgcgcgcaaggcctgccggttgctcggggtcgtatgacgcacttttccagctcgagccctcacgaggccgtgggtacgaccggaagccgcagcatgctgatcccattttcaatga

SEQ ID NO: 385575 - DNA, 120 bp, Artificial Sequence
  ENSG00000144182_1 (sequence is synthesized)
agaattgcttccagttactttgtaactgccaggtcccagcagctggctttaaaaaaacagtaaaaaatgggctcattttacagtcaatttccaatgatgtctatcaaaatctggctgtgg

SEQ ID NO: 385576 - DNA, 120 bp, Artificial Sequence
  ENSG00000144182_2 (sequence is synthesized)
aagactggatccatgaccatatgaatctagaaggcaaaccaattctattcttttggcagaattctccctctgttgtaattggtaggcatcaaaatccttggcaggaatgtaacctgaatc

SEQ ID NO: 385577 - DNA, 120 bp, Artificial Sequence
  ENSG00000144182_3 (sequence is synthesized)
taatgagagaagaaggtataaaactggctcggagaagaagtggaggaggaacagtctaccatgatatgggtaatatcaatttgactttctttacaaccaaaaaaaagtatgatagaatgg

SEQ ID NO: 385578 - DNA, 120 bp, Artificial Sequence
  ENSG00000144182_4 (sequence is synthesized)
aaaatctgaaattaattgtgagagctctgaatgctgtccaaccccagctggatgtgcaggctaccaaaagatttgaccttttacttgatggacagtttaaaatctcaggaacagcttcta

SEQ ID NO: 385579 - DNA, 120 bp, Artificial Sequence
  ENSG00000144182_5 (sequence is synthesized)
caagggatcaggagcaatgccactgctagcataccttccttagtgaaaaatcttttggaaaaggatcccactctgacctgtgaagtactaatgaatgctgttgctacagagtatgctgct

SEQ ID NO: 385580 - DNA, 120 bp, Artificial Sequence
  ENSG00000144182_6 (sequence is synthesized)
tatcatcaaattgataatcacattcacctaataaacccaacggatgagacactgtttcctggaataaatagcaaagccaaagaactgcaaacttgggagtggatatatggcaaaactcca

SEQ ID NO: 385581 - DNA, 120 bp, Artificial Sequence
  ENSG00000144182_7 (sequence is synthesized)
aagtttagtataaatacttcctttcatgtgttatatgaacagtcacacttggaaattaaagtattcatagacataaagaatggaagaattgaaatttgtaatattgaagcacctgatcat

SEQ ID NO: 385582 - DNA, 120 bp, Artificial Sequence
  ENSG00000144182_8 (sequence is synthesized)
tggttgccattggaaatacgtgacaaattaaattcaagtcttattggcagtaagttttgcccaactgaaactaccatgctaacaaatatattacttagaacatgtccacaagaccacaaa

SEQ ID NO: 385583 - DNA, 120 bp, Artificial Sequence
  ENSG00000144182_9 (sequence is synthesized)
ctaaacagtaaatggaatattctctgtgaaaaaattaagggaataatgtgattccaagtaaatgtcttaatacagtttcaattagaaaataaaatgtctcatacttgcacattgtatgtc

SEQ ID NO: 385584 - DNA, 120 bp, Artificial Sequence
  ENSG00000144182_10 (sequence is synthesized)
agcatcgcgcgcaaggcctgccggttgctcggggtcgtatgacgcacttttccagctcgagccctcacgaggccgtgggtacgaccggaagccgcagactgaatctcgctctgttgccca

SEQ ID NO: 385585 - DNA, 120 bp, Artificial Sequence
  ENSG00000144182_11 (sequence is synthesized)
aaaccgggatgttgcgggccgtagcgcgtgggcggccgtggggtcttgggcgcgcgcggtgtttctggcggtgggtcaggacttgcgggtcgcctccgccggtgttgaagcctcttgtgt

SEQ ID NO: 385586 - DNA, 120 bp, Artificial Sequence
  ENSG00000144182_12 (sequence is synthesized)
gcacactttctcctcagcacttgggacgacctaatttcactgttaggaacggttgatcccgaacacaggagggagggtaaatatcgtaaaacatgttggacgctagctgtgtgcacgccc

SEQ ID NO: 385587 - DNA, 120 bp, Artificial Sequence
  ENSG00000144182_13 (sequence is synthesized)
cctgggagccaaaagggcgaagtaaaacatgcacacgaccgtaatgagattctgattcagtgatggggagccgtgtttggcagtgcagaggtagcgaagtgtcccaagaacatggaagac

SEQ ID NO: 385588 - DNA, 120 bp, Artificial Sequence
  ENSG00000144182_14 (sequence is synthesized)
ttttttaatagccctccttatcacctttattcatttgactcactgatgattcccaagtgctaagaacaatgtctgtcatgtaattgatgaaaactttgttgaattaatacctttgttgtg

SEQ ID NO: 385589 - DNA, 120 bp, Artificial Sequence
  ENSG00000144182_15 (sequence is synthesized)
ttttattcacactgtatatacaatacctggatgaagagagatatttttagcactattaaaatacatgcattggctcaatacatgaattggatcaattctggaaccctaacaagatcacat

SEQ ID NO: 385590 - DNA, 120 bp, Artificial Sequence
  ENSG00000144182_16 (sequence is synthesized)
atgaagaagctgcgcctgcctagaaagatagatgggattgtgctgttttcgctttcagttcagtgatggggagccgtgtttggcagtgcagaggtagcgaagtgtcccaagaacatggaa

SEQ ID NO: 385591 - DNA, 120 bp, Artificial Sequence
  ENSG00000144191_0 (sequence is synthesized)
agcaatcatctggggggctaaatgtgacaaaccgagaagatggccaagatcaacacccaatactcccacccctccaggacccacctcaaggtaaagacctcagaccgagatctcaatcgc

SEQ ID NO: 385592 - DNA, 120 bp, Artificial Sequence
  ENSG00000144191_1 (sequence is synthesized)
gctgaaaatggcctcagcagagcccactcgtcaagtgaggagacatcgtcagtgctgcagccggggatcgccatggagaccagaggactggctgactccgggcagggctccttcaccggc

SEQ ID NO: 385593 - DNA, 120 bp, Artificial Sequence
  ENSG00000144191_2 (sequence is synthesized)
caggggatcgccaggctgtcgcgcctcatcttcttgctgcgcaggtgggctgccaggcatgtgcaccaccaggaccagggaccggactcttttcctgatcgtttccgtggagccgagctt

SEQ ID NO: 385594 - DNA, 120 bp, Artificial Sequence
  ENSG00000144191_3 (sequence is synthesized)
aaggaggtgtccagccaagaaagcaatgcccaggcaaatgtgggcagccaggagccagcagacagagggagaagcgcctggcccctggccaaatgcaacactaacaccagcaacaacacg

SEQ ID NO: 385595 - DNA, 120 bp, Artificial Sequence
  ENSG00000144191_4 (sequence is synthesized)
gaggaggagaagaagacgaaaaagaaggatgcgatcgtggtggacccgtccagcaacctgtactaccgctggctgaccgccatcgccctgcctgtcttctataactggtatctgcttatt

SEQ ID NO: 385596 - DNA, 120 bp, Artificial Sequence
  ENSG00000144191_5 (sequence is synthesized)
tgcagggcctgtttcgatgagctgcagtccgagtacctgatgctgtggctggtcctggactactcggcagatgtcctgtatgtcttggatgtgcttgtacgagctcggacaggttttctc

SEQ ID NO: 385597 - DNA, 120 bp, Artificial Sequence
  ENSG00000144191_6 (sequence is synthesized)
gagcaaggcttaatggtcagtgataccaacaggctgtggcagcattacaagacgaccacgcagttcaagctggatgtgttgtccctggtccccaccgacctggcttacttaaaggtgggc

SEQ ID NO: 385598 - DNA, 120 bp, Artificial Sequence
  ENSG00000144191_7 (sequence is synthesized)
acaaactacccagaagtgaggttcaaccgcctactgaagttttcccggctctttgaattctttgaccgcacagagacaaggaccaactaccccaatatgttcaggattgggaacttggtc

SEQ ID NO: 385599 - DNA, 120 bp, Artificial Sequence
  ENSG00000144191_8 (sequence is synthesized)
ttgtacattctcatcatcatccactggaatgcctgcatctactttgccatttccaagttcattggttttgggacagactcctgggtctacccaaacatctcaatcccagagcatgggcgc

SEQ ID NO: 385600 - DNA, 120 bp, Artificial Sequence
  ENSG00000144191_9 (sequence is synthesized)
ctctccaggaagtacatttacagtctctactggtccaccttgacccttaccaccattggtgagaccccaccccccgtgaaagatgaggagtatctctttgtggtcgtagacttcttggtg

SEQ ID NO: 385601 - DNA, 120 bp, Artificial Sequence
  ENSG00000144191_10 (sequence is synthesized)
ggtgttctgatttttgccaccattgtgggcaatgtgggctccatgatctcgaatatgaatgcctcacgggcagagttccaggccaagattgattccatcaagcagtacatgcagttccgc

SEQ ID NO: 385602 - DNA, 120 bp, Artificial Sequence
  ENSG00000144191_11 (sequence is synthesized)
aaggtcaccaaggacttggagacgcgggttatccggtggtttgactacctgtgggccaacaagaagacggtggatgagaaggaggtgctcaagagcctcccagacaagctgaaggctgag

SEQ ID NO: 385603 - DNA, 120 bp, Artificial Sequence
  ENSG00000144191_12 (sequence is synthesized)
atcgccatcaacgtgcacctggacacgctgaagaaggttcgcatcttccaggactgtgaggcagggctgctggtggagctggtgctgaagctgcgacccactgtgttcagccctggggat

SEQ ID NO: 385604 - DNA, 120 bp, Artificial Sequence
  ENSG00000144191_13 (sequence is synthesized)
tatatctgcaagaagggagatattgggaaggagatgtacatcatcaacgagggcaagctggccgtggtggctgatgatggggtcacccagttcgtggtcctcagcgatggcagctacttc

SEQ ID NO: 385605 - DNA, 120 bp, Artificial Sequence
  ENSG00000144191_14 (sequence is synthesized)
catggaggccctcaccgagtaccccgaagccaagaaggccctggaggagaaaggacggcagatcctgatgaaagacaacctgatcgatgaggagctggccagggcgggcgcggaccccaa

SEQ ID NO: 385606 - DNA, 120 bp, Artificial Sequence
  ENSG00000144191_15 (sequence is synthesized)
ggaccttgaggagaaagtggagcagctggggtcctccctggacaccctgcagaccaggtttgcacgcctcctggctgagtacaacgccacccagatgaagatgaagcagcgtctcagcca

SEQ ID NO: 385607 - DNA, 120 bp, Artificial Sequence
  ENSG00000144191_16 (sequence is synthesized)
actggaaagccaggtgaagggtggtggggacaagcccctggctgatggggaagttcccggggatgctacaaaaacagaggacaaacaacagtgaaaatgcagcatctgtctcctgcttca

SEQ ID NO: 385608 - DNA, 120 bp, Artificial Sequence
  ENSG00000144191_17 (sequence is synthesized)
cagggtcgactgtcagggtgaccgtatgtggccgcagctgtgtggcatggaacttggtcagggttgaattccagctctactcaccctttgaaagctgtgtgactgcctgagagaacctgt

SEQ ID NO: 385609 - DNA, 120 bp, Artificial Sequence
  ENSG00000144191_18 (sequence is synthesized)
ttcttcacctaaaaaatgggactttttgtctcagtcccagtgaagtgccaggtttgattgtgaagtccgcatgaaacactgcaccaggcagggctttgcaaagtgcaaggtatccccagt

SEQ ID NO: 385610 - DNA, 120 bp, Artificial Sequence
  ENSG00000144191_19 (sequence is synthesized)
ccaagtatatgaaaacgtgcacacaggactctcattacttttttatggaatctgcaaggtgtttttaggctttttaatctgattttcttataaatgaaagattatttagtcacctttctc

SEQ ID NO: 385611 - DNA, 120 bp, Artificial Sequence
  ENSG00000144191_20 (sequence is synthesized)
ctgtccaacttcaccaccacctgataatgggtatataacaggaagctgaaggtacaacatagtgactaaaattcagacttacacaagacagtttgaggcatatttcttaatctggtatca

SEQ ID NO: 385612 - DNA, 120 bp, Artificial Sequence
  ENSG00000144191_21 (sequence is synthesized)
cctcgtgtgttctttggggccctagaaaccctggcttttgggagtgctatggcaagtagaagttctgccggatggaaagaggctgccccatttgaggtcatttaaaatctgtgaagcaaa

SEQ ID NO: 385613 - DNA, 120 bp, Artificial Sequence
  ENSG00000144191_22 (sequence is synthesized)
tccagactccttgccgttcagccactgtgaaaccagaatctgcttcacagaaaaaagcatctcagttaggagaagagacatcccctccttctcacttgccaaagagattcaaagacagcc

SEQ ID NO: 385614 - DNA, 120 bp, Artificial Sequence
  ENSG00000144191_23 (sequence is synthesized)
cctatcctccattcttgagtcagggccctaggtgacctattctaactcaaggaggagagctatgtacagggagagcattttagattgaaggttggaatggtgtactaaaccaaaaaagct

SEQ ID NO: 385615 - DNA, 120 bp, Artificial Sequence
  ENSG00000144191_24 (sequence is synthesized)
gacaactgagagttttagaagattagaccattaggaacgtatctttgcaaactgcccattcacccatgaagaggaagcctcaagatcccttggaattgcatcccaaggcaaagcttttgg

SEQ ID NO: 385616 - DNA, 120 bp, Artificial Sequence
  ENSG00000144191_25 (sequence is synthesized)
ctcaccgaaagctcacagattgcagaaattagcttttttaaaaaacaaaccccagtaaatataatttcattaacattttataacagatttatatttttgagttccgtgattgcaaattat

SEQ ID NO: 385617 - DNA, 120 bp, Artificial Sequence
  ENSG00000144191_26 (sequence is synthesized)
gacctcaaattccatccttcacttatgtaacatgttgcaaattacccaaagatgagtctttcttctttctttcctttttcctttcttcttcctttccttttttctttcttcttccttctt

SEQ ID NO: 385618 - DNA, 120 bp, Artificial Sequence
  ENSG00000144191_27 (sequence is synthesized)
tcttcctttttctctctcctcttttcctcctcaaaatgtatatattttaaaagccttaactgttagttatgcctgcattcatatttgcacaggaaaaataaagacctggatttaaaaata

SEQ ID NO: 385619 - DNA, 120 bp, Artificial Sequence
  ENSG00000144191_28 (sequence is synthesized)
gcttactcatccagtgtggattacactaccagcaaaacatcccaggaaggagtccagggtggccgcccacagttaggagagaacccagaacggaacgacggacttgtttgctttcttgcc

SEQ ID NO: 385620 - DNA, 120 bp, Artificial Sequence
  ENSG00000144191_29 (sequence is synthesized)
cctgactctccccgtcctccctgggagggttggggatgtgaactaatgacttctgcctctttcggaccgcctttgaggctccagagcctcaccttactttcccacggagagggaggccac

SEQ ID NO: 385621 - DNA, 120 bp, Artificial Sequence
  ENSG00000144191_30 (sequence is synthesized)
aggctccttcagcagtcgccgagcagagtcctgggccgggagcgcgggggagggagcgagcggaactgcgcctaggaggccgagggaggaggcgctccgcagaccctggcgcgccgcgga

SEQ ID NO: 385622 - DNA, 120 bp, Artificial Sequence
  ENSG00000144191_31 (sequence is synthesized)
gaagatgaaattcagtaggcgagaagtgttggaaccaaaatcctcgttctggagtcattttatggaagcagctgctttggcttgaaatgagcccactcgtcaagtgaggagacatcgtca

SEQ ID NO: 385623 - DNA, 120 bp, Artificial Sequence
  ENSG00000144191_32 (sequence is synthesized)
gtgctgcagccggggatcgccatggagaccagaggactggctgactccgggcagggctccttcaccggccaggggatcgccaggtttggaagaattcagaaaaaaagccaaccggagaag

SEQ ID NO: 385624 - DNA, 120 bp, Artificial Sequence
  ENSG00000144191_33 (sequence is synthesized)
gtggtaagagcagccagccgtgggagacctttgattgggtggacacagtggtgtgctgaggatggtggtgatgagtctgaaatggctctggcagggtctcccgggtgctcgtctggaccc

SEQ ID NO: 385625 - DNA, 120 bp, Artificial Sequence
  ENSG00000144191_34 (sequence is synthesized)
acaaatggtaataaagagagtgtccctttccggggaagcctgcccctgactgcagggtggagggagaaggggataaacggtccccatggggcagagatgcaaacttagaccacagggccc

SEQ ID NO: 385626 - DNA, 120 bp, Artificial Sequence
  ENSG00000144191_35 (sequence is synthesized)
ccagcacccgtaccctgctggtcatcattgcttctgccccatcccttgagacagacagagagggagggagaaagagagagagggaaagactggggtttgggggtgtggggggcttttcct

SEQ ID NO: 385627 - DNA, 120 bp, Artificial Sequence
  ENSG00000144199_0 (sequence is synthesized)
acaggacgcgcccgcttctcgctggagtgcgcaccgagcggcagtgacttcgccgctgctgtagttccccggctggatgcggtgactggtgccagtgctcaggcgcccgctgcccttgac

SEQ ID NO: 385628 - DNA, 120 bp, Artificial Sequence
  ENSG00000144199_1 (sequence is synthesized)
ctcccgccccgcgagccctaactcagcgcaggaggaccggctgccgccgccgccgccgccaggctctgatgctggtgtctggtagaagaagattactcacagctctgctgcaggctcaga

SEQ ID NO: 385629 - DNA, 120 bp, Artificial Sequence
  ENSG00000144199_2 (sequence is synthesized)
agtggccctttcaaccctccagagacatgagactagtgcagttccgggcaccccacctggtggggcctcacttgggcctggagacagggaatggtggaggggttatcaacctcaatgcct

SEQ ID NO: 385630 - DNA, 120 bp, Artificial Sequence
  ENSG00000144199_3 (sequence is synthesized)
ttgaccccacactcccaaagacgatgacgcagttcctagagcagggagaggccaccctctcagtggcaagaagagccttggctgcccagttgccagtcctaccatggtcggaggtaacct

SEQ ID NO: 385631 - DNA, 120 bp, Artificial Sequence
  ENSG00000144199_4 (sequence is synthesized)
tcctggctccagtcacatggccagataaggtggtgtgtgtgggcatgaattatgtggaccactgcaaagaacagaacgtgcccgtgcccaaggagcccatcatcttcagcaagtttgcca

SEQ ID NO: 385632 - DNA, 120 bp, Artificial Sequence
  ENSG00000144199_5 (sequence is synthesized)
tcaaggccacagatgccatggcccacgtggccggcttcactgtggctcatgacgtgagtgctcgtgactggctaacaagacgcaatgggaaacagtggctgctgggaaaaaccttcgaca

SEQ ID NO: 385633 - DNA, 120 bp, Artificial Sequence
  ENSG00000144199_6 (sequence is synthesized)
ccttctgccctctgggccctgccttggtgaccaaggacagtgtagcagatccacacaacttaaagatctgctgccgagtgaatggggaagtcgtccagagcagcaacaccaaccagatgg

SEQ ID NO: 385634 - DNA, 120 bp, Artificial Sequence
  ENSG00000144199_7 (sequence is synthesized)
tattcaagacagaggacctgatagcctgggtctcccagtttgttaccttttacccaggggatgtcatcctaactgggacccccccaggtgtcggtgtattcaggaaacctcctgtctttc

SEQ ID NO: 385635 - DNA, 120 bp, Artificial Sequence
  ENSG00000144199_8 (sequence is synthesized)
tcaagaagggggatgaagtccagtgtgagattgaagaactaggtgtcatcatcaacaaggtggtgtgatggctcctgcacaggcccgacataggatgagggcatctgctcccactcagcc

SEQ ID NO: 385636 - DNA, 120 bp, Artificial Sequence
  ENSG00000144199_9 (sequence is synthesized)
tagcccagggaaaggcccagtggcaggtgtgggcaggtgccagccctgcaagccgcctcttctcggtagaagggagaaggacagagctctcttcaataaatgcgtcgggtcaaagcagca

SEQ ID NO: 385637 - DNA, 120 bp, Artificial Sequence
  ENSG00000144199_10 (sequence is synthesized)
ccgccgccgccgccgccagcagagccaagcacagtgggaactttcagaaagcactggttgaaggaacgctggaatccctgggacttactgcgtagcatgtagtagttgctcctctacaaa

SEQ ID NO: 385638 - DNA, 120 bp, Artificial Sequence
  ENSG00000144199_11 (sequence is synthesized)
gatgaggtggtcctcccaccacagagccaggaggtagattgggaagtggagctggccgtggtcattggaaagaaaggcaagcacatcaaggtgaggtggaaagggtgggctcccaggcca

SEQ ID NO: 385639 - DNA, 120 bp, Artificial Sequence
  ENSG00000144199_12 (sequence is synthesized)
gcctctcctagttctgacctcactcaccgacacacggcaccagctgtccctgacactaggaagcagtcagcctccttgctccctgacactgcctttcccttcacccacctttggctggct

SEQ ID NO: 385640 - DNA, 120 bp, Artificial Sequence
  ENSG00000144199_13 (sequence is synthesized)
gcttttagcatatatttgctttctggccaagacgttccaggctcatcatgtactgtctgtcttggaccaaggaacccagtgctccttagtggggagtggtattagagaccaacatctgga

SEQ ID NO: 385641 - DNA, 120 bp, Artificial Sequence
  ENSG00000144199_14 (sequence is synthesized)
tgtcaggtgtacttataccaactctggttattattagaaagagccaccaattttgaaggccaaattatatctattttatagtgtattttatggattatgggagaggctgagcattttttc

SEQ ID NO: 385642 - DNA, 120 bp, Artificial Sequence
  ENSG00000144199_15 (sequence is synthesized)
atgttttgtggccatgtccgttacctttttgtgaattgcttactcaagtcctttgtggcatgtcaatctttctcttactaaagtgagttaatagattaaaacacttagaacagtgcctga

SEQ ID NO: 385643 - DNA, 120 bp, Artificial Sequence
  ENSG00000144199_16 (sequence is synthesized)
atccacacaacttaaagatctgctgccgagtgaatggggaagtcgtccagagcagcaacaccaaccagatggtattcaagacagaggacctgatagcctgggtctcccagtgagtgacaa

SEQ ID NO: 385644 - DNA, 120 bp, Artificial Sequence
  ENSG00000144199_17 (sequence is synthesized)
gccacacatgtggaggctgacctgagccctccacctttggctgtggccactcagccagcccctggtctcactgggtccttttgctttgctccaggtttgttaccttttacccaggggatg

SEQ ID NO: 385645 - DNA, 120 bp, Artificial Sequence
  ENSG00000144199_18 (sequence is synthesized)
tcatcctaactgggacccccccaggtgtcggtgtattcaggaaacctcctgtctttctcaaggtaggttagcgaaaagcaaagagagcaagggccccaaaggcctggcaggcttggctca

SEQ ID NO: 385646 - DNA, 120 bp, Artificial Sequence
  ENSG00000144199_19 (sequence is synthesized)
gagccaggtcagtgcctccccactgccctccctagtcactgggcccatcacaagggcattctgagctcagtattgagcctactggagccacctctcgctcagtagtgcattcaacagaaa

SEQ ID NO: 385647 - DNA, 120 bp, Artificial Sequence
  ENSG00000144199_20 (sequence is synthesized)
ctctacaggattatacacacagtagtaacactggccttggaaaaaaaaagttaatgtacgtgttttcctggttacaaaagcaatacaccttcactgtagataaaacagagataaacattt

SEQ ID NO: 385648 - DNA, 120 bp, Artificial Sequence
  ENSG00000144199_21 (sequence is synthesized)
aaaaattacgtcacccataatcccactgcccatggctcggaatattaatgtttttctgtctaccttcccagtgtttctccactcctgtatatgtttatactgtacatatacttacctttt

SEQ ID NO: 385649 - DNA, 120 bp, Artificial Sequence
  ENSG00000144214_0 (sequence is synthesized)
ataatttatgagatgtcataaatctctccaaaataggatgagatgaacacttttaacaagagaacaggactctatataaatcgctgtgggctcaccacctctaaggaggagcactgactg

SEQ ID NO: 385650 - DNA, 120 bp, Artificial Sequence
  ENSG00000144214_1 (sequence is synthesized)
aagacagaaaaattgatgaactgaagaagacatggtccattatgccttacaaacttacacagtgctttgggaattccaaagtactcagtggagagaggtgtttcaggagccgtagagcca

SEQ ID NO: 385651 - DNA, 120 bp, Artificial Sequence
  ENSG00000144214_2 (sequence is synthesized)
gatcgtcatcatgtctgcattgtggctgctgctgggcctccttgccctgatggacttgtctgaaagcagcaactggggatgctatggaaacatccaaagcctggacacccctggagcatc

SEQ ID NO: 385652 - DNA, 120 bp, Artificial Sequence
  ENSG00000144214_3 (sequence is synthesized)
ttgtgggattggaagacgtcacggcctgaactactgtggagttcgtgcttctgaaaggctggctgaaatagacatgccatacctcctgaaatatcaacccatgatgcaaaccattggcca

SEQ ID NO: 385653 - DNA, 120 bp, Artificial Sequence
  ENSG00000144214_4 (sequence is synthesized)
tggtgtcttgtccaggaagtctcccggtgacaaaattctggtcaacatgggcgataggactagcatggtgcaggaccctggctctcaagctcccacatcctggattagtgagtctcaggt

SEQ ID NO: 385654 - DNA, 120 bp, Artificial Sequence
  ENSG00000144214_5 (sequence is synthesized)
ttcccagacaactgaagttctgactactagaatcaaagaaatccagaggaggtttccaacctggacccctgaccagtacctgagaggtggactctgtgcctacagtgggggtgctggcta

SEQ ID NO: 385655 - DNA, 120 bp, Artificial Sequence
  ENSG00000144214_6 (sequence is synthesized)
tgtccgaagcagccaggacctgagctgtgacttctgcaatgatgtccttgcacgagccaagtacctcaagagacatggcttctaacatctcagatgaaacccaagaccatgatcacatat

SEQ ID NO: 385656 - DNA, 120 bp, Artificial Sequence
  ENSG00000144214_7 (sequence is synthesized)
gcagcctcaaatgttacacagataaaactagccaagggcacctgtaactgggaatctgagtttgacctaaaagtcattaaaataacatgaatcacattaaaggaagaattttgacctgca

SEQ ID NO: 385657 - DNA, 120 bp, Artificial Sequence
  ENSG00000144214_8 (sequence is synthesized)
gttgctatgttgcccaggctggtcttgaagtgccttgacctcctaaagtgttggaaccacagacgtgagccactccacccagcctaaaacttcatcttctttggatgagatgaacacttt

SEQ ID NO: 385658 - DNA, 120 bp, Artificial Sequence
  ENSG00000144218_0 (sequence is synthesized)
aaatccgatctcaaataggaaagaagtctcattggccttttggtcttctacctgtgtcctgaattgagtttgttaatcctcattcggagctgatcacctgcctttccagaccggagacgg

SEQ ID NO: 385659 - DNA, 120 bp, Artificial Sequence
  ENSG00000144218_1 (sequence is synthesized)
gcggcaagtttgaagtcgacacccagaggccagtttgtcccccttcccgcgcgcgggcggcccgagcctcggcggcggcggtagcggcggcggcgacgctgacacctcccaccatggaca

SEQ ID NO: 385660 - DNA, 120 bp, Artificial Sequence
  ENSG00000144218_2 (sequence is synthesized)
gcttcgacttagccctgctccaggaatgggacctcgagtcactgtggggtgaagacatcttaaaccagaggaatgactctctagttgtggaatttcagtcatcagccagcagatgcagga

SEQ ID NO: 385661 - DNA, 120 bp, Artificial Sequence
  ENSG00000144218_3 (sequence is synthesized)
gtgtctatgaaccagatagaaatgcattacggaggaaagaacgagaaagaagaaatcaagaaactcaacaggatgatggcacgtttaattctagttactctctcttcagtgagccctaca

SEQ ID NO: 385662 - DNA, 120 bp, Artificial Sequence
  ENSG00000144218_4 (sequence is synthesized)
agactaacaagggggatgaactctccaaccggatccagaacactttaggcaattatgatgaaatgaaagactttttaactgatagatccaatcagagtcatctcgttggagttcccaaac

SEQ ID NO: 385663 - DNA, 120 bp, Artificial Sequence
  ENSG00000144218_5 (sequence is synthesized)
ctggggttcctcagactcctgtgaacaagatcgatgaacattttgttgcagattcaagagcccagaaccagccctcgtctatctgtagcactacaacttccacaccagcagctgtccccg

SEQ ID NO: 385664 - DNA, 120 bp, Artificial Sequence
  ENSG00000144218_6 (sequence is synthesized)
tgcagcagagtaagagaggcactatgggctggcagaaggctgggcacccaccctctgacggccaacagagagcaacacaacagggctctctcaggaccttgcttggagatggtgttggca

SEQ ID NO: 385665 - DNA, 120 bp, Artificial Sequence
  ENSG00000144218_7 (sequence is synthesized)
gacagcagcctcgggccaaacaagtgtgcaatgtggaggtgggccttcagacccaggagaggccacctgccatggcggccaagcacagcagcagcggacactgtgttcagaactttcctc

SEQ ID NO: 385666 - DNA, 120 bp, Artificial Sequence
  ENSG00000144218_8 (sequence is synthesized)
catccctagcttcaaaacccagcctggtccagcagaaaccgaccgcgtatgtgaggccaatggacggccaagatcaggcccctgatgagtctcctaagctgaagtcgtcttcggaaacca

SEQ ID NO: 385667 - DNA, 120 bp, Artificial Sequence
  ENSG00000144218_9 (sequence is synthesized)
gcgtgcactgcacatcatacaggggagtccctgccagcaagccggagcctgccagagccaaggccaagctctccaagttcagcatccccaagcagggggaggagagtagatctggagaaa

SEQ ID NO: 385668 - DNA, 120 bp, Artificial Sequence
  ENSG00000144218_10 (sequence is synthesized)
ccaacagctgtgttgaagaaataatccgggagatgacctggcttccaccactttctgctattcaagcacctggcaaagtggaaccaaccaaatttccatttccaaataaggactctcagc

SEQ ID NO: 385669 - DNA, 120 bp, Artificial Sequence
  ENSG00000144218_11 (sequence is synthesized)
ttgtatcctctggacacaataatccaaagaaaggtgatgcagagccagagagtccagacaatggcacatcgaatacatcaatgctggaagatgaccttaagctaagcagtgatgaagagg

SEQ ID NO: 385670 - DNA, 120 bp, Artificial Sequence
  ENSG00000144218_12 (sequence is synthesized)
agaatgaacagcaggcagctcagagaacggctctccgcgctctctctgacagcgccgtggtccagcagcccaactgcagaacctcggtgccttccagcaagggcagcagcagcagcagca

SEQ ID NO: 385671 - DNA, 120 bp, Artificial Sequence
  ENSG00000144218_13 (sequence is synthesized)
gcagcggcagcagcagctcctccagcgactcagagagcagctccggatctgactcggagaccgagagcagctccagcgagagtgagggcagcaagcccccccacttctccagccccgagg

SEQ ID NO: 385672 - DNA, 120 bp, Artificial Sequence
  ENSG00000144218_14 (sequence is synthesized)
ctgaaccggcatcctctaacaagtggcagctggataaatggctaaacaaagttaatccccacaagcctcctattctgatccaaaatgaaagccacgggtcagagagcaatcagtactaca

SEQ ID NO: 385673 - DNA, 120 bp, Artificial Sequence
  ENSG00000144218_15 (sequence is synthesized)
acccggtgaaagaggacgtccaggactgtgggaaagtccccgacgtttgccagcccagcctgagagagaaggagatcaagagcacttgcaaggaggagcaaaggccaaggacagccaaca

SEQ ID NO: 385674 - DNA, 120 bp, Artificial Sequence
  ENSG00000144218_16 (sequence is synthesized)
aacaaggcccctgggagtaaaggcgtgaagcagaagtccccgcccgcggccgtggccgtggcggtgagcgcagccgccccgccacccgcagtgccctgtgcgcccgcggagaacgcgccc

SEQ ID NO: 385675 - DNA, 120 bp, Artificial Sequence
  ENSG00000144218_17 (sequence is synthesized)
ctgcccggaggtccgcgggcaagaagcccaccaggcgcaccgagaggacctcagccggggacggcgccaactgccaccggcccgaggagcccgcggccgcggacgcgctggggacgagcg

SEQ ID NO: 385676 - DNA, 120 bp, Artificial Sequence
  ENSG00000144218_18 (sequence is synthesized)
caaaaccaggccctgtggcaacaacagagcgagccaccgcaaggagctgcgctcctccgtgacctgcgagaagcgccgcacgcgggggctaagcaggatcgtccccaaatccaaggagtt

SEQ ID NO: 385677 - DNA, 120 bp, Artificial Sequence
  ENSG00000144218_19 (sequence is synthesized)
cattgagacagagtcgtcatcttcatcctcctcctcggactccgacctggagtccgagcaggaggagtaccctctgtccaaagcacagaccgtggctgcctctgcctcctccgggaatga

SEQ ID NO: 385678 - DNA, 120 bp, Artificial Sequence
  ENSG00000144218_20 (sequence is synthesized)
tcagaggctgaaggaggccgctgccaacgggggcagtggtcctagggcccctgtaggctccatcaacgccaggaccaccagtgacatcgccaaggagctggaggagcagttctacacact

SEQ ID NO: 385679 - DNA, 120 bp, Artificial Sequence
  ENSG00000144218_21 (sequence is synthesized)
ggtcccctttggccggaacgaacttctctcccctctaaaggacagtgatgagatcaggtctctctgggtcaaaatcgacctgaccctcctgtccaggatcccagaacacctgccccagga

SEQ ID NO: 385680 - DNA, 120 bp, Artificial Sequence
  ENSG00000144218_22 (sequence is synthesized)
gccaggggtattgagcgcccctgccaccaaggactctgagagcgcaccgcccagccacacctcggacacacctgcagaaaaggctttgccaaaatccaagaggaaacgcaagtgtgacaa

SEQ ID NO: 385681 - DNA, 120 bp, Artificial Sequence
  ENSG00000144218_23 (sequence is synthesized)
cgaagacgactacagggagatcaagaagtcccagggagagaaagacagctcttcaagactggccacctccaccagtaatactttgtctgcaaaccactgcaacatgaacatcaacagtgt

SEQ ID NO: 385682 - DNA, 120 bp, Artificial Sequence
  ENSG00000144218_24 (sequence is synthesized)
ggcaataccaataaataaaaatgaaaaaatgcttcggtcgcccatctcacccctctctgatgcatctaaacacaaatacaccagcgaggacttaacttcttccagccgacctaatggcaa

SEQ ID NO: 385683 - DNA, 120 bp, Artificial Sequence
  ENSG00000144218_25 (sequence is synthesized)
cagtttgtttacttcagcctcttccagcaaaaagcctaaggccgacagccagctgcagcctcacggcggagacctcacgaaagcagctcacaacaattctgaaaacattcccctccacaa

SEQ ID NO: 385684 - DNA, 120 bp, Artificial Sequence
  ENSG00000144218_26 (sequence is synthesized)
gtcacggccgcagacgaagccgtggtctccaggctccaacggccacagggactgcaagaggcagaaacttgtcttcgatgatatgcctcgcagtgccgattattttatgcaagaagctaa

SEQ ID NO: 385685 - DNA, 120 bp, Artificial Sequence
  ENSG00000144218_27 (sequence is synthesized)
acgaatgaagcataaagcagatgcaatggtggaaaagtttggaaaggctttgaactatgctgaagcagcattgtcgtttatcgagtgtggaaatgcaatggaacaaggccccatggaatc

SEQ ID NO: 385686 - DNA, 120 bp, Artificial Sequence
  ENSG00000144218_28 (sequence is synthesized)
caaatctccttatacgatgtattcagaaacagtagagctcatcaggtatgctatgagactaaaaacccactcaggccccaatgccacaccagaagacaaacaactggctgcattatgtta

SEQ ID NO: 385687 - DNA, 120 bp, Artificial Sequence
  ENSG00000144218_29 (sequence is synthesized)
ccgatgcctggccctcctgtactggcggatgtttcgactcaaaagggaccacgctgtaaagtattcaaaagcactaatcgactatttcaagaactcatctaaagccgcccaagccccatc

SEQ ID NO: 385688 - DNA, 120 bp, Artificial Sequence
  ENSG00000144218_30 (sequence is synthesized)
tccgtggggggccagtggaaagagcactggaaccccatcccccatgtctcccaacccctctcccgccagctccgtggggtctcagggcagcctctccaacgccagcgccctgtccccgtc

SEQ ID NO: 385689 - DNA, 120 bp, Artificial Sequence
  ENSG00000144218_31 (sequence is synthesized)
gaccatcgtcagcatcccacagcgcatccaccagatggcggccaaccacgtcagcatcaccaacagcatcctgcacagctacgactactgggagatggccgacaacctggccaaggaaaa

SEQ ID NO: 385690 - DNA, 120 bp, Artificial Sequence
  ENSG00000144218_32 (sequence is synthesized)
ccgagaattcttcaacgacctggatctgctcatggggccggtcaccctgcacagcagcatggagcacctggtccagtactcccaacagggcctgcactggctgcggaacagcgcccacct

SEQ ID NO: 385691 - DNA, 120 bp, Artificial Sequence
  ENSG00000144218_33 (sequence is synthesized)
gtcatagggacctcaccctggggccagagtgggctctggtctccacagatggctcaacgtttttggacactgtgctactgaaactcccagccacagcatttatcagactgcggtgaacat

SEQ ID NO: 385692 - DNA, 120 bp, Artificial Sequence
  ENSG00000144218_34 (sequence is synthesized)
ttcctcagcattgaacaatgatcttttgcagggcatgtgtgtttgtatgtgtgggtatataagaagccgcctgtgtatgtgtgtaagatacacagctcttcagaacacaccttctttgtc

SEQ ID NO: 385693 - DNA, 120 bp, Artificial Sequence
  ENSG00000144218_35 (sequence is synthesized)
gtgtaagatacacagctcttcagaacacaccttctttgtctagtttccataatcccaggctagacaaagtgatcagaggtttctgactagaggaagtacacacacacacacacacacaca

SEQ ID NO: 385694 - DNA, 120 bp, Artificial Sequence
  ENSG00000144218_36 (sequence is synthesized)
cgccagcgagaagagagctccacgctcagcctcagaagaaagacgttcaacgacttactggggagagaaagaaaaggaacgggagctgagagctgatcacctgcctttccagaccggaga

SEQ ID NO: 385695 - DNA, 120 bp, Artificial Sequence
  ENSG00000144218_37 (sequence is synthesized)
tgacttcttagaaaattcaaccaaaatctcatgggttagttaaccaggtgcaatacagcacaccaaaagcttgactgccagtgaagatggacctgctcttatactgttgattactttcag

SEQ ID NO: 385696 - DNA, 120 bp, Artificial Sequence
  ENSG00000144218_38 (sequence is synthesized)
tattaatatactattccccaattattttttgattggtatgtattaatgggtaattgaataatgaaaataagccaggtatttttgtgccggaagtttactagattgcatgttaccaaatac

SEQ ID NO: 385697 - DNA, 120 bp, Artificial Sequence
  ENSG00000144218_39 (sequence is synthesized)
cctgctcttcctctaattcccttcccccatctgactctattatcaactaaatgcattccaggcaaacagatggacactcacagcccttcccagccccacctccaagtagtatgcaaatgg

SEQ ID NO: 385698 - DNA, 120 bp, Artificial Sequence
  ENSG00000144218_40 (sequence is synthesized)
cactgagatttagcaaaaacgcggcgtctttgaaagttaacagacactaaggtagcagtgcctgtgtgttggagctcagttaggagttgaagttttctgcacctgtgataacaagcccac

SEQ ID NO: 385699 - DNA, 120 bp, Artificial Sequence
  ENSG00000144218_41 (sequence is synthesized)
cagccacatgcatttcttcttcctgccactgtgactcggtggctgtagagccacatggcatttgtcagccaatctgtttcaagtcttttctttccaccaatagctttcttacagattttc

SEQ ID NO: 385700 - DNA, 120 bp, Artificial Sequence
  ENSG00000144218_42 (sequence is synthesized)
ttggctaaatgaggccattacctagattgtcccttcagtaggagcctgaatccttcgcttaccaggctgagagctatttgccatgataatgctgattctctcactcctcatgcagaatgt

SEQ ID NO: 385701 - DNA, 120 bp, Artificial Sequence
  ENSG00000144218_43 (sequence is synthesized)
gcacctgcagccctttgatgcgttttgatttgggggcgatttttcaggctttgattagcaggctgcttgcaatgcagaagatcacagttcctttctggggcagcagcaaccagagcctct

SEQ ID NO: 385702 - DNA, 120 bp, Artificial Sequence
  ENSG00000144218_44 (sequence is synthesized)
tcctgtgtcctgtgtgtctggtatgtttacaccttgctctgagtttttctcttgttttctttttttaattaagtttacattttagtttctttgacatcttgtttacagtttttgtctgat

SEQ ID NO: 385703 - DNA, 120 bp, Artificial Sequence
  ENSG00000144218_45 (sequence is synthesized)
gttttttcttttgtagtgtcttatgccctagatttagtcatcttgttaaatatatttggatatgaaatcttgacgaaaagaaaataactcctgaaaaagagggtctatcttgccacacgt

SEQ ID NO: 385704 - DNA, 120 bp, Artificial Sequence
  ENSG00000144218_46 (sequence is synthesized)
taaaaacaaaaataatgtccttgtggcctcttacttgataaagttgcaccaggacggtctgagaaaggcaggcggtgtaatatgtggtgcaatccattttttcaaggtgatgacggcaca

SEQ ID NO: 385705 - DNA, 120 bp, Artificial Sequence
  ENSG00000144218_47 (sequence is synthesized)
aaatacttagactagatgctgatccataaacattcactgatattcttacaggttggtttgcagtgttaacatttttgttagcctgatctgtaggtgggaagtaagatcatcataattcct

SEQ ID NO: 385706 - DNA, 120 bp, Artificial Sequence
  ENSG00000144218_48 (sequence is synthesized)
tagctctgagcactgattcaaaattgtataaatgactgaacaacttagatgatttgaaattaattgaaaataagaagggcttgtggaatttgcatttggctttggccttcaagcatttgg

SEQ ID NO: 385707 - DNA, 120 bp, Artificial Sequence
  ENSG00000144218_49 (sequence is synthesized)
gccttcaagcatttggaaatattaagagaatttccattttacatgtctccaactggggtgcttcttacaaccctttcactttttttttgagacgagtttcgctctgttgcccaggctgga

SEQ ID NO: 385708 - DNA, 72 bp, Artificial Sequence
  ENSG00000144218_50 (sequence is synthesized)
tgacctcaggtgatctacccgcctccattcactaatttttggcagagttcacaatcccatcctatgtcagaa

SEQ ID NO: 385709 - DNA, 120 bp, Artificial Sequence
  ENSG00000144218_51 (sequence is synthesized)
taatttttggcagagttcacaatcccatcctatgtcagaaacttgaacctaacttaagaaattttgagtcatttttttggaggactgaggctttgttctacctactcttgaagaatcctg

SEQ ID NO: 385710 - DNA, 120 bp, Artificial Sequence
  ENSG00000144218_52 (sequence is synthesized)
atgaaatattcaaacacataaagggatggccctggaggtctatcctgcatacctggagagcttctctggtcctgcccaccttgaaagttgcagactttgttgtaacatctatgtgatgag

SEQ ID NO: 385711 - DNA, 120 bp, Artificial Sequence
  ENSG00000144218_53 (sequence is synthesized)
cttccctgtgaagccccatttgacaggtgggccagcagtgttttatcagcactctgatggcccacatttcccaggaaaacttcttgaaacttaccgttgtgggcagtggtcagagcgtgt

SEQ ID NO: 385712 - DNA, 120 bp, Artificial Sequence
  ENSG00000144218_54 (sequence is synthesized)
agttcttatgactgtcttgtttcatctgtggagcacgtgtggagcacgttggtacagcagtttctgtggggtttggcatgggtgattttggttagtaaccatcctccaattgttgcttgt

SEQ ID NO: 385713 - DNA, 120 bp, Artificial Sequence
  ENSG00000144218_55 (sequence is synthesized)
gaaagtcattcataacttgttccttttacttagttttgttgttactgctgttgttgttggtttggttggttttgagaccgggtctggctctgtagcccaagctggaatgcggtggcgcga

SEQ ID NO: 385714 - DNA, 120 bp, Artificial Sequence
  ENSG00000144218_56 (sequence is synthesized)
caaactcctgggctcaagcgatcctttggcctcggcctcccaaagtgcatgagccaccatgcctggcctgtttagttttgtttcaagttgaaatacctttcttgtgttttctaattagaa

SEQ ID NO: 385715 - DNA, 120 bp, Artificial Sequence
  ENSG00000144218_57 (sequence is synthesized)
tttcaagttgaaatacctttcttgtgttttctaattagaaaagtaatatctactcattgtaaaaactcaaacagtgcagaaatgtagaaagtagaaagtgtaagtccctggttgtccctt

SEQ ID NO: 385716 - DNA, 120 bp, Artificial Sequence
  ENSG00000144218_58 (sequence is synthesized)
ctgcctgagacaaccactgctcacagtttgatgtatatccttccagagactctcaaatttaagcaaataatttttattaccatgtctttttatttgaagacgtacatttgcctccaaagt

SEQ ID NO: 385717 - DNA, 120 bp, Artificial Sequence
  ENSG00000144218_59 (sequence is synthesized)
tcaacacaagttcaactgaccatatccttccatgacctgaatagatgctatcctttatcacgatgttcaattgcctttgaaagagagtagtccaggtatattcctgatcaaaatttggca

SEQ ID NO: 385718 - DNA, 120 bp, Artificial Sequence
  ENSG00000144218_60 (sequence is synthesized)
tttttgatgatactactctacacagatcagactcatgtgcagaatcgtgcctggagagagaggtttggttaagacagagatttctggaaacattcaaattgcaaatggaaacttgaaacc

SEQ ID NO: 385719 - DNA, 120 bp, Artificial Sequence
  ENSG00000144218_61 (sequence is synthesized)
cacaatctaatgaggaatgtactggaaaaataatctgaagagttgacaaattgtgtactagattgaacacatggaatgcaatgcaatgagactttctgcactaaaacttatcctcatatg

SEQ ID NO: 385720 - DNA, 120 bp, Artificial Sequence
  ENSG00000144218_62 (sequence is synthesized)
tacaacaatgatgtgtgtattatataacagtgatgtgtacatttctgacaccccatacataatatacacagtttgtataaatgcatacatttaaaaatatatatgtacaatacagctaac

SEQ ID NO: 385721 - DNA, 120 bp, Artificial Sequence
  ENSG00000144218_63 (sequence is synthesized)
ataaaactgtagtacgcctgaaggatattactagtgcctaatattgagtatgagtcactgcgtgttcgcatcaacttggaagtgcagtaattgttataaaattaatcagtgcagccaaca

SEQ ID NO: 385722 - DNA, 120 bp, Artificial Sequence
  ENSG00000144218_64 (sequence is synthesized)
ttatttatgaatcacatctttgaaactgtgcagtagcatatacatatatatttttaaataacatttttcacagttttccagagttactgttgaaatctgcatcaccaaaaaaaaaaaaaa

SEQ ID NO: 385723 - DNA, 120 bp, Artificial Sequence
  ENSG00000144218_65 (sequence is synthesized)
gcaagatttttttaacaatgtagacactcttcagacccagtaatctgcgtgtgatttcctatttgtagattcccaagagactttagcagtcaccagccttaatgcatgtacaggatatta

SEQ ID NO: 385724 - DNA, 120 bp, Artificial Sequence
  ENSG00000144218_66 (sequence is synthesized)
ttgtgacttaatttatctgcagtttttaatccatgtgaaattggaatttataaacggacttggattaaacatgtctgcctttctaaggttgcaaatgttacattaaatgatttatgttgt

SEQ ID NO: 385725 - DNA, 120 bp, Artificial Sequence
  ENSG00000144218_67 (sequence is synthesized)
ccaatttctgtgaatatttttacacggaaacttgagaatcaaaatacgttcaagtcagttgttctggctcccagtttataatctcgaaaagcaatctttttgtttcataaatggcttaaa

SEQ ID NO: 385726 - DNA, 120 bp, Artificial Sequence
  ENSG00000144218_68 (sequence is synthesized)
tgtagctcccacagattatcagtatgaagtctgacatttttcatggaaaagaagtatgtttttcttcattataactatagtttactatttgtctttgctatttcctgatacatacacata

SEQ ID NO: 385727 - DNA, 120 bp, Artificial Sequence
  ENSG00000144218_69 (sequence is synthesized)
cgcacacacgcgcgcacatgcatgcacgtatgcacatgcacgctcccagtgtcccagtgaaggctcaacaggaagcttgagaaggtcatctcaatggccacagggttcctgttcaaccag

SEQ ID NO: 385728 - DNA, 120 bp, Artificial Sequence
  ENSG00000144218_70 (sequence is synthesized)
tagccctgggatgccgctttgcttgtcattctttagtgtcacaagttagttccctgacttgtgtgcagtcagggaactgcacacaactgaaaccaacatggtggaatcatgtttgcaata

SEQ ID NO: 385729 - DNA, 120 bp, Artificial Sequence
  ENSG00000144218_71 (sequence is synthesized)
tttggttgagtaaaataagataattttgaactaaagaagacggaggcattagaccagtggcttgacatgaagcatcccctatgtgggagggtaagtttgttaacttcatttttagtctta

SEQ ID NO: 385730 - DNA, 120 bp, Artificial Sequence
  ENSG00000144218_72 (sequence is synthesized)
tctccaacccttttccttatcctcctccccaaactaaagaagcagaaacagcaacaaaagcaaaaccatcccttcacctgatccagcccatgtccttagattcaaatatcctttgtcttt

SEQ ID NO: 385731 - DNA, 120 bp, Artificial Sequence
  ENSG00000144218_73 (sequence is synthesized)
ttcccattataccatctgacataactcactcgtgtctagagagaaaaatgcagaaagggtttgtttgcagatgggcagttcagttgagtcctcattaaccaggcagaggggtgcagaaga

SEQ ID NO: 385732 - DNA, 120 bp, Artificial Sequence
  ENSG00000144218_74 (sequence is synthesized)
agcctgactcagggtcaccatggagaactcctcatcccagagatgggtgggacaggaacttggctttgcttcaccaaccactgagcttgatactctttcagaggtggtttgtgctaagaa

SEQ ID NO: 385733 - DNA, 120 bp, Artificial Sequence
  ENSG00000144218_75 (sequence is synthesized)
acacccagcagtctttcaagaacgttctcttctgtagctttgcctgctacacagctgaagtctgtccctataagaattatatttgtaaaaagtaatacattttcgaagaaacccggatca

SEQ ID NO: 385734 - DNA, 120 bp, Artificial Sequence
  ENSG00000144218_76 (sequence is synthesized)
agtggaatcttgaaagtttttttaatgaaaggggaaaaacaacctgaccacataaactgcacttccaaccatttggaaccagagtttatgtcctcattttcccattctcagaagagcaca

SEQ ID NO: 385735 - DNA, 120 bp, Artificial Sequence
  ENSG00000144218_77 (sequence is synthesized)
gtttttcaatattacaacttcctggcaaatagcacaagaaatgttcagacttgagatttgtgttccctttgtccagattattctgtatatgtcaccaaaggggttaacttgtttgcttgg

SEQ ID NO: 385736 - DNA, 120 bp, Artificial Sequence
  ENSG00000144218_78 (sequence is synthesized)
catgaggaaaattataaactccgttctcaaactaattacatctgcccacggttttggtttttattattttaattggcactccgaggcagcagggggtaaattttgtgttggctgcaaggg

SEQ ID NO: 385737 - DNA, 120 bp, Artificial Sequence
  ENSG00000144218_79 (sequence is synthesized)
gatttaggttcacagctcttactcacagtaatgggaatcaagggattaaatctctgtgtgttactttgaaaatccacctcttacagccaattttatagacattgatctgagggttgaatt

SEQ ID NO: 385738 - DNA, 120 bp, Artificial Sequence
  ENSG00000144218_80 (sequence is synthesized)
cagggcactaattgccagtcagtacaagggtcagcatttgtgttgaagcaccaggggtattgatgtagcctgaaaagctgaatcagggacttgggttttgttttgttttgttttttttac

SEQ ID NO: 385739 - DNA, 120 bp, Artificial Sequence
  ENSG00000144218_81 (sequence is synthesized)
ccatttttaaaataggaaagctcatccagaaatacttggatctagacatgatataacatagcaccaatgtttaggatttttagagtgctgttgggtaattaaaataatatcaatgttcta

SEQ ID NO: 385740 - DNA, 120 bp, Artificial Sequence
  ENSG00000144218_82 (sequence is synthesized)
attcggaggtgggtgaggtgagaggatgactcttcggcttgacgctggagggatcccgtcacttgcacccagggtttacatttctggcagccccagtcagcggttcttgcccagaaaaag

SEQ ID NO: 385741 - DNA, 120 bp, Artificial Sequence
  ENSG00000144218_83 (sequence is synthesized)
gaacaaaggggagagtgctggaagggactcccttttggcggggagtgcgaggtttggttcgcgtggtgaggcacaactgcagggctctgagctgctctctaggaattctggggaatccct

SEQ ID NO: 385742 - DNA, 120 bp, Artificial Sequence
  ENSG00000144218_84 (sequence is synthesized)
gctcagagaacggctctccgcgctctctctgacagccttagctggtagctgcttccttctgaaatgccctcctctgtctcagctccactgaccattgaaaccctgtgttctctgctacgt

SEQ ID NO: 385743 - DNA, 79 bp, Artificial Sequence
  ENSG00000144218_85 (sequence is synthesized)
agctccactgaccattgaaaccctgtgttctctgctacgtcacttcttctacaagagtcctgaggcctccccagccatg

SEQ ID NO: 385744 - DNA, 120 bp, Artificial Sequence
  ENSG00000144218_86 (sequence is synthesized)
gccttctggtagaccaggccctgccacaaaaagtgccattcagaaagctcgccagcgagaagagagctccacgctcagcctcagaagaaagacgttcaacgacttactggggagagaaag

SEQ ID NO: 385745 - DNA, 120 bp, Artificial Sequence
  ENSG00000144218_87 (sequence is synthesized)
aaaaggaacgggagctgagagaaagtttcacacatatgatttagaccttacgatcagccattgtttacatcgggaagcatcaatccggagtaactggcaagcagggacagggtctcacca

SEQ ID NO: 385746 - DNA, 85 bp, Artificial Sequence
  ENSG00000144218_88 (sequence is synthesized)
caatccggagtaactggcaagcagggacagggtctcaccatgtcgcccaggcttgtcttgaactcctggcttaagtgatcctcca

SEQ ID NO: 385747 - DNA, 120 bp, Artificial Sequence
  ENSG00000144218_89 (sequence is synthesized)
cactcctgtttgaagcagaccaacaccttgagatttgtttaagccaagaaggaggtcctacctttaaacaagaaaaggtttatgactctcttgacatactccagggattcctgtctggca

SEQ ID NO: 385748 - DNA, 120 bp, Artificial Sequence
  ENSG00000144218_90 (sequence is synthesized)
gtgctcaggaagaacaactgaaaaaaacagacctctaacatttcagaactgtcagagacaaaaactgacagagacaaagaacacccaatccagccttctcatgttgcaaaggaagacgtt

SEQ ID NO: 385749 - DNA, 120 bp, Artificial Sequence
  ENSG00000144218_91 (sequence is synthesized)
gaggctagagacaaggagcgcctcactccaggtgcggttatggcagaactcaaggggcaaaactgggtggcaggagaattgcagagaggggtagagggctctctctcgccttccgactgg

SEQ ID NO: 385750 - DNA, 120 bp, Artificial Sequence
  ENSG00000144218_92 (sequence is synthesized)
gactgtattactttcattatttcagtgcctgtgagcatgagaatgcgccaatgctatagataattaaggcaaaagttgtgggaggtggagtatggtatcacagctaccagtaataccata

SEQ ID NO: 385751 - DNA, 120 bp, Artificial Sequence
  ENSG00000144218_93 (sequence is synthesized)
aataatccggtaccccagggtctgcttcagtaatgctgtgcaaactgagcctgcgctcccagggccagggtgtacaggacacagcctgtggcgcatctgctctgtgggaccaccgggagc

SEQ ID NO: 385752 - DNA, 120 bp, Artificial Sequence
  ENSG00000144218_94 (sequence is synthesized)
catagaggcagaaagcaaaggaaccaggtagaaagcctgccagatgttggaggcgaagagctagcaatccttacctgagatatttgaaagagttatgaatgaagagccttgtacataaca

SEQ ID NO: 385753 - DNA, 120 bp, Artificial Sequence
  ENSG00000144218_95 (sequence is synthesized)
tctattggagaagcttaccagggcacgcagatgggaatgcttaacccaacccaactaaggacataaatatccagtgcggtgtactcctttgagaaaagcccaaagaccactccccatgac

SEQ ID NO: 385754 - DNA, 120 bp, Artificial Sequence
  ENSG00000144218_96 (sequence is synthesized)
tcagcatctgagccctgggatgcagcagcattcagtctgcagatgcccagggtctagggactcaggactctgaacatgcacacttcagagttgcgccagccactgtggtatcaactggct

SEQ ID NO: 385755 - DNA, 120 bp, Artificial Sequence
  ENSG00000144218_97 (sequence is synthesized)
taaagcccagcaggaagggcctggagtcaagtaggatcaagcaaacgttgtggagaaatggaaggtttcctctgtgcaggaagaactgtggtctcctagtggcactctcccaggatgctc

SEQ ID NO: 385756 - DNA, 120 bp, Artificial Sequence
  ENSG00000144218_98 (sequence is synthesized)
ctgggaaggaatcagctcttcatctgggagcctggagcccactgccggaatggtggaaataacttgcttcctcatgccagttccctctccattgtaattaggaagttggcttgtttgaaa

SEQ ID NO: 385757 - DNA, 120 bp, Artificial Sequence
  ENSG00000144218_99 (sequence is synthesized)
tataatttcacaggtgcaggattcatcctcgacaggagatgacctggcttccaccactttctgctattcaagcacctggcaaagtggaaccaaccaaatttccatttccaaataaggtga

SEQ ID NO: 385758 - DNA, 120 bp, Artificial Sequence
  ENSG00000144218_100 (sequence is synthesized)
gatcttgcatccctcaggaggaatatgtttcactcatgcaggcatttctagtgggcagtgggctttacccgtgattgtcttttcttctgtaaatattcctgccagaggcacgtgaatctg

SEQ ID NO: 385759 - DNA, 120 bp, Artificial Sequence
  ENSG00000144218_101 (sequence is synthesized)
atccttcacaatttgcaagcgcatacttattcatttatgaaagggggagaatcaagcctccaatcttacttacctacacttctctgcaaaatgtgatactactgtaattatcattttgtc

SEQ ID NO: 385760 - DNA, 120 bp, Artificial Sequence
  ENSG00000144218_102 (sequence is synthesized)
taaaaaacattcatgaagttgaaatgcatcttataatcattttaaacattcaatgtgatgtataaaattgtatgtcctggatttttctgaaaagctattattaaattaatgatgtatctt

SEQ ID NO: 385761 - DNA, 120 bp, Artificial Sequence
  ENSG00000144218_103 (sequence is synthesized)
aaaatcaatgtcttagtattgaagacgtgtggtatttaatttccctgaatatcttttttaaagcttaagatattttctaggacttaaaaaaagatatctatattttctaaggaaaagcac

SEQ ID NO: 385762 - DNA, 120 bp, Artificial Sequence
  ENSG00000144218_104 (sequence is synthesized)
aaacggtttgtttggggcgctgctgcgggcggcacagctcactctccccgcgcctgggcggccggggaattcccccgcacccacccgggtccgccgcccgcgggagcgcccagcagggtc

SEQ ID NO: 385763 - DNA, 120 bp, Artificial Sequence
  ENSG00000144218_105 (sequence is synthesized)
aaaccgcaacggagagcaggtccgggtggaagaggtttcctccgcgccgccgctttatttcgctgaacttgcgggctccagagaccttaaacgcgcgcgggcggcccgagcctcggcggc

SEQ ID NO: 385764 - DNA, 120 bp, Artificial Sequence
  ENSG00000144218_106 (sequence is synthesized)
cattagaacacattgtacaattggcacaaatgcaagagagaagaaaattcacatgctaacccctgagggctagaaacaggagggagtgcagcagctcctgctaaagtgtgtgtcagaaaa

SEQ ID NO: 385765 - DNA, 120 bp, Artificial Sequence
  ENSG00000144218_107 (sequence is synthesized)
ctcagactttttgtgtctgccacttttatcctgagtatctttcatgagactaagcctttcattttgataggtaatgaatttttacaagttgaagaaatcaagctaatacatttgcaggga

SEQ ID NO: 385766 - DNA, 120 bp, Artificial Sequence
  ENSG00000144218_108 (sequence is synthesized)
taatttggttaattaccatgttgctgctggtagaatcaagggctggaagtcaaaactgtttccactgctaatatgctctgtgtaaagcagttcttggaacaattaaaacacatctatcca

SEQ ID NO: 385767 - DNA, 120 bp, Artificial Sequence
  ENSG00000144218_109 (sequence is synthesized)
atgtctaaaaaagtaagccagggggaagagctgtctttacaatgagggagattattattactctttaggagccacgatgatactcttatcacccttctagctgatcacctgcctttccag

SEQ ID NO: 385768 - DNA, 71 bp, Artificial Sequence
  ENSG00000144218_110 (sequence is synthesized)
gtagagacagggttttgccgtgttggtcaggctgatctcaaacacctgacctcaggtggccaccgcgcccg

SEQ ID NO: 385769 - DNA, 120 bp, Artificial Sequence
  ENSG00000144218_111 (sequence is synthesized)
tgagccagccaccgcgcccggccggatagatccctttttatgcaccccaaggccattacaggcttcctgttctggtgcatcaccaagtgctgacagacatcttcagagacgataaggatt

SEQ ID NO: 385770 - DNA, 120 bp, Artificial Sequence
  ENSG00000144218_112 (sequence is synthesized)
tcgatttcatctctcagctctcattctgcatgtgacaaccctggctctgtgattgataagggcacctgttgattatctccggtgtttctgttgtctctaacaatagcgtggatgtgtttt

SEQ ID NO: 385771 - DNA, 120 bp, Artificial Sequence
  ENSG00000144218_113 (sequence is synthesized)
agtctttatcagcaccgttcacatgcaactgcatagttacaagtgacaatttgaccctcgtgaattcagtttccatgtttcttttttttcagtgatgtggttaacttcatgtggtaggat

SEQ ID NO: 385772 - DNA, 120 bp, Artificial Sequence
  ENSG00000144218_114 (sequence is synthesized)
ttgtagcagtcactgaaaggggaggcagacttaaatagtgatttcttaaaatctcaaatttattataatttgaatttttagagttccagcaaatgcagttgtgtgtgtatgtattagtta

SEQ ID NO: 385773 - DNA, 120 bp, Artificial Sequence
  ENSG00000144218_115 (sequence is synthesized)
gggaaggaatgtccccttcactatagtttgagaattttcttctgaatagctagtgttcactgagggtataaataaaattaagaaataagtgaataagtgattcagaagtaagaaaagcac

SEQ ID NO: 385774 - DNA, 120 bp, Artificial Sequence
  ENSG00000144218_116 (sequence is synthesized)
ttaaaggctataatttcagtatctatttacctatttaaggtaaatttttatgtaaaagagttccaaaactcttaacattttcgtgttttgaaatattttaacacaaactttaccaaataa

SEQ ID NO: 385775 - DNA, 78 bp, Artificial Sequence
  ENSG00000144218_117 (sequence is synthesized)
acagtttgtttacttcagcctcttccagcaaaaagcctaaggccgacagccagctgcagcctcacggcggagacctca

SEQ ID NO: 385776 - DNA, 120 bp, Artificial Sequence
  ENSG00000144218_118 (sequence is synthesized)
gtgcttgcggagaagacaatggggaaaagagctttctacagaggttttcctaataactaagagtggcacaggaacaaaggtcccctccctgccttttgcctttattcccctgtgggtata

SEQ ID NO: 385777 - DNA, 120 bp, Artificial Sequence
  ENSG00000144218_119 (sequence is synthesized)
ttctggctacatcttaggatcaaaagaaaaaccaacctcagaagaagaatcaatgtgctggaaggcaaagtggccagatgcagagaatttcgtccatgatgggatccttgggctgaagaa

SEQ ID NO: 385778 - DNA, 120 bp, Artificial Sequence
  ENSG00000144218_120 (sequence is synthesized)
tgcttccagccttctggtagaccaggccctgccacaagtgagagttggccggttgggtatctggtttagtcactcgcctccacactttcacatcctctatcaacacctgcacacttgggt

SEQ ID NO: 385779 - DNA, 120 bp, Artificial Sequence
  ENSG00000144218_121 (sequence is synthesized)
tgtgaccacacatgctcttcctgtttgtacagaaagtgccattcagaaagctcgccagcgagaagagagctccacgctcagcctcagaagaaagacgttcaacgacttactggggagaga

SEQ ID NO: 385780 - DNA, 120 bp, Artificial Sequence
  ENSG00000144218_122 (sequence is synthesized)
gagtggagtatgaagaccaaggaattctcttaaagacctgagcagttatctggaactcctcacaaaatcacagtaatggatattatttcccagttcctactctacactgggcatagatgt

SEQ ID NO: 385781 - DNA, 120 bp, Artificial Sequence
  ENSG00000144218_123 (sequence is synthesized)
tatggacatcttctgagtcccacaacacccctgcaaggcagatatgatacactcctttcacctatggagaacggaggctcaaagaggctaggtgaccctcaggaaacacagatgagaggt

SEQ ID NO: 385782 - DNA, 120 bp, Artificial Sequence
  ENSG00000144218_124 (sequence is synthesized)
ccccgcccagtctgcccagctctgaaatcttccatgccaactcccttagggcgatcctgagtctaggctgtacaggcagttcatgtggttgtatttgaataaaatccctttcctccagga

SEQ ID NO: 385783 - DNA, 120 bp, Artificial Sequence
  ENSG00000144218_125 (sequence is synthesized)
ggtgagaatccggagctgtggccaagaggtcaggagagtcagggggccttggaggggcttccggttctaggccaactgtggagaagcagaggtagggccctgatggagacatgcgcttct

SEQ ID NO: 385784 - DNA, 120 bp, Artificial Sequence
  ENSG00000144224_0 (sequence is synthesized)
gaagacggagggcggagccggcttcgggactgcggagactacacaccgagcgagcgcctgggcccgaagggagcgatgctgtggttccagggcgccattccggccgccatcgcgacggcc

SEQ ID NO: 385785 - DNA, 120 bp, Artificial Sequence
  ENSG00000144224_1 (sequence is synthesized)
aaaaggagcggcgcggtcttcgtggtgttcgtggcaggtgatgatgaacagtctacacagatggctgcaagttgggaagatgataaagttacagaagcatcttcaaacagttttgttgct

SEQ ID NO: 385786 - DNA, 120 bp, Artificial Sequence
  ENSG00000144224_2 (sequence is synthesized)
attaaaatcgataccaaaagtgaagcctgcctacagttttcacaaatctatcctgtagtgtgtgttccatccagtttctttattggagacagtggaattcccttggaagtaatagcagga

SEQ ID NO: 385787 - DNA, 120 bp, Artificial Sequence
  ENSG00000144224_3 (sequence is synthesized)
agtgtttctgcagatgaacttgttacaagaattcacaaggtccgacagatgcatttgctaaaaagtgaaacatcagtagcaaatggcagtcagtcagaaagttcagtgtctactccatct

SEQ ID NO: 385788 - DNA, 120 bp, Artificial Sequence
  ENSG00000144224_4 (sequence is synthesized)
gcgtcatttgaacctaacaacacttgtgaaaactctcagtccagaaatgcagagctttgtgagataccacccacttctgatacaaagtcagatactgcaacaggaggagaaagtgcaggc

SEQ ID NO: 385789 - DNA, 120 bp, Artificial Sequence
  ENSG00000144224_5 (sequence is synthesized)
catgccacttcctctcaggagcctagtggatgctcagatcagagacctgcagaggacctcaacatccgagtggaaagactaacaaaaaaacttgaagaaaggagagaagagaaaagaaaa

SEQ ID NO: 385790 - DNA, 120 bp, Artificial Sequence
  ENSG00000144224_6 (sequence is synthesized)
gaggaagaacagagagaaattaagaaggaaattgagaggagaaaaactggaaaagaaatgttggattataaaagaaaacaagaagaagaattaacaaaaagaatgctggaggaaagaaac

SEQ ID NO: 385791 - DNA, 120 bp, Artificial Sequence
  ENSG00000144224_7 (sequence is synthesized)
agagagaaagcagaagatagggcagctcgagaacgtataaaacagcagattgcattggaccgtgcagagagagctgctcgttttgcaaagacaaaggaagaagtagaggctgccaaagct

SEQ ID NO: 385792 - DNA, 120 bp, Artificial Sequence
  ENSG00000144224_8 (sequence is synthesized)
gctgccttgctagcaaaacaggcagaaatggaagtcaagagggaatcttatgcaagagaaagaagcactgttgcaagaattcaattccgtcttcctgatggttcttcctttacaaatcag

SEQ ID NO: 385793 - DNA, 120 bp, Artificial Sequence
  ENSG00000144224_9 (sequence is synthesized)
ttcccttctgatgctcctctagaagaggcaaggcagtttgctgcacagactgttggcaacacttacggtaatttttcgttagcaaccatgtttcccaggagggaatttaccaaagaagat

SEQ ID NO: 385794 - DNA, 120 bp, Artificial Sequence
  ENSG00000144224_10 (sequence is synthesized)
tataaaaagaagttactggatttggaacttgccccaagcgcttcggtggtactgttgccagcaggaagaccaactgcatccattgtacactcttccagcggagacatttggaccttgttg

SEQ ID NO: 385795 - DNA, 120 bp, Artificial Sequence
  ENSG00000144224_11 (sequence is synthesized)
ggaacagtgctttatccattccttgccatctggagattaattagcaatttcttgtttagtaatccgcctcccacacagacttcagtgagagtaacatcgtcagaacccccaaaccctgca

SEQ ID NO: 385796 - DNA, 120 bp, Artificial Sequence
  ENSG00000144224_12 (sequence is synthesized)
tcatctagcaaatcagaaaaaagggaaccagtgagaaaaagagtgctggaaaaacgtggagacgactttaaaaaggaggggaaaatttatagattaaggactcaagatgatggtgaagat

SEQ ID NO: 385797 - DNA, 120 bp, Artificial Sequence
  ENSG00000144224_13 (sequence is synthesized)
gaaaacaacacttggaatggaaattccactcaacagatgtagtgtgacaagtataatatgtgcaataatcattgtttctcttatgatttaattcaactaaaattctactggagaagtggg

SEQ ID NO: 385798 - DNA, 120 bp, Artificial Sequence
  ENSG00000144224_14 (sequence is synthesized)
actgctttatattttccaactggtctataaaatgtctctttattcctgcttagtgggtgtgggttgaaggtgtttaactcagaaaagtaaagacaggaaataactctctgctaggtcctt

SEQ ID NO: 385799 - DNA, 120 bp, Artificial Sequence
  ENSG00000144224_15 (sequence is synthesized)
agcctgcctccatcagcttcttatttagtatttcatatgcccattagccctatgcttcagatgacacgttttgtttagagctactttgctccaagactcttaagcccaaagtaactggta

SEQ ID NO: 385800 - DNA, 120 bp, Artificial Sequence
  ENSG00000144224_16 (sequence is synthesized)
tgtcactgagtaacttgactcggtgtcagagcattttaactagccactcagatgagaatttatgtttaacttctctttttactcatcagctgcaagcaaaatcttgtagtttttaatctt

SEQ ID NO: 385801 - DNA, 120 bp, Artificial Sequence
  ENSG00000144224_17 (sequence is synthesized)
aaacactgaataaaaaaactttcccctaaattggaatgatcttagttttgctttgagttttgttatctagcatctttttgttgcacagggctctattgaggtcctatgtctctgattttt

SEQ ID NO: 385802 - DNA, 120 bp, Artificial Sequence
  ENSG00000144224_18 (sequence is synthesized)
ttttttccccagtattgccctggagctgtctctggaaagtagctggcgaggttaccttaactatcactgaagaaagaaattttctgacacactgatggcatgtgacttgtctcctaagtc

SEQ ID NO: 385803 - DNA, 120 bp, Artificial Sequence
  ENSG00000144224_19 (sequence is synthesized)
agtgaggcatcactttgtttgcataaagtatacggtttgttaaggcctttgttcttgtgagatgcaaaacagctgctagtctgcaacctagttttccctctcacctttaactgacgtttt

SEQ ID NO: 385804 - DNA, 120 bp, Artificial Sequence
  ENSG00000144224_20 (sequence is synthesized)
gtcctcaataattacacaaggacctagagtacctataggacaaaaagtatagaataaaaatatgcctttagtcatttggtttttcttaaaaagttgagattcttaatctgacttacatgt

SEQ ID NO: 385805 - DNA, 120 bp, Artificial Sequence
  ENSG00000144224_21 (sequence is synthesized)
tactttatccgtatgtctttgttagtggagaccgctaaactaatgatgtttgaaaacagttcctctgttttagattggaagatagcactctagagtggacatacggaaagactgtgactt

SEQ ID NO: 385806 - DNA, 120 bp, Artificial Sequence
  ENSG00000144224_22 (sequence is synthesized)
tattttgtaatgggaggaagaaattttctcagagcaaactttctattttttacctgtgaaataacagtgactttttaaaatggtgacagtgttggcaaggaaacagcaacacaggctgcg

SEQ ID NO: 385807 - DNA, 120 bp, Artificial Sequence
  ENSG00000144224_23 (sequence is synthesized)
ctgttggtaggagtgaaaaccagtataattcttctgaaaaacatttatcagaaacttaaaatatttcataccgtttgatccagtagcttcttctaaatcataaatgcagacaatgtttag

SEQ ID NO: 385808 - DNA, 120 bp, Artificial Sequence
  ENSG00000144224_24 (sequence is synthesized)
gtaaagacatactcattaagtgttatttattttactcaagaactggaaaccaactaaatgccttctatagaagtaatttttgatgaggagaaatggtacaatactaattaacaacttggt

SEQ ID NO: 385809 - DNA, 120 bp, Artificial Sequence
  ENSG00000144224_25 (sequence is synthesized)
ttaacatgtttactgagcatctgttaagtgttgggggaaaaagcagcaggatccagagctataggtacagtgtgatctcagctttgcaaacacattttctacatagatagtactaggtat

SEQ ID NO: 385810 - DNA, 120 bp, Artificial Sequence
  ENSG00000144224_26 (sequence is synthesized)
taatagatatgtaaagaaagaaatcacaccattaataatggtaagattggtttatgtgattttagtggtatttttggcacccttatatatgttttccaaactttcagcagtgatattatt

SEQ ID NO: 385811 - DNA, 120 bp, Artificial Sequence
  ENSG00000144224_27 (sequence is synthesized)
tccataacttaaaaagtgagtttgaaaaagaaaatctccagcaagcatctcatttaaataaaggtttgtcatctttaaaaatacagcaatatgtgactttttaaaaaagctgtcaaatag

SEQ ID NO: 385812 - DNA, 120 bp, Artificial Sequence
  ENSG00000144224_28 (sequence is synthesized)
gtgtgaccctactaataattattagaaatacatttaaaaacatcgagtacctcaagtcagtttgccttgaaaaatatcaaatataactcttagagaaatgtacataaaagaatgcttcgt

SEQ ID NO: 385813 - DNA, 120 bp, Artificial Sequence
  ENSG00000144224_29 (sequence is synthesized)
aattttggagtaggaggttccctcctcaattttgtatttttaaaagtacatggtaaaaaaaaaaattcacaacagtatataaggctgtaaaatgagaattctgccccctcacctcttacc

SEQ ID NO: 385814 - DNA, 120 bp, Artificial Sequence
  ENSG00000144224_30 (sequence is synthesized)
ccagtactattctccagaggtaatctattaacaatttcttatgtaattttcagaaaatttgtatgcgtatataagcaaatatgtaatctttattttttaaataaatgggatcatattata

SEQ ID NO: 385815 - DNA, 120 bp, Artificial Sequence
  ENSG00000144224_31 (sequence is synthesized)
ccaaaagtgaagcctgcctacagttttcacaaatctgtatcctttcagtaaagaatggcttatatatatacatttatttaccttccttttggttaatttatgaaatttagaaattattca

SEQ ID NO: 385816 - DNA, 120 bp, Artificial Sequence
  ENSG00000144224_32 (sequence is synthesized)
ttcatttttatttaggaaatcatacattcttttttatggaaactttattactaagtgtcctcatttaaaaaaaatgttattataggaaatttcaaacatatataaaagtaactcaatggt

SEQ ID NO: 385817 - DNA, 120 bp, Artificial Sequence
  ENSG00000144224_33 (sequence is synthesized)
tgcaccccatacattgagataatatattgcagctaaagataggatagggagtttttaaaatgtgaatatctgaaaaacaatatagatcagttgggttggaatgttacaagtagcttgcaa

SEQ ID NO: 385818 - DNA, 120 bp, Artificial Sequence
  ENSG00000144224_34 (sequence is synthesized)
gtagattcttcactagaatatacctcataaattaacatgtcacatgtattaatactacaggtataatgatgcagtacttgaaattatttaataaatgttagattatattgtgaaaatcac

SEQ ID NO: 385819 - DNA, 120 bp, Artificial Sequence
  ENSG00000144224_35 (sequence is synthesized)
aaagatcatttgttttcctttgttaccaatagtgtttcgtaaaactatcctttcgtttcacatgaattgttagacttcattaaactgtacagatcctgtagtgtgtgttccatccagttt

SEQ ID NO: 385820 - DNA, 120 bp, Artificial Sequence
  ENSG00000144224_36 (sequence is synthesized)
gtgaggtgttctcgcgcgcgctagcgcgcgtctccgggtgccgctgacgggcgtgcgcgcttgtgcggagccggaggtgggggccgaaccagccaaggttgcgggggccgcagagccgga

SEQ ID NO: 385821 - DNA, 120 bp, Artificial Sequence
  ENSG00000144224_37 (sequence is synthesized)
gtccctctctgtcaccaaggaccctctttgtgctgcttgaacgcccgtttcgttactgctgtttagatggaggtaggaacgggccattaggcaagcagttgggttgtaattagttgtgga

SEQ ID NO: 385822 - DNA, 120 bp, Artificial Sequence
  ENSG00000144224_38 (sequence is synthesized)
ttttgagctgaatagaggtgatgatgaacagtctacacagatggctgcaagttgggaagatgataaagttacagaagcatcttcaaacagttttgttgctattaaaatcgataccaaaag

SEQ ID NO: 385823 - DNA, 120 bp, Artificial Sequence
  ENSG00000144224_39 (sequence is synthesized)
cacacttttcatttagtggaaaattcagttttcaaatttggcagaaagtggtataggtgggattatattttatttgaggtttccgttttccaggggaaaagagtttgcaatcagcagatc

SEQ ID NO: 385824 - DNA, 120 bp, Artificial Sequence
  ENSG00000144227_0 (sequence is synthesized)
agagctgcgcggcacggcgcagcgctcggattccgggagggaagcgccgcgctgtgtccctggcgtcctcagtcctgccccgcgaagtggagatgcgcgagaggcaggcgagggcgcgca

SEQ ID NO: 385825 - DNA, 120 bp, Artificial Sequence
  ENSG00000144227_1 (sequence is synthesized)
gctcgtgaaaagccgcgccagccggcaccatgcgcctgcggccgctgcccctcgtggtggtccctggcttgctgcagctgctattttgtgacagtaaggaagtggtgcatgccacggagg

SEQ ID NO: 385826 - DNA, 120 bp, Artificial Sequence
  ENSG00000144227_2 (sequence is synthesized)
ggctggattgggaagacaaagatgctccagggacgttggtcggcaacgtggtgcactcaaggatcatcagtcccctgcgcctgtttgttaaacagtctccggtgcccaagcccggcccca

SEQ ID NO: 385827 - DNA, 120 bp, Artificial Sequence
  ENSG00000144227_3 (sequence is synthesized)
tggcgtacgcagacagcatggaaaacttttgggattggctggccaacatcacggagattcaggagccattggcaagaactaaacggaggccaatagtaaaaacaggaaaatttaagaaaa

SEQ ID NO: 385828 - DNA, 120 bp, Artificial Sequence
  ENSG00000144227_4 (sequence is synthesized)
tgtttggatggggtgactttcattccaacattaaaactgtcaaactcaatctcctcatcacagggaaaattgttgaccatggaaatggaaccttcagtgtgtatttccgacataattcaa

SEQ ID NO: 385829 - DNA, 120 bp, Artificial Sequence
  ENSG00000144227_5 (sequence is synthesized)
caggcctgggcaatgtttcagtgagcttggtaccaccctccaaggtggtggaatttgaagtttccccccagtctaccttggagaccaaggaatccaaatctttcaattgtcgcattgagt

SEQ ID NO: 385830 - DNA, 120 bp, Artificial Sequence
  ENSG00000144227_6 (sequence is synthesized)
atgaaaaaacagatcgggcgaaaaagaccgccctgtgcaactttgacccatccaagatctgctaccaggagcagactcagagccatgtgtcttggttgtgctccaagcccttcaaggtca

SEQ ID NO: 385831 - DNA, 120 bp, Artificial Sequence
  ENSG00000144227_7 (sequence is synthesized)
tttgcatttacattgccttttacagtgttgattataaactcgtgcaaaaggtgtgccctgactacaattaccatagtgagaccccatacttatcttctggctgatcttcctgctgtggtg

SEQ ID NO: 385832 - DNA, 120 bp, Artificial Sequence
  ENSG00000144227_8 (sequence is synthesized)
gaaatgagggatacatatgtatttgattagaatgacaaagaaacaagcccagctctttatgataaaggatcccttttgtttctggcagtgaacaatagttccctatcaggttttcaaatt

SEQ ID NO: 385833 - DNA, 120 bp, Artificial Sequence
  ENSG00000144227_9 (sequence is synthesized)
taaaaaaagaaaaagagacatctttaagtgtgaaatttgtttctttctatcgtaggtacctttatctaaaaagttaaactgtttatgaaaccatcactttcatgcaagatgactaagttc

SEQ ID NO: 385834 - DNA, 120 bp, Artificial Sequence
  ENSG00000144227_10 (sequence is synthesized)
tagaaatcttattgtttctctgaaagaaacatcaatgatagcaatatgtgacaagaaggaacaaaattatgcatgtgacaaacattgctcttgaaatgagcctgcctttgaaatatgttt

SEQ ID NO: 385835 - DNA, 120 bp, Artificial Sequence
  ENSG00000144227_11 (sequence is synthesized)
ttgacattggacccttttttttatatttctatcttttcccccatccatctgtgctgttattgatatgagagaaaaaaaggtaaaatttgtttcaaaattcatgtgtgaagttacagtgcc

SEQ ID NO: 385836 - DNA, 120 bp, Artificial Sequence
  ENSG00000144227_12 (sequence is synthesized)
acagtggaaccaagttccttatcatctgagctacagttgcgtggaatgtgatttgagcacttagccctgtgttggtcaccattcttatgattccccctgagtttgaatactgatgtaatg

SEQ ID NO: 385837 - DNA, 120 bp, Artificial Sequence
  ENSG00000144227_13 (sequence is synthesized)
ggaaagcaaatctgagaataagtttgttgaacgataacaaaaatcatgatgtttttagactcttctgataaattcaaatgctgtggaattaatcaaaaaatgacaaaatttgtatgcatc

SEQ ID NO: 385838 - DNA, 120 bp, Artificial Sequence
  ENSG00000144227_14 (sequence is synthesized)
ctatagcttagagctttattcaattcattcgatagtgtgattctttacacatgtgtagaacagctctgaagttgagtgaaagtgcttgtttcctagactagaatagaaaacaaaagtggg

SEQ ID NO: 385839 - DNA, 120 bp, Artificial Sequence
  ENSG00000144227_15 (sequence is synthesized)
aagtagagggaggaaatttcaggattatggattcattatttctagcctcccagattaagttccccttgcatttagttaatatttgaataagagatcaaactctatgtggaaatagagagt

SEQ ID NO: 385840 - DNA, 120 bp, Artificial Sequence
  ENSG00000144227_16 (sequence is synthesized)
tatatttaaacatttctaattattaagtgctgacaaccaagatacctggcttaccagacttttgaaatgactttcaaattaatgtcacttcacagtcagtgcccttctcatcttccctgt

SEQ ID NO: 385841 - DNA, 120 bp, Artificial Sequence
  ENSG00000144227_17 (sequence is synthesized)
gggggtgaatagcagtcctatatggtagaactgaatgatcattaaattagaacagaaacaggggtctggttggccaagaaaaaggcttctagaactcaggacgctcatggaatggtcact

SEQ ID NO: 385842 - DNA, 120 bp, Artificial Sequence
  ENSG00000144227_18 (sequence is synthesized)
ccttttacaatagatgttaacttctttctcccttcttatctgtaaaatattaattaaagtaaaacattaaattgaggactaaaggaagagaagtcctaaacaacaagaaatactcttacc

SEQ ID NO: 385843 - DNA, 120 bp, Artificial Sequence
  ENSG00000144227_19 (sequence is synthesized)
acactgttcaaaaaaccaagagctctgttctctatcttcatttctttccttttaccggtaatatctgcagtgttcaatttttgtcttttgtaaaaattgtactaagcttagtgtgtggta

SEQ ID NO: 385844 - DNA, 120 bp, Artificial Sequence
  ENSG00000144227_20 (sequence is synthesized)
gtacaggcttgaagttcttgctctgagttcaccacatgtttttgtaattttgtggttggtgattaatattttgaaacatctttttattttcacctagaaacaagagtaaaatattattta

SEQ ID NO: 385845 - DNA, 120 bp, Artificial Sequence
  ENSG00000144227_21 (sequence is synthesized)
ttgtaaaatatgtgggaatcatatatctatatatatatacttagaattttctgtgtacagagaaagtatgtgtacacattttatgtaaataaaaagaatttgctagatctgtcacattaa

SEQ ID NO: 385846 - DNA, 120 bp, Artificial Sequence
  ENSG00000144228_0 (sequence is synthesized)
gccggggctggagtcgtaactcggaagccggagcccagacgggcccgcggcgggggggtgggggctgcgcgggggcgggagtggcggaggtggccgcccctggcggcgggtttgtttatc

SEQ ID NO: 385847 - DNA, 120 bp, Artificial Sequence
  ENSG00000144228_1 (sequence is synthesized)
tggcggcgggtttgtttatcccggggaagaagtttaggagcgggagatagggaaggagggcgggtcggggaggagggatgcggttcggcggaggcggccgccacagggacttgccgccat

SEQ ID NO: 385848 - DNA, 120 bp, Artificial Sequence
  ENSG00000144228_2 (sequence is synthesized)
cacccctgctgccaccaccgcagcctcgggctcccagggcggacacggccaccgcctcagcgggagaggagtctccaccaggactgaccgctgccgcccagcacgtccaggtaaggtact

SEQ ID NO: 385849 - DNA, 120 bp, Artificial Sequence
  ENSG00000144228_3 (sequence is synthesized)
caactgtgtggggtactacataaatcctgaaagactacaataaagtggtgatgtctcgggaacccaccccacctctacctggagatatgtctactggtcccatagcagaaagctggtgtt

SEQ ID NO: 385850 - DNA, 120 bp, Artificial Sequence
  ENSG00000144228_4 (sequence is synthesized)
acacacaggttaaagtagtaaaattttcctatatgtggaccattaataacttcagtttttgtcgagaggaaatgggtgaagtgttaaaaagttcaacattttcatctggcccaagtgaca

SEQ ID NO: 385851 - DNA, 120 bp, Artificial Sequence
  ENSG00000144228_5 (sequence is synthesized)
aaatgaaatggtgcctgagggtaaacccaaagggattagatgatgaaagtaaagactacttgtccttatatttgcttttagtcagctgccccaaaagtgaagttcgagcaaaattcaaat

SEQ ID NO: 385852 - DNA, 120 bp, Artificial Sequence
  ENSG00000144228_6 (sequence is synthesized)
tttcccttctgaatgctaaaagggaagaaacaaaagcaatggaaagccaaagagcatatcgatttgtgcaagggaaggactggggttttaaaaaattcattagaagggactttttgcttg

SEQ ID NO: 385853 - DNA, 120 bp, Artificial Sequence
  ENSG00000144228_7 (sequence is synthesized)
atgaagctaatggtcttttaccagatgacaagcttacattattttgtgaggtgagtgtggtccaagattcagtaaacatatcaggacatactaatacaaatactttgaaggtgcctgagt

SEQ ID NO: 385854 - DNA, 120 bp, Artificial Sequence
  ENSG00000144228_8 (sequence is synthesized)
gtcgtctagcagaagatttaggtaatctctgggaaaacacaagatttacagactgcagttttttcgtgagaggacaagaatttaaagctcataaatctgtgcttgcagctcgatctccag

SEQ ID NO: 385855 - DNA, 120 bp, Artificial Sequence
  ENSG00000144228_9 (sequence is synthesized)
tttttaacgccatgtttgaacatgaaatggaagaaagcaaaaagaatcgagtggaaataaatgatttagaccctgaagtttttaaagaaatgatgagattcatttacacagggagagcac

SEQ ID NO: 385856 - DNA, 120 bp, Artificial Sequence
  ENSG00000144228_10 (sequence is synthesized)
caaaccttgacaaaatggctgacaacttgttggcagctgcagacaaatatgcactggaacggctgaaggtcatgtgcgaagaagctttgtgtagtaacctctcagtagagaatgttgcag

SEQ ID NO: 385857 - DNA, 120 bp, Artificial Sequence
  ENSG00000144228_11 (sequence is synthesized)
atacccttgtccttgcagatttgcacagtgcagaacagttgaaagcacaagccatagactttattaataggtgcagtgtacttcgacaacttgggtgtaaagatgggaaaaactggaaca

SEQ ID NO: 385858 - DNA, 120 bp, Artificial Sequence
  ENSG00000144228_12 (sequence is synthesized)
gcaaccaagcaaccgacataatggaaacatcagggtggaagtccatgattcagtctcaccctcatttagtagcagaagcctttcgagcactagcatctgcacagtgtccacagtttggca

SEQ ID NO: 385859 - DNA, 120 bp, Artificial Sequence
  ENSG00000144228_13 (sequence is synthesized)
ttccacgcaaacggctaaaacagtcctgaaatcttccatgaacagttgaaaaatggaattgactttcactcctccaggtccagaaggattctaatacacaaaccataagcaagagttgtt

SEQ ID NO: 385860 - DNA, 120 bp, Artificial Sequence
  ENSG00000144228_14 (sequence is synthesized)
tctgttattttgtccacagaacagaagctgaaaaagcatattgcttgcatttcaggtggataatttatggtttattcttcagctttaaattagactgattaattcacttcaaggccttaa

SEQ ID NO: 385861 - DNA, 120 bp, Artificial Sequence
  ENSG00000144228_15 (sequence is synthesized)
attatcttcaatgacttgtcttgttcatataatactttaatttttttttattgtgccttgtcattttgaccaaggctatgcaggattgcactagctccataatgcagtaatattgataac

SEQ ID NO: 385862 - DNA, 120 bp, Artificial Sequence
  ENSG00000144228_16 (sequence is synthesized)
tgaagatactaagtttcaaaaggatcttccattattttgcaaaaagaaaaatgaattttatagggtttgtcctatgctatctcaaagtttaagttctctttaaaagcacttgtattggag

SEQ ID NO: 385863 - DNA, 120 bp, Artificial Sequence
  ENSG00000144228_17 (sequence is synthesized)
attaccagtaatatctccaatctaagttctataaatatgggagaaccctcttaccttcaaggtaagttatggcaatacactgcttcaattctaatttatttttcatttcagggggcaaat

SEQ ID NO: 385864 - DNA, 120 bp, Artificial Sequence
  ENSG00000144228_18 (sequence is synthesized)
atgcaatgagttggcctagatttttagtgacatttatgatgtttgtcttgtatgttaactgtccaacaaactgtgggtttattctaagtttacaattattgagaactgattgaggttaag

SEQ ID NO: 385865 - DNA, 120 bp, Artificial Sequence
  ENSG00000144228_19 (sequence is synthesized)
atttcatgaagaaagcatgtattgtgtggaagtaatttttttttaatttatactgacctacatttatacgaagaattctgtacatgttaaaagtaaggatgaccaaatgcaaatttaatg

SEQ ID NO: 385866 - DNA, 120 bp, Artificial Sequence
  ENSG00000144228_20 (sequence is synthesized)
agtgggccaattaagaaagatacatatgcacttttactgtgtaacttttgtatgctgaatggtacatatatttttttgcttttgagggaattaataaggtataattaattgtgtcttaac

SEQ ID NO: 385867 - DNA, 120 bp, Artificial Sequence
  ENSG00000144228_21 (sequence is synthesized)
ttttcaaagaaatttttagatggaggcaactgggatgtttgtgataatagatgagaaagacatccttgattgtagttaaattggtttggattacagatattcattattgaattgactcct

SEQ ID NO: 385868 - DNA, 120 bp, Artificial Sequence
  ENSG00000144228_22 (sequence is synthesized)
attttctcacactttggaaaagacacctgaacaataaatgaatcctggatagtctactctccttcaaacaattaactgatacttgcctttgggagatgcatacaaaaggagagaaccctt

SEQ ID NO: 385869 - DNA, 120 bp, Artificial Sequence
  ENSG00000144228_23 (sequence is synthesized)
agactatgtcaggtcacactaggaacctcccctcactccccgtttttcttcattgtgtttcagttactgtactaacattgtggatgatactgaaattctgcataatgtgaacaggataaa

SEQ ID NO: 385870 - DNA, 120 bp, Artificial Sequence
  ENSG00000144228_24 (sequence is synthesized)
ctatttataaactgcttttcatgggccagttctttattataaatgaattttagctttaaatgcatatacacgttcagtgtttgatagttgtgttcttaagggaggtttgttctggtgcat

SEQ ID NO: 385871 - DNA, 120 bp, Artificial Sequence
  ENSG00000144228_25 (sequence is synthesized)
tggtgaccagtgtgcttcttaagggcaagatttatatttgaccacaagggaaaaagtgtgtcactggaaaaaaacgcatatacctatgtttgcaaacataactattcttcagattaaaat

SEQ ID NO: 385872 - DNA, 120 bp, Artificial Sequence
  ENSG00000144228_26 (sequence is synthesized)
ttgtataatttgtttatttaatgtttgaattcaggacaaaagaaaaaatgaagcttgaggtgttttcaaatagaccttatttttgctatctctttgttaggtgttaactgaagcaattcg

SEQ ID NO: 385873 - DNA, 120 bp, Artificial Sequence
  ENSG00000144228_27 (sequence is synthesized)
aatatgtccagattcatttggattcatatttacattgaaaaaactcaactaagcatttgttatccacaacaacctagagtttaaaaagatcgtattttcacctgtcttcattactttcta

SEQ ID NO: 385874 - DNA, 120 bp, Artificial Sequence
  ENSG00000144228_28 (sequence is synthesized)
tgtagtttcattctttgtcgtggtaacttaaatttgaaattggaagaatctcttgggatagaagaaagattcttacctggtgatggaacttcatacttcatcctgtgtaagagtattatg

SEQ ID NO: 385875 - DNA, 120 bp, Artificial Sequence
  ENSG00000144228_29 (sequence is synthesized)
ggaagtagaaattcacttccttaaatccatcgtaagattgagcctcaagtttgcaatatacaattttaaaaatacacatacatacatacatatgtatacatttccagttttaagattttg

SEQ ID NO: 385876 - DNA, 120 bp, Artificial Sequence
  ENSG00000144228_30 (sequence is synthesized)
cgagggtcttataagaaaacaaaaattccctcaggctatagaattatgttgtcatatatcagaaaagtactgatgtatccatttatatccaatgcgcaccacaccggcacattgtgattt

SEQ ID NO: 385877 - DNA, 120 bp, Artificial Sequence
  ENSG00000144228_31 (sequence is synthesized)
aattcaccgcttgaatctatatttctaaccacagtgacttcagtaaaaataccgtataatgaacatttcagcttcttcttacttactcgagagtttattgcaaatcttaaggattttatt

SEQ ID NO: 385878 - DNA, 120 bp, Artificial Sequence
  ENSG00000144228_32 (sequence is synthesized)
ataaagattttttttttagtttggtagcacattttgtaccaaaaatgtcaaacactgtgctgtaagaatatccatgtttgtagaaatgtccacttttcagataatataatgcctaccatt

SEQ ID NO: 385879 - DNA, 120 bp, Artificial Sequence
  ENSG00000144228_33 (sequence is synthesized)
atactaacagaatcatatggtagttgatttatttttttatttattatgtatatttttggtattgtgggttcttgaggcaatgataaaaacacttaatgtattctgacatgagtgctctaa

SEQ ID NO: 385880 - DNA, 120 bp, Artificial Sequence
  ENSG00000144228_34 (sequence is synthesized)
tagcctccttctcctcatttttaaactgcatacattactttcaaaataggtatagatactctgtcccgccttttgagctattagcctgttcctgtttccctttgtcacctaagcaaggct

SEQ ID NO: 385881 - DNA, 120 bp, Artificial Sequence
  ENSG00000144228_35 (sequence is synthesized)
ttttctgagaaggtagtgaatggtttcaaatgttgcatactataagaataatcattgggtaactgttgtttagaccaacacttagaaatactatatttgtgccttttcatttttaatttt

SEQ ID NO: 385882 - DNA, 120 bp, Artificial Sequence
  ENSG00000144228_36 (sequence is synthesized)
aatgtgtgttgatatttggagcacaaataatgaaggtgccataatatggcttgccaatgttacctccttgaatagtcatgtgtcattgtcttgaattggtaattggagaaccttgcatga

SEQ ID NO: 385883 - DNA, 120 bp, Artificial Sequence
  ENSG00000144228_37 (sequence is synthesized)
aatatgtgatcgtgtgtgtgtgtgtgtatgcgcgtgtgtgtctgtgtgtttgtgtacatacctgtatttgcttggggcttgtgtgtggtatgttacaaagagtgaatttctggaaataga

SEQ ID NO: 385884 - DNA, 120 bp, Artificial Sequence
  ENSG00000144228_38 (sequence is synthesized)
aatcagttaaatgttgaaagttcaggttagcagaaatatttcatttaaatatgctttactttggaggacaattgattaacagaggaaatgataattttcaaaaatgtgatcaatttactg

SEQ ID NO: 385885 - DNA, 120 bp, Artificial Sequence
  ENSG00000144228_39 (sequence is synthesized)
catgatgaaatgtgaaaacagtgcctttttaggacatcaattataataaaattgttttaaaatattaacaaagatctcaaaaagttgtcatgaacattattcatttatttttaaactgga

SEQ ID NO: 385886 - DNA, 120 bp, Artificial Sequence
  ENSG00000144228_40 (sequence is synthesized)
tctaaataagagcttagatggccaaaattagaattaataatatacccatttaaattttgttcataaatttaaaatcttaatcagaattctttataaaatgtgggtcatagatatgaccca

SEQ ID NO: 385887 - DNA, 120 bp, Artificial Sequence
  ENSG00000144228_41 (sequence is synthesized)
gtgttactaaaatagaacagggattgtgaaaatccagctcaacatacttaagtatacttggcttagagccaagtatacttgaagaggtgaattattctgacttggacatgcatgctcttt

SEQ ID NO: 385888 - DNA, 120 bp, Artificial Sequence
  ENSG00000144228_42 (sequence is synthesized)
gatggataaaataaaaatattcaatttattcttacaaaagaaggtgggtgggtgagtgggttcgttttagtgttctcagattataaagacagctataaagacagcactttccgcacacaa

SEQ ID NO: 385889 - DNA, 120 bp, Artificial Sequence
  ENSG00000144228_43 (sequence is synthesized)
agtgtattttacaaaccttttttatacaaattaatgagctctactttatttaagtgttcatggaatgatgtaaattttaggtccagttgaacaaatattgagtgcctatcatatgcaaga

SEQ ID NO: 385890 - DNA, 120 bp, Artificial Sequence
  ENSG00000144228_44 (sequence is synthesized)
ctaactccttactaggaatgaaatcacacagtgtcttctgtttgcagtatgtgaactttatgtttgaaaagaaattattatatttaaatttttttgttgtcagagtttatcattgtatac

SEQ ID NO: 385891 - DNA, 120 bp, Artificial Sequence
  ENSG00000144228_45 (sequence is synthesized)
tgtaacccagtaaattttgcattcagttttaaaaaatgaagatgtaacttacctgagtctcatttttgaaaatgaaattctgcaaaaattatttaaaaattagttcttggggaaattgat

SEQ ID NO: 385892 - DNA, 120 bp, Artificial Sequence
  ENSG00000144228_46 (sequence is synthesized)
tttcaagattcaagtgtataaaaacttatattgaacttttcagcctcgtttttaattagctgatgttaatgataagatacataatacatgtatcttgttgctgaaaatattttttgcatt

SEQ ID NO: 385893 - DNA, 120 bp, Artificial Sequence
  ENSG00000144228_47 (sequence is synthesized)
tcaacacattgagttaaaataaagttgttactacttattcaagattaattggcttatcttgtgtttatttgaagaatacatactcttctttttcaggttggtatgatgctttgcaaaaga

SEQ ID NO: 385894 - DNA, 120 bp, Artificial Sequence
  ENSG00000144228_48 (sequence is synthesized)
gccatgtatttgatacggtaaatcatgcatagtaattgtcttttctacataggggagctcttgttttttggaaccaattgaagacattcttaactgtaaaatattaatatgcatttattt

SEQ ID NO: 385895 - DNA, 120 bp, Artificial Sequence
  ENSG00000144228_49 (sequence is synthesized)
taatatgtatgaaccatcaatactggatgacttattctaatgctacgtaccattaatgtaacagagatcaccttttccctgtcattcctatcctgtcttaatttcagttatcccagacaa

SEQ ID NO: 385896 - DNA, 120 bp, Artificial Sequence
  ENSG00000144228_50 (sequence is synthesized)
aaatgaaatgtcagctgccccaaaagtgaagttcgagcaaaattcaaattttcccttctgaatgctaaaagggaagaaacaaaagcaatggaaagccaaagagcatatcgatttgtgcaa

SEQ ID NO: 385897 - DNA, 120 bp, Artificial Sequence
  ENSG00000144228_51 (sequence is synthesized)
ggtacacattagtgtttgaagtagtagacaagagaagtatatttattaagaatattgagtaataaggtagctttttagaataaatcctacttcaaaaatacgcttatgcaaattgcagtt

SEQ ID NO: 385898 - DNA, 120 bp, Artificial Sequence
  ENSG00000144228_52 (sequence is synthesized)
ttagtctttcttctaagtgcatttgtttatatttacttcgtattaggttaaaacagtaacttaaagaattttaaaataatcttaaataataatctattttacccttattttccaagttgc

SEQ ID NO: 385899 - DNA, 120 bp, Artificial Sequence
  ENSG00000144229_0 (sequence is synthesized)
agtgctgaggagccagagtcgccgccgggttgccagacgctggaatgggtggtcttccgacacacaccaccatctttcttgcgctcgggaagctcggggctcagcggctcccagaggtta

SEQ ID NO: 385900 - DNA, 120 bp, Artificial Sequence
  ENSG00000144229_1 (sequence is synthesized)
cggcggcggctctggcgagacgggaataggcaagtcaagaggctgaaaaatctgaagcatgtttccaaagagcaacctaacagtcacttgctgggtatggaggagcatgaggaagctctt

SEQ ID NO: 385901 - DNA, 120 bp, Artificial Sequence
  ENSG00000144229_2 (sequence is synthesized)
tctattgctttctctcttgctgtcccatgcagctcatttggaaggcaaaaaggataatcagttcatctggaaaccaggtccgtggggaaggtgtacaggagactgtggtcccggaggagt

SEQ ID NO: 385902 - DNA, 120 bp, Artificial Sequence
  ENSG00000144229_3 (sequence is synthesized)
ccagagtcgggcagtgtggtgttttcatgttgacgggtggacaagtcacctgtctaactgtggtgagagcaacaggcctccaaaggaaagaagttgtttccgagtttgtgactggcacag

SEQ ID NO: 385903 - DNA, 120 bp, Artificial Sequence
  ENSG00000144229_4 (sequence is synthesized)
tgacctctttcagtgggaggtttctgactggcaccactgtgtgcttgttccttacgctcgcggtgaagtcaagcctcggactgcagagtgtgtgacggctcagcatggactgcagcaccg

SEQ ID NO: 385904 - DNA, 120 bp, Artificial Sequence
  ENSG00000144229_5 (sequence is synthesized)
gatggtgcgctgcattcagaagctgaaccgaactgtggttgcaaatgaaatatgcgaacactttgcccttcagcctcctacagaacaggcttgcctcattccttgtccccgggattgtgt

SEQ ID NO: 385905 - DNA, 120 bp, Artificial Sequence
  ENSG00000144229_6 (sequence is synthesized)
agtatctgagttcttaccatggtccaactgtagcaagggatgtgggaagaaattgcagcatagaactcgcgcggtcatagctccccctctctttggtggtttgcaatgtccaaatctgac

SEQ ID NO: 385906 - DNA, 120 bp, Artificial Sequence
  ENSG00000144229_7 (sequence is synthesized)
tgagtcaagagcctgtgatgctcccatttcctgtcctcttggggaagaggaatatacatttagccttaaggttggaccatggagtaaatgcagactgcctcatcttaaagaaattaatcc

SEQ ID NO: 385907 - DNA, 120 bp, Artificial Sequence
  ENSG00000144229_8 (sequence is synthesized)
aagcggaagaactgttctggattttaactctgattcaaatgagcgagtcacctttaaacatcaaagttacaaagcacatcatcattcgaagtcttgggcaatagagataggttatcaaac

SEQ ID NO: 385908 - DNA, 120 bp, Artificial Sequence
  ENSG00000144229_9 (sequence is synthesized)
ccggcaggtttcgtgtacaagaagtgatggacaaaatgctatgttaagcctttgccttcaagattccttcccattgactgttcagtcctgcatcatgcccaaagactgtgaaacctccca

SEQ ID NO: 385909 - DNA, 120 bp, Artificial Sequence
  ENSG00000144229_10 (sequence is synthesized)
gtggtcctcctggagcccctgctccaagacatgccgttcagggagtctcttgccaggatttaggagcaggagccggaacgtgaagcacatggctattggaggtggaaaggagtgtcctga

SEQ ID NO: 385910 - DNA, 120 bp, Artificial Sequence
  ENSG00000144229_11 (sequence is synthesized)
acttcttgagaaagaggcctgcattgttgaaggagaacttctgcagcaatgtcccaggtattcctggagaacttctgaatggaaagaatgccaagtctctctcctcctcgagcagcagga

SEQ ID NO: 385911 - DNA, 120 bp, Artificial Sequence
  ENSG00000144229_12 (sequence is synthesized)
tccccactggcatgtgacgggacccgtgtgtggcggtgggatccagacccgggaggtgtactgtgcccagagcgtaccagcagctgccgcactgagggccaaggaagtctctagacctgt

SEQ ID NO: 385912 - DNA, 120 bp, Artificial Sequence
  ENSG00000144229_13 (sequence is synthesized)
ggaaaaggcattatgtgtgggacccgccccgttgccctctcagctctgcaatatcccttgctctacggactgcatagtatcttcctggtcagcctggggcctgtgcatccatgaaaactg

SEQ ID NO: 385913 - DNA, 120 bp, Artificial Sequence
  ENSG00000144229_14 (sequence is synthesized)
tcatgatcctcaggggaaaaaaggatttagaacgaggcagcgccatgtcctcatggaatctacagggcctgcagggcattgccctcatttggtggagtctgttccttgtgaggatccaat

SEQ ID NO: 385914 - DNA, 120 bp, Artificial Sequence
  ENSG00000144229_15 (sequence is synthesized)
gtgctaccgatggctggcatcagaagggatctgtttccctgatcatggaaaatgtggcctgggacatcgtattctgaaggccgtctgccagaatgaccgcggagaagatgtatcagggag

SEQ ID NO: 385915 - DNA, 120 bp, Artificial Sequence
  ENSG00000144229_16 (sequence is synthesized)
tctttgcccagttccccctcctcctgagaggaagtcttgtgaaattccctgccgaatggactgtgtgctgagcgagtggacggagtggtcatcctgttcccagtcctgttcaaataaaaa

SEQ ID NO: 385916 - DNA, 120 bp, Artificial Sequence
  ENSG00000144229_17 (sequence is synthesized)
ctcagatgggaaacagaccaggtcaagaactatcctggcactggctggggaaggtggaaagccatgtccccctagtcaggctctccaagagcatcgtttgtgtaatgaccattcctgtat

SEQ ID NO: 385917 - DNA, 120 bp, Artificial Sequence
  ENSG00000144229_18 (sequence is synthesized)
gcagcttcactgggagacatcgccttggggcccttgttctgaggacacattggtaactgcccttaatgcaaccattggctggaatggagaagccacgtgtggtgtaggcattcagactcg

SEQ ID NO: 385918 - DNA, 120 bp, Artificial Sequence
  ENSG00000144229_19 (sequence is synthesized)
gagagtcttctgtgtcaagagtcacgtgggacaagtaatgaccaaaagatgtccagattctactcgacctgaaactgtgcgcccctgttttctcccatgcaaaaaagactgtattgtgac

SEQ ID NO: 385919 - DNA, 120 bp, Artificial Sequence
  ENSG00000144229_20 (sequence is synthesized)
tgctttcagtgagtggacaccctgcccaaggatgtgccaagcaggaaatgccacagtaaaacagtctcgatacagaatcatcatccaagaagcagccaatggaggccaggaatgcccaga

SEQ ID NO: 385920 - DNA, 120 bp, Artificial Sequence
  ENSG00000144229_21 (sequence is synthesized)
taccttatatgaggagagagagtgtgaagatgtttccttgtgtcctgtatatcggtggaagccacagaaatggagcccttgcatcttagtgccagagtctgtctggcagggaataacggg

SEQ ID NO: 385921 - DNA, 120 bp, Artificial Sequence
  ENSG00000144229_22 (sequence is synthesized)
cagcagtgaagcctgtggaaaggggttacaaacaagagctgtctcatgcatctctgatgacaaccggtcagcagaaatgatggaatgcctcaagcagacaaacggcatgcctctccttgt

SEQ ID NO: 385922 - DNA, 120 bp, Artificial Sequence
  ENSG00000144229_23 (sequence is synthesized)
gcaagaatgcacagtcccatgtcgagaagactgcaccttcactgcttggtccaagtttacgccctgctccacgaactgtgaagccacaaaaagtaggcggcgacagctcacagggaaaag

SEQ ID NO: 385923 - DNA, 120 bp, Artificial Sequence
  ENSG00000144229_24 (sequence is synthesized)
cagaaagaaggagaaatgccaggattctgacctttaccctctagtggagacagaactatgtccttgtgatgaatttatatcccaaccttatggaaactggtcagattgcattcttccaga

SEQ ID NO: 385924 - DNA, 120 bp, Artificial Sequence
  ENSG00000144229_25 (sequence is synthesized)
gacccctccttctgcagcagctctggttacattcaagaaaaatgtgtcattccctgcccatttgattgcaagttaagcgattggtctagttgggggtcttgcagttcatcttgtggaatt

SEQ ID NO: 385925 - DNA, 120 bp, Artificial Sequence
  ENSG00000144229_26 (sequence is synthesized)
ggagtgagaattcgatccaaatggctaaaagaaaaaccttacaatggaggacgaccatgtcccaaactggatctcaagaatcaggtacatgaggcagtcccatgttacagtgagtgcaat

SEQ ID NO: 385926 - DNA, 120 bp, Artificial Sequence
  ENSG00000144229_27 (sequence is synthesized)
cagtattcctgggttgtagaacactggtcttcatgcaaaatcaacaatgagctgaggtccctgcgctgtggaggaggaacacaatctaggaaaatcagatgtgtgaatactgcggatggt

SEQ ID NO: 385927 - DNA, 120 bp, Artificial Sequence
  ENSG00000144229_28 (sequence is synthesized)
gaaggtggagcagtggatagcaacctgtgcaaccaggatgaaattcccccagaaacccagtcctgttctcttatgtgtcccaatgagtgtgtcatgtctgagtggggactttggagcaaa

SEQ ID NO: 385928 - DNA, 120 bp, Artificial Sequence
  ENSG00000144229_29 (sequence is synthesized)
tgcccacagtcatgcgatccccacacaatgcagagaagaactcgccacctgctaagaccatcactgaactcaaggacttgtgctgaagactcacaggtgcagccttgcctcctgaatgaa

SEQ ID NO: 385929 - DNA, 120 bp, Artificial Sequence
  ENSG00000144229_30 (sequence is synthesized)
aattgcttccagttccagtacaatctaacagagtggagcacatgccagctgagtgaaaacgcaccctgtggtcaaggcgtcaggacccgcctgctaagctgtgtgtgcagtgatggcaag

SEQ ID NO: 385930 - DNA, 120 bp, Artificial Sequence
  ENSG00000144229_31 (sequence is synthesized)
ccagtcagcatggaccaatgtgagcagcataatttggagaagccccagagaatgagcattccctgcttggtggaatgcgtggtcaactgtcagctctcagggtggacggcttggacagag

SEQ ID NO: 385931 - DNA, 120 bp, Artificial Sequence
  ENSG00000144229_32 (sequence is synthesized)
tgttcacagacctgtggccatggaggtcgaatgagccggactcgatttatcattatgccaacccaaggagaaggacggccatgccccacagagcttacccaggagaaaacctgcccagtg

SEQ ID NO: 385932 - DNA, 120 bp, Artificial Sequence
  ENSG00000144229_33 (sequence is synthesized)
accccctgctacagctgggtccttggcaactggtctgcatgtaaattggagggtggagactgtggggaaggagttcagatccgcagcctttcctgcatggtccacagtggttcaatatct

SEQ ID NO: 385933 - DNA, 120 bp, Artificial Sequence
  ENSG00000144229_34 (sequence is synthesized)
catgcagctggacgtgtcgaggatgcactgtgtggagaaatgccctttcaggacagcatcctgaagcagctgtgttctgtgccttgcccaggagactgccatttaacagaatggtcagag

SEQ ID NO: 385934 - DNA, 120 bp, Artificial Sequence
  ENSG00000144229_35 (sequence is synthesized)
tggagcacatgtgaattaacctgcattgatggaagaagctttgagactgtgggccgccagtctagatcaaggacttttataattcagtcttttgagaaccaagacagctgcccccaacag

SEQ ID NO: 385935 - DNA, 120 bp, Artificial Sequence
  ENSG00000144229_36 (sequence is synthesized)
gttctagaaacacgcccttgtacaggaggcaaatgttatcactacacatggaaagcaagtctttggaacaataacgaacgaactgtatggtgccagcgttcagatggcgttaatgtcaca

SEQ ID NO: 385936 - DNA, 120 bp, Artificial Sequence
  ENSG00000144229_37 (sequence is synthesized)
ggaggctgctcccctcaggcccgtcctgctgccattcggcagtgcattccagcctgcagaaaacctttctcctactgtacacagggtggagtctgtggttgtgagaagggctatacagag

SEQ ID NO: 385937 - DNA, 120 bp, Artificial Sequence
  ENSG00000144229_38 (sequence is synthesized)
ataatgaaatcaaatggtttcctggattactgcatgaaagtaccaggctcagaggataaaaaagctgatgtgaaaaacctttctgggaaaaacagacctgtgaattcaaaaatacatgat

SEQ ID NO: 385938 - DNA, 120 bp, Artificial Sequence
  ENSG00000144229_39 (sequence is synthesized)
atttttaaaggatggtctcttcaaccacttgatccagatggccgagtaaaaatttgggtttatggcgtttcaggtggcgcttttctcatcatgattttcctaatatttacttcctacctt

SEQ ID NO: 385939 - DNA, 120 bp, Artificial Sequence
  ENSG00000144229_40 (sequence is synthesized)
gtttgcaagaagccaaaaccacatcaaagcacacctccccaacagaagcctctgaccttagcctacgatggagacttagacatgtaatctgaaaaagaaatccaaatgtagacatcaact

SEQ ID NO: 385940 - DNA, 120 bp, Artificial Sequence
  ENSG00000144229_41 (sequence is synthesized)
gccttaaccgctttctcttttgtagctctcagacttctcagttttttgaggaatctcaagatgtgatatattgggcagaatacaaatattgcaaaagtaatattgcctcaacttcatttg

SEQ ID NO: 385941 - DNA, 120 bp, Artificial Sequence
  ENSG00000144229_42 (sequence is synthesized)
gacatggagtcaaggattattaggtctgccattttgttttcaagttgtttgtgggtgtgttttatttttttggttttcccaagggacctgaaaacccttctcttcctgtttggaactggg

SEQ ID NO: 385942 - DNA, 120 bp, Artificial Sequence
  ENSG00000144229_43 (sequence is synthesized)
aggaagaaaacatgatggaattcccacagacttgagtaaacttgatcttcagcagcataatgacaatccagaggaaaatacagtcaaggcatttactctaaatgacgagtctgacactgc

SEQ ID NO: 385943 - DNA, 120 bp, Artificial Sequence
  ENSG00000144229_44 (sequence is synthesized)
attgttacgcactatattagtgcaaagtctttattcttcccatacttcaacactgagttttctagagtttactttggtttaaagactttcaaattggattgcctatttttcatgaacaca

SEQ ID NO: 385944 - DNA, 120 bp, Artificial Sequence
  ENSG00000144229_45 (sequence is synthesized)
gagagaatggattaccatttcagaaattctctgagtttttaacctttaaatattgtattttgttttgtagccaggggatgatggcgcttcatgggttgcagctactgaaaatagcagcgt

SEQ ID NO: 385945 - DNA, 120 bp, Artificial Sequence
  ENSG00000144229_46 (sequence is synthesized)
gtgtgtaattgctggactagatgaaagctaggtcatttctgaagggaatgtgtactgaatgttagagtgtacaaatgaaatatgtggttaaattggagaatgaggtagattatttgatta

SEQ ID NO: 385946 - DNA, 120 bp, Artificial Sequence
  ENSG00000144229_47 (sequence is synthesized)
ctaaaactgtattttaacaaaaacttatccatgtagatatagcattaaccacacacagttgtaattcagtttaatgatgacaaactctgcttttgtaatttcaattttcttatctgaata

SEQ ID NO: 385947 - DNA, 120 bp, Artificial Sequence
  ENSG00000144229_48 (sequence is synthesized)
tttataaattcttctttcaaatttaattatctgacctcatttaatatacatcaaacaccgatcctgtttgtacaaagtcttgcttttataaggtttcaataatatctaaaacaacacatt

SEQ ID NO: 385948 - DNA, 120 bp, Artificial Sequence
  ENSG00000144229_49 (sequence is synthesized)
aaaaagctgagaccattttatgaagataattgtttgtaatcataggtgttgaaagtaaaaaggtgccatcttgtggtattgacttgtatttataacaaataaactgctcaagagactgca

SEQ ID NO: 385949 - DNA, 120 bp, Artificial Sequence
  ENSG00000144229_50 (sequence is synthesized)
ggccacttgggtagaggcttagctcttgctttgctctgtgcttgctgaatgaacttggagaaaccacccaaagtcttgggagcttagtttttcagtaaaattgatgaattaaactaaatc

SEQ ID NO: 385950 - DNA, 120 bp, Artificial Sequence
  ENSG00000144229_51 (sequence is synthesized)
agctctgaagctcactctagctccgaaagtcctgttgactgttggaacatagaaatatcctgtgtttttactcttctctggaagatatgacttgctaagtggtctgaagctgtctctaga

SEQ ID NO: 385951 - DNA, 120 bp, Artificial Sequence
  ENSG00000144229_52 (sequence is synthesized)
gtttgtactttgaagactaaaagaagtagaagacagaatttcagatcctttaagcattgtgaaaacctagatagcctgtgtctctgtggaactctaaatgaaaatgacagaaaaactaaa

SEQ ID NO: 385952 - DNA, 120 bp, Artificial Sequence
  ENSG00000144229_53 (sequence is synthesized)
agtgagataggacagagttcagtctattaaaatgaagacttacatgtataaggcaacattctgttcttcaggtccctttccaagccaaactaactgaaaagctgacacctcccttatcat

SEQ ID NO: 385953 - DNA, 120 bp, Artificial Sequence
  ENSG00000144229_54 (sequence is synthesized)
gataatcagttcatctggaaaccaggacttgccaagtagaagaaagcacttattggagagggggagtagagtcaagcaaataaacctgagatttttaggatcatttttataagtcttgaa

SEQ ID NO: 385954 - DNA, 120 bp, Artificial Sequence
  ENSG00000144229_55 (sequence is synthesized)
ttcgttgatgatgttaacaaaaaagtccgtggggaaggtgtacaggagactgtggtcccggaggagtccagagtcgggcagtgtggtgttttcatgttgacgggtggacaagtcacctgt

SEQ ID NO: 385955 - DNA, 120 bp, Artificial Sequence
  ENSG00000144230_0 (sequence is synthesized)
ccgacacccacgggcggagatcacctgctgccccgcagacccctgtcccttcctcccggaccagcagctagaggatgtccaaacggagttggtgggctggatccagaaagcccccaagag

SEQ ID NO: 385956 - DNA, 120 bp, Artificial Sequence
  ENSG00000144230_1 (sequence is synthesized)
agatgctgaaactctcaggctctgactccagccaaagcatgaatggccttgaagtggctcccccaggtctgatcaccaacttctccctggccacggcagagcaatgtggccaggagacgc

SEQ ID NO: 385957 - DNA, 120 bp, Artificial Sequence
  ENSG00000144230_2 (sequence is synthesized)
cactggagaacatgctgttcgcctccttctaccttctggattttatcctggctttagttggcaataccctggctctgtggcttttcatccgagaccacaagtccgggaccccggccaacg

SEQ ID NO: 385958 - DNA, 120 bp, Artificial Sequence
  ENSG00000144230_3 (sequence is synthesized)
tgttcctgatgcatctggccgtggccgacttgtcgtgcgtgctggtcctgcccacccgcctggtctaccacttctctgggaaccactggccatttggggaaatcgcatgccgtctcaccg

SEQ ID NO: 385959 - DNA, 120 bp, Artificial Sequence
  ENSG00000144230_4 (sequence is synthesized)
gcttcctcttctacctcaacatgtacgccagcatctacttcctcacctgcatcagcgccgaccgtttcctggccattgtgcacccggtcaagtccctcaagctccgcaggcccctctacg

SEQ ID NO: 385960 - DNA, 120 bp, Artificial Sequence
  ENSG00000144230_5 (sequence is synthesized)
cacacctggcctgtgccttcctgtgggtggtggtggctgtggccatggccccgctgctggtgagcccacagaccgtgcagaccaaccacacggtggtctgcctgcagctgtaccgggaga

SEQ ID NO: 385961 - DNA, 120 bp, Artificial Sequence
  ENSG00000144230_6 (sequence is synthesized)
aggcctcccaccatgccctggtgtccctggcagtggccttcaccttcccgttcatcaccacggtcacctgctacctgctgatcatccgcagcctgcggcagggcctgcgtgtggagaagc

SEQ ID NO: 385962 - DNA, 120 bp, Artificial Sequence
  ENSG00000144230_7 (sequence is synthesized)
gcctcaagaccaaggcagtgcgcatgatcgccatagtgctggccatcttcctggtctgcttcgtgccctaccacgtcaaccgctccgtctacgtgctgcactaccgcagccatggggcct

SEQ ID NO: 385963 - DNA, 120 bp, Artificial Sequence
  ENSG00000144230_8 (sequence is synthesized)
ggccctggcaaaccgcatcacctcctgcctcaccagcctcaacggggcactcgaccccatcatgtatttcttcgtggctgagaagttccgccacgccctgtgcaacttgctctgtggcaa

SEQ ID NO: 385964 - DNA, 120 bp, Artificial Sequence
  ENSG00000144230_9 (sequence is synthesized)
aaggctcaagggcccgccccccagcttcgaagggaaaaccaacgagagctcgctgagtgccaagtcagagctgtgagcggggggcgccgtccaggccgagcgcagactgtttaggactca

SEQ ID NO: 385965 - DNA, 120 bp, Artificial Sequence
  ENSG00000144230_10 (sequence is synthesized)
gcagacccagcaagaggcatctgccctttccccagccacctccccagcaagcaacctgaaatctcagcagatgcccaccatttctctagatcgcctagtctcaacccataaaaaggaaga

SEQ ID NO: 385966 - DNA, 120 bp, Artificial Sequence
  ENSG00000144230_11 (sequence is synthesized)
actgacaaaggggatccatcggccacccctctgcaggggcttgtgatggctacaatggctcctagacactcaacgacttcatctgtggcagggagagaggaggccggaagaacaacccct

SEQ ID NO: 385967 - DNA, 120 bp, Artificial Sequence
  ENSG00000144230_12 (sequence is synthesized)
gaacaatggaggcctttctttcccgctaggctcccagcctccttcccgctacagaatcgctcatcggcgaggctcagcagaaagaccctgaaggcaggctgcaaatgacccagaagaggg

SEQ ID NO: 385968 - DNA, 120 bp, Artificial Sequence
  ENSG00000144230_13 (sequence is synthesized)
acctgggagtcctggtggggacggggagggagtctcaatactcctttgcagtgcaaggtactctgagtcccctctgtagtgcctctgccagacacacactgcctgagttgaagagacaca

SEQ ID NO: 385969 - DNA, 120 bp, Artificial Sequence
  ENSG00000144230_14 (sequence is synthesized)
ggccacacatttcaggctggttgccagcggacgtcagcactcacggcctgcagggactcagcacagctctggattctggatctctcctgctgtaaccccacgcacaagcctgcaaccccc

SEQ ID NO: 385970 - DNA, 120 bp, Artificial Sequence
  ENSG00000144230_15 (sequence is synthesized)
agagctctttgacaggctcccaggcctcccagtcctggacaagcatgtgcagtcacgggagctcagctcaggccagggctgggctgtgcacctgcctcccactgacccagacccacttcc

SEQ ID NO: 385971 - DNA, 120 bp, Artificial Sequence
  ENSG00000144230_16 (sequence is synthesized)
tccagagaggcctctctccgcctgagctatttcccttgctagtgtgcagatatttccctaacatgtccttttttgtatttgtttgtacggaccataaatataactgtagctttaagacta

SEQ ID NO: 385972 - DNA, 120 bp, Artificial Sequence
  ENSG00000144230_17 (sequence is synthesized)
aaacgtcctgttgtgtccctcagctccagcccaagccccccacccagcccccgcctgctctgagtctctgagacagtcacacactcagactatgtggccaagctgggggcggggggcatg

SEQ ID NO: 385973 - DNA, 120 bp, Artificial Sequence
  ENSG00000144230_18 (sequence is synthesized)
ggctagggacacactagaatattcacgctccggtggcagcagcagcagcagccagaggagcagcccgacacaacaagggacccctcaggaatgaagcagcctttcagggccagaggggct

SEQ ID NO: 385974 - DNA, 120 bp, Artificial Sequence
  ENSG00000144230_19 (sequence is synthesized)
gtggtctcccttcctctccttaaatagccagcgttccacccacagcggcaaggagccccctgccaccaccgacacccacgggcggagatcacctgctgccccgcagacccctgtcccttc

SEQ ID NO: 385975 - DNA, 120 bp, Artificial Sequence
  ENSG00000144230_20 (sequence is synthesized)
ctcccggaccagcagctagagctctccgccctcaccgtggttttagcagtcctagggaaagtgccagccgagaccagccagaccaagtcagagtactgtggaacctggattcctggggaa

SEQ ID NO: 385976 - DNA, 120 bp, Artificial Sequence
  ENSG00000144230_21 (sequence is synthesized)
tggggtccccatgaggaactccacattggactaagaacagaccctgttcctggaagcagcaggaaaccatctctggtgttagaacttcaggcatcttgaaacactctgaagccgggggca

SEQ ID NO: 385977 - DNA, 120 bp, Artificial Sequence
  ENSG00000144231_0 (sequence is synthesized)
gctccgcgcttctgcttccggcggcgctggtggtggcgcgcggcgcggcgcggcgatggcggcgggtggcagcgatccgcgggctggcgacgtagaggaggacgcctcacagctcatctt

SEQ ID NO: 385978 - DNA, 120 bp, Artificial Sequence
  ENSG00000144231_1 (sequence is synthesized)
tcctaaagagtttgaaacagctgagacacttctaaattcagaagttcatatgcttctggaacatcgaaagcagcagaatgagagtgcagaggacgaacaggagctctcagaagtcttcat

SEQ ID NO: 385979 - DNA, 120 bp, Artificial Sequence
  ENSG00000144231_2 (sequence is synthesized)
gaaaacattaaactacacagcccgtttcagtcgtttcaaaaacagagagaccattgccagtgttcgtagcttgctactccagaaaaagcttcataagtttgagttggcctgtttggccaa

SEQ ID NO: 385980 - DNA, 120 bp, Artificial Sequence
  ENSG00000144231_3 (sequence is synthesized)
cctttgcccagagactgctgaggagtccaaggctctaatcccaagcttggagggacggtttgaagatgaggagctgcagcagattcttgatgatatccagacaaagcgcagctttcagta

SEQ ID NO: 385981 - DNA, 120 bp, Artificial Sequence
  ENSG00000144231_4 (sequence is synthesized)
ttaatctccaaacatcactgctgctcggagaaaccacatccccaggcataacaccaccttcccactgtctggggctgacttgcacagaaattctgttgaagacagttgagaattcctttg

SEQ ID NO: 385982 - DNA, 120 bp, Artificial Sequence
  ENSG00000144231_5 (sequence is synthesized)
gagaaaacagcccagcttggcgtggggttaggttgctgtttcaaataactcacaggcccaggtgacatggaatcttggagcagccttgtgcagtggcagccagtggcttcctgaacgtgc

SEQ ID NO: 385983 - DNA, 120 bp, Artificial Sequence
  ENSG00000144231_6 (sequence is synthesized)
ctctgcgaagtgtgagatgaggggtcacataaccacactgttgactacctcattcctggtttttggcctccacatcatcttttttcttaatatttcatgttttaatttcagggtgtttat

SEQ ID NO: 385984 - DNA, 120 bp, Artificial Sequence
  ENSG00000144231_7 (sequence is synthesized)
actttttgaaactagaccagaagatagtagactttatagagaaagaccagttttacctagatactaaaggaagaattaaaccgctgttagtttgaaatgctttttttttttttttttaaa

SEQ ID NO: 385985 - DNA, 120 bp, Artificial Sequence
  ENSG00000144231_8 (sequence is synthesized)
tggagatagggtcttaactcttgtccaggctggaggagtgcagtcgtacagtcatggctcactgaagtcttgaccccgctgcctcagcctcccaaataactggggccacaggtgtgcacc

SEQ ID NO: 385986 - DNA, 120 bp, Artificial Sequence
  ENSG00000144231_9 (sequence is synthesized)
ctcccaaataactggggccacaggtgtgcaccacaactctcagctaatttttaaaattttttatagaggtggggttttactatgctgtccagactggtcttaaactcctgggctcaagtg

SEQ ID NO: 385987 - DNA, 120 bp, Artificial Sequence
  ENSG00000144231_10 (sequence is synthesized)
attacaggcatgagccaccacaactggcctgaaattcttaaaggatgggagtgtcgatgacagcaccttggcatcgttgtgcctaacctgggagacggaagaagcacgccatgggaagtg

SEQ ID NO: 385988 - DNA, 120 bp, Artificial Sequence
  ENSG00000144231_11 (sequence is synthesized)
tttacacttggggacaagtgctaagtattgtggagcccatagccccttgagatagatggctactttgcctttcttcttgaactgtcttgcagaatgtggatttggggtaagtggtcttga

SEQ ID NO: 385989 - DNA, 120 bp, Artificial Sequence
  ENSG00000144231_12 (sequence is synthesized)
aggattcatttagtcaccctcaaattaagatttttacttcatctttcttgggcctgcacctccaagataacaaagaagaagcaatggtcgtgccaaagaggtccacaaccaggtgtgcac

SEQ ID NO: 385990 - DNA, 120 bp, Artificial Sequence
  ENSG00000144231_13 (sequence is synthesized)
tgttcactgcagcccatttgctgtatgaactgtggttgttgtgtgcccaatgacaaggctactaagaaattcatcatttgaaacgtagaggccgcagcagtcagcgatgtttctgaaatg

SEQ ID NO: 385991 - DNA, 120 bp, Artificial Sequence
  ENSG00000144231_14 (sequence is synthesized)
agcatccttgacgcctgtgtacttcccaggctggatgtgaagctacattaccatgtgagttgtgccattcacagcacagtggtgaggaattgagctcatgaagcaggcaaggaccgaaca

SEQ ID NO: 385992 - DNA, 120 bp, Artificial Sequence
  ENSG00000144231_15 (sequence is synthesized)
cctccaccccaacgtagacctgcaggtgctgccccatgacctccaccaaagcccatataaggagcggagttgttaaggactgaagaaaaacttctctggagaaaaataaaattgcaattc

SEQ ID NO: 385993 - DNA, 120 bp, Artificial Sequence
  ENSG00000144231_16 (sequence is synthesized)
tacttaaaaaaatttttttttttttttacttcataggccaggcttgaagttctgaacactttgaagtctccaattatgagagatccagtctaagcctctggcctgctaattagcaataag

SEQ ID NO: 385994 - DNA, 120 bp, Artificial Sequence
  ENSG00000144231_17 (sequence is synthesized)
tgctttatttggaaggagggagtcatccactcttgagccactgcagtgaagtcacttgatctcagtctgggggaaaacacttcaatagctaaacattctagctttgatttttctgaaggg

SEQ ID NO: 385995 - DNA, 120 bp, Artificial Sequence
  ENSG00000144231_18 (sequence is synthesized)
aatacacttgttttcaattttggggtttttctttggggcacttgcttgactctgtatgaacttgtgatccaaggaaaaaggagaaagaacagtgttggcttttaaaatcaggatggtttt

SEQ ID NO: 385996 - DNA, 88 bp, Artificial Sequence
  ENSG00000144231_19 (sequence is synthesized)
gagaaagaacagtgttggcttttaaaatcaggatggttttatgtttgctacgaaataaggcaagaataaaaaattcagagtctggctg

SEQ ID NO: 385997 - DNA, 66 bp, Artificial Sequence
  ENSG00000144231_20 (sequence is synthesized)
aatctttttatccttgagcaacttcgcttctttgagcctcattggtgttctcaattgtgaaatatg

SEQ ID NO: 385998 - DNA, 120 bp, Artificial Sequence
  ENSG00000144231_21 (sequence is synthesized)
cttctttgagcctcattggtgttctcaattgtgaaatatggataatagtatctgccccatgggtattttgagaaggttgaatgaacaggaaattattacaaagagcctagaggtgtctga

SEQ ID NO: 385999 - DNA, 120 bp, Artificial Sequence
  ENSG00000144231_22 (sequence is synthesized)
tatatagtatgttccagtaaatgttcactattcttagcatctcaggcagatgagctagtatagatagatgattaagtcagcttgcttcatagaaattagtgcaagaatttgttagcctac

SEQ ID NO: 386000 - DNA, 120 bp, Artificial Sequence
  ENSG00000144231_23 (sequence is synthesized)
ttgttagcctaccaactgatagtatcagacttggaaaataaatgaaattgggccaggcgtggtggctcacccttgtaatcccagcgctttcagaggccgaggcaggcggatcacctgagg

SEQ ID NO: 386001 - DNA, 62 bp, Artificial Sequence
  ENSG00000144231_24 (sequence is synthesized)
ttggaaattgcttacccaaatctacagttaactttcgttttttaatgcttgatgaatttgca

SEQ ID NO: 386002 - DNA, 120 bp, Artificial Sequence
  ENSG00000144231_25 (sequence is synthesized)
tacagttaactttcgttttttaatgcttgatgaatttgcatgtcattcttgggcagtggccatgctgtcttctctgtattgttccaatttgggtatatgtgctgccaaagtgagtactgc

SEQ ID NO: 386003 - DNA, 120 bp, Artificial Sequence
  ENSG00000144231_26 (sequence is synthesized)
agaattatttcttgagagaggcacttacatgtgctgattggcactaaagcagtggaatgggaagaagagacttggaaggcagcccagacgatccaggcgtgtgctagatggcaactgagg

SEQ ID NO: 386004 - DNA, 120 bp, Artificial Sequence
  ENSG00000144231_27 (sequence is synthesized)
agcacggtgctaccatctttactggtgtttccacctatgtgccaggggttctgtgagctacctgagaatactgaagtatataatgctctggcacatagttaggcactaatcagtggtatt

SEQ ID NO: 386005 - DNA, 79 bp, Artificial Sequence
  ENSG00000144231_28 (sequence is synthesized)
taatgctctggcacatagttaggcactaatcagtggtatttatcaaggtgattaaaagcagatttaaaaagcagctcac

SEQ ID NO: 386006 - DNA, 79 bp, Artificial Sequence
  ENSG00000144231_29 (sequence is synthesized)
tgaaaaaaaataaaataataaaaagcagctcatactagggaacttggtaaagcaacctcatgctgttgtaggttgaaag

SEQ ID NO: 386007 - DNA, 120 bp, Artificial Sequence
  ENSG00000144231_30 (sequence is synthesized)
gaacttggtaaagcaacctcatgctgttgtaggttgaaagcctggtcagctattctgcaagacagtcaaaaattgtttacagggctggacagcatattgctattgaaaaatagctattag

SEQ ID NO: 386008 - DNA, 120 bp, Artificial Sequence
  ENSG00000144231_31 (sequence is synthesized)
gagaccttgcacaatttgtgaaacattgttaggctcattgtactgtgtaaaatcaggaaagaatttgggaacatactgatacaacaaaaagataggttgtcaaaccctcacttcaccaga

SEQ ID NO: 386009 - DNA, 120 bp, Artificial Sequence
  ENSG00000144231_32 (sequence is synthesized)
aagctaaattaaccagataagtctttctgaaagttttagtgtcttagtttgttcctgcgctgtaacagaataccttagactgggtaacctataaataataggaatttatttctcacagtt

SEQ ID NO: 386010 - DNA, 120 bp, Artificial Sequence
  ENSG00000144231_33 (sequence is synthesized)
ttggaggctggcaaatgcaagatccaggtgctggtacgttcagtgtctggcaagggcggctttctggtccaagatggtgcctttttttctgcatcttccatagggaatgaacactcctta

SEQ ID NO: 386011 - DNA, 120 bp, Artificial Sequence
  ENSG00000144231_34 (sequence is synthesized)
ctttttttctgcatcttccatagggaatgaacactccttatggtagaagggatggaaggaccaggctttttttttttttttttttggatacagcaggatcttgctctgtcgcccaggctg

SEQ ID NO: 386012 - DNA, 120 bp, Artificial Sequence
  ENSG00000144231_35 (sequence is synthesized)
gcagcctcaatctcccactctccagcgatcatcccacctcagcctcttggatagctgggaccacaggcacgagctaccatgcctggctaatttattttttgtagagacggggtttcgcca

SEQ ID NO: 386013 - DNA, 120 bp, Artificial Sequence
  ENSG00000144231_36 (sequence is synthesized)
tggtctggaatttctgacctctagcagtccacctgtttccgcctcccaaatgctgagattagaggcatgagtcactgcacccagcccgcagcctcttttataagggcattaatccccttc

SEQ ID NO: 386014 - DNA, 120 bp, Artificial Sequence
  ENSG00000144231_37 (sequence is synthesized)
atgagggatattctctcatgacttaatcacctgccaaagaccccacctcttaatactacatcagtgatgggttcaatgtatcaattgggtgggagggggcacattcagaccatagcatct

SEQ ID NO: 386015 - DNA, 120 bp, Artificial Sequence
  ENSG00000144231_38 (sequence is synthesized)
agtcattctggttttattaagatttattagacctgaggcatgaaaaatagcatactggatgggacttcagcatcgatgagttgccttagtaatactgttaataaaaagcactaaatatgc

SEQ ID NO: 386016 - DNA, 120 bp, Artificial Sequence
  ENSG00000144231_39 (sequence is synthesized)
aaggccctgcctcagcggcggcttgggcaagccccagcgcggcgtggggctggggagggaacatggccttgggagggaccatggccttgggagggaccgcctgggcaactgggttatttt

SEQ ID NO: 386017 - DNA, 120 bp, Artificial Sequence
  ENSG00000144231_40 (sequence is synthesized)
cgcgcggcgcggcgcggcgatggcggcgggtggcagcgatccgcgggctggcgacgtagaggaggacgcctcacagctcatctttcctaaagcttggagggacggtttgaagatgaggag

SEQ ID NO: 386018 - DNA, 120 bp, Artificial Sequence
  ENSG00000144233_0 (sequence is synthesized)
ggccagcttctctcgggagcccccacccaggcgcatggctccatgaagcaagaggaggaggcagagcgcgagaggtcccgtccgccccagccgcgtctgggccaggagaaaaggtacagg

SEQ ID NO: 386019 - DNA, 120 bp, Artificial Sequence
  ENSG00000144233_1 (sequence is synthesized)
aagaaggaatggaatcggaaggaagaaaattcattccagagacaaaatagctcccctcctctgttgtagctgttcctctggcaatacaaactttctgctttcaggttctgcagcattcca

SEQ ID NO: 386020 - DNA, 120 bp, Artificial Sequence
  ENSG00000144233_2 (sequence is synthesized)
gaccttgagcactgaatcaggatgggaaaaagacgttgtgttcctccactcgagcccaagttggcagcaggctgttgtggggtcaagaagcccaaattatctggaagtggaacgcacagt

SEQ ID NO: 386021 - DNA, 120 bp, Artificial Sequence
  ENSG00000144233_3 (sequence is synthesized)
cacgggaatcagtccacaactgtccccggctctagttcaggacctcttcaaaaccaccagcatgtggacagcagcagtggacgggagaatgtgtcagacttaactctgggacctggaaac

SEQ ID NO: 386022 - DNA, 120 bp, Artificial Sequence
  ENSG00000144233_4 (sequence is synthesized)
tctcccatcacacgaatgaatcccgcatcgggagcgctgagccctcttccccggcctaatggaactgccaacaccactaagaatctggtggtgactgcagagatgtgctgctactgcttc

SEQ ID NO: 386023 - DNA, 120 bp, Artificial Sequence
  ENSG00000144233_5 (sequence is synthesized)
gacgtactctactgtcacctctatggcttcccacagccacgacttcctagattcaccaatgacccctatccgctctttgtgacgtggaagacagggcgggacaagcggcttcgtggctgc

SEQ ID NO: 386024 - DNA, 120 bp, Artificial Sequence
  ENSG00000144233_6 (sequence is synthesized)
attgggaccttctcagccatgaatcttcattcaggactcagggaatacacgttaaccagtgcacttaaggacagccgatttccccccctgacccgagaggagctgcctaaacttttctgc

SEQ ID NO: 386025 - DNA, 120 bp, Artificial Sequence
  ENSG00000144233_7 (sequence is synthesized)
tctgtctccctccttactaactttgaggatgccagtgattacctggactgggaggtaggggtccatgggattcgaattgaattcattaatgaaaaaggtgtcaaacgcacagccacatat

SEQ ID NO: 386026 - DNA, 120 bp, Artificial Sequence
  ENSG00000144233_8 (sequence is synthesized)
ttacctgaggttgctaaggaacaagactgggatcagatccagacaatagactccttgctcaggaaaggtggctttaaagctccaattaccagtgaattcagaaaaacgatcaaactcacc

SEQ ID NO: 386027 - DNA, 120 bp, Artificial Sequence
  ENSG00000144233_9 (sequence is synthesized)
aggtaccgaagtgagaaggtgacaatcagttacgcagagtatattgcttcccgacagcactgtttccagaacggcactcttcatgccccgcccctctacaatcattactcctgacacacg

SEQ ID NO: 386028 - DNA, 120 bp, Artificial Sequence
  ENSG00000144233_10 (sequence is synthesized)
gctgcatgaccagtcccacccccccgtggccaccaatggctatgacatcattggagcagatgcctcctcttcctggtccagttacttctattactgcaccattttatgatgctagcttcc

SEQ ID NO: 386029 - DNA, 120 bp, Artificial Sequence
  ENSG00000144233_11 (sequence is synthesized)
gttgccaagtctgcctcccgctgactgagggagggtagggttaccttgaacgaaacagaacttgaggggcccaagccttatctcagcctttcctcaatatggggttccgttggattgggg

SEQ ID NO: 386030 - DNA, 120 bp, Artificial Sequence
  ENSG00000144233_12 (sequence is synthesized)
ctcctccatgactagtgggaattactgtgggttcagaagacccttgtctggtatttgccacatggggtattggccacacgctggaagctgaaattgatgatccctgaaggttgaacccac

SEQ ID NO: 386031 - DNA, 120 bp, Artificial Sequence
  ENSG00000144233_13 (sequence is synthesized)
acacacccctgcagcctccccagatgaagtaggtgtattcccctggcagtctgggcaacggagaccaagaaacatttttaggttgttttaaattcctttttttaaacttccagtttattg

SEQ ID NO: 386032 - DNA, 120 bp, Artificial Sequence
  ENSG00000144233_14 (sequence is synthesized)
cgtaccaagagttgattacaacctccatgcttcataagcggacgccacgttagggttggacgtgggcaccacgagtcctttgaggctcctggacagagacccacatcaagatcggaagcc

SEQ ID NO: 386033 - DNA, 120 bp, Artificial Sequence
  ENSG00000144233_15 (sequence is synthesized)
ctttgggtggcgttgcagatctcattgctcagtaggccgtgaagattttcatcctcatcccactctcagttggattttctggcactcttcctgcattgagtctcctgattactgaacaga

SEQ ID NO: 386034 - DNA, 120 bp, Artificial Sequence
  ENSG00000144233_16 (sequence is synthesized)
gctccgtcatgtagcctgctgaggaatggaatggaatggagatgcccacaggaggtcctgatgtcatcactgcacgcaggtgtgagaggagagacctcttctgcaccgcctggctacctc

SEQ ID NO: 386035 - DNA, 120 bp, Artificial Sequence
  ENSG00000144233_17 (sequence is synthesized)
actcctctgctggtagcagtgcctatagctggacctaagttctcagaagcgtagatgtgcaaacaagcgattgagttgggctttaggaggacacatcataggagagaatccagggtctgt

SEQ ID NO: 386036 - DNA, 120 bp, Artificial Sequence
  ENSG00000144233_18 (sequence is synthesized)
aagctggttttcttttcaggtgacatcctgaggggcctgtaagcaggggagctcctttttctagtttgcctgtagaggtgggaagactgttggtgtttctgtcctttacaggacattagg

SEQ ID NO: 386037 - DNA, 120 bp, Artificial Sequence
  ENSG00000144233_19 (sequence is synthesized)
ctaggtctttcaaactttcatgtgacatatttccctttcccattgttgctgatttccaaatcgctgtcagcaattttttcctctctccttgcctattcttcactcatttggtggcaaagt

SEQ ID NO: 386038 - DNA, 120 bp, Artificial Sequence
  ENSG00000144233_20 (sequence is synthesized)
tcatagaactaggggacttggaagatgctttgaaaatattgttacaaaggcactgctaaaatgattcacagggagagtggccagttggaagaaggatcctaaggatgtgacactggtttt

SEQ ID NO: 386039 - DNA, 120 bp, Artificial Sequence
  ENSG00000144233_21 (sequence is synthesized)
caacaacatgcttagagaactcatgaagtggattgggtgtcaacccagtgaacatgtttttatttaatttattttttgaagtttatgtggtgatggtgtggctttccgaaatgggcaaat

SEQ ID NO: 386040 - DNA, 120 bp, Artificial Sequence
  ENSG00000144233_22 (sequence is synthesized)
attcagaagatcttttgcattttcttctgtcaggaatggggaaggggagtgggggcacaatctgagaaaggacacctgtgctgttctaggcatcgctggcaagtttgtgggaagggatgg

SEQ ID NO: 386041 - DNA, 120 bp, Artificial Sequence
  ENSG00000144233_23 (sequence is synthesized)
gcaagggtgagtgggtttgctccacaccgtcctgtgctgctcgagaggacctgggacgtgcgagggaaacgtgggtgacggtgcctaggctgcggcccttcactgctgtgctgggttcct

SEQ ID NO: 386042 - DNA, 120 bp, Artificial Sequence
  ENSG00000144233_24 (sequence is synthesized)
gcagcctgctacgtttcccttggcaatgtaaatgaagatggaggggtcgtttcgtgatttcctgctgctgagaataaatgtcttgttaaaaacgtggcaacggttactcttaggtgccat

SEQ ID NO: 386043 - DNA, 120 bp, Artificial Sequence
  ENSG00000144233_25 (sequence is synthesized)
ggatcgatgtcagggtggtcagctctggactaagccacccacctccaatttgtacaacagtattgatacatagggctacactcattactgttcaagtgttctatgttaagagttgtgttt

SEQ ID NO: 386044 - DNA, 120 bp, Artificial Sequence
  ENSG00000144233_26 (sequence is synthesized)
aatttctaaagattaaaaaaagcaaaaaaattggtgctaaaccttcacccctgagcacgctcagtgagactggtcatgcaagcatttacagtgccatgctcctcaagccgattttttctt

SEQ ID NO: 386045 - DNA, 81 bp, Artificial Sequence
  ENSG00000144233_27 (sequence is synthesized)
agcatttacagtgccatgctcctcaagccgattttttcttgtagaaatgttgccctatttgtcttctccaatgtatggtat

SEQ ID NO: 386046 - DNA, 120 bp, Artificial Sequence
  ENSG00000144233_28 (sequence is synthesized)
aatagaaaattttaaaacccgagaaatggggaaaaaaaaatcagtgcacaagaattgggctggttaggcccagcaccacactgaagtgggctcagtggtttttggagtgaagaagcctta

SEQ ID NO: 386047 - DNA, 120 bp, Artificial Sequence
  ENSG00000144233_29 (sequence is synthesized)
ctccctgcacattccctcatgctcccacacaagtccagcaatggaaatgcttgggttcctcttgctttgtcaggggactcaggagtcgaccaagggaaaccatttggccccgtgaggaat

SEQ ID NO: 386048 - DNA, 120 bp, Artificial Sequence
  ENSG00000144233_30 (sequence is synthesized)
gggcattgtcagtatccgtcctgaacggggcctagtcaggaagcggtctagaagtgtacggtcacggtcgcctcatgaaagtgtgtagcaggtggctctcaggaaaaataccaagtctgg

SEQ ID NO: 386049 - DNA, 120 bp, Artificial Sequence
  ENSG00000144233_31 (sequence is synthesized)
atcatccatgtggcagctttgcatagggagaggatagctccgaactggaactgaactgccttctctgcacgcttgaccaaagcagtgatgagggcggccagtacctgcggtgtgcgtggt

SEQ ID NO: 386050 - DNA, 120 bp, Artificial Sequence
  ENSG00000144233_32 (sequence is synthesized)
aggtttaaagaaaagggaatgttttctgctgagtgtttcctttgtccttgggctgctcgagctggacagtaggtaaccactgttttcaaggaccagcccaatttctctggcttggttcgg

SEQ ID NO: 386051 - DNA, 120 bp, Artificial Sequence
  ENSG00000144233_33 (sequence is synthesized)
agttcgtttcatccctagctgtgagtgccttttggtctggaaagttggcttgtctcataatacccacagctaggacattctctctgtaattatgaattgtccttgttttacattaaaaga

SEQ ID NO: 386052 - DNA, 120 bp, Artificial Sequence
  ENSG00000144233_34 (sequence is synthesized)
gaatgtctttgatcactagagtctgtcggtgttggattatttccactgtgagattcttaaaacttttttgcttcataataataaaacaactcatgttagagaccctttcaacatgaaagg

SEQ ID NO: 386053 - DNA, 120 bp, Artificial Sequence
  ENSG00000144233_35 (sequence is synthesized)
tttgtagttgagacattacatatattttattgtttataataaaaatcatctatacaaaagaagtcctgggtgttaatattttgcacaagatctgttttccatgatgtgttgacatctaca

SEQ ID NO: 386054 - DNA, 120 bp, Artificial Sequence
  ENSG00000144233_36 (sequence is synthesized)
atttcactaactgttgacgttattttctattgagattctggagcctagggagctatgtgttctttttgttcatttcgttcttacttccctgaagcaagagactatatggccttcagtgca

SEQ ID NO: 386055 - DNA, 120 bp, Artificial Sequence
  ENSG00000144233_37 (sequence is synthesized)
aagacttcagaccaattctttgtattacacttggttgcctcttggctatataacttctgagtgcaaatcattgaacactttaacgaagtattgtagagaataaatcataatggataaaaa

SEQ ID NO: 386056 - DNA, 120 bp, Artificial Sequence
  ENSG00000144278_0 (sequence is synthesized)
gaccaggcggcggcggctctgctgaggtgacaacgtgctagcagccctcgctcgctctgggcgcctcctcggcctcagcgtccgctctggccgcgctcgaggagcccttcagcccgccgc

SEQ ID NO: 386057 - DNA, 120 bp, Artificial Sequence
  ENSG00000144278_1 (sequence is synthesized)
tgcgctatgaaggcccctctctggggctggccgaggctggagccggctccctctgctcgcgggcaagtgtgaagagagaggcgcgggcgggagccggggctgcgcgcggcgctcgcgggc

SEQ ID NO: 386058 - DNA, 120 bp, Artificial Sequence
  ENSG00000144278_2 (sequence is synthesized)
cggcgcgggttccaggtgagcgcggactcggcgagccccgcactcggcgcggccggccggcgcctgctgggcttgatctgaggctgaatcccgtgtgtggaccgccgttccctcttcgcg

SEQ ID NO: 386059 - DNA, 120 bp, Artificial Sequence
  ENSG00000144278_3 (sequence is synthesized)
ggatcgttggccaggatagcagatgcatttttgtagaagcattttgaggatgaatgtttgcaaatcattttgaaattgccaagtgccacatacatggaatgtatcctgctttcatcttgg

SEQ ID NO: 386060 - DNA, 120 bp, Artificial Sequence
  ENSG00000144278_4 (sequence is synthesized)
agttcacctgtgtggcttggatttatcacagtagcatttgtcttcaatctgtgtgttaactagaaatcaaggaaagacatgaggagatttgtctactgcaaggtggttctagccacttcg

SEQ ID NO: 386061 - DNA, 120 bp, Artificial Sequence
  ENSG00000144278_5 (sequence is synthesized)
ctgatgtgggttcttgttgatgtcttcttactgctgtacttcagtgaatgtaacaaatgtgatgacaagaaggagagatctctgctgcctgcattgagggctgttatttcaagaaaccaa

SEQ ID NO: 386062 - DNA, 120 bp, Artificial Sequence
  ENSG00000144278_6 (sequence is synthesized)
gaagggccaggagaaatgggaaaagctgtgttgattcctaaagatgaccaggagaaaatgaaagagctgtttaaaatcaatcagtttaaccttatggccagtgatttgattgcccttaat

SEQ ID NO: 386063 - DNA, 120 bp, Artificial Sequence
  ENSG00000144278_7 (sequence is synthesized)
agaagtctgccagatgtaagattagaaggatgtaagacaaaagtctaccctgatgaacttccaaacacaagtgtagtcattgtgtttcataatgaagcttggagcactctccttagaact

SEQ ID NO: 386064 - DNA, 120 bp, Artificial Sequence
  ENSG00000144278_8 (sequence is synthesized)
gtttacagtgtgataaatcgttccccacactatctactctcagaggtcatcttggtagatgatgccagtgaaagagattttctcaagttgacattagagaattacgtgaaaaatttagaa

SEQ ID NO: 386065 - DNA, 120 bp, Artificial Sequence
  ENSG00000144278_9 (sequence is synthesized)
gtgccagtaaaaattattaggatggaagaacgctctgggttaatacgtgcccgtcttcgaggagcagctgcttcaaaagggcaggtcataacttttcttgatgcacactgtgaatgcacg

SEQ ID NO: 386066 - DNA, 120 bp, Artificial Sequence
  ENSG00000144278_10 (sequence is synthesized)
ttaggatggctggagcctttgctggcaagaataaaggaagacaggaaaacggttgtctgccctatcattgatgtgattagtgatgatacttttgaatatatggctgggtcagacatgact

SEQ ID NO: 386067 - DNA, 120 bp, Artificial Sequence
  ENSG00000144278_11 (sequence is synthesized)
tatgggggttttaactggaaactgaatttccgctggtatcctgttccccaaagagaaatggacaggaggaaaggagacagaacattacctgtcaggacccctactatggctggtggccta

SEQ ID NO: 386068 - DNA, 120 bp, Artificial Sequence
  ENSG00000144278_12 (sequence is synthesized)
ttttctattgacagaaactactttgaagagataggaacttacgatgcaggaatggatatctggggtggagagaatcttgaaatgtcttttaggatttggcaatgtggaggctccttggag

SEQ ID NO: 386069 - DNA, 120 bp, Artificial Sequence
  ENSG00000144278_13 (sequence is synthesized)
attgttacttgctcccatgttggtcatgtttttcggaaggcaactccatacacttttcctggtggcactggtcatgtcatcaacaagaacaacaggagactggcagaagtttggatggat

SEQ ID NO: 386070 - DNA, 120 bp, Artificial Sequence
  ENSG00000144278_14 (sequence is synthesized)
gaatttaaagatttcttctacatcatatccccaggtgttgtcaaagtggattatggagatgtgtcagtcagaaaaacactaagagaaaatctgaagtgtaagcccttttcttggtaccta

SEQ ID NO: 386071 - DNA, 120 bp, Artificial Sequence
  ENSG00000144278_15 (sequence is synthesized)
gaaaacatctatccggactcccagatcccaagacgttattactcacttggtgagataagaaatgttgaaaccaatcagtgtttagacaacatgggccgcaaggaaaatgaaaaagtgggt

SEQ ID NO: 386072 - DNA, 120 bp, Artificial Sequence
  ENSG00000144278_16 (sequence is synthesized)
atattcaactgtcatggtatgggaggaaatcaggtattttcttacactgctgacaaagaaatccgaaccgatgacttgtgcttggatgtttctagactcaatggacctgtaatcatgtta

SEQ ID NO: 386073 - DNA, 120 bp, Artificial Sequence
  ENSG00000144278_17 (sequence is synthesized)
aaatgccaccatatgagaggaaatcagttatgggaatatgatgctgagagactcacgttgcgacatgttaacagtaaccaatgtctcgatgaaccttctgaagaagacaaaatggtgcct

SEQ ID NO: 386074 - DNA, 120 bp, Artificial Sequence
  ENSG00000144278_18 (sequence is synthesized)
acaatgcaggactgtagtggaagcagatcccaacagtggctgctaaggaacatgaccttgggcacatgaagatcatgtcctccaagccatgaaagtgtctacgcttttgtttttccatta

SEQ ID NO: 386075 - DNA, 120 bp, Artificial Sequence
  ENSG00000144278_19 (sequence is synthesized)
tttcaattgggggaaaatattaactttgctgaattgaaagttttaaaaatccttttagtattctaaaacacaattgtttctaattcgtttctagaaatgtttgcttatttccctactaaa

SEQ ID NO: 386076 - DNA, 120 bp, Artificial Sequence
  ENSG00000144278_20 (sequence is synthesized)
atttgtatctgatcaaagcacataagaatataaataatagcaaactactattaaacaacagaacaacttgtaaaacaaattgtgtttgctttaagaaaaatgtttattgcactcatgtca

SEQ ID NO: 386077 - DNA, 120 bp, Artificial Sequence
  ENSG00000144278_21 (sequence is synthesized)
tagggttaattggaggttattttatttttggttgtcatggtgattgaaagagataatgtaaatgccttataaaatcttcattatgaaatattatcagttgctttataaactcactctttt

SEQ ID NO: 386078 - DNA, 120 bp, Artificial Sequence
  ENSG00000144278_22 (sequence is synthesized)
tatggatccttcatggaaacatgtttgatttctgtgtctacaacagggccacatattaaattacttctgaatggtgaattcatcttacaaaatgttccaagttttggacaaggaaaaaca

SEQ ID NO: 386079 - DNA, 120 bp, Artificial Sequence
  ENSG00000144278_23 (sequence is synthesized)
ttcatggagcctttacagaagcatcacatttaaaccaatgtgaattcaaaaaagagaaggaaactttttaaattcaatttagagtacataaaaaaagaaatccgcgaagcattgagggga

SEQ ID NO: 386080 - DNA, 120 bp, Artificial Sequence
  ENSG00000144278_24 (sequence is synthesized)
acaagatgagtctaatccgcagcacttcgatcactgtgagagaactcaaagtgggttgcaatcattcctaacacaggctgaaactaaacaatcttgctcctagagtttatgttggatact

SEQ ID NO: 386081 - DNA, 120 bp, Artificial Sequence
  ENSG00000144278_25 (sequence is synthesized)
caattcttaaccaaaatcttggtctccacaaactctaccatcccttttctcttcactctatagacagtggcatgccattgatgctgtacagaattgcaggtgaaagggagaattttagac

SEQ ID NO: 386082 - DNA, 120 bp, Artificial Sequence
  ENSG00000144278_26 (sequence is synthesized)
ttaatttttaactctattgcacttaaagattttagttaggttaccactgtcattttcattttctatgttaaagaatacctttcagtgctgtgctccagtatctaaaaattttatcaccag

SEQ ID NO: 386083 - DNA, 120 bp, Artificial Sequence
  ENSG00000144278_27 (sequence is synthesized)
gggaataaactcaatacacattcattaaacttttgttgtaattaaactgctatatattgtttgccatatattatggcccaaggaatatagttataatcaggctacattcacattttcttt

SEQ ID NO: 386084 - DNA, 120 bp, Artificial Sequence
  ENSG00000144278_28 (sequence is synthesized)
tctcatcttaaaaccctttatgttcaaaatacattagcagaggccatgaaagtgaaaaaaaatcagatttttgctagtaagtttttatatttgacatcattttaaatgctcaaagagttg

SEQ ID NO: 386085 - DNA, 120 bp, Artificial Sequence
  ENSG00000144278_29 (sequence is synthesized)
ccctatatatgcatgttatccattataaatgcactcagcagctaagagaaatttgagaggaaaagtggaagaagtgttttctggagcagaagattccacttctttggtcctcatctttac

SEQ ID NO: 386086 - DNA, 120 bp, Artificial Sequence
  ENSG00000144278_30 (sequence is synthesized)
ttaaaaagctcttatagaaaggattaatcattttgactgcatacaaactatgtctctgacatgcacatacactgctttataatgaaaatgaggacactttctgatggtcagtaaaatctt

SEQ ID NO: 386087 - DNA, 120 bp, Artificial Sequence
  ENSG00000144278_31 (sequence is synthesized)
aaatgatttttgccactggtattccttcctcttttgactttttattggtacaactgtagggaagaatctacaacctggagcatttcaggtttgctctttaaatatagacacccctcacca

SEQ ID NO: 386088 - DNA, 120 bp, Artificial Sequence
  ENSG00000144278_32 (sequence is synthesized)
tgagctctctgtgaatccgtgaatttcctaaaattgtaagcaaaatgttgaatatcagggcatttttttttctgaggtgggagtatgtcactcacagcaaacttggaaagaaggctatga

SEQ ID NO: 386089 - DNA, 120 bp, Artificial Sequence
  ENSG00000144278_33 (sequence is synthesized)
ctcccaagaggcagtgaaccattgccttaaattaatagcagcctctcaagtccattgaggcctcatgtaaaattcccatttttcatctttacactccttttctcccctcatttcctcttc

SEQ ID NO: 386090 - DNA, 120 bp, Artificial Sequence
  ENSG00000144278_34 (sequence is synthesized)
tccttactaaggtaaaaagaccctgcacagcattattacttaagttgaaaaagcttcaactctcaaggactcatgtataccatatgttccacttattgctttgttagtcaaaatgcatgt

SEQ ID NO: 386091 - DNA, 120 bp, Artificial Sequence
  ENSG00000144278_35 (sequence is synthesized)
tatgtagaaaatggtcaatggcaaatttttataaatacagctaccccatcaaagctgaacttgaaacgttttagcagaattttaaatatgtgaaagttcattgtggtcatggtgagaaaa

SEQ ID NO: 386092 - DNA, 120 bp, Artificial Sequence
  ENSG00000144278_36 (sequence is synthesized)
ctaaaactacatgagtttcatgttagaaaagaatttttaaacaatcttcagatggcttgaacacgtgccattatagtatctaacaaaaagtggcataaaatattacaaaacatccaacac

SEQ ID NO: 386093 - DNA, 120 bp, Artificial Sequence
  ENSG00000144278_37 (sequence is synthesized)
tagaaagcaatgactaacatttaatttgtttacaaaaatgtttattgtcttcagtacaaaaagttaaaaccatgattggattcataatgcacttgtcttatcccttatttatggagctag

SEQ ID NO: 386094 - DNA, 120 bp, Artificial Sequence
  ENSG00000144278_38 (sequence is synthesized)
actgacatatttcaaaccaatctcttctgtggtcttctccatctcagttaatgcaacttcaaccttccagatgctcaggtcaaaaactgaaagttgcttttgactcctctatttctgttt

SEQ ID NO: 386095 - DNA, 120 bp, Artificial Sequence
  ENSG00000144278_39 (sequence is synthesized)
caactctcgtctaatccaacagcaaatccccttgatgctacctttgaaatataactagaaaagaatgacttgccaccatatccactaggtgtcactacctctaacctttttaatcgcaat

SEQ ID NO: 386096 - DNA, 120 bp, Artificial Sequence
  ENSG00000144278_40 (sequence is synthesized)
atgcttattatttagttccctaatttcccagtccttgtcttgaacaatcttttctcagtacaacagccatagtgattctgttaaccatgaatttgattgtgtcacttccctgctcacaat

SEQ ID NO: 386097 - DNA, 120 bp, Artificial Sequence
  ENSG00000144278_41 (sequence is synthesized)
cttccaatgacttctccctccggtggccttcaaggtcctttatgagtgttacccctctacacgtccacaccactcaccacacatacatacacatgcacacacacacacatgcaattctac

SEQ ID NO: 386098 - DNA, 120 bp, Artificial Sequence
  ENSG00000144278_42 (sequence is synthesized)
ctttttctaacaccatctcttatctctcattattctgcctcttacttaccctattatggctcccaagaaagttcctgctttagtgttttgttccctctgccccagagagctccccttagt

SEQ ID NO: 386099 - DNA, 120 bp, Artificial Sequence
  ENSG00000144278_43 (sequence is synthesized)
gatctcagttcaaatattatcttatcagtaagacaaacccttctcccatctgccttccctatcccctgtacctgacaatctatgagtttgcttctttatttctgtctatacttccccctc

SEQ ID NO: 386100 - DNA, 120 bp, Artificial Sequence
  ENSG00000144278_44 (sequence is synthesized)
cccagccccaaacatgcccatcacatgccctagaaggtaagtcccatgaaggcaggggctttgtcagttttgttcatttggtatttctggcatatatattctctaaatatttcttgaatt

SEQ ID NO: 386101 - DNA, 120 bp, Artificial Sequence
  ENSG00000144278_45 (sequence is synthesized)
aatgaactgaaaaatgtgtgttaaagttgctaagtgtaactgtatcatactttttttgtattttaaattttaaaataaaggctaatatatttagacaggatttccaaaaactttgtcttc

SEQ ID NO: 386102 - DNA, 120 bp, Artificial Sequence
  ENSG00000144278_46 (sequence is synthesized)
aaattttaattttcttcctaatattcttcacattaaactatggactctaattttctggataaaatatcctgccttatggaaatgaaatatgaaattttattaaaatgctgctatattaca

SEQ ID NO: 386103 - DNA, 120 bp, Artificial Sequence
  ENSG00000144278_47 (sequence is synthesized)
atgggaatatgatgctgagtcttgtctctcagtgaacaaagtagctgatggctcccagcatcctactgtggaaacctgtaatgatagcactttgcaaaaatggctactaagaaactatac

SEQ ID NO: 386104 - DNA, 120 bp, Artificial Sequence
  ENSG00000144278_48 (sequence is synthesized)
aggtcaatgatactgttcatgataggaacccagcaaggcgaaaagtaataaaatagctctgagactaagcaaggctctgctactccaactgatggacagttaattacctgagcataaaac

SEQ ID NO: 386105 - DNA, 120 bp, Artificial Sequence
  ENSG00000144278_49 (sequence is synthesized)
agtagaaattgcatgttgcctaggatgattgatttattactgtctttgtacttgattttgtcattattcgttattttctttgtcaaacagacccacactcttcttcatataatcacccag

SEQ ID NO: 386106 - DNA, 120 bp, Artificial Sequence
  ENSG00000144278_50 (sequence is synthesized)
ttgttggaatatccagagaaaaatggaaacagtgtcatgaagcctcaaaagatggaatctatccagctactttggttttgtttacttcttagagactcacgttgcgacatgttaacagta

SEQ ID NO: 386107 - DNA, 120 bp, Artificial Sequence
  ENSG00000144278_51 (sequence is synthesized)
tcagcttcatgttttagagggaaaatattgttaaaactatcagtggagaccatggctcacatgttaataactataaactgagcttaataaataaatgtacactcaaatctagaactaatt

SEQ ID NO: 386108 - DNA, 120 bp, Artificial Sequence
  ENSG00000144278_52 (sequence is synthesized)
tggctattttattgtcccaaggatcttaaaggagagctgaaaaattaaaataaaaagagcaacactttcagtgtgcctacagttaatgaagatatccaaatattttagacacatctcatt

SEQ ID NO: 386109 - DNA, 120 bp, Artificial Sequence
  ENSG00000144283_0 (sequence is synthesized)
gcgccgccgcggcacttttttaattttttcgggtgccgcagcggcgacccctcggcgccgatgtccctgatccctggagcgacgacggccgctgcctaagctggaaagaggaatgccagc

SEQ ID NO: 386110 - DNA, 120 bp, Artificial Sequence
  ENSG00000144283_1 (sequence is synthesized)
tcctgagcaggcctcattggtggaggaggggcaaccacagacccgccaggaagctgcctccactggcccaggcatggaacccgagaccacagccaccactattctagcatccgtgaagga

SEQ ID NO: 386111 - DNA, 120 bp, Artificial Sequence
  ENSG00000144283_2 (sequence is synthesized)
gcaggagcttcagtttcagcgactcacccgagaactggaagtggaaaggcagattgttgccagtcagctagaaagatgtaggcttggagcagaatcaccaagcatcgccagcaccagctc

SEQ ID NO: 386112 - DNA, 120 bp, Artificial Sequence
  ENSG00000144283_3 (sequence is synthesized)
aactgagaagtcatttccttggagatcaacagacgtgccaaatactggtgtaagcaaacctagagtttctgacgctgtccagcccaacaactatctcatcaggacagagccagaacaagg

SEQ ID NO: 386113 - DNA, 120 bp, Artificial Sequence
  ENSG00000144283_4 (sequence is synthesized)
aaccctctattcaccagaacagacatctctccatgaaagtgagggatcattgggtaactcaagaagttcaacacaaatgaattcttattccgacagtggataccaggaagcagggagttt

SEQ ID NO: 386114 - DNA, 120 bp, Artificial Sequence
  ENSG00000144283_5 (sequence is synthesized)
ccacaacagccagaacgtgagcaaggcagacaacagacagcagcattcattcataggatcaactaacaaccatgtggtgaggaattcaagagctgaaggacaaacactggttcagccatc

SEQ ID NO: 386115 - DNA, 120 bp, Artificial Sequence
  ENSG00000144283_6 (sequence is synthesized)
agtagccaatcgggccatgagaagagttagttcagttccatctagagcacagtctccttcttatgttatcagcacaggcgtgtctccttcaagggggtctctgagaacttctctgggtag

SEQ ID NO: 386116 - DNA, 120 bp, Artificial Sequence
  ENSG00000144283_7 (sequence is synthesized)
tggatttggctctccgtcagtgaccgacccccgacctctgaaccccagtgcatattcctccaccacattacctgctgcacgggcagcctctccgtactcacagagacccgcctccccaac

SEQ ID NO: 386117 - DNA, 120 bp, Artificial Sequence
  ENSG00000144283_8 (sequence is synthesized)
agctatacggcggattgggtcagtcacctcccggcagacctccaatcccaacggaccaacccctcaataccaaaccaccgccagagtggggtccccactgaccctgacggatgcacagac

SEQ ID NO: 386118 - DNA, 120 bp, Artificial Sequence
  ENSG00000144283_9 (sequence is synthesized)
tcgagtagcttccccatcccaaggccaggtggggtcgtcgtcccccaaacgctcagggatgaccgccgtaccacagcatctgggaccttcactgcaaaggactgttcatgacatggagca

SEQ ID NO: 386119 - DNA, 120 bp, Artificial Sequence
  ENSG00000144283_10 (sequence is synthesized)
attcggacagcagcagtatgacatttatgagaggatggttccacccaggccagacagcctgacaggcttacggagttcctatgctagtcagcatagtcagcttgggcaagaccttcgttc

SEQ ID NO: 386120 - DNA, 120 bp, Artificial Sequence
  ENSG00000144283_11 (sequence is synthesized)
tgccgtgtctcccgacttgcacattactcctatatatgaggggaggacctattacagcccagtgtaccgcagcccaaaccatggaactgtggagctccaaggatcgcagacggcgttgta

SEQ ID NO: 386121 - DNA, 120 bp, Artificial Sequence
  ENSG00000144283_12 (sequence is synthesized)
tcgcacaggttcagtaggtattggaaatctacaaaggacatccagccaacgaagtacccttacataccaaagaaataattatgctctgaacacaacagctacctacgcggagccctacag

SEQ ID NO: 386122 - DNA, 120 bp, Artificial Sequence
  ENSG00000144283_13 (sequence is synthesized)
gcctatacaataccgagtgcaagagtgcaattataacaggcttcagcatgcagtgccggctgatgatggcaccacaagatccccatcaatagacagcattcagaaggaccccagggagtt

SEQ ID NO: 386123 - DNA, 120 bp, Artificial Sequence
  ENSG00000144283_14 (sequence is synthesized)
tgcctggcgtgatcctgagttgcctgaggtcattcacatgcttcagcaccagttcccatctgttcaggcaaatgcagcggcctacctgcagcacctgtgctttggtgacaacaaagtgaa

SEQ ID NO: 386124 - DNA, 120 bp, Artificial Sequence
  ENSG00000144283_15 (sequence is synthesized)
gatggaggtgtgtaggttagggggaatcaagcatctggttgaccttctggaccacagagttttggaagttcagaagaatgcttgtggtgcccttcgaaacctcgtttttggcaagtctac

SEQ ID NO: 386125 - DNA, 120 bp, Artificial Sequence
  ENSG00000144283_16 (sequence is synthesized)
agatgaaaataaaatagcaatgaagaatgttggtgggatacctgccttgttgcgactgttgagaaaatctattgatgcagaagtaagggagcttgttacaggagttctttggaatttatc

SEQ ID NO: 386126 - DNA, 120 bp, Artificial Sequence
  ENSG00000144283_17 (sequence is synthesized)
ctcatgtgatgctgtaaaaatgacaatcattcgagatgctctctcaaccttaacaaacactgtgattgttccacattctggatggaataactcttcttttgatgatgatcataaaattaa

SEQ ID NO: 386127 - DNA, 120 bp, Artificial Sequence
  ENSG00000144283_18 (sequence is synthesized)
tcagacttcactagttctgcgtaacacgacaggttgcctaaggaacctcagctccgcgggggaagaagctcggaagcaaatgcggtcctgcgaggggctggtagactcactgttgtatgt

SEQ ID NO: 386128 - DNA, 120 bp, Artificial Sequence
  ENSG00000144283_19 (sequence is synthesized)
gatccacacgtgtgtgaacacatccgattacgacagcaagacggtggagaactgcgtgtgcaccctgaggaacctgtcctatcggctggagctggaggtgccccaggcccggttactggg

SEQ ID NO: 386129 - DNA, 120 bp, Artificial Sequence
  ENSG00000144283_20 (sequence is synthesized)
actgaacgaattggatgacttactaggaaaagagtctcccagcaaagactctgagccaagttgctgggggaagaagaagaaaaagaaaaagaggactccgcaagaagatcaatgggatgg

SEQ ID NO: 386130 - DNA, 120 bp, Artificial Sequence
  ENSG00000144283_21 (sequence is synthesized)
agttggtcctatcccaggactgtcgaagtcccccaaaggggttgagatgctgtggcacccatcggtggtaaaaccatatctgactcttctagcagaaagttccaacccagccaccttgga

SEQ ID NO: 386131 - DNA, 120 bp, Artificial Sequence
  ENSG00000144283_22 (sequence is synthesized)
aggctctgcagggtctctccagaacctctctgctggcaactggaagtttgcagcatatatccgggcggccgtccgaaaagaaaaggggctccccatccttgtggagcttctgagaatgga

SEQ ID NO: 386132 - DNA, 120 bp, Artificial Sequence
  ENSG00000144283_23 (sequence is synthesized)
taacgatagagttgtttcttccgtggcaacagccttgaggaatatggcactagatgttcgcaacaaggagctcataggcaaatacgccatgcgagacctggtcaaccggctccccggcgg

SEQ ID NO: 386133 - DNA, 120 bp, Artificial Sequence
  ENSG00000144283_24 (sequence is synthesized)
caatggccccagtgtcttgtctgatgagaccatggcagccatctgctgtgctctgcacgaggtcaccagcaaaaacatggagaacgcaaaagccctggccgactcaggaggcatagagaa

SEQ ID NO: 386134 - DNA, 120 bp, Artificial Sequence
  ENSG00000144283_25 (sequence is synthesized)
gctggtgaacataaccaaaggcaggggcgacagatcatctctgaaagtggtgaaggcagcagcccaggtcttgaatacattatggcaatatcgggacctccggagcatttataaaaagga

SEQ ID NO: 386135 - DNA, 120 bp, Artificial Sequence
  ENSG00000144283_26 (sequence is synthesized)
tgggtggaatcagaaccattttattacacctgtgtcgacattggagcgagaccgattcaaatcacatccttccttgtctaccaccaaccaacagatgtcacccatcattcagtcagtcgg

SEQ ID NO: 386136 - DNA, 120 bp, Artificial Sequence
  ENSG00000144283_27 (sequence is synthesized)
cagcacctcttcctcaccagcactgttaggaatcagagaccctcgctctgaatacgataggacccagccacctatgcagtattacaatagccaaggggatgccacacataaaggcctgta

SEQ ID NO: 386137 - DNA, 120 bp, Artificial Sequence
  ENSG00000144283_28 (sequence is synthesized)
ccctggctccagcaaaccttcaccaatttacatcagttcctattcctcaccagcaagagaacaaaatagacggctacagcatcaacagctgtattatagtcaagatgactccaacagaaa

SEQ ID NO: 386138 - DNA, 120 bp, Artificial Sequence
  ENSG00000144283_29 (sequence is synthesized)
gaactttgatgcatacagattgtatttgcagtctcctcatagctatgaagatccttattttgatgaccgagttcactttccagcttctactgattactcaacacagtatggactgaaatc

SEQ ID NO: 386139 - DNA, 120 bp, Artificial Sequence
  ENSG00000144283_30 (sequence is synthesized)
gaccacaaattatgtagacttttattccactaaacgaccttcttatagagcagaacagtacccagggtccccagactcatgggtgtagcatcaagatgcccaacagaggaactctttctt

SEQ ID NO: 386140 - DNA, 120 bp, Artificial Sequence
  ENSG00000144283_31 (sequence is synthesized)
tctaaccttgttcagattgaggtgaaaagtccatcttgctgatttgatgattgaaatgtgaaagtgaagtggaaggaatgaatgaagtgtgttttttttttcttttttgaggaattatca

SEQ ID NO: 386141 - DNA, 120 bp, Artificial Sequence
  ENSG00000144283_32 (sequence is synthesized)
gggaagtgaggaaatgtttgggagaggactttctaagctctatttaggtgttagatctaattacttatagattctgtagtctggtgaaggtgtgggtgacgtgatgagaggtttgagaaa

SEQ ID NO: 386142 - DNA, 120 bp, Artificial Sequence
  ENSG00000144283_33 (sequence is synthesized)
tgggtgaaatgaaatgggggatatgtaggtcaaatcaaattaaagatgatttttttaatgtgaataaagttatgttctgatagtttgtacagaaaaaataaaatggatgcccatgtttta

SEQ ID NO: 386143 - DNA, 120 bp, Artificial Sequence
  ENSG00000144283_34 (sequence is synthesized)
ttgctattactaaatgtcaagattgtatgctattatgtcttgtaaatttcttttgttggtgtaaatatggaaatgccacattggttaagtgccatcatttgtaatgcaatgtgtcacttg

SEQ ID NO: 386144 - DNA, 120 bp, Artificial Sequence
  ENSG00000144283_35 (sequence is synthesized)
aaaagagatttgaagaaactgacaacttcaaaaacaaatgagaagcccaaggaactgtgagcaattaaaagcaaaccgcgacaccctttgtctccaccacacatagtgtactttggaagc

SEQ ID NO: 386145 - DNA, 120 bp, Artificial Sequence
  ENSG00000144283_36 (sequence is synthesized)
acaacgtccaggctggtaccgcagcgccatgcccattcctcgcctcattcataggacacttcactgccattttctattcacataaaagaaaaataaatgtggaaatttcatccttggaaa

SEQ ID NO: 386146 - DNA, 120 bp, Artificial Sequence
  ENSG00000144283_37 (sequence is synthesized)
attctttttaaattttctgtatgtatatggaaaagcagatttaataaacacaaatctaactgcatgttggaaacagcttaaatatatccaactattttggacttttcctagttttatata

SEQ ID NO: 386147 - DNA, 120 bp, Artificial Sequence
  ENSG00000144283_38 (sequence is synthesized)
tactttgtgagatggaccacaccaaagaattaagctatgaactttccttctctgacaatctaggtatttttatttcttggaatctatttcaaatctagtacccttcacagttttatcatg

SEQ ID NO: 386148 - DNA, 120 bp, Artificial Sequence
  ENSG00000144283_39 (sequence is synthesized)
tttttctatatggcagcccggccataactaaattgatataactaaattgataccttttttaggcatcatttttaagaactcagtaacttcataagaacagtggttgggcatttatttggt

SEQ ID NO: 386149 - DNA, 120 bp, Artificial Sequence
  ENSG00000144283_40 (sequence is synthesized)
tggcaccaatataataaaacaaattctaaattatgatcttgttgagtaattcctggattaggaatggggtaggggaaagaagccccacagtagggtaggcagaggtccccatagcaccac

SEQ ID NO: 386150 - DNA, 120 bp, Artificial Sequence
  ENSG00000144283_41 (sequence is synthesized)
acagcattacttgggagcttttctccatctgtggaggcaatgagggacaccaggcccaaagtctgaggccttctcaggtcttgcagtttccacccttcagtcctagctcctggatctttg

SEQ ID NO: 386151 - DNA, 120 bp, Artificial Sequence
  ENSG00000144283_42 (sequence is synthesized)
ttggtgtaaatatggaaatgccacattggttaagtgccatcatggaaaactaggaactagtttacctgtagctgtactaggaaaactaggaactaacgcccatggcaagtcaaacccaga

SEQ ID NO: 386152 - DNA, 120 bp, Artificial Sequence
  ENSG00000144283_43 (sequence is synthesized)
agtgttgtcttagctcaatataccctgcaagtgtaatacaaatcgcagattaaaacatttgtacttatatttgtgagtatatggaaagacacccaagagaaaactgcgttttcttgccga

SEQ ID NO: 386153 - DNA, 120 bp, Artificial Sequence
  ENSG00000144283_44 (sequence is synthesized)
atggacagcagcccaagatgagcatccaaagtgaaatggaaataccagtgcgagcatgaaagttcctaagatctgcaagccgggagcccttctggggtgccttctgaagaacactcgagc

SEQ ID NO: 386154 - DNA, 120 bp, Artificial Sequence
  ENSG00000144283_45 (sequence is synthesized)
cagcttgcggagtcgactgcccagctactgagccctggctgcctcatacctggcggagctcagcagacagcccttgttagatggcagaggtcgccagatgttcctgaggaactggcatca

SEQ ID NO: 386155 - DNA, 120 bp, Artificial Sequence
  ENSG00000144283_46 (sequence is synthesized)
ggacttctgggacgtaaccacttcagtttccaatcactgacttccctgaacctggtatcttcagatctgggttgaagctgaaggctcagttggggaatcaggaaaacaagggaatcggag

SEQ ID NO: 386156 - DNA, 120 bp, Artificial Sequence
  ENSG00000144283_47 (sequence is synthesized)
ccagcccaagccaactgacaataactttcttttagtgactgcattagtttggggtaatgctgtaacaggcagcatttcaaaaacggatccaaatttgggttgaaaataactcacctgggt

SEQ ID NO: 386157 - DNA, 120 bp, Artificial Sequence
  ENSG00000144283_48 (sequence is synthesized)
ctccaatcagacctaacagagccagaaagaggcctgtacacggggactgggcagaagatctaatgccgtttaagactcctcccttgagaccagagaaaagaaactgcagacacagcctga

SEQ ID NO: 386158 - DNA, 120 bp, Artificial Sequence
  ENSG00000144283_49 (sequence is synthesized)
ttgcttttcccggcgattcctctccccggtctcccgtacgcgcagcgcacgacctctgcccacgctgggctgttcggattcagagctcccagccccgaacttgagcgccgcgctgagccc

SEQ ID NO: 386159 - DNA, 120 bp, Artificial Sequence
  ENSG00000144283_50 (sequence is synthesized)
tgctggacgccctcgcggcggcttccccgctgcctgccgccgcgcgccccaagtcgccctcgacaccactgggcgcccgccctcctcagcactcggggccggctgtctgtccttctagcc

SEQ ID NO: 386160 - DNA, 120 bp, Artificial Sequence
  ENSG00000144283_51 (sequence is synthesized)
ccagatcctgcaccttggtcccctccccgtcttcccacgcccctgctgcccgcgcggtcttgcgtttgtccccgaagtcctgtactccttgccggtcctgcccacccctctgcctagtgc

SEQ ID NO: 386161 - DNA, 120 bp, Artificial Sequence
  ENSG00000144283_52 (sequence is synthesized)
gcccctctctaccggccgcggatcctcacgctccacccctcccggctccccagcgccgagcctcgccgctgccctcctgcgccgccgcttcctcctctccctgccaggagttgaagcgga

SEQ ID NO: 386162 - DNA, 120 bp, Artificial Sequence
  ENSG00000144283_53 (sequence is synthesized)
gctgcggcacctccctggcggatctggtatccccgcccgctgccgaggctgccggccctctcccctggaccgctacccggagagcgagcggcggggccgggatttggctgcgtgttggct

SEQ ID NO: 386163 - DNA, 120 bp, Artificial Sequence
  ENSG00000144283_54 (sequence is synthesized)
gagtgcgacacaccgcgagcgcgggcagtggaggtgccgcggcggccgtggccgctcggggcgcagcggtagtcaggtgtgtgtgtacagcgggggacgcgcgctgccggctcctgggct

SEQ ID NO: 386164 - DNA, 120 bp, Artificial Sequence
  ENSG00000144283_55 (sequence is synthesized)
ggcgacagattgtgcaggaatgcgaggaatgcaccaggggcagagtccacacagcccgccgcggctgccctagcgccttccctccccagctctcgccgcgcagccagaggtcaccggagc

SEQ ID NO: 386165 - DNA, 120 bp, Artificial Sequence
  ENSG00000144283_56 (sequence is synthesized)
tgtacacctcagctctatacacaaaaatgtgtaactgtacccagttcatacattaagatccagaaagatctaacgaaaagtattgtttggcagcctgacttggtccagattcaaaggtaa

SEQ ID NO: 386166 - DNA, 120 bp, Artificial Sequence
  ENSG00000144283_57 (sequence is synthesized)
ttgaaccaggagatctgcagatgaaattgagaggagtaagcaagttggaaagggaagcttgctagatagacaaatgctgaacttggttttagacactcaaacactcagttaaatgacagt

SEQ ID NO: 386167 - DNA, 120 bp, Artificial Sequence
  ENSG00000144283_58 (sequence is synthesized)
tggcctcccaatcagaggtgtgatgcagtcttttagggaacaaaagaccatgtacagaaggcaaatgtcagcagggaaagacaccgctgaacatggctcaaaaggagggtggagttggga

SEQ ID NO: 386168 - DNA, 120 bp, Artificial Sequence
  ENSG00000144283_59 (sequence is synthesized)
gattgagaaggaggcagacatgggacttggggatatagttgtccccagggagggagttggggcatctgttgtcacgccaaggatctgcagtagtgagaagtgaggctcaagcatcatggg

SEQ ID NO: 386169 - DNA, 120 bp, Artificial Sequence
  ENSG00000144283_60 (sequence is synthesized)
tgcagtctgcacggcagcagccctgaagagaaacactgggccggagcctcaagcatttcggtcggcatgaagtcaaatcctcagcaggactgagaagggctctgcatcctgtcatctggg

SEQ ID NO: 386170 - DNA, 120 bp, Artificial Sequence
  ENSG00000144283_61 (sequence is synthesized)
tattccacaaacactctagaatcataattctctcttcagattgtttcaagttctcataaataaaaagtagttctttcatatttcccatttatttcctgtctgtagtgttcagtacagaag

SEQ ID NO: 386171 - DNA, 80 bp, Artificial Sequence
  ENSG00000144283_62 (sequence is synthesized)
tccggggctgagtccgcgtcgacgccggccgcggaggcggcaccatgggcaaggggtagaggggcaagttggccaccgcc

SEQ ID NO: 386172 - DNA, 120 bp, Artificial Sequence
  ENSG00000144283_63 (sequence is synthesized)
tttataaaagcagggagctggagcatcacacccttgtaccgccagtcctcatgtttatgccataccatcaaggctcatacagcagatgctgtagcccatggtggtgtgagctgccaggtt

SEQ ID NO: 386173 - DNA, 120 bp, Artificial Sequence
  ENSG00000144283_64 (sequence is synthesized)
aattttttcgggtgccgcagcggcgacccctcggcgccgatgtccctgatccctggagcgacgacggccgctgcctaagctggaaacgccgagcctcgccgctgccctcctgcgccgccg

SEQ ID NO: 386174 - DNA, 120 bp, Artificial Sequence
  ENSG00000144283_65 (sequence is synthesized)
ttggttctttctgacctgcggatcctgtcctcctcaggaggccactctccagatcaaagggcaagtctccaaagttacaggggcaaggacgtggcaacttaagaaaatatcctgagaacc

SEQ ID NO: 386175 - DNA, 120 bp, Artificial Sequence
  ENSG00000144283_66 (sequence is synthesized)
gtgagaacagagtggcttggtgtggtaaaggctttctctctggttcccctaggctcattctcagggtggtgcccatgctgctatttcctccaattctgtatccgcactagaatcagagcc

SEQ ID NO: 386176 - DNA, 120 bp, Artificial Sequence
  ENSG00000144283_67 (sequence is synthesized)
atgttcgcaacaaggagctcataggtatgttctggtgacaagatgagctgtaaatgtgagagcagctacaaaattcatgaaactcttcttttgattaataaatatatggcttgtaaaatc

SEQ ID NO: 386177 - DNA, 120 bp, Artificial Sequence
  ENSG00000144283_68 (sequence is synthesized)
tgctggtttgaagcagctttctgaagtagctcaacagttgccacccccttgagcagtagctacaaagagacaagcttagaaatttgccttctatcagcaagagaccattgtgcgtaacta

SEQ ID NO: 386178 - DNA, 120 bp, Artificial Sequence
  ENSG00000144283_69 (sequence is synthesized)
aaaatactcgaacgaaagtaacttgatttgtctacccaattttacgcattgatttacatttgctttcagcaattgacagtaatgttttataaatgaatcatttctgcaagtgacgttgca

SEQ ID NO: 386179 - DNA, 120 bp, Artificial Sequence
  ENSG00000144283_70 (sequence is synthesized)
ataaatgttagctttccccttataatgacatttgtccttttcttctttgccatgggttttgattttttcccctattattgtctctttgggggttttatttttaagagattgcatgccacc

SEQ ID NO: 386180 - DNA, 120 bp, Artificial Sequence
  ENSG00000144283_71 (sequence is synthesized)
ccagttgggtgtgtgatacagtctcttgaaaagccgcatttccaggcgcttggccagtggcctgggaagtagcctgtgcttgtattgagacagtcccccagcagcaaaccatgttccagt

SEQ ID NO: 386181 - DNA, 120 bp, Artificial Sequence
  ENSG00000144283_72 (sequence is synthesized)
cattccctttcctactttggggattgttgccttttctgcttgtttaaagtaaaacaagcatgtacttgtttgtatgtatgtatgtatgtagttgtacggtgggcacaaataaaaagaggg

SEQ ID NO: 386182 - DNA, 120 bp, Artificial Sequence
  ENSG00000144283_73 (sequence is synthesized)
ctgtatccaaataaatcatttctggctgctcactggcacagtccctttgctccgtcccctcctggctcgagcagtctctgtgttttccacatgcatcagaaccgtcagcccagtgtcact

SEQ ID NO: 386183 - DNA, 120 bp, Artificial Sequence
  ENSG00000144283_74 (sequence is synthesized)
ttgcaggggccacatcttctagactggctcatctcttaaattcaaaccagagaatggagatcaatttcatttacattttcatggagaagagtttgaataaatagcaaaaggtataatgtg

SEQ ID NO: 386184 - DNA, 120 bp, Artificial Sequence
  ENSG00000144285_0 (sequence is synthesized)
aatgtgcaggatgacaagatggagcaaacagtgcttgtaccaccaggacctgacagcttcaacttcttcaccagagaatctcttgcggctattgaaagacgcattgcagaagaaaaggca

SEQ ID NO: 386185 - DNA, 120 bp, Artificial Sequence
  ENSG00000144285_1 (sequence is synthesized)
aagaatcccaaaccagacaaaaaagatgacgacgaaaatggcccaaagccaaatagtgacttggaagctggaaagaaccttccatttatttatggagacattcctccagagatggtgtca

SEQ ID NO: 386186 - DNA, 120 bp, Artificial Sequence
  ENSG00000144285_2 (sequence is synthesized)
gagcccctggaggacctggacccctactatatcaataagaaaacttttatagtattgaataaagggaaggccatcttccggttcagtgccacctctgccctgtacattttaactcccttc

SEQ ID NO: 386187 - DNA, 120 bp, Artificial Sequence
  ENSG00000144285_3 (sequence is synthesized)
aatcctcttaggaaaatagctattaagattttggtacattcattattcagcatgctaattatgtgcactattttgacaaactgtgtgtttatgacaatgagtaaccctcctgattggaca

SEQ ID NO: 386188 - DNA, 120 bp, Artificial Sequence
  ENSG00000144285_4 (sequence is synthesized)
aagaatgtagaatacaccttcacaggaatatatacttttgaatcacttataaaaattattgcaaggggattctgtttagaagattttactttccttcgggatccatggaactggctcgat

SEQ ID NO: 386189 - DNA, 120 bp, Artificial Sequence
  ENSG00000144285_5 (sequence is synthesized)
ttcactgtcattacatttgcgtacgtcacagagtttgtggacctgggcaatgtctcggcattgagaacattcagagttctccgagcattgaagacgatttcagtcattccaggcctgaaa

SEQ ID NO: 386190 - DNA, 120 bp, Artificial Sequence
  ENSG00000144285_6 (sequence is synthesized)
accattgtgggagccctgatccagtctgtgaagaagctctcagatgtaatgatcctgactgtgttctgtctgagcgtatttgctctaattgggctgcagctgttcatgggcaacctgagg

SEQ ID NO: 386191 - DNA, 120 bp, Artificial Sequence
  ENSG00000144285_7 (sequence is synthesized)
aataaatgtatacaatggcctcccaccaatgcttccttggaggaacatagtatagaaaagaatataactgtgaattataatggtacacttataaatgaaactgtctttgagtttgactgg

SEQ ID NO: 386192 - DNA, 120 bp, Artificial Sequence
  ENSG00000144285_8 (sequence is synthesized)
aagtcatatattcaagattcaagatatcattatttcctggagggttttttagatgcactactatgtggaaatagctctgatgcaggccaatgtccagagggatatatgtgtgtgaaagct

SEQ ID NO: 386193 - DNA, 120 bp, Artificial Sequence
  ENSG00000144285_9 (sequence is synthesized)
ggtagaaatcccaattatggctacacaagctttgataccttcagttgggcttttttgtccttgtttcgactaatgactcaggacttctgggaaaatctttatcaactgacattacgtgct

SEQ ID NO: 386194 - DNA, 120 bp, Artificial Sequence
  ENSG00000144285_10 (sequence is synthesized)
gctgggaaaacgtacatgatattttttgtattggtcattttcttgggctcattctacctaataaatttgatcctggctgtggtggccatggcctacgaggaacagaatcaggccaccttg

SEQ ID NO: 386195 - DNA, 120 bp, Artificial Sequence
  ENSG00000144285_11 (sequence is synthesized)
gaagaagcagaacagaaagaggccgaatttcagcagatgattgaacagcttaaaaagcaacaggaggcagctcagcaggcagcaacggcaactgcctcagaacattccagagagcccagt

SEQ ID NO: 386196 - DNA, 120 bp, Artificial Sequence
  ENSG00000144285_12 (sequence is synthesized)
gcagcaggcaggctctcagacagctcatctgaagcctctaagttgagttccaagagtgctaaggaaagaagaaatcggaggaagaaaagaaaacagaaagagcagtctggtggggaagag

SEQ ID NO: 386197 - DNA, 120 bp, Artificial Sequence
  ENSG00000144285_13 (sequence is synthesized)
aaagatgaggatgaattccaaaaatctgaatctgaggacagcatcaggaggaaaggttttcgcttctccattgaagggaaccgattgacatatgaaaagaggtactcctccccacaccag

SEQ ID NO: 386198 - DNA, 120 bp, Artificial Sequence
  ENSG00000144285_14 (sequence is synthesized)
tctttgttgagcatccgtggctccctattttcaccaaggcgaaatagcagaacaagccttttcagctttagagggcgagcaaaggatgtgggatctgagaacgacttcgcagatgatgag

SEQ ID NO: 386199 - DNA, 120 bp, Artificial Sequence
  ENSG00000144285_15 (sequence is synthesized)
cacagcacctttgaggataacgagagccgtagagattccttgtttgtgccccgacgacacggagagagacgcaacagcaacctgagtcagaccagtaggtcatcccggatgctggcagtg

SEQ ID NO: 386200 - DNA, 120 bp, Artificial Sequence
  ENSG00000144285_16 (sequence is synthesized)
tttccagcgaatgggaagatgcacagcactgtggattgcaatggtgtggtttccttggttggtggaccttcagttcctacatcgcctgttggacagcttctgccagagggaacaaccact

SEQ ID NO: 386201 - DNA, 120 bp, Artificial Sequence
  ENSG00000144285_17 (sequence is synthesized)
gaaactgaaatgagaaagagaaggtcaagttctttccacgtttccatggactttctagaagatccttcccaaaggcaacgagcaatgagtatagccagcattctaacaaatacagtagaa

SEQ ID NO: 386202 - DNA, 120 bp, Artificial Sequence
  ENSG00000144285_18 (sequence is synthesized)
gaacttgaagaatccaggcagaaatgcccaccctgttggtataaattttccaacatattcttaatctgggactgttctccatattggttaaaagtgaaacatgttgtcaacctggttgtg

SEQ ID NO: 386203 - DNA, 120 bp, Artificial Sequence
  ENSG00000144285_19 (sequence is synthesized)
atggacccatttgttgacctggccatcaccatctgtattgtcttaaatactcttttcatggccatggagcactatccaatgacggaccatttcaataatgtgcttacagtaggaaacttg

SEQ ID NO: 386204 - DNA, 120 bp, Artificial Sequence
  ENSG00000144285_20 (sequence is synthesized)
gttttcactgggatctttacagcagaaatgtttctgaaaattattgccatggatccttactattatttccaagaaggctggaatatctttgacggttttattgtgacgcttagcctggta

SEQ ID NO: 386205 - DNA, 120 bp, Artificial Sequence
  ENSG00000144285_21 (sequence is synthesized)
gaacttggactcgccaatgtggaaggattatctgttctccgttcatttcgattgctgcgagttttcaagttggcaaaatcttggccaacgttaaatatgctaataaagatcatcggcaat

SEQ ID NO: 386206 - DNA, 120 bp, Artificial Sequence
  ENSG00000144285_22 (sequence is synthesized)
tccgtgggggctctgggaaatttaaccctcgtcttggccatcatcgtcttcatttttgccgtggtcggcatgcagctctttggtaaaagctacaaagattgtgtctgcaagatcgccagt

SEQ ID NO: 386207 - DNA, 120 bp, Artificial Sequence
  ENSG00000144285_23 (sequence is synthesized)
gattgtcaactcccacgctggcacatgaatgacttcttccactccttcctgattgtgttccgcgtgctgtgtggggagtggatagagaccatgtgggactgtatggaggttgctggtcaa

SEQ ID NO: 386208 - DNA, 120 bp, Artificial Sequence
  ENSG00000144285_24 (sequence is synthesized)
gccatgtgccttactgtcttcatgatggtcatggtgattggaaacctagtggtcctgaatctctttctggccttgcttctgagctcatttagtgcagacaaccttgcagccactgatgat

SEQ ID NO: 386209 - DNA, 120 bp, Artificial Sequence
  ENSG00000144285_25 (sequence is synthesized)
gataatgaaatgaataatctccaaattgctgtggataggatgcacaaaggagtagcttatgtgaaaagaaaaatatatgaatttattcaacagtccttcattaggaaacaaaagatttta

SEQ ID NO: 386210 - DNA, 120 bp, Artificial Sequence
  ENSG00000144285_26 (sequence is synthesized)
gatgaaattaaaccacttgatgatctaaacaacaagaaagacagttgtatgtccaatcatacagcagaaattgggaaagatcttgactatcttaaagatgtaaatggaactacaagtggt

SEQ ID NO: 386211 - DNA, 120 bp, Artificial Sequence
  ENSG00000144285_27 (sequence is synthesized)
ataggaactggcagcagtgttgaaaaatacattattgatgaaagtgattacatgtcattcataaacaaccccagtcttactgtgactgtaccaattgctgtaggagaatctgactttgaa

SEQ ID NO: 386212 - DNA, 120 bp, Artificial Sequence
  ENSG00000144285_28 (sequence is synthesized)
aatttaaacacggaagactttagtagtgaatcggatctggaagaaagcaaagagaaactgaatgaaagcagtagctcatcagaaggtagcactgtggacatcggcgcacctgtagaagaa

SEQ ID NO: 386213 - DNA, 120 bp, Artificial Sequence
  ENSG00000144285_29 (sequence is synthesized)
cagcccgtagtggaacctgaagaaactcttgaaccagaagcttgtttcactgaaggctgtgtacaaagattcaagtgttgtcaaatcaatgtggaagaaggcagaggaaaacaatggtgg

SEQ ID NO: 386214 - DNA, 120 bp, Artificial Sequence
  ENSG00000144285_30 (sequence is synthesized)
aacctgagaaggacgtgtttccgaatagttgaacataactggtttgagaccttcattgttttcatgattctccttagtagtggtgctctggcatttgaagatatatatattgatcagcga

SEQ ID NO: 386215 - DNA, 120 bp, Artificial Sequence
  ENSG00000144285_31 (sequence is synthesized)
aagacgattaagacgatgttggaatatgctgacaaggttttcacttacattttcattctggaaatgcttctaaaatgggtggcatatggctatcaaacatatttcaccaatgcctggtgt

SEQ ID NO: 386216 - DNA, 120 bp, Artificial Sequence
  ENSG00000144285_32 (sequence is synthesized)
tggctggacttcttaattgttgatgtttcattggtcagtttaacagcaaatgccttgggttactcagaacttggagccatcaaatctctcaggacactaagagctctgagacctctaaga

SEQ ID NO: 386217 - DNA, 120 bp, Artificial Sequence
  ENSG00000144285_33 (sequence is synthesized)
ccatccatcatgaatgtgcttctggtttgtcttatattctggctaattttcagcatcatgggcgtaaatttgtttgctggcaaattctaccactgtattaacaccacaactggtgacagg

SEQ ID NO: 386218 - DNA, 120 bp, Artificial Sequence
  ENSG00000144285_34 (sequence is synthesized)
tttgacatcgaagacgtgaataatcatactgattgcctaaaactaatagaaagaaatgagactgctcgatggaaaaatgtgaaagtaaactttgataatgtaggatttgggtatctctct

SEQ ID NO: 386219 - DNA, 120 bp, Artificial Sequence
  ENSG00000144285_35 (sequence is synthesized)
ttgcttcaagttgccacattcaaaggatggatggatataatgtatgcagcagttgattccagaaatgtggaactccagcctaagtatgaagaaagtctgtacatgtatctttactttgtt

SEQ ID NO: 386220 - DNA, 120 bp, Artificial Sequence
  ENSG00000144285_36 (sequence is synthesized)
attttcatcatctttgggtccttcttcaccttgaacctgtttattggtgtcatcatagataatttcaaccagcagaaaaagaagtttggaggtcaagacatctttatgacagaagaacag

SEQ ID NO: 386221 - DNA, 120 bp, Artificial Sequence
  ENSG00000144285_37 (sequence is synthesized)
aagaaatactataatgcaatgaaaaaattaggatcgaaaaaaccgcaaaagcctatacctcgaccaggaaacaaatttcaaggaatggtctttgacttcgtaaccagacaagtttttgac

SEQ ID NO: 386222 - DNA, 120 bp, Artificial Sequence
  ENSG00000144285_38 (sequence is synthesized)
ataagcatcatgattctcatctgtcttaacatggtcacaatgatggtggaaacagatgaccagagtgaatatgtgactaccattttgtcacgcatcaatctggtgttcattgtgctattt

SEQ ID NO: 386223 - DNA, 120 bp, Artificial Sequence
  ENSG00000144285_39 (sequence is synthesized)
actggagagtgtgtactgaaactcatctctctacgccattattattttaccattggatggaatatttttgattttgtggttgtcattctctccattgtaggtatgtttcttgccgagctg

SEQ ID NO: 386224 - DNA, 120 bp, Artificial Sequence
  ENSG00000144285_40 (sequence is synthesized)
atagaaaagtatttcgtgtcccctaccctgttccgagtgatccgtcttgctaggattggccgaatcctacgtctgatcaaaggagcaaaggggatccgcacgctgctctttgctttgatg

SEQ ID NO: 386225 - DNA, 120 bp, Artificial Sequence
  ENSG00000144285_41 (sequence is synthesized)
atgtcccttcctgcgttgtttaacatcggcctcctactcttcctagtcatgttcatctacgccatctttgggatgtccaactttgcctatgttaagagggaagttgggatcgatgacatg

SEQ ID NO: 386226 - DNA, 120 bp, Artificial Sequence
  ENSG00000144285_42 (sequence is synthesized)
ttcaactttgagacctttggcaacagcatgatctgcctattccaaattacaacctctgctggctgggatggattgctagcacccattctcaacagtaagccacccgactgtgaccctaat

SEQ ID NO: 386227 - DNA, 120 bp, Artificial Sequence
  ENSG00000144285_43 (sequence is synthesized)
aaagttaaccctggaagctcagttaagggagactgtgggaacccatctgttggaattttcttttttgtcagttacatcatcatatccttcctggttgtggtgaacatgtacatcgcggtc

SEQ ID NO: 386228 - DNA, 120 bp, Artificial Sequence
  ENSG00000144285_44 (sequence is synthesized)
atcctggagaacttcagtgttgctactgaagaaagtgcagagcctctgagtgaggatgactttgagatgttctatgaggtttgggagaagtttgatcccgatgcaactcagttcatggaa

SEQ ID NO: 386229 - DNA, 120 bp, Artificial Sequence
  ENSG00000144285_45 (sequence is synthesized)
tttgaaaaattatctcagtttgcagctgcgcttgaaccgcctctcaatctgccacaaccaaacaaactccagctcattgccatggatttgcccatggtgagtggtgaccggatccactgt

SEQ ID NO: 386230 - DNA, 120 bp, Artificial Sequence
  ENSG00000144285_46 (sequence is synthesized)
cttgatatcttatttgcttttacaaagcgggttctaggagagagtggagagatggatgctctacgaatacagatggaagagcgattcatggcttccaatccttccaaggtctcctatcag

SEQ ID NO: 386231 - DNA, 120 bp, Artificial Sequence
  ENSG00000144285_47 (sequence is synthesized)
ccaatcactactactttaaaacgaaaacaagaggaagtatctgctgtcattattcagcgtgcttacagacgccaccttttaaagcgaactgtaaaacaagcttcctttacgtacaataaa

SEQ ID NO: 386232 - DNA, 120 bp, Artificial Sequence
  ENSG00000144285_48 (sequence is synthesized)
aacaaaatcaaaggtggggctaatcttcttataaaagaagacatgataattgacagaataaatgaaaactctattacagaaaaaactgatctgaccatgtccactgcagcttgtccacct

SEQ ID NO: 386233 - DNA, 120 bp, Artificial Sequence
  ENSG00000144285_49 (sequence is synthesized)
tcctatgaccgggtgacaaagccaattgtggaaaaacatgagcaagaaggcaaagatgaaaaagccaaagggaaataaatgaaaataaataaaaataattgggtgacaaattgtttacag

SEQ ID NO: 386234 - DNA, 120 bp, Artificial Sequence
  ENSG00000144285_50 (sequence is synthesized)
cctgtgaaggtgatgtatttttatcaacaggactcctttaggaggtcaatgccaaactgactgtttttacacaaatctccttaaggtcagtgcctacaataagacagtgaccccttgtca

SEQ ID NO: 386235 - DNA, 120 bp, Artificial Sequence
  ENSG00000144285_51 (sequence is synthesized)
gcaaactgtgactctgtgtaaaggggagatgaccttgacaggaggttactgttctcactaccagctgacactgctgaagataagatgcacaatggctagtcagactgtagggaccagttt

SEQ ID NO: 386236 - DNA, 120 bp, Artificial Sequence
  ENSG00000144285_52 (sequence is synthesized)
caaggggtgcaaacctgtgattttggggttgtttaacatgaaacactttagtgtagtaattgtatccactgtttgcatttcaactgccacatttgtcacatttttatggaatctgttagt

SEQ ID NO: 386237 - DNA, 120 bp, Artificial Sequence
  ENSG00000144285_53 (sequence is synthesized)
ggattcatctttttgttaatccatgtgtttattatatgtgactatttttgtaaacgaagtttctgttgagaaataggctaaggacctctataacaggtatgccacctggggggtatggca

SEQ ID NO: 386238 - DNA, 120 bp, Artificial Sequence
  ENSG00000144285_54 (sequence is synthesized)
accacatggccctcccagctacacaaagtcgtggtttgcatgagggcatgctgcacttagagatcatgcatgagaaaaagtcacaagaaaaacaaattcttaaatttcaccatatttctg

SEQ ID NO: 386239 - DNA, 120 bp, Artificial Sequence
  ENSG00000144285_55 (sequence is synthesized)
ggaggggtaattgggtgataagtggaggtgctttgttgatcttgttttgcgaaatccagcccctagaccaagtagattatttgtgggtaggccagtaaatcttagcaggtgcaaacttca

SEQ ID NO: 386240 - DNA, 120 bp, Artificial Sequence
  ENSG00000144285_56 (sequence is synthesized)
ttcaaatgtttggagtcataaatgttatgtttctttttgttgtattaaaaaaaaaacctgaatagtgaatattgcccctcaccctccaccgccagaagactgaattgaccaaaattactc

SEQ ID NO: 386241 - DNA, 120 bp, Artificial Sequence
  ENSG00000144285_57 (sequence is synthesized)
tttataaatttctgctttttcctgcactttgtttagccatcttcggctctcagcaaggttgacactgtatatgttaatgaaatgctatttattatgtaaatagtcattttaccctgtggt

SEQ ID NO: 386242 - DNA, 120 bp, Artificial Sequence
  ENSG00000144285_58 (sequence is synthesized)
gcacgtttgagcaaacaaataatgacctaagcacagtatttattgcatcaaatatgtaccacaagaaatgtagagtgcaagctttacacaggtaataaaatgtattctgtaccatttata

SEQ ID NO: 386243 - DNA, 120 bp, Artificial Sequence
  ENSG00000144285_59 (sequence is synthesized)
gatagtttggatgctatcaatgcatgtttatattaccatgctgctgtatctggtttctctcactgctcagaatctcatttatgagaaaccatatgtcagtggtaaagtcaaggaaattgt

SEQ ID NO: 386244 - DNA, 120 bp, Artificial Sequence
  ENSG00000144285_60 (sequence is synthesized)
tcaacagatctcatttatttaagtcattaagcaatagtttgcagcactttaacagctttttggttatttttacattttaagtggataacatatggtatatagccagactgtacagacatg

SEQ ID NO: 386245 - DNA, 120 bp, Artificial Sequence
  ENSG00000144285_61 (sequence is synthesized)
aaaaaacacactgcttaacctattaaatatgtgtttagaattttataagcaaatataaatactgtaaaaagtcactttattttatttttcagcattatgtacataaatatgaagaggaaa

SEQ ID NO: 386246 - DNA, 120 bp, Artificial Sequence
  ENSG00000144285_62 (sequence is synthesized)
gaaattatcttcaggttgatatcacaatcacttttcttactttctgtccatagtactttttcatgaaagaaatttgctaaataagacatgaaaacaagactgggtagttgtagatttctg

SEQ ID NO: 386247 - DNA, 120 bp, Artificial Sequence
  ENSG00000144285_63 (sequence is synthesized)
ctttttaaattacatttgctaattttagattatttcacaattttaaggagcaaaataggttcacgattcatatccaaattatgctttgcaattggaaaagggtttaaaattttatttata

SEQ ID NO: 386248 - DNA, 120 bp, Artificial Sequence
  ENSG00000144285_64 (sequence is synthesized)
tttctggtagtacctgcactaactgaattgaaggtagtgcttatgttatttttgttctttttttctgacttcggtttatgttttcatttctttggagtaatgctgctctagattgttcta

SEQ ID NO: 386249 - DNA, 120 bp, Artificial Sequence
  ENSG00000144285_65 (sequence is synthesized)
aatagaatgtgggcttcataatttttttttccacaaaaacagagtagtcaacttatatagtcaattacatcaggacattttgtgtttcttacagaagcaaaccataggctcctcttttcc

SEQ ID NO: 386250 - DNA, 120 bp, Artificial Sequence
  ENSG00000144285_66 (sequence is synthesized)
ttaaaactacttagataaactgtattcgtgaactgcatgctggaaaatgctactattatgctaaataatgctaaccaacatttaaaatgtgcaaaactaataaagattacattttttatt

SEQ ID NO: 386251 - DNA, 120 bp, Artificial Sequence
  ENSG00000144285_67 (sequence is synthesized)
cattcagagagctccccagcactggtgcttcgttatgtaaggctgtctaggtcaagtgtaggagacacactgctggcctgtggaaactcatggaactgttcctccagattaacacttcag

SEQ ID NO: 386252 - DNA, 120 bp, Artificial Sequence
  ENSG00000144285_68 (sequence is synthesized)
gtaccatagagtgaggcgaggatgaagccgagaggatactgcagaggtctctggtgcatgtgtgtatgtgtgcgtttgtgtgtgtttgtgtgtctgtgtgttctgccccagtgagactgc

SEQ ID NO: 386253 - DNA, 120 bp, Artificial Sequence
  ENSG00000144285_69 (sequence is synthesized)
agcccttgtaaatactttgacaccttttgcaagaaggaatctgaacaattgcaactgaaggcacattgttatcatctcgtctttgggtgatgctgttcctcactgcagatggataatttt

SEQ ID NO: 386254 - DNA, 120 bp, Artificial Sequence
  ENSG00000144285_70 (sequence is synthesized)
ccttttaatcagaacagcataagaattatttctgagtggaggtgaggcttgtccaaatgtctttgctatcatggatttcctgactcctacctgtttgaggtttgggcaattatgaataag

SEQ ID NO: 386255 - DNA, 90 bp, Artificial Sequence
  ENSG00000144285_71 (sequence is synthesized)
gtggaaactcatggaactgttcctccagattaacacttcaggggttatggaagctggaggaagctgagcttttactacatcttttggggg

SEQ ID NO: 386256 - DNA, 120 bp, Artificial Sequence
  ENSG00000144285_72 (sequence is synthesized)
cacacacacacacacacacagaggcatacccacgttgacaacaaaacctagggtagatatgtcactggaggtagggggtaatgacctcccagaattacaagcagcaggtgtgttctctgt

SEQ ID NO: 386257 - DNA, 120 bp, Artificial Sequence
  ENSG00000144285_73 (sequence is synthesized)
ccagaattacaagcagcaggtgtgttctctgttaggaggaagaactggtgtcagaggatagctagtgattctaggaggaagagaagtatggaagccagagtgatggtggatgaccccttg

SEQ ID NO: 386258 - DNA, 120 bp, Artificial Sequence
  ENSG00000144285_74 (sequence is synthesized)
agctatgaaaagaaacccttaaatcatcatttaaaaatttagaattgccatgtgtgtaggatactgtgtttgctcctccagagccactctctctgcttctgcatcattctgtgtgtccca

SEQ ID NO: 386259 - DNA, 120 bp, Artificial Sequence
  ENSG00000144285_75 (sequence is synthesized)
gaagggtgacttctacacattgcaaaaatgggctctcctacctttgagctcccaattggtttggccaatgagaagcaccagtgggaaagcaccagagagagaagattgacataggaatat

SEQ ID NO: 386260 - DNA, 120 bp, Artificial Sequence
  ENSG00000144285_76 (sequence is synthesized)
ttcttctccaattccttctttgctgggttggcactggactcattcctccccgaaaagtcatactccaatcagactgcccctcatacaactgaagctactttctctggggtcaggtaatca

SEQ ID NO: 386261 - DNA, 120 bp, Artificial Sequence
  ENSG00000144285_77 (sequence is synthesized)
ctcctccccttgctccttcaggtctgctgctgcattgagagtgcttttgtattccttgtagctttctcctaacattgctgacacttttgtaaatgtccccttcatgaaattcttctatat

SEQ ID NO: 386262 - DNA, 120 bp, Artificial Sequence
  ENSG00000144285_78 (sequence is synthesized)
gcctcatttcagcatgccatctgtctcctgcctggctgacacaaggtgattcaacagctcatgaaagtcagcaggaagcaaagatgtgccttgcttcagcttggggtcttaatcttgcta

SEQ ID NO: 386263 - DNA, 120 bp, Artificial Sequence
  ENSG00000144285_79 (sequence is synthesized)
acttttgcagataaagaaaaacagtaactgggggaaccacagtgaagtccagtgcagaattcacagatatcatggaaaggttactcgggtggtccagatagtaaaattaacagtctaaat

SEQ ID NO: 386264 - DNA, 120 bp, Artificial Sequence
  ENSG00000144285_80 (sequence is synthesized)
taatctatctaaatttctgaggaacgagaagccttcccttgtcatcaggtgaagccagaagagggaatatagcctcaaccagaaaagggacagtaattaaaaggcttttcccatccttgt

SEQ ID NO: 386265 - DNA, 120 bp, Artificial Sequence
  ENSG00000144285_81 (sequence is synthesized)
acaatggactgactttgcctcttcataacatcacaatcctaaagcaacacaacaattaattctgatatattagtagctgaaaaaaattcccatttccaactaaggtaggtcagaattata

SEQ ID NO: 386266 - DNA, 120 bp, Artificial Sequence
  ENSG00000144285_82 (sequence is synthesized)
ggataaaccctgcagactttttatactacccatccacgccattactcactgttacctttccaaatacaaagagaagaactggtaaaacataatcatataaatctccatattcattttgaa

SEQ ID NO: 386267 - DNA, 120 bp, Artificial Sequence
  ENSG00000144285_83 (sequence is synthesized)
atatttggcatgatattttctgtgctaaaaagtaattattcttcaaagaatgatgaggtcatgtcagtaagacacaggaaccaactagaaggggcttcccactggccaaatctggggcaa

SEQ ID NO: 386268 - DNA, 120 bp, Artificial Sequence
  ENSG00000144285_84 (sequence is synthesized)
gttgagcatcaaaataaatgatagtaaaagattataattcattgaataagaatcagcaaatacatactgatgtaagtaaataaggaaaagtacaaatctgtttcttgcagttgaatgtta

SEQ ID NO: 386269 - DNA, 120 bp, Artificial Sequence
  ENSG00000144285_85 (sequence is synthesized)
attaacaattgtagaagaaataacggagttagaaaaatcactatttggcaatcaccctaatgacaattgattcatacaagaatcatcaatgagtattaaaactcatgggtgaaagtttga

SEQ ID NO: 386270 - DNA, 120 bp, Artificial Sequence
  ENSG00000144285_86 (sequence is synthesized)
tgaggaatagggtatttatagcatcttaaagtatctcttctctattaagtagaaaatttaaacagaagaaagtatactttggagaaatacagcagacaataccttcaaagatatcatcaa

SEQ ID NO: 386271 - DNA, 120 bp, Artificial Sequence
  ENSG00000144285_87 (sequence is synthesized)
ttatgagaccaactgatactatgtgcctcctgataagatatactgaaagggccacattacttcttggtacacagtcaaaattttaaaaccagaatctaactacaaggaaaatcaaattga

SEQ ID NO: 386272 - DNA, 120 bp, Artificial Sequence
  ENSG00000144285_88 (sequence is synthesized)
ggacactctataaaataagtggactgaactccttaaaaatgtcaatgtcatgaaagacaaagaaaggctaaagaattccatgaggtcaaagaactatgacaactaaacacaattctggat

SEQ ID NO: 386273 - DNA, 120 bp, Artificial Sequence
  ENSG00000144285_89 (sequence is synthesized)
aaataacagataaataatattattgggaaagttgaataaatttgaatatggactgtttattagttattagtattataatagtgttaattttcctaattttgttaagactagtgtgcctgt

SEQ ID NO: 386274 - DNA, 120 bp, Artificial Sequence
  ENSG00000144285_90 (sequence is synthesized)
agactagtgtgcctgttccatgaaaatagaaaatgttcttattctctgaaaatgcatgctaaagtatttaggggtgaatgcaacaatgtctgcagctcattcttgaatcagttcaaagaa

SEQ ID NO: 386275 - DNA, 120 bp, Artificial Sequence
  ENSG00000144285_91 (sequence is synthesized)
aaatgagttacatttatatatatatgtatgtatgtaaacagacatagataaaagtatagatgtgtgtgtgtctttagaaaggggaggattttttttttttttttgctgtgtgttactgaa

SEQ ID NO: 386276 - DNA, 120 bp, Artificial Sequence
  ENSG00000144285_92 (sequence is synthesized)
gtgcctatgtctgcgtgttcacactatcatattttgtatgccctggactttataatttctaccttcaaaattagatctactgttggtaattaattcaatatatactggttttttaactac

SEQ ID NO: 386277 - DNA, 120 bp, Artificial Sequence
  ENSG00000144285_93 (sequence is synthesized)
tattctcatttcctagcagtaatcttcctgaaaagtcacagaaatgattacattccttgttcttcataataatcactgtttaattaaaataagaatattttagaaaagatctgcggcata

SEQ ID NO: 386278 - DNA, 120 bp, Artificial Sequence
  ENSG00000144285_94 (sequence is synthesized)
gtggttaagaccccagtatttgatgctaaacagatctgatttggataacagaaggtggcactttgctgtttaagctggggaccagacactgtgggtataaatagtaattccaaacacagc

SEQ ID NO: 386279 - DNA, 120 bp, Artificial Sequence
  ENSG00000144285_95 (sequence is synthesized)
tccacagagcagcacccttatgacaaggttttcatatgtctatagttaagccagaaaattaagaataatgccataaatatttataaagctgaacatatccaagttaaagacctttatcct

SEQ ID NO: 386280 - DNA, 120 bp, Artificial Sequence
  ENSG00000144285_96 (sequence is synthesized)
gaaattgtatcttttagattattttctaaagactaataccatttaatgtttaaatgttctttggaaatgatggtgagaatacgtgataatgggtcattggttttaatattttatttagcc

SEQ ID NO: 386281 - DNA, 120 bp, Artificial Sequence
  ENSG00000144285_97 (sequence is synthesized)
aagtggaaaattggcaacctggtgtcggtcctcccatttgtattttactggtgcatgaaatccaaaagtctagtaaccattgggacagacaactctactgcataagtttgtatgtttgta

SEQ ID NO: 386282 - DNA, 120 bp, Artificial Sequence
  ENSG00000144285_98 (sequence is synthesized)
tatctgtatcacaaagcccagacactcgaactatataaacttgtcgcactaaagacagcaaatatgtctggtaattgcatattcttcatgtgtgcactggaatttcttattatataagaa

SEQ ID NO: 386283 - DNA, 120 bp, Artificial Sequence
  ENSG00000144285_99 (sequence is synthesized)
aataaatgtgtttctaaaccaccatgaattgggtactgctgatagtactattcttcctggcacatggaaatatcccactgaggttgtcaatcaatattgatttaatcagtgtggcagcaa

SEQ ID NO: 386284 - DNA, 120 bp, Artificial Sequence
  ENSG00000144285_100 (sequence is synthesized)
aggcactagaggaggaaaatactctagacaatcaagtatagatgggaaaattgcatcaccaagaaattcttaaaatcacaagtggataatttgcaatatcaattgattttactcaactgc

SEQ ID NO: 386285 - DNA, 120 bp, Artificial Sequence
  ENSG00000144285_101 (sequence is synthesized)
ttgagtcctttatcattccgttagaacactcctcatatttgcagataactcagcccctcacctcagcaacaagcaagaggacatcattataaacttcctcaatttctttcctatccagtg

SEQ ID NO: 386286 - DNA, 120 bp, Artificial Sequence
  ENSG00000144285_102 (sequence is synthesized)
aaaaatatctaagtcccttttcccttcccttttccttcccttcccttcctttttctttccttccattctcttcctttttccttcctttttctttccttccattctcttcctttttccttc

SEQ ID NO: 386287 - DNA, 120 bp, Artificial Sequence
  ENSG00000144285_103 (sequence is synthesized)
ctttttcttactttacctccccctcctacctttccctttctcccttcctccctctctcccttccttcctctctccctctccttccttccttccttcaatccatacttttatatcttttca

SEQ ID NO: 386288 - DNA, 120 bp, Artificial Sequence
  ENSG00000144285_104 (sequence is synthesized)
gagatcaatttttcccattcatttctacattctcagataccttgctccatgacttgttctacttctcttctatctttattctttccctcttgactgatcctttttgtctgcctttgcatt

SEQ ID NO: 386289 - DNA, 120 bp, Artificial Sequence
  ENSG00000144285_105 (sequence is synthesized)
ttcaaaatcagtttttctaatcttaaaaaataactttgctcaaccctgatgcatctttattcactgtgtcattatctcattatttttaaaggttagtttctaaagccagggctctatact

SEQ ID NO: 386290 - DNA, 120 bp, Artificial Sequence
  ENSG00000144285_106 (sequence is synthesized)
cactaccttcactcttggttaaaattaaaagaaatataggtcccagtgatatttatgggaaaatttgactgtgaataatcttgttgatataaacactttgggttttcaaaatgttatgct

SEQ ID NO: 386291 - DNA, 120 bp, Artificial Sequence
  ENSG00000144285_107 (sequence is synthesized)
agctgttaactttcccagtaacattatgagggaagggctggaaaatacaaaaggtagacataggaaccgagaacaccacccctatggagccaagctatacatactctgtctctggttatc

SEQ ID NO: 386292 - DNA, 120 bp, Artificial Sequence
  ENSG00000144285_108 (sequence is synthesized)
ataaatacatctcctatattcaatgcttgcttagaaaggcatgatgtccacggagcaattcaattgttcactgtgatgggtttttttgttttctcctcatggaatgcaacttttatttat

SEQ ID NO: 386293 - DNA, 120 bp, Artificial Sequence
  ENSG00000144285_109 (sequence is synthesized)
ttttaagatttttttgaaccttgcttttacatatcctagaataaatagcattgatagaaaaaaagaatggaaagaccagagattactaggggaattttttttctttattaacagataaga

SEQ ID NO: 386294 - DNA, 120 bp, Artificial Sequence
  ENSG00000144285_110 (sequence is synthesized)
gcgactggccatctgagcccctaatatttctttcagattttactcagcatatctggggggaaaggaagtatatgcagtacatttgaaaggtggaccatatttattcctgagctagctcac

SEQ ID NO: 386295 - DNA, 120 bp, Artificial Sequence
  ENSG00000144285_111 (sequence is synthesized)
tttgggcctttctgtgtcgttacatgctcatattcccccacagcaaaggcatttgcattgcacaagtctgttcagatttacgatgatctcacaatgtcattcagggacagaatccctcaa

SEQ ID NO: 386296 - DNA, 120 bp, Artificial Sequence
  ENSG00000144285_112 (sequence is synthesized)
tgaatcagagaaaaagagggctaagtattgttggcataggggattgttcttctagtaagcacaggtgaaattctcccttccttcaaatgcgctttgtggtaaagctctatctgttttctg

SEQ ID NO: 386297 - DNA, 120 bp, Artificial Sequence
  ENSG00000144285_113 (sequence is synthesized)
gactcatactccttcaaagatgatagagggaatgcaggcagaggtgagacttggagcagtgcttctcaaactctgttgaggatgtgaggtctctattcttctataaaatgaagtaaaaat

SEQ ID NO: 386298 - DNA, 120 bp, Artificial Sequence
  ENSG00000144285_114 (sequence is synthesized)
tagtttctagaaaactgaaatgaaaaacaggcccacaacaacatccccctacttttttattattagaatagacagacacaacattaattggccaaattgccttacaaatttctaaacatg

SEQ ID NO: 386299 - DNA, 120 bp, Artificial Sequence
  ENSG00000144285_115 (sequence is synthesized)
gactctccatatctatacttaaccagtactggttgggggaccatactttcacagccagtttaggacacttctacccataccagatagaaagtgcttaattttcaaaaaccaactccatta

SEQ ID NO: 386300 - DNA, 120 bp, Artificial Sequence
  ENSG00000144285_116 (sequence is synthesized)
gcaggtaggggtgtgggagggtgggtttgctttacttgaatttagaaaatcctgcaagtataggggaaatctgttaatgagctaagactatacaaagattcttagtagaaaataaacata

SEQ ID NO: 386301 - DNA, 120 bp, Artificial Sequence
  ENSG00000144285_117 (sequence is synthesized)
acatttatgcttgctgtatcataacatgatctgtgcagatatgcatcctaaggcttagaaaagaaagctttcgaagaatgggtgaatttaaaatcaagaagcttaaaatttccttcccca

SEQ ID NO: 386302 - DNA, 120 bp, Artificial Sequence
  ENSG00000144285_118 (sequence is synthesized)
aatatgctcttcacagagataaaggctttctccctggctctgtctaaatataagtaagcaccttggaaaacattgagtcagagccctttttatacccttacatgttgcttctttaatgtt

SEQ ID NO: 386303 - DNA, 120 bp, Artificial Sequence
  ENSG00000144285_119 (sequence is synthesized)
ttgtctgcccactgccaattgatctcaaataagtctaatttttggaaggaatttcattcacattcatggatcctggattcttcaggagcttggagcttctcctctgtgataagaaagcac

SEQ ID NO: 386304 - DNA, 120 bp, Artificial Sequence
  ENSG00000144285_120 (sequence is synthesized)
tgcataagataggaagtcaattgggattagaattcaatatgtcagctaactcagaaatcccagtacagaatttagcactcctggtcaacgggtactctccagggatcttggcctccagaa

SEQ ID NO: 386305 - DNA, 120 bp, Artificial Sequence
  ENSG00000144285_121 (sequence is synthesized)
atcaattattggattacatccatctaacccaagagtgggtttgatggtggctgtttttattttctattacgaagagagtgataatgtttattttatgaggatagatggtaaaaacaatct

SEQ ID NO: 386306 - DNA, 120 bp, Artificial Sequence
  ENSG00000144285_122 (sequence is synthesized)
ttatttcaaaaatagtatcagttctgttgaatgattttgcgttccacaggattaattttcaagatatttgaattgggaaagctgaaatgactataaaaagcatgtagtgccttaagtttt

SEQ ID NO: 386307 - DNA, 120 bp, Artificial Sequence
  ENSG00000144285_123 (sequence is synthesized)
ttggaatgaaatgaaatgtgcacccatttaagactttcatttaactcagacacttaaaatatcgagaaaataaatgacttctcttggctaattgtcttatgtacaataaaattgagggta

SEQ ID NO: 386308 - DNA, 120 bp, Artificial Sequence
  ENSG00000144285_124 (sequence is synthesized)
agtattaggtaaaaggtaagtggtatcattggatttcctctctaattaagaagagatccagtgacagtttgttttcatggggcactttagaaattgtgattgtgctggtttctcatttaa

SEQ ID NO: 386309 - DNA, 120 bp, Artificial Sequence
  ENSG00000144285_125 (sequence is synthesized)
ctttacaataatttattatgacaagtaacagaaagtagataacagagtttaagtggtttatactttcatacttctatgttgtgttcctgtcttacagacttttatagtattgaataaagg

SEQ ID NO: 386310 - DNA, 120 bp, Artificial Sequence
  ENSG00000144285_126 (sequence is synthesized)
gcagcagttgattccagaaatcctctttcaggctccaagacctaaactgaaattcatgctcattccaactttgctcttcaaaactttgtggaactccagcctaagtatgaagaaagtctg

SEQ ID NO: 386311 - DNA, 120 bp, Artificial Sequence
  ENSG00000144285_127 (sequence is synthesized)
atactgctttaaatatcatgacaccatgaactctaaagaattgaaaagtgcttgtgagttggttatcaaggggaggatatatcaaatggccattttgttcaatatgtgttctagaaatga

SEQ ID NO: 386312 - DNA, 120 bp, Artificial Sequence
  ENSG00000144285_128 (sequence is synthesized)
aaagccatactaaaatactgtcttggtccaaaatctgtgtaaaatttgttttgaaatgtctttcaaaaatattcccttttgaaaattatatcagtaagaatatttattaaacatcaggtc

SEQ ID NO: 386313 - DNA, 75 bp, Artificial Sequence
  ENSG00000144285_129 (sequence is synthesized)
cttttatagtattgaataaagggaaggccatcttccggttcagtgccacctctgccctgtacattttaactccct

SEQ ID NO: 386314 - DNA, 120 bp, Artificial Sequence
  ENSG00000144285_130 (sequence is synthesized)
attcaagatcatcccagcaatcagagataatcactgtaaatattttgatacattttatccaagtgtgtttgtttttttaacaaaatgtctcctactatatgtcagtattgtttcttattc

SEQ ID NO: 386315 - DNA, 120 bp, Artificial Sequence
  ENSG00000144285_131 (sequence is synthesized)
tatccatttagaacaatatacttagtgtaaatgtagtaaaacctcattcatttgaactagaactgtgctattaactaaaataaaaatgtttttgacatgttgagattgaagaaccaatat

SEQ ID NO: 386316 - DNA, 120 bp, Artificial Sequence
  ENSG00000144285_132 (sequence is synthesized)
agtatctagatggttctgttaacaagactagaaatgtagtctggtactcacgaaaattgctttagagaatagacatggagtcaccagcatatagatattagtggaaagtggtttcaagat

SEQ ID NO: 386317 - DNA, 120 bp, Artificial Sequence
  ENSG00000144285_133 (sequence is synthesized)
aaggaaaagtattgcataaaaagagaataaagacaaggactaaacattagcaaatgcatatagtaggttctctgcaagtgtcatgtagagattttctagactaccttaaaaatgggttta

SEQ ID NO: 386318 - DNA, 120 bp, Artificial Sequence
  ENSG00000144285_134 (sequence is synthesized)
tcataatgatgcacaagggaaataaggtggcatgggacatcatcagtactatacttcaaagcctggaacacataactagcctcatgagcaatagctcatttcattagacaaaactaaagc

SEQ ID NO: 386319 - DNA, 120 bp, Artificial Sequence
  ENSG00000144285_135 (sequence is synthesized)
tctagtaaagtaaaaagcatctgtctgtgggcctattcattcttccctaaacaggatgatatgattgggtcaatattttactatccaaaacgaggcacctgtgttggacagattttcatg

SEQ ID NO: 386320 - DNA, 120 bp, Artificial Sequence
  ENSG00000144285_136 (sequence is synthesized)
ccactcccctctctgaagaaactggccttatatccagctcattgtatatagcctttgattcccactaattataatccttggttataactagtgtggctaaggtataaaagttgtattctc

SEQ ID NO: 386321 - DNA, 120 bp, Artificial Sequence
  ENSG00000144285_137 (sequence is synthesized)
cacacacacacacacacactcttacacttcgtcttttcagaatgaggcatttaaacttgaaggcatttagtttcttgagctcttctttttaactttacaagtattgtttttatctaaaaa

SEQ ID NO: 386322 - DNA, 120 bp, Artificial Sequence
  ENSG00000144285_138 (sequence is synthesized)
tcttctttttaactttacaagtattgtttttatctaaaaagcaaatggagagagaagctgaaaataagaagactgagattacagtgttaggtacaggagaccaaaaagaattgaaataca

SEQ ID NO: 386323 - DNA, 120 bp, Artificial Sequence
  ENSG00000144285_139 (sequence is synthesized)
acattaagtacaggatactaaaaagagcatcaacctgggatcctttcagaaatgcaccagaacatacataaatgagtatataaaaatattagagtggaatttaagtaagtaccaagatca

SEQ ID NO: 386324 - DNA, 120 bp, Artificial Sequence
  ENSG00000144285_140 (sequence is synthesized)
tggggagatgaaagtagcatcaaaagctaccaatactttcagatggaaaaggagtaaatagagaatttagaatatggcaatttcagaaaaagtcactgtatacatataaacttgtaccta

SEQ ID NO: 386325 - DNA, 120 bp, Artificial Sequence
  ENSG00000144285_141 (sequence is synthesized)
tactgttgggctgctactgttcggccaaatgtgcatttttaacttattttctttttaaattctgacttgggactttacataaactaaaagtagtttataaacatctcttaaagataaaaa

SEQ ID NO: 386326 - DNA, 120 bp, Artificial Sequence
  ENSG00000144285_142 (sequence is synthesized)
tattgctgaatttcaaaattaagatttataatatattatgtacaattatatatatattatatatagttgtcatatttaatataactgggttcaggactctgaaccttaccttggagcttt

SEQ ID NO: 386327 - DNA, 120 bp, Artificial Sequence
  ENSG00000144285_143 (sequence is synthesized)
gtaagaaaaatgaaagaacctgaagtattgtatatagccaaaattaaactaaattaaatttagaaaaaggaaaatctatgcatgcaaaaggaatggcaaattcttgcaaaattgctactt

SEQ ID NO: 386328 - DNA, 120 bp, Artificial Sequence
  ENSG00000144285_144 (sequence is synthesized)
tattgttttatctgttgcatatttacttctaggtgatatgcaagagaaataggcctctcttgaaatgatataatatcatttatctgctgtgcttatttaaatgactttatttcctaatcc

SEQ ID NO: 386329 - DNA, 120 bp, Artificial Sequence
  ENSG00000144285_145 (sequence is synthesized)
atcttgggagtttccttacaaatctatatacaaaaaaaagctgatgcattattaaagtactatgtgtaatgatataatggtaatctaaagtaaattctatatcaggtacttattctttgt

SEQ ID NO: 386330 - DNA, 120 bp, Artificial Sequence
  ENSG00000144285_146 (sequence is synthesized)
agttcctagtgtgaaccgtcttgcttttcagaacagcataagaattatttctgagtggaggaatttcatatgcagaataaatggtaattaaaatgtgcaggatgacaagatggagcaaac

SEQ ID NO: 386331 - DNA, 120 bp, Artificial Sequence
  ENSG00000144285_147 (sequence is synthesized)
tgaattatttagggaattaaatattatcatacctaaagagtacaattttttttacattttaaatcccagatataattatactaatcagttgaattttgtatttctttttttagccatcca

SEQ ID NO: 386332 - DNA, 120 bp, Artificial Sequence
  ENSG00000144285_148 (sequence is synthesized)
tttagccatccattttctattttaacattgaaaaaaatgtacaaaaggacacagttttaaccagtttgatttttcttttctatactttggaggtcaagacatctttatgacagaagaaca

SEQ ID NO: 386333 - DNA, 120 bp, Artificial Sequence
  ENSG00000144290_0 (sequence is synthesized)
caaaacctggccagcagcccgagtgagtaggagccatgtgactctggtgagttggagtgtgcaattgcctcctgcttcagagctacctgatccgaatactaagcagagcgagtgccgggc

SEQ ID NO: 386334 - DNA, 120 bp, Artificial Sequence
  ENSG00000144290_1 (sequence is synthesized)
tgagtgtaagacactgaagacactgcagagcaaggtgcttattccagaggcgttacaaaacatggagattaaagaccagggagcccaaatggagccgctgctgcctacgagaaatgatga

SEQ ID NO: 386335 - DNA, 120 bp, Artificial Sequence
  ENSG00000144290_2 (sequence is synthesized)
agaagcagttgtggatagaggtggaactcgttctattctcaaaacacactttgagaaagaagatttagaaggtcatcgaacactatttattggagtacatgtgcccttgggaggaagaaa

SEQ ID NO: 386336 - DNA, 120 bp, Artificial Sequence
  ENSG00000144290_3 (sequence is synthesized)
aagccatcgacgtcacaggcatcgtggtcataaacacagaaagagagacagagaaagagattcaggattagaggatggaagggagtcaccttcttttgacaccccatcacagagggtaca

SEQ ID NO: 386337 - DNA, 120 bp, Artificial Sequence
  ENSG00000144290_4 (sequence is synthesized)
gtttattcttggaaccgaggatgatgacgaggaacacattcctcatgaccttttcacagaactggatgagatttgttggcgtgaaggtgaggacgctgagtggcgagaaacagccaggtg

SEQ ID NO: 386338 - DNA, 120 bp, Artificial Sequence
  ENSG00000144290_5 (sequence is synthesized)
gttgaagtttgaagaagatgtggaagatggaggagaaaggtggagcaagccttatgtggctactctttcattgcacagcttgtttgaattgagaagttgtattctgaatggaactgtgtt

SEQ ID NO: 386339 - DNA, 120 bp, Artificial Sequence
  ENSG00000144290_6 (sequence is synthesized)
gctggacatgcatgccaacactttagaagaaattgcagatatggttcttgaccaacaagtgagctcaggtcagctgaatgaagatgtacgccatagggtccatgaggcattgatgaaaca

SEQ ID NO: 386340 - DNA, 120 bp, Artificial Sequence
  ENSG00000144290_7 (sequence is synthesized)
gcatcatcatcagaatcagaaaaaactcaccaacaggattcccattgttcgttcctttgctgatattggcaagaaacagtcagaaccaaattccatggacaaaaatgcaggtcaggttgt

SEQ ID NO: 386341 - DNA, 120 bp, Artificial Sequence
  ENSG00000144290_8 (sequence is synthesized)
ttctcctcagtctgctccagcctgtgttgaaaataaaaatgatgttagcagagaaaacagcactgttgactttagcaaggttgatctgcattttatgaaaaagattcctccaggtgctga

SEQ ID NO: 386342 - DNA, 120 bp, Artificial Sequence
  ENSG00000144290_9 (sequence is synthesized)
agcatcgaacatcttagtgggagaactggagttcttggatcgaacagtagttgcgtttgtcaggttgtctccagctgtattgcttcaaggactggctgaagtcccaatcccaaccagatt

SEQ ID NO: 386343 - DNA, 120 bp, Artificial Sequence
  ENSG00000144290_10 (sequence is synthesized)
tttgttcattcttctgggacccctgggaaagggtcaacagtaccatgagattggcagatcaattgcaaccctaatgacagatgaggtatttcatgatgttgcctataaagctaaagatcg

SEQ ID NO: 386344 - DNA, 120 bp, Artificial Sequence
  ENSG00000144290_11 (sequence is synthesized)
taatgacttggtatcaggaattgatgagtttctggatcaggttactgttctccctcctggagaatgggatccaagcattcgaatagagcctcccaaaaatgttccttcccaggagaagag

SEQ ID NO: 386345 - DNA, 120 bp, Artificial Sequence
  ENSG00000144290_12 (sequence is synthesized)
gaagattcctgctgtaccaaatggaacagcagctcatggggaagcagagccccacggaggacatagtggacctgaactccagcgaactggaaggatttttgggggacttattttagatat

SEQ ID NO: 386346 - DNA, 120 bp, Artificial Sequence
  ENSG00000144290_13 (sequence is synthesized)
caaaagaaaagctccatacttctggagtgacttcagagatgctttcagcctgcagtgcttagcatcttttctatttctctactgcgcgtgtatgtctcctgtcatcacgtttggaggact

SEQ ID NO: 386347 - DNA, 120 bp, Artificial Sequence
  ENSG00000144290_14 (sequence is synthesized)
gctgggagaagcaactgaagggcgtataagtgcaattgaatctctctttggagcatccatgaccgggatagcctattctctctttggtggacagcctcttaccatattaggcagtacagg

SEQ ID NO: 386348 - DNA, 120 bp, Artificial Sequence
  ENSG00000144290_15 (sequence is synthesized)
accagttttggtgtttgaaaagattttgtttaaattttgcaaagaatatgggctgtcatacctatctttaagagctagcattggactttggactgcaactctatgtatcatacttgtggc

SEQ ID NO: 386349 - DNA, 120 bp, Artificial Sequence
  ENSG00000144290_16 (sequence is synthesized)
cacagatgctagttcccttgtctgctacatcactcggtttactgaagaagcttttgcttccctgatttgcatcattttcatttatgaggccctggagaagttgtttgaactcagtgaagc

SEQ ID NO: 386350 - DNA, 120 bp, Artificial Sequence
  ENSG00000144290_17 (sequence is synthesized)
atatccaatcaacatgcataatgatctggaactgctgacacaatactcgtgtaactgtgtggaaccgcataatcccagcaatggcacattgaaggaatggagggaatccaatatttctgc

SEQ ID NO: 386351 - DNA, 120 bp, Artificial Sequence
  ENSG00000144290_18 (sequence is synthesized)
ctctgacataatttgggagaacctaactgtgtcagaatgcaaatcattgcatggagagtatgttggacgggcctgtggccatgatcacccatatgttccagatgttctattttggtctgt

SEQ ID NO: 386352 - DNA, 120 bp, Artificial Sequence
  ENSG00000144290_19 (sequence is synthesized)
gatcctgttcttttccacagttactctgtcagccaccctgaagcagttcaagactagcagatattttccaaccaaggttcgatccatagtgagtgactttgctgtctttcttacaattct

SEQ ID NO: 386353 - DNA, 120 bp, Artificial Sequence
  ENSG00000144290_20 (sequence is synthesized)
gtgtatggttttaattgactatgccattgggatcccatctccaaaactacaagtaccaagtgttttcaagcccactagagatgatcgtggctggtttgttacgcctttaggtccaaaccc

SEQ ID NO: 386354 - DNA, 120 bp, Artificial Sequence
  ENSG00000144290_21 (sequence is synthesized)
atggtggacagtaatagctgctataattccagctctgctttgtactattctaatttttatggaccaacagattacagctgtcatcatcaacaggaaagagcataagctaaagaaaggttg

SEQ ID NO: 386355 - DNA, 120 bp, Artificial Sequence
  ENSG00000144290_22 (sequence is synthesized)
tgggtaccatctggacctattaatggtggctgtcatgctcggtgtatgctccatcatgggcctgccatggtttgtggctgccacagtcctctccatcactcatgtcaatagcctaaaact

SEQ ID NO: 386356 - DNA, 120 bp, Artificial Sequence
  ENSG00000144290_23 (sequence is synthesized)
agggttactgggcttatgatttttattcttatgggttcatcagtctttatgaccagtattctgaagtttattcccatgccagtgctatatggagtgtttctttatatgggtgcttcatct

SEQ ID NO: 386357 - DNA, 120 bp, Artificial Sequence
  ENSG00000144290_24 (sequence is synthesized)
ctaaagggaattcagttctttgataggataaagctcttctggatgccggcaaaacatcaaccagattttatatacctaaggcacgtaccgcttcgaaaagtgcatctcttcacaattatt

SEQ ID NO: 386358 - DNA, 120 bp, Artificial Sequence
  ENSG00000144290_25 (sequence is synthesized)
cagatgagttgccttggccttttgtggataataaaagtttcaagagctgctattgtctttcccatgatggtgttagccctggtatttgtaagaaagttgatggacttgttgttcacgaag

SEQ ID NO: 386359 - DNA, 120 bp, Artificial Sequence
  ENSG00000144290_26 (sequence is synthesized)
cgggaactcagctggttggatgatttgatgcccgagagtaagaaaaagaaactggaagatgctgaaaaagaagaagaacaaagtatgctagctatggaagatgagggcacagtacaactc

SEQ ID NO: 386360 - DNA, 120 bp, Artificial Sequence
  ENSG00000144290_27 (sequence is synthesized)
ccattggaagggcactatagagatgatccatctgtgatcaatatatctgatgaaatgtcaaagactgccttgtggaggaaccttctgattactgccgataactcaaaagataaggagtca

SEQ ID NO: 386361 - DNA, 120 bp, Artificial Sequence
  ENSG00000144290_28 (sequence is synthesized)
agctttccttccaaaagctccccttcctaatcactctagaagctgattccccaaagcattgaaagccgaaaagagaagaaagctgactcagggaaaggtgttgacagggagacttgtcta

SEQ ID NO: 386362 - DNA, 120 bp, Artificial Sequence
  ENSG00000144290_29 (sequence is synthesized)
tgactcgatcttcaatttattttttacatatatatgagaagagtgtcacaattattaataaaactgctttgatcatgtattgtaaattctgtccctcaacccaaatccaccttcatactg

SEQ ID NO: 386363 - DNA, 120 bp, Artificial Sequence
  ENSG00000144290_30 (sequence is synthesized)
taagtagtgcaatacttgtttcatttctgtgtttaaacttctgagcagtgagacatccctgtgagcagatacaatagccaatgcaagaatctgtgtgttccttgctgtacgttagacatt

SEQ ID NO: 386364 - DNA, 120 bp, Artificial Sequence
  ENSG00000144290_31 (sequence is synthesized)
tgtaaactggattctgattgtcagttttatgagagcaatagcttccttaaagagataagtcatatttacctagtttgtattttcctactttagtgacctgaagatgcctgataatttcat

SEQ ID NO: 386365 - DNA, 120 bp, Artificial Sequence
  ENSG00000144290_32 (sequence is synthesized)
tcagaagaatttttgaaaggtagtcttacttctttttagtttttatagcttagcattagtgacttatttcaaaagacccaaatcaaaaagttagtttgaaagcattttttaataattgta

SEQ ID NO: 386366 - DNA, 120 bp, Artificial Sequence
  ENSG00000144290_33 (sequence is synthesized)
tgcatttccttgatttaatatgataaatttaatacttaacaatttatatgtaactaaaacttaaagtcatttgaaaaatatatagaaacctatttacaacttgttaaggacaatcagaca

SEQ ID NO: 386367 - DNA, 120 bp, Artificial Sequence
  ENSG00000144290_34 (sequence is synthesized)
gacataatgcagagttaagtagtatttgcttaaaattcaagttgtgactaatgatcaaatactaggcttgtacgaaatgctttagaaaaactttgtaacagttttgtgggatttttcaat

SEQ ID NO: 386368 - DNA, 120 bp, Artificial Sequence
  ENSG00000144290_35 (sequence is synthesized)
ataaacctttatcagaaatatactaagtttgtctcccactgacaacagatgttttccaaataaacatattctatacatacttgtggaatgccacatggtgaatcattgtatatgaaattc

SEQ ID NO: 386369 - DNA, 120 bp, Artificial Sequence
  ENSG00000144290_36 (sequence is synthesized)
cactcctgtacagttactctgcagctaatggtcatgcactgcttaatgctggtcctgaatcatgttctcatgttagaccaacagctctccaattgtcattttttttctgcagagtttttt

SEQ ID NO: 386370 - DNA, 120 bp, Artificial Sequence
  ENSG00000144290_37 (sequence is synthesized)
ttttccacttttaaattaaatgcatgttgtggaaaaacagtcttttaaaatgaaatttcagattccatttgagaaggttctgtagatatttcagtccatataaaataatacatctttact

SEQ ID NO: 386371 - DNA, 120 bp, Artificial Sequence
  ENSG00000144290_38 (sequence is synthesized)
aaacttatataaggggagagaaagttatgaagttttggacattactaaaagtacagtatttgatttcactttcaatgaatgtgaagttaataaaactaaatctcataatgctcttggttc

SEQ ID NO: 386372 - DNA, 120 bp, Artificial Sequence
  ENSG00000144290_39 (sequence is synthesized)
ctaagaatgagtagtaatcatcaactttataatactccaatattccgttttataataattcagagccctgtggcttttacacaccgttaattatgtactctgttggaagtgcacatgaaa

SEQ ID NO: 386373 - DNA, 120 bp, Artificial Sequence
  ENSG00000144290_40 (sequence is synthesized)
agtgaagaaaagttcctcttgtgattaaactaatgggaggaaataaatcaacaaagtctccattaagttctacattttgagaccttttaaaaattcccctcacaattctttaaggagccc

SEQ ID NO: 386374 - DNA, 120 bp, Artificial Sequence
  ENSG00000144290_41 (sequence is synthesized)
ccctttttatggaacatgagcctaaaaattatagaaagaagaattttaagttaataaagtttgtatttataaatgctgaaaaaatacagaaactttctgttccaaatgtgttgcctttgt

SEQ ID NO: 386375 - DNA, 120 bp, Artificial Sequence
  ENSG00000144290_42 (sequence is synthesized)
gtattttataatacagatactacattgtaaacatttccattgttttatgatttagccagtgattccccaaagcagcctcttagtgttttaatatattaataactgttttgttaaaaatga

SEQ ID NO: 386376 - DNA, 120 bp, Artificial Sequence
  ENSG00000144290_43 (sequence is synthesized)
tcatagtgaatttaaatcttcacatgatcacctatttgaataagcaatcatatccaatgaaattctgtatttctgagtatttttatagtcattttgttcttgtgtgaattttaaagctat

SEQ ID NO: 386377 - DNA, 120 bp, Artificial Sequence
  ENSG00000144290_44 (sequence is synthesized)
atataataaaaatgtagtattatatatttacttctaatttcagattcctggtcaaaattactaaatatcttgaatgtaatttagtgccaagtttaaataatgtgtaaatgtgactaggat

SEQ ID NO: 386378 - DNA, 120 bp, Artificial Sequence
  ENSG00000144290_45 (sequence is synthesized)
tgccaagtttaaataatgtgtaaatgtgactaggatattgtgtttttcacaattaagaaatgttatgtggaaataaatatttatcctaacttccttgcacattttaaattgtgatacaaa

SEQ ID NO: 386379 - DNA, 120 bp, Artificial Sequence
  ENSG00000144290_46 (sequence is synthesized)
atgctgagacatagagatggctgtgattatcttttgtaagacaggaaatgcagtctttaggggtttctggaaatagaaaggtcatgcagtctggaacctgtgagccttttcaatctctaa

SEQ ID NO: 386380 - DNA, 120 bp, Artificial Sequence
  ENSG00000144290_47 (sequence is synthesized)
gggactgggaggccaacaaaaggggcatactagtccatgtgggatgaaacaaaggcatgaaaaaggacctccacaccagcaagagagagaggttgatctgcattttatgaaaaagattcc

SEQ ID NO: 386381 - DNA, 120 bp, Artificial Sequence
  ENSG00000144290_48 (sequence is synthesized)
attttatttgaccctcgatggccgtctgcagcgaataagtgcaggtctccgagcgtgattttaaccttttttgcacagcagtctctgcaattagctcaccgaccttcaactttgctgtaa

SEQ ID NO: 386382 - DNA, 120 bp, Artificial Sequence
  ENSG00000144290_49 (sequence is synthesized)
accttttggttttcctacttactcttcttctgtggagttatcctcctacaattcccctccccctcgtctttctcttacctcctacttctctttcttgtaatgaaactcttcacctttagg

SEQ ID NO: 386383 - DNA, 120 bp, Artificial Sequence
  ENSG00000144290_50 (sequence is synthesized)
cgtcctttcttatccccgagtggatggatggatggatggatgagatttccactgtgtgagctgtaggacacatttatcatgcaatgtgacctctgcttctgcgccttcattggcctattc

SEQ ID NO: 386384 - DNA, 120 bp, Artificial Sequence
  ENSG00000144290_51 (sequence is synthesized)
aaagtgaagatgatgaggatgaggactttatgatgatccactttcacttaacgaacaagaaatgatgaagaagcagttgtggatagaggtggaactcgttctattctcaaaacacacttt

SEQ ID NO: 386385 - DNA, 120 bp, Artificial Sequence
  ENSG00000144290_52 (sequence is synthesized)
ccatggtcaaccatggatcaatcagcatgcacttcctcccttctgagcccataaccccaccccgcctccggactcagccagactcatacagatgttgggactaccagctgtaggaaggag

SEQ ID NO: 386386 - DNA, 120 bp, Artificial Sequence
  ENSG00000144290_53 (sequence is synthesized)
ctacccattttgggactcctcgcctgttcaggataaactgcctgtggaaaggagctacccactgtgggtctctctgctgagagctggacactcatctggacaacttgcctgtggaaagga

SEQ ID NO: 386387 - DNA, 120 bp, Artificial Sequence
  ENSG00000144290_54 (sequence is synthesized)
tgacaatgcctaaataatctagatctagttacgtgcatgctctccctctggtgcctggcggagtctccgtgggagcatggtgtaccagcttaagtctgttaattatgcgtgcagggactg

SEQ ID NO: 386388 - DNA, 120 bp, Artificial Sequence
  ENSG00000144290_55 (sequence is synthesized)
ttgaaggaaatatatttcatttttcaaaatattgtacatgcttctgcctcaatgttagagaacttttcaggataatcttgatctttggaatgataaaactgattgtaaacttgcccagta

SEQ ID NO: 386389 - DNA, 120 bp, Artificial Sequence
  ENSG00000144290_56 (sequence is synthesized)
aaggaccaaatgacataccattcttctctgtcagaaattgctattttgggatctaatttattgtatacttttaatacctgctttttgagggtgaaaatgccaattagtttgatttctctg

SEQ ID NO: 386390 - DNA, 120 bp, Artificial Sequence
  ENSG00000144290_57 (sequence is synthesized)
agagttcttccacagattctgttgctgacatgacttgaagtatccattactcatctgctctcctggagttgctggtgtacatctgggctgctcttgcactgttctctgatttttggggga

SEQ ID NO: 386391 - DNA, 120 bp, Artificial Sequence
  ENSG00000144290_58 (sequence is synthesized)
aactttactgtagtggaaagatctccagactggcagaaatataaaatttacctgggagtatttttcaaaaagtatatcctcacctacttcttctcctcacccccaccaaggacatatcag

SEQ ID NO: 386392 - DNA, 120 bp, Artificial Sequence
  ENSG00000144290_59 (sequence is synthesized)
aatctccaaggcagggttctgagaatgaagcgagtacctcaaagtgtcaaaatcagactgatctggttggaggccaacttggactagtctatatgaaaagtgagcatcttagggatccaa

SEQ ID NO: 386393 - DNA, 120 bp, Artificial Sequence
  ENSG00000144306_0 (sequence is synthesized)
atcaaaggtgacagcttccggcaactgatgcctccactggccactcctccctccgtccacctgtcacttcgggtagctgggaggccagttaaaaaaaatggaacctttttcctgtgacac

SEQ ID NO: 386394 - DNA, 120 bp, Artificial Sequence
  ENSG00000144306_1 (sequence is synthesized)
tttcgtggcattacctccagcaacagtcgataacaggattatttttggaaaaaattcagatagactctatgatgaagtacaagaggtggtttattttcctgctgtagttcatgataacct

SEQ ID NO: 386395 - DNA, 120 bp, Artificial Sequence
  ENSG00000144306_2 (sequence is synthesized)
gggagaacgtcttaagtgtacatatatagaaattgatcaagttcctgaaacatatgctgttgtcctgagtcgcccagcgtggttgtggggggcagaaatgggagccaatgagcatggagt

SEQ ID NO: 386396 - DNA, 120 bp, Artificial Sequence
  ENSG00000144306_3 (sequence is synthesized)
ttgcattgggaatgaagctgtatggggaagagaagaagtttgtgatgaagaagcactattaggaatggaccttgtcagacttggccttgaaagagctgatacagctgaaaaagccctcaa

SEQ ID NO: 386397 - DNA, 120 bp, Artificial Sequence
  ENSG00000144306_4 (sequence is synthesized)
tgtcattgttgacttactagaaaaatatggccagggtggaaattgcacagagggtagaatggtatttagctatcacaacagtttcctgatagctgataggaatgaagcctggattctgga

SEQ ID NO: 386398 - DNA, 120 bp, Artificial Sequence
  ENSG00000144306_5 (sequence is synthesized)
gactgcagggaagtactgggcagcagaaaaagtacaagagggagttcgtaatatttctaatcaactttccataacaaccaagattgcccgggaacacccagacatgagaaactatgctaa

SEQ ID NO: 386399 - DNA, 120 bp, Artificial Sequence
  ENSG00000144306_6 (sequence is synthesized)
gcggaaaggttggtgggatggtaaaaaggagtttgattttgctgcagcatattcctatcttgacacagccaagatgatgacttcatcaggcagatactgtgagggctacaagcttctaaa

SEQ ID NO: 386400 - DNA, 120 bp, Artificial Sequence
  ENSG00000144306_7 (sequence is synthesized)
taagcacaaaggaaatataacttttgaaacaatgatggaaattcttcgagataaaccaagtggcattaatatggagggagaattcctgaccactgcaagcatggtttctattttacctca

SEQ ID NO: 386401 - DNA, 120 bp, Artificial Sequence
  ENSG00000144306_8 (sequence is synthesized)
agactccagccttccttgcattcacttctttacagggactcctgatcctgagagatctgtttttaagcctttcatatttgtgccacatatttcacaactattggataccagttcaccaac

SEQ ID NO: 386402 - DNA, 120 bp, Artificial Sequence
  ENSG00000144306_9 (sequence is synthesized)
atttgaacttgaagatctagttaaaaagaaatcacattttaagcctgacagaagacacccactctaccaaaaacatcaacaggcattggaagtagtaaataataatgaggaaaaagccaa

SEQ ID NO: 386403 - DNA, 120 bp, Artificial Sequence
  ENSG00000144306_10 (sequence is synthesized)
aataatgttggacaacatgaggaaactggagaaagaactattcagagagatggaatcaatccttcaaaacaagcatcttgatgtggagaaaattgttaatctctttcctcagtgtacaaa

SEQ ID NO: 386404 - DNA, 120 bp, Artificial Sequence
  ENSG00000144306_11 (sequence is synthesized)
agatgaaattcaaatttatcagtcaaatttatcagtcaaagttagttcttagtgatcatatggtcagctaatattagttcttagtgatcagtggtcagtaatcttcaaagtcagaatcta

SEQ ID NO: 386405 - DNA, 120 bp, Artificial Sequence
  ENSG00000144306_12 (sequence is synthesized)
atagtattcaagtggtatcttgactattaaactacgtatagtgttgctgaaatagaaagaaaacagcattggaattggattcatgtatcgtgggatacaggtgttatttcaggtgatgta

SEQ ID NO: 386406 - DNA, 120 bp, Artificial Sequence
  ENSG00000144306_13 (sequence is synthesized)
tgtacttgcattattttctttagccatagtaactttttgtcacaataactaagtattcaattatatataaagagtgaaacattaaaatgacgcatggatttatatttattataattatgt

SEQ ID NO: 386407 - DNA, 120 bp, Artificial Sequence
  ENSG00000144306_14 (sequence is synthesized)
ccctcaaatcattttgtcagttacatcaagaaagcagatttttctttagtcatgaaaaatatctcaagtggtaagttgtttgtgctttaggcaaacattaaccagctctaacaagaaaaa

SEQ ID NO: 386408 - DNA, 120 bp, Artificial Sequence
  ENSG00000144306_15 (sequence is synthesized)
tgtctagatttacacattgtcaatacagtatattagttctgcaaatgcacttttgttaaactcaaacatgctctttgtcaagacttggctaaccagtgagcttgtagctctgattatcta

SEQ ID NO: 386409 - DNA, 120 bp, Artificial Sequence
  ENSG00000144306_16 (sequence is synthesized)
gcatttttagggtcattctccttaataggcttttatgttaataagatatatttttagaagagcttgtttgggagattagagaataagataaaagaaccaaaaccttaggatatactgttt

SEQ ID NO: 386410 - DNA, 120 bp, Artificial Sequence
  ENSG00000144306_17 (sequence is synthesized)
ctgggtctgaaatctctctcattgtttacttctgttcactcagtgaaaacagaaacaagaatgaggtagtggcaatgaaatagaattattagtatattatgaacattataacattttgaa

SEQ ID NO: 386411 - DNA, 120 bp, Artificial Sequence
  ENSG00000144306_18 (sequence is synthesized)
cactataatgcattatatattatgaacttttatgaactttatacatgagtaatagcttcctaaagtttataaaacattgtttaggttacataaagattaccaagtaagactcaaaattgc

SEQ ID NO: 386412 - DNA, 120 bp, Artificial Sequence
  ENSG00000144306_19 (sequence is synthesized)
aaatataaacaaaagaaaaatccaactgaaaataacactaagtatttttgagttcctagaatgtccattttggtatttggttacattatcatatttactagtcactatcagcacaattag

SEQ ID NO: 386413 - DNA, 120 bp, Artificial Sequence
  ENSG00000144306_20 (sequence is synthesized)
gttaataaagaagtgggtcattatattcaaagagtgctcaggaagttatgtgttcaaagttctctcataaataccatcgtctgcctgatactgctcttgtctaatagagggttgacatta

SEQ ID NO: 386414 - DNA, 120 bp, Artificial Sequence
  ENSG00000144306_21 (sequence is synthesized)
caaaagaaaagatgtctgactcaagaactcagttgattctgtttgccttaagtttggttcagtgataggctgtcttctaacccctatactcctcttctctcctttaatagatgaggaaac

SEQ ID NO: 386415 - DNA, 120 bp, Artificial Sequence
  ENSG00000144306_22 (sequence is synthesized)
taagggcaaacagttcgttacacttacgggaatcttatttccctctctaggggcagcatgttttcaccttctcctttgctgccaccttggcctaaactagcaccgtcttttagctagacc

SEQ ID NO: 386416 - DNA, 120 bp, Artificial Sequence
  ENSG00000144306_23 (sequence is synthesized)
attgcgttaactgttctcctacacccatttttgttctttatttccacccacatgagtcactgcagccaatctattacaaatttaaatctgattatgaattcccctcctaaaactcttttt

SEQ ID NO: 386417 - DNA, 120 bp, Artificial Sequence
  ENSG00000144306_24 (sequence is synthesized)
taaaagagactttattttttggagcagttttaggttcacagcaaaattgaacagaaagtacagagttccaatacagcccctatcagcatacatgcatagcctcccccactatcaacatcc

SEQ ID NO: 386418 - DNA, 120 bp, Artificial Sequence
  ENSG00000144306_25 (sequence is synthesized)
ttccggcaactgatgcctccactggccactcctccctccgtccacctgtcacttcgggtagctgggaggccagatagactctatgatgaagtacaagaggtggtttattttcctgctgta

SEQ ID NO: 386419 - DNA, 120 bp, Artificial Sequence
  ENSG00000144306_26 (sequence is synthesized)
acttcgggtagctgggaggccaggtgaggggcgcgcacgggggaggggcgtgcatagttgagacagaaacccggaagacccaactgtggcgcggcactgcttgaccgaggggctccggag

SEQ ID NO: 386420 - DNA, 120 bp, Artificial Sequence
  ENSG00000144306_27 (sequence is synthesized)
cccagctgcaccggctgcggtttgagcgcccagggccggggtgcggggtggaccgcggcggcccttcgaccaaaggtgcttgaagctcgagcccattactttctgtggactctgactcga

SEQ ID NO: 386421 - DNA, 120 bp, Artificial Sequence
  ENSG00000144306_28 (sequence is synthesized)
aacaatatgatgtttctgaaagcgccggctgaactaagagcgcgtgaaatagaatgacagacagctctgcaagaacggaggccctgtctattttgtacccagctgtacggtactggcgcc

SEQ ID NO: 386422 - DNA, 120 bp, Artificial Sequence
  ENSG00000144306_29 (sequence is synthesized)
gaaagacgttcaataaatacttattgaatgacgaatacgcgttaggagttgcaaaataaggacctttaggtgttctattataagtgaagatctaagattttccaagttacaactgaagag

SEQ ID NO: 386423 - DNA, 120 bp, Artificial Sequence
  ENSG00000144306_30 (sequence is synthesized)
cagcttccggcaactgatgcctccactggccactcctccctccgtccacctgtcacttcgggtagctgggaggccagcaaaataaggacctttaggtgttctattataagtgaagatcta

SEQ ID NO: 386424 - DNA, 120 bp, Artificial Sequence
  ENSG00000144320_0 (sequence is synthesized)
gtctctctgtcagtggcggctgctgcctgctctggaggcaggctgggcggtggcggccgagactggcgggggtggacgcccgggccgggctgcgcccgcttcttgcagctgtgaattcct

SEQ ID NO: 386425 - DNA, 120 bp, Artificial Sequence
  ENSG00000144320_1 (sequence is synthesized)
ttggacaattgatgatatttatcattgtgcccagtttctacaaataaaagatgggtggattattttctcgatggaggacaaaaccttcaactgtagaagttctagaaagtatagataagg

SEQ ID NO: 386426 - DNA, 120 bp, Artificial Sequence
  ENSG00000144320_2 (sequence is synthesized)
aaattcaagcattggaagaatttagggaaaaaaatcagagattacaaaaattatgggttggaagattaattctgtattcctcagttctctatctgtttacatgcttaattgtatatttgt

SEQ ID NO: 386427 - DNA, 120 bp, Artificial Sequence
  ENSG00000144320_3 (sequence is synthesized)
ggtatcttcctgatgaatttacagcaagacttgccatgacactcccattttttgcttttccattgatcatctggagcataagaacagtaattattttcttcttttccaagagaacagaaa

SEQ ID NO: 386428 - DNA, 120 bp, Artificial Sequence
  ENSG00000144320_4 (sequence is synthesized)
gaaataatgaagcattggatgatttaaaatcccagaggaaaaaaatacttgaagaagtcatggaaaaagaaacttacaagacggctaaattaattcttgaaaggtttgatccggactcaa

SEQ ID NO: 386429 - DNA, 120 bp, Artificial Sequence
  ENSG00000144320_5 (sequence is synthesized)
agaaagcaaaggagtgtgagccgccatctgctggagcagctgtaactgcaagacctggacaagagattcgtcagcgaactgcagctcaaagaaacctttctccaacaccagcaagcccta

SEQ ID NO: 386430 - DNA, 120 bp, Artificial Sequence
  ENSG00000144320_6 (sequence is synthesized)
accagggccctcctccacaagttccagtatctcctggaccaccaaaggacagttctgcccctggtggacccccagaaaggactgttactccagccctatcatcaaatgtgttaccaagac

SEQ ID NO: 386431 - DNA, 120 bp, Artificial Sequence
  ENSG00000144320_7 (sequence is synthesized)
atcttggatcccctgctacttcagtgcctggaatgggtcttcatcctccaggtccacctttagcaagacctattctcccccgagaacgaggtgctttggatagaattgttgaatatttgg

SEQ ID NO: 386432 - DNA, 120 bp, Artificial Sequence
  ENSG00000144320_8 (sequence is synthesized)
ttggtgatggtccacaaaacaggtatgcacttatatgtcagcagtgtttttctcataatggcatggctttgaaggaagaatttgaatacattgcttttcgatgtgcctactgttttttct

SEQ ID NO: 386433 - DNA, 120 bp, Artificial Sequence
  ENSG00000144320_9 (sequence is synthesized)
tgaaccctgcaagaaaaaccagacctcaggctccaagacttcctgagtttagttttgagaagaggcaggtggtggaaggttcaagttcagttggtcccttgccatcaggaagtgtgcttt

SEQ ID NO: 386434 - DNA, 120 bp, Artificial Sequence
  ENSG00000144320_10 (sequence is synthesized)
catcagacaaccagtttaatgaagaatctttagaacacgatgttcttgatgataatacagagcagacagatgacaaaataccagctacagaacagacaaaccaagtgattgaaaaagcat

SEQ ID NO: 386435 - DNA, 120 bp, Artificial Sequence
  ENSG00000144320_11 (sequence is synthesized)
ctgactcagaggaaccagaggagaaacaagagactgagaatgaggaagcctcagtgattgaaaccaactccacagttcctggagctgattctattcctgatcctgaactaagtggagaat

SEQ ID NO: 386436 - DNA, 120 bp, Artificial Sequence
  ENSG00000144320_12 (sequence is synthesized)
ctttgacggcagagtagtaaatgcttccacgtgccttcaactggatatttatagtcttactgatgtcagttattgctttttcggtggcacttactttttttgcccctctaagggtatgct

SEQ ID NO: 386437 - DNA, 120 bp, Artificial Sequence
  ENSG00000144320_13 (sequence is synthesized)
tgtgtatcatttgaattcagattgcctagctatttgaacatctcaaagttatatatactgggtattaaaattaaaagcaagttatatcagtgaagtaagatccttttgaatgtacaaaga

SEQ ID NO: 386438 - DNA, 120 bp, Artificial Sequence
  ENSG00000144320_14 (sequence is synthesized)
cccacactattgagacagcttttagatacttttttgtccattctaaaagtaagcaaacatgattgccttcttgttttctgtatgtataacccgtaaatatccattttgacataggaagaa

SEQ ID NO: 386439 - DNA, 120 bp, Artificial Sequence
  ENSG00000144320_15 (sequence is synthesized)
ctttggttaagagtaagttctctaattgtgtttgttttaaggaatgaaacttggttaagattttgactacttcattattaaaaattgatagaattttagctcctgagatatttacaactg

SEQ ID NO: 386440 - DNA, 120 bp, Artificial Sequence
  ENSG00000144320_16 (sequence is synthesized)
ggagaaatgtctatttaggtgtttacattaagcggtatgaaagttgttaccacataggcactggtacgaattctcaataagaatgcagtggaacagttaagtagaactgtaactacgttg

SEQ ID NO: 386441 - DNA, 120 bp, Artificial Sequence
  ENSG00000144320_17 (sequence is synthesized)
gcactggtacgaattctcagtgagaatgcaatgaaacagtcaactgcagtgtttctttttgatgtcttttattttacaactgggccaaaggcacattatgtatataattagtttatattt

SEQ ID NO: 386442 - DNA, 120 bp, Artificial Sequence
  ENSG00000144320_18 (sequence is synthesized)
acacactagcatataggaaatatttctgcacttgaccctatttgaattctgagcattatttataagtataaaatgatgatatataagtgaattttgtgctcttgtttgtattttattaag

SEQ ID NO: 386443 - DNA, 120 bp, Artificial Sequence
  ENSG00000144320_19 (sequence is synthesized)
gaaaatgaaaataatctggcatcagtttcattttgctaaatatctagtcttcttcaaacagtatcttggtgggtgacttggctacctgaaaaatcttaggaggaatagctcacaatacaa

SEQ ID NO: 386444 - DNA, 120 bp, Artificial Sequence
  ENSG00000144320_20 (sequence is synthesized)
taaatctgtagattctgcttagagcaaattatggtacttttattcagacttgtttcctttctagttaacagaaatagtgacatttagaggttttaatcagaagttaggtttttctgattc

SEQ ID NO: 386445 - DNA, 120 bp, Artificial Sequence
  ENSG00000144320_21 (sequence is synthesized)
aggaacatcgtaggccagccatttgtaatttttaactttgagaaacaaattttgtgagaataggtagtgggttgctggtagttaattggatttaatatttgtattaaggattaactggaa

SEQ ID NO: 386446 - DNA, 120 bp, Artificial Sequence
  ENSG00000144320_22 (sequence is synthesized)
aaaatgtgtctcagtgctaattcttggacctttaatacagtgtgcttatctgttacggcctccttttatctctcttctccaatattaaaaaaaatggaaatcaaattattatgctgaagg

SEQ ID NO: 386447 - DNA, 120 bp, Artificial Sequence
  ENSG00000144320_23 (sequence is synthesized)
gaaaaatatacctgtataagaatggtgtgtttggctaatgtttctaagttgcacacagtttattaacaactgaacaaaacatttttatcatttaaaaatctatttttatgatttaatatc

SEQ ID NO: 386448 - DNA, 120 bp, Artificial Sequence
  ENSG00000144320_24 (sequence is synthesized)
tcatatgtgacagtttttttttttttttttttttggaactcaatctgttaacagtctgggacatccggtatagtaaccagagtttttgagcctgccgtattgggcttaaatttcaggtct

SEQ ID NO: 386449 - DNA, 120 bp, Artificial Sequence
  ENSG00000144320_25 (sequence is synthesized)
gtagtcttgggcaagtcacctataaactcactgagattattttttcatctgtaaaatgggaagagttatgtttatttttgaagggtattaggataattaaaaataatgtaatgtgcctag

SEQ ID NO: 386450 - DNA, 120 bp, Artificial Sequence
  ENSG00000144320_26 (sequence is synthesized)
cacactacctgaaaacgatggcatttgttcttattaatgtctttaaaatatgcaaggaccataagtttttcctcttgcagatgaggaaagtaaaaaataatacgaacatgtaattcagct

SEQ ID NO: 386451 - DNA, 120 bp, Artificial Sequence
  ENSG00000144320_27 (sequence is synthesized)
tctcagattcaagccaatgttttttgcatcaacttttctatattgtatgtatgtatataaatacatagattaaggaaataggaaactgaaactctgtggaatataaactttttaaaaata

SEQ ID NO: 386452 - DNA, 120 bp, Artificial Sequence
  ENSG00000144320_28 (sequence is synthesized)
atttcatcaggttttttgtatgttactgacccatatggattttagtaacatcttgcttagtcatgttgttataaaacattcaaattctgatatacattgcttgaaaatgagtgagtacct

SEQ ID NO: 386453 - DNA, 120 bp, Artificial Sequence
  ENSG00000144320_29 (sequence is synthesized)
cagagaaatttgatagactcaaacagatagtatgagaaatatctttgaaagaaatatggaggaaggttaaaaggggattagtaaaattaatgcgataggtaacatgtttgtaaccatata

SEQ ID NO: 386454 - DNA, 120 bp, Artificial Sequence
  ENSG00000144320_30 (sequence is synthesized)
ccttttagatacaaaagcttattttcattattattataataaacagttaatggttgaaacttagtaaaatgtcctatttctgattattaagactagtataaatgagaaaatccaagctat

SEQ ID NO: 386455 - DNA, 120 bp, Artificial Sequence
  ENSG00000144320_31 (sequence is synthesized)
gtctagcttctgtctctccgtcttcccgccatcattgtgctgtagccatatggaactcctttcagttctctgaccatgccctttcctgcctcagatttcagcttaaattttgcctcctca

SEQ ID NO: 386456 - DNA, 120 bp, Artificial Sequence
  ENSG00000144320_32 (sequence is synthesized)
gagagatgccttcccaaactccccatctgaagctggcctctgccttttactccctatcatgtcactctctgctcaccatccttatcacaatgtgtatttgatttgtttgctagtttactg

SEQ ID NO: 386457 - DNA, 120 bp, Artificial Sequence
  ENSG00000144320_33 (sequence is synthesized)
tcttcacaacataatgtccgtttgtgcaagggtcttatttttcttattcatgtctgtatctcaagggtctagcacaatgcttgatgcatattgtgtgaataaatactttgttgccaaatc

SEQ ID NO: 386458 - DNA, 120 bp, Artificial Sequence
  ENSG00000144320_34 (sequence is synthesized)
cagtgaaaactctcagttcttgtttcactgcttggcagtattgacattgaatattctctgagatactttttttcttttggcttttcatatatcacactattattctcttatttctctggc

SEQ ID NO: 386459 - DNA, 120 bp, Artificial Sequence
  ENSG00000144320_35 (sequence is synthesized)
ctcttgctctcaacgtcctgtaagtgttggtgttccttaagttctacctagtgtcatcatttcttcattctgcatattctttccctagggtttcttcccaacaccaaaggacttaccatc

SEQ ID NO: 386460 - DNA, 120 bp, Artificial Sequence
  ENSG00000144320_36 (sequence is synthesized)
tgtctctctgaatctcagatctccagctttgatctgtttcctttactttagagctatatatttgcctgcctactggcctgtctctcacaatccatatattcaagaatgaacactatactt

SEQ ID NO: 386461 - DNA, 120 bp, Artificial Sequence
  ENSG00000144320_37 (sequence is synthesized)
tgcttcaaaccttcagaacattcaaaccgtttatgtttctcatctaatcaaatagagttactctctaagccagaagctgtaaactcatctcttttccctttattcaagctgtcaattttt

SEQ ID NO: 386462 - DNA, 120 bp, Artificial Sequence
  ENSG00000144320_38 (sequence is synthesized)
gtctcctaaacatcttctagttatattctcatttctctgttcacattgcattaataatgatgataaacatttgcattcttattctgtgccaggcaacatgctaactgctgtatatatatt

SEQ ID NO: 386463 - DNA, 120 bp, Artificial Sequence
  ENSG00000144320_39 (sequence is synthesized)
attatatttgtactttggcaagaatcctgtgaagatttttatctttggactactagaagagaaagctgagttgtagagagagtatgtatttaagtccgtttgggctgctataacagaata

SEQ ID NO: 386464 - DNA, 120 bp, Artificial Sequence
  ENSG00000144320_40 (sequence is synthesized)
ccacagactgggtaacgtgatgaacaaaaatttatttggctcacagttctggaacctgggaaatccaaaggcatgatgctagcatctggtgagggcctttgtgctttgtcatcccatgcc

SEQ ID NO: 386465 - DNA, 120 bp, Artificial Sequence
  ENSG00000144320_41 (sequence is synthesized)
agaaggcagaagggtaagagagggcaagagtgagcaagagatggaagttgcaacctcaagctcttttataatgagcattaatccattcatgagggcttcaccctcatgacctaaacatct

SEQ ID NO: 386466 - DNA, 120 bp, Artificial Sequence
  ENSG00000144320_42 (sequence is synthesized)
ccattaggctccaccttccaatgcaacagttagcataagttttcaacacatgctttttgtagcattcaaaccatagcaggaagcaactttgcttaaaattgtatacctggtaagtggaaa

SEQ ID NO: 386467 - DNA, 120 bp, Artificial Sequence
  ENSG00000144320_43 (sequence is synthesized)
aagagggatttgaatataggcaaatgacttcagaggatttactcttaatttctgttgtactgccttctaatcttggcctccatcatttcagattaccaaagctgtctcttaactggtttc

SEQ ID NO: 386468 - DNA, 120 bp, Artificial Sequence
  ENSG00000144320_44 (sequence is synthesized)
tttgtctccaaccttgtgcacttgctatctattctgtgtgctgcagcctgagtttttaaaaaacagaaaatgaggggccaggtgtggtggtggctcacgcctgtaatcccagcaagttgg

SEQ ID NO: 386469 - DNA, 77 bp, Artificial Sequence
  ENSG00000144320_45 (sequence is synthesized)
ggtgtggtggtggctcacgcctgtaatcccagcaagttgggaggctgaggcgggcagatcatcactatctctactaa

SEQ ID NO: 386470 - DNA, 120 bp, Artificial Sequence
  ENSG00000144320_46 (sequence is synthesized)
aaaaaaaaaaaagaaagaaagaaaatgaatctgccacgccattgcttagaccctttaatgactcttgagtgttcttgggatgaggtccaaatttactaataaggcctgcaaagccctgtg

SEQ ID NO: 386471 - DNA, 120 bp, Artificial Sequence
  ENSG00000144320_47 (sequence is synthesized)
taattttgctcctagttatggctggcatctgcaccacaactacagccactgccacctccccctgccacacacacattttaaaagtaacaatagtagtgttttctgtgttttgcatatgca

SEQ ID NO: 386472 - DNA, 120 bp, Artificial Sequence
  ENSG00000144320_48 (sequence is synthesized)
gtcttttctcatctcccagccttcttgagcttttcctctgcctgagatacgctcccactcacatagacattgggggcactaaataaaaatagctgtttaattgaattggaatcgttccac

SEQ ID NO: 386473 - DNA, 120 bp, Artificial Sequence
  ENSG00000144320_49 (sequence is synthesized)
ttggaacccaagtttggaaattttgctacttcttgttaagctaggccttttattcttgaagttgctatttctcatacaaactcattttatgcattagacacacagtcactattgttatgg

SEQ ID NO: 386474 - DNA, 120 bp, Artificial Sequence
  ENSG00000144320_50 (sequence is synthesized)
agaacatagttgtatcagaagaggtatagctttgggtgtggatgtgcgtgtgtcaggggaaagatattctgattatatgatgattttcataaaatatagtatgctgagtttccgaaaatc

SEQ ID NO: 386475 - DNA, 120 bp, Artificial Sequence
  ENSG00000144320_51 (sequence is synthesized)
ctaaatgacttagaaatggtgctatatgtggtttgtttgacccctgcaaatctcatgttgaaatttgatccccattgctggaggtgttttgagcatggagcggatccctcatgaatgtct

SEQ ID NO: 386476 - DNA, 120 bp, Artificial Sequence
  ENSG00000144320_52 (sequence is synthesized)
tggcgttgtccttgcagtaatgagttcttgctctatttttcctcccctggaagctgattgtttaaaagagcctggtatcctccctccctttcttctttgcttcctctctcttgctgtgtg

SEQ ID NO: 386477 - DNA, 120 bp, Artificial Sequence
  ENSG00000144320_53 (sequence is synthesized)
atctctgcacacaccagctcccctttgctttctgccatgagtggtctgaggctctcaccagaagccaagcagaggctggcaccatgcttctagtacagcctgcagaactgtaagccaaat

SEQ ID NO: 386478 - DNA, 120 bp, Artificial Sequence
  ENSG00000144320_54 (sequence is synthesized)
ttttttgtttgttttgtttttttttcagtaaattacccagcctcaggtattccttaacaacacaaatgggctaagacacagggtcatagggatagcaggcacctgagccaagccagaact

SEQ ID NO: 386479 - DNA, 120 bp, Artificial Sequence
  ENSG00000144320_55 (sequence is synthesized)
acctgagccaagccagaacttagatctcaactgttaatgcaggatgatttgtattgaaccatgaattttacactgcctctcaatgttggtgtcagcatttaaggttatttaaaaaataca

SEQ ID NO: 386480 - DNA, 120 bp, Artificial Sequence
  ENSG00000144320_56 (sequence is synthesized)
acctgaaggttacataaagtttcatttaaaaaataagaccttataagtctacttttatttccagtggacagcaactacttaatcgtcttaaaactttcttcttacaatattactttacaa

SEQ ID NO: 386481 - DNA, 120 bp, Artificial Sequence
  ENSG00000144320_57 (sequence is synthesized)
tattacctgttggatttattatctgtgtacaaatcagttagttgaagggccaaagaataaaggcattttgtgaattatgaatagctattttgaaatggtcatggagactagctactctag

SEQ ID NO: 386482 - DNA, 120 bp, Artificial Sequence
  ENSG00000144320_58 (sequence is synthesized)
aaaattgggagaatatactgtattaagttactatctggtataacttcaattaattgtgaaaattgtagcagagatctagatatagtttatgaacttctaaagagacattaaagggaattc

SEQ ID NO: 386483 - DNA, 120 bp, Artificial Sequence
  ENSG00000144320_59 (sequence is synthesized)
aagtacttgtgtaaagatgaaccaaggtagagatgattgtgaattggtgatctgctgtatgttacagttatgtaatttgacttgtttcaaaattattaaagttttaagtgtatgcattct

SEQ ID NO: 386484 - DNA, 120 bp, Artificial Sequence
  ENSG00000144320_60 (sequence is synthesized)
actggtcaataagtaaatatattcaggctctgaatgtagacagataaatatataaatatagaaagtacatttgttagaatacaaacaagaataaaaattgagtacagaatgaaaacctta

SEQ ID NO: 386485 - DNA, 120 bp, Artificial Sequence
  ENSG00000144320_61 (sequence is synthesized)
aagacatctcaggttttaataatattcattgtgaatctctaagagggttccaacttttccagccttatctgaccacagatttggaggctttcatccccagcactatactctgggaaacac

SEQ ID NO: 386486 - DNA, 120 bp, Artificial Sequence
  ENSG00000144320_62 (sequence is synthesized)
aagtgttcagttgtcaaatatgtttctgctaatttaataaagatatattcatttaactgttagtttattttaaatttgatgtataaattatatttttaaatgcttgaaatttgggctttg

SEQ ID NO: 386487 - DNA, 120 bp, Artificial Sequence
  ENSG00000144320_63 (sequence is synthesized)
taatttgttatggcatatttagctgtgttaaaatataaattagccatgatggctaaattagtctctgtcatgagctttgtttgcatttgtaactggtctgttcatttttccttacggtgt

SEQ ID NO: 386488 - DNA, 120 bp, Artificial Sequence
  ENSG00000144320_64 (sequence is synthesized)
acctaatgattctggttactagaaatgtaatctcactaattcatttaaatcattaatattattctgctgtcaacctgctgtgtaacttattacatagttagcctgctatgtaacctgtta

SEQ ID NO: 386489 - DNA, 120 bp, Artificial Sequence
  ENSG00000144320_65 (sequence is synthesized)
tgccttttctgcctttaattttaaaaattaaaattctaataattaggaagtatgctttagttctgtttagagcatctaccatattattatttaaataacatacacagtaacttttaaaag

SEQ ID NO: 386490 - DNA, 120 bp, Artificial Sequence
  ENSG00000144320_66 (sequence is synthesized)
gttcttttgaatatctgcaaaagtgatcttgtgagttaactaattagttcttgaactttgcttggtttgtggttttgcttatttttaaaaaattctctgcagcttttcgatgtgcctact

SEQ ID NO: 386491 - DNA, 120 bp, Artificial Sequence
  ENSG00000144320_67 (sequence is synthesized)
ctttttgacgtccaagagtgacagagcctcaagcactcctggggaccgggctgacttttctccactggcttggttgggaactggcttcttcggagctgtgtagtcttaatttgctttgct

SEQ ID NO: 386492 - DNA, 120 bp, Artificial Sequence
  ENSG00000144320_68 (sequence is synthesized)
gctggctggctgacagctgatgggggactcctcaggacggactcccttccagatgcacccatctccatccttctcaactccccaacctttgtcctccccactcttcgctcgcgcggcggt

SEQ ID NO: 386493 - DNA, 120 bp, Artificial Sequence
  ENSG00000144320_69 (sequence is synthesized)
aaaatttctaacaagtataggtagttcttggtaatggaattaaattttatgtgtatttcatgtatataaattttgtatgtatttatttatttaataggtcttcatcctccaggtccacct

SEQ ID NO: 386494 - DNA, 120 bp, Artificial Sequence
  ENSG00000144320_70 (sequence is synthesized)
cctaatgttaacaactcttatggaaactacaatgaactgatattcattaccctcttggattgttgagtatgtaattgacaaaaccttcaactgtagaagttctagaaagtatagataagg

SEQ ID NO: 386495 - DNA, 120 bp, Artificial Sequence
  ENSG00000144331_0 (sequence is synthesized)
gcagtgtcaacgagcccccgaacggttccgcctcattccctctctgtgtgcctcgcaagtctctgcttagtaaaccgtcacagcttcggcgcgcgagagtggcgttggcacgtccaaacc

SEQ ID NO: 386496 - DNA, 80 bp, Artificial Sequence
  ENSG00000144331_1 (sequence is synthesized)
gggctccgggcacacgcccctcacctgggcgaggcccggtgcgcaggcgctcagcgcgggggcagcggccgggcgcttaa

SEQ ID NO: 386497 - DNA, 120 bp, Artificial Sequence
  ENSG00000144331_2 (sequence is synthesized)
gcgcttaagcccggcgcgggcaagagttggacagttcaggggccgcgccgggccgagctgtcgcccgcgccacctccaccgccgccgctgctaccgccaccgccaccgcctgggctgcag

SEQ ID NO: 386498 - DNA, 120 bp, Artificial Sequence
  ENSG00000144331_3 (sequence is synthesized)
cgccaccgcctgggctgcagcagatcgcgggagaacgtctgcgcgaagccccggtgcagccctggcgggaccgcagcaaccaccggagcgtgagcaacagcttcccggctggaggagcca

SEQ ID NO: 386499 - DNA, 120 bp, Artificial Sequence
  ENSG00000144331_4 (sequence is synthesized)
ctgccccacgcgcccgcggcccgcgcgccgagatgttctacatttcaactccatcaaatattaaattgatgtttatgggctaacctggaaaccgaaaaacagtttgtttcactacaagaa

SEQ ID NO: 386500 - DNA, 120 bp, Artificial Sequence
  ENSG00000144331_5 (sequence is synthesized)
taagaaaatatgtccaaattcctgtcagctgacttataaagggacttttagaacacaacccaatgcatgaggtactccttaagccctgacaaccatcttgaagatggaatcatgaatatg

SEQ ID NO: 386501 - DNA, 120 bp, Artificial Sequence
  ENSG00000144331_6 (sequence is synthesized)
gcaaattttctacggggctttgaagaaaaggggataaagaacgacaggcctgaggaccagttgagcaaagagaaaaagaaaattcttttctccttctgtgaggtgtgcaacatccagctg

SEQ ID NO: 386502 - DNA, 120 bp, Artificial Sequence
  ENSG00000144331_7 (sequence is synthesized)
aactctgcagcccaggctcaggtgcattccaacggcaaatcccaccgcaaacgagtgaagcagctgagtgatgggcagcccccaccacccgcccaggccagccccagcagcaacagcagc

SEQ ID NO: 386503 - DNA, 120 bp, Artificial Sequence
  ENSG00000144331_8 (sequence is synthesized)
acaggcagtacatgccacactactacccttcctgctcttgtgcgcacacctaccctgatgatgcagccttcactggatatcaaaccatttatgtcttttccagtggacagtagttctgct

SEQ ID NO: 386504 - DNA, 120 bp, Artificial Sequence
  ENSG00000144331_9 (sequence is synthesized)
gttgggctctttccaaattttaacacaatggatcctgtgcaaaaagcggttattaaccatacatttggagtatccattcccccaaagaagaaacaagttatttcttgtaatgtctgtcag

SEQ ID NO: 386505 - DNA, 120 bp, Artificial Sequence
  ENSG00000144331_10 (sequence is synthesized)
cttcgctttaactcagatagccaggccgaggcccactacaaaggaagtaaacatgccaagaaggtcaaagcactagacgcaacgaaaaataaacccaaaatggttccttccaaggacagc

SEQ ID NO: 386506 - DNA, 120 bp, Artificial Sequence
  ENSG00000144331_11 (sequence is synthesized)
gcaaaggctaatcccagctgctccatcactccaatcacaggcaacaactctgacaaatcagaagataaagggaagttaaaagccagcagttccagtcagccatcaagctctgaaagtggc

SEQ ID NO: 386507 - DNA, 120 bp, Artificial Sequence
  ENSG00000144331_12 (sequence is synthesized)
tcatttctcctcaaatctggcacaacacccctgccacctggagcagccacttctccctccaagagcacaaatggagctcccggtactgttgttgaatcagaagaagaaaaagccaaaaaa

SEQ ID NO: 386508 - DNA, 120 bp, Artificial Sequence
  ENSG00000144331_13 (sequence is synthesized)
ttactttattgttcactatgcaaagtggctgtgaactccctgtcacagctagaggcacacaacacaggatctaaacacaagaccatggttgaagctcgtaatggggctggtccaattaaa

SEQ ID NO: 386509 - DNA, 120 bp, Artificial Sequence
  ENSG00000144331_14 (sequence is synthesized)
gaatggcagtaaggggtcaggactacagaacaagacatttcattgtgaaatctgtgatgttcatgttaattcagaaattcaactcaaacagcacatttctagccgaaggcataaagatcg

SEQ ID NO: 386510 - DNA, 120 bp, Artificial Sequence
  ENSG00000144331_15 (sequence is synthesized)
agttgcagggaaaccactgaagccaaaatacagcccttacaacaaactccagcggagcccgagtattctagcagcaaaacttgcattccagaaagatatgatgaagcctttggccccagc

SEQ ID NO: 386511 - DNA, 120 bp, Artificial Sequence
  ENSG00000144331_16 (sequence is synthesized)
cttcctgtcctcacctctcgcagcggcggcagccgtgtcctcagcgctgtcactcccaccccggccctctgcctcgctcttccaggctccagccattcctccagctcttctgaggcctgg

SEQ ID NO: 386512 - DNA, 120 bp, Artificial Sequence
  ENSG00000144331_17 (sequence is synthesized)
gcatgggcccatccgcgccactcctgcctccatcctctttgctccgtactaacgtctgcaaaccccaagacgtttgaggccagtaggaagttgagaaagaaagccacaaggattcagcaa

SEQ ID NO: 386513 - DNA, 120 bp, Artificial Sequence
  ENSG00000144331_18 (sequence is synthesized)
tttaagcagtttgtgttgcagtaccccccattcacccacaaaatgcagcccaccacccagtcccccaattccagagagaaacacatcactagattgacgagggcttttagagactgctcc

SEQ ID NO: 386514 - DNA, 120 bp, Artificial Sequence
  ENSG00000144331_19 (sequence is synthesized)
tataattgaggaatcagcagcataggctttatctccctacttcctcccccaccctaccgcgttcaatttgtgtatctcagatatttgatttcttgagcatgtattggtcagaaagaaaaa

SEQ ID NO: 386515 - DNA, 120 bp, Artificial Sequence
  ENSG00000144331_20 (sequence is synthesized)
gaaagaaaaccattctctatttttccatgggtatgatctggcttaaaacaatatggaatattttcctgacagacttgaaaactaggatcttcctcagatgtctgtaaataactctggtat

SEQ ID NO: 386516 - DNA, 120 bp, Artificial Sequence
  ENSG00000144331_21 (sequence is synthesized)
ccaactgggtgtattctagtgtggaacaaaaaacagtgaacacaagtgcttacttgtggatactatcttaccaacggatcacaaagttctctttttggtgtactgttgttgacagggatt

SEQ ID NO: 386517 - DNA, 120 bp, Artificial Sequence
  ENSG00000144331_22 (sequence is synthesized)
gtgtactgtttcgacccaagtactgctgtatcctgtgtagtactagatctgtatctcttgtctgaattaaacatttttagttgctgtgtaaatgttaggaagcaaagtagctttgaattt

SEQ ID NO: 386518 - DNA, 120 bp, Artificial Sequence
  ENSG00000144331_23 (sequence is synthesized)
tctctgtaagagaataaaagataaaataatgtattttctttatttcacattttatttggagatatttaaatgaaatagaaagccatataacatagctataattactacctgtttgctatt

SEQ ID NO: 386519 - DNA, 120 bp, Artificial Sequence
  ENSG00000144331_24 (sequence is synthesized)
tttgtttaacttattttgtagcttcctcactggtttgtgttgctaagcaaacgtatacaaacagaaaaagagcttcctaaattgcacatttttgcacctcttgtgcattctgcaagaaga

SEQ ID NO: 386520 - DNA, 120 bp, Artificial Sequence
  ENSG00000144331_25 (sequence is synthesized)
caatgaatccatgtatttctatataagtatcttcttcatttttaacctgttttcatttgtaatgatgctacataattttgtggctccctaatgcaataatgtacagaagataaaaaaatt

SEQ ID NO: 386521 - DNA, 120 bp, Artificial Sequence
  ENSG00000144331_26 (sequence is synthesized)
tataattgaacaatttgtctttctgttcgctgaatatattgcaggtcatgctcccatgcccccctttctaagccgatatcaacaagactggaatgtttgtgatatcaggggcaagagtta

SEQ ID NO: 386522 - DNA, 120 bp, Artificial Sequence
  ENSG00000144331_27 (sequence is synthesized)
tcatagaacaacaaaatagagtggactcttttagagcatctatatctgcaacctgtaaatggtaaaatgtctgtgtatttttttaaatgtaccttttcaataaaagtacaaaaaataaaa

SEQ ID NO: 386523 - DNA, 120 bp, Artificial Sequence
  ENSG00000144331_28 (sequence is synthesized)
agtgcttctggtttcagcacacatggagatatagaattgaaattgctctgctttctttacaaatgactcagagtgtgcttgtccttccctaaaatgttgccagcatgtaaaggattttca

SEQ ID NO: 386524 - DNA, 120 bp, Artificial Sequence
  ENSG00000144331_29 (sequence is synthesized)
atgagcagtgcaataagccagcaactgggaaggcttggagcggcactgatataacgtggtgctgtcacacagataatcagggctggagccaagtctcggtagcgctgtgcattatcctgg

SEQ ID NO: 386525 - DNA, 120 bp, Artificial Sequence
  ENSG00000144331_30 (sequence is synthesized)
agggtgacataatggtagaacacagaacacttgtagaaatacttgaggaatgagtctgtgaggtttaatttgtgctaaaaattcatcaacacatctagagcaacgcaaatcttcccaaga

SEQ ID NO: 386526 - DNA, 120 bp, Artificial Sequence
  ENSG00000144331_31 (sequence is synthesized)
agtagactataagcttttggaaaacagggactatgtcttcttcaacaatgtgtacacaacaagtagcaggttgtttggcacatggcagatgctcgatacgttgatctggcagcggcatgg

SEQ ID NO: 386527 - DNA, 120 bp, Artificial Sequence
  ENSG00000144331_32 (sequence is synthesized)
gagatggatccaaagagattaaaactggagtgaaggagtccagtaatgatgtgaagagatgagggtctgaactaggacagaagtcagtcacagggatggatttgagacgttttggagggt

SEQ ID NO: 386528 - DNA, 120 bp, Artificial Sequence
  ENSG00000144331_33 (sequence is synthesized)
cagaaaccagaataaaggggagaacaagatggatcctgtgcaaaaagcggttattaaccatacatttggagtatccattcccccaaagaagaaacaagttatttcttgtaatgtctgtca

SEQ ID NO: 386529 - DNA, 120 bp, Artificial Sequence
  ENSG00000144331_34 (sequence is synthesized)
gcttcgctttaactcagatgggaaggaaggagccgcaagccaaggaatgtgggcaacctctagaagctggaaaagacaaagaaatggattttcccttaaagcctccagaaggaatgcagc

SEQ ID NO: 386530 - DNA, 120 bp, Artificial Sequence
  ENSG00000144331_35 (sequence is synthesized)
agggggatagctccctcatcttggatctaggggagcttataacatcttttaaaaggcgaaaattcaagttatctgtggactgtcagaacattttgcataagtcatccccagatgttctac

SEQ ID NO: 386531 - DNA, 120 bp, Artificial Sequence
  ENSG00000144331_36 (sequence is synthesized)
agtaattagagctaagcggcaattacaggacgtatgatttgttcagaagcactgcctgccggctgtttcctagcaccacatttcacgggagcaccaggttgagatgatggaattatttac

SEQ ID NO: 386532 - DNA, 120 bp, Artificial Sequence
  ENSG00000144331_37 (sequence is synthesized)
agacccaccatgctgtgtcctcttgtatgtccctttctttatcctagtcccaatgtcacatggttctggggcctcatcttcagtgctagagtttcaaggattatgtgtacttggagggga

SEQ ID NO: 386533 - DNA, 120 bp, Artificial Sequence
  ENSG00000144331_38 (sequence is synthesized)
aagcataccagtggtgtgaacaaggaacgagaattaagatctaaaacccaggagagaggaaaacaaatctcaaccacagcatctcttcttcagtacctatgtggtggtctttcttcctgc

SEQ ID NO: 386534 - DNA, 120 bp, Artificial Sequence
  ENSG00000144331_39 (sequence is synthesized)
attctctgcttcctctgccactcttttacccacctcctagtacctgtagtctaacagtattgatgtcactcactttgtgactacagatttggactagaagtaatagaaaccacctatatt

SEQ ID NO: 386535 - DNA, 120 bp, Artificial Sequence
  ENSG00000144339_0 (sequence is synthesized)
agagggatgcgggcggcagagctcgagaggcggctgccgggctgcggggcgccttgactctccctccaccctgcctcctcgggctccactcgtctgcccctggactcccgtctcctcctg

SEQ ID NO: 386536 - DNA, 120 bp, Artificial Sequence
  ENSG00000144339_1 (sequence is synthesized)
tcctccggcttcccagagctccctccttatggcagcagcttcccgcgtctccggcgcagcttctcagcggacgaccctctcgctccggggctgagcccagtccctggatgttgctgaaac

SEQ ID NO: 386537 - DNA, 120 bp, Artificial Sequence
  ENSG00000144339_2 (sequence is synthesized)
tctcgagatcatgcgcgggtttggctgctgcttccccgccgggtgccactgccaccgccgccgcctctgctgccgccgtccgcgggatgctcagtagcccgctgcccggcccccgcgatc

SEQ ID NO: 386538 - DNA, 120 bp, Artificial Sequence
  ENSG00000144339_3 (sequence is synthesized)
ctgtgttcctcggaagccgtttgctgctgcagagttgcacgaactagtcatggtgctgtgggagtccccgcggcagtgcagcagctggacactttgcgagggcttttgctggctgctgct

SEQ ID NO: 386539 - DNA, 120 bp, Artificial Sequence
  ENSG00000144339_4 (sequence is synthesized)
gctgcccgtcatgctactcatcgtagcccgcccggtgaagctcgctgctttccctacctccttaagtgactgccaaacgcccaccggctggaattgctctggttatgatgacagagaaaa

SEQ ID NO: 386540 - DNA, 120 bp, Artificial Sequence
  ENSG00000144339_5 (sequence is synthesized)
tgatctcttcctctgtgacaccaacacctgtaaatttgatggggaatgtttaagaattggagacactgtgacttgcgtctgtcagttcaagtgcaacaatgactatgtgcctgtgtgtgg

SEQ ID NO: 386541 - DNA, 120 bp, Artificial Sequence
  ENSG00000144339_6 (sequence is synthesized)
ctccaatggggagagctaccagaatgagtgttacctgcgacaggctgcatgcaaacagcagagtgagatacttgtggtgtcagaaggatcatgtgccacagatgcaggatcaggatctgg

SEQ ID NO: 386542 - DNA, 120 bp, Artificial Sequence
  ENSG00000144339_7 (sequence is synthesized)
agatggagtccatgaaggctctggagaaactagtcaaaaggagacatccacctgtgatatttgccagtttggtgcagaatgtgacgaagatgccgaggatgtctggtgtgtgtgtaatat

SEQ ID NO: 386543 - DNA, 120 bp, Artificial Sequence
  ENSG00000144339_8 (sequence is synthesized)
tgactgttctcaaaccaacttcaatcccctctgcgcttctgatgggaaatcttatgataatgcatgccaaatcaaagaagcatcgtgtcagaaacaggagaaaattgaagtcatgtcttt

SEQ ID NO: 386544 - DNA, 120 bp, Artificial Sequence
  ENSG00000144339_9 (sequence is synthesized)
gggtcgatgtcaagataacacaactacaactactaagtctgaagatgggcattatgcaagaacagattatgcagagaatgctaacaaattagaagaaagtgccagagaacaccacatacc

SEQ ID NO: 386545 - DNA, 120 bp, Artificial Sequence
  ENSG00000144339_10 (sequence is synthesized)
ttgtccggaacattacaatggcttctgcatgcatgggaagtgtgagcattctatcaatatgcaggagccatcttgcaggtgtgatgctggttatactggacaacactgtgaaaaaaagga

SEQ ID NO: 386546 - DNA, 120 bp, Artificial Sequence
  ENSG00000144339_11 (sequence is synthesized)
tcagtatgtcttaatcgcagctgtgattggaacaattcagattgctgtcatctgtgtggtggtcctctgcatcacaaggaaatgccccagaagcaacagaattcacagacagaagcaaaa

SEQ ID NO: 386547 - DNA, 120 bp, Artificial Sequence
  ENSG00000144339_12 (sequence is synthesized)
tacagggcactacagttcagacaatacaacaagagcgtccacgaggttaatctaaagggagcatgtttcacagtggctggactaccgagagcttggactacacaatacagtattatagac

SEQ ID NO: 386548 - DNA, 120 bp, Artificial Sequence
  ENSG00000144339_13 (sequence is synthesized)
aaaagaataagacaagagatctacacatgttgccttgcatttgtggtaatctacaccaatgaaaacatgtactacagctatatttgattatgtatggatatatttgaaatagtatacatt

SEQ ID NO: 386549 - DNA, 120 bp, Artificial Sequence
  ENSG00000144339_14 (sequence is synthesized)
gtcttgatgttttttctgtaatgtaaataaactatttatatcacacaatatagttttttctttcccatgtatttgttatatataataaatactcagtgatgagaaaaaattggcattctt

SEQ ID NO: 386550 - DNA, 120 bp, Artificial Sequence
  ENSG00000144339_15 (sequence is synthesized)
aaatttgcggtatctcataactgtaaatataatcagactagtacaatctgtacagctaccaatatttcatgtttcttctcatcttgagacagcacattagttcgtacaggactcagtggc

SEQ ID NO: 386551 - DNA, 120 bp, Artificial Sequence
  ENSG00000144339_16 (sequence is synthesized)
taggttttgaatgattccaagatcaagggaaatgatggttattggaaaagagaaaaaataatttactttatatcgagtgaggataaaatatttccgatctttgaatcatctctatttcat

SEQ ID NO: 386552 - DNA, 120 bp, Artificial Sequence
  ENSG00000144339_17 (sequence is synthesized)
caactttcttccctggtcttccattttcatccctagagcagaaaaatctctggcatataaactaaataaaagaagaaggggagggaaagtgttttataactcataaaggagagggaaaga

SEQ ID NO: 386553 - DNA, 120 bp, Artificial Sequence
  ENSG00000144339_18 (sequence is synthesized)
aaatattggtttttattggggaagtagcttagaatcccccagttaagtgcatatatctgaacttactgaacaagttacatactaggtatacacagagtggcaaaatatattccatttagg

SEQ ID NO: 386554 - DNA, 120 bp, Artificial Sequence
  ENSG00000144339_19 (sequence is synthesized)
tgggtggaattaccaggggaaaaatgtaataacaccactagatgtgaaacaccaaaatcgtgaattctcaaaagcaccatacaatatgtatagtatatagttctttgaaaagaagttaga

SEQ ID NO: 386555 - DNA, 120 bp, Artificial Sequence
  ENSG00000144339_20 (sequence is synthesized)
atcacaaccaataccccatgaatagctttgtggctaatgcagcaccataatttgtaatggaactaagatgatgatgacgatatttcatgaaaacagagagatgttttgagcatatttatg

SEQ ID NO: 386556 - DNA, 120 bp, Artificial Sequence
  ENSG00000144339_21 (sequence is synthesized)
tggtgaggtaagaaagaaaattaatcctatagcatctgaaagacctcactgggaagttggtatggatttttgtttgatttgtgcatacaaataggtatcacaacttgatctggaaaaaat

SEQ ID NO: 386557 - DNA, 120 bp, Artificial Sequence
  ENSG00000144339_22 (sequence is synthesized)
aagctgtgaaaattctcaaggaataagatgaaaataaatcaattattatcatttagctctgcaaagctttccatggctaacacagtaaatttaaataaagctctctttgtctccttcaaa

SEQ ID NO: 386558 - DNA, 120 bp, Artificial Sequence
  ENSG00000144339_23 (sequence is synthesized)
atattattatgtatatttacttatgtatgttccatttcagatatttaagacaaatttcatattttgcattttaggaaaggtgaaaccataaaaaattgtcaccatattaagtacatgtat

SEQ ID NO: 386559 - DNA, 120 bp, Artificial Sequence
  ENSG00000144339_24 (sequence is synthesized)
ataccgtgcaaattatttggcatacttatgaatcatactctatctccagttaaccttccttgttcatttgtttgtttgtttgtttgtaagttatctttgatatggataggcataatgtaa

SEQ ID NO: 386560 - DNA, 120 bp, Artificial Sequence
  ENSG00000144339_25 (sequence is synthesized)
aaacttctgaagagaagcatgtaagcatatttggcagggaagaaagaattcatgaggaaatcatttaaatattggatttttaaatatatgacactgctctcaattactaggtgctaataa

SEQ ID NO: 386561 - DNA, 120 bp, Artificial Sequence
  ENSG00000144339_26 (sequence is synthesized)
gacatacataacctaccatatagccaaggttttaattatcagatttataatttgaaactgaaggaactttagttcataaaagtgaaaaagataaaatgaagtccaatgaaagtaaaatat

SEQ ID NO: 386562 - DNA, 120 bp, Artificial Sequence
  ENSG00000144339_27 (sequence is synthesized)
tatctttgcttccttgattaaatctatagttatttttactaaagtatgatatatgttcccattatttagttttgtttagggaagtatataagatgagagagagagagagagaaactttaa

SEQ ID NO: 386563 - DNA, 120 bp, Artificial Sequence
  ENSG00000144339_28 (sequence is synthesized)
aagtttgatctaatgtacttactaccaaataaagattttacctatagattgaaactaaattgtaaatgtcccaaatacttttcccgatgaaattcaaacaaaattagacttttatacaca

SEQ ID NO: 386564 - DNA, 120 bp, Artificial Sequence
  ENSG00000144339_29 (sequence is synthesized)
caaagcaaaacaaaacacaacctatatataatttcaagattaagaaaaacaaaacaaataaaagcattctctcaagaccttgcttcagttgtgtaaaataattaaatgtgctattccaag

SEQ ID NO: 386565 - DNA, 120 bp, Artificial Sequence
  ENSG00000144339_30 (sequence is synthesized)
ttgattttagtttttaaatacagaatttgataaaagataagtaaaagaaggccttgggttcagggtggcagatatttagtgcaccctttatctagttcaggaaacacttgaaagatttat

SEQ ID NO: 386566 - DNA, 120 bp, Artificial Sequence
  ENSG00000144339_31 (sequence is synthesized)
caagtttccttatgtaatgaaagacttaactagttcaaataagcaatacccacagaacataattagagcagcatattggagcacaatttttttttcataaagactaaaactgaacagcag

SEQ ID NO: 386567 - DNA, 120 bp, Artificial Sequence
  ENSG00000144339_32 (sequence is synthesized)
cagattgaaacacaatttttttcctaaagactaaaactgaacagcagtcaagactcaagcatagaatatgtttcaatgtcccatgatgttggacagtcctttgatgtctggacagtcttt

SEQ ID NO: 386568 - DNA, 120 bp, Artificial Sequence
  ENSG00000144339_33 (sequence is synthesized)
acttctaataaaagttttcctagctgattaatatagtattcccaagaaagcgtccctagaggttttgaaaataagaccttagaatagcatattaaatcttaaagaaaaaaaaaagacagg

SEQ ID NO: 386569 - DNA, 120 bp, Artificial Sequence
  ENSG00000144339_34 (sequence is synthesized)
aaaaaaggcagttcctttagtagatgttttaccatgggaatattattaataagaaatcaattaattttttaaaatgttgcttttgtaaggaaacagtttctatgcaaaattctgtatatt

SEQ ID NO: 386570 - DNA, 120 bp, Artificial Sequence
  ENSG00000144339_35 (sequence is synthesized)
ttctagctgtttagttttatatgtagactacctaattttgcaaatattgtgctgagactgaactgttccactgtttacccaccagtcttgttaattttctagcatctttaaagacaaaat

SEQ ID NO: 386571 - DNA, 120 bp, Artificial Sequence
  ENSG00000144339_36 (sequence is synthesized)
aaaacataccaagaatgtcttcatttctctttctgttaaagcatcatcatttacttttttctgcttgactatcctaccatactgtacttcatatctttatttttctaacaataagatgtg

SEQ ID NO: 386572 - DNA, 120 bp, Artificial Sequence
  ENSG00000144339_37 (sequence is synthesized)
aactttgtttcacatactagtttctagttttcattcattgttattagcacatgcaaatggaaatgaagtcaaactcactcttccctgttgcgttttatattaaaatctttggttcattat

SEQ ID NO: 386573 - DNA, 120 bp, Artificial Sequence
  ENSG00000144339_38 (sequence is synthesized)
gttgtcttgtgatctgaataagacattttttcaggaaataattttaatctcatgaatatgacatgtataacttataccatataagtgaaacatcacttggaaaacactttattttctttc

SEQ ID NO: 386574 - DNA, 120 bp, Artificial Sequence
  ENSG00000144339_39 (sequence is synthesized)
tctttttctgttttttaatcactcttcctttcagttagaggtgcttcatagtaacttggagaaaacaaaaacaacttccgatgtttgctttagaaaaaaaaagcatataacacatttaat

SEQ ID NO: 386575 - DNA, 120 bp, Artificial Sequence
  ENSG00000144339_40 (sequence is synthesized)
tctgagcttattcttttaaataactgcagttctgaaaattgtggtgatgagtatttgctcctaattgcatacaatttttaaaattagagactgatcaggtttttctcaacagaactgctt

SEQ ID NO: 386576 - DNA, 120 bp, Artificial Sequence
  ENSG00000144339_41 (sequence is synthesized)
gtttttctagtctacatgttactttggtctgtaagactattagttttaattttctttaaattctttattgagggatgccaaaaatgcttagtaactaaaacctaaaaacctagtttagaa

SEQ ID NO: 386577 - DNA, 120 bp, Artificial Sequence
  ENSG00000144339_42 (sequence is synthesized)
taacttgcacaaattcagttcacatatccattgggttgtaatcgtaagatatatttgacttgctatctctcttatacagatgatagactttcctctgtatttttgtagaattcgtattac

SEQ ID NO: 386578 - DNA, 120 bp, Artificial Sequence
  ENSG00000144339_43 (sequence is synthesized)
caaggttttgagagggcagaatcagcttccttcatttttgaataaagcaaaagtgattgaataacttgtgattgtttggctaatccaacaattgtaactagtgattgttctaactaatct

SEQ ID NO: 386579 - DNA, 120 bp, Artificial Sequence
  ENSG00000144339_44 (sequence is synthesized)
ctatataacatattctcagtaatgtgtatttaattaataattgggtttacttggcaagcactttggatggttaatagttattttctaatttcttattttaacaaaagttaatataattcc

SEQ ID NO: 386580 - DNA, 120 bp, Artificial Sequence
  ENSG00000144339_45 (sequence is synthesized)
aaaatggagtacactgaacaaaagagtgaagggaacaaatttacttgtaaaacatttatcatgtgtgactatcataaatgatatcattaaacttacaaatctaaaatcatgtaaaaatat

SEQ ID NO: 386581 - DNA, 120 bp, Artificial Sequence
  ENSG00000144339_46 (sequence is synthesized)
atcaaatattactttttaaaaattttcctatattttagcgtgaatgaatattacattagtaatgaaaattagacctgattattctaaaaataatttaagcttaacccatttgcacaaggg

SEQ ID NO: 386582 - DNA, 120 bp, Artificial Sequence
  ENSG00000144354_0 (sequence is synthesized)
gctgctgctgctcctcctgctgtgggaccgctgaccgcgcggctgctccgctctccccgctccaagcgccgatctgggcacccgccaccagcatggacgctcgccgcgtgccgcagaaag

SEQ ID NO: 386583 - DNA, 120 bp, Artificial Sequence
  ENSG00000144354_1 (sequence is synthesized)
atctcagagtaaagaagaacttaaagaaattcagatatgtgaagttgatttccatggaaacctcgtcatcctctgatgacagttgtgacagctttgcttctgataattttgcaaacacga

SEQ ID NO: 386584 - DNA, 120 bp, Artificial Sequence
  ENSG00000144354_2 (sequence is synthesized)
aacctaaattcaggtcagatatcagtgaagaactggcaaatgttttttatgaggactctgataatgaatctttctgcggcttttcagaaagtgaggtgcaagatgtattagaccattgtg

SEQ ID NO: 386585 - DNA, 120 bp, Artificial Sequence
  ENSG00000144354_3 (sequence is synthesized)
gatttttacagaaaccaaggccagatgtcactaacgaactggccggtatttttcatgccgactctgacgatgaatcattttgcggtttctcagagagtgagatacaagatggaatgaggc

SEQ ID NO: 386586 - DNA, 120 bp, Artificial Sequence
  ENSG00000144354_4 (sequence is synthesized)
tgcagtcagttcgggaaggctgtaggacccgcagccagtgcaggcactctggacctctcagggtggcgatgaagtttccagcgcggagtaccaggggagcaaccaacaaaaaagcagagt

SEQ ID NO: 386587 - DNA, 120 bp, Artificial Sequence
  ENSG00000144354_5 (sequence is synthesized)
cccgccagccctcagagaattctgtgactgattccaactccgattcagaagatgaaagtggaatgaattttttggagaaaagggctttaaatataaagcaaaacaaagcaatgcttgcaa

SEQ ID NO: 386588 - DNA, 120 bp, Artificial Sequence
  ENSG00000144354_6 (sequence is synthesized)
aactcatgtctgaattagaaagcttccctggctcgttccgtggaagacatcccctcccaggctccgactcacaatcaaggagaccgcgaaggcgtacattcccgggtgttgcttccagga

SEQ ID NO: 386589 - DNA, 120 bp, Artificial Sequence
  ENSG00000144354_7 (sequence is synthesized)
gaaaccctgaacggagagctcgtcctcttaccaggtcaaggtcccggatcctcgggtcccttgacgctctacccatggaggaggaggaggaagaggataagtacatgttggtgagaaaga

SEQ ID NO: 386590 - DNA, 120 bp, Artificial Sequence
  ENSG00000144354_8 (sequence is synthesized)
ggaagaccgtggatggctacatgaatgaagatgacctgcccagaagccgtcgctccagatcatccgtgacccttccgcatataattcgcccagtggaagaaattacagaggaggagttgg

SEQ ID NO: 386591 - DNA, 120 bp, Artificial Sequence
  ENSG00000144354_9 (sequence is synthesized)
agaacgtctgcagcaattctcgagagaagatatataaccgttcactgggctctacttgtcatcaatgccgtcagaagactattgataccaaaacaaactgcagaaacccagactgctggg

SEQ ID NO: 386592 - DNA, 120 bp, Artificial Sequence
  ENSG00000144354_10 (sequence is synthesized)
gcgttcgaggccagttctgtggcccctgccttcgaaaccgttatggtgaagaggtcagggatgctctgctggatccgaactggcattgcccgccttgtcgaggaatctgcaactgcagtt

SEQ ID NO: 386593 - DNA, 120 bp, Artificial Sequence
  ENSG00000144354_11 (sequence is synthesized)
gacggtgtgcgactggggtccttgtgtatttagccaaatatcatggctttgggaatgtgcatgcctacttgaaaagcctgaaacaggaatttgaaatgcaagcataatatctggaaaatt

SEQ ID NO: 386594 - DNA, 120 bp, Artificial Sequence
  ENSG00000144354_12 (sequence is synthesized)
tgctgcctgccttctacttctcaaatctttcttgtaaaagtttccaattttttcactgaaacctgagttaaaaatcttgatgatcagcctgtttcataagaaactccaatcaagttaatc

SEQ ID NO: 386595 - DNA, 120 bp, Artificial Sequence
  ENSG00000144354_13 (sequence is synthesized)
ttagcagacatgtgtttctggagcatcacagaaggtatattgctagttacactttgccctcctgcagtttcttctctgctcccaacccccatctcacagcatccccctctatttccaatg

SEQ ID NO: 386596 - DNA, 120 bp, Artificial Sequence
  ENSG00000144354_14 (sequence is synthesized)
ctcctctccaaccgcttagtttctgaatttcttttaaattacagttttatgaaagcatattttatttacttggtgttgaaatagccctcataaaacctaagcacttggaaacacaataat

SEQ ID NO: 386597 - DNA, 120 bp, Artificial Sequence
  ENSG00000144354_15 (sequence is synthesized)
agtattaactaactagatctattgaatttcagagaagagccttctaacttgtttacacaaaaacgagtatgatttagcattcatactagttgaaatttttaatagaatcaaggcacaaaa

SEQ ID NO: 386598 - DNA, 120 bp, Artificial Sequence
  ENSG00000144354_16 (sequence is synthesized)
gtcttaaaaccatgtggaaaaattaggtaattattgcagattgatgtctctcaatcccatgtattgcgcttatgttacaagttgttgtcacagttgagacttaatttctcctaatttctt

SEQ ID NO: 386599 - DNA, 120 bp, Artificial Sequence
  ENSG00000144354_17 (sequence is synthesized)
ctgcccgaagggtaagtggtgcgtccagcttacacaatcataattcaaaggttggtgggcaatgtaatacttaattaaaataatgatggaagagctatctggagattatgagtaagctga

SEQ ID NO: 386600 - DNA, 120 bp, Artificial Sequence
  ENSG00000144354_18 (sequence is synthesized)
tttgaattttcagtataaaactttagtataattgtagtttgcaaagtttatttcagttcacatgtaaggtattgcaaataaattcttggacaattttgtatggaaacttgatattaaaaa

SEQ ID NO: 386601 - DNA, 120 bp, Artificial Sequence
  ENSG00000144354_19 (sequence is synthesized)
ctagtctgtggttctttgcagtttcttgtaaatttataaaccaggcacaaggttcaagtttagattttaagcacttttataacaatgataagtgcctttttggagatgtaacttttagca

SEQ ID NO: 386602 - DNA, 120 bp, Artificial Sequence
  ENSG00000144354_20 (sequence is synthesized)
gtttgttaacctgacatctctgccagtctagtttctgggcaggtttcctgtgtcagtattccccctcctctttgcattaatcaaggtatttggtagaggtggaatctaagtgtttgtatg

SEQ ID NO: 386603 - DNA, 120 bp, Artificial Sequence
  ENSG00000144354_21 (sequence is synthesized)
tccaatttacttgcatatgtaaaccattgctgtgccattcaatgtttgatgcataattggaccttgaatcgataagtgtaaatacagcttttgatctgtaatgcttttatacaaaagttt

SEQ ID NO: 386604 - DNA, 120 bp, Artificial Sequence
  ENSG00000144354_22 (sequence is synthesized)
attttaataataaaatgtttgttctaacttgtctgcttttttaaaaataatcttactgtacttaattctaattttttcctcatatttaaataaaaggccatttccaccttttctaaaaaa

SEQ ID NO: 386605 - DNA, 120 bp, Artificial Sequence
  ENSG00000144354_23 (sequence is synthesized)
taaggtcgatctgtgttgtatttaaaaatctaatttctttatttgtgtggccttctagacaaacgaaggggacctagaggaaaccccctgacagatctctggatgatcctccttgaatcc

SEQ ID NO: 386606 - DNA, 120 bp, Artificial Sequence
  ENSG00000144354_24 (sequence is synthesized)
tgggcagtttggtctctccttgctgtgctcctgtggcactaaactccttttgattggttctttctttccttcccagctagactaagcccctcatgggcaggtaatgaagattgaaaactt

SEQ ID NO: 386607 - DNA, 120 bp, Artificial Sequence
  ENSG00000144354_25 (sequence is synthesized)
ttttctgttctccagtgtgagcacattcctcctacatggtagatgtgcaatagatgtttttaaaattggagaatgaaaataaaagaagaaaatcacaatttcttatcaagttgtagcttg

SEQ ID NO: 386608 - DNA, 120 bp, Artificial Sequence
  ENSG00000144354_26 (sequence is synthesized)
gtatcatacacaattgcattctgaggaattaaggtggtacaacttagggagatttggtgtgtctgctgtgatagaaaagatttctttttcctggctttccctgaggaaaggaaagatgga

SEQ ID NO: 386609 - DNA, 120 bp, Artificial Sequence
  ENSG00000144354_27 (sequence is synthesized)
aagagggaagccatacagatatccctctattttgcagtgtagaaactgaatgtgtttctacagggtcaagagacatcagagaaaatttttttttttagaacagaagatcatttcttacat

SEQ ID NO: 386610 - DNA, 120 bp, Artificial Sequence
  ENSG00000144354_28 (sequence is synthesized)
cttcattaagtaaaagaataaatagctcatctctcaagttgaaagaaactgggcttggtattacaaaagcaaaattaagatggccatataggttttaggctcattttgccatgcattatg

SEQ ID NO: 386611 - DNA, 120 bp, Artificial Sequence
  ENSG00000144354_29 (sequence is synthesized)
caaaggacaaagaaaaagaaaaaatagagctctctttacttaaaacatccttaaggagaagctatgaattccccaaagtactacttctctttattatggaataaatggattcccttatac

SEQ ID NO: 386612 - DNA, 120 bp, Artificial Sequence
  ENSG00000144354_30 (sequence is synthesized)
aagacagagcgagatcctgcttcttacaaaaaaaagaaagaaaaaattttttgtagcagttaacaaacttccttttctatgtagggtatgataaatggacatatctactctgtgctgttt

SEQ ID NO: 386613 - DNA, 120 bp, Artificial Sequence
  ENSG00000144355_0 (sequence is synthesized)
agcagcatcatgcttagacttttcaaagagacaaactccattttcttatgaatggaaagtgaaaacccctgttccgcttaaattgggttccttcctgtcctgagaaacatagagaccccc

SEQ ID NO: 386614 - DNA, 120 bp, Artificial Sequence
  ENSG00000144355_1 (sequence is synthesized)
aaaagggaagcagaggagagaaagtcccacacccagaccccgcgagaagagatgaccatgaccaccatgccagaaagtctcaacagccccgtgtcgggcaaggcggtgtttatggagttt

SEQ ID NO: 386615 - DNA, 120 bp, Artificial Sequence
  ENSG00000144355_2 (sequence is synthesized)
gggccgcccaaccagcaaatgtctccttctcccatgtcccacgggcactactccatgcactgtttacactcggcgggccattcgcagcccgacggcgcctacagctcagcctcgtccttc

SEQ ID NO: 386616 - DNA, 120 bp, Artificial Sequence
  ENSG00000144355_3 (sequence is synthesized)
tcccgaccgctgggctacccctacgtcaactcggtcagcagccacgcatccagcccctacatcagttcggtgcagtcctacccgggcagcgccagcctcgcccagagccgcctggaggac

SEQ ID NO: 386617 - DNA, 120 bp, Artificial Sequence
  ENSG00000144355_4 (sequence is synthesized)
ccaggggcggactcggagaagagcacggtggtggaaggcggtgaagtgcgcttcaatggcaagggaaaaaagatccgtaaacccaggacgatttattccagtttgcagttgcaggctttg

SEQ ID NO: 386618 - DNA, 120 bp, Artificial Sequence
  ENSG00000144355_5 (sequence is synthesized)
aaccggaggttccagcaaactcagtacctagctctgccggagagggcggagctcgcggcctctttgggactcacacagactcaggtcaagatctggttccaaaacaagcgatccaagttc

SEQ ID NO: 386619 - DNA, 120 bp, Artificial Sequence
  ENSG00000144355_6 (sequence is synthesized)
aagaagctgatgaagcagggtggggcggctctggagggtagtgcgttggccaacggtcgggccctgtctgctggctccccacccgtgccgcccggctggaaccctaactcttcatccggg

SEQ ID NO: 386620 - DNA, 120 bp, Artificial Sequence
  ENSG00000144355_7 (sequence is synthesized)
aagggctcaggaggaaacgcgggctcctatatccccagctacacatcgtggtacccttcagcgcaccaagaagctatgcagcaaccccaacttatgtgaggttgcccgcccgtctccttc

SEQ ID NO: 386621 - DNA, 120 bp, Artificial Sequence
  ENSG00000144355_8 (sequence is synthesized)
ttgtctccccggcccaggtccctcccgcctccaggtccatccatcccgtccggaaaagaaggacccagagggaagaaggaacagtggaggcgggacgccctccatctcctcggagccccg

SEQ ID NO: 386622 - DNA, 120 bp, Artificial Sequence
  ENSG00000144355_9 (sequence is synthesized)
gagtggcctcggagggaagccactgccacctgagacagcccaagcagcaagataaacccgctccacccgacccgccgaccttcagctttgtgggactatcaggaaaaaacaaaacaaaaa

SEQ ID NO: 386623 - DNA, 120 bp, Artificial Sequence
  ENSG00000144355_10 (sequence is synthesized)
caaaatgtagaaaaagcaaaagctcttttctgtcctgtcagtctcctgtctccttttgctctgtctgtgcgctggtaaagtccaggtcctcatccgtccgctgtcctcattctgcggcct

SEQ ID NO: 386624 - DNA, 120 bp, Artificial Sequence
  ENSG00000144355_11 (sequence is synthesized)
cagcaaaaagccacaaggtctgagcggcccgggtcctgccgggctgaccatctccggatcctgggacactctgcctgaccatctgtgtagctggtgtgggaatctgggggcattggaggg

SEQ ID NO: 386625 - DNA, 120 bp, Artificial Sequence
  ENSG00000144355_12 (sequence is synthesized)
agggggttttatttattgagaaatggacttcgcctgaggctgtttgccaattcagggttctgctgggcgcaaggaacgcactgttcaaacgcactgtttactttaagcgcacggggagaa

SEQ ID NO: 386626 - DNA, 120 bp, Artificial Sequence
  ENSG00000144355_13 (sequence is synthesized)
acgaataaggaggacgtggtgatttttaatttatacagtaacttttgtacttctctggtatggagagtttggagccgaatgatttgcattttttacatgtccgacattatttaataaata

SEQ ID NO: 386627 - DNA, 120 bp, Artificial Sequence
  ENSG00000144355_14 (sequence is synthesized)
atttttaaaagaaaagaacgataaatgaagccaacatgattttctcatttcgggaggaactctgttgcttcgcctggacaagaaggaaaatgctgatttcctccttgggtagaaagaggg

SEQ ID NO: 386628 - DNA, 120 bp, Artificial Sequence
  ENSG00000144355_15 (sequence is synthesized)
agcgagggcaaatggggagtagagagaaaacaggcgagaacaagcactctaattccagtgggctttaaaataagacaaaatcagctttacaacaatccctagaggctcgaccacagaata

SEQ ID NO: 386629 - DNA, 120 bp, Artificial Sequence
  ENSG00000144355_16 (sequence is synthesized)
atgccagtcaccaccctgaacgcacaatctccagtgcaggatctaatgactgtacatattattgttattattattattgttattattgttgttctgtaaacatgttgcacaagcttagcc

SEQ ID NO: 386630 - DNA, 120 bp, Artificial Sequence
  ENSG00000144355_17 (sequence is synthesized)
tttttgcgttctgttgtgtgtggctgtaaaaccccatgctttgtgaaatgagaatcttgacatttttcttgtgaaatttggaaaatgtgatcaattgaaatcaactgtgttttgtgttct

SEQ ID NO: 386631 - DNA, 120 bp, Artificial Sequence
  ENSG00000144355_18 (sequence is synthesized)
ctatgtcaaagtttagttttatattgagaatgttaacttattgctttgtatcttgggaaaaaaactttgtaaataagttataaagtttctttgagacagtaaaattatgatttcttgaaa

SEQ ID NO: 386632 - DNA, 120 bp, Artificial Sequence
  ENSG00000144355_19 (sequence is synthesized)
gccggcctgcgcccgggtcttcatttgttgctcgctgggactcagggtcggggtgtcactgtgtgtatgtgtttgtgtccacccctggctctcagcgtgtctccttcctccctcattccc

SEQ ID NO: 386633 - DNA, 120 bp, Artificial Sequence
  ENSG00000144355_20 (sequence is synthesized)
tctgccctagctctgtcactgctctcggtatcccgagctgcctgccgtccggccctctgtccctggacaatctgattagggcgcaggaaggatttccccagacgatttgtttgggaactc

SEQ ID NO: 386634 - DNA, 120 bp, Artificial Sequence
  ENSG00000144355_21 (sequence is synthesized)
aagactccggggagcccgtgagcgttcctgacggcggcgggcgcgggtttccgacgtccggtccgggatttggagcagagctggagaaagcaaacagacactagtgcaagaatggttttg

SEQ ID NO: 386635 - DNA, 120 bp, Artificial Sequence
  ENSG00000144355_22 (sequence is synthesized)
gggaggagaagcgcgggttcctggctctccacgcgcactgctttaatcagacccgtgcagcctcgagctggagtggccagctgggcctggagcaatgcgagcgggccccagggagcgaca

SEQ ID NO: 386636 - DNA, 120 bp, Artificial Sequence
  ENSG00000144355_23 (sequence is synthesized)
gcggcgttggcgcagcggccgaaggagccccggccgggaagtgtggatgcgtcttacccgaggccgggccgcctcgcccgctctagtccagcggagcccgagcgcctcggaccaatcccc

SEQ ID NO: 386637 - DNA, 120 bp, Artificial Sequence
  ENSG00000144355_24 (sequence is synthesized)
gcggctcggtgtgcagagcacacaatgccccgctggaaaacagaaacccacatgtgcacgtattagtctcggtaattatttattgcgtagcgctataaacaatgtatgcaattaagggta

SEQ ID NO: 386638 - DNA, 120 bp, Artificial Sequence
  ENSG00000144355_25 (sequence is synthesized)
attaaacctcaactaccgcctgcaaaaatagcaaactttccctgcaaaggcaggagctgagctcctgggaacggctctatccctcctgcagcgtcccgggacaggccctcggattttggg

SEQ ID NO: 386639 - DNA, 120 bp, Artificial Sequence
  ENSG00000144355_26 (sequence is synthesized)
ggacccttccctggctttcagagtttcttgaacgttctctccctggtgctgcctccgccacccttcggtagccactcgctctcggctgttcgcactaaaggcggcccctcgtattaacaa

SEQ ID NO: 386640 - DNA, 120 bp, Artificial Sequence
  ENSG00000144357_0 (sequence is synthesized)
tccctggaggagccgctggccctggactctccaaattctgagctctcatcatggcggcggcggccgcggcggccgtcgggggccagcagccgtcacagcccgagctgcccgcgccggggc

SEQ ID NO: 386641 - DNA, 120 bp, Artificial Sequence
  ENSG00000144357_1 (sequence is synthesized)
tggccctagacaaggcggccaccgccgcgcacctcaaggcggccctcagccggccggacaaccgcgcaggtgctgaggagctgcaggcgctgctggagcgggtgctgagcgccgagcggc

SEQ ID NO: 386642 - DNA, 120 bp, Artificial Sequence
  ENSG00000144357_2 (sequence is synthesized)
gcggcggccggaggcgggggcggtccgggggcggccgaggaggaggccctggagtggtgtaagtgccttctggcgggcggcggcggctacgacgagttctgcgcggcggtgcgggcctac

SEQ ID NO: 386643 - DNA, 120 bp, Artificial Sequence
  ENSG00000144357_3 (sequence is synthesized)
acgacgagttctgcgcggcggtgcgggcctacgatcccgcggcgctctgcggcctggtctggacagccaacttcgtggcctaccgctgccggacgtgcggcatctcgccctgcatgtcgc

SEQ ID NO: 386644 - DNA, 120 bp, Artificial Sequence
  ENSG00000144357_4 (sequence is synthesized)
tgtgcgccgagtgcttccaccagggcgaccacaccggacacgacttcaacatgttccgcagccaggccgggggcgcctgcgactgcggggacagcaacgtgatgcgggagagcgggtttt

SEQ ID NO: 386645 - DNA, 120 bp, Artificial Sequence
  ENSG00000144357_5 (sequence is synthesized)
gcaaaaggcatcaaattaaatcaagttcaaatattccctgtgtccctaaagacttactgatgatgtctgaatttgttcttccaagatttatattttgtcttattcagtacttaagagaag

SEQ ID NO: 386646 - DNA, 120 bp, Artificial Sequence
  ENSG00000144357_6 (sequence is synthesized)
gctataatgaaccagcagctgatggaccatcagaaaaggaccttaacaaagtccttcagcttttggaacctcaaatttcctttttagaagacctgactaaaatgggaggagcaatgcggt

SEQ ID NO: 386647 - DNA, 120 bp, Artificial Sequence
  ENSG00000144357_7 (sequence is synthesized)
ctgttcttactcaggttttgacaaaccaacaaaactacaaagatctgacttctggtcttggagaaaatgcttgtgtaaagaaaagtcatgaaaagtaccttatagctttaaagagctctg

SEQ ID NO: 386648 - DNA, 120 bp, Artificial Sequence
  ENSG00000144357_8 (sequence is synthesized)
gacttacatatcctgaggataagcttgtatatggtgtgcaggagccatctgctggtactagttctctggctgttcaaggtttcataggcgcaacaggaactttgggacaagtggattctt

SEQ ID NO: 386649 - DNA, 120 bp, Artificial Sequence
  ENSG00000144357_9 (sequence is synthesized)
cagatgaggatgatcaggatggtagtcaaggtctgggcaagagaaaaagggtaaaactaagcagtggcaccaaagatcaatccataatggatgttttgaagcataaaagcttcctagaag

SEQ ID NO: 386650 - DNA, 120 bp, Artificial Sequence
  ENSG00000144357_10 (sequence is synthesized)
aactattattttggactataaaatatgaattccctcaaaagatggtaactttcttactcaacatgcttccagatcaagagtataaggttgcttttacaaaaacttttgttcagcattatg

SEQ ID NO: 386651 - DNA, 120 bp, Artificial Sequence
  ENSG00000144357_11 (sequence is synthesized)
ctttcattatgaaaacactgaagaaaagtcatgaatcagacacaatgtctaacagaattgtgcatattagtgttcagttgttcagcaatgaggagctagccagacaggtaacagaagaat

SEQ ID NO: 386652 - DNA, 120 bp, Artificial Sequence
  ENSG00000144357_12 (sequence is synthesized)
gtcagctgctggatattatggtcactgtgctattatacatgatggaaagttgccttattaaaagtgagctacaagatgaagaaaatagtttacatgtggtagtgaactgtggagaagcat

SEQ ID NO: 386653 - DNA, 120 bp, Artificial Sequence
  ENSG00000144357_13 (sequence is synthesized)
tactgaagaataacacttactggcctcttgttagtgattttattaatattctttctcatcaaagtgtggccaagagatttttggaggatcacggtttgttagttacatggatgaactttg

SEQ ID NO: 386654 - DNA, 120 bp, Artificial Sequence
  ENSG00000144357_14 (sequence is synthesized)
tatctttctttcaaggtatgaacttaaacaagcgagaactaaacgagcatgtggaatttgagtctcagacctactatgctgcctttgctgctgaacttgaggcctgtgcacagccaatgt

SEQ ID NO: 386655 - DNA, 120 bp, Artificial Sequence
  ENSG00000144357_15 (sequence is synthesized)
gggggcttttatcacattgtaaagttagggaaactcaagagtatacccgaaatgttgttagatattgccttgaagctcttcaagactggtttgatgctattaacttcgtagacgagccag

SEQ ID NO: 386656 - DNA, 120 bp, Artificial Sequence
  ENSG00000144357_16 (sequence is synthesized)
cacctaaccaagtcacttttcatctgccactacatcgttactatgctatgtttttgagtaaggctgtgaaatgtcaagaactagatttggattctgttttaccagatcaggaaatgttaa

SEQ ID NO: 386657 - DNA, 120 bp, Artificial Sequence
  ENSG00000144357_17 (sequence is synthesized)
tgaaactaatgattcacccactccaaattcaagcaagtcttgcagaaatccacagcaatatgtgggtaagaaatggtctgcaaatcaaaggacaagccatgacgtatgtccagtctcatt

SEQ ID NO: 386658 - DNA, 120 bp, Artificial Sequence
  ENSG00000144357_18 (sequence is synthesized)
tctgtaattccatgattgatcctgacatttacctgttacaggtttgtgcttctagacttgacccagattattttatttcatccgtctttgaaagatttaaggtagtggatttgttgacaa

SEQ ID NO: 386659 - DNA, 120 bp, Artificial Sequence
  ENSG00000144357_19 (sequence is synthesized)
tggcatcacaacatcaaaatacagtacttgatgcagagcatgagaggtcgatgttagaaggcgctcttacatttcttgtgattcttttgagtcttcgtttacatttaggaatgtctgatg

SEQ ID NO: 386660 - DNA, 120 bp, Artificial Sequence
  ENSG00000144357_20 (sequence is synthesized)
atgagattctcagggccgagatggtagcccagctgtgtatgaatgacaggacacacagttcattgctggacctcattccagaaaatcctaatcccaaaagtggcattattccaggcagtt

SEQ ID NO: 386661 - DNA, 120 bp, Artificial Sequence
  ENSG00000144357_21 (sequence is synthesized)
acagctttgaatcagttttatcagctgtagctgattttaaggctcctgtttttgaacctggaggttctatgcaacaaggcatgtatactcccaaagctgaagtctgggatcaagagtttg

SEQ ID NO: 386662 - DNA, 120 bp, Artificial Sequence
  ENSG00000144357_22 (sequence is synthesized)
accccgtcatggtcattcttcgaacagtttaccgtagagatgtgcagtctgcaatggacagatatactgcatttttaaaacagagtggaaaatttcctggaaatccctggcctccatata

SEQ ID NO: 386663 - DNA, 120 bp, Artificial Sequence
  ENSG00000144357_23 (sequence is synthesized)
agaaaaggacatcactccatcctagctataaaggtcttatgagacttttgcactgtaaaactttacacattgtgctattcactctgctttacaagattttgatggatcatcaaaatctgt

SEQ ID NO: 386664 - DNA, 120 bp, Artificial Sequence
  ENSG00000144357_24 (sequence is synthesized)
cagaacatgtactctgcatggttttatatctgattgaattaggacttgaaaattctgctgaagaagaatcagatgaagaggcatcagtgggtggaccagaacgttgtcatgacagttggt

SEQ ID NO: 386665 - DNA, 120 bp, Artificial Sequence
  ENSG00000144357_25 (sequence is synthesized)
ttcctggcagtaacttagtgtcaaacatgcgacactttataaactatgttagagtaagagttccagagactgctcctgaagtaaagagagactcacctgcaagtactagctctgataact

SEQ ID NO: 386666 - DNA, 120 bp, Artificial Sequence
  ENSG00000144357_26 (sequence is synthesized)
tgggttctttacaaaattctggtacagctcaagttttcagtttagtagcagaacgtagaaagaaatttcaggaaatcatcaatcgcagtagcagtgaagcaaatcaggtggttcgtccca

SEQ ID NO: 386667 - DNA, 120 bp, Artificial Sequence
  ENSG00000144357_27 (sequence is synthesized)
aaacttcaagtaaatggtctgctcctggttcagctccacagttaactacagccattttggaaattaaagaaagcatattgtctttgctaattaaacttcaccacaaactctcaggaaaac

SEQ ID NO: 386668 - DNA, 120 bp, Artificial Sequence
  ENSG00000144357_28 (sequence is synthesized)
aaaactcctactatcctccttggcttgatgacatagaaattttaatccaaccagaaattcctaaatacagtcatggagatggtataactgccgtggaaagaattttactaaaagctgcat

SEQ ID NO: 386669 - DNA, 120 bp, Artificial Sequence
  ENSG00000144357_29 (sequence is synthesized)
cgcaaagtagaatgaacaaacgcatcattgaagagatatgtagaaaagtgacccctcctgtaccacctaaaaaagtcactgcagcagagaagaaaacattggacaaagaagaaaggcgac

SEQ ID NO: 386670 - DNA, 120 bp, Artificial Sequence
  ENSG00000144357_30 (sequence is synthesized)
agaaggctagagagaggcagcagaaattgcttgcggagtttgcttcacgacagaaaagctttatggaaactgcaatggatgttgattctcctgagaatgatattcctatggagatcacca

SEQ ID NO: 386671 - DNA, 120 bp, Artificial Sequence
  ENSG00000144357_31 (sequence is synthesized)
cggcagaaccacaggtttccgaggcagtatatgactgtgttatttgtggacagagtggcccctcctctgaagatcgacctactggattagttgtactgttacaagcatcctcagttttgg

SEQ ID NO: 386672 - DNA, 120 bp, Artificial Sequence
  ENSG00000144357_32 (sequence is synthesized)
ggcagtgccgtgacaatgttgagccaaaaaagttgccgatcagtgaagaggagcagatttacccttgggatacctgtgcagccgttcatgatgtgaggctttcattattacagcgttatt

SEQ ID NO: 386673 - DNA, 120 bp, Artificial Sequence
  ENSG00000144357_33 (sequence is synthesized)
agattgtcataaatcttacatggaatcattacggaatgaccaggttcttcagggcttctcggtggacaaaggagaattcacgtgtccactctgtaggcagtttgctaacagtgttcttcc

SEQ ID NO: 386674 - DNA, 120 bp, Artificial Sequence
  ENSG00000144357_34 (sequence is synthesized)
atgttatcctggaagcaatgtggaaaataacccttggcaacgtcctagcaacaaaagcatacaagatctcataaaggaagtggaggagctgcagggacgaccgggagctttcccatcaga

SEQ ID NO: 386675 - DNA, 120 bp, Artificial Sequence
  ENSG00000144357_35 (sequence is synthesized)
aacaaatttaagtaaagaaatggaatctgtaatgaaagatataaaaaataccactcagaagaaatatagagactatagcaagaccccgggctcaccagacaatgattttctctttatgta

SEQ ID NO: 386676 - DNA, 120 bp, Artificial Sequence
  ENSG00000144357_36 (sequence is synthesized)
ctctgttgctagaaccaatttagaacttgaattgattcatcgaggaggcaatttgtgttcaggtggtgcaagcacagctggcaaaaggtcttgtttaaatcagctgtttcatgtattagc

SEQ ID NO: 386677 - DNA, 120 bp, Artificial Sequence
  ENSG00000144357_37 (sequence is synthesized)
cttgcacatgcggctttatagcattgactctgagtataatccctggagaaagctcacccagttagaagagatgaatccacagctgggatatgaagaacaacagcctgaggttccaattct

SEQ ID NO: 386678 - DNA, 120 bp, Artificial Sequence
  ENSG00000144357_38 (sequence is synthesized)
ttatcatgatgtaacatcccttttgctcatccagatcttaatgatgccacaacccttacgcaaagaccactttacctgcattgtgaaggtactttttaccctactgtacacacaggctct

SEQ ID NO: 386679 - DNA, 120 bp, Artificial Sequence
  ENSG00000144357_39 (sequence is synthesized)
tgcagcactctcagttaaatgcagcgaagaagataggtcagcctggaaacacgcgggagctctcaaaaagagtacatgtgatgcagaaaagtcttacgaagtattactgagctttgtgat

SEQ ID NO: 386680 - DNA, 120 bp, Artificial Sequence
  ENSG00000144357_40 (sequence is synthesized)
aagtgaactatttaaaggaaagttataccatgaagaaggaactcaggaatgtgcaatggttaaccctattgcttggtctcctgaatccatggaaaaatgcttacaggacttctgcttacc

SEQ ID NO: 386681 - DNA, 120 bp, Artificial Sequence
  ENSG00000144357_41 (sequence is synthesized)
ttttctcagaatcaccagccttcttcagcaccacctttttggggaagatttacctagctgccaggaagaagaagaattttcagttcttgccagctgcctgggacttctgccaacgtttta

SEQ ID NO: 386682 - DNA, 120 bp, Artificial Sequence
  ENSG00000144357_42 (sequence is synthesized)
ccaaacagaacatccattcatcagtgcctcctgtctggattggccagttccagcatttgatattataactcagtggtgttttgagataaaatcatttactgaaagacatgcagaacaagg

SEQ ID NO: 386683 - DNA, 120 bp, Artificial Sequence
  ENSG00000144357_43 (sequence is synthesized)
aaaggccttgcttatccaagagtcaaaatggaaattaccacacctactacagttgcctgagaattataacaccatttttcagtactaccacagaaaaacctgtagtgtctgcaccaaggt

SEQ ID NO: 386684 - DNA, 120 bp, Artificial Sequence
  ENSG00000144357_44 (sequence is synthesized)
tcctaaagatcctgctgtttgccttgtgtgtggtacttttgtatgcctgaaaggactttgctgcaagcaacaaagttactgtgaatgtgtactgcactctcagaactgtggtgcaggaac

SEQ ID NO: 386685 - DNA, 120 bp, Artificial Sequence
  ENSG00000144357_45 (sequence is synthesized)
aggtattttccttttgatcaatgcatcggtaattatcatcattcgaggtcaccgcttctgcctctggggttccgtgtatttggatgctcatggagaggaagaccgggatcttaggcgagg

SEQ ID NO: 386686 - DNA, 120 bp, Artificial Sequence
  ENSG00000144357_46 (sequence is synthesized)
caaacctctctacatttgtaaggaaagatacaaagttcttgagcaacagtggatttctcatacttttgatcacatcaataaaagatggggtccacattacaatgggctgtgactctccac

SEQ ID NO: 386687 - DNA, 120 bp, Artificial Sequence
  ENSG00000144357_47 (sequence is synthesized)
ctcagcattgcatcgtatcatcattttcgctacgaatttatttttcaacaataagctttaacttaatttgggggattaacacttttgctgagggagaaaaagaaaacatacattatgaag

SEQ ID NO: 386688 - DNA, 120 bp, Artificial Sequence
  ENSG00000144357_48 (sequence is synthesized)
cctttccaaaattaggtgcttggtaatcacgttaatggtataattttttttttttaatatctggagaacattaataacaagttaaattattctttagtggtcattttttaagtgcacaat

SEQ ID NO: 386689 - DNA, 120 bp, Artificial Sequence
  ENSG00000144357_49 (sequence is synthesized)
taataagaagcacaacttgttcacaaactcattcagaaatgattctcccaacaatgcgtatcagctattcattgatacttagagtgggtgtgatttatttgacattttactgcttctttc

SEQ ID NO: 386690 - DNA, 120 bp, Artificial Sequence
  ENSG00000144357_50 (sequence is synthesized)
tgtctgtgtgttttaatttgcatctgccaagcataatgcatcttttttcctctgccattcttgtgttgattggagaatttttctgtatgtaattagaaaaaaatgtaaaacatgatttat

SEQ ID NO: 386691 - DNA, 120 bp, Artificial Sequence
  ENSG00000144357_51 (sequence is synthesized)
gtgaaatactgtatagtaaaagttggtctaatagtagaactttaaaattttttcttattgtgaggaatctgttaaaagtttaaagctttgctgaaaactgaattcattctcaggaatttc

SEQ ID NO: 386692 - DNA, 120 bp, Artificial Sequence
  ENSG00000144357_52 (sequence is synthesized)
ataaatcttctccccaggtaaataattgaaatagctgtaaaataagtagatagctgctgttaatataatacagtacattttggggggcatatgtgtggttggggggtccttaaaaatcaa

SEQ ID NO: 386693 - DNA, 120 bp, Artificial Sequence
  ENSG00000144357_53 (sequence is synthesized)
aatttgccatttcagttggatgaattactagaggtaataacaaatcttactatgaaatcaagaggtttaagaacatacactgggcagatgttgattccgtgcatgcccaccttttattac

SEQ ID NO: 386694 - DNA, 120 bp, Artificial Sequence
  ENSG00000144357_54 (sequence is synthesized)
caaacaaggttttgtttatatgattgtattagaaatgctcagacttccccagaaatgaaccataaattttggaacttcctttcagctcaagaggttcagctatattgtatttgtgcagtg

SEQ ID NO: 386695 - DNA, 120 bp, Artificial Sequence
  ENSG00000144357_55 (sequence is synthesized)
taatcactactatttctgctcggtttcctaaaaggaaaaaaaaggcgcagtggtgatgaccctcatgaatgagccacgcttctgcattcttcttagaaactgctgtgaaaaacaatttat

SEQ ID NO: 386696 - DNA, 120 bp, Artificial Sequence
  ENSG00000144357_56 (sequence is synthesized)
gtttgcagggtttaaaaatcagtaaaaatgggaatgattgagctaaaacccactctatgagaaggaagattactgaaaagcatgtgacatattgctacaaagattttttttcctaaatga

SEQ ID NO: 386697 - DNA, 120 bp, Artificial Sequence
  ENSG00000144357_57 (sequence is synthesized)
ttcagtaattgaatgattatttaatatatagtgctatcaagcaatccctggtactttggacttccatggcttgttatataaaattacatttttacatgtaaaaataaactaaacaaatct

SEQ ID NO: 386698 - DNA, 120 bp, Artificial Sequence
  ENSG00000144357_58 (sequence is synthesized)
aatgataaaatatgtcagatccatgttctaaaaaatttttgtaatgacatgacattacaagagtataaaaatggacattaaatcatggccttgcattaaaatatggaaagcagagcagta

SEQ ID NO: 386699 - DNA, 120 bp, Artificial Sequence
  ENSG00000144357_59 (sequence is synthesized)
catattcaaatgtattcagaaagtcaaaagattacctatcgttctacaataaaatacatggaaatagcttgctatttttatatacatttccaaaatattaagataactttctgtaagagt

SEQ ID NO: 386700 - DNA, 120 bp, Artificial Sequence
  ENSG00000144357_60 (sequence is synthesized)
caatgattctgttcgactaaatagctgtcctttccaacacattgctacttttttaaatactgtatcataagttcagcctgtcatactttttgcattgatcgttatgaataccagaccatt

SEQ ID NO: 386701 - DNA, 120 bp, Artificial Sequence
  ENSG00000144357_61 (sequence is synthesized)
tgtaagtgtggttgaagagcaaaatgctaattgacatctctagtaaatactgttacaggattcatgaacttgaataattctacagtttgaaactctgatgctatatatacatggtataat

SEQ ID NO: 386702 - DNA, 120 bp, Artificial Sequence
  ENSG00000144357_62 (sequence is synthesized)
gtattcagactttgattactacttatttaaaatggaatgttttatggttgtgcatatggatgtgaagtgaaaatattagccttaactttaaaatttgggtgtttgatagtgtttattttg

SEQ ID NO: 386703 - DNA, 120 bp, Artificial Sequence
  ENSG00000144357_63 (sequence is synthesized)
atattggtgaattagtcaccagtaaattttaaaaaagcacttggttgaaaattgtacttgaatacatacatgcatgctgctaaactagaactttaatttttccccataacttttataagt

SEQ ID NO: 386704 - DNA, 120 bp, Artificial Sequence
  ENSG00000144357_64 (sequence is synthesized)
cccatttataaacccacttttaaaaataacaggtccaagttagagtgatgtgtgtatattattcaaaaaaatgtactggtgtgatatcttgtatgaatgatcatttaaatacagtacatt

SEQ ID NO: 386705 - DNA, 120 bp, Artificial Sequence
  ENSG00000144357_65 (sequence is synthesized)
actgtagaagctaaattgatctttataattaagcagaaattacaaaactaggaataatcaacattgtaagatatgttaataaaaacctgctgtcatttggtttgtgaaaggtccttaaaa

SEQ ID NO: 386706 - DNA, 120 bp, Artificial Sequence
  ENSG00000144357_66 (sequence is synthesized)
acaaaacaaaaacaattttctgaggaatcaattaagcaacgtacccagagcagattgggtggtattgccttgaataagagaatggtcaccttatcctctgaggaaactggagggaaggag

SEQ ID NO: 386707 - DNA, 120 bp, Artificial Sequence
  ENSG00000144357_67 (sequence is synthesized)
accagccttcttcagcaccacctttttggggaagatttacctagctgccagaatttcctatttcatgtctaaaaggaagaagaagaattttcagttcttgccagctgcctgggacttctg

SEQ ID NO: 386708 - DNA, 120 bp, Artificial Sequence
  ENSG00000144357_68 (sequence is synthesized)
atgaaagatataaaaaataccactcagaagaaatatagagactatagcaagaccccgggctcaccagacaatgattttctctttatgtactctgttgctagattaggcaacagaagattt

SEQ ID NO: 386709 - DNA, 120 bp, Artificial Sequence
  ENSG00000144357_69 (sequence is synthesized)
gtgaaaacaaaatgtattgatctcatttatattcccttgatgaaggaacacatgctggtctccgctcgctttctgtccactagtatgaaatccttgtccctgcttccttgctgaaccaat

SEQ ID NO: 386710 - DNA, 120 bp, Artificial Sequence
  ENSG00000144357_70 (sequence is synthesized)
gatgcccttatcagcagcaaccagatggagctctgagctggaacgttatcggtgttaaattgctttttctcccaccctgagtagagaggattaaagcattcctttagaaatgggtggcaa

SEQ ID NO: 386711 - DNA, 120 bp, Artificial Sequence
  ENSG00000144357_71 (sequence is synthesized)
atgtacagacttaggaatattaatattctttaacaatttgcatttataagtaaatacatggaaatataatctccaaaaaagtccatgttcaaaattcagccaaatcagtgcaaaatgttt

SEQ ID NO: 386712 - DNA, 120 bp, Artificial Sequence
  ENSG00000144357_72 (sequence is synthesized)
attgatttccagataccatctaacctccaatgaatgataaccatttctctgatagaaaaattggtatgcctttgtgttttatatggcaataaccacctacacagtggctgacgttggagt

SEQ ID NO: 386713 - DNA, 120 bp, Artificial Sequence
  ENSG00000144357_73 (sequence is synthesized)
aaaaattctttcttcatattcatatgcaggtttatgaaatatgttgcagtttttttttttttcttaaggcctagtttttagtatgtgccaagagttgggactttgcaacaattacaccat

SEQ ID NO: 386714 - DNA, 120 bp, Artificial Sequence
  ENSG00000144357_74 (sequence is synthesized)
gatgtgtgcaattttttgcaggtgtaaatatgaacatataagtaaggatggataaattgttccctttgtatttctaaatatcagataaatatgattattactgatacaacataaaaactg

SEQ ID NO: 386715 - DNA, 120 bp, Artificial Sequence
  ENSG00000144357_75 (sequence is synthesized)
cttttgcaaaaaataaagttgaagaactttattttttaggttgattcagacatgtcaataaagcagattaataaagaatcttcagtttaatgactgagatataatgttttacttacagaa

SEQ ID NO: 386716 - DNA, 120 bp, Artificial Sequence
  ENSG00000144357_76 (sequence is synthesized)
aatttgtggatgagacaataagggattcaggattatgataggcagtggatgattttggggggcttgttacatctccattgtaccttggacgtgatgtggcaagacttgatattcattttt

SEQ ID NO: 386717 - DNA, 120 bp, Artificial Sequence
  ENSG00000144357_77 (sequence is synthesized)
gtaagcaatagtagataatacaaaatttatgaaaacacagatctcatatcacaaaatatggtcaagccatctcttcatattaactactctttgaattaagtatataatacatatagggat

SEQ ID NO: 386718 - DNA, 120 bp, Artificial Sequence
  ENSG00000144357_78 (sequence is synthesized)
tgtgtgtgttttttaatccagtagaagagtaaaaaaagaaagtctttgaggctttaagtgagtaaatccttccttaagtacaattctagttctcctttcatctactatccctttaatggt

SEQ ID NO: 386719 - DNA, 120 bp, Artificial Sequence
  ENSG00000144357_79 (sequence is synthesized)
atgtactttggaatgtgctgtgaaacagaagtcatctgtgctgttgaagatactagactctgaattaggttggctcttaattgctttactagatattccttacccaaatacctcctaatg

SEQ ID NO: 386720 - DNA, 120 bp, Artificial Sequence
  ENSG00000144357_80 (sequence is synthesized)
ctattgaataaatctttgtatgaaactgagcattccctttagaaaatatagtactaatatgtttttaaaatgatgctaaataacttctcttgatttttctttgtttctctttgttaatgg

SEQ ID NO: 386721 - DNA, 120 bp, Artificial Sequence
  ENSG00000144362_0 (sequence is synthesized)
gcagttggcggtcgggctagagaagagaggcgcctgcgcttgcgagctgggcttgtgagtggggctgccgagagggcaggcgtggggcgaggccaaaggactgaacccgcaggagcgtca

SEQ ID NO: 386722 - DNA, 120 bp, Artificial Sequence
  ENSG00000144362_1 (sequence is synthesized)
cgggcgccggggcggctgccgacggcgggactgggttttctatcagatgttccacgtaataatgctggagttaagaagtttccattattttgctccaaaccagaagactctgttccctgt

SEQ ID NO: 386723 - DNA, 120 bp, Artificial Sequence
  ENSG00000144362_2 (sequence is synthesized)
atatagaataggagtaatatttgaaaacaactggctgatgtttaaaactgaagattgtcatgattgtttatcctaatcccaatgctgaagtaagattgtcttggaaatactaagttgggg

SEQ ID NO: 386724 - DNA, 120 bp, Artificial Sequence
  ENSG00000144362_3 (sequence is synthesized)
taatccaaatctatttctggaaccatgaaaattttgctagtttttgactttgacaatacaatcatagatgacaatagtgacacttggattgtacaatgtgctcccaacaaaaagcttcct

SEQ ID NO: 386725 - DNA, 120 bp, Artificial Sequence
  ENSG00000144362_4 (sequence is synthesized)
atttatgggcagagtctttaagtatttgggagataagggtgtaagagaacatgaaatgaaaagagcagtgacatcattgcctttcactccagggatggtggaactcttcaactttataag

SEQ ID NO: 386726 - DNA, 120 bp, Artificial Sequence
  ENSG00000144362_5 (sequence is synthesized)
aaagaataaggataaatttgactgcattattatttcagattcaaattcggtcttcatagattgggttttagaagctgccagttttcatgacatatttgataaagtgtttacaaatccagc

SEQ ID NO: 386727 - DNA, 120 bp, Artificial Sequence
  ENSG00000144362_6 (sequence is synthesized)
agcttttaatagcaatggtcatctcactgttgaaaattatcatactcattcttgcaatagatgcccaaagaatctttgcaaaaaggtagttttgatagaatttgtagataaacagttaca

SEQ ID NO: 386728 - DNA, 120 bp, Artificial Sequence
  ENSG00000144362_7 (sequence is synthesized)
acagggagtgaattatacacaaattgtttatattggtgatggtggaaatgatgtctgtccagtcacctttttaaagaatgatgatgttgccatgccacggaaaggatataccttacagaa

SEQ ID NO: 386729 - DNA, 120 bp, Artificial Sequence
  ENSG00000144362_8 (sequence is synthesized)
aactctttccagaatgtctcaaaatcttgagcctatggaatattctgttgtagtttggtcctcaggtgttgatataatttctcatttacaatttctaataaaggattaatatgtcagcaa

SEQ ID NO: 386730 - DNA, 120 bp, Artificial Sequence
  ENSG00000144362_9 (sequence is synthesized)
caacaggatttcttgtaaaaacctcaaaatggttataaagagtatcacagatgtggtgttatggttagtgtgtactttgaaagtaatgaatgtttttatgtaattaaatatctttctgcc

SEQ ID NO: 386731 - DNA, 120 bp, Artificial Sequence
  ENSG00000144362_10 (sequence is synthesized)
ggcgccggggcggctgccgacggcgggactgggtcagtgagaagcccgtgggcccccgccctgcctgctactcccatccccacctgcgcgctccccatgggggacgacccccgattgggt

SEQ ID NO: 386732 - DNA, 120 bp, Artificial Sequence
  ENSG00000144366_0 (sequence is synthesized)
aaaggaaggggcggcgtccacatggttacccttctgctgcgcgggtcaagtagcttcttctggagggcgcaaggcgcggcgggggtgatgagcccttgggttctcgctccgactgctaaa

SEQ ID NO: 386733 - DNA, 120 bp, Artificial Sequence
  ENSG00000144366_1 (sequence is synthesized)
ttcgcttggccgggtccaccttctcgtggcctcactcgccacacggatcagaatccggagcaggcagttctctctattctgaggctcctgcggctgccgcgctgacttccctgtgtgcgg

SEQ ID NO: 386734 - DNA, 120 bp, Artificial Sequence
  ENSG00000144366_2 (sequence is synthesized)
gagggaactctgggcaggctggttttcttggaatgtgtttacgatgttgaatgggacttgaacaggaagctggacgctgcagctggaactagcgtgccaagttatttatgattccatctg

SEQ ID NO: 386735 - DNA, 120 bp, Artificial Sequence
  ENSG00000144366_3 (sequence is synthesized)
atatacataggagagaaactgatagaagaattctgatggcaactgtatgatagaagctatataaagtcaagtgtccattttctttcaactatatttgagcatacccaggatttaagtcgt

SEQ ID NO: 386736 - DNA, 120 bp, Artificial Sequence
  ENSG00000144366_4 (sequence is synthesized)
ggaactgaacatttatttggctgatcctcatcatgaaccgtgcttttagcaggaagaaagacaaaacatggatgcatacacctgaagctttatcaaaacatttcattccctataatgcaa

SEQ ID NO: 386737 - DNA, 120 bp, Artificial Sequence
  ENSG00000144366_5 (sequence is synthesized)
agtttcttggcagtacagaagtggaacagccaaaaggaacagaagttgtgagagatgctgtaaggaaactaaagtttgcaagacatatcaagaaatctgaaggccagaaaattcctaaag

SEQ ID NO: 386738 - DNA, 120 bp, Artificial Sequence
  ENSG00000144366_6 (sequence is synthesized)
tggagttgcaaatatcaatttatggagtaaaaattctagaacccaaaacaaaggaagttcaacacaattgccagcttcatagaatatctttttgtgcagatgataaaactgacaagagga

SEQ ID NO: 386739 - DNA, 120 bp, Artificial Sequence
  ENSG00000144366_7 (sequence is synthesized)
tattcactttcatatgcaaagattctgagtcaaataaacatttgtgctatgtatttgacagcgaaaagtgtgctgaagagatcactttaacaattggccaagcatttgacctggcataca

SEQ ID NO: 386740 - DNA, 120 bp, Artificial Sequence
  ENSG00000144366_8 (sequence is synthesized)
ggaaatttctagaatcaggaggaaaagatgttgaaacaagaaaacagatcgcagggttacaaaaaagaatccaagacttagaaacagaaaatatggaacttaaaaataaagtacaagatt

SEQ ID NO: 386741 - DNA, 120 bp, Artificial Sequence
  ENSG00000144366_9 (sequence is synthesized)
tggaaaaccaactgagaataactcaagtatcagcacctccagcaggcagtatgacacctaagtcgccctccactgacatctttgatatgattccattttctccaatatcacaccagtctt

SEQ ID NO: 386742 - DNA, 120 bp, Artificial Sequence
  ENSG00000144366_10 (sequence is synthesized)
cgatgcctactcgcaatggcacacagccacctccagtacctagtagatctactgagattaaacgggacctgtttggagcagaaccttttgacccatttaactgtggagcagcagatttcc

SEQ ID NO: 386743 - DNA, 120 bp, Artificial Sequence
  ENSG00000144366_11 (sequence is synthesized)
ctccagatattcaatcaaaattagatgagatgcaggaggggttcaaaatgggactaactcttgaaggcacagtattttgtctcgacccgttagacagtaggtgctgacatcaagaacaag

SEQ ID NO: 386744 - DNA, 120 bp, Artificial Sequence
  ENSG00000144366_12 (sequence is synthesized)
aaatcctgattcatgttaaatgtgtttgtatacacatgtcatttattattattactttaagataggtattattcatgtgtcaatgtttttgaatattttaatattttgaaaattttctca

SEQ ID NO: 386745 - DNA, 120 bp, Artificial Sequence
  ENSG00000144366_13 (sequence is synthesized)
atttgtaattgaaagacatattatacaaatacctgccttgtgtctgagttctatttagttagcatcttgaaatttgtattcattttccagatggctagtttattaatgatttcccaaaag

SEQ ID NO: 386746 - DNA, 120 bp, Artificial Sequence
  ENSG00000144366_14 (sequence is synthesized)
ccataccttaaagataactttttaaattctgaagagacatgccaatgtcaaactaaacatgttctgtttttaaaccaacaaacatgttactattcattggacagatatcattttatgtat

SEQ ID NO: 386747 - DNA, 120 bp, Artificial Sequence
  ENSG00000144366_15 (sequence is synthesized)
aaatactgttcacatcactgggaaaatgtaaactttaaacataatgccacaaggtcactaatttctagcaggtaaaattataaggatataaattccaataataaaccaaatgtatttaga

SEQ ID NO: 386748 - DNA, 120 bp, Artificial Sequence
  ENSG00000144366_16 (sequence is synthesized)
tagtaaatgcaaggtgatgttagttatgatcagttatactctaaatatttaatttgttttataaaggtagtgaaaaaatgaaaatttgctatttattaaaaaacattaaatttcattcca

SEQ ID NO: 386749 - DNA, 120 bp, Artificial Sequence
  ENSG00000144366_17 (sequence is synthesized)
tcattccaaatgagataagtgatattactataacatctaagcatcatctgatttgatattccctaaaaaacatttggaatatatgctatctatagattcagtatctactacccatattta

SEQ ID NO: 386750 - DNA, 120 bp, Artificial Sequence
  ENSG00000144366_18 (sequence is synthesized)
ctttaccaaatatatttctcctcactgcataaggactactcttctcatattttcttctttgatgaagatatttttcaccaaagtttattttgtgatgccctcttggttttgatactttaa

SEQ ID NO: 386751 - DNA, 120 bp, Artificial Sequence
  ENSG00000144366_19 (sequence is synthesized)
aatctgtggcacccgttctacatgaattatcaatatttggtaaattcaatctgtatttgttttgttaaagtcaaaaatctcattttccaaaaaaaaaaaaaaaacccagttactgctcag

SEQ ID NO: 386752 - DNA, 120 bp, Artificial Sequence
  ENSG00000144366_20 (sequence is synthesized)
tttagtcttgaacatgagcaataaaattctcttgcatttcattattgatgtgctgatgaacctggacttttaaaaatatttgtttcctatacctttaccctttacctaacagactaattt

SEQ ID NO: 386753 - DNA, 120 bp, Artificial Sequence
  ENSG00000144366_21 (sequence is synthesized)
gtactcagtaaaacaaaaatttatggtcaaaatttctaacttggttcatcacattataagataaataaattaaattaatgaaaatgtgacttagagtaggggtagccctcaaaaatagat

SEQ ID NO: 386754 - DNA, 120 bp, Artificial Sequence
  ENSG00000144366_22 (sequence is synthesized)
ttatcatttactcattggaattttcttcaagtgttaaaggtacattttcactaggaaaagaaatcaaatatgcttatgcaatatatatttgtgtgtttttccttaatgttatatggtata

SEQ ID NO: 386755 - DNA, 120 bp, Artificial Sequence
  ENSG00000144366_23 (sequence is synthesized)
tatgagccttcttgtttagtttcttttatctgctaagttgtaccttaattagagggcaatatatgtttcataaagaagagtctttataattttgtttgtcagatagtattttggaatttg

SEQ ID NO: 386756 - DNA, 120 bp, Artificial Sequence
  ENSG00000144366_24 (sequence is synthesized)
tataataaggatgtttagaagccatataagtggctttttttaacagatagaatttgtatttttattgtactttaaaaagatttatgtaataggtatatatttagtggccatttattatca

SEQ ID NO: 386757 - DNA, 120 bp, Artificial Sequence
  ENSG00000144366_25 (sequence is synthesized)
atggtaacacaatggagtactaagatggtatttgcacatttaagatatgttactttaccaatttttaatggtaatcaactctgctactggcatgatgaaatagtacataactggtcatta

SEQ ID NO: 386758 - DNA, 120 bp, Artificial Sequence
  ENSG00000144366_26 (sequence is synthesized)
attatgaacatttatttctccagtgcgtttttatgaagatctggttgaaaattgtatttctatgtaaactcaacgatatgtttggttttcctgaaaataaatgattttaaataaattaaa

SEQ ID NO: 386759 - DNA, 120 bp, Artificial Sequence
  ENSG00000144366_27 (sequence is synthesized)
gaagacttaagggtttgagcagatggttttctacctaaattgaataattcaattacgtattctcagctagcatggatttgggtcatggaattaaagtagaaacgtatccggcatgacttc

SEQ ID NO: 386760 - DNA, 120 bp, Artificial Sequence
  ENSG00000144366_28 (sequence is synthesized)
agactgagctcagtagccaggcatgaaagagactgggcaagttgcaggggctaattggaaaggggctgtcggttgcacttggggtttaaacaagaggtttcttttgcaatgagaattttt

SEQ ID NO: 386761 - DNA, 120 bp, Artificial Sequence
  ENSG00000144366_29 (sequence is synthesized)
aggtggctaagatcagtcttcttggcaaaaaaataaactaagcatagagtgcagttggatatgaccgaggaaattacaaaaagggctccaggagcaaagtctgaactttccttatcagtg

SEQ ID NO: 386762 - DNA, 120 bp, Artificial Sequence
  ENSG00000144366_30 (sequence is synthesized)
ttgcagtggaatagctgggggcctgatgctgtttgtgctgatcatactttgcaaatgcccacactttgttgctgtttgtctccttggacgaggtttgctgcaacttcaattccttgactt

SEQ ID NO: 386763 - DNA, 120 bp, Artificial Sequence
  ENSG00000144366_31 (sequence is synthesized)
gttcccggccgggagcgacccggagtccccagccccgcgtcccagctgccgccagcgccagttttggattcggcggattaggaagaggagggaggggggagagagcgcgaagagggaggg

SEQ ID NO: 386764 - DNA, 120 bp, Artificial Sequence
  ENSG00000144366_32 (sequence is synthesized)
gaccgaagctggagggtcccgagtccagcgccgtgttggcgtagagaaactttccctctcggcctcggagacggcgccccggccgtgccggagtggagatcgccaggctcggaggaaccg

SEQ ID NO: 386765 - DNA, 120 bp, Artificial Sequence
  ENSG00000144366_33 (sequence is synthesized)
attccaccctccacccacctccggttccgcgtgcacgcgcgagatagtccagtgggcccacagataacgaccatcagagattaaagaaggaaagtcagcgagcttgaacacaggcgtccc

SEQ ID NO: 386766 - DNA, 120 bp, Artificial Sequence
  ENSG00000144366_34 (sequence is synthesized)
aaaaccaactgagaataactcaagtatcagcacctccactgctgcacaatatgtctgatcatgaacaacatgtgtttcagagatgctcatcctctttctggcgtagtaatggtgattcat

SEQ ID NO: 386767 - DNA, 120 bp, Artificial Sequence
  ENSG00000144366_35 (sequence is synthesized)
ctccctgtctcaatatttcttccatctctgtcactcctatcaactcgcctgattccagactatcactgggactgttaataccaccaccttctaaatgtggctttcccaagccagtcagtg

SEQ ID NO: 386768 - DNA, 120 bp, Artificial Sequence
  ENSG00000144366_36 (sequence is synthesized)
ttgatatgggacaaagagaatgttatgtaccaaaactatggtttccttcaattattttcgctataaaaactcgcttaaaataattactttaaaataataatgtacagttagtcctaaaaa

SEQ ID NO: 386769 - DNA, 120 bp, Artificial Sequence
  ENSG00000144366_37 (sequence is synthesized)
tactcctacatatgctaaggataaggttgttggttttttaaatggttcaatttataatgtcaataagatggttcattttttaaatacaaaatggcatggattctaatggttcattgttct

SEQ ID NO: 386770 - DNA, 120 bp, Artificial Sequence
  ENSG00000144366_38 (sequence is synthesized)
gaaatctagagttaaacagtcactgcattagatttataagatttgatctcagtcttaacaattatgaatttgaaaattgtaaatgggtagatgaaggaaaatctttgtaagagtgaaatt

SEQ ID NO: 386771 - DNA, 120 bp, Artificial Sequence
  ENSG00000144366_39 (sequence is synthesized)
attctctctgaaaagaagcattgtagctgtagttcataacttttgggcttttatttaaaaagcaaacaaccagtgacaacttatttaggaatgtagttcagttgggttttcatttctctc

SEQ ID NO: 386772 - DNA, 120 bp, Artificial Sequence
  ENSG00000144366_40 (sequence is synthesized)
tcttccttttacttttttgttctaaattggtctgaagtttacagaaattggttttaaatgctttgcactatgggccatgatttaaaaatagtcttataaaccctagaataaagtcttctc

SEQ ID NO: 386773 - DNA, 120 bp, Artificial Sequence
  ENSG00000144366_41 (sequence is synthesized)
tttatatttgccctttacattttggtgaagttattatatcctatttttcatcaaaaagtttatatatggtagaatccagacagacaccaattatatgaagctgattgagaagagacaatg

SEQ ID NO: 386774 - DNA, 120 bp, Artificial Sequence
  ENSG00000144366_42 (sequence is synthesized)
aagacactaaagtaaggagaaggaggtatttttgtttattagtcttgggttaatacattaattctctatgcctcacttcctagaaaaaacaattatgggtgaacactgatctatcactga

SEQ ID NO: 386775 - DNA, 120 bp, Artificial Sequence
  ENSG00000144366_43 (sequence is synthesized)
taattgcaatccttcttagaaagttaatttaaatgcccttttactcatttttgactgcagctgtgtagctatcttattttctaggtagtacatgaattcattattgttctagatgtaata

SEQ ID NO: 386776 - DNA, 120 bp, Artificial Sequence
  ENSG00000144366_44 (sequence is synthesized)
acatgcctgaatttaaaagttgaattacttaacatatgtcttgaggttttcaaagaatctattaaaacagtgtttctcaagttgaatgattcttaatccccttttacataaaaattgttt

SEQ ID NO: 386777 - DNA, 120 bp, Artificial Sequence
  ENSG00000144366_45 (sequence is synthesized)
attaacttacaatttttaaatattgacaaaaatgttataaacaacttgtccttatggtttttataaaattatgaattcaataaattataaattaaatgaaagccaaattgcaacaccaat

SEQ ID NO: 386778 - DNA, 120 bp, Artificial Sequence
  ENSG00000144366_46 (sequence is synthesized)
tgcaacaccaatacaggacggatgatcttatttggttaaagctaaaaccaccttatcaaatttctattgatttcaacatgtattctatctgatggcacagatttcctagttcttttctat

SEQ ID NO: 386779 - DNA, 120 bp, Artificial Sequence
  ENSG00000144366_47 (sequence is synthesized)
atttcaaacgctatgaaactttcaaatggcgcatgataatttagcaagaatgctgtatttcatatgaaatcaattccttttcttttacattagttttacccattggacatgtactatctg

SEQ ID NO: 386780 - DNA, 120 bp, Artificial Sequence
  ENSG00000144366_48 (sequence is synthesized)
gtactaatgcttttgtagtaacaaagaaatatttatgtggtagtatttattctcaagggttgcacaggtcatacagagtacttctctaaaaattttttagattttcccaaaattggaaaa

SEQ ID NO: 386781 - DNA, 120 bp, Artificial Sequence
  ENSG00000144366_49 (sequence is synthesized)
aaaattatggagttttaaggataagcctctatttccagattttgttgaaaccaagtgtgagacacaatgtattgggatgattgagtgatggtgacactcaatgttaaaccgtggtgtttt

SEQ ID NO: 386782 - DNA, 120 bp, Artificial Sequence
  ENSG00000144366_50 (sequence is synthesized)
tgcttttgctgtttctaatattttcttaatgtctttttaaattctttactgctttcatggtgggtagcgccagagatggttggtatattatttttataataattttaaacaacttacaaa

SEQ ID NO: 386783 - DNA, 120 bp, Artificial Sequence
  ENSG00000144366_51 (sequence is synthesized)
tttttaaagctgaaaccttaaaatttgcatgccttatttaataaaaattcaaacaacagcttcatatgggtatatctgataattagttatgtttagagaggttttataaaccacatttta

SEQ ID NO: 386784 - DNA, 120 bp, Artificial Sequence
  ENSG00000144366_52 (sequence is synthesized)
agattatttttcagtgacttagtcactattgcattgttcacttcattgtttcctttcttttctttttttttttgaggcagagtctcactctatcgccctacccaagctggagtgcagtgg

SEQ ID NO: 386785 - DNA, 120 bp, Artificial Sequence
  ENSG00000144366_53 (sequence is synthesized)
catgatcttggctcactgcaacctccaccgcccgggctcaagcaatcttccctcctcagcttcctgagtagctgagactacaagtgtgcactaccacgcgtggctaatttttgtattttt

SEQ ID NO: 386786 - DNA, 120 bp, Artificial Sequence
  ENSG00000144366_54 (sequence is synthesized)
tgttaaaaacagggtttcatcatgttgtccagactgggcttgaactgctgggctcaagcgatctacccacttagacctcccaaagtgcttggaccacaggcatgagccaccatacttggc

SEQ ID NO: 386787 - DNA, 120 bp, Artificial Sequence
  ENSG00000144366_55 (sequence is synthesized)
catgattgtttcttttagtccaatatttacttgcaaggtcactttaacaaaagtaaaataatattttcttcatctaaagtctatgatggcttttattattaatcgtgctagcctaatgaa

SEQ ID NO: 386788 - DNA, 120 bp, Artificial Sequence
  ENSG00000144366_56 (sequence is synthesized)
tctaatgcagacatttagctatctttgcatatcatataaaaacttaatatagtacaatgggttgtgaacaccatattgagttaataagcctagtgagacatttagttttcatctttcatt

SEQ ID NO: 386789 - DNA, 120 bp, Artificial Sequence
  ENSG00000144366_57 (sequence is synthesized)
tacagagtattgtgactaagctatttttaagagaatcgaattattaagtttgaaatcacagaaacatctcatgcatgtaagcatttatgcagaaatgttagaccatatttcagtataagc

SEQ ID NO: 386790 - DNA, 120 bp, Artificial Sequence
  ENSG00000144366_58 (sequence is synthesized)
agttagaaaattaaacatctatttgaaatcaataatgtagctatttgatttgacataatttaaactgtccagtacatgtcaccaacaggaaaataagtggaatagtattgatagcccaca

SEQ ID NO: 386791 - DNA, 120 bp, Artificial Sequence
  ENSG00000144366_59 (sequence is synthesized)
ctgtaacatgtgagctataataatttaatacattaaaaaacaagcatggcaagttcatgaatgatgaaagaatcatgtatgagtggtgttaagtcagctagctagtactctgggagaaga

SEQ ID NO: 386792 - DNA, 120 bp, Artificial Sequence
  ENSG00000144366_60 (sequence is synthesized)
tcaatgtactgctgaaacttacagcaaatgccgagataaatttcagaagtaatcaacattttaaaatatttaaaatattattgaatattcatcagacttttgaattgaaaagaaaatttt

SEQ ID NO: 386793 - DNA, 120 bp, Artificial Sequence
  ENSG00000144366_61 (sequence is synthesized)
ggaaaagaaaaatacggacatatagtatccaattttttaaaatttactgtctaaaaatatataaatacattacatatacataattaaagcaattagacaaatggctaggaaactaaagaa

SEQ ID NO: 386794 - DNA, 120 bp, Artificial Sequence
  ENSG00000144366_62 (sequence is synthesized)
agaatcaacagataaataaaaaagcactagttcacaaaagaagaccacaagtggcttacacatatgtagacatgttctgtctaatcaaagtaaacatataaatcaaataaagaactgtaa

SEQ ID NO: 386795 - DNA, 120 bp, Artificial Sequence
  ENSG00000144366_63 (sequence is synthesized)
gaggtaactatggcctagcagtctctttaaagggtagcttgttattaatacttttatttctgtttgatatcaaaactttaaagcaatctattctgatgaaaaaataagtatgaatgtgtt

SEQ ID NO: 386796 - DNA, 120 bp, Artificial Sequence
  ENSG00000144366_64 (sequence is synthesized)
caatctctgcgaataaaaatacctagtcaacattattcataattttaaaatgctgaacgattttttttcaaatcaacgtaaaatgcatttttacgatggaaacaatcataaaaattaata

SEQ ID NO: 386797 - DNA, 120 bp, Artificial Sequence
  ENSG00000144366_65 (sequence is synthesized)
gcattttatatagtcataataaattagttttgtgggaatttaaaataatcagggtctgcaaagatgaaaagaggaagatagaaaactatatgtaatatattacttacataagaaaattat

SEQ ID NO: 386798 - DNA, 120 bp, Artificial Sequence
  ENSG00000144366_66 (sequence is synthesized)
atcattaaaatcatttttaaaaatgtatagatagaaaaaaagacatacctcaaaatgtagtgatttttctttccttgatatgcttttctatttcaaaataagaaaattcatcaaaatctt

SEQ ID NO: 386799 - DNA, 120 bp, Artificial Sequence
  ENSG00000144366_67 (sequence is synthesized)
aataagaaaattcatcaaaatctttcgtataaaaagcatatggtgaataatactttaattatttaatcattcttttgtgtgacgttagcttatgataattcccatcactacataagtaaa

SEQ ID NO: 386800 - DNA, 120 bp, Artificial Sequence
  ENSG00000144366_68 (sequence is synthesized)
taaagtctcatttttattaagaagtttgaagctcaacaggtgtgggaaattttatctgaggaagaaagaaaatcaagaaaccttataatatgtaaggatccttaaaaagtcaatatggag

SEQ ID NO: 386801 - DNA, 120 bp, Artificial Sequence
  ENSG00000144366_69 (sequence is synthesized)
atagatattattgtaagtcatatactaacactttattattaaaatagtgattgacctctgttttactttggctgctattctgcttttccaatattgataacacattgacaaatagtattt

SEQ ID NO: 386802 - DNA, 120 bp, Artificial Sequence
  ENSG00000144366_70 (sequence is synthesized)
tcagggtaattgaagtgatactggtttactagcagaatgaactgataaaatttaaaagtaccgtatggtatcaaacatttccacatgtaactctctttctatctgtcattatctatcaat

SEQ ID NO: 386803 - DNA, 120 bp, Artificial Sequence
  ENSG00000144366_71 (sequence is synthesized)
atctgtcattatctatcaatgtatcatctatttaccatttgtaatataccagaagatgacataatatacagatcttcagatatccaaataaaataattttaaagaaaagtttacttacag

SEQ ID NO: 386804 - DNA, 120 bp, Artificial Sequence
  ENSG00000144366_72 (sequence is synthesized)
atttttctaagtatttgctggctgtttgaaaaatataaataaatatggcaaaatgtattttgtgataagaatagatttttaaaaaataatgataagtagtctcatatttactcaactaaa

SEQ ID NO: 386805 - DNA, 120 bp, Artificial Sequence
  ENSG00000144366_73 (sequence is synthesized)
taaagattgtattccaagtactggaaagacattttgaaaaactttcacaatgattacatcactgtaattgctatatagtagtagtctctgtgctgtaaacataaagaatattctttgaac

SEQ ID NO: 386806 - DNA, 120 bp, Artificial Sequence
  ENSG00000144366_74 (sequence is synthesized)
attaataacaaataaagtatggcttacagctttgtaactaccttcctcctctatatgatgatgtttacattggatttatagaaagataagaacatttacataattattctaaataaaagt

SEQ ID NO: 386807 - DNA, 120 bp, Artificial Sequence
  ENSG00000144366_75 (sequence is synthesized)
aatttggagagatgcaaaaagatacccaattagctaacatacaagtagatatagtcagtccaattaaataaaacacccaaagcagaggtgaaaaccaatggttacctttaggagacattt

SEQ ID NO: 386808 - DNA, 120 bp, Artificial Sequence
  ENSG00000144366_76 (sequence is synthesized)
tgttttctttaggaatacactgctatctgcatattatttgccaataatgtgttgcatggccactccaaattacaaattacctttctgaaacatttcagttctgttagtaagaaaaaaaag

SEQ ID NO: 386809 - DNA, 120 bp, Artificial Sequence
  ENSG00000144366_77 (sequence is synthesized)
gtagagtatgtagagagcactaccacatttgcttctacaaggagacctacaatgtaacctccactttcattgatcagtgcaagtctgtgcttttcatctttttgtaggccaatgtgtata

SEQ ID NO: 386810 - DNA, 120 bp, Artificial Sequence
  ENSG00000144366_78 (sequence is synthesized)
gatttacaggaaagggtaggaatggggagaggtggcaagactggagatggcccacagttcaattatcttatgcaataaaaaaaaaagagattggagtgaaggaggacagactcctatgcc

SEQ ID NO: 386811 - DNA, 120 bp, Artificial Sequence
  ENSG00000144366_79 (sequence is synthesized)
attattttaattcaaaatcttggtggaaaaacactttcttagcaattgtgttcttatactcaataaatcatagacaacttaacttctaaaatatgcaaggaagagtaggagtcaaagaag

SEQ ID NO: 386812 - DNA, 120 bp, Artificial Sequence
  ENSG00000144366_80 (sequence is synthesized)
ccagtccgctacaagcaacagcaaggctagtaggggaagttttctccatggcaaagtaatctgcagttgtgtgttccacagaggatacggcattgcatttaaaagaagtattttacccgg

SEQ ID NO: 386813 - DNA, 120 bp, Artificial Sequence
  ENSG00000144366_81 (sequence is synthesized)
gctctggtcagtgctaaccaggaataaggtgaaaatcatcaggctatcttgaacctctcatcaatttgaagcctaactatcttaataatatttaaattaataataatttttaaagctaac

SEQ ID NO: 386814 - DNA, 120 bp, Artificial Sequence
  ENSG00000144366_82 (sequence is synthesized)
agatttcatttacaatagaatgatgtagtaactagccttttctgaaaaagaaacctttatcttaattttatgttttctcttctgtctctcatgcatgctaacctcacatagatttaaaac

SEQ ID NO: 386815 - DNA, 120 bp, Artificial Sequence
  ENSG00000144366_83 (sequence is synthesized)
attaaagtgttaatgggtctgaaagaactaccagtgctatacacctatataaaaattcagcaagtcaacatttgacatatagttatttattagttgatcaaagcatgaatatttcaactt

SEQ ID NO: 386816 - DNA, 120 bp, Artificial Sequence
  ENSG00000144366_84 (sequence is synthesized)
aaacatttgtgctatgtatttgacagcgaaaagtgtgtaagtatcccagatgttgtagggtggtttgttctgttttataagccaggaattgtcttgcttctggcattggcaaagtatttg

SEQ ID NO: 386817 - DNA, 120 bp, Artificial Sequence
  ENSG00000144366_85 (sequence is synthesized)
aaaatgaataattttctgtaaattattctgtaaaaagtctgtaaatacttagctgtactaatagatttattttgtcatgagaatatgcttcaggatttcatctgtaactaaattctcatg

SEQ ID NO: 386818 - DNA, 120 bp, Artificial Sequence
  ENSG00000144366_86 (sequence is synthesized)
gtcatgagcataaacttacatgtaaatttcttttattagaatgccatgcctgcttatgttatgcatgtattttataataatttaatctattttacaattttaaactcaaatatgatttag

SEQ ID NO: 386819 - DNA, 120 bp, Artificial Sequence
  ENSG00000144366_87 (sequence is synthesized)
tattatgcacataatacaaacagtagtggtgagcaaacgtgtgtttcccccacatgtgcagaatatgatggattttatgaaaataaatattcttaactccaggaaatatgatctatatgg

SEQ ID NO: 386820 - DNA, 120 bp, Artificial Sequence
  ENSG00000144366_88 (sequence is synthesized)
attcttaactccaggaaatatgatctatatggttccttaaaagattttccaatacactgaaaatttagttccttatgttcattgtataaaaatcttaggccaggcgcggtggctcacgcc

SEQ ID NO: 386821 - DNA, 63 bp, Artificial Sequence
  ENSG00000144366_89 (sequence is synthesized)
gaggctgaggcagttccagcctggcggcagagtgagactccatctcaagagaaaaaaaaaaaa

SEQ ID NO: 386822 - DNA, 120 bp, Artificial Sequence
  ENSG00000144366_90 (sequence is synthesized)
acagaagtggaacagccaaaaggaacagaagttgtgagagatgctgtaaggaaactaaaggtagggaaaggccttcaaataaattacaagtgtattgactctgtcatgttttcagcagat

SEQ ID NO: 386823 - DNA, 120 bp, Artificial Sequence
  ENSG00000144366_91 (sequence is synthesized)
tgatggagatcaaagcatgaacagctttgctgcagtttgcaagacatatcaagaaatctgaaggccagaaaattcctaaagtggagttgcaaatatcaatttatggagtaaaaattctag

SEQ ID NO: 386824 - DNA, 120 bp, Artificial Sequence
  ENSG00000144366_92 (sequence is synthesized)
gcccctgcccgaagcctgacccgactgcctctctcagtgagcagcaagaattgaagacttaagggtttgagcagatggttttctacctaaattgaataattcaattacgtattctcagct

SEQ ID NO: 386825 - DNA, 120 bp, Artificial Sequence
  ENSG00000144369_0 (sequence is synthesized)
gccaggagcccgcagccctggcgcccgccgccgcccggagccccgcaatatgccgccgcggccctctggctctaggccatggcgaggctctgccggcgtgtcccctgcaccctgcttctc

SEQ ID NO: 386826 - DNA, 120 bp, Artificial Sequence
  ENSG00000144369_1 (sequence is synthesized)
aggctctgccggcgtgtcccctgcaccctgcttctcggcctggccgtggtgctgctgaaagcgcggctggtccccgcggccgccagagcggaactcagccgctccgacctcagcctcatc

SEQ ID NO: 386827 - DNA, 120 bp, Artificial Sequence
  ENSG00000144369_2 (sequence is synthesized)
caacagcagcagcagcagcagcaacaacaacaacaacagcaaaagcagctggaggaggctgaggaggagaggacagaggtgcctggggcaacctccaccttgacggttccagtgtctgta

SEQ ID NO: 386828 - DNA, 120 bp, Artificial Sequence
  ENSG00000144369_3 (sequence is synthesized)
tttatgttgaaagtccaggtgaatgacatcatcagtcgtcagtacctgagccaagcagttgtagaagtgtttgtaaactacacgaagacaaattccacagtaactaaaagcaatggagca

SEQ ID NO: 386829 - DNA, 120 bp, Artificial Sequence
  ENSG00000144369_4 (sequence is synthesized)
gtgctgataaaagtaccctacaaattaggacttagtttaactattattgcttacaaagatggctacgtgttgacccctctgccttggaaaaccagaagaatgccaatatattcatcagtt

SEQ ID NO: 386830 - DNA, 120 bp, Artificial Sequence
  ENSG00000144369_5 (sequence is synthesized)
acactttcactgttcccgcaaagccaagcaaatatatggctatttgaagacactgttttaattactggaaaattagctgatgccaagtctcaaccaagtgttcagttttcaaaagcctta

SEQ ID NO: 386831 - DNA, 120 bp, Artificial Sequence
  ENSG00000144369_6 (sequence is synthesized)
attaaacttcctgacaaccatcatattagcaacgttactggctatcttacagttctacaacagtttttgaaagtggacaattttctgcatacaactggaattactctcaataaaccaggt

SEQ ID NO: 386832 - DNA, 120 bp, Artificial Sequence
  ENSG00000144369_7 (sequence is synthesized)
tttgaaaacattgaattgactcctcttgctgcaatatgtgtgaaaatatattctggaggaaaagaactaaaggtcaatggctctattcaagtttctcttcctcttctacgtctgaatgat

SEQ ID NO: 386833 - DNA, 120 bp, Artificial Sequence
  ENSG00000144369_8 (sequence is synthesized)
ataagtgcaggggatcgcatacctgcttggacatttgatatgaacacaggtgcttgggtaaatcatggtcggggaatggtcaaggaacataacaatcatttaatctggacatatgatgca

SEQ ID NO: 386834 - DNA, 120 bp, Artificial Sequence
  ENSG00000144369_9 (sequence is synthesized)
ccacatttggggtactggatagcagctccacttccaggaactagaggttcaggtataaatgaagattccaaggacataactgcctaccacacagtgtttcttacagccatattaggagga

SEQ ID NO: 386835 - DNA, 120 bp, Artificial Sequence
  ENSG00000144369_10 (sequence is synthesized)
acaatagtcattgtcattggattttttgctgtactactttgttattgcagggacaagtgtggtactccacagaaaagagaaagaaatatcactaaacttgaggtcctcaagagagaccag

SEQ ID NO: 386836 - DNA, 120 bp, Artificial Sequence
  ENSG00000144369_11 (sequence is synthesized)
acaacttcaacaacacacataaatcatatcagtacagttaaagttgcattaaaagctgaggacaagtcgcagttattcaatgccaaaaactcctcatatagtcctcagaaaaaggaacca

SEQ ID NO: 386837 - DNA, 120 bp, Artificial Sequence
  ENSG00000144369_12 (sequence is synthesized)
tcaaaggcagaaacagaagaaagagtttccatggtaaaaactcgggacgattttaaaatctacaatgaagatgtttcatttctatcagtcaatcaaaataattactcaagaaacccaaca

SEQ ID NO: 386838 - DNA, 120 bp, Artificial Sequence
  ENSG00000144369_13 (sequence is synthesized)
cagtctttggagcccaatgtagggtccaaacaacctaaacatattaacaacaatctatcttcatctctaggtgatgctcaagatgaaaagaggtatctcacaggtaatgaggaggcgtat

SEQ ID NO: 386839 - DNA, 120 bp, Artificial Sequence
  ENSG00000144369_14 (sequence is synthesized)
gggcgttcccatattcctgaacagcttatgcatatttacagccaacccattgccatccttcaaacatctgaccttttctccacaccggaacaattacatactgctaagtcagctactttg

SEQ ID NO: 386840 - DNA, 120 bp, Artificial Sequence
  ENSG00000144369_15 (sequence is synthesized)
ccaagaaagggacagttagtctatggccaattgatggaaccagtaaatcgagagaactttacgcagaccttgcccaaaatgccaattcattctcatgcacagcccccagatgccagggaa

SEQ ID NO: 386841 - DNA, 120 bp, Artificial Sequence
  ENSG00000144369_16 (sequence is synthesized)
gaggatatcatacttgaaggtcaacagagcctgccatcccaggcttcagattggagccgatactcaagcagcttactggaatccgtctctgttcctggaacactaaatgaggctgttgta

SEQ ID NO: 386842 - DNA, 120 bp, Artificial Sequence
  ENSG00000144369_17 (sequence is synthesized)
atgactccattttcatcggaacttcaaggaatttcagaacagaccctcctggagctgtccaaaggaaagccctccccgcatcccagagcctggtttgtgtctcttgatggaaagccagtt

SEQ ID NO: 386843 - DNA, 120 bp, Artificial Sequence
  ENSG00000144369_18 (sequence is synthesized)
gcacaagtgaggcactcctttatagacctgaaaaagggcaagagaacccagagcaatgacaccagtctggactctggggtggacatgaatgagcttcactcaagtagaaagctcgagagg

SEQ ID NO: 386844 - DNA, 120 bp, Artificial Sequence
  ENSG00000144369_19 (sequence is synthesized)
gagaaaacattcatcaaaagcatgcatcagcccaagatcctttacttagaagatttagacctaagcagcagtgagagtggaaccaccgtctgttcccctgaggacccagctttaaggcac

SEQ ID NO: 386845 - DNA, 120 bp, Artificial Sequence
  ENSG00000144369_20 (sequence is synthesized)
atcctagatggagggagtggagtgatcatggagcaccctggagaagagtcgccaggaaggaaaagcactgttgaagattttgaagctaatacatcccccactaaaagaaggggcagacca

SEQ ID NO: 386846 - DNA, 120 bp, Artificial Sequence
  ENSG00000144369_21 (sequence is synthesized)
ccactagccaaaagagatagcaagactaacatctggaagaagcgagaggaacgcccactgattcccataaattaactccaatggggattgtgtgtctgctgtctcgtgctgtttattctt

SEQ ID NO: 386847 - DNA, 120 bp, Artificial Sequence
  ENSG00000144369_22 (sequence is synthesized)
gcttcttgttgtaaattgcagtacgaacttaagaaaatgagactgagcaatctcatggttcttggacatgtctcaagcagagtaaatggtaattcagtaatcagagagaaagataccaag

SEQ ID NO: 386848 - DNA, 120 bp, Artificial Sequence
  ENSG00000144369_23 (sequence is synthesized)
tatctgaaaatgttgctcagccagccagtttggccttgactctcttaagaataacagtgaaatatatactcctcaagttgcctccaaaaatgttgcctctaccatggtgactaccccatg

SEQ ID NO: 386849 - DNA, 120 bp, Artificial Sequence
  ENSG00000144369_24 (sequence is synthesized)
gaacatttagaaacaaaactgacttcaggcatcatattattttaaatgttactattacgtcttcttctgcctatacttaaaaataacttgataaatgacttggactgatgttactctgga

SEQ ID NO: 386850 - DNA, 120 bp, Artificial Sequence
  ENSG00000144369_25 (sequence is synthesized)
gttatcacaaagaaaatgttgtttggtctttaaagagcatgtgtattgtatcatcccaaacgtaaatcctacatttatataagatgggcaagaagctacttggtcattagagagggagac

SEQ ID NO: 386851 - DNA, 120 bp, Artificial Sequence
  ENSG00000144369_26 (sequence is synthesized)
accagctctttggttgtttttggatataactttacaaaataagtaagatgttaatttagaaatttgagaaattaatgctctaatactgagtttttatttaaaaattattttttcttcccc

SEQ ID NO: 386852 - DNA, 120 bp, Artificial Sequence
  ENSG00000144369_27 (sequence is synthesized)
tcaacaatgaagcaagcttagctgtcaagggaaactttttacaaatctgaaaaaaacaatctatgactttggtttaaggctcactgatacttttaggctaaattggttttaatatatttc

SEQ ID NO: 386853 - DNA, 120 bp, Artificial Sequence
  ENSG00000144369_28 (sequence is synthesized)
ttctattctaaaaacctgaactcagtcacttaaaggctatgaaatttaaaaaaaaagtcgatgtgaaagtttcttttgaacactaaaataaaatatgtgcagataaaatatacattgatt

SEQ ID NO: 386854 - DNA, 120 bp, Artificial Sequence
  ENSG00000144369_29 (sequence is synthesized)
tgtttttcttaaatgttgatgagaagaaaaagagatgccattttcctgaggctcaaaaataccttcaggatagttgtatatccagttattgattttcttaaaagatgtgtaaggaaaaca

SEQ ID NO: 386855 - DNA, 120 bp, Artificial Sequence
  ENSG00000144369_30 (sequence is synthesized)
gtttcaatttcaggggaaaagtaaaagtttttccctaagtcacttaaagcctttgcaacttcttttttcagttttgtaagtaatatatctatgttcttttcattatagcaagcattcaat

SEQ ID NO: 386856 - DNA, 120 bp, Artificial Sequence
  ENSG00000144369_31 (sequence is synthesized)
gtgaacaactttttaattaactctgaattaccattcatacatcctaaaaataaaagctcgttattcattaaaatcaactgatcccatttttcttaaaatttccctgaaggcaaatgtctg

SEQ ID NO: 386857 - DNA, 120 bp, Artificial Sequence
  ENSG00000144369_32 (sequence is synthesized)
aagcacctttcccttgtgggggtaaaaatcctaaattgctttatttttcattccctcctattcaacatgggagcagcatagagacccaaaccatgtaaacaagttcagtgaaccaaaaca

SEQ ID NO: 386858 - DNA, 120 bp, Artificial Sequence
  ENSG00000144369_33 (sequence is synthesized)
gccacattagcttcagtaaaattatagctagatgtgcaattttttcctccaacttctaacgtgtcaaataaccttcctactgttctgtgttaactgaaagaacataaagaccctaggcaa

SEQ ID NO: 386859 - DNA, 120 bp, Artificial Sequence
  ENSG00000144369_34 (sequence is synthesized)
ctgtgttaactgaaagaacataaagaccctaggcaaatatttgctatatattaccccaatccatagaagaaataatgttttgggtaatacctaggcttcctttttttttttttttttttt

SEQ ID NO: 386860 - DNA, 120 bp, Artificial Sequence
  ENSG00000144369_35 (sequence is synthesized)
aggcttcttattggtcttacacagaaagatacatcaaaagcagcatgactcaaaatgatttggaaaaggttaaagttagtgctctgctgaagtgcctttgatatagacttgcattattag

SEQ ID NO: 386861 - DNA, 120 bp, Artificial Sequence
  ENSG00000144369_36 (sequence is synthesized)
aaggatataacatcttttttaagtgtgcattttctttcagttaaccaaattaaacagatgtgcagttttattaaaaatatagacctagtgtttcatgttggaacaataaatattgcatgt

SEQ ID NO: 386862 - DNA, 120 bp, Artificial Sequence
  ENSG00000144369_37 (sequence is synthesized)
gagtagtatttcttgttttttgaatacagtatatattgataaattgtttatgttggaatgaagttagaaactatatagcaaaacattatattttaagtgtttatttttcccacctttaaa

SEQ ID NO: 386863 - DNA, 120 bp, Artificial Sequence
  ENSG00000144369_38 (sequence is synthesized)
taaaaatgtttcatctcagcttggtaatgaaatacacatattggtataagggtataccattcaggtatgccacttattttattcatttttgtgtaagggaaatgagatgatgtatcccaa

SEQ ID NO: 386864 - DNA, 120 bp, Artificial Sequence
  ENSG00000144369_39 (sequence is synthesized)
gggcttttctagaactacttgtttgctttcagaataaaaccttattattttttacactgcacatgctgttctcaattggtaattataggcaatttatcttttctaatgatcaaaagagtg

SEQ ID NO: 386865 - DNA, 120 bp, Artificial Sequence
  ENSG00000144369_40 (sequence is synthesized)
tgacttctcatttgtgagtagttcacaaatttcctgttaaaaagctgaaaccatctactttttcttaacccaagtgataataaacaatattcacaactttcttaaatttttaaattgaaa

SEQ ID NO: 386866 - DNA, 120 bp, Artificial Sequence
  ENSG00000144369_41 (sequence is synthesized)
accaaggttttttcaaatataaacctagatgattttggtcacaaattgttaacatttgtcgatcctttgtatatactttggatatatattaaaggcaaaactatctcttgactaactgat

SEQ ID NO: 386867 - DNA, 120 bp, Artificial Sequence
  ENSG00000144369_42 (sequence is synthesized)
ggattcatttactaaagcacagctgtatgtatttttgaatacatattatgatcttgagactttataaatcaatttttatgactttatgcagttgtatagggattatgccctttcagttct

SEQ ID NO: 386868 - DNA, 120 bp, Artificial Sequence
  ENSG00000144369_43 (sequence is synthesized)
atagggattatgcccttttataatacataatataccacagagattacaaatgttgaggaatgaaagcacttctttgctttggcaatcattttcagaccactatgtgtttgaatcctctgg

SEQ ID NO: 386869 - DNA, 120 bp, Artificial Sequence
  ENSG00000144369_44 (sequence is synthesized)
tatcaatacgtattatagggttttagagatctgtgggtcaaatgatgtccctcaaaacttcctaaaaaggtgaagctcaaagtcacacattcttataaggcgcatgagtttctcattttc

SEQ ID NO: 386870 - DNA, 120 bp, Artificial Sequence
  ENSG00000144369_45 (sequence is synthesized)
ccatgtacgagcattgtaaaggaattcagctgtattaatttctatttcagatctagaattgacattttgccttcttgtttccaggtgtttctattttttgtattctttcagagaaatctc

SEQ ID NO: 386871 - DNA, 120 bp, Artificial Sequence
  ENSG00000144369_46 (sequence is synthesized)
atatttcggtgtatttattgctgttactactatatttactgctgaaaactgtaacaacctgaagatttgtaaaatgttaaacatagttcattaaaaataataaaataaatctaaaatgta

SEQ ID NO: 386872 - DNA, 120 bp, Artificial Sequence
  ENSG00000144381_0 (sequence is synthesized)
gccccgacgcgcaccgcgattcgccccaagggccctgcgcaggacgctgacgcgaagactcggaggcggaagaaaaaaggagctgtttctaggcttttctaggcgcccagccgagaaatg

SEQ ID NO: 386873 - DNA, 120 bp, Artificial Sequence
  ENSG00000144381_1 (sequence is synthesized)
cttcggttacccacagtctttcgccagatgagaccggtgtccagggtactggctcctcatctcactcgggcttatgccaaagatgtaaaatttggtgcagatgcccgagccttaatgctt

SEQ ID NO: 386874 - DNA, 120 bp, Artificial Sequence
  ENSG00000144381_2 (sequence is synthesized)
caaggtgtagaccttttagccgatgctgtggccgttacaatggggccaaagggaagaacagtgattattgagcagagttggggaagtcccaaagtaacaaaagatggtgtgactgttgca

SEQ ID NO: 386875 - DNA, 120 bp, Artificial Sequence
  ENSG00000144381_3 (sequence is synthesized)
aagtcaattgacttaaaagataaatacaaaaacattggagctaaacttgttcaagatgttgccaataacacaaatgaagaagctggggatggcactaccactgctactgtactggcacgc

SEQ ID NO: 386876 - DNA, 120 bp, Artificial Sequence
  ENSG00000144381_4 (sequence is synthesized)
tctatagccaaggaaggcttcgagaagattagcaaaggtgctaatccagtggaaatcaggagaggtgtgatgttagctgttgatgctgtaattgctgaacttaaaaagcagtctaaacct

SEQ ID NO: 386877 - DNA, 120 bp, Artificial Sequence
  ENSG00000144381_5 (sequence is synthesized)
gtgaccacccctgaagaaattgcacaggttgctacgatttctgcaaacggagacaaagaaattggcaatatcatctctgatgcaatgaaaaaagttggaagaaagggtgtcatcacagta

SEQ ID NO: 386878 - DNA, 120 bp, Artificial Sequence
  ENSG00000144381_6 (sequence is synthesized)
aaggatggaaaaacactgaatgatgaattagaaattattgaaggcatgaagtttgatcgaggctatatttctccatactttattaatacatcaaaaggtcagaaatgtgaattccaggat

SEQ ID NO: 386879 - DNA, 120 bp, Artificial Sequence
  ENSG00000144381_7 (sequence is synthesized)
gcctatgttctgttgagtgaaaagaaaatttctagtatccagtccattgtacctgctcttgaaattgccaatgctcaccgtaagcctttggtcataatcgctgaagatgttgatggagaa

SEQ ID NO: 386880 - DNA, 120 bp, Artificial Sequence
  ENSG00000144381_8 (sequence is synthesized)
gctctaagtacactcgtcttgaataggctaaaggttggtcttcaggttgtggcagtcaaggctccagggtttggtgacaatagaaagaaccagcttaaagatatggctattgctactggt

SEQ ID NO: 386881 - DNA, 120 bp, Artificial Sequence
  ENSG00000144381_9 (sequence is synthesized)
agggattgaccctgaatcttgaagacgttcagcctcatgacttaggaaaagttggagaggtcattgtgaccaaagacgatgccatgctcttaaaaggaaaaggtgacaaggctcaaattg

SEQ ID NO: 386882 - DNA, 120 bp, Artificial Sequence
  ENSG00000144381_10 (sequence is synthesized)
aaaaacgtattcaagaaatcattgagcagttagatgtcacaactagtgaatatgaaaaggaaaaactgaatgaacggcttgcaaaactttcagatggagtggctgtgctgaaggttggtg

SEQ ID NO: 386883 - DNA, 120 bp, Artificial Sequence
  ENSG00000144381_11 (sequence is synthesized)
ggacaagtgatgttgaagtgaatgaaaagaaagacagagttacagatgcccttaatgctacaagagctgctgttgaagaaggcattgttttgggagggggttgtgccctccttcgatgca

SEQ ID NO: 386884 - DNA, 120 bp, Artificial Sequence
  ENSG00000144381_12 (sequence is synthesized)
ttccagccttggactcattgactccagctaatgaagatcaaaaaattggtatagaaattattaaaagaacactcaaaattccagcaatgaccattgctaagaatgcaggtgttgaaggat

SEQ ID NO: 386885 - DNA, 120 bp, Artificial Sequence
  ENSG00000144381_13 (sequence is synthesized)
ctttgatagttgagaaaattatgcaaagttcctcagaagttggttatgatgctatggctggagattttgtgaatatggtggaaaaaggaatcattgacccaacaaaggttgtgagaactg

SEQ ID NO: 386886 - DNA, 120 bp, Artificial Sequence
  ENSG00000144381_14 (sequence is synthesized)
ctttattggatgctgctggtgtggcctctctgttaactacagcagaagttgtagtcacagaaattcctaaagaagagaaggaccctggaatgggtgcaatgggtggaatgggaggtggta

SEQ ID NO: 386887 - DNA, 120 bp, Artificial Sequence
  ENSG00000144381_15 (sequence is synthesized)
tgggaggtggcatgttctaactcctagactagtgctttacctttattaatgaactgtgacaggaagcccaaggcagtgttcctcaccaataacttcagagaagtcagttggagaaaatga

SEQ ID NO: 386888 - DNA, 120 bp, Artificial Sequence
  ENSG00000144381_16 (sequence is synthesized)
agaaaaaggctggctgaaaatcactataaccatcagttactggtttcagttgacaaaatatataatggtttactgctgtcattgtccatgcctacagataatttattttgtatttttgaa

SEQ ID NO: 386889 - DNA, 120 bp, Artificial Sequence
  ENSG00000144381_17 (sequence is synthesized)
taaaaaacatttgtacattcctgatactgggtacaagagccatgtaccagtgtactgctttcaacttaaatcactgaggcatttttactactattctgttaaaatcaggattttagtgct

SEQ ID NO: 386890 - DNA, 120 bp, Artificial Sequence
  ENSG00000144381_18 (sequence is synthesized)
tgccaccaccagatgagaagttaagcagcctttctgtggagagtgagaataattgtgtacaaagtagagaagtatccaattatgtgacaacctttgtgtaataaaaatttgtttaaagtt

SEQ ID NO: 386891 - DNA, 120 bp, Artificial Sequence
  ENSG00000144381_19 (sequence is synthesized)
aggacttaacatgttacacgttttttaaaaaaaatttaatggcatgtgtgattttttttttcccttgatcacaccaatgtcagaataacaatactacccaatcatcaatattagaatcat

SEQ ID NO: 386892 - DNA, 120 bp, Artificial Sequence
  ENSG00000144381_20 (sequence is synthesized)
tgtttcttactgctaaaacctttgaaaagaattatgaccataatggttgtcatttagttctacatgtggttgtcattttagttctacatggctgtaaaatggattcatatgattgtgaaa

SEQ ID NO: 386893 - DNA, 120 bp, Artificial Sequence
  ENSG00000144381_21 (sequence is synthesized)
ccctcactcgccgccgacgacctgtctcgccgagcgcacgccttgccgccgccccgcaggcagctgggataccgcgcctccagtcttgaccttgctgggggcgttcggaaagaaggacac

SEQ ID NO: 386894 - DNA, 120 bp, Artificial Sequence
  ENSG00000144381_22 (sequence is synthesized)
gtgggctcgcgccgagtgggccgggccgccgcccccagcatcgcggccttgctggttgctctgatacagtagccttgggtggatccatggagacactttgctgagcggctttttgcaccg

SEQ ID NO: 386895 - DNA, 120 bp, Artificial Sequence
  ENSG00000144381_23 (sequence is synthesized)
gaagactcggaggcggaagaaaaaaggagctgtttctaggcttttctaggcgcccagccgaggtgaaagaactaccccttcgtcccctcccggaaatgacgcgatttgacccttgagccg

SEQ ID NO: 386896 - DNA, 120 bp, Artificial Sequence
  ENSG00000144381_24 (sequence is synthesized)
agtgatgaaaacttgctggaccagagaacagctccagggaaagcggcagggagaggtggtcaaagggaaacaaggaggagaatatcggcacccggatccggctagacaagctggatggca

SEQ ID NO: 386897 - DNA, 120 bp, Artificial Sequence
  ENSG00000144381_25 (sequence is synthesized)
gacacaacttacgttgagactttgaagtagttgctttattatgaagactgctcatttttaaaaatgtaaatcatccttagggtatgtctgatcctgttacatttttttcttctagggaag

SEQ ID NO: 386898 - DNA, 120 bp, Artificial Sequence
  ENSG00000144381_26 (sequence is synthesized)
aggcctgagtcaccacgcccggccaggccaacagtttattaagaaggtaaacggatatggacaagtataattaatagaaaatagcctaaactgtctcagatacttcctgtcttaatttga

SEQ ID NO: 386899 - DNA, 120 bp, Artificial Sequence
  ENSG00000144381_27 (sequence is synthesized)
aaaaacaaaaaaacacaaaaaccaaaccagattacttagggagtcctaagtaatctagtaacagcttgaggggaattaaacagataggcatttttatttcatttaaatcttactatcaac

SEQ ID NO: 386900 - DNA, 120 bp, Artificial Sequence
  ENSG00000144381_28 (sequence is synthesized)
gaattagcctttgctgcatgaaatgaatccatcctaacttaaatgattattcaaataagcacttttgggattttttgcagaagtgtaattggatgtcctgggctgtttcatactctaccc

SEQ ID NO: 386901 - DNA, 120 bp, Artificial Sequence
  ENSG00000144381_29 (sequence is synthesized)
tctgttgtcaccacagtgttctaaacttcagtgtgctttaaggcattgattccttggacctaaggaaagtgttaacttgaggaaattaatccttctctcattcctcctcttggcctggag

SEQ ID NO: 386902 - DNA, 120 bp, Artificial Sequence
  ENSG00000144381_30 (sequence is synthesized)
aaatcttaaactgggttttcctttagcaagcttggctgtatggtgggtaggtactgttaggtaattttgatattttacttagttggtttcttttgtttttagagacagggtcttgctctg

SEQ ID NO: 386903 - DNA, 120 bp, Artificial Sequence
  ENSG00000144395_0 (sequence is synthesized)
agttccacggaaacccgctcgcctgctgcagtacggagcctcaggcggacagatggactgtaaggtacatatggaaactacagtgtccagaccggtcctttctccaacccacatcaacgc

SEQ ID NO: 386904 - DNA, 120 bp, Artificial Sequence
  ENSG00000144395_1 (sequence is synthesized)
tacagcttctgaaacattcacagtacttcagcaaaggatgagaatagttgaggaacagaccagttcactgagggatgacctaataatgttggattttggtgaaaaaagaggctatttgga

SEQ ID NO: 386905 - DNA, 120 bp, Artificial Sequence
  ENSG00000144395_2 (sequence is synthesized)
agctccagactgtttagaagacctggacagccagaaagtcattagtcctatccaaaatgaagcaatttgtgcaggaaaaacagatattttatggaagaactgtgagtttctggtaaatcg

SEQ ID NO: 386906 - DNA, 120 bp, Artificial Sequence
  ENSG00000144395_3 (sequence is synthesized)
aatgtgccgtcttgaaagcctcatgcagtccttgaagatgaacatctttcggctgcaaactgaaaaggatttgaatcctcagaaaacagcttttctgaaagatcgactgaatgcaataca

SEQ ID NO: 386907 - DNA, 120 bp, Artificial Sequence
  ENSG00000144395_4 (sequence is synthesized)
ggaagagcattctaaggacctgaagctgttgcatctcgaagttatgaatttgcgccagcaactgagagctgtaaaagaggaagaagacaaggcacaagatgaggtgcaaaggttgactgc

SEQ ID NO: 386908 - DNA, 120 bp, Artificial Sequence
  ENSG00000144395_5 (sequence is synthesized)
cactctgaagattgcctcgcagacaaagaagaatgcagccattattgaagaggaactgaagaccacaaaacgtaaaatgaaccttaaaattcaagagctaaggagacaactggctcagga

SEQ ID NO: 386909 - DNA, 120 bp, Artificial Sequence
  ENSG00000144395_6 (sequence is synthesized)
gaagtaccttagggaatctttagagaaatcagcatcagccatgctcctcaaaatacaagaaatgggatcaacagtggaggtagaacgaaaacaggtgcacattttgcagcaaaactgcat

SEQ ID NO: 386910 - DNA, 120 bp, Artificial Sequence
  ENSG00000144395_7 (sequence is synthesized)
tgctctacgtgattctatacagagcgctcaagaactactggcccaggaacaaaaaaaaaaagaagagttggagattgctacttcacagctcaaatctgatctaacttctagagatgacct

SEQ ID NO: 386911 - DNA, 120 bp, Artificial Sequence
  ENSG00000144395_8 (sequence is synthesized)
catttccaagttggttgaagaaaataagaacctgcagatatctttcaacaaggaacatgaagaaaatgcatatttgaggtccgaaataatgtctcttcatgaagcatcagaaaaagcaca

SEQ ID NO: 386912 - DNA, 120 bp, Artificial Sequence
  ENSG00000144395_9 (sequence is synthesized)
agttttgaatgaccaattgactaaaaagtgttcagagttgagctgcatgcttcagactgttactatggaaaaagccagaatcattgctgaccatcaggccattctgcaggtagagcagaa

SEQ ID NO: 386913 - DNA, 120 bp, Artificial Sequence
  ENSG00000144395_10 (sequence is synthesized)
aatgatgacgcagacatttcaagaacaaaacttattgctggatgcagcccatgccagtatcacaaatgaactacagactgttcagaatgagaaaacccaactccaggcacatctggatca

SEQ ID NO: 386914 - DNA, 120 bp, Artificial Sequence
  ENSG00000144395_11 (sequence is synthesized)
tttaatccttgagcataaccagtgtatccagaaagcacaggatgctgaaaagagaacagctgtgcaaaaagagctgctagaatcaactattgcaagattgcgaggtgaattggaagcatc

SEQ ID NO: 386915 - DNA, 120 bp, Artificial Sequence
  ENSG00000144395_12 (sequence is synthesized)
aatgcaagagaagaagtctctgctagaggagaaagaaagatttcagagggaggttaataaaacagaaaaagaaatagtgcaagaaagatgcaatttggaaaaggaattagctaaaaacaa

SEQ ID NO: 386916 - DNA, 120 bp, Artificial Sequence
  ENSG00000144395_13 (sequence is synthesized)
ggtagacataaatacattaactcataacctgcagactcttgaagaagagaataagcacctggcagatcaaatggcttccctagaacttcagcaagtcacttctgattaccatgggcttgc

SEQ ID NO: 386917 - DNA, 120 bp, Artificial Sequence
  ENSG00000144395_14 (sequence is synthesized)
cttacagaatgatcatctacgcaagatgaataagtatttacagactaaatatgctcaggcaaactcagaactcagtgccaagagggtacacctgcagcaggcagatgctcacctgaaaga

SEQ ID NO: 386918 - DNA, 120 bp, Artificial Sequence
  ENSG00000144395_15 (sequence is synthesized)
agtgaaatctattcttgaaagaagtaaagaggagctgtcccgaacagtgaagtgtcgtaatgcggccctgaaagagagtcagaagttgaaagaagacctcgaggctgtggaggacaggga

SEQ ID NO: 386919 - DNA, 120 bp, Artificial Sequence
  ENSG00000144395_16 (sequence is synthesized)
aaacaagaaggtgggaaactttcagcgacaattggcagaagctaaagaagacaactgcaaagtcacaatcatgttggagaatgtgctggcttctcacagtaagatgcaaggtgctctgga

SEQ ID NO: 386920 - DNA, 120 bp, Artificial Sequence
  ENSG00000144395_17 (sequence is synthesized)
gaaagtacaaatagagcttgggcggagggattcagagattgcaggcctcaagaaagaaagggatctcaatcaacagagggtgcagaagctggaagctgaagtggaccagtggcaggccag

SEQ ID NO: 386921 - DNA, 120 bp, Artificial Sequence
  ENSG00000144395_18 (sequence is synthesized)
gatgcttgtcatggaggaccagcacaacagtgagattgaatctctacaaaaagctctaggtgtagctagagaagacaacaggaaacttgctatgagtctggaacaagctctccagacaaa

SEQ ID NO: 386922 - DNA, 120 bp, Artificial Sequence
  ENSG00000144395_19 (sequence is synthesized)
taatcatctgcaaacaaagctagatcacattcaagagcaattggaaagcaaagaacttgagcgacagaatttggaaaccttcaaagaccggatgactgaagagtccaaagtggaagcaga

SEQ ID NO: 386923 - DNA, 120 bp, Artificial Sequence
  ENSG00000144395_20 (sequence is synthesized)
attgcatgctgaacgcatagaagctctaagaaagcagtttcaaaccgagagagaaactacaaagaaagtggcacaacgggaagtggctgagctgaagaaagcccttgatgaagctaactt

SEQ ID NO: 386924 - DNA, 120 bp, Artificial Sequence
  ENSG00000144395_21 (sequence is synthesized)
cagatcagtggaagtgtcccggaccaaccgagagctgcgacagaaacttgcagagctagaaaaaatactagaaagtaacaaggagaaaataaagaatcaaaagacccaaattaagctcca

SEQ ID NO: 386925 - DNA, 120 bp, Artificial Sequence
  ENSG00000144395_22 (sequence is synthesized)
cttgtcagctaaggcgaataatgctcagaatatagaaaggatgaagcaaatagaaaaagaattgaagcaaatggagctaattaaggatcaatatcagaaaaagaactatgaacagtcttt

SEQ ID NO: 386926 - DNA, 120 bp, Artificial Sequence
  ENSG00000144395_23 (sequence is synthesized)
gagtatccagagatttgtgtgtgaaatgactaacctgcagaaagagatgcagatgttggctaagagccaatatgatgcctcagtgcggaataaacagcaagagctgcacctagaagcaga

SEQ ID NO: 386927 - DNA, 120 bp, Artificial Sequence
  ENSG00000144395_24 (sequence is synthesized)
gcggaaaataaggcaggagctagagaatcggtgccaggaattggaagaaactgtcagacacctgaagaaatgtaaagaggcaacagagaatacgctgaaagaagccagtgtggaatcaga

SEQ ID NO: 386928 - DNA, 120 bp, Artificial Sequence
  ENSG00000144395_25 (sequence is synthesized)
acagataacagctaatctggaagaagctcatcgctggtttaagcacaggtttgatggtctacaacttgagctgacaaaaaaccggttgcagaggccttctggggaagacaggtggcagga

SEQ ID NO: 386929 - DNA, 120 bp, Artificial Sequence
  ENSG00000144395_26 (sequence is synthesized)
aaaggaccaagatgtaaaacatgatgtcatgtccaaccaatctgttctgcatcgatgggagagaaaacagaatcttaggcccatgcccaagaagtatcattctgaggtacagaggaagtg

SEQ ID NO: 386930 - DNA, 120 bp, Artificial Sequence
  ENSG00000144395_27 (sequence is synthesized)
atgtccttgacaagggagcttctttatgtgtagctacactccatgattccaagagcccagcagccggggctggcctgtttctagagtcataagaacatgaagtctttgatgtgggctgaa

SEQ ID NO: 386931 - DNA, 120 bp, Artificial Sequence
  ENSG00000144395_28 (sequence is synthesized)
gattttggacctgagtttatcactttatgaactcttatatcagtacaaaactacccctttttttgtcccttttcacattttccacccaataaatttgtgttaatttgttgtatgatagga

SEQ ID NO: 386932 - DNA, 120 bp, Artificial Sequence
  ENSG00000144395_29 (sequence is synthesized)
ttaaaggaggcctcattagatgcgctctctgacagggaagttggcataaggtctgtttctttgctgggtcatattttacagtgtgatctcttcactctgaaagcagagaaacacattttc

SEQ ID NO: 386933 - DNA, 120 bp, Artificial Sequence
  ENSG00000144395_30 (sequence is synthesized)
aatatattttccattacggctccttctagaacactgtgttgtttctcctagtaaaggggctattccttgaaaaataactctaggtttagctgattttattgtttttattaataattgacg

SEQ ID NO: 386934 - DNA, 120 bp, Artificial Sequence
  ENSG00000144395_31 (sequence is synthesized)
atgcctctaagaaaaaggaaatccccagagaggactgcatcttcaaaatcccccgaaatctctaggtcccatgtaaacagtataaaggaaagaacgtcatcagttggtttgcctagtgtt

SEQ ID NO: 386935 - DNA, 120 bp, Artificial Sequence
  ENSG00000144395_32 (sequence is synthesized)
attccaaactctacacgccgtgtgagctttgcacctaacctgccttctatgaaaacatctcaggatattggagactctaggatctctctaaagactcttttgaatgctattaaaaccatg

SEQ ID NO: 386936 - DNA, 120 bp, Artificial Sequence
  ENSG00000144395_33 (sequence is synthesized)
cacttcctggataccctgtgaggatgtagtcagtcaatggtgtctagggaagacaggttttagaaccctagcagccccatgtattctctgggaattatagccagttgtctttggggagac

SEQ ID NO: 386937 - DNA, 120 bp, Artificial Sequence
  ENSG00000144395_34 (sequence is synthesized)
agtctgaaattcccagggaaggcgggaggaaactcctgattggcccaggttggttcaggagcagactccctcctcgatcaactgtgatcatgcaggagcagcagagtctcagtgcataaa

SEQ ID NO: 386938 - DNA, 120 bp, Artificial Sequence
  ENSG00000144395_35 (sequence is synthesized)
acagggagacttatttcctccacggctatttagtagacactggagccacagtccagtgagctaatttaagagagaaactcggagcacagaatgctcagttccacagaattccaacacaca

SEQ ID NO: 386939 - DNA, 120 bp, Artificial Sequence
  ENSG00000144395_36 (sequence is synthesized)
agtctaacttattactgtatctcagttacctctaccattacctataaatggcataaagtaaaaattaagcatgtgaaacagttaacctcaattataaaaataaaatgcatttaaattata

SEQ ID NO: 386940 - DNA, 120 bp, Artificial Sequence
  ENSG00000144395_37 (sequence is synthesized)
ttggatttgtctatgtttattcacacagatatttttgttgtagtttcctttaaaggaataagcagctaataaagatgggttctatttatagtagtgaataaatatatttaaacatttaaa

SEQ ID NO: 386941 - DNA, 120 bp, Artificial Sequence
  ENSG00000144395_38 (sequence is synthesized)
agaaagaaaggtacctgtggttttttttccctgtcattggtattgctggattgtactaaggagcagtgtcaagtcaataaatgaagtcactttatgtagcttcctttacaaaaaaaaaaa

SEQ ID NO: 386942 - DNA, 120 bp, Artificial Sequence
  ENSG00000144395_39 (sequence is synthesized)
tgattgtactggactttgctcttttgggatcagtgggctagatgggaaagaaagctcagcaggaactggtaactttgggtctcatattggattctttctgtcatcctataggcaaaaaga

SEQ ID NO: 386943 - DNA, 120 bp, Artificial Sequence
  ENSG00000144395_40 (sequence is synthesized)
agcttacagaatgatcatctacgcaagatgaataagtatttacagactaaatatgctcaggtgtgattaatatctacaaaagcggattgctgctatatttcgtttttaagaaattgtttg

SEQ ID NO: 386944 - DNA, 120 bp, Artificial Sequence
  ENSG00000144395_41 (sequence is synthesized)
taaatatgctgtcacttgactcagtttaacaaactttttttcaagcacctagtacatacaaggttctgctaaagcctcagaaattgtaaagatacctgaagcaggattgagacattcaac

SEQ ID NO: 386945 - DNA, 120 bp, Artificial Sequence
  ENSG00000144395_42 (sequence is synthesized)
ttgcttattatagttaggaaatgtactccataaactttattagagaatagaaagttatgcttttcagaaaaatagattgtattactgaacattcatagggagcattattatgagtagaag

SEQ ID NO: 386946 - DNA, 120 bp, Artificial Sequence
  ENSG00000144395_43 (sequence is synthesized)
cagtgagaaatgctttcataaaggcagtgctttttaaaattttggcagttgtgaggaacaagtatctttgttttttgaattaaaggcaaactcagaactcagtgccaagagggtacacct

SEQ ID NO: 386947 - DNA, 120 bp, Artificial Sequence
  ENSG00000144395_44 (sequence is synthesized)
acgcattccctgagcgccgccggatgccggcctgggtcccgcccagggctgagggccctcctgggccgggaaaactacagttcccgacatgccctgccacgggtgcgcctgcgtaccgga

SEQ ID NO: 386948 - DNA, 120 bp, Artificial Sequence
  ENSG00000144395_45 (sequence is synthesized)
gcagagttcaccaacttttctggggatcagcttttctttttctcaacaataacttaagaaaccacctaaaaataaaatatactttaattattcccactagcatcctactgtgtctgcttg

SEQ ID NO: 386949 - DNA, 120 bp, Artificial Sequence
  ENSG00000144395_46 (sequence is synthesized)
tttcagagaatggctacagttgttctttgactcctctcatccccctttgatcagcaggccagatgtaattaagacctctctgtaaagcaacacacaagaaaaaagtttctgacataattc

SEQ ID NO: 386950 - DNA, 120 bp, Artificial Sequence
  ENSG00000144395_47 (sequence is synthesized)
tctgcccgacaaaggtgtgccttgatgggagattttccatcagagagtgataagcaagagggatagaggaataaggagactgccatttgatagacagaagagaaatcatctgtcttctca

SEQ ID NO: 386951 - DNA, 120 bp, Artificial Sequence
  ENSG00000144395_48 (sequence is synthesized)
gttcatttaactggcatctattctgcatctaccatttcctgagaggcacagagaaaacagtagaagatatggtccatgccccagtgtgtgccaaatgacccttgtttgggatctccactc

SEQ ID NO: 386952 - DNA, 120 bp, Artificial Sequence
  ENSG00000144395_49 (sequence is synthesized)
cggaaatgagatatatagggaaaacatcagagaactttcttgggtagcagaggctgtgtacaactttgaaggaattcaaagtaagagaaagtttattttaggccatttggttgatagaag

SEQ ID NO: 386953 - DNA, 120 bp, Artificial Sequence
  ENSG00000144395_50 (sequence is synthesized)
tggacaccttatgaaacagcacaggccatgcttacttacaaaaatgaacaggacatgtgagcagatgaaaagtagcctttcttgattagagcagagactttggaaaatgttagagagaga

SEQ ID NO: 386954 - DNA, 120 bp, Artificial Sequence
  ENSG00000144395_51 (sequence is synthesized)
gtgttagcttaaatgggaccacctgatggatggccttagttatagaaatgttggatgtgtgctcttaggtagaaacggagcactatgggtttctgagcagggggtggtatgatagaagca

SEQ ID NO: 386955 - DNA, 120 bp, Artificial Sequence
  ENSG00000144395_52 (sequence is synthesized)
tgagtttaggaaggttaatgtaacagcagaggacagtagaggataatgaagagaaactggaggcatggaggctcgagaaaactataacagttaattcgagtattagatgattagggccaa

SEQ ID NO: 386956 - DNA, 120 bp, Artificial Sequence
  ENSG00000144395_53 (sequence is synthesized)
agggccaagcaaagtagttcagttgaaaatagaaaacaattaagtcagaaagcccattttaatagaaaaaaaatcaaacaggccaggcgaggcggctcatgcctgtaatccctgcacttt

SEQ ID NO: 386957 - DNA, 120 bp, Artificial Sequence
  ENSG00000144395_54 (sequence is synthesized)
aaagaaaaagaaaaaaattatcaaccagacattaaatgttgtatcctggagagggagggattaaaataattccttggttggcatggctggtctgtgtttcaccaaatttgttacgtttag

SEQ ID NO: 386958 - DNA, 120 bp, Artificial Sequence
  ENSG00000144395_55 (sequence is synthesized)
tagttgcaattgacagaccattcacaaaatcaaactcaaataatggtatataaaacaattttgtgaattgcaaagcactatataaatacaaatgttataaaaagcaaattctgcttttta

SEQ ID NO: 386959 - DNA, 120 bp, Artificial Sequence
  ENSG00000144395_56 (sequence is synthesized)
caaattctgctttttatagaagaattagggaacataaaggtgtgctaaatgtagaaatgtacctttagtcggagatcattgttaagaatacttacagccgggcacagtggctcatgcctg

SEQ ID NO: 386960 - DNA, 120 bp, Artificial Sequence
  ENSG00000144395_57 (sequence is synthesized)
aaatagatgctagaaatcaccctcttgttagtttttggagatttcatggaaaaactcttaagatcccaaattcttaaagtggccagtgttattggtatttcccacagtgctgtatgtaaa

SEQ ID NO: 386961 - DNA, 120 bp, Artificial Sequence
  ENSG00000144395_58 (sequence is synthesized)
acattgcagatttcccttctacctgcagtactgagatacagaaggattgttgttaataatatatttgaccctgttaattgtaaactattccttatttgtttttttccagcttgtttgtgg

SEQ ID NO: 386962 - DNA, 120 bp, Artificial Sequence
  ENSG00000144395_59 (sequence is synthesized)
acctgggaatatttggtttctagacatctggcttgaatattgggcaaaaaaagtaaaacaatagattgaatatttgataatagaatattagtaaggtagtaaggccatgaatccttgatg

SEQ ID NO: 386963 - DNA, 120 bp, Artificial Sequence
  ENSG00000144395_60 (sequence is synthesized)
acttatggattctgtcagttcatcatgtcagattctccattcttcatgttatcaatctattttggttaacctatatttgtagagatggatagttgtaaggtacctttaagagagcttaga

SEQ ID NO: 386964 - DNA, 120 bp, Artificial Sequence
  ENSG00000144395_61 (sequence is synthesized)
ttaatctcctctttttatagatgagtcctcaaagatgacagagctaggaaaggaaggagcctagacttgatcccaaggtgttcggtcatatttcttctaacccatcagccttttatcata

SEQ ID NO: 386965 - DNA, 120 bp, Artificial Sequence
  ENSG00000144395_62 (sequence is synthesized)
ctactgttgctagtacttcattataaagcagtttccaggtagtctcaatgacagaggtcacagagttacagggcagtgcttcatgtgattaatacatcatggtttacactgaactttcac

SEQ ID NO: 386966 - DNA, 120 bp, Artificial Sequence
  ENSG00000144395_63 (sequence is synthesized)
ataaactatttcattcagtactcaaagctatccttccagagttacaaaaggaaaaaatggcaaagtaagacctagacctggatcttctaactccaagccgagtgtactctccagttcacc

SEQ ID NO: 386967 - DNA, 120 bp, Artificial Sequence
  ENSG00000144395_64 (sequence is synthesized)
ttctgtgctctatggctgctgtaatgggggcagagaataccaaaaaggaaatggaaattataaaaaatatagagcaagagtaatctattcaatgttttgacttactgcttttagcagaaa

SEQ ID NO: 386968 - DNA, 120 bp, Artificial Sequence
  ENSG00000144395_65 (sequence is synthesized)
gtattcccttttcttatagtagtgaattactgtgtgaagttctcaccgacaatgcccctggataattttctgtctttctgtaattgtgtgcctacaaaaatacatgtatattttatggtg

SEQ ID NO: 386969 - DNA, 120 bp, Artificial Sequence
  ENSG00000144395_66 (sequence is synthesized)
ctgagaggatgtgctatctctgcagtgttaataaaacagaaaaagaaatagtgcaagaaagatgcaatttggaaaaggaattagctaaaaacaaggtagacataaatacattaactcata

SEQ ID NO: 386970 - DNA, 120 bp, Artificial Sequence
  ENSG00000144395_67 (sequence is synthesized)
gaggtaacagacctatgacgcgacttttaaaaataggtgatgttgatatgaggattcttggcatttgacatttggcatgttgatttgaggattcttggcctatgacatttgcactgataa

SEQ ID NO: 386971 - DNA, 120 bp, Artificial Sequence
  ENSG00000144395_68 (sequence is synthesized)
cctaaaccactgtgtgctatctgtgattgattatttgtacaacccttaccccatacaagtgatggtgtgggtccagaggtatgagatagagcctgtgctcttcaggaactcatatgctag

SEQ ID NO: 386972 - DNA, 120 bp, Artificial Sequence
  ENSG00000144401_0 (sequence is synthesized)
cccccgcgtcgcgggctctttaaggccggcggttttcgcagccagcccggggcggggaaagcggagcgcgcgctccacgcgggaccgcctcccgggccgtctgagcagagggcggggtgc

SEQ ID NO: 386973 - DNA, 120 bp, Artificial Sequence
  ENSG00000144401_1 (sequence is synthesized)
gcagagggcggggtgcaggcggaatggccctcgtgccctatgaggagaccacggaatttgggttgcagaaattccacaagcctcttgcaactttttcctttgcaaaccacacgatccaga

SEQ ID NO: 386974 - DNA, 120 bp, Artificial Sequence
  ENSG00000144401_2 (sequence is synthesized)
tccggcaggactggagacacctgggagtcgcagcggtggtttgggatgcggccatcgttctttccacatacctggagatgggagctgtggagctcaggggccgctctgccgtggagctgg

SEQ ID NO: 386975 - DNA, 120 bp, Artificial Sequence
  ENSG00000144401_3 (sequence is synthesized)
gtgctggcacggggctggtgggcatagtggctgccctgctgggtgctcatgtgactatcacggatcgaaaagtagcattagaatttcttaaatcaaacgttcaagccaacttacctcctc

SEQ ID NO: 386976 - DNA, 120 bp, Artificial Sequence
  ENSG00000144401_4 (sequence is synthesized)
aaggagctgacttggggacaaaatttggggagtttttctcctggagaatttgacctgatacttggtgctgatatcatatatttagaagaaacattcacagatcttcttcagacactggaa

SEQ ID NO: 386977 - DNA, 120 bp, Artificial Sequence
  ENSG00000144401_5 (sequence is synthesized)
catctctgtagcaatcactctgtgattcttttagcatgccgaattcgctatgaacgggataacaacttcttagcaatgctggagaggcaatttactgtgagaaaggttcactacgatcct

SEQ ID NO: 386978 - DNA, 120 bp, Artificial Sequence
  ENSG00000144401_6 (sequence is synthesized)
gaaaaagatgtacatatttacgaagcacagaagagaaaccagaaggaggacttataattggctataatttataagaatgttgtcattgagtgtgtcacttaaggtcttagactgcaaatc

SEQ ID NO: 386979 - DNA, 120 bp, Artificial Sequence
  ENSG00000144401_7 (sequence is synthesized)
taaccatatttaatgaaatgtcttactgtacaaaaagtctaagccaaaggttctcaggggagaaagcacatgtgcagttttaaaacaaagcagtgctttgtcccattgctgtgattttta

SEQ ID NO: 386980 - DNA, 120 bp, Artificial Sequence
  ENSG00000144401_8 (sequence is synthesized)
gtcagactttactcagtctgaaatgcaattaacattaaaggattaagtgtgagatttcgatttatgctatttgtgtatcccatactcctcccttttaataaacagtttccactgatgata

SEQ ID NO: 386981 - DNA, 120 bp, Artificial Sequence
  ENSG00000144401_9 (sequence is synthesized)
gcggcgcctcagcccggcctgggcgagccctgggtgctccgccgggcagctcacggcgccccgtatggcctggggatcctaagaggccctgtgacccccctcgcctggtctccctctcac

SEQ ID NO: 386982 - DNA, 120 bp, Artificial Sequence
  ENSG00000144401_10 (sequence is synthesized)
tttaaatgagtaagctttcttggtaagattaaatcttacaaattatttttaaaaccttgtgatatatacaatgtttagctgagttttctaattttctggatgtaaaacaaaaggtttaac

SEQ ID NO: 386983 - DNA, 120 bp, Artificial Sequence
  ENSG00000144401_11 (sequence is synthesized)
ctatacattccttgagctgttagtgctatttaaatcttttgccctgtttaggtcctaaacacttttagttgagtaggatatgagcttttttgggtctcatatcatgctttttgccttaat

SEQ ID NO: 386984 - DNA, 120 bp, Artificial Sequence
  ENSG00000144401_12 (sequence is synthesized)
ttttgccttaatttcaggtatatatatatatataaataaaggaattaagtaaaaataaaatttcagttactttttaaaagcacctgaaatctggccggatgcggtggctcatgcctgtaa

SEQ ID NO: 386985 - DNA, 62 bp, Artificial Sequence
  ENSG00000144401_13 (sequence is synthesized)
ccattgtactccagcctggggaaatcttgaataggttttctttttttttttttttttttaat

SEQ ID NO: 386986 - DNA, 120 bp, Artificial Sequence
  ENSG00000144401_14 (sequence is synthesized)
ggagagggagagggagagggagagggagggggagggagagggagagggagggaataggttttctatttcaagtcaagagctgaggttttccccttctgttttacccttgctcaaatgtct

SEQ ID NO: 386987 - DNA, 120 bp, Artificial Sequence
  ENSG00000144401_15 (sequence is synthesized)
gctcaaatgtcttaatgcagttctttcccaagctttccctgcttccttaacaacgcataggatgacattaaaagttttaaatctcatccctgcctgagaggttagcttcctacatataag

SEQ ID NO: 386988 - DNA, 120 bp, Artificial Sequence
  ENSG00000144401_16 (sequence is synthesized)
ctccttttgtattggacttgtaattgctcattcagtggtagtattgccctgtagagtgtaagctccttgagggccaagaatgcttctgcctcttccattgttgcttccccagtaccttct

SEQ ID NO: 386989 - DNA, 120 bp, Artificial Sequence
  ENSG00000144401_17 (sequence is synthesized)
gtatatttcataaccaaataatgaaaaagatacattccatttaaagggcattgactttgggttaaatgattgttatattgttttaggattatctatgatacactttgacatctcacacac

SEQ ID NO: 386990 - DNA, 120 bp, Artificial Sequence
  ENSG00000144401_18 (sequence is synthesized)
acacatgaacttttctttttacaatgcaaaagtttaaacaatagcttaaatttagactgcaagaatattataatctcaatatggtatttggtactagagatagatttcttttataaaatc

SEQ ID NO: 386991 - DNA, 120 bp, Artificial Sequence
  ENSG00000144401_19 (sequence is synthesized)
ttaaaaacaggacgttctcttccttttgaacctttatcccagaggtgaaaatatccaatatgttgttttctgcatatattgaagtagtagtttcactttaataaagatggattaaaagtt

SEQ ID NO: 386992 - DNA, 120 bp, Artificial Sequence
  ENSG00000144401_20 (sequence is synthesized)
gattcggaagagccatgcaaaagaaattggacaaaggcttcctccacctgtttctttttttcttttgaacttgtaaacgaccttaaaagcatttggagttagttaagaacagataatgta

SEQ ID NO: 386993 - DNA, 120 bp, Artificial Sequence
  ENSG00000144401_21 (sequence is synthesized)
ctgtgctttagttgaaaagggttttgtgacttttccactcgattgccgccaagcgggctattacgccgcttctgaccccaccgtggagacgcggggactagagtgaccatgccttcttcg

SEQ ID NO: 386994 - DNA, 120 bp, Artificial Sequence
  ENSG00000144401_22 (sequence is synthesized)
gagcgagctgtctccatcatccgctaacgcgccacctttaaaaaacaggcacaacgcgcaagcgacaaagtcagaggcagagagcggcggagcacatgatagaaaaggtcgagaggcaca

SEQ ID NO: 386995 - DNA, 120 bp, Artificial Sequence
  ENSG00000144401_23 (sequence is synthesized)
ccagtgtcgctcacttccagggtcggggagacggaactgcggcgaccatgtatttctggtttatcaaaccgctaacacccagtctaagggcaggttctgtcccattgttatcactatcga

SEQ ID NO: 386996 - DNA, 120 bp, Artificial Sequence
  ENSG00000144401_24 (sequence is synthesized)
ttaaccaagtgatcaaagttaatatcgccaattatgtatgtgctcccggatgtgatgttatgagaaaggcacactatacctctgtggaattcctccccaaaacctattatctcaatctat

SEQ ID NO: 386997 - DNA, 120 bp, Artificial Sequence
  ENSG00000144401_25 (sequence is synthesized)
ccatagaaaacactggacaaatgcaaactgagggatattctaaaagaaaacagatcactactcttcaaaagttacaaggccatcaaagacaaggaaacaaactttcacagactgaaggag

SEQ ID NO: 386998 - DNA, 120 bp, Artificial Sequence
  ENSG00000144401_26 (sequence is synthesized)
actataattaaatgcgatatggtacccaaactggattatgtaagtaaaaaaactggggaaataaaatgtataattcagttaatggtattataccaatgtacttttatttttgataaatgt

SEQ ID NO: 386999 - DNA, 120 bp, Artificial Sequence
  ENSG00000144401_27 (sequence is synthesized)
accctggttatgtaatatactaagattagagaaagctggatgaagggtatccggaactctgtatttttaaaactcctttgtaagtttaaaattacttaaaaatatattaaaaatgtatat

SEQ ID NO: 387000 - DNA, 120 bp, Artificial Sequence
  ENSG00000144401_28 (sequence is synthesized)
ttacctttgtactggtttgagtaaaaaaactgactttagaatgttaacattttagatggtgaaattagaagtaattcaatttttaggtaatgtttcttaatttacttataatgaacatgt

SEQ ID NO: 387001 - DNA, 120 bp, Artificial Sequence
  ENSG00000144401_29 (sequence is synthesized)
tttacttgtgtaataataaatttaaaaaacctgatagtaatgtaaatactctttggtaacctgcttttgtccgagaacatcttcccatcttaataaaaatacacctttatttactcttaa

SEQ ID NO: 387002 - DNA, 120 bp, Artificial Sequence
  ENSG00000144401_30 (sequence is synthesized)
cattcccactccactgactttgggcttgtccttgcctgtgctgtggctaacagatcacgagtagatgtaacgttcaccaaaatcaagcaaatgctttcaaaagcattgcccttttctcaa

SEQ ID NO: 387003 - DNA, 120 bp, Artificial Sequence
  ENSG00000144401_31 (sequence is synthesized)
agacgtgctgctctatctagcccaggatcctagacccagatgggcacatgaaggagagccacagcaactgacctgcagctgccaaaatgtaacagaagtgaggaagaaattttaagacac

SEQ ID NO: 387004 - DNA, 120 bp, Artificial Sequence
  ENSG00000144401_32 (sequence is synthesized)
tgagattcgtggttgttactgtagcaacacaaattaacagaagagctgtctacactttcttttagaatgtttaccacttaccttcatcttgaaataaatggcaatttggatagtgatgaa

SEQ ID NO: 387005 - DNA, 120 bp, Artificial Sequence
  ENSG00000144406_0 (sequence is synthesized)
gggtcctgcagtaggactcccgggagccaccattatggtgaagaggaagagctccgagggccaggagcaggacggcggccgcggcatccccctgcccatccagaccttcctgtggcggca

SEQ ID NO: 387006 - DNA, 120 bp, Artificial Sequence
  ENSG00000144406_1 (sequence is synthesized)
aaccagtgcatttttgaggcccaaactggggaagcaatatgaagcttcttgtgtgtcctttgagcgagtgttggtagaaaacaagctgcatggcctctctccagctctctctgaagccat

SEQ ID NO: 387007 - DNA, 120 bp, Artificial Sequence
  ENSG00000144406_2 (sequence is synthesized)
ccagagcatttccagatgggaactggtgcaagctgctttgcctcatgtcctccactgcactgcaaccctgctttcaaaccgaaacaagctaggccaccaggataaattgggtgttgctga

SEQ ID NO: 387008 - DNA, 120 bp, Artificial Sequence
  ENSG00000144406_3 (sequence is synthesized)
gacaaagctccttcacactctacactggatgcttctggaggccccccaggactgcaacaatgagcggtttgggggtacagaccgaggctccagctggggtggaagcagcagtgctttcat

SEQ ID NO: 387009 - DNA, 120 bp, Artificial Sequence
  ENSG00000144406_4 (sequence is synthesized)
ccaccaggttgaaaaccagggttctccagggcagccttgccaaagcagctctaatgacgaagaagagaacaaccgaagaaagatcttccagaactccatggctactgtggagctcttcgt

SEQ ID NO: 387010 - DNA, 120 bp, Artificial Sequence
  ENSG00000144406_5 (sequence is synthesized)
gtttctgtttgctcccctggtacacaggatcaaggaatctgacctcaccttccgtctggccagtgggcttgttatatggcagcccatgtgggaacacagacagcccggagtctctggctt

SEQ ID NO: 387011 - DNA, 120 bp, Artificial Sequence
  ENSG00000144406_6 (sequence is synthesized)
taccgcactggtgaagcccatcaggaacatcattacagctaagagaagttctcctatcaacagtcaaagccggacctgtgaatcaccaaatcaagatgcaagacacttagagggactcca

SEQ ID NO: 387012 - DNA, 120 bp, Artificial Sequence
  ENSG00000144406_7 (sequence is synthesized)
ggtggtttgtgaaacattccagtctgattccatctcacccaaggccaccatttcaggctgtcaccgaggaaactcctttgatggaagtctgtcctcccaaacttcccaggaaagaggccc

SEQ ID NO: 387013 - DNA, 120 bp, Artificial Sequence
  ENSG00000144406_8 (sequence is synthesized)
atcacattccagggcctctcttgtgatacctccgtgccaaaggtcccgctatgccacctactttgacgttgctgttctgcgctgcctacttcagccccattggtctgaggaaggcactca

SEQ ID NO: 387014 - DNA, 120 bp, Artificial Sequence
  ENSG00000144406_9 (sequence is synthesized)
gtggtctctgatgtactatctacaaaggctgcgacacatgttggaagagaagccagaaaagcctccggagccagatattcctctcctgcccagacccaggagtagctccatggtggcagc

SEQ ID NO: 387015 - DNA, 120 bp, Artificial Sequence
  ENSG00000144406_10 (sequence is synthesized)
agctccctcactagtgaacacccacaaaacccaagatctcaccatgaagtgtaacgaggaggaaaaatctcttagctctgaggccttttccaaggtttcactgaccaatctgcgtagatc

SEQ ID NO: 387016 - DNA, 120 bp, Artificial Sequence
  ENSG00000144406_11 (sequence is synthesized)
tgcagtcccagatctttcttcagacctgggcatgaatatttttaaaaagttcaagagccgcaaagaagaccgagagaggaaaggctccattccattccaccacacaggcaagaggaggcc

SEQ ID NO: 387017 - DNA, 120 bp, Artificial Sequence
  ENSG00000144406_12 (sequence is synthesized)
acggagaatgggagtgcccttcctgcttcacgaggaccacctggatgtgtcccccacgcgcagcacattctcctttggaagtttctctgggctgggagaagacaggcgaggaattgagaa

SEQ ID NO: 387018 - DNA, 120 bp, Artificial Sequence
  ENSG00000144406_13 (sequence is synthesized)
aggaggctggcaaaccaccattttagggaaattgacccggcgaggcagttcagatgcagccactgagatggagagtctgagcgccaggcattcccactcccatcacaccctggtaagcga

SEQ ID NO: 387019 - DNA, 120 bp, Artificial Sequence
  ENSG00000144406_14 (sequence is synthesized)
cctgccggacccctccaacagccatggagaaaacaccgtcaaggaagtgcgatctcagatctccaccatcacagttgcgaccttcaataccactttggcgtcattcaacgtaggctatgc

SEQ ID NO: 387020 - DNA, 120 bp, Artificial Sequence
  ENSG00000144406_15 (sequence is synthesized)
agactttttcaatgagcatatgaggaaactctgcaaccaggtgcctatcccggagatgccacatgaacctctggcatgtgctaacctacctcgaagcctcacagactcctgcataaacta

SEQ ID NO: 387021 - DNA, 120 bp, Artificial Sequence
  ENSG00000144406_16 (sequence is synthesized)
cagctacctagaggacacagaacatattgacgggaccaataactttgtccacaagaatggaatgcttgatctttctgtagttctgaaggctgtttatcttgtccttaatcatgacatcag

SEQ ID NO: 387022 - DNA, 120 bp, Artificial Sequence
  ENSG00000144406_17 (sequence is synthesized)
ctctcgtatctgtgacgtggcgctaaacattgtggaatgcttgcttcaacttggtgtggtgccctgtgtagaaaagaatagaaagaagagtgaaaacaaggaaaatgagaccttggaaaa

SEQ ID NO: 387023 - DNA, 120 bp, Artificial Sequence
  ENSG00000144406_18 (sequence is synthesized)
gaggccaagtgagggagctttccaattcaaaggagtatctggaagttccacctgtggattcggaggccctgctgttagtggagctggagatggtggaggagaagaaggaggaggtggaga

SEQ ID NO: 387024 - DNA, 120 bp, Artificial Sequence
  ENSG00000144406_19 (sequence is synthesized)
tggaggaggtggaggaggtgatggaggaggaggtggaggaggtggaggcggcccttatgagaagaatgataagaaccaagagaaggatgaaagtacacctgtaagcaaccataggcttgc

SEQ ID NO: 387025 - DNA, 120 bp, Artificial Sequence
  ENSG00000144406_20 (sequence is synthesized)
tctaacaatgctcatcaaaatagtgaagtctttgggatgtgcctatggttgtggtgaaggacaccgagggctctctggagatcgtctgagacaccaggcccagaactgcctcactaagct

SEQ ID NO: 387026 - DNA, 120 bp, Artificial Sequence
  ENSG00000144406_21 (sequence is synthesized)
atacaagctagataagatgcagttccgacaaaccatgagggactatgtgaacaaggactctctcaataatgtagtggacttcttgcatgctttgctaggattttgtatggagccggtcac

SEQ ID NO: 387027 - DNA, 120 bp, Artificial Sequence
  ENSG00000144406_22 (sequence is synthesized)
tgacaacaaggctgggtttggaaataacttcaccacagtggacaacaaatccacagcccaaaatgtggaaggcattatcgtcagcgccatgtttaaatccctcatcacacgctgcgcttc

SEQ ID NO: 387028 - DNA, 120 bp, Artificial Sequence
  ENSG00000144406_23 (sequence is synthesized)
aaccacacatgaattgcacagccctgagaatctgggactgtattgtgacattcgtcagctggtccagtttatcaaagaggctcatgggaatgtcttcaggagagtggccctcagcgctct

SEQ ID NO: 387029 - DNA, 120 bp, Artificial Sequence
  ENSG00000144406_24 (sequence is synthesized)
gcttgacagtgccgagaagttagcaccagggaaaaaggtggaggagaatgaacaggaatctaagcctgcaggcagtaaaaggtcagaggcgggaagcattgtggataaaggccaggtatc

SEQ ID NO: 387030 - DNA, 120 bp, Artificial Sequence
  ENSG00000144406_25 (sequence is synthesized)
ctctgcacctgaggaatgtcgcagcttcatgtctggtcgcccctcacagactccagagcacgatgaacaaatgcaaggagccaacttggggcggaaagatttctggcgtaagatgttcaa

SEQ ID NO: 387031 - DNA, 120 bp, Artificial Sequence
  ENSG00000144406_26 (sequence is synthesized)
gtcccagagtgcagcaagtgacaccagcagccagtctgaacaggacacttcagaatgcacgactgcccactcagggaccacctctgaccgacgtgcccgctcacgatcccgcagaatttc

SEQ ID NO: 387032 - DNA, 120 bp, Artificial Sequence
  ENSG00000144406_27 (sequence is synthesized)
cctccgaaagaagcttaaactccccataggtaaaaggaactggctgaagagatcatccctctcaggcctggcagatggtgtggaggacctcctggacattagctctgtggaccgactctc

SEQ ID NO: 387033 - DNA, 120 bp, Artificial Sequence
  ENSG00000144406_28 (sequence is synthesized)
tttcatcaggcaaagctccaaggtcaaattcactagtgctgtgaagctttctgaaggtgggccaggaagtggcatggaaaatggaagagatgaagaggagaatttcttcaagcgtcttgg

SEQ ID NO: 387034 - DNA, 120 bp, Artificial Sequence
  ENSG00000144406_29 (sequence is synthesized)
ttgccacagttttgatgatcatctctctcccaaccaagatggtggaaaaagcaaaaacgtggtgaatcttggagcaatccgacaaggcatgaaacgcttccaatttctgttaaactgctg

SEQ ID NO: 387035 - DNA, 120 bp, Artificial Sequence
  ENSG00000144406_30 (sequence is synthesized)
tgagccagggacaattcctgatgcctccatcctagcagctgccttggatctagaagcccctgtggtggccagagcagccttgttcctggaatgtgctcgttttgttcaccgctgcaaccg

SEQ ID NO: 387036 - DNA, 120 bp, Artificial Sequence
  ENSG00000144406_31 (sequence is synthesized)
tggcaactggccagagtggatgaaagggcaccacgtgaacatcaccaagaaaggactttcccggggacgctctcccattgtgggcaacaagcgaaaccagaagctgcagtggaatgcagc

SEQ ID NO: 387037 - DNA, 120 bp, Artificial Sequence
  ENSG00000144406_32 (sequence is synthesized)
caagctcttctaccaatggggagacgcaattggcgtccgattgaatgagctgtgccacggggaaagtgagagcccagccaacctgctgggtctcatttacgatgaagagaccaagaggag

SEQ ID NO: 387038 - DNA, 120 bp, Artificial Sequence
  ENSG00000144406_33 (sequence is synthesized)
acttagaaaggaggatgaggaggaagactttttagatgacagtactgtgaacccctctaaatgcggttgcccctttgccttgaagatggcagcatgtcagcttcttctggagattaccac

SEQ ID NO: 387039 - DNA, 120 bp, Artificial Sequence
  ENSG00000144406_34 (sequence is synthesized)
cttcctgcgagagaccttttcttgcctgcccagacctcgcactgagcctctggtggacttggagagctgcagacttcgtttggatcccgagttggaccggcacagatatgagaggaagat

SEQ ID NO: 387040 - DNA, 120 bp, Artificial Sequence
  ENSG00000144406_35 (sequence is synthesized)
cagctttgctggggtcctggacgaaaatgaagactcaaaagattctctccacagcagcagccacactctcaaatcagatgcaggagtcgaggagaagaaagaagggagtccttggagtgc

SEQ ID NO: 387041 - DNA, 120 bp, Artificial Sequence
  ENSG00000144406_36 (sequence is synthesized)
aagcgagcccagcattgagccagagggaatgagtaatgccggcgcggaggagaattaccacagaaacatgtcgtggcttcatgtgatgatcttgctgtgcaatcagcagagtttcatctg

SEQ ID NO: 387042 - DNA, 120 bp, Artificial Sequence
  ENSG00000144406_37 (sequence is synthesized)
cactcacgttgactactgccatccccactgctacctgcaccacagccgctcctgtgcccgactggtcagagccatcaagctactctatggagacagtgtggactccctgagggaaagcag

SEQ ID NO: 387043 - DNA, 120 bp, Artificial Sequence
  ENSG00000144406_38 (sequence is synthesized)
caacatcagcagtgtggctctccggggcaagaaacagaaagaatgctcagataagtcatgcctgaggacaccttctctaaagaagagagtttcagatgccaatctggaaggaaaaaaaga

SEQ ID NO: 387044 - DNA, 120 bp, Artificial Sequence
  ENSG00000144406_39 (sequence is synthesized)
ttccggaatgctgaagtacatcagacttcaggtgatgagcttgtcgcctgctcccttatctctgttaatcaaggcagcaccaattctgacagaggagatgtacggagacatccagccagc

SEQ ID NO: 387045 - DNA, 120 bp, Artificial Sequence
  ENSG00000144406_40 (sequence is synthesized)
tgcctgggagctcctgctcagcatggatgagcacatggcaggggcagcagctgccatgttcctgctgtgtgcagtgaaggtgcctgaggccgtgtccgacatgctgatgtcagagttcca

SEQ ID NO: 387046 - DNA, 120 bp, Artificial Sequence
  ENSG00000144406_41 (sequence is synthesized)
ccacccggagactgtgcagaggctgaacgctgtcctcaagttccacacgctctggaggtttcgctatcaggtctggccccggatggaggaaggggcacagcagatttttaagattccgcc

SEQ ID NO: 387047 - DNA, 120 bp, Artificial Sequence
  ENSG00000144406_42 (sequence is synthesized)
tcccagtatcaatttcacccttccctcgccggtgcttggaatgccatccgtcccaatgtttgacccaccgtgggttcctcagtgcagcgggagtgtccaggaccccattaatgaagacca

SEQ ID NO: 387048 - DNA, 120 bp, Artificial Sequence
  ENSG00000144406_43 (sequence is synthesized)
gtctaaatccttttcagcccgggctgtgtcccgctcccatcaaagggcagaacacatcttaaagaacttgcagcaggaggaagaaaagaaacgacttggtagagaagccagcctcatcac

SEQ ID NO: 387049 - DNA, 120 bp, Artificial Sequence
  ENSG00000144406_44 (sequence is synthesized)
tgccatccccatcacccaggaggcttgctatgagcccacatgcacgcccaactcagaaccggaagaagaagtagaagaagtcaccaatctggcatcccgtcgactgtctgtgagtccatc

SEQ ID NO: 387050 - DNA, 120 bp, Artificial Sequence
  ENSG00000144406_45 (sequence is synthesized)
ctgcacctccagcacttcccacaggaattattccttccgccgcgggtcagtctggtcagtgcgttcagccgtcagtgctgaagatgaggaacataccactgaacacacgccgaaccacca

SEQ ID NO: 387051 - DNA, 120 bp, Artificial Sequence
  ENSG00000144406_46 (sequence is synthesized)
tgtgcctcagcccccacaagcagtgttcccagcatgcatctgtgcagcagtacttcccattgttcatctgatggaggatggtgaggtgcgggaagatggagtagcagtgagtgctgtggc

SEQ ID NO: 387052 - DNA, 120 bp, Artificial Sequence
  ENSG00000144406_47 (sequence is synthesized)
tcaacaagtcttatggaactgtctaattgaagatccatcaacggttcttcgacattttctggaaaaactgaccatcagcaatagacaagatgagttaatgtacatgctgcgcaaacttct

SEQ ID NO: 387053 - DNA, 120 bp, Artificial Sequence
  ENSG00000144406_48 (sequence is synthesized)
cttgaatattggagactttcctgctcagacatctcacatcctattcaactatttggtaggattaatcatgtactttgtgcggaccccctgcgagtgggggatggatgccatttcagccac

SEQ ID NO: 387054 - DNA, 120 bp, Artificial Sequence
  ENSG00000144406_49 (sequence is synthesized)
cctgacattcctgtgggaggtggtgggttacgtggagggcctcttcttcaaggatctcaagcagacgatgaagaaggagcagtgtgaggtgaagctcctggtgaccgcttcaatgccagg

SEQ ID NO: 387055 - DNA, 120 bp, Artificial Sequence
  ENSG00000144406_50 (sequence is synthesized)
tactaaaaccttggtagttcatggacagaatgagtgcgatatcccaacccagttaccagtccatgaagacactcaatttgaagccctgttgaaggagtgtctggagttttttaatatccc

SEQ ID NO: 387056 - DNA, 120 bp, Artificial Sequence
  ENSG00000144406_51 (sequence is synthesized)
agaatcccagtcaacacattattttcttatggataaacgatggaaccttatccactacaataagacctatgttcgagatatttatcctttccggaggtcagtatctccccagctgaatct

SEQ ID NO: 387057 - DNA, 120 bp, Artificial Sequence
  ENSG00000144406_52 (sequence is synthesized)
tgtacatatgcatccagagaagggacaggagctcattcagaaacaggtgttcacccgaaagctggaagaagtagggcgggtgttgtttctcatctccctaacccagaagatccccacagc

SEQ ID NO: 387058 - DNA, 120 bp, Artificial Sequence
  ENSG00000144406_53 (sequence is synthesized)
ccacaaacagtcccacgtctccatgcttcaggaagacctcctccgcctgccctcattccctcgtagtgctattgatgctgagttttcactcttcagtgatcctcaagctggaaaggaact

SEQ ID NO: 387059 - DNA, 120 bp, Artificial Sequence
  ENSG00000144406_54 (sequence is synthesized)
gtttggcctcgacactcttcagaaaagcttgtggatccagctgctggaggaaatgttcctgggcatgccgagcgagtttccatggggagacgaaatcatgcttttcctcaacgtttttaa

SEQ ID NO: 387060 - DNA, 120 bp, Artificial Sequence
  ENSG00000144406_55 (sequence is synthesized)
cggggctctgatcctccacccggaagacagtgccctgctcaggcagtatgctgccaccgtcatcaacaccgcggtgcacttcaaccacctcttctctctcagcggctaccagtggattct

SEQ ID NO: 387061 - DNA, 120 bp, Artificial Sequence
  ENSG00000144406_56 (sequence is synthesized)
ccccaccatgctgcaggtgtactccgactatgaaagcaatccccagctgcgtcaagccatcgaatttgcctgtcaccagttctatattctacaccggaagccctttgtgctccagctgtt

SEQ ID NO: 387062 - DNA, 120 bp, Artificial Sequence
  ENSG00000144406_57 (sequence is synthesized)
tgctagtgtggcccctctcctggaatttcctgatgctgccaataatgggcccagcaaaggtgtgtcagctcagtgcctgtttgacttgctgcagtccctagagggagagaccaccgacat

SEQ ID NO: 387063 - DNA, 120 bp, Artificial Sequence
  ENSG00000144406_58 (sequence is synthesized)
attagacatcttagagctggtcaaagctgagaagcctctcaagtcattagatttctgctatggaaacgaagatctgacattttctatcagtgaagccattaagctctgtgtcactgtggt

SEQ ID NO: 387064 - DNA, 120 bp, Artificial Sequence
  ENSG00000144406_59 (sequence is synthesized)
ggcgtatgctcccgaatcattcagaagtcttcagatgctgatggtcttagaagccttagttccatgttacctacaaaagctaaagaggcagacatcacaggtggagacagtacctgctgc

SEQ ID NO: 387065 - DNA, 120 bp, Artificial Sequence
  ENSG00000144406_60 (sequence is synthesized)
ccgagaggagattgcggccactgctgctcttgcgacgtccctacaggcccttttgtacagtgtagaggtcctcaccaggcccatgacagccccacagatgagcaggtgtgaccaaggtca

SEQ ID NO: 387066 - DNA, 120 bp, Artificial Sequence
  ENSG00000144406_61 (sequence is synthesized)
taagggaaccaccacagccaatcacaccatgtcgtctggggtgaacaccaggtaccaggaacaaggagccaaactgcactttatcagggaaaaccttcatttactggaggaagggcaagg

SEQ ID NO: 387067 - DNA, 120 bp, Artificial Sequence
  ENSG00000144406_62 (sequence is synthesized)
cattcccagagaggaactggatgaacgaattgctcgggaagagttcagaagaccccgggagtccttactgaatatttgcactgagttctataagcactgtgggccacggctgaagatctt

SEQ ID NO: 387068 - DNA, 120 bp, Artificial Sequence
  ENSG00000144406_63 (sequence is synthesized)
gcaaaatctggctggggagcctcgggtcattgccttggaactgctggatgtgaagtctcacatgaggttggcagaaattgcacactcccttctgaagctggcaccatatgacactcagac

SEQ ID NO: 387069 - DNA, 120 bp, Artificial Sequence
  ENSG00000144406_64 (sequence is synthesized)
aatggagagtcgtgggcttcggcgctacatcatggagatgctacccattactgactggacagctgaggcagtgaggccggccctcatcctcattttaaaaagattggatagaatgttcaa

SEQ ID NO: 387070 - DNA, 120 bp, Artificial Sequence
  ENSG00000144406_65 (sequence is synthesized)
caaaattcataagatgcctactttgaggcgacaggttgagtgggagcctgccagcaatttgattgaaggggtttgtttgacacttcagaggcagccaatcatatccttcctgcctcacct

SEQ ID NO: 387071 - DNA, 120 bp, Artificial Sequence
  ENSG00000144406_66 (sequence is synthesized)
taggtcactgatcaatgtctgtgtcaatctggtgatgggagtggtaggaccttccagtgttgctgatggattaccccttcttcatctcagcccttatctctcaccacctctgcccttcag

SEQ ID NO: 387072 - DNA, 120 bp, Artificial Sequence
  ENSG00000144406_67 (sequence is synthesized)
cacagctgttgtccggcttgtagcattgcagatacaggctttaaaagaagattttcctttaagccatgtgatctccccattcaccaatcaagagcgaagggaggggatgcttttaaatct

SEQ ID NO: 387073 - DNA, 120 bp, Artificial Sequence
  ENSG00000144406_68 (sequence is synthesized)
gctcatcccatttgtgctcacagtaggatctggaagcaaagatagcccatggctggagcagcctgaggtgcagctgctgctgcagacagtcatcaatgtactcctcccaccgcggatcat

SEQ ID NO: 387074 - DNA, 120 bp, Artificial Sequence
  ENSG00000144406_69 (sequence is synthesized)
cagcacatccaggagcaagaacttcatgttagagagctccccagcccactgctccacccctggggatgcggggaaagacttgcgcagggaagggctggctgagtccaccagccaagcagc

SEQ ID NO: 387075 - DNA, 120 bp, Artificial Sequence
  ENSG00000144406_70 (sequence is synthesized)
atacttggcgctgaaggtgattctcgtctgctttgagaggcagctcggaagccagtggtactggctgagcctccaggtgaaggagatggctctgcggaaggtgggaggcctggccctttg

SEQ ID NO: 387076 - DNA, 120 bp, Artificial Sequence
  ENSG00000144406_71 (sequence is synthesized)
ggatttcctcgacttcatcgtgcggacccgaatacccatctttgtgcttttgcgccctttcatccagtgcaagctgctggcccaaccagcagagaatcatgaagagctttccgcccggca

SEQ ID NO: 387077 - DNA, 120 bp, Artificial Sequence
  ENSG00000144406_72 (sequence is synthesized)
acatattgccgaccagctggagcggcgcttcataccacgccctttgtgtaagagctcgctcattgctgagttcaacagtgaactaaaaattctaaaagaggcagttcatagtggatcagc

SEQ ID NO: 387078 - DNA, 120 bp, Artificial Sequence
  ENSG00000144406_73 (sequence is synthesized)
ctaccaaggcaagacatccatcagtaccgtgggcacctccacctctgcttaccgcctgagcttggccaccatgtcccgctctaacacgggcacgggcactgtctgggagcaggacagtga

SEQ ID NO: 387079 - DNA, 120 bp, Artificial Sequence
  ENSG00000144406_74 (sequence is synthesized)
gccatcccagcaggcttcgcaggacaccctgagtcggactgatgaggaagatgaggaaaatgactctataagcatgcccagcgtggtaagtgaacaagaagcttacctcctgagtgccat

SEQ ID NO: 387080 - DNA, 120 bp, Artificial Sequence
  ENSG00000144406_75 (sequence is synthesized)
tggaaggaggcgattctccagccatgtctccagcatgtctgtacctcaggctgaggtgggcatgctacccagccagagggtggcaagtatacagagtgaacctggtcaacagaacctcct

SEQ ID NO: 387081 - DNA, 120 bp, Artificial Sequence
  ENSG00000144406_76 (sequence is synthesized)
tgttcagcagccgctggggaggaagaggggcctgaggcagctaagacgtcctctactatcacgtcagaaaactcagactgaacccagaaatcgccaaggggctcggctgtcaaccactcg

SEQ ID NO: 387082 - DNA, 120 bp, Artificial Sequence
  ENSG00000144406_77 (sequence is synthesized)
caggagcattcaacctaaaacgaagccgtctgcggatcagaaacgatctgtgaccttcattgaggctcagccagagccagcagctgccccaacagatgcgcttcctgcaacaggccaact

SEQ ID NO: 387083 - DNA, 120 bp, Artificial Sequence
  ENSG00000144406_78 (sequence is synthesized)
acagggctgtagcccagccccttctaggaaaccagaagcaatggacgaaccagtcctcacatcttctcccgccatagttgttgcggatctccacagcgtgtctcccaagcagagtgagaa

SEQ ID NO: 387084 - DNA, 120 bp, Artificial Sequence
  ENSG00000144406_79 (sequence is synthesized)
cttccccactgaagaaggagaaaaggaggaggacacagaagcacaaggtgctactgcacacagtccactctctgcccaactctctgaccctgatgacttcacaggcctcgagacatccag

SEQ ID NO: 387085 - DNA, 120 bp, Artificial Sequence
  ENSG00000144406_80 (sequence is synthesized)
cctcctacagcatggagacactgtccttcatatcagtgaggaaaatggcatggagaacccgctactatctagtcagttcacctttactcccactgagctggggaaaacggatgcagtatt

SEQ ID NO: 387086 - DNA, 120 bp, Artificial Sequence
  ENSG00000144406_81 (sequence is synthesized)
agatgagtctcatgtttaattctgtatcttgtaagctctgcaggtatagagaagacatgaaagtgatctctctactacaagttcaatacttttgcttgaaaaagattaattacaaaatag

SEQ ID NO: 387087 - DNA, 120 bp, Artificial Sequence
  ENSG00000144406_82 (sequence is synthesized)
cactttacttctaatgggtggcacaaatctgaataggttttgctgccaatacacatgatgtttcataaacatcttaaaagtcaatggctaaaaggatttagttgtgtgaaaatcacaaaa

SEQ ID NO: 387088 - DNA, 120 bp, Artificial Sequence
  ENSG00000144406_83 (sequence is synthesized)
ccagggaggaataaggggaaagagccatttcactgcacattgtttatgattcaagaagccttcagcagttaaaaatatatactattcattgctgctttcatagaaatattaacaaatgat

SEQ ID NO: 387089 - DNA, 120 bp, Artificial Sequence
  ENSG00000144406_84 (sequence is synthesized)
atgatctaaaaatagaatgcaattttttgagattactcacattatacatctcatgcaaatatttatttttatagtttaaaaaatatcaattcaggttggctatacaagtagcaatttaca

SEQ ID NO: 387090 - DNA, 120 bp, Artificial Sequence
  ENSG00000144406_85 (sequence is synthesized)
taaaaaaataattaataggaaaaatattactttggggagactaaataacaagcctgcagccatttttgttttgagtaacaatacagccatttagaagaagaaaaaaatactatatagaga

SEQ ID NO: 387091 - DNA, 120 bp, Artificial Sequence
  ENSG00000144406_86 (sequence is synthesized)
gctgtggacttttagatatttatttttcaactatcattttcattgcatgttgtaaatcaaaatgcagatggcataagatcatcccatttcataatctatcacattagaatattacagaat

SEQ ID NO: 387092 - DNA, 120 bp, Artificial Sequence
  ENSG00000144406_87 (sequence is synthesized)
attctagaaatcatcagaaataattctgaattaagaacctaaacagcctatacaattataaaaactaaatgtatatataatcacttaaaagagatggtattcctattcctagccctgact

SEQ ID NO: 387093 - DNA, 120 bp, Artificial Sequence
  ENSG00000144406_88 (sequence is synthesized)
acatcaataccaagattagaagctattggaaaatgtgattagtaatacttttccttatagtatcctgtgcctgccctggagggcatattttcagatattaaggttagtgttgttagaatc

SEQ ID NO: 387094 - DNA, 120 bp, Artificial Sequence
  ENSG00000144406_89 (sequence is synthesized)
ggtttaataaaataacattttcctaatagaaacaatattcttatgatacttggaacatctaagtttataaggaaaaatgtataaagtaagcaatttcttcatagacacctccagtttata

SEQ ID NO: 387095 - DNA, 120 bp, Artificial Sequence
  ENSG00000144406_90 (sequence is synthesized)
tattttgcaaataggcctttaacttgaagttcaattacttcaagaaaagtgtaacacttagaaggcttgtgaggccaacacctagtgtgttactgatcctatggtagggctgtgcatcac

SEQ ID NO: 387096 - DNA, 120 bp, Artificial Sequence
  ENSG00000144406_91 (sequence is synthesized)
gtggttcacaattgaatttcaaaattttaacagtttacattagaaaactgttacctaacaaccaagcatatacaaactcatatacatacttaaattggtacggtggtgtatgtgtgcgtg

SEQ ID NO: 387097 - DNA, 120 bp, Artificial Sequence
  ENSG00000144406_92 (sequence is synthesized)
cgtgtgtgtgtgtatgtgttgtagtcctcaagatgaagttaaatatagactttaattaccctgcaatgaatttaaaacacattctgtatgcttaaactttgagtgcgttggctgtgaaat

SEQ ID NO: 387098 - DNA, 120 bp, Artificial Sequence
  ENSG00000144406_93 (sequence is synthesized)
gtatacatatataaagaggatacctactaaacccaccttaatcataaaggaaaattattttttgttagaattgcttattaaataggcatactttatactgtggtttataatttcaaatat

SEQ ID NO: 387099 - DNA, 120 bp, Artificial Sequence
  ENSG00000144406_94 (sequence is synthesized)
aacttggggttatggtcctattcactaagagaatgaaagatatccatgagttaaaagaacaaaactaaaaatttcagatctaacaattgaaagaaaattgaggcagtaaatgacctcttt

SEQ ID NO: 387100 - DNA, 120 bp, Artificial Sequence
  ENSG00000144406_95 (sequence is synthesized)
tactcttttatgttttacaatattatcatgttatttacagttaatgctgaaataattctcaagtgcaggaatataaatgttaagtggttttatgattccaagctgatatatttcacctgt

SEQ ID NO: 387101 - DNA, 120 bp, Artificial Sequence
  ENSG00000144406_96 (sequence is synthesized)
taaaaattatgctgctaaattagcattagaggccttatgtttggtaattacaagtgtctgggctattggcgcgtctctatatatgtgtgtgctttgttccagtttcttcaaattatctat

SEQ ID NO: 387102 - DNA, 120 bp, Artificial Sequence
  ENSG00000144406_97 (sequence is synthesized)
gtataattgtatgaaatatttaaatagcaaagaagtcaaagaagattgttaaatattcaacaagaatcataaatacctttatatgtattttaaaagtattgggctgttctgaacatgatt

SEQ ID NO: 387103 - DNA, 120 bp, Artificial Sequence
  ENSG00000144406_98 (sequence is synthesized)
atgctggtctgtctgtcttttagcctgactccttcactcttgtgtgtgaagtctattagcaactttcaataagctaagcaatgttgtaacttgcaaaaaagcctccactctgagaaacag

SEQ ID NO: 387104 - DNA, 120 bp, Artificial Sequence
  ENSG00000144406_99 (sequence is synthesized)
ggccttatagagtaggaatgttttcatactgggactactgaaattttgcagatgtgtgcatctgttccatttaaggtgcccttaaatgtgttgaatgtaatgtgttgaatgtttatgtgt

SEQ ID NO: 387105 - DNA, 120 bp, Artificial Sequence
  ENSG00000144406_100 (sequence is synthesized)
aatggctaaagtatctatatgtatgtgcataaaactgtcacaagatgtattctcaggaatactgttacctggagtttgaaaggaataactattaaaaaaaaaagttggggaagattagaa

SEQ ID NO: 387106 - DNA, 120 bp, Artificial Sequence
  ENSG00000144406_101 (sequence is synthesized)
aaaagctcaagataaatgttcaaaatattattaagtacatgactaaaagctaattactacatatgataaatgcagtgttggtaatagtagatcatttcttaagccatgatacttaatgat

SEQ ID NO: 387107 - DNA, 120 bp, Artificial Sequence
  ENSG00000144406_102 (sequence is synthesized)
atttatcttattcagaggaaaaacaaaaaaggtacccacttcccatgtagaaaaaattagactcagcaaagaggttgcttcttctgaaattagcttttgagagaccttggaataaaccat

SEQ ID NO: 387108 - DNA, 120 bp, Artificial Sequence
  ENSG00000144406_103 (sequence is synthesized)
gtgttatccatgatagtatgactcagatccaattaaaacagtttaaattctggatataggatctcctatagcaaaacattttactttcatttttcagtatttgctgctttctagaattct

SEQ ID NO: 387109 - DNA, 120 bp, Artificial Sequence
  ENSG00000144406_104 (sequence is synthesized)
attagataagctatgtcatttttctgaaaaagaaactgagttattgagtgtattaagacaaggcactgagaactacagtgtcaaaatcaaagggcataaatgggcatggcagtgctggtg

SEQ ID NO: 387110 - DNA, 120 bp, Artificial Sequence
  ENSG00000144406_105 (sequence is synthesized)
gaaaaatctgtggtactggtgatctggttagggcctgttgcacaggctgggagtaactggtttgctgtttcaagcctccaagagtaccttaaacaaggtgatagctcctctcttctttag

SEQ ID NO: 387111 - DNA, 120 bp, Artificial Sequence
  ENSG00000144406_106 (sequence is synthesized)
cattatattcctttagtcaacaaagaactttctccactctgctgcccagctctgagagtatctgagatgagaataggatgtgtgtggaggggcttttagggaagaaagggtcataaatga

SEQ ID NO: 387112 - DNA, 120 bp, Artificial Sequence
  ENSG00000144406_107 (sequence is synthesized)
atagaagtacagtctgaaacatgaattaaatatccttcctcaagttataaaggatactttaatagaacacagtctccagaattcgctgctatcacaccaagtcatgctgttgccctgtga

SEQ ID NO: 387113 - DNA, 120 bp, Artificial Sequence
  ENSG00000144406_108 (sequence is synthesized)
cctcacacttcccattccatggccttgtcttggcagggagtaaaaaatcccacttctttttactttagtgggtctcaactgcagcatttcagaaacaaattttgatttgacactcaggag

SEQ ID NO: 387114 - DNA, 120 bp, Artificial Sequence
  ENSG00000144406_109 (sequence is synthesized)
aataaaaacaagttgagggcagaatgtatttggaaaagcttaagacaaatttactgatattattttatgatcatttaggattacagatcaatttacctccataaatctttgaattgtcac

SEQ ID NO: 387115 - DNA, 120 bp, Artificial Sequence
  ENSG00000144406_110 (sequence is synthesized)
tgtgaccacaggatgaaaatcctttattagccattttataggttaaaacaaaaaattgactacacagccgacttccctcagataactatgaagtctattatgagtactgaatgaccaaag

SEQ ID NO: 387116 - DNA, 120 bp, Artificial Sequence
  ENSG00000144406_111 (sequence is synthesized)
aacatggaaaaaatgcatatgaataaatactgaaatgtttatgaaagatatttatgaaagatattaagacttctgtgtttaggtatgcacatatgataaaataaatctaaaaacattaaa

SEQ ID NO: 387117 - DNA, 120 bp, Artificial Sequence
  ENSG00000144406_112 (sequence is synthesized)
atactgtactctgcatttgggggcaaagttagaaattctgaaaatacactcctgttattctacaaagacagaaagagaagcaagcaatggtaatgtttttagatagatcattccacaaag

SEQ ID NO: 387118 - DNA, 120 bp, Artificial Sequence
  ENSG00000144406_113 (sequence is synthesized)
gatttgtcaactaggttcctgcaggcaacactttgcagttttctaagccaagctagtagaagggatcccaatttccaagtattgtctctccttaaaaattttccatagacacatggtctt

SEQ ID NO: 387119 - DNA, 120 bp, Artificial Sequence
  ENSG00000144406_114 (sequence is synthesized)
ctttctgttgtcaaatggcattcttgtatttcagatttatcattagctaagctaatgatgggtacttggcaagagtttggaccatctttatgtttttggtaaagtttaggcttctgatat

SEQ ID NO: 387120 - DNA, 120 bp, Artificial Sequence
  ENSG00000144406_115 (sequence is synthesized)
attattagtattcagttgtaggtagtgacacttaaccaagcagaaaaggatctatgccactgagtgtgaccttgggcaggtcatttaaccgtaatccacagttctccctctgtaaaatga

SEQ ID NO: 387121 - DNA, 120 bp, Artificial Sequence
  ENSG00000144406_116 (sequence is synthesized)
agaggtttgctaaaatgatctttaagataacttctcatctatagttctatgattccatgacaaaacccctttaaatattttgtgtgttctctgtctcttaagaatataagtaaaaaaaaa

SEQ ID NO: 387122 - DNA, 120 bp, Artificial Sequence
  ENSG00000144406_117 (sequence is synthesized)
aggagacataaggtctctctgcatgcatacaccaaggaaaagccacatgaggacataaccaggaagagagccatcaccaagaacccgaacatgcggacaccctgatctcagacttccagc

SEQ ID NO: 387123 - DNA, 120 bp, Artificial Sequence
  ENSG00000144406_118 (sequence is synthesized)
gcattcttctgattcatttttctccatttgtgctgtttttctctgtgatgtgaatccatccctatccattatgtcatgcctccatcttttgctgcttcttcagattgcactgagccataa

SEQ ID NO: 387124 - DNA, 120 bp, Artificial Sequence
  ENSG00000144406_119 (sequence is synthesized)
gaggaagcccctgtggtggccagagcagccttgttcctggaatgtgctcgttttgttcaccgctgcaaccgtggcaactggccagagtggatgaaagggcaccacgtgaacatcaccaag

SEQ ID NO: 387125 - DNA, 120 bp, Artificial Sequence
  ENSG00000144406_120 (sequence is synthesized)
tcccgctggtcttctctagctgacctaagcaattctgtgaacagagaaacatcacattcccagagtcagaaaatcattatgaccaatggccattttggcatttggagggaggggacagca

SEQ ID NO: 387126 - DNA, 120 bp, Artificial Sequence
  ENSG00000144406_121 (sequence is synthesized)
agagtcagagaggcctggcgctccctctagaggccaatacctattaaaggttaaatgaactggaaatgatttagctctgtgcctggcacagatctggacacaatagatactaatgctaat

SEQ ID NO: 387127 - DNA, 120 bp, Artificial Sequence
  ENSG00000144406_122 (sequence is synthesized)
gagaatggttcaaatactatgttaaacactggggatgtaaactaaggtcctggtcttcaagattatcacggttcaatgcaagaggcacataagaaaataactatgatacaaagttgttgg

SEQ ID NO: 387128 - DNA, 120 bp, Artificial Sequence
  ENSG00000144406_123 (sequence is synthesized)
tgtcaaagttaagatttgtcattttttaagatggtggatcattctggagttgaatggatgacttgaaagttttctttggtatatgtgcatagttaatagggtctatgaatgcctaagtag

SEQ ID NO: 387129 - DNA, 120 bp, Artificial Sequence
  ENSG00000144406_124 (sequence is synthesized)
caaagcctacattttgagaaaaataacattttctttaaaagtatatgtgctcatcttgaaaaaaatctatccatttcttagctatcatgctcctcatctgacacatataaaaatttcaat

SEQ ID NO: 387130 - DNA, 120 bp, Artificial Sequence
  ENSG00000144406_125 (sequence is synthesized)
tagtaccctttaatcccttttaaaataagggagggttggccttataaatgaaacaactaatgagaaaagaaaaggaattttatgttcaaaatactatatttaacatagctagttaacata

SEQ ID NO: 387131 - DNA, 120 bp, Artificial Sequence
  ENSG00000144406_126 (sequence is synthesized)
tttaggtaccagtttagagaaattccaagctttacaataatcgccaagcagaagcttaaaaattcgcaggattgaaaacaaacacctagttttcacttttttacctaattcagtgtggta

SEQ ID NO: 387132 - DNA, 120 bp, Artificial Sequence
  ENSG00000144406_127 (sequence is synthesized)
ctaaatgaacactattaatgcttgatctttgttcagtgacctgggaaatattaattggtagcctacatattagcagatgtttttgaaccactctacttagagatgtgagccgagtttgga

SEQ ID NO: 387133 - DNA, 120 bp, Artificial Sequence
  ENSG00000144406_128 (sequence is synthesized)
aactgtagtgatagtgagcagatagttcaacagattaacactggtaaacccacttactcggaaatttcaagtttaggttagtgagaaaattttctgtccttttaaactaaacccaaaaat

SEQ ID NO: 387134 - DNA, 120 bp, Artificial Sequence
  ENSG00000144406_129 (sequence is synthesized)
cagtgtgactccttcccaagaatttatagcacttaatgttcaattcatcagaatttttcaggtattagtccataatctccttcacactaatccagctttcaggagtcattaaaaaaacaa

SEQ ID NO: 387135 - DNA, 120 bp, Artificial Sequence
  ENSG00000144406_130 (sequence is synthesized)
atggaaaagttttattctaataattgattatttgtttttatattcttttataccgtggtgatgactacctatacattatttcaaggttatttatttcaatggcatggaaatgcttgtttt

SEQ ID NO: 387136 - DNA, 120 bp, Artificial Sequence
  ENSG00000144406_131 (sequence is synthesized)
aaaacactatttctttagtgatcccaatagaacatttgtgtctatcagcaaatggcttatcaaagatttataactgtctcacaagggtgcgtcaaaataaattcctttcttaaatacttc

SEQ ID NO: 387137 - DNA, 120 bp, Artificial Sequence
  ENSG00000144406_132 (sequence is synthesized)
atatctaaagacgttaaacatctccaaaaatgacccatttatgcttcccgaaagtagatttctggattagtacataggcttggtcagttataggcaattttctcgggagataggctatga

SEQ ID NO: 387138 - DNA, 120 bp, Artificial Sequence
  ENSG00000144406_133 (sequence is synthesized)
atatggagttggcttggatttaaattcattaggtgatctcagttcaacacaagaaatgttgactgaacctgacctgcatattaccttcagtgtcggagatgtcacatagcctcatttatg

SEQ ID NO: 387139 - DNA, 120 bp, Artificial Sequence
  ENSG00000144406_134 (sequence is synthesized)
aatacatttccatttgtcattgcagattccatttcgctagaaaatataagcttagaaagtattgccaggaaaatataaggaaatactgttaatatcagtaaagcccaagctgtttatttt

SEQ ID NO: 387140 - DNA, 120 bp, Artificial Sequence
  ENSG00000144406_135 (sequence is synthesized)
ggggccacagggatgaatcagtactagaagaattatgaaatggattgacttttattacagaaaatcccatattcatttaattgggttatgtatacagtaacaccatttatactaccatag

SEQ ID NO: 387141 - DNA, 120 bp, Artificial Sequence
  ENSG00000144406_136 (sequence is synthesized)
aaagtagccaaaaaatacatatcatgtcttgggaggccaagaaagaacattgtttaaataaactattttcttctaatgtgatcttcttggcaggagttaagctatataaatcaaattagt

SEQ ID NO: 387142 - DNA, 120 bp, Artificial Sequence
  ENSG00000144406_137 (sequence is synthesized)
ggtagtctggtgtaaaaactgatgggcgtgtgtaatctgataaacaggtttcagaaatgtagctggggtcagattagttctattgggagtaattacccctgtgatcagttttctatgatg

SEQ ID NO: 387143 - DNA, 120 bp, Artificial Sequence
  ENSG00000144406_138 (sequence is synthesized)
gtagtcttaggaccctctgtcaaagctaaaaccagggaaattaaaatgcaacccattcatcatctctgttttttcttcaatagatttagtcgagtggggcaggcctgcctctgctacgtt

SEQ ID NO: 387144 - DNA, 120 bp, Artificial Sequence
  ENSG00000144406_139 (sequence is synthesized)
ttcagtatcttcttcccctcccagtatgctctgtgcttttggaacaatatgggtaaacttcatcccagagacacatcctgtcttagatggcatcagaatcactgtctcattcacttgttt

SEQ ID NO: 387145 - DNA, 120 bp, Artificial Sequence
  ENSG00000144406_140 (sequence is synthesized)
gaattgaagatttacaggtcaaccactttgtgcccctatctgcccatgaaaacagacggctcaggtgacactgaaaatagtgaggtacatttcaaggtggtgtgtggggagatccaggaa

SEQ ID NO: 387146 - DNA, 120 bp, Artificial Sequence
  ENSG00000144406_141 (sequence is synthesized)
cccatccctacacagaagggattttggtgtgctgcttcccatgcactactttgacaattcacctcttcaagttgcgctgagagttgagggctgccagttggagagtggggtggcggagcc

SEQ ID NO: 387147 - DNA, 120 bp, Artificial Sequence
  ENSG00000144406_142 (sequence is synthesized)
tgcacaattggctagaagttgaggtagtctggggtggggaacttaaaatgcaaagaggatatttttctcttatggtgcaaaatgacactatgagttggccagtctaggatttatgtgaag

SEQ ID NO: 387148 - DNA, 120 bp, Artificial Sequence
  ENSG00000144406_143 (sequence is synthesized)
aggccttctcagccatgtggaactgtaactccaattaaacttacttatgttcccagtttggggtatttatcagcagcaagaaaatgaactaatatagtaaattggtaccagtagagtggg

SEQ ID NO: 387149 - DNA, 75 bp, Artificial Sequence
  ENSG00000144406_144 (sequence is synthesized)
caggcagagattggaacagtttgaagagctcagaagaagacagggaagtgtggaaaagtttggaactttcataga

SEQ ID NO: 387150 - DNA, 120 bp, Artificial Sequence
  ENSG00000144406_145 (sequence is synthesized)
taaaagttcagaaaatttgcagcctgactatgcaacagaaaagaaaaaccaattttctggggagaaattcaagccaactgcagaaatttgcataagtaaggagcaaggagcctaatgtta

SEQ ID NO: 387151 - DNA, 120 bp, Artificial Sequence
  ENSG00000144406_146 (sequence is synthesized)
tcgtgggctgggcccagggtcctcatgctgtgtgcagccgagggacttggtgccgtgggtcccaactgctccagctgtggctgaaaggggccaatgtacagctcaggatgtgacttcaga

SEQ ID NO: 387152 - DNA, 62 bp, Artificial Sequence
  ENSG00000144406_147 (sequence is synthesized)
ctgaaaggggccaatgtacagctcaggatgtgacttcagagggtggaagccccaagtctcag

SEQ ID NO: 387153 - DNA, 64 bp, Artificial Sequence
  ENSG00000144406_148 (sequence is synthesized)
agaggccccacacagagtccctaatggagtgctgccaggtggagctgtgagaagagggccactg

SEQ ID NO: 387154 - DNA, 120 bp, Artificial Sequence
  ENSG00000144406_149 (sequence is synthesized)
actgtcctccagaccccagaatggtagttccactgacagcttggatcatgcacctggaaaagccgcagacactcaacaccagcctgtgaaagcagccgagagggaggctgtaccctccaa

SEQ ID NO: 387155 - DNA, 82 bp, Artificial Sequence
  ENSG00000144406_150 (sequence is synthesized)
aacctggatgtgaggcctggagttaaagaagatcattttggagctttaaagtttgactgtcctgctggactttggacttgca

SEQ ID NO: 387156 - DNA, 84 bp, Artificial Sequence
  ENSG00000144406_151 (sequence is synthesized)
cctggatgtgaggcctggagttaaagaagatcattttggagctttaaagtttgactgtcctgctggactttggacttgcatgcc

SEQ ID NO: 387157 - DNA, 86 bp, Artificial Sequence
  ENSG00000144406_152 (sequence is synthesized)
ttgggttaatgctgaaatgagttaagactctgggagactatatgagacttggaggcgcaaggggtggaatgatatggtttggctgt

SEQ ID NO: 387158 - DNA, 120 bp, Artificial Sequence
  ENSG00000144407_0 (sequence is synthesized)
cgcgccgcggcgcagcagcacgcgggttctgagaagcgcgtggctccggcgacaagaccccaagcaccctcggccggtggcccgggcccgaccaccccagctgcgcgtcgttactggcca

SEQ ID NO: 387159 - DNA, 120 bp, Artificial Sequence
  ENSG00000144407_1 (sequence is synthesized)
caagtttgctctgggccagccaagttggcaacttggaagcttctcccgggctctggaggagggtccctgcttcttcctacagccgttccgggcatggccgggctgggggcgtcgctccac

SEQ ID NO: 387160 - DNA, 120 bp, Artificial Sequence
  ENSG00000144407_2 (sequence is synthesized)
gtctggggttggctaatgctcggcagctgcctcctggccagagcccagctggattctgatggcaccattactatagaggagcagattgtccttgtgctgaaagcgaaagtacaatgtgaa

SEQ ID NO: 387161 - DNA, 120 bp, Artificial Sequence
  ENSG00000144407_3 (sequence is synthesized)
ctcaacatcacagctcaactccaggagggagaaggtaattgtttccctgaatgggatggactcatttgttggcccagaggaacagtggggaaaatatcggctgttccatgccctccttat

SEQ ID NO: 387162 - DNA, 120 bp, Artificial Sequence
  ENSG00000144407_4 (sequence is synthesized)
atttatgacttcaaccataaaggagttgctttccgacactgtaaccccaatggaacatgggattttatgcacagcttaaataaaacatgggccaattattcagactgccttcgctttctg

SEQ ID NO: 387163 - DNA, 120 bp, Artificial Sequence
  ENSG00000144407_5 (sequence is synthesized)
cagccagatatcagcataggaaagcaagaattctttgaacgcctctatgtaatgtataccgttggctactccatctcttttggttccttggctgtggctattctcatcattggttacttc

SEQ ID NO: 387164 - DNA, 120 bp, Artificial Sequence
  ENSG00000144407_6 (sequence is synthesized)
agacgattgcattgcactaggaactatatccacatgcacttatttgtgtctttcatgctgagagctacaagcatctttgtcaaagacagagtagtccatgctcacataggagtaaaggag

SEQ ID NO: 387165 - DNA, 120 bp, Artificial Sequence
  ENSG00000144407_7 (sequence is synthesized)
ctggagtccctaataatgcaggatgacccacaaaattccattgaggcaacttctgtggacaaatcacaatatatcgggtgcaagattgctgttgtgatgtttatttacttcctggctaca

SEQ ID NO: 387166 - DNA, 120 bp, Artificial Sequence
  ENSG00000144407_8 (sequence is synthesized)
aattattattggatcctggtggaaggtctctacctgcataatctcatctttgtggctttcttttcggacaccaaatacctgtggggcttcatcttgataggctgggggtttccagcagca

SEQ ID NO: 387167 - DNA, 120 bp, Artificial Sequence
  ENSG00000144407_9 (sequence is synthesized)
tttgttgcagcatgggctgtggcacgagcaactctggctgatgcgaggtgctgggaacttagtgctggagacatcaagtggatttatcaagcaccgatcttagcagctattgggctgaat

SEQ ID NO: 387168 - DNA, 120 bp, Artificial Sequence
  ENSG00000144407_10 (sequence is synthesized)
tttattctgtttctgaatacggttagagttctagctaccaaaatctgggagaccaatgcagttgggcatgacacaaggaagcaatacaggaaactggccaaatcgacactggtcctggtc

SEQ ID NO: 387169 - DNA, 120 bp, Artificial Sequence
  ENSG00000144407_11 (sequence is synthesized)
gcatgcactgtgagctcttcttcaactcctttcagggtttctttgtgtctatcatctactgctactgcaatggagaggttcaggcagaggtgaagaagatgtggagtcggtggaacctct

SEQ ID NO: 387170 - DNA, 120 bp, Artificial Sequence
  ENSG00000144407_12 (sequence is synthesized)
ccgtggactggaaaaggacaccgccatgtggcagccgcagatgcggctcagtgctcaccaccgtgacgcacagcaccagcagccagtcacaggtggcggccagcacacgcatggtgctta

SEQ ID NO: 387171 - DNA, 120 bp, Artificial Sequence
  ENSG00000144407_13 (sequence is synthesized)
tctctggcaaagctgccaagatcgccagcagacagcctgacagccacatcactttacctggctatgtctggagtaactcagagcaggactgcctgccacactctttccacgaggagacca

SEQ ID NO: 387172 - DNA, 120 bp, Artificial Sequence
  ENSG00000144407_14 (sequence is synthesized)
aggaagatagtgggaggcagggagatgatattctaatggagaagccttccaggcctatggaatctaacccagacactgaaggatgccaaggagaaactgaggatgttctctgaatggaca

SEQ ID NO: 387173 - DNA, 120 bp, Artificial Sequence
  ENSG00000144407_15 (sequence is synthesized)
tttgtggctgactttcatgggctggtccaatggctggttgtgtgagagggcttggctgatactcctatgcttgagttcaaaggctgaaaattcagttaaggtgttacttaataatagttt

SEQ ID NO: 387174 - DNA, 120 bp, Artificial Sequence
  ENSG00000144407_16 (sequence is synthesized)
ttaggctccatgaattggctcctgtaaatactaacgacatgaaaatgcaagtgtcaatggagtagtttattaccttctattggcatcaagttttcctctaaattaatgtatggtatttgc

SEQ ID NO: 387175 - DNA, 120 bp, Artificial Sequence
  ENSG00000144407_17 (sequence is synthesized)
tctgtgattgttcatttttttctgctacttttgggtagaaaaaagattcaattgcttggctgtagctttctctcatatatatcaccctaaatataatgaagatcttttagtgtgtatcat

SEQ ID NO: 387176 - DNA, 120 bp, Artificial Sequence
  ENSG00000144407_18 (sequence is synthesized)
tttccttttagaaactagtattctcttatttcttactttaatgtacttctatcactgcatttattttgcctgtgcataggagcaattaggatctaaaaaaatatatgggaagataaaaga

SEQ ID NO: 387177 - DNA, 120 bp, Artificial Sequence
  ENSG00000144407_19 (sequence is synthesized)
tctaagaacaagtacttgctggaaaattagttggctggacattgataaaataatgcatttataacaattacatgtgtttctgggaacaaggaaaatttctcaaaaaagaatatttcacac

SEQ ID NO: 387178 - DNA, 120 bp, Artificial Sequence
  ENSG00000144407_20 (sequence is synthesized)
atcccttcttttgaatggcctctttgtgaccagccagacctcaggtcttcactctttcttctttgtaaactatgtcatgtggaaagatttcctcagttagtgagcttgtgtctgcaaatt

SEQ ID NO: 387179 - DNA, 120 bp, Artificial Sequence
  ENSG00000144407_21 (sequence is synthesized)
gattttgtttgtaatgtattttgatagcaaatcatgctgcatctatatctttttcttgtttgagctgttactacattgtacatggcatgtgggatcaattaaaaatttgttttaaaaata

SEQ ID NO: 387180 - DNA, 120 bp, Artificial Sequence
  ENSG00000144407_22 (sequence is synthesized)
gaaaaatcaaaacaccatcctacagaactttgatgcattcagaacaaagatcacgaatcaagctgaaaaagtaaagcattctgtgagttgtggaatggaaattgcctcaaccatctcacc

SEQ ID NO: 387181 - DNA, 120 bp, Artificial Sequence
  ENSG00000144407_23 (sequence is synthesized)
acttgatgacacttgtaatttcagtgacccaattcaagcaatcaaacatcaagtaatactctcaataaagatgtgtaattaaaacagaagaggaaacagactaacagaagtgatgaagaa

SEQ ID NO: 387182 - DNA, 120 bp, Artificial Sequence
  ENSG00000144407_24 (sequence is synthesized)
agttcagaggttatggatgtatctatcatcagtatttcgggaagtcagggacccggaacagagggacttaatgaagctgtggcagaagaaaaaattatgaagatttcatggacatttatt

SEQ ID NO: 387183 - DNA, 120 bp, Artificial Sequence
  ENSG00000144407_25 (sequence is synthesized)
gtgctccgagggaccacaggtccactacgtgaggggaggcttccctcccacaggaactcacacctgtgggcaggaagccgggaggcccgccccctgcctgggttcctgcaggggaaggcg

SEQ ID NO: 387184 - DNA, 120 bp, Artificial Sequence
  ENSG00000144407_26 (sequence is synthesized)
agggtggctggatagagcgtaccctgagaggtggttgggcaggaggctgggctggtggccagctgcgcagggagaccgggaggtggcagatctgcggggcgcccagtcacttcctccacg

SEQ ID NO: 387185 - DNA, 120 bp, Artificial Sequence
  ENSG00000144407_27 (sequence is synthesized)
ttctcgtgctgggcgggaggagcggatggggcttgggaggcagcctgctctccagtccctatccacccacaggttttttgggtcggagaggaattatctgataaaattcctgggttaata

SEQ ID NO: 387186 - DNA, 120 bp, Artificial Sequence
  ENSG00000144407_28 (sequence is synthesized)
tttttaaaaacggagagtttttaaaaatgatttttttccctcgaaaatgacctttttatgcttcgaagcagtttgtcaccagcatagtgctttttcttttctcttctttttctacgataa

SEQ ID NO: 387187 - DNA, 120 bp, Artificial Sequence
  ENSG00000144407_29 (sequence is synthesized)
actccttcactgggctcgggtgggagatccgcatgcactgtgagctcttcttcaactcctttcagggtttctttgtgtctatcatctactgctactgcaatggagagattgggaggctgc

SEQ ID NO: 387188 - DNA, 120 bp, Artificial Sequence
  ENSG00000144407_30 (sequence is synthesized)
tgtgtatggataagatacctgctacagccagcttgacaccatgagaaggacaagagaattgcagagacacatatccaggattctgatccagttgaggcactgaaataatctagaaccacc

SEQ ID NO: 387189 - DNA, 120 bp, Artificial Sequence
  ENSG00000144407_31 (sequence is synthesized)
ttcaaatttcttataaagagagctatgctattaggatttaattaaatggatgccaacagcaagtaaaccatctccaaagatgccatgaagctctcctaattgcaggaaaatatcagaggc

SEQ ID NO: 387190 - DNA, 120 bp, Artificial Sequence
  ENSG00000144407_32 (sequence is synthesized)
aaaatggaagaatcaaaggcaagggaaacctgtacagtggagacacaaagggtcactggcagatttcaaatgatccaagacatcctcaagacattgagatctgctggttggagatcttag

SEQ ID NO: 387191 - DNA, 120 bp, Artificial Sequence
  ENSG00000144407_33 (sequence is synthesized)
tgcccaaggaagaatgcttgcaaaaggagatggaacagtgtttctgttgcattggccactgagaatatctggttattttgaatttgtcacagtctgcagctaaaaggcgaacaggaaaag

SEQ ID NO: 387192 - DNA, 120 bp, Artificial Sequence
  ENSG00000144407_34 (sequence is synthesized)
aagagatcacgaatcaagctgaaaaagtaaagcattctgtgagttgtggaatggaaattgcctcaaccatctcaccacttgatgacacttgtaatttcagtgacccaattcaaggcaaga

SEQ ID NO: 387193 - DNA, 120 bp, Artificial Sequence
  ENSG00000144410_0 (sequence is synthesized)
acagtcttgatgcattcattctcaaggacacttgatccactgccagagaggcccagaattttctaacttactgtgtggcagaatgaagcctctgcttgaaaccctttatcttttggggat

SEQ ID NO: 387194 - DNA, 120 bp, Artificial Sequence
  ENSG00000144410_1 (sequence is synthesized)
gctggttcctggagggctgggatatgatagatccttagcccaacacagacaagagattgtggacaagtcagtgagtccatggagcctggagacgtattcctataacatataccaccccat

SEQ ID NO: 387195 - DNA, 120 bp, Artificial Sequence
  ENSG00000144410_2 (sequence is synthesized)
gggagagatctatgagtggatgagagagatcagtgagaagtacaaggaagtggtgacacagcatttcctaggagtgacctatgagacccaccccatgtattatctgaagatcagccaacc

SEQ ID NO: 387196 - DNA, 120 bp, Artificial Sequence
  ENSG00000144410_3 (sequence is synthesized)
atctggtaatcccaagaaaatcatttggatggactgtggaattcacgccagagaatggattgctcctgctttttgccaatggttcgtcaaagaaattctacaaaaccataaagacaactc

SEQ ID NO: 387197 - DNA, 120 bp, Artificial Sequence
  ENSG00000144410_4 (sequence is synthesized)
aagtatacgcaagctccttaggaacctggacttctatgtccttccagttcttaacatagatggttatatctacacttggacaactgatcgtctttggaggaaatcccgttcaccccataa

SEQ ID NO: 387198 - DNA, 120 bp, Artificial Sequence
  ENSG00000144410_5 (sequence is synthesized)
atcttggtgtagtattggtgcctctagaaactgccaagatcaaacattctgtgggacagggccagtgtctgaaccagagactaaagctgttgccagcttcatagagagcaagaaggatga

SEQ ID NO: 387199 - DNA, 120 bp, Artificial Sequence
  ENSG00000144410_6 (sequence is synthesized)
tattttgtgcttcctgaccatgcactcttatgggcagttaattctcacaccttacggctacaccaaaaataaatcaagtaaccacccagaaatgattcaagttggacagaaggcagcaaa

SEQ ID NO: 387200 - DNA, 120 bp, Artificial Sequence
  ENSG00000144410_7 (sequence is synthesized)
tgcattgaaagcaaagtatggaaccaattatagagttggatcgagtgcagatattttatatgcctcatcagggtcttcaagagattgggcccgagacattgggattcccttctcatatac

SEQ ID NO: 387201 - DNA, 120 bp, Artificial Sequence
  ENSG00000144410_8 (sequence is synthesized)
gtttgagctgagggacagtggaacatatgggtttgttctgccagaagctcagatccagcccacctgtgaggagaccatggaggctgtgctgtcagtcctggatgatgtgtatgcgaaaca

SEQ ID NO: 387202 - DNA, 120 bp, Artificial Sequence
  ENSG00000144410_9 (sequence is synthesized)
ctggcactcggacagtgctggaagggtgacatctgccactatgctgctgggcctgctggtgtcctgcatgtctcttctctaagtgcattctgcccaggcctgctcaaccccagtggcatg

SEQ ID NO: 387203 - DNA, 120 bp, Artificial Sequence
  ENSG00000144426_0 (sequence is synthesized)
gctcgtctgcctggctgcggggtgacacggggcttcgccttgggaaggggtcgagggaagcagttagacggctgccgggcggcggctgccgcgcggcacacaatatttatttaattgccc

SEQ ID NO: 387204 - DNA, 120 bp, Artificial Sequence
  ENSG00000144426_1 (sequence is synthesized)
aactaccactgatgaagatatattggagtgactgctgaaattgcctttttgtttttaaccagaggacagtccatttgtttcacttctttttgctttctttactgctatgagctttactga

SEQ ID NO: 387205 - DNA, 120 bp, Artificial Sequence
  ENSG00000144426_2 (sequence is synthesized)
acggctgaaaaacttggaaaataaaatggacatgctgtagtcttgaacataatttttttaaggaaaacttaaagtgccagagtgaaagccagaatggcatccagagagaggctctttgaa

SEQ ID NO: 387206 - DNA, 120 bp, Artificial Sequence
  ENSG00000144426_3 (sequence is synthesized)
ctttggatgctttattgtacaaagaaagatccagattacctgaagctgtggttggacacttttgtttctagctatgaacaatttttagacgttgactttgaaaagctgcctaccagggta

SEQ ID NO: 387207 - DNA, 120 bp, Artificial Sequence
  ENSG00000144426_4 (sequence is synthesized)
gatgatatgcctccaggaatatctctgcttcctgataatattctgcaggttctgaggatccagcttctacagtgtgttcagaaaatggcagatgggttagaggaacaacagcaagccttg

SEQ ID NO: 387208 - DNA, 120 bp, Artificial Sequence
  ENSG00000144426_5 (sequence is synthesized)
tcaattttgcttgtcaagttcttcattattctttgcagaaatctatcaaatgtggaagaaattgggacttgctcgtacattaattatgtcatcaccatgacaacactctatattcagcaa

SEQ ID NO: 387209 - DNA, 120 bp, Artificial Sequence
  ENSG00000144426_6 (sequence is synthesized)
ttaaaaagcaaaaaaaaagagaaggaaatggcagatcagacatgtattgaagaatttgtgatccacgcattggcattttgtgaaagcttatatgatccatatcggaattggagacataga

SEQ ID NO: 387210 - DNA, 120 bp, Artificial Sequence
  ENSG00000144426_7 (sequence is synthesized)
atttcaggacgaatccttagtactgtggaaaagagcagacagaaatataaaccagcttctctcacagtggaattcgtccctttcttttatcaatgttttcaggaaagtgaacatctcaag

SEQ ID NO: 387211 - DNA, 120 bp, Artificial Sequence
  ENSG00000144426_8 (sequence is synthesized)
gaaagtcttaaatgttgcttattgcatctctttggagccattgtagccggtgggcagaggaatgctttgcaagcaatttctccagccactatggaagttcttatgcgagtattggcagat

SEQ ID NO: 387212 - DNA, 120 bp, Artificial Sequence
  ENSG00000144426_9 (sequence is synthesized)
tgtgattcctgggaggatggagatcctgaagaagtgggtaggaaggcagaactaactctgaagtgccttacagaagtggtacatatccttctcagtagcaactctgatcagcgtcaagtg

SEQ ID NO: 387213 - DNA, 120 bp, Artificial Sequence
  ENSG00000144426_10 (sequence is synthesized)
gaaaccagtactattctggagaactattttaaattgctaaattcagatcattcagctttacctaatcaaaggaggtccagacagtgggaaaaccgatttattgctctacagatcaaaatg

SEQ ID NO: 387214 - DNA, 120 bp, Artificial Sequence
  ENSG00000144426_11 (sequence is synthesized)
ctgaataccatcacagccatgttagattgtacagatagacctgttcttcaggccatttttcttaacagcaattgctttgaacatctcatacgactgctacagaactgcaaggtgtttcag

SEQ ID NO: 387215 - DNA, 120 bp, Artificial Sequence
  ENSG00000144426_12 (sequence is synthesized)
ggacaattggattgtttggccatatcaaccattcaggctttgaccgcagtaatgaacaaatctccagctgctaaggaagtatttaaagaaagaattggttatacacatatgcttgaagta

SEQ ID NO: 387216 - DNA, 120 bp, Artificial Sequence
  ENSG00000144426_13 (sequence is synthesized)
ttaaaatccctgggtcagccaccactggaattacttaaagaacttatgaatatggctgtagagggtgaccacacttcagttgggattttgggcattagtaatgtccaacctctcttgctt

SEQ ID NO: 387217 - DNA, 120 bp, Artificial Sequence
  ENSG00000144426_14 (sequence is synthesized)
cttatccagtggcttccagaactacaatcccatgacctgcaaatcttcatctctgattggctgaaaagaatttgttgtattaatagacagagtcgaactacttgtgtcaatgcaaacatg

SEQ ID NO: 387218 - DNA, 120 bp, Artificial Sequence
  ENSG00000144426_15 (sequence is synthesized)
gggattagaatcattgaaacccttgacttgcattcttccctccatcaaacttgtgctgagaacttgattgcaatccatggttccttggggagtcagtcagtgagctcagaagaaatccgt

SEQ ID NO: 387219 - DNA, 120 bp, Artificial Sequence
  ENSG00000144426_16 (sequence is synthesized)
cgactactgagattgctgagagtggatgaatctgagtctgttcacccttatgtcactcccgtgactcgagcaatcctgacaatggcccgaaaactaagtctagagagtgccctccagtat

SEQ ID NO: 387220 - DNA, 120 bp, Artificial Sequence
  ENSG00000144426_17 (sequence is synthesized)
ttcaatttgtcacatagtatggcaggaatttctgtgcctcccatacagaaatggccagggtctgccttttctttcagtgcttggttttgcttagaccaggatcagttgactcttggcatt

SEQ ID NO: 387221 - DNA, 120 bp, Artificial Sequence
  ENSG00000144426_18 (sequence is synthesized)
gctaacaaaggagggaaaaggaaacaattgtacagtttttttacaggaagtggcatgggttttgaagcctttattacccattcaggtatgttggtcgtggcagtgtgcacaaaaagagaa

SEQ ID NO: 387222 - DNA, 120 bp, Artificial Sequence
  ENSG00000144426_19 (sequence is synthesized)
tatgcaacggttatgcttcctgaccacagtttctgtgattccctctggcacaacataactgttgtccacatgcctggaaaaaggccttttggtcagagcttcgtctatatctatgacaat

SEQ ID NO: 387223 - DNA, 120 bp, Artificial Sequence
  ENSG00000144426_20 (sequence is synthesized)
ggacaacagaaggtttctgcccctctcagatttcctgccatgaatgaaccctttacttcctgttgcattggttcagctgggcaaagaaccaccactcctccaccatcccaaatcccagat

SEQ ID NO: 387224 - DNA, 120 bp, Artificial Sequence
  ENSG00000144426_21 (sequence is synthesized)
ccacctttctcttctcccattacccctcatcggacatcatttggtggaattctgtcatcagcctcctggggaggaacaattgaaaaatcaaaattgattaccaaattgatatcagctgga

SEQ ID NO: 387225 - DNA, 120 bp, Artificial Sequence
  ENSG00000144426_22 (sequence is synthesized)
acccaagacagtgaatgggggtgtcccacatctctggagggtcagctaggatctgttatcatcttttatgaaccactacaacctcctcaggtgaaggcattatatttagcaggtccaaat

SEQ ID NO: 387226 - DNA, 120 bp, Artificial Sequence
  ENSG00000144426_23 (sequence is synthesized)
tgtttaagcccttggaagtgtcaagagtctgacatggccgacctgcctggtaacatccttctttactacacagcaaaggcctgcaaaaattcaatctgtcttgatttatctactaattgt

SEQ ID NO: 387227 - DNA, 120 bp, Artificial Sequence
  ENSG00000144426_24 (sequence is synthesized)
ttgcatggaagattaacaggaaacaaagtagtgaactgggacattaaggatatcataaactgcataggtgggttaaatgtactctttcctttattggaacaaatcagccactttagtgaa

SEQ ID NO: 387228 - DNA, 120 bp, Artificial Sequence
  ENSG00000144426_25 (sequence is synthesized)
ggacagattcctgaagaaaagaatgaaagcacagttcctgaatcagtaacacctgttgaaggagattggctcgtatggacttccacaaaggcctcagagtcaagactagagagaaaccta

SEQ ID NO: 387229 - DNA, 120 bp, Artificial Sequence
  ENSG00000144426_26 (sequence is synthesized)
gttgcaacatttatcttaattgtgaaacattttattcagagacatcctatcaaccagggcaatcttattcactcccatggagttgcaactcttggtgctttacttcagaaggtgccaagc

SEQ ID NO: 387230 - DNA, 120 bp, Artificial Sequence
  ENSG00000144426_27 (sequence is synthesized)
accttgatggatgttaatgtgttgatggcagttcagttactaattgaacaagtatcattagagaaaaatatgcagctcctgcaacaaatgtatcaatatttactctttgactttcgtatt

SEQ ID NO: 387231 - DNA, 120 bp, Artificial Sequence
  ENSG00000144426_28 (sequence is synthesized)
tggaaccgtggagattttccctttcgaatcggtcacatacagtatctttcaaccatcattaaagacagcaggagagttttccgaaagaagtatggtgtgcagtttctcctagatacactt

SEQ ID NO: 387232 - DNA, 120 bp, Artificial Sequence
  ENSG00000144426_29 (sequence is synthesized)
aggatttattatgggaatggttgtaaatataatgaactatctctagatgatattcgaacaataaggacttctttgtatggactaattaaatattttctgtgcaaaggtggatctcatgaa

SEQ ID NO: 387233 - DNA, 120 bp, Artificial Sequence
  ENSG00000144426_30 (sequence is synthesized)
gagatacaaagtattatggggtacatagctgctactaatgaagaagaacagctctttggaattttggacgtgctcttcagtctcctacgtaccagcccaaccagaggtcagcttttctta

SEQ ID NO: 387234 - DNA, 120 bp, Artificial Sequence
  ENSG00000144426_31 (sequence is synthesized)
ctgctttttgaaccaggaaatgctgacatactgtacgcattgctcttaaatcagaagtactctgacagactaagagaaatcatttttaagattatggaacaaatgttgaaatgcacgaac

SEQ ID NO: 387235 - DNA, 120 bp, Artificial Sequence
  ENSG00000144426_32 (sequence is synthesized)
gtttatgagcgtagtaaacaacatattcgactcagagaagttggctactcgggactgggactccttcttaatgaagcacttgttaatacttctcttattaaaaacctcacccatcaaatc

SEQ ID NO: 387236 - DNA, 120 bp, Artificial Sequence
  ENSG00000144426_33 (sequence is synthesized)
ataaatacagatcctgttattaatttcaaagatctactatctgtggtatatatatctcacagagcacatataaatgttagagtggccatctgcagaaaggttttgcaaattttgcagttc

SEQ ID NO: 387237 - DNA, 120 bp, Artificial Sequence
  ENSG00000144426_34 (sequence is synthesized)
cagccagatgcagcacatcaaatatcacagcaagtgggttggcaagacaccttagttaggctttttttaaaagcaaaatttgaaaacggaaatactcttcataagcacagtagagctgtt

SEQ ID NO: 387238 - DNA, 120 bp, Artificial Sequence
  ENSG00000144426_35 (sequence is synthesized)
ttaatgaaagacaatgataaaaatatgtcaactgaagataccaagaagaactctgatgaaaaaacagatgaggaaaaaatcacctcttttgcctcagctaatgtgtcttcggatcagtgg

SEQ ID NO: 387239 - DNA, 120 bp, Artificial Sequence
  ENSG00000144426_36 (sequence is synthesized)
agtttggaggatagacactctttagactcaaacacaccattatttccagaagatagctctgtgggagaattgtctttcaaatcagagaatcaagaggaattctggcatagtaacccttca

SEQ ID NO: 387240 - DNA, 120 bp, Artificial Sequence
  ENSG00000144426_37 (sequence is synthesized)
catttgagtttagacctcagtggaattgactcatgtgaaatgagtgatagtggaagtcaagtgccagacagtctgcctagcacaccatccccagtagagtctactaaatcgttttctgtg

SEQ ID NO: 387241 - DNA, 120 bp, Artificial Sequence
  ENSG00000144426_38 (sequence is synthesized)
cactctgacagagaaagcagcatcacaaatgatatgggctttagtgatgacttctctttacttgaaagccaagagagatgtgaggaggagcttcttcaattactgacacatattttgaat

SEQ ID NO: 387242 - DNA, 120 bp, Artificial Sequence
  ENSG00000144426_39 (sequence is synthesized)
tatgtaatgtgtaagggactagaaaagtctgatgatgatacttggattgaacgaggacaagtgttttcagcactaagtaaaccaggaatatccagtgaactacttcgaccatcagatgaa

SEQ ID NO: 387243 - DNA, 120 bp, Artificial Sequence
  ENSG00000144426_40 (sequence is synthesized)
ataaaactaactttgctacaaaagatgttagaatgggcaatctcagaaaacagagaagcaaaaactaatccagtaactgctgaaaacgccttccgactagtgctgatcatacaggacttt

SEQ ID NO: 387244 - DNA, 120 bp, Artificial Sequence
  ENSG00000144426_41 (sequence is synthesized)
cttcagtcagagggactagttaattcaaacatgtggaccgagaagcttttagaggatatgatgctgctctttgactgtctgtcagtctgctattctgaaagtccagtatgggtaaaactc

SEQ ID NO: 387245 - DNA, 120 bp, Artificial Sequence
  ENSG00000144426_42 (sequence is synthesized)
tctcaaattcagatccagttgcttctaggattcattggaaggggtaatttgcaggtttgtgcaatggcatcagctaagctaaatacccttcttcagaccaaagtgattgaaaatcaggat

SEQ ID NO: 387246 - DNA, 120 bp, Artificial Sequence
  ENSG00000144426_43 (sequence is synthesized)
gaagcatgttacattttagggaagctggaacatgttctaagtcaatcaatcaaggaacagactgaaatctactcatttctgattccccttgttcgtaccctggtttccaaaatttatgag

SEQ ID NO: 387247 - DNA, 120 bp, Artificial Sequence
  ENSG00000144426_44 (sequence is synthesized)
cttctcttcatgaacttgcacctaccttctttaccttttaccaatggtagctcctcattttttgaagattttcaagaatattgtaattcaaatgaatggcaagtttacattgaaaaatat

SEQ ID NO: 387248 - DNA, 120 bp, Artificial Sequence
  ENSG00000144426_45 (sequence is synthesized)
cagtatgaagctcatacattttacgatggtcatgagaacatggcactttattggaaggattgttatgaagctttaatggtaaatatgcataaacgagaccgggaaggaggggaaagcaag

SEQ ID NO: 387249 - DNA, 120 bp, Artificial Sequence
  ENSG00000144426_46 (sequence is synthesized)
ctcaaatttcaggagctgtttgtggagccatttaatcgaaaagcacgccaagagaacctgaggtataataatatgcttaaacaacttagcagtcaacagttagccactcttagacgctgg

SEQ ID NO: 387250 - DNA, 120 bp, Artificial Sequence
  ENSG00000144426_47 (sequence is synthesized)
aaagcaatacagctctatcttacatgtgaaaggggaccttgggctaaaaggaaacagaatccaattcactggaagctagctaatgtagagaattattcccgcatgagacttaagctggta

SEQ ID NO: 387251 - DNA, 120 bp, Artificial Sequence
  ENSG00000144426_48 (sequence is synthesized)
ccgaattataatttcaaaacccatgaggaagctagtgccttgagagataatctgggtatccaacactcacagccttccagtgatacattgcttttggaagtagtgaaacaagtaaaagtt

SEQ ID NO: 387252 - DNA, 120 bp, Artificial Sequence
  ENSG00000144426_49 (sequence is synthesized)
agtgatatggtggaggataaattagaccttcctgaagaggatataacagctagagtaaatgttgatgagaaagaagaacaggatcaaaaagaaaaattggtattgatggaagactgtgaa

SEQ ID NO: 387253 - DNA, 120 bp, Artificial Sequence
  ENSG00000144426_50 (sequence is synthesized)
ctcattacaataattgatgtaattcctggcagattagaaatcactactcaacacatttacttctatgatggcagcattgaaaaagaagatggagtaggctttgatttcaagtggcctcat

SEQ ID NO: 387254 - DNA, 120 bp, Artificial Sequence
  ENSG00000144426_51 (sequence is synthesized)
tctcaaattcgagagattcatctccggcgttacaatttaagaagatcagcccttgagatttttcatgttgaccaatccaactactttctcaatttcaaaaaagaggttagaaacaaaata

SEQ ID NO: 387255 - DNA, 120 bp, Artificial Sequence
  ENSG00000144426_52 (sequence is synthesized)
tatagccgactgttgtcacttcattccccaaatagttattatggaagcagatcaccacaggagttattcaaagcatcaggattgacacagaaatgggtaaacagagagatatcaaatttt

SEQ ID NO: 387256 - DNA, 120 bp, Artificial Sequence
  ENSG00000144426_53 (sequence is synthesized)
gactacctcattcaaataaatacaatggcaggacgaacctataatgaccttgcacagtatcctgtgtttccctggattttacaagattatacttcggaagagttggaccttaataaccct

SEQ ID NO: 387257 - DNA, 120 bp, Artificial Sequence
  ENSG00000144426_54 (sequence is synthesized)
gctgtatttcgagatctttccaaaccaattggggtagttaatgaaaaaaacgccaaagctatgagagaaaaatatgaaaattttgaggatcctatgggaactattgataagtttcactat

SEQ ID NO: 387258 - DNA, 120 bp, Artificial Sequence
  ENSG00000144426_55 (sequence is synthesized)
ggtactcactattcaaattctgcgggggtcatgcactatctcattcgtgtagaaccgttcaccaccctccacatccaacttcagagtggaaggtttgactgtgcagatcgacagttccat

SEQ ID NO: 387259 - DNA, 120 bp, Artificial Sequence
  ENSG00000144426_56 (sequence is synthesized)
tctattcctgctacctggcaagctcttatggataatccatatgatgttaaagaacttattcctgaattcttctatttcccagagtttttggaaaatcaaaatcaatttaacttgggtcgt

SEQ ID NO: 387260 - DNA, 120 bp, Artificial Sequence
  ENSG00000144426_57 (sequence is synthesized)
ctacagatttccaaagaattagtaaatgatgtcattctcccgaaatgggctaaatcagctgaagatttcatctataaacataggaaagctttggagtctgaatatgtttcagctcatctt

SEQ ID NO: 387261 - DNA, 120 bp, Artificial Sequence
  ENSG00000144426_58 (sequence is synthesized)
catgaatggatagatctgatctttggctataaacagaggggaccagctgcagtagaggcactcaacgttttctattattgtagttatgaaggagctgtggatctggatgccttaacagat

SEQ ID NO: 387262 - DNA, 120 bp, Artificial Sequence
  ENSG00000144426_59 (sequence is synthesized)
gagaaagaaagaaaagccttagaagggatgattaataattttgggcaaacaccctgtcaattattaaaggaaccacaccctccaagattatcagcagaagaagcagtgcagaagccaacc

SEQ ID NO: 387263 - DNA, 120 bp, Artificial Sequence
  ENSG00000144426_60 (sequence is synthesized)
aaaatagacacttcaaccctaaacctgtttcaacaccttcctgaactcaagtcattttttatagaggggattagtgatggtattccactattaaaggccaccatccccaaaaatcagtat

SEQ ID NO: 387264 - DNA, 120 bp, Artificial Sequence
  ENSG00000144426_61 (sequence is synthesized)
cgttcttttatgtctcaaggcagccctgagttactgataacaataagcatgaattatgttattggaacccatggatggttgccttatgacagaaacatttctaattactttacattcatc

SEQ ID NO: 387265 - DNA, 120 bp, Artificial Sequence
  ENSG00000144426_62 (sequence is synthesized)
aaggatcaaactgtgacaaatccaaaaactcagcgcagtataaatggttcttttgctcccgggctagagatcacttctaagctatttgtagtatcacatgatgcaaagttgctcttcagt

SEQ ID NO: 387266 - DNA, 120 bp, Artificial Sequence
  ENSG00000144426_63 (sequence is synthesized)
gctggatactgggataatagcattcaagtgatgtcacttacaaaaggcaaaattatctcacacatcatccggcatatggatattgtgacttgcttagctacagattactgtggaatacat

SEQ ID NO: 387267 - DNA, 120 bp, Artificial Sequence
  ENSG00000144426_64 (sequence is synthesized)
ttgatttctggttccagagatactacatgtatgatatggcaaataacacaacagggaggtgttcctgtgggcttagcatctaaaccttttcagattctttatggacacaccaacgaggta

SEQ ID NO: 387268 - DNA, 120 bp, Artificial Sequence
  ENSG00000144426_65 (sequence is synthesized)
ctgagtgtcggcatcagcactgagctagacatggcagtgtcaggatcaagggatggaacggtgattatacataccattcagaaaggtcagtacatgaggactttacgaccaccttgtgag

SEQ ID NO: 387269 - DNA, 120 bp, Artificial Sequence
  ENSG00000144426_66 (sequence is synthesized)
agttctctgttcctgaccattcctaatttggctatatcttgggaaggacatattgttgtctactccagcactgaagaaaagaccaccctcaaggataagaatgcattacatctgttttct

SEQ ID NO: 387270 - DNA, 120 bp, Artificial Sequence
  ENSG00000144426_67 (sequence is synthesized)
ataaatggcaagtatctagggtctcaaatcctgaaggaacaagtatcagatatatgtataatcggagaacacattgtcacaggcagcatacaaggattcctgtctataagagatctccac

SEQ ID NO: 387271 - DNA, 120 bp, Artificial Sequence
  ENSG00000144426_68 (sequence is synthesized)
agcttgaatctcagcatcaacccattagccatgcgactgcctatccattgtgtttgtgtcaccaaagaatacagccatattcttgtaggtttagaagatggcaaattgattgtagtgggt

SEQ ID NO: 387272 - DNA, 120 bp, Artificial Sequence
  ENSG00000144426_69 (sequence is synthesized)
gttggcaagcctgctgagatgcgttcaggtcagctttctcgaaaattttggggatcgagcaagcggctcagccagatttcagctggagaaactgaatataatactcaagattccaagtga

SEQ ID NO: 387273 - DNA, 120 bp, Artificial Sequence
  ENSG00000144426_70 (sequence is synthesized)
ttgttatttccattttctgttatgattactgaaacctgatttattgctttgtcactttaaccacatctctcaactctctgcaatgttgcaaggcttttatccctgaaaatcatttacaga

SEQ ID NO: 387274 - DNA, 120 bp, Artificial Sequence
  ENSG00000144426_71 (sequence is synthesized)
taaccacaatttgctgtggtatataaactaattcttggtctatactaagatgtatttgagaaaatacatttgatttgattttgtggcccattcctaaaggtcattgtatccatttttaaa

SEQ ID NO: 387275 - DNA, 120 bp, Artificial Sequence
  ENSG00000144426_72 (sequence is synthesized)
acaaactaaaatgagaacattaggttcaattttcttattattccaaatgataaaatttaagatttttctaataaaagagtacagataatgggacagttgagagagatggctttaaataca

SEQ ID NO: 387276 - DNA, 120 bp, Artificial Sequence
  ENSG00000144426_73 (sequence is synthesized)
ttcttaagtaatcattttcctatttactgaccactgtaatgaaaatatatcaatttatttatggaactcctgattggggataatattttaaaggtatctgttgcacacttggattttcaa

SEQ ID NO: 387277 - DNA, 120 bp, Artificial Sequence
  ENSG00000144426_74 (sequence is synthesized)
aactcggtgaaagttacaagtttgcatggtaagaataaaataagaatattgaaactggtacattagctaattctattactacttagcgtgtttctaatgagaagttactgaaatctatta

SEQ ID NO: 387278 - DNA, 120 bp, Artificial Sequence
  ENSG00000144426_75 (sequence is synthesized)
ctgtccttaataaaaattgagtagaaaaaagtggaactagagatacattttacagatgtatttccttaataatataattaagcaaaagtgctaattgtgattttgacagttgggcctttt

SEQ ID NO: 387279 - DNA, 120 bp, Artificial Sequence
  ENSG00000144426_76 (sequence is synthesized)
aagtagcatttgcagcacaatttgcatttgcaaagttccgaatttcttgactctttcttcactaagcaaatactgttttactctaataattaagagttagtagtacccaaatatgttgaa

SEQ ID NO: 387280 - DNA, 80 bp, Artificial Sequence
  ENSG00000144426_77 (sequence is synthesized)
ttagtagtacccaaatatgttgaatttttacttaggatatctgtgtgattgatgaatgaattgaaaagatatgtataact

SEQ ID NO: 387281 - DNA, 120 bp, Artificial Sequence
  ENSG00000144426_78 (sequence is synthesized)
tatagtgttaaatgttgtggttgattattaagatcttaaagtaaaagtctgatttatttaatttggaattcaaagacattgttaaacttagatttttttgtaagattatcttttgagtta

SEQ ID NO: 387282 - DNA, 120 bp, Artificial Sequence
  ENSG00000144426_79 (sequence is synthesized)
ttgagttaggtcagagagcttttacaactaccagtgttattaatctgagatttcatgtgtttgggagaacttgtgaatccctctgaaattgtgcagagactttgtatgttaaatgcattt

SEQ ID NO: 387283 - DNA, 120 bp, Artificial Sequence
  ENSG00000144426_80 (sequence is synthesized)
tcaggaaggaatggttacatggctttctttaaagggatctgtttccagtaatagtattcttttttgttccacaaatcatagatgtccttaaatccaattgtcttctcagttgaatcttag

SEQ ID NO: 387284 - DNA, 120 bp, Artificial Sequence
  ENSG00000144426_81 (sequence is synthesized)
agaaatttttcttttgcaatttcgctttcctgttgaccacagtatccagtgcccttttctttataatcttttgagtgagtaaaaaaattttaagaaataaaggattctgtttagggaaac

SEQ ID NO: 387285 - DNA, 120 bp, Artificial Sequence
  ENSG00000144426_82 (sequence is synthesized)
ttttgaatagatttgatttgatgtgagtcagggctaataaaaagctatagaagaattttctttccaataagtaaaaatcctctgttttattaaggaaaaaatagctatgttttaggtaaa

SEQ ID NO: 387286 - DNA, 120 bp, Artificial Sequence
  ENSG00000144426_83 (sequence is synthesized)
taactctgaaataaactggtacaacaattgtaaaatagaacatatttaaatgtcaaggtgtcttttcttaagacttcaggaatttgtattgaacaaagtctcaagttaagtagcaataat

SEQ ID NO: 387287 - DNA, 120 bp, Artificial Sequence
  ENSG00000144426_84 (sequence is synthesized)
tatgatgcataaatgagactggcatctattcatttattttattcttttttggggtgatgggaggtttcaatccagtgcttcacccgtggtgccaccgtggctatctttttttttatctta

SEQ ID NO: 387288 - DNA, 120 bp, Artificial Sequence
  ENSG00000144426_85 (sequence is synthesized)
cagttttttaggagatttcaagtcggcagaactaacatgattgatttttagtttttaaaatactgatttttttagaaactttttctaaatcaaaacctactaagttttattttgttattt

SEQ ID NO: 387289 - DNA, 120 bp, Artificial Sequence
  ENSG00000144426_86 (sequence is synthesized)
atccagagattttgatgtaaaaatgccttcatttttaagattacttaatactggatttgaaaattattttggatgcttataagttttctaaaacttagataattagaaaaaatgcctaag

SEQ ID NO: 387290 - DNA, 120 bp, Artificial Sequence
  ENSG00000144426_87 (sequence is synthesized)
tttatgatgttttactatgctgctttttagatggaagaaataagcagtttttactttatagtacaaataagttttgttcacaataaaatagatatcctacctggactaatactagatgta

SEQ ID NO: 387291 - DNA, 120 bp, Artificial Sequence
  ENSG00000144426_88 (sequence is synthesized)
aaaatagatatcctacctggactaatactagatgtacaaggtagtggaattatttcttatattgctttttccaaaaagtaaaaaccaaaaatgtgggccgggtgtggtggctcatgcctg

SEQ ID NO: 387292 - DNA, 77 bp, Artificial Sequence
  ENSG00000144426_89 (sequence is synthesized)
tggcacatgcctatagtcccagctacttgagaggctgagcagcctgagatcacgctactgcactccagcttgggcaa

SEQ ID NO: 387293 - DNA, 120 bp, Artificial Sequence
  ENSG00000144426_90 (sequence is synthesized)
ccaccgtgcctggccgagacatagctttttaattaaatgatttatctaaccaatatttattgtgtaccaattgtgtatcagacacttttcttttgaggtcacaaaatatatgttgtcttc

SEQ ID NO: 387294 - DNA, 120 bp, Artificial Sequence
  ENSG00000144426_91 (sequence is synthesized)
ataatgactactttataaattaggcacaaagtttcagagcgagagtttcagtttagttctttttgacttcatggccattattcctaacttttacaccatgtaatgacctaaatgatgatt

SEQ ID NO: 387295 - DNA, 120 bp, Artificial Sequence
  ENSG00000144426_92 (sequence is synthesized)
ttgggtgtttatttccattcttctctccaaatatgtgatatgtttgtataatttaaataaaattcataaatgatttggtgccctttcagggtcaaataacattttttattacaattaaag

SEQ ID NO: 387296 - DNA, 120 bp, Artificial Sequence
  ENSG00000144426_93 (sequence is synthesized)
taatacatactcattgtaaatggaaacattgatagcatattgattctcccatacaataataaatatatgaattccaaaattgttgctcatagatgaaaactggtaataattcccatactt

SEQ ID NO: 387297 - DNA, 120 bp, Artificial Sequence
  ENSG00000144426_94 (sequence is synthesized)
cctaatgtaaaaatatgtatttctgttaatgaaaaagtaagatcccacatcaagctgaataatatcaataggatacttttgtaaatatatttttgatagctcaaaatcatattataacat

SEQ ID NO: 387298 - DNA, 120 bp, Artificial Sequence
  ENSG00000144426_95 (sequence is synthesized)
taatacaaacaaaattttgaagcaaccagctacttgatagcttttccattatcagtgttaactttttctgcagttgttcagaggctgtggaagttaatgcagatttgtagaaaccttaat

SEQ ID NO: 387299 - DNA, 120 bp, Artificial Sequence
  ENSG00000144426_96 (sequence is synthesized)
atgtttgtaagtgaattttgcacaatgtacgattatattttgttgcaaaacaattttgatgccaaaatacgaaatatggagaacagacttcttgaaacattaaaaaaaaatttgtttctg

SEQ ID NO: 387300 - DNA, 120 bp, Artificial Sequence
  ENSG00000144426_97 (sequence is synthesized)
gttacagccacatcctcaaaagtcactgagtccatgttccagcttccagcatgctccagcatcctgcccagggatcttgcagggcctgcaggtcacaggcaacagaggctgccccagaac

SEQ ID NO: 387301 - DNA, 120 bp, Artificial Sequence
  ENSG00000144426_98 (sequence is synthesized)
tggaatttctttgtatgggaagaatttcagttcatgacatatattattttcattctatccagaaatatccttgaggccctttaagtaattagttgcttctgagctcttctaactatttgt

SEQ ID NO: 387302 - DNA, 120 bp, Artificial Sequence
  ENSG00000144426_99 (sequence is synthesized)
gtctgaatatactaagatgagtctttgaaaaacaattgtttctcatggaaacactgtcttctaccacagtttgtagactccaagttacataccctgtaaatacaggccactgattatagg

SEQ ID NO: 387303 - DNA, 88 bp, Artificial Sequence
  ENSG00000144426_100 (sequence is synthesized)
gagacagggtctcgcttttcccttaggctggaatgcagtgctgtgatcactaaatcctctcagctcagcctcctgagtagctaggact

SEQ ID NO: 387304 - DNA, 120 bp, Artificial Sequence
  ENSG00000144426_101 (sequence is synthesized)
tgctcggattacaggtgggagtcaccatgcccggccagcttcatttttgtgtcatagaaggtttctttcaaagtaagcatagtggcagatttgagtagttgcaacagatatgataacact

SEQ ID NO: 387305 - DNA, 120 bp, Artificial Sequence
  ENSG00000144426_102 (sequence is synthesized)
cacaaagccaaaaatatttattctttgactttttataggaaaaatttggtaactcctgatttagagcatgcaagagtaggcaaattaaaatgacaggatataagttactgtaatatttga

SEQ ID NO: 387306 - DNA, 120 bp, Artificial Sequence
  ENSG00000144426_103 (sequence is synthesized)
aaatttatgttatgtttttgaagtagagaagtatggagttaaatattaatacctttttaaatgtccaaatcctttttctgtgaggtagttttacatttacttttaagtacaaataaggaa

SEQ ID NO: 387307 - DNA, 120 bp, Artificial Sequence
  ENSG00000144426_104 (sequence is synthesized)
attagcaatatttttattattggtgttctttagggaggttccacagtattaaagggttattaccaacttttttccctgccctaacatgtaatgttagtgtttgacccttcatttattcag

SEQ ID NO: 387308 - DNA, 120 bp, Artificial Sequence
  ENSG00000144426_105 (sequence is synthesized)
tacaattatttgtcatactgtggagaatatatccagggcttaatgtcactttgaccatgaactctggaacaagctgttggaggcagggcatcacagtaaggcagtcagaattggtgactt

SEQ ID NO: 387309 - DNA, 120 bp, Artificial Sequence
  ENSG00000144426_106 (sequence is synthesized)
tcagaaaatgaggtaaatctgttgtctgagtctgatcctaaactctcagtcagctattggactggattcttctaaagcagagtatctagaataggagggatgagcagactacatttggat

SEQ ID NO: 387310 - DNA, 120 bp, Artificial Sequence
  ENSG00000144426_107 (sequence is synthesized)
aaagaatttataaggtactctttaacaatttatatcagagttagttgctatctttagcaccattgtcctgatggcctccacttctagctatacattgcctctttgaaatgagccatttgg

SEQ ID NO: 387311 - DNA, 120 bp, Artificial Sequence
  ENSG00000144426_108 (sequence is synthesized)
gagaaagcaaatatatcaattagaatgcctttaagaataaaaaacttaaaaagcaaagaaaaacagaatgcctttaggaaaaaatttaataaaaccaactcaaaattgtgcaaacaagga

SEQ ID NO: 387312 - DNA, 120 bp, Artificial Sequence
  ENSG00000144426_109 (sequence is synthesized)
aattttagtgtttcccataataaaaatcctgaggtatggtagtttcagatagtttagcatcatcagcgccaactttttttctgtattttcactctgccattctgagtattttggctttgg

SEQ ID NO: 387313 - DNA, 120 bp, Artificial Sequence
  ENSG00000144426_110 (sequence is synthesized)
ctagttcctctcatggtcacaaatgcctaacgcagttttaggcatcataggcagatccaacagtatcgcagaaataagtgaggctgttaatccattgtgtcctttcttaagagtgagaaa

SEQ ID NO: 387314 - DNA, 120 bp, Artificial Sequence
  ENSG00000144426_111 (sequence is synthesized)
ctctttctcataagttctcctcactctccagaactgggtcatataccaacccctagaccagtcacctggaatgggcatgaaatatagggcagagatggacacttgaatgaaataaaggtt

SEQ ID NO: 387315 - DNA, 120 bp, Artificial Sequence
  ENSG00000144426_112 (sequence is synthesized)
ctgctagcaaataaaaagagggaatgactatcaggtgggcaacgaataacatctgctacactgtgatgggtttaacataaaaccaaagaccctgtgcattctgtcattttatgacattta

SEQ ID NO: 387316 - DNA, 120 bp, Artificial Sequence
  ENSG00000144426_113 (sequence is synthesized)
tgtaaacaaaaaaaccctcatatttggggaaattttatcaaaatgccatgttctaacctatgagcaaatctttattatgcaagtatctatttagaatagtggtatgtaaatattattctt

SEQ ID NO: 387317 - DNA, 120 bp, Artificial Sequence
  ENSG00000144426_114 (sequence is synthesized)
ccatcagacaaatataactcttccagtaggtgagcttaaggtatgagttacaccaaaaagctttaaggagctgtattttactattagagggactgtgtccctctcattattttaagtgta

SEQ ID NO: 387318 - DNA, 120 bp, Artificial Sequence
  ENSG00000144426_115 (sequence is synthesized)
agaagaaaacttaattttgcattttggtctgattgaaataagggttgtagctatagtttcccccactttttttgcttaacaacttaattcttactctaatttaccttataatagctaatt

SEQ ID NO: 387319 - DNA, 120 bp, Artificial Sequence
  ENSG00000144426_116 (sequence is synthesized)
taaaactcgttatttttgtttttaaattaactggtatgtactccaatagataagaattttaaaagaaaaaatatgttttgcttaggaatgtgccctcattagtgtttgttttacttcgtt

SEQ ID NO: 387320 - DNA, 120 bp, Artificial Sequence
  ENSG00000144426_117 (sequence is synthesized)
gtcaattattaaaggtaagtcaacaacttaagaagtagatttaagtcaacttaagaagtagatttaagtacataacaaaatattgcagtcaagatccatgtatatagccagttactctca

SEQ ID NO: 387321 - DNA, 120 bp, Artificial Sequence
  ENSG00000144426_118 (sequence is synthesized)
gtcacagaaagatttctgtttgctcagaaagtcttatattatttccaagaggaaaaactgagtacctattagggtatgccattaaaactgtcctcatgctgggactcattccacatgtaa

SEQ ID NO: 387322 - DNA, 120 bp, Artificial Sequence
  ENSG00000144426_119 (sequence is synthesized)
aacttctaatagctaacatctgcccaaaaaggcacttgctttccagagcccaaacccagtcttaagaatcaaattgctctcggctttcggctcggaggaggccaaggtgcaactttcttc

SEQ ID NO: 387323 - DNA, 120 bp, Artificial Sequence
  ENSG00000144426_120 (sequence is synthesized)
ggtcgtcccgaatccgggttcatccaacaccagccgcctccaccatgccgccgaagttcgaccccaacgagatcaaagtcgtatacctgaggtgcaccggaggtgaagtcggtgccactt

SEQ ID NO: 387324 - DNA, 120 bp, Artificial Sequence
  ENSG00000144426_121 (sequence is synthesized)
aggtgaagtcggtgccacttctgccctggcccccaagatcggccccctgggtctgtctccaaaaaaggttggtgatgacattgccaaggcaacgggtgactggaagggcctgaggattac

SEQ ID NO: 387325 - DNA, 80 bp, Artificial Sequence
  ENSG00000144426_122 (sequence is synthesized)
cctgatcatcaaagccctcaaggaaccaccaagagacagaaagaaacagaaaaacattaaacacagtgggaatatcactt

SEQ ID NO: 387326 - DNA, 79 bp, Artificial Sequence
  ENSG00000144426_123 (sequence is synthesized)
aagaaacagaatcaacattgttcgacagatgcggcaccgatccttagccagagaactctctggaaccattaaagagatc

SEQ ID NO: 387327 - DNA, 120 bp, Artificial Sequence
  ENSG00000144426_124 (sequence is synthesized)
tgcccagtctgtgggctgtaatgttgatggccgccatcctcatgacatcatcgatgacatcaacagtggtgctgtggaatgcccagccagttaagcacaaaggaaaatatttcaataaag

SEQ ID NO: 387328 - DNA, 120 bp, Artificial Sequence
  ENSG00000144426_125 (sequence is synthesized)
caacagagatgaacatgaacctttacctactagcaccatccattcactatactacactttattgaagacacttcattagaattggaaacttcctgcgttaattcatctggtaagattctc

SEQ ID NO: 387329 - DNA, 120 bp, Artificial Sequence
  ENSG00000144426_126 (sequence is synthesized)
agtcactggacaatcaaagccatgttagttacgtgcttcattaagactgccttgcttttgtaaaacaagttcataacaccattccaagcatcaaataaatctgtttgtttcacacaatga

SEQ ID NO: 387330 - DNA, 72 bp, Artificial Sequence
  ENSG00000144426_127 (sequence is synthesized)
ggagttgaacaatgagaacacatggagatgaggaggggaacatcacacactgggcctattggtgggtagggt

SEQ ID NO: 387331 - DNA, 80 bp, Artificial Sequence
  ENSG00000144445_0 (sequence is synthesized)
agaccgcggcagggttccgtccccccgagccgcacggagctgcgggcagcgggcggactgttaaaccgcggcggcggcgg

SEQ ID NO: 387332 - DNA, 120 bp, Artificial Sequence
  ENSG00000144445_1 (sequence is synthesized)
gggagcggggcgcgctctggagacgagtcagcggcgccccgggtgggggaggcgggcgggcagctagagatcacctcagcagcccccaccacggccggaccgaaggtgcggcggcggagg

SEQ ID NO: 387333 - DNA, 120 bp, Artificial Sequence
  ENSG00000144445_2 (sequence is synthesized)
ggagccagggcgccccagcaggtttccaatacttatctacaggaatcgccatgaccccagctctgagggaggcaacagcaaagggtatcagcttttcatctttgccaagtaccatggagt

SEQ ID NO: 387334 - DNA, 120 bp, Artificial Sequence
  ENSG00000144445_3 (sequence is synthesized)
ctgacaagatgctctacatggaaagtcccagaactgtagatgaaaagctaaagggagacaccttttctcagatgcttggatttccaactcctgaacctactcttaatactaattttgtga

SEQ ID NO: 387335 - DNA, 120 bp, Artificial Sequence
  ENSG00000144445_4 (sequence is synthesized)
atttaaaacattttggctcccctcagtcttcaaaacattaccagactgtttttttaatgagatctaattctacattaaataaacacaatgagaattataaacaaaagaaattaggggagc

SEQ ID NO: 387336 - DNA, 120 bp, Artificial Sequence
  ENSG00000144445_5 (sequence is synthesized)
ccagttgcaataagctgaaaaacatactgtataatggcagcaacattcagctcagtaaaatctgtctttctcattctgaagagttcatcaaaaaggagcctctatcagataccacgagcc

SEQ ID NO: 387337 - DNA, 120 bp, Artificial Sequence
  ENSG00000144445_6 (sequence is synthesized)
agtgcatgaaagatgtacaaattattctggattcaaatataaccaaagacactaatgtagataaagtacaactacaaaactgtaaatggtatcaagagaatgcacttttggataaagtta

SEQ ID NO: 387338 - DNA, 120 bp, Artificial Sequence
  ENSG00000144445_7 (sequence is synthesized)
ctgatgctgagattaaaaagggtttattgcactgtactcaaaagaaaattgtacctggccactcaaatgtgcctgttagttcttcagctgctgaaaaagaggaggaagtacatgctcgtt

SEQ ID NO: 387339 - DNA, 120 bp, Artificial Sequence
  ENSG00000144445_8 (sequence is synthesized)
tacttcattgtgtaagcaaacagaaaattttacttagccaggctagaagaactcagaaacatttgcagatgctcctggcaaagcatgttgttaagcactatggtcagcagatgaaattgt

SEQ ID NO: 387340 - DNA, 120 bp, Artificial Sequence
  ENSG00000144445_9 (sequence is synthesized)
ctatgaaacatcaactccccaaaatgaagacatttcatgaacctaccacaattttgggtaatagtttacctaaatgcactgaaattaagccagaagttaacacattgactgcagagaata

SEQ ID NO: 387341 - DNA, 120 bp, Artificial Sequence
  ENSG00000144445_10 (sequence is synthesized)
aattgtgggatgatgcaaaaaatggctttgcacggtgtacagctgcggaaatccaaagatttgcattttctgctacagggctgttgtctcatgttgaagagggtttggattccgatgcaa

SEQ ID NO: 387342 - DNA, 120 bp, Artificial Sequence
  ENSG00000144445_11 (sequence is synthesized)
ctgatagcagctctgatgacgatttggatgaatatacccttagaaaaaatgtggcagttaactgtagtactgaatggaagtggcttgtagacagagcacgagttggcagccgatggactt

SEQ ID NO: 387343 - DNA, 120 bp, Artificial Sequence
  ENSG00000144445_12 (sequence is synthesized)
ggcttcaagctcagatttcagacctagaatgcaaaatccaacaactaacagacattcacaggcaaattcgtgcctccaaggggatagtggtcctagaagaatgtcagcttccaaaagata

SEQ ID NO: 387344 - DNA, 120 bp, Artificial Sequence
  ENSG00000144445_13 (sequence is synthesized)
ttttgaaaaaacaaatgcaatttgcagaccaagcagcttcactaaacattctagggaatcctcaggttccccaggagtgtcaagatcctgtaccggaacaagattttgaaatgtcaccaa

SEQ ID NO: 387345 - DNA, 120 bp, Artificial Sequence
  ENSG00000144445_14 (sequence is synthesized)
gcagccctactttacttcttcgaaacatcgaaaaacagagtgcacagttgactgagatcatcaacagtttgattgcccctctcaacttgtccccaacttcatcacccctctcttccaaat

SEQ ID NO: 387346 - DNA, 120 bp, Artificial Sequence
  ENSG00000144445_15 (sequence is synthesized)
cctgtagccataaatgtctggctaatggcatttacaggagtgcatcagagaatttagatgagctgtcttcctccagtagctggttacttaaccagaagcacagtaagaaaaagagaaaag

SEQ ID NO: 387347 - DNA, 120 bp, Artificial Sequence
  ENSG00000144445_16 (sequence is synthesized)
acaggacaagactgaaatcttcatccttgactttcatgagtacatcagcccgaacaaggccacttcagagtttccacaaacgaaaactgtacagattgagccctactttttattggactc

SEQ ID NO: 387348 - DNA, 120 bp, Artificial Sequence
  ENSG00000144445_17 (sequence is synthesized)
cacagactttgccttcaaaagaaacagcatttttaaacactacacaaatgccttgcctgcaatcagcttcaacttggagtagctatgaacacaattcggagtcttacctattaagagaac

SEQ ID NO: 387349 - DNA, 120 bp, Artificial Sequence
  ENSG00000144445_18 (sequence is synthesized)
atgtatcagagttagattcctctttccattctgttctatcattgccatcagatgtgcctcttcattttcactttgaaacactgttaaaaaagactgaaataaaaggcaatcttgctgaaa

SEQ ID NO: 387350 - DNA, 120 bp, Artificial Sequence
  ENSG00000144445_19 (sequence is synthesized)
cagaatcttctgcacaactgttacagggaagaaagaaaagacatttgagtgaaacagcattaggagaaagaactaaacttgaagaatctgattttcaacacacagaatcaggatcccata

SEQ ID NO: 387351 - DNA, 120 bp, Artificial Sequence
  ENSG00000144445_20 (sequence is synthesized)
gcaattttactgctgtttccaatgtcaacgttttatcaagaatccagaattcatcacgaaatactgcacgacggagattgagaagtgagagctcttatgacatagataacattgtgattc

SEQ ID NO: 387352 - DNA, 120 bp, Artificial Sequence
  ENSG00000144445_21 (sequence is synthesized)
ccatgtcattagtagccccagctaaattagagaaactccaatataaggaaatacttactccaagctggaggatggttgttcttcagcctttggatgaatataatttaggcaaagaagaga

SEQ ID NO: 387353 - DNA, 120 bp, Artificial Sequence
  ENSG00000144445_22 (sequence is synthesized)
tagaagatctttctgatgaagtcttctccctaaggcacaaaaaatatgaagagagagagcaagccaggtggtcactatgggagcaaagcaagtggcacagaagaaacagcagagcttaca

SEQ ID NO: 387354 - DNA, 120 bp, Artificial Sequence
  ENSG00000144445_23 (sequence is synthesized)
gtaaaaatgttgaaggacaggacttgcttttgaaagaataccctaataacttcagtagcagtcagcaatgtgctgctgcaagtcctcctgggcttccttcagagaaccaggatctgtgtg

SEQ ID NO: 387355 - DNA, 120 bp, Artificial Sequence
  ENSG00000144445_24 (sequence is synthesized)
catatggcttaccttctttaaatcaaagtcaagaaaccaagtctttgtggtgggaacgacgggcttttccactgaagggtgaagacatggcagccttattatgtcaagatgaaaaaaagg

SEQ ID NO: 387356 - DNA, 120 bp, Artificial Sequence
  ENSG00000144445_25 (sequence is synthesized)
atcaggttgaaaggtcaagcacagctttccatggtgaaatcttcggtaccagtgtaccagagaatggccaccatccaaaaaagcagtcagatggaatggaagaatacaaaacctttggtc

SEQ ID NO: 387357 - DNA, 120 bp, Artificial Sequence
  ENSG00000144445_26 (sequence is synthesized)
taggacttactaatgttaaaaaaaataggtgacagggaacaggttaagaaaactatgtaaatgtaggaaagatgggaggaaataaagccctgttctggatcccccatcccctccagaata

SEQ ID NO: 387358 - DNA, 120 bp, Artificial Sequence
  ENSG00000144445_27 (sequence is synthesized)
agagcatgttctgcatgtattaatcttttatgctgtttatgaaacaggcaagataagtctgtttttccttctggaaccataagggtaaccagattttcatctacagacaagtggtagtca

SEQ ID NO: 387359 - DNA, 120 bp, Artificial Sequence
  ENSG00000144445_28 (sequence is synthesized)
tttgtgtttatcatgcaacttacttacaaacaccaagatattaattgctgcaacttgatgtcaaatcacattactgggtaatttttaagactatgtacccacaccatacatacatacata

SEQ ID NO: 387360 - DNA, 120 bp, Artificial Sequence
  ENSG00000144445_29 (sequence is synthesized)
tatatatacacatacatacaaacctgtgtgccaagtgacagctatttttttatatacatggtaattcattaaaattgccttagtaatatattagaatatacaaatatgtgtgtataaaat

SEQ ID NO: 387361 - DNA, 120 bp, Artificial Sequence
  ENSG00000144445_30 (sequence is synthesized)
aaacatacacacacacacacacccctatgtagtttttaaaacactggcaatgacccactccccttggaaatgcatgtatgaactaccctatgaaatgtaagctgcagaatagataaaaca

SEQ ID NO: 387362 - DNA, 120 bp, Artificial Sequence
  ENSG00000144445_31 (sequence is synthesized)
caggtttccactaataaaagacatctgaacgtcctgaatatagagacagaagttttttgttgttgttgttgttgttttaacatgtttaaccaacagaagttatttacagaaattcatata

SEQ ID NO: 387363 - DNA, 120 bp, Artificial Sequence
  ENSG00000144445_32 (sequence is synthesized)
tccaggcaacacaaaactcctttattcaaaatcactgctatctttgggactaaacacaggctactttctgtttactcctaacaaaataaagcaagcaaatttgagtcaaatattggtgca

SEQ ID NO: 387364 - DNA, 120 bp, Artificial Sequence
  ENSG00000144445_33 (sequence is synthesized)
ctttaatactatcacatctttgaaaactcaatttgagttttaccaattaatgtgtctcatgaagagaagacaccagttttaaaatgagccacaaacagtaaagccctatcagtataaaat

SEQ ID NO: 387365 - DNA, 120 bp, Artificial Sequence
  ENSG00000144445_34 (sequence is synthesized)
ttgaaaaaaaaaaaaaagatgattgtatttctagattagcaagaaattagttaattctggctgatttctatttctagctaatttggtcattctttgccatagcttactctattcaaataa

SEQ ID NO: 387366 - DNA, 120 bp, Artificial Sequence
  ENSG00000144445_35 (sequence is synthesized)
acatatattcttgcttgcatcctagattggaaattaaaatttttcaaagaacaaagcttcaatattggatactgaagagtatacatgaaagaaaattccttttgaagctattaaaccatt

SEQ ID NO: 387367 - DNA, 120 bp, Artificial Sequence
  ENSG00000144445_36 (sequence is synthesized)
tttttcctatgtgaaagttgaggacaatttatataactcactttttgtcatgtaaaaaaggttactcaagttgtactacccacataactgaaaatattggccatttggccttatctgtga

SEQ ID NO: 387368 - DNA, 120 bp, Artificial Sequence
  ENSG00000144445_37 (sequence is synthesized)
gatttgacactaagtttttgttagagattggaaattatactagtccttttaaggggtaaaaaattcaattcaatactgacaaacttttgcttgtagttttactgtacatttatttttaaa

SEQ ID NO: 387369 - DNA, 120 bp, Artificial Sequence
  ENSG00000144445_38 (sequence is synthesized)
gaaaaagaaaacaaaagccagacaaacccaagttgtccaggcaaataaactcaaatctttgtcacgtctgatattataatcttctatgtaagttttttaattaaagttatttctatatgc

SEQ ID NO: 387370 - DNA, 120 bp, Artificial Sequence
  ENSG00000144445_39 (sequence is synthesized)
gaggtaggtatcaatggaatagcttagcttttaaattcaactttgcctattttatcttattttgattttgttttgatattttaagtattatagctactttttttgtacattaggggctac

SEQ ID NO: 387371 - DNA, 120 bp, Artificial Sequence
  ENSG00000144445_40 (sequence is synthesized)
tagagtacaatcaatataccatggatgcattttttgataatattaaatttacacaattaaggtaatgataaatctaggaatgagggagagagatttctgggaagtttcataatgtttctt

SEQ ID NO: 387372 - DNA, 120 bp, Artificial Sequence
  ENSG00000144445_41 (sequence is synthesized)
actttctttcaggaaaacgtagatttgggctttagagttagatgggatagagcagaatctaggggatttttgagggacggtgcttccaagtttgtgtcaccggtgtgctgaggaagggac

SEQ ID NO: 387373 - DNA, 120 bp, Artificial Sequence
  ENSG00000144445_42 (sequence is synthesized)
cggtcttgctggaaaaagtcagattgcgtggtgtttggtagcaagaaataccaggcggtatcctggccgtttcagaaaccacaggaaaggaaagaggctggctttgcagtcgggagggca

SEQ ID NO: 387374 - DNA, 120 bp, Artificial Sequence
  ENSG00000144445_43 (sequence is synthesized)
ggcactggatggacgttcttgtaatgttttcttactctgggagagtccgtttttgtttgtttttttgtttgaactgtggtaagcacattccgtttttgattccccaaacttcaggacatt

SEQ ID NO: 387375 - DNA, 120 bp, Artificial Sequence
  ENSG00000144445_44 (sequence is synthesized)
aattattattagactattttctgttccatatatagcagcaattatcttagtttccaggtatgttgacaagaaatagattttctaaaatcttaatgctataatctttttttttttttttaa

SEQ ID NO: 387376 - DNA, 120 bp, Artificial Sequence
  ENSG00000144445_45 (sequence is synthesized)
cacatccagccaccataatcttttatgttataaaacttttgttgaatttttttaatgttttgtttgttaaattattgtgtgtgagtatatacatactatttaaaaataaatttactcaac

SEQ ID NO: 387377 - DNA, 120 bp, Artificial Sequence
  ENSG00000144445_46 (sequence is synthesized)
ttttctatctaggaaaaacccatacaggaataatgaaattattgagctataaataagcatattttctattcttgaataggctgtggacaaggcctaatctttgtttaagtgatctagtta

SEQ ID NO: 387378 - DNA, 120 bp, Artificial Sequence
  ENSG00000144445_47 (sequence is synthesized)
atatgtgtatctaactaaaaaactttagtctgcacatagggagccctcattgtctttgggagtgtatcagttgagagtacatgtaagttgacttactactttttttccttaactctctac

SEQ ID NO: 387379 - DNA, 120 bp, Artificial Sequence
  ENSG00000144445_48 (sequence is synthesized)
tcgtactcatagctttcagaactgacctttaacaattcagttagtttttgctagcttagtataactaaaacaaaactataatgtcagctgtaagatatctattgaatgcttattatgtgc

SEQ ID NO: 387380 - DNA, 120 bp, Artificial Sequence
  ENSG00000144445_49 (sequence is synthesized)
tagacactaagattcagttgtgagcaacatattcacaacctctgccttttggggcatgtacttgagagagaggtatctcgatattgaataataaaaagcagagaaaaatagtttcagtta

SEQ ID NO: 387381 - DNA, 120 bp, Artificial Sequence
  ENSG00000144445_50 (sequence is synthesized)
tcacaccgtgataacactacagaccaactctgtccaatagaaacttctgagatgttggaaatcttttatgtctatgccatctaataggcactagacttatgtggatatttaacacttaag

SEQ ID NO: 387382 - DNA, 120 bp, Artificial Sequence
  ENSG00000144445_51 (sequence is synthesized)
atttggccagtgatactaaggaaatgagattttaattttatttaattgactaaattttagttgaaatggtcagataaagcataatttttaatttagttttcaggggatctattactgtcc

SEQ ID NO: 387383 - DNA, 120 bp, Artificial Sequence
  ENSG00000144445_52 (sequence is synthesized)
ccaaattgatgtgaattattgtttgtatatatagcattttgggggaaagaagtctgtcacacatggatacatacaggggcacaacactcactggggctttttaaagggtgcagggtggga

SEQ ID NO: 387384 - DNA, 120 bp, Artificial Sequence
  ENSG00000144445_53 (sequence is synthesized)
acccctgaacttaaaagttaaaaataaactttttcaaattctcaaaaataaatgagaattacagaattagaagccaaacacattgatatttactatgaaatagaagatcagtatattagt

SEQ ID NO: 387385 - DNA, 120 bp, Artificial Sequence
  ENSG00000144445_54 (sequence is synthesized)
ttttatagtgagaaataaaatataaagcaaagtaagcattcgggtcttctagtgttctgatatcactgtaattgaaatttgtttgcatgtggaatttatagtagttaataagcgcagatt

SEQ ID NO: 387386 - DNA, 120 bp, Artificial Sequence
  ENSG00000144445_55 (sequence is synthesized)
atttttctggctggcattgtgctagttatttaacatatgatatctcatttaattctttcaacaaccctagcaggtagttgttatccttatttcacttaagaagaaacagactcagcatgg

SEQ ID NO: 387387 - DNA, 120 bp, Artificial Sequence
  ENSG00000144445_56 (sequence is synthesized)
gttaaataatttaccaatggttaaaaagccaagtaaggggcagaaacaggattttgctcatatatatgactctaaacacatacttattctcttgtaatatgctgttttctcaacattgca

SEQ ID NO: 387388 - DNA, 120 bp, Artificial Sequence
  ENSG00000144445_57 (sequence is synthesized)
tcactgatacttagagctacaagaattattaggtacatgtgttctgaaagaagtctgaaaatttaccaatttttgtatatacaatgcttgtgaagtatttaaataaaatgtagtgggcac

SEQ ID NO: 387389 - DNA, 120 bp, Artificial Sequence
  ENSG00000144445_58 (sequence is synthesized)
caagggaaagcatcatgcaagatgagaacaagttatgttatatgcctgcaacccaaaggatctaaactacatcatttggaagatttttattattctccagcttccagttagaaatctaaa

SEQ ID NO: 387390 - DNA, 120 bp, Artificial Sequence
  ENSG00000144445_59 (sequence is synthesized)
atatatcatatctccatcacctggtatgtcacatttacagttcttgtactctatatgcctttttatgtctttatacttactatttttgcattctaagaaaaataaaatctaagaaaagaa

SEQ ID NO: 387391 - DNA, 120 bp, Artificial Sequence
  ENSG00000144445_60 (sequence is synthesized)
gtaacgatattttctgtactgaaatctaatcctctaaatacagagaatctaataaatcttattttatcaattttttttcagtagatattagaactaagcaatgccttgacaattaaattt

SEQ ID NO: 387392 - DNA, 120 bp, Artificial Sequence
  ENSG00000144445_61 (sequence is synthesized)
gttgtagaggaattaatctagtcacatgcacggttaatgttctatctgtgtaagttgattctttaattccttctaaaccaacttgatttactttgggaaattactaggtttttatcttgt

SEQ ID NO: 387393 - DNA, 120 bp, Artificial Sequence
  ENSG00000144445_62 (sequence is synthesized)
taaattttgagcattttattggtaacatggctgtgctgttgaaatgtttctgagtaatggtaattcagtgttctttttctaatgtgctgttatacatggaggtttccctgtcataaaata

SEQ ID NO: 387394 - DNA, 120 bp, Artificial Sequence
  ENSG00000144445_63 (sequence is synthesized)
tttctccatttataatctgcattgaatttctcaatgcagagggaagaaaactgcgtacctataagtatagtcaacctcaagagtatctgtactttataactgagtaaatgaggcttatac

SEQ ID NO: 387395 - DNA, 77 bp, Artificial Sequence
  ENSG00000144445_64 (sequence is synthesized)
tgctgatctcgaactcctgatctcaggtttccaatacttatctacaggaatcgccatgaccccagctctgagggagg

SEQ ID NO: 387396 - DNA, 120 bp, Artificial Sequence
  ENSG00000144445_65 (sequence is synthesized)
agccctactttacttcttcgaaacatcgaaaaacaggtaaagtcaaagtaaggatatcagtggtatgaaatgacttttcattgattttgtaaactattcaaataaacatcattatatgtg

SEQ ID NO: 387397 - DNA, 120 bp, Artificial Sequence
  ENSG00000144451_0 (sequence is synthesized)
gggggcccgaagcgccagagatggctgctcagcgagggatgcccagctccgccgtgagggtcctggaagaggcgttgggcatgggtttgacggcagccggggacgcgagggacacggcgg

SEQ ID NO: 387398 - DNA, 120 bp, Artificial Sequence
  ENSG00000144451_1 (sequence is synthesized)
acgcggtggcggctgagggcgcctactacctggaacaggtcaccataactgaagcatctgaagatgactatgaatatgaagagataccagatgacaattttagcatcccagaaggtgaag

SEQ ID NO: 387399 - DNA, 120 bp, Artificial Sequence
  ENSG00000144451_2 (sequence is synthesized)
aagatctggcaaaagcaattcagatggcccaagaacaggctacagatactgaaattttggaacggaaaacagttcttccttcaaagcatgcagtacctgaagtaatagaagactttctct

SEQ ID NO: 387400 - DNA, 120 bp, Artificial Sequence
  ENSG00000144451_3 (sequence is synthesized)
gcaatttcttgatcaaaatgggaatgaccagaactcttgattgctttcagtctgaatggtatgagttaatacagaaaggagtgactgaacttagaactgttgggaatgttccagatgtct

SEQ ID NO: 387401 - DNA, 120 bp, Artificial Sequence
  ENSG00000144451_4 (sequence is synthesized)
acacccagattatgcttttggaaaatgagaacaaaaatttaaagaaagatttgaagcactacaaacaagcagctgacaaagctagagaagatttgctgaaaattcagaaagaacgtgatt

SEQ ID NO: 387402 - DNA, 120 bp, Artificial Sequence
  ENSG00000144451_5 (sequence is synthesized)
ttcatcgaatgcatcataagcgaatagtccaggaaaaaaacaaattaattaatgacctcaaagggttgaagttacattatgcatcttatgaaccgactataagggtgttacatgagaaac

SEQ ID NO: 387403 - DNA, 120 bp, Artificial Sequence
  ENSG00000144451_6 (sequence is synthesized)
accacactttactgaaggagaaaatgctgacctccttggaaagagacaaagtagttgggcagatttctggacttcaagaaacattgaagaaactgcaaagaggacatagttaccatggtc

SEQ ID NO: 387404 - DNA, 120 bp, Artificial Sequence
  ENSG00000144451_7 (sequence is synthesized)
ctcaaattaaagttgatcatagtcgtgaaaaagaaaatgcaccagaaggtcctactcagaaaggtcttcgtgaagccagggaacaaaacaaatgtaaaacaaagatgaaaggcaatacaa

SEQ ID NO: 387405 - DNA, 120 bp, Artificial Sequence
  ENSG00000144451_8 (sequence is synthesized)
ctttctccagcaaaatttgactacaagctgaaaaacatttttagactccatgaacttccagtgagctgtgtctccatgcaaccccacaaagacatcctagtctcctgtggcgaggaccga

SEQ ID NO: 387406 - DNA, 120 bp, Artificial Sequence
  ENSG00000144451_9 (sequence is synthesized)
ctctggaaggtgttgggccttccaaaatgcaatgtgcttctcacgggatttggccacactgactggctttcagactgctgcttccatcccagtggcgacaaattggctacttcaagtggt

SEQ ID NO: 387407 - DNA, 120 bp, Artificial Sequence
  ENSG00000144451_10 (sequence is synthesized)
gacactacagttaaattatgggatctatgtaaaggcgattgcattttgacctttgaaggacacagccgcgcagtgtggtcctgcacatggcactcctgcggcaattttgtggcttcctcc

SEQ ID NO: 387408 - DNA, 120 bp, Artificial Sequence
  ENSG00000144451_11 (sequence is synthesized)
tcactggataaaactagcaaaatttgggatgttaatagtgaaagatgcagatgtactttgtatggacatacagattctgtgaacagcattgagttttttcctttctccaatactcttctc

SEQ ID NO: 387409 - DNA, 120 bp, Artificial Sequence
  ENSG00000144451_12 (sequence is synthesized)
acaagctctgcagacaagaccctgtctatatgggatgcaagaacaggtatatgtgagcagtcactttatggtcacatgcattctatcaatgatgccatttttgatcccaggggtcacatg

SEQ ID NO: 387410 - DNA, 120 bp, Artificial Sequence
  ENSG00000144451_13 (sequence is synthesized)
atagcatcctgtgatgcctgtggggttacaaagctgtgggactttcggaagctgttaccaattgtgtccatcgatataggtccaagtcctggcaatgaggtgaattttgattcatcaggt

SEQ ID NO: 387411 - DNA, 120 bp, Artificial Sequence
  ENSG00000144451_14 (sequence is synthesized)
cgagttttagctcaggcaagtggcaatggtgttatccatttgctagatcttaaatctggggagattcacaaattgatgggccacgaaaacgaggcacacacggttgtgttttctcacgac

SEQ ID NO: 387412 - DNA, 120 bp, Artificial Sequence
  ENSG00000144451_15 (sequence is synthesized)
ggggagattctcttttctggaggctctgacggcacagttcgaacgtggtcttgaccgtcagcacatcccgctgcagagggcattccctttaaggcttgaaaatgcctcctgtagtcccaa

SEQ ID NO: 387413 - DNA, 120 bp, Artificial Sequence
  ENSG00000144451_16 (sequence is synthesized)
accagcaaagaactggttaaatgtgccagcaggtaacatttacagtctgctttaaaacatgctttggacatatattttagtgctcatactgttactaataaaaaaataactttatgctca

SEQ ID NO: 387414 - DNA, 120 bp, Artificial Sequence
  ENSG00000144451_17 (sequence is synthesized)
cgggtaatgggtgttgggacgaaggcgagggcctcccactggcggcgccttttgagccttggggccactccggaggagcctctgttggacttcaagataccagatgacaattttagcatc

SEQ ID NO: 387415 - DNA, 120 bp, Artificial Sequence
  ENSG00000144451_18 (sequence is synthesized)
aactataatggaaggacttctgcttctggtcattatacctggtaccagactagccttctctgtgtaaataactctaaagctaagctgtaagatcagacaactacttttaggcagtagaaa

SEQ ID NO: 387416 - DNA, 120 bp, Artificial Sequence
  ENSG00000144451_19 (sequence is synthesized)
acagacagctcaagtaacagaaggcaattgacagaaggaaaatttataaggtgagctctgccatcaccatggctttgggtctgtggaaagttccaaactgagctttgtggagatggaagc

SEQ ID NO: 387417 - DNA, 120 bp, Artificial Sequence
  ENSG00000144451_20 (sequence is synthesized)
caataagagcatgacaatcctgataattggaaatgtcagagaccctagttcacagcttttgaagccactggaatctgtagggaaagacaccagagaagagagctgcaatgaggagtggct

SEQ ID NO: 387418 - DNA, 120 bp, Artificial Sequence
  ENSG00000144451_21 (sequence is synthesized)
cagtttgtgagggagtttactatgagtccttagctgaggctgcaatactatacataacaacactacctgacacttacaagagagatacaattatataggatcaagaggaggccagagatt

SEQ ID NO: 387419 - DNA, 120 bp, Artificial Sequence
  ENSG00000144451_22 (sequence is synthesized)
gtagaagttaagtagtgatgcgaaacattgcaaatctggccatgcctgggtggaaagacctctttcacaccttgttaacaacacagtaacattcagcatcccatatccgccttataaaac

SEQ ID NO: 387420 - DNA, 120 bp, Artificial Sequence
  ENSG00000144451_23 (sequence is synthesized)
caggaacaaagcttacacagcattcttagagaggacacagaatttggagtttgagtcttgccaagttatagggccttgagaaacatttagggctttccatggatccaccctaacgaagca

SEQ ID NO: 387421 - DNA, 120 bp, Artificial Sequence
  ENSG00000144451_24 (sequence is synthesized)
taaaattaagcctaggattttagggtcatcagccaaaaatggaactgccttctagaacaaaaaatgacatccttttgaggaagacagtcatccagagtctttacaatcttttacccacat

SEQ ID NO: 387422 - DNA, 120 bp, Artificial Sequence
  ENSG00000144451_25 (sequence is synthesized)
tgcctagtacataattaaacatttctagatatgaataggaacaggaaaatgtgacccataatcaagacaacaagcaataaatggaaacctacccttaagtagctaaactgttgcatttag

SEQ ID NO: 387423 - DNA, 120 bp, Artificial Sequence
  ENSG00000144451_26 (sequence is synthesized)
cagatagaaagtgctaaagtagatactttgattatgttcaaggacttaatggaaaatactaataagtgaacagatggggaatttaagcaaagaaatgagaacaagcatacattccaaagc

SEQ ID NO: 387424 - DNA, 120 bp, Artificial Sequence
  ENSG00000144451_27 (sequence is synthesized)
cataagcgaatagtccaggaaaaaaacaaattaattaatgacctcaaaggatttctggacttcaagaaacattgaagaaactgcaaagaggacatagttaccatggtcctcaaattaaag

SEQ ID NO: 387425 - DNA, 120 bp, Artificial Sequence
  ENSG00000144451_28 (sequence is synthesized)
ggcccttcagggagcccagacctagaagctccacgagccagtgctgtgacaccctctttggggctgtgcagtttcagatgtttccaagcatccagacgccactgaattctcatccagatt

SEQ ID NO: 387426 - DNA, 120 bp, Artificial Sequence
  ENSG00000144451_29 (sequence is synthesized)
tgggtgcccacagcagaagttgcttggagtgcatctgatccagctccaggcttacacagatccagtgcctgtgccagtgcctggagctgcctgccccactgcagcagctggcatgcctgg

SEQ ID NO: 387427 - DNA, 120 bp, Artificial Sequence
  ENSG00000144451_30 (sequence is synthesized)
ctgtgcacagtggctggacctggttctcacttgctcacacacccctcacctctctgctcctggcttgcctttggctggtgtggaatctgggctgtagcaagagctgagcacagcctacca

SEQ ID NO: 387428 - DNA, 120 bp, Artificial Sequence
  ENSG00000144451_31 (sequence is synthesized)
acaattttagcatcccagaaggtgaagaagatctggcaaaagcaattcagatggcccaagaacaggctacagatactgaaattttgcaaagctagagaagatttgctgaaaattcagaaa

SEQ ID NO: 387429 - DNA, 120 bp, Artificial Sequence
  ENSG00000144451_32 (sequence is synthesized)
ctttcttgatgttacctcaaattgaagttgccaatggtaggactgcacaatctgaatacatatgatgagatattttatgcctcgttttccatctgcttgagttagcaccctttcaccatt

SEQ ID NO: 387430 - DNA, 120 bp, Artificial Sequence
  ENSG00000144451_33 (sequence is synthesized)
ggccatttcatactacccaatttccatgtaatttgtctctctaatcttgtcagccccttgaaatgaaggtgcactttattcagggattattttcatgctcaagatcattttgtgaattat

SEQ ID NO: 387431 - DNA, 120 bp, Artificial Sequence
  ENSG00000144451_34 (sequence is synthesized)
tttatatcattataaataatcctactgttaccttttcaatacaagaatttgatttcccagcattaatgggttcattcaatagtagtgccaagttcatacagcaacactgtaattgcattt

SEQ ID NO: 387432 - DNA, 120 bp, Artificial Sequence
  ENSG00000144451_35 (sequence is synthesized)
taatcagaaactagtaatatatgctgaagatactttgttaaattaacattattgctgtgattaacaaagcacactgttaagtgaatattgcatgaattaaattacatactagatcactta

SEQ ID NO: 387433 - DNA, 120 bp, Artificial Sequence
  ENSG00000144451_36 (sequence is synthesized)
catagtttaggatttcatgtgctatctagctacctcttcccacaaaatctacatccttatctgttttactcataaaaatgtaattcttgaagctcataagcatagctacttaaatgattc

SEQ ID NO: 387434 - DNA, 120 bp, Artificial Sequence
  ENSG00000144451_37 (sequence is synthesized)
ctttgcttaatagaaacatctttgttcactacaacaagcttatctgcactacattttttaggaataaaggatatgtgatatgtattatttgaaaactggcattcaattgccacacttggc

SEQ ID NO: 387435 - DNA, 120 bp, Artificial Sequence
  ENSG00000144451_38 (sequence is synthesized)
agttatagttctgaaatagttacttgcagaaatgctatctattaatttaaattttggtttaaaaaactcataatatttttttttgagacaaggattcactctgttgcccaggctggagtg

SEQ ID NO: 387436 - DNA, 120 bp, Artificial Sequence
  ENSG00000144451_39 (sequence is synthesized)
caggctggagtgcaatagcacagtcagagcatattgcagccccaaacttgtggcctcaagtaattctcctcctttagcctccagaatagctaagactacaggcaagcaccaccatgcctg

SEQ ID NO: 387437 - DNA, 120 bp, Artificial Sequence
  ENSG00000144451_40 (sequence is synthesized)
agaaatggagtgccactatgttgcccaggctggtcacaaattcctgtcctcaagcaatcctcccaaagtgctaggattactggcatgagccactgcacccagccttaatcatttttagtg

SEQ ID NO: 387438 - DNA, 120 bp, Artificial Sequence
  ENSG00000144451_41 (sequence is synthesized)
cacagtttagtggtattaattatagtcatgttgttgtaccacagatctctagaactttttcattttgcaaaactgacactctgtacccattaaacaataaatcctcattttcaaaatgag

SEQ ID NO: 387439 - DNA, 120 bp, Artificial Sequence
  ENSG00000144451_42 (sequence is synthesized)
atagcttctctagatttagtaaagctctcttctttttcattattttgcttttctgtgaaaggggacttcaaatttattttgaggaaacaaatgtaaacactcatcttaaagtatgtatat

SEQ ID NO: 387440 - DNA, 120 bp, Artificial Sequence
  ENSG00000144451_43 (sequence is synthesized)
taagactattttaataatcagagcaaactttcatttatttagctattttcagtttgcagcctaccatgccaaacattactttattgctgttccctgcagtccttttgacaaggatggagc

SEQ ID NO: 387441 - DNA, 120 bp, Artificial Sequence
  ENSG00000144451_44 (sequence is synthesized)
actgtcagagctgcactggagctggagacagggatagaggacactcaggatgacagcccccacccagaatcctggagaggaaagttgctattgttgaaaacataatggatctggttgtta

SEQ ID NO: 387442 - DNA, 120 bp, Artificial Sequence
  ENSG00000144451_45 (sequence is synthesized)
ttaaagtacctgaagtcagctgcataaattgggaagcatatgcacgcttctgctttactgtggcaatttaaaacaatataaatttcataaaattctcattgaaaaaaaatgaccaagaaa

SEQ ID NO: 387443 - DNA, 120 bp, Artificial Sequence
  ENSG00000144451_46 (sequence is synthesized)
agccctaaaaatagtaggaaatgttacccatcattacatcctccaccatcaaggccaagtagtcaatacccacgccagataagcactgtgtgcctatgtgaggtggtcattaaagaatga

SEQ ID NO: 387444 - DNA, 120 bp, Artificial Sequence
  ENSG00000144451_47 (sequence is synthesized)
tgaggaaaggaccacagaaatcaactggtgtcttcccaaagtcctggggacgctgaggaacacacatgggtctcataatgtccatgtccttcccttatacctcaatgctctttccacctt

SEQ ID NO: 387445 - DNA, 120 bp, Artificial Sequence
  ENSG00000144451_48 (sequence is synthesized)
gccctggtggaaagtcttgtccatatcacctctaatccagcattctcaaagcagcacaaaactgtcttcagaagactgaatgtttctacattccttcatattaattccaggaaaagaatt

SEQ ID NO: 387446 - DNA, 120 bp, Artificial Sequence
  ENSG00000144451_49 (sequence is synthesized)
cccaagtcaaataattcaaatgctaagtgtattttttaaaattgtttttaggcactttctcttaggaatgtaaactctttgagggcagggtctatgtcctttcatcattgtgttcatcag

SEQ ID NO: 387447 - DNA, 120 bp, Artificial Sequence
  ENSG00000144451_50 (sequence is synthesized)
gctttatcattgtctagcatatggtggatggataaacaaccatctccgtaaagatatctgatttctattccaactacacaagctccttttctagtatacacagccaccaaaataatgctt

SEQ ID NO: 387448 - DNA, 120 bp, Artificial Sequence
  ENSG00000144451_51 (sequence is synthesized)
aaaacatatgtctcagaatgacaatcaagatagaagtcttaaagcaagaaagatgttttccttgtttgttcttctataaattctctaaagattcataaaatttagctatacaatctactt

SEQ ID NO: 387449 - DNA, 120 bp, Artificial Sequence
  ENSG00000144451_52 (sequence is synthesized)
cagataatggcttctagatgctatgtagaaattggcccattatgcaagataaaaatcatctaagattataatgcaaatcagtcatcataaaaaatataaagatctagaatttatagaaat

SEQ ID NO: 387450 - DNA, 120 bp, Artificial Sequence
  ENSG00000144451_53 (sequence is synthesized)
tctactgagcatttattttatgtgaaagaaaaatacatccacagtacatacataattaaatgtaaatgtatgctgaaaaagttcataatcatgaaaaatacatatcttgatggactactt

SEQ ID NO: 387451 - DNA, 120 bp, Artificial Sequence
  ENSG00000144451_54 (sequence is synthesized)
ttatttggcaacctttaccttccaatatctgtcataatattagagtagattagaaattatatctacagtctcaactcattttatgaaatatgagtaacggtaggtatagataatttattt

SEQ ID NO: 387452 - DNA, 120 bp, Artificial Sequence
  ENSG00000144451_55 (sequence is synthesized)
gaaatatgagtaacggtaggtatagataatttattttccctcagctgtacataaagatggataattacatctttctaaaaaaatgaagctgaccaggcgcggtggctcacgcctgtaatc

SEQ ID NO: 387453 - DNA, 63 bp, Artificial Sequence
  ENSG00000144451_56 (sequence is synthesized)
tgggcgatgtgcgactgtagttcccagttattcgaaaagctgaggcaggagaattgcttgaac

SEQ ID NO: 387454 - DNA, 120 bp, Artificial Sequence
  ENSG00000144451_57 (sequence is synthesized)
atccagtgcccttgctactgaatgattaaaacttgacaagatattcagaggtcaccataactgaagcatctgaagatgactatgaatatgaagagataaaagcagttgcccacaaactaa

SEQ ID NO: 387455 - DNA, 120 bp, Artificial Sequence
  ENSG00000144451_58 (sequence is synthesized)
tcctgaatttattagaagtgacgtttattgacatttacaaggaagtcagaagaaagcagttattcatttttcatggatcttcagaatgacatgataccagatgacaattttagcatccca

SEQ ID NO: 387456 - DNA, 120 bp, Artificial Sequence
  ENSG00000144451_59 (sequence is synthesized)
caaaagcaattcagatggcccaagaacaggctacagatactgaaattttgcacctttcatggtacctggtacatgggagatgttcaccaattatatgttgaataaatatcctacgtaaag

SEQ ID NO: 387457 - DNA, 120 bp, Artificial Sequence
  ENSG00000144451_60 (sequence is synthesized)
ttttcttctttttcttttggactaaataaaagagttgagtgaagctgatatatgtaatataccagagccttaatttttgaaaactgaatttttctagttgtaaagaatgtgagaggcttc

SEQ ID NO: 387458 - DNA, 120 bp, Artificial Sequence
  ENSG00000144451_61 (sequence is synthesized)
attagcaaattaattaaacagatgatcagaactatcacaattataacttaccaacaagaagggaatgcaggtagttgtttaggagatggtacattttttatataacattcacttccttgt

SEQ ID NO: 387459 - DNA, 120 bp, Artificial Sequence
  ENSG00000144451_62 (sequence is synthesized)
gtatttgatagtcttttcatggtttataacattttctcctgtaaagataggctaatttctgaaataataattaaatttatagaaagccgagaggaaattgctagtttattcctggtagag

SEQ ID NO: 387460 - DNA, 120 bp, Artificial Sequence
  ENSG00000144451_63 (sequence is synthesized)
gaatttctgtatttgaaaattctccagaaggaataatataaactgtggactttgggtgataatgatatgtaggttcgtcagttgttaacaaatgtatccctctgttgggggctattgata

SEQ ID NO: 387461 - DNA, 120 bp, Artificial Sequence
  ENSG00000144451_64 (sequence is synthesized)
atggggaaggctgtgcatgtgtgggagtaggaggtgtatgggacatctctgtaccttctaatcaattttgctatgaacttaaaactgctctaaaaataaagtttattaaaaaaaagttaa

SEQ ID NO: 387462 - DNA, 120 bp, Artificial Sequence
  ENSG00000144451_65 (sequence is synthesized)
tgttgcccacctggctgtccatggcaaaagtgggtggggtcatgtgcagcctcctgccacctgagtgtttcccgggacatcaggaggctgtatcctgcagctgaatttacacagaagtgg

SEQ ID NO: 387463 - DNA, 120 bp, Artificial Sequence
  ENSG00000144452_0 (sequence is synthesized)
gtggataggcaattaatttcatggagagtaggaggtgtgggttcagctgctgcttttttttttttttcagtgaggcattatctgaatgatgctcattctctcttgagtctggacttcgtg

SEQ ID NO: 387464 - DNA, 120 bp, Artificial Sequence
  ENSG00000144452_1 (sequence is synthesized)
caacaagcagcaactggatattattttaaaataagcataagccacccaaagatactgatctgggtccttcttttggaagaagagttgattgagaagtgcctcttggttaaggattaacca

SEQ ID NO: 387465 - DNA, 120 bp, Artificial Sequence
  ENSG00000144452_2 (sequence is synthesized)
cagggaaaaatccagcagaaacagaagaactgtgggtttcttaccccagccctcaaggaagctatgccgtgaaaggggtactgatacactgacatacagcaagttggacggggcatcagt

SEQ ID NO: 387466 - DNA, 120 bp, Artificial Sequence
  ENSG00000144452_3 (sequence is synthesized)
tcttcatttgtggagtggagaaaagaagaggaaatctctcatttggggcatttgaaggatggcttccctgtttcatcagcttcagatcctggtctggaaaaattggctaggtgtaaaaag

SEQ ID NO: 387467 - DNA, 120 bp, Artificial Sequence
  ENSG00000144452_4 (sequence is synthesized)
gcagccgctttggacacttgtcttgatcttatggccagtcattattttcataattttggctattactcggaccaaatttcctccaactgcaaaaccaacttgttacctcgcacctcgaaa

SEQ ID NO: 387468 - DNA, 120 bp, Artificial Sequence
  ENSG00000144452_5 (sequence is synthesized)
ccttcctagtactggattctttccattcctgcagaccctactctgtgacacagactctaaatgcaaagacacaccctatggcccacaagatctgcttcgtaggaaaggaattgatgatgc

SEQ ID NO: 387469 - DNA, 120 bp, Artificial Sequence
  ENSG00000144452_6 (sequence is synthesized)
actatttaaagacagtgagattctgagaaagtcatccaacctggataaggacagcagtttatcattccagagcacccaagttccagaaagaaggcatgcatcactagccacagtatttcc

SEQ ID NO: 387470 - DNA, 120 bp, Artificial Sequence
  ENSG00000144452_7 (sequence is synthesized)
cagtccaagttctgatttggaaatccccggaacatatactttcaatggcagtcaagtgctcgcacgaattcttggcttggaaaagctgttaaagcaaaattcaacttcagaagatatacg

SEQ ID NO: 387471 - DNA, 120 bp, Artificial Sequence
  ENSG00000144452_8 (sequence is synthesized)
aagagaactatgtgacagctattcaggatacattgtggatgatgccttctcttggacctttctaggaagaaatgtttttaacaaattttgcctttctaacatgacccttttagagtcttc

SEQ ID NO: 387472 - DNA, 120 bp, Artificial Sequence
  ENSG00000144452_9 (sequence is synthesized)
tctccaagaactaaacaaacagttctcccagctatccagtgaccccaacaatcagaagatagtgtttcaggaaatagtcagaatgctgtctttcttctcacaagtgcaagagcagaaagc

SEQ ID NO: 387473 - DNA, 120 bp, Artificial Sequence
  ENSG00000144452_10 (sequence is synthesized)
tgtgtggcagcttctgtctagttttccaaatgtgtttcagaatgacacatcactaagcaatctatttgatgttcttcgaaaggcaaacagtgtgctgctggttgtgcagaaggtttatcc

SEQ ID NO: 387474 - DNA, 120 bp, Artificial Sequence
  ENSG00000144452_11 (sequence is synthesized)
acgttttgcaactaacgaaggtttcagaaccctccagaagtctgttaaacatctgctgtacactctggactccccagctcaaggtgactccgataatataacgcatgtgtggaatgagga

SEQ ID NO: 387475 - DNA, 120 bp, Artificial Sequence
  ENSG00000144452_12 (sequence is synthesized)
tgatggacagaccttatctccaagcagtctggctgcacagctcctaattctggaaaactttgaagatgccctcttaaatatatcagcaaatagtccttatattccttacttggcatgtgt

SEQ ID NO: 387476 - DNA, 120 bp, Artificial Sequence
  ENSG00000144452_13 (sequence is synthesized)
gagaaatgtgactgacagtttggccagaggttcaccagaaaatctaagactcctgcagtccacaatacgatttaaaaaatcttttcttcgcaatggttcctatgaagattactttcctcc

SEQ ID NO: 387477 - DNA, 120 bp, Artificial Sequence
  ENSG00000144452_14 (sequence is synthesized)
agttcctgaagtcctaaaatcaaaactgtctcaacttcgaaacttgaccgaacttctttgtgaatctgaaactttcagtttgatagagaagtcatgccagctctctgatatgagctttgg

SEQ ID NO: 387478 - DNA, 120 bp, Artificial Sequence
  ENSG00000144452_15 (sequence is synthesized)
gagcctgtgtgaagaaagtgagtttgatctgcaactcctcgaagcggcagagctgggcaccgaaatagcagccagcttactgtaccatgacaatgtcatatctaaaaaagtgagagattt

SEQ ID NO: 387479 - DNA, 120 bp, Artificial Sequence
  ENSG00000144452_16 (sequence is synthesized)
gctgactggagatccaagcaaaattaatttaaatatggatcagtttctagaacaggcactgcaaatgaattacttggaaaatatcactcagttaataccgatcatagaagccatgctgca

SEQ ID NO: 387480 - DNA, 120 bp, Artificial Sequence
  ENSG00000144452_17 (sequence is synthesized)
tgtcaataacagtgcagatgcttctgaaaagccaggtcagttactagaaatgtttaaaaatgttgaagagctgaaagaagatttaaggagaacaacaggaatgtccaacaggactattga

SEQ ID NO: 387481 - DNA, 120 bp, Artificial Sequence
  ENSG00000144452_18 (sequence is synthesized)
caagttgctggccattcccatccctgataatagagctgagattatttctcaggtgttctggctgcattcctgtgatactaatatcaccactcccaaactagaagatgcaatgaaagaatt

SEQ ID NO: 387482 - DNA, 120 bp, Artificial Sequence
  ENSG00000144452_19 (sequence is synthesized)
ctgcaacctgtctctttcagagagatcccggcagtcttacctcatcggactcacccttctgcactacttaaacatttacaacttcacatacaaggtgtttttcccgaggaaagatcaaaa

SEQ ID NO: 387483 - DNA, 120 bp, Artificial Sequence
  ENSG00000144452_20 (sequence is synthesized)
gccagtagaaaagatgatggagctcttcataagactaaaagagattctcaatcagatggcttctggcacacatccgctgctagacaaaatgagatccctgaagcaaatgcatctgcccag

SEQ ID NO: 387484 - DNA, 120 bp, Artificial Sequence
  ENSG00000144452_21 (sequence is synthesized)
aagtgttccattaacacaggcaatgtacagaagcaaccgaatgaacacaccacaaggatcatttagcaccatctcccaagcattatgttctcaaggaattaccactgaatatttaactgc

SEQ ID NO: 387485 - DNA, 120 bp, Artificial Sequence
  ENSG00000144452_22 (sequence is synthesized)
catgctgccctcttcccagaggccaaaaggcaaccacaccaaggattttttgacttataaattaactaaagagcaaattgcttcaaaatatggaattcccataaattccacaccattttg

SEQ ID NO: 387486 - DNA, 120 bp, Artificial Sequence
  ENSG00000144452_23 (sequence is synthesized)
cttctccctttataaagacatcattaacatgcccgctggacctgtgatttgggctttcttgaaacctatgttgttgggaagaattttgtatgcaccatataacccagtcacaaaggcaat

SEQ ID NO: 387487 - DNA, 120 bp, Artificial Sequence
  ENSG00000144452_24 (sequence is synthesized)
aatggaaaagtccaatgtaactctgagacagctggcggaattaagagaaaaatctcaagagtggatggataagtcgccacttttcatgaattccttccatctgttaaaccaggcaattcc

SEQ ID NO: 387488 - DNA, 120 bp, Artificial Sequence
  ENSG00000144452_25 (sequence is synthesized)
aatgctccagaatactctaaggaacccttttgtgcaagtttttgtaaagttctccgtgggactcgatgctgttgaactattgaaacagatagatgaactcgatattctaagactgaaatt

SEQ ID NO: 387489 - DNA, 120 bp, Artificial Sequence
  ENSG00000144452_26 (sequence is synthesized)
agagaacaacattgacatcatcgatcagcttaacacactatcttccctgacagtaaatatttcctcttgtgtattatatgaccgtattcaggcagcaaaaaccatagatgaaatggagag

SEQ ID NO: 387490 - DNA, 120 bp, Artificial Sequence
  ENSG00000144452_27 (sequence is synthesized)
agaggctaaaaggctctacaaaagcaacgaactctttggaagtgttatttttaagcttccttctaacagaagctggcacagaggctatgactctggaaatgtctttcttcctcctgtcat

SEQ ID NO: 387491 - DNA, 120 bp, Artificial Sequence
  ENSG00000144452_28 (sequence is synthesized)
aaaatataccatccggatgagtctcaagaccgcacagaccacaagaagcctaagaaccaagatttgggctccagggccacacaattctccatcacacaaccagatctatggcagggcttt

SEQ ID NO: 387492 - DNA, 120 bp, Artificial Sequence
  ENSG00000144452_29 (sequence is synthesized)
tatttatttacaggatagtattgaaagagcaatcattgaattgcaaactggaaggaactcccaggaaatagcagtccaggttcaagcaattccttatccctgcttcatgaaagacaactt

SEQ ID NO: 387493 - DNA, 120 bp, Artificial Sequence
  ENSG00000144452_30 (sequence is synthesized)
cctaaccagtgtctcttattctcttccaattgtgcttatggttgcctgggttgtatttatagctgcctttgtaaaaaagcttgtctatgagaaagacctccggcttcatgagtacatgaa

SEQ ID NO: 387494 - DNA, 120 bp, Artificial Sequence
  ENSG00000144452_31 (sequence is synthesized)
gatgatgggtgtgaactcctgcagccatttctttgcctggcttatagagagtgttggatttttactggttaccatcgtgatcctcatcattatactcaagtttggcaatattcttcctaa

SEQ ID NO: 387495 - DNA, 120 bp, Artificial Sequence
  ENSG00000144452_32 (sequence is synthesized)
aacaaatgggttcattttgttcctgtatttttcggactacagcttctcggttattgccatgagctatcttatcagtgtcttcttcaacaacaccaacattgcagctctgatcggaagcct

SEQ ID NO: 387496 - DNA, 120 bp, Artificial Sequence
  ENSG00000144452_33 (sequence is synthesized)
catctacatcattgccttctttccatttattgttctggttacagtggagaatgagttgagctatgtattgaaagtgttcatgagcctgctgtccccaacagcattcagctatgcaagcca

SEQ ID NO: 387497 - DNA, 120 bp, Artificial Sequence
  ENSG00000144452_34 (sequence is synthesized)
atacattgcacgatacgaagaacagggcattggtcttcagtgggaaaatatgtacacctccccggttcaggatgacaccacctcatttggctggctgtgctgtctaatcctagctgactc

SEQ ID NO: 387498 - DNA, 120 bp, Artificial Sequence
  ENSG00000144452_35 (sequence is synthesized)
tttcatttatttccttattgcttggtatgtcaggaatgtcttcccagggacatacggtatggcagctccctggtattttccaattcttccttcctattggaaggagcgatttgggtgtgc

SEQ ID NO: 387499 - DNA, 120 bp, Artificial Sequence
  ENSG00000144452_36 (sequence is synthesized)
agaggtgaagcctgagaagagcaatggcctcatgtttactaacatcatgatgcagaacaccaacccatctgccagtcctgaatacatgttttcctctaacatcgagcctgaacctaaaga

SEQ ID NO: 387500 - DNA, 120 bp, Artificial Sequence
  ENSG00000144452_37 (sequence is synthesized)
tctcacagtcggggttgccctgcatggggtcacaaagatctatggctcaaaagttgctgttgataacctcaatctgaacttttatgaagggcatattacttcattgctggggcccaatgg

SEQ ID NO: 387501 - DNA, 120 bp, Artificial Sequence
  ENSG00000144452_38 (sequence is synthesized)
accatttttgtatatggaaaagatatcaaaacagacctacacacggtacggaagaacatgggagtctgtatgcagcacgacgtcttgttcagttacctcactactaaggagcaccttctc

SEQ ID NO: 387502 - DNA, 120 bp, Artificial Sequence
  ENSG00000144452_39 (sequence is synthesized)
ctatatggttccatcaaagttcctcactggactaaaaagcagctccacgaggaagtaaaaaggactttaaaagatactggactatatagccatcgtcataagagagttggaacactgtca

SEQ ID NO: 387503 - DNA, 120 bp, Artificial Sequence
  ENSG00000144452_40 (sequence is synthesized)
ggaggcatgaagaggaagttatctatatccatagctctcattggtggatcaagggtagtaattttggatgaaccatctactggagttgacccatgttctcgccgaagtatatgggatgtt

SEQ ID NO: 387504 - DNA, 120 bp, Artificial Sequence
  ENSG00000144452_41 (sequence is synthesized)
atatccaagaacaaaactgccagaacaatcattctgtcaacgcaccacttggacgaggctgaagtgctgagtgaccgcatcgccttcctggagcagggtgggcttaggtgctgtgggtcc

SEQ ID NO: 387505 - DNA, 120 bp, Artificial Sequence
  ENSG00000144452_42 (sequence is synthesized)
ccattttacctcaaggaagcctttggcgatgggtatcacctcacgcttaccaagaagaagagtccaaatttaaatgcaaatgcagtatgtgacaccatggccgtgacagcaatgatccaa

SEQ ID NO: 387506 - DNA, 120 bp, Artificial Sequence
  ENSG00000144452_43 (sequence is synthesized)
tcacatctccccgaagcctacctcaaggaggatattgggggagagcttgtttatgtacttcctccattcagcaccaaagtctcaggggcctacctgtcactcctacgggcactcgacaat

SEQ ID NO: 387507 - DNA, 120 bp, Artificial Sequence
  ENSG00000144452_44 (sequence is synthesized)
ggcatgggtgacctcaacatcgggtgctacggcatttcagataccaccgtggaggaggtctttctgaacttgaccaaagagtcacaaaaaaatagtgctatgagtcttgagcacttaaca

SEQ ID NO: 387508 - DNA, 120 bp, Artificial Sequence
  ENSG00000144452_45 (sequence is synthesized)
caaaagaaaattgggaattccaatgccaatggcatctcaactcctgacgatttatctgtgagcagcagcaatttcacagacagagatgacaaaatcctgacaagaggagagaggctggat

SEQ ID NO: 387509 - DNA, 120 bp, Artificial Sequence
  ENSG00000144452_46 (sequence is synthesized)
ggctttggactgttgctgaagaagatcatggctatactcatcaagaggttccaccacacccgcaggaactggaaaggtctcattgctcaggttatcctccccatcgtctttgttaccact

SEQ ID NO: 387510 - DNA, 120 bp, Artificial Sequence
  ENSG00000144452_47 (sequence is synthesized)
gccatgggccttggcacactgagaaattccagcaacagttatccagagattcagatctccccctctctttatggtacctccgaacagacagccttctatgctaattatcacccgagcacg

SEQ ID NO: 387511 - DNA, 120 bp, Artificial Sequence
  ENSG00000144452_48 (sequence is synthesized)
gaagcacttgtctcagcaatgtgggacttccctggaattgacaacatgtgtctgaacaccagtgatctacagtgtttaaacaaagacagtctggaaaaatggaacaccagtggagaaccc

SEQ ID NO: 387512 - DNA, 120 bp, Artificial Sequence
  ENSG00000144452_49 (sequence is synthesized)
atcactaattttggtgtttgctcctgctcagaaaatgtccaggaatgtcctaaatttaactattccccaccgcacagaagaacttactcatcccaggtaatttataacctcactgggcaa

SEQ ID NO: 387513 - DNA, 120 bp, Artificial Sequence
  ENSG00000144452_50 (sequence is synthesized)
cgagtggaaaattatcttatatcaactgcaaatgagtttgtccaaaaaagatatggaggttggagttttgggctgcctttgacaaaagaccttcgttttgatataacaggagtccctgcc

SEQ ID NO: 387514 - DNA, 120 bp, Artificial Sequence
  ENSG00000144452_51 (sequence is synthesized)
aatagaacacttgccaaggtatggtatgatccagaaggctatcactcccttccagcttacctcaacagcctgaataatttccttctgcgagttaacatgtcaaaatacgatgctgcccga

SEQ ID NO: 387515 - DNA, 120 bp, Artificial Sequence
  ENSG00000144452_52 (sequence is synthesized)
catggcatcatcatgtatagccatccttatccaggagtgcaagaccaagaacaagccacaatcagcagtttaatcgatattttagtggcactgtctatcttgatgggctactctgtcacc

SEQ ID NO: 387516 - DNA, 120 bp, Artificial Sequence
  ENSG00000144452_53 (sequence is synthesized)
accgccagctttgtcacctatgttgtaagggaacatcaaaccaaagccaaacagttgcagcacatttcaggcattggcgtgacatgctactgggtaacaaacttcatttatgacatggtt

SEQ ID NO: 387517 - DNA, 120 bp, Artificial Sequence
  ENSG00000144452_54 (sequence is synthesized)
ttctacttggtgcctgtagcgttttcaattggtatcattgcgattttcaaattacctgcattctacagtgaaaacaacctaggcgctgtatctctcctacttctcctgtttgggtatgca

SEQ ID NO: 387518 - DNA, 120 bp, Artificial Sequence
  ENSG00000144452_55 (sequence is synthesized)
acattttcctggatgtacttgctggctgggctcttccatgaaacaggaatggccttcatcacttacgtctgtgtcaacttgttttttggcattaattccattgtttccctgtcagtggta

SEQ ID NO: 387519 - DNA, 120 bp, Artificial Sequence
  ENSG00000144452_56 (sequence is synthesized)
tactttctttccaaggaaaagcctaatgatccgactttagaacttatttctgaaaccctcaagcgcattttcctgattttcccacaattctgttttggctacggtttgattgaactttct

SEQ ID NO: 387520 - DNA, 120 bp, Artificial Sequence
  ENSG00000144452_57 (sequence is synthesized)
caacaacagtcggtcctagacttcttaaaagcatatggagtggaatacccaaatgaaacctttgagatgaataaactaggtgcaatgtttgtggctttggtttctcagggcaccatgttt

SEQ ID NO: 387521 - DNA, 120 bp, Artificial Sequence
  ENSG00000144452_58 (sequence is synthesized)
ttttccttgcgactcttaatcaacgaatccctgataaagaaactcaggcttttcttcagaaaatttaattcttcacatgtaagggagacaatagatgaggatgaagatgtgcgggctgag

SEQ ID NO: 387522 - DNA, 120 bp, Artificial Sequence
  ENSG00000144452_59 (sequence is synthesized)
agattaagagttgagagtggtgcagctgaatttgacttggtccaactttattgtctcacaaagacctaccaacttatccacaaaaagattatagctgtaaacaacatcagcattgggata

SEQ ID NO: 387523 - DNA, 120 bp, Artificial Sequence
  ENSG00000144452_60 (sequence is synthesized)
cctgctggagagtgttttgggcttcttggagtgaatggagcaggaaagaccactatattcaagatgctgacaggagacatcattccttcaagtggaaacattctgatcagaaataagacc

SEQ ID NO: 387524 - DNA, 120 bp, Artificial Sequence
  ENSG00000144452_61 (sequence is synthesized)
ggatctctgggtcacgttgattctcacagctcattagttggctactgtcctcaggaagatgccttagatgacctggtaactgtggaagaacatttgtatttctatgccagggtacatgga

SEQ ID NO: 387525 - DNA, 120 bp, Artificial Sequence
  ENSG00000144452_62 (sequence is synthesized)
attccagaaaaggatattaaagaaactgttcataaactccttaggagacttcacctgatgcccttcaaggacagagctacctctatgtgcagttatggcacaaaaagaaaattatccact

SEQ ID NO: 387526 - DNA, 120 bp, Artificial Sequence
  ENSG00000144452_63 (sequence is synthesized)
gcactggccttgatagggaaaccttccattctactgctggatgagccgagctctggcatggatccgaagtcgaaacggcacctctggaagatcatttcagaagaagtacagaacaaatgt

SEQ ID NO: 387527 - DNA, 120 bp, Artificial Sequence
  ENSG00000144452_64 (sequence is synthesized)
tccgtcatcctcacatctcacagcatggaagaatgtgaagctctctgtaccaggttggccattatggtgaatggaaagtttcaatgtattggatctttgcagcacataaagagcaggttt

SEQ ID NO: 387528 - DNA, 120 bp, Artificial Sequence
  ENSG00000144452_65 (sequence is synthesized)
ggacgaggatttactgtcaaagttcacttgaagaataacaaagtgaccatggagaccctcacaaagttcatgcagctgcactttccaaaaacatacttaaaagatcagcacctcagcatg

SEQ ID NO: 387529 - DNA, 120 bp, Artificial Sequence
  ENSG00000144452_66 (sequence is synthesized)
ctagagtatcatgtaccagtcacagcaggaggagtcgcaaacatttttgatctgctggaaaccaacaagactgctttaaatattacaaatttcttagtgagtcagaccactctggaagag

SEQ ID NO: 387530 - DNA, 120 bp, Artificial Sequence
  ENSG00000144452_67 (sequence is synthesized)
gttttcatcaactttgccaaagaccagaagtcctatgaaactgctgataccagcagccaaggttccactataagtgttgactcacaagatgaccagatggagtcttaacacttccagcaa

SEQ ID NO: 387531 - DNA, 120 bp, Artificial Sequence
  ENSG00000144452_68 (sequence is synthesized)
actcaatctcagcgtgtgaccaatggcttcattttgaagaaaagccacagaagatacacttccgcaagatatcttcattttaaagtaaagtaatatactgtatggaaagttacaactgtg

SEQ ID NO: 387532 - DNA, 120 bp, Artificial Sequence
  ENSG00000144452_69 (sequence is synthesized)
ttagactaacaagtaattataaaaggaaatttttccttctaaggtcagtgagtgttgttgctactgaaatgaattcctgtatactcaacactgtgagcatgctaatgtatatgctggtga

SEQ ID NO: 387533 - DNA, 120 bp, Artificial Sequence
  ENSG00000144452_70 (sequence is synthesized)
ttcttatgcaaaggtgaagccacctcaagatgaatatcttaatttattactttcaataaaaagacagtttaaaaggcatggattttggtagttgaaatataagagtggagaagaaaagtc

SEQ ID NO: 387534 - DNA, 120 bp, Artificial Sequence
  ENSG00000144452_71 (sequence is synthesized)
agatggtttgtggcaggtgccaccgggcaagcagacaacataatttatttccagaaaacaacagaatgaacatcatcatgaatacatgaatcggctgtgatgtgtgaactgctaagggcc

SEQ ID NO: 387535 - DNA, 120 bp, Artificial Sequence
  ENSG00000144452_72 (sequence is synthesized)
aaatgaacgtttgcagagcagtgggcacaatgtttacaatgtatgtgtatgtcactttcggtacctgtgaatgcatggggacgtgctgaacccgaaaaaaagtgcctttccataaggact

SEQ ID NO: 387536 - DNA, 120 bp, Artificial Sequence
  ENSG00000144452_73 (sequence is synthesized)
gcaatagagagggcaatttaccctggtggtacacggaacctagattcactcctgccatgccttgccaatagtaagctgcagggtggaacaagaaatcacttgctctggggggaagggagg

SEQ ID NO: 387537 - DNA, 120 bp, Artificial Sequence
  ENSG00000144452_74 (sequence is synthesized)
ggggaatgggtgtgtcagctgggtagatacaaaccctgaaaagagaatccatgtgctactggcaggcaacattttttaaagctctttcagaaaccctcatatttggggtttcttttcagg

SEQ ID NO: 387538 - DNA, 120 bp, Artificial Sequence
  ENSG00000144452_75 (sequence is synthesized)
aaacattcctgtggagggaaaacgaatatgaagataattttcagctaattatctgggtgacccagaatcgtgtatatggctataggatagacttcttaataatggcaagtgacgtggccc

SEQ ID NO: 387539 - DNA, 120 bp, Artificial Sequence
  ENSG00000144452_76 (sequence is synthesized)
tggggaaaggtgctttatgtaccgtgtgtgcgtgtatgtgtgtgtatctatacaagtttgtcagctttggcatgactgtttgtctcgaaaaccaataaactcaaagtttagaaaaactca

SEQ ID NO: 387540 - DNA, 120 bp, Artificial Sequence
  ENSG00000144452_77 (sequence is synthesized)
atttcctataaatatcacaaatatttccaacaaaagagcatagatgtcttttatacaattcttttgagaatgattctgcagatttctgcattttctcctcattaatttgacctgggatgg

SEQ ID NO: 387541 - DNA, 120 bp, Artificial Sequence
  ENSG00000144452_78 (sequence is synthesized)
cttctacttggaacacttgtgatggatggatggcccagattttttttttttcctgcataaatgaggaaactgactcaagatacagggttatgattgcacaataaatcatttgcaaagcta

SEQ ID NO: 387542 - DNA, 120 bp, Artificial Sequence
  ENSG00000144455_0 (sequence is synthesized)
gggtcacatggcccgcgggacaacatggctgcgcccgcactagggctggtgtgtggacgttgccctgagctgggtctcgtcctcttgctgctgctgctctcgctgctgtgtggagcggca

SEQ ID NO: 387543 - DNA, 120 bp, Artificial Sequence
  ENSG00000144455_1 (sequence is synthesized)
gggagccaggaggccgggaccggtgcgggcgcggggtcccttgcgggttcttgcggctgcggcacgccccagcggcctggcgcccatggcagttcggcagccgctcaccgatactcgcgg

SEQ ID NO: 387544 - DNA, 120 bp, Artificial Sequence
  ENSG00000144455_2 (sequence is synthesized)
gaggctaacgctccgggccccgtacccggagagcggcaactcgcgcactcaaagatggtccccatccctgctggagtatttacaatgggcacagatgatcctcagataaagcaggatggg

SEQ ID NO: 387545 - DNA, 120 bp, Artificial Sequence
  ENSG00000144455_3 (sequence is synthesized)
gaagcacctgcgaggagagttactattgatgccttttacatggatgcctatgaagtcagtaatactgaatttgagaagtttgtgaactcaactggctatttgacagaggctgagaagttt

SEQ ID NO: 387546 - DNA, 120 bp, Artificial Sequence
  ENSG00000144455_4 (sequence is synthesized)
ggcgactcctttgtctttgaaggcatgttgagtgagcaagtgaagaccaatattcaacaggcagttgcagctgctccctggtggttacctgtgaaaggcgctaactggagacacccagaa

SEQ ID NO: 387547 - DNA, 120 bp, Artificial Sequence
  ENSG00000144455_5 (sequence is synthesized)
gggcctgactctactattctgcacaggccggatcatccagttctccatgtgtcctggaatgatgcggttgcctactgcacttgggcagggaagcggctgcccacggaagctgagtgggaa

SEQ ID NO: 387548 - DNA, 120 bp, Artificial Sequence
  ENSG00000144455_6 (sequence is synthesized)
tacagctgtcgaggaggcctgcataatagacttttcccctggggcaacaaactgcagcccaaaggccagcattatgccaacatttggcagggcgagtttccggtgaccaacactggtgag

SEQ ID NO: 387549 - DNA, 120 bp, Artificial Sequence
  ENSG00000144455_7 (sequence is synthesized)
gatggcttccaaggaactgcgcctgttgatgccttccctcccaatggttatggcttatacaacatagtggggaacgcatgggaatggacttcagactggtggactgttcatcattctgtt

SEQ ID NO: 387550 - DNA, 120 bp, Artificial Sequence
  ENSG00000144455_8 (sequence is synthesized)
tcggagccagaacacacctgatagctctgcttcgaatctgggattccgctgtgcagccgaccgcctgcccactatggactgacaaccaaggaaagtcttccccagtccaaggagcagtcg

SEQ ID NO: 387551 - DNA, 120 bp, Artificial Sequence
  ENSG00000144455_9 (sequence is synthesized)
tgtctgacctacattgggcttttctcagaactttgaacgatcccatgcaaagaattcccaccctgaggtgggttacatacctgcccaatggccaaaggaaccgccttgtgagaccaaatt

SEQ ID NO: 387552 - DNA, 120 bp, Artificial Sequence
  ENSG00000144455_10 (sequence is synthesized)
gctgacctgggtcagtgcatgtgctttatggtgtggtgcatctttggagatcatcaccatattttacttttgagagtctttaaagaggaaggggagtggagggaaccctgagctaggctt

SEQ ID NO: 387553 - DNA, 120 bp, Artificial Sequence
  ENSG00000144455_11 (sequence is synthesized)
caggaggcccgcgtcctacgcaggctctgccacaggggttagaccccaggtccgacgcttgaccttcctgggcctcaagtgccctcccctatcaaatgaagggatggacagcatgacctc

SEQ ID NO: 387554 - DNA, 120 bp, Artificial Sequence
  ENSG00000144455_12 (sequence is synthesized)
tgggtgtctctccaactcaccagttctaaaaagggtatcagattctattgtgacttcatagtgagaatttattatagattattttttagctattttttccatgtgtgaaccttgagtgat

SEQ ID NO: 387555 - DNA, 120 bp, Artificial Sequence
  ENSG00000144455_13 (sequence is synthesized)
actaatcatgtaaagtaagagttctcttatgtattattttcggaagaggggtgtggtgactcctttatattcgtactgcactttgtttttccaaggaaatcagtgtcttttacgttgtta

SEQ ID NO: 387556 - DNA, 120 bp, Artificial Sequence
  ENSG00000144455_14 (sequence is synthesized)
tgatgaatcccacatggggccggtgatggtatgctgaagttcagccgttgaacacataggaatgtctgtggggtgactctactgtgctttatcttttaacattaagtgcctttggttcag

SEQ ID NO: 387557 - DNA, 120 bp, Artificial Sequence
  ENSG00000144455_15 (sequence is synthesized)
aggggcagtcataagctctgtttccccctctccccaaagccttcagcgaacgtgaaatgtgcgctaaacggggaaacctgtttaattctagatatagggaaaaaggaacgaggaccttga

SEQ ID NO: 387558 - DNA, 120 bp, Artificial Sequence
  ENSG00000144455_16 (sequence is synthesized)
atgagctatattcagggtatccggtattttgtaatagggaataggaaaccttgttggctgtggaatatccgatgctttgaatcatgcactgtgttgaataaacgtatctgctaaatcagg

SEQ ID NO: 387559 - DNA, 120 bp, Artificial Sequence
  ENSG00000144455_17 (sequence is synthesized)
gcccactgctgtctacaaatgaatgggaagatttaagatctttcaaagcaagttgagtctagacccttgcccaagttttgtaacatgattttgtctctttccccccttttcatgcagatt

SEQ ID NO: 387560 - DNA, 120 bp, Artificial Sequence
  ENSG00000144455_18 (sequence is synthesized)
atccatggagttagcatgcagatagcatggagtttgtctgatagaagttgggctctggtggaagtacggaaattgaatggtcagggaaagatagaatgcaggtttcttagggagtctcta

SEQ ID NO: 387561 - DNA, 120 bp, Artificial Sequence
  ENSG00000144455_19 (sequence is synthesized)
ggagtggaagagagatgaggttgtgcccttcaaggaggagctttacagagataaagaaactaagccctagaagaggaactctgccagtctatttacaaagcctgcactgaaagctagacc

SEQ ID NO: 387562 - DNA, 120 bp, Artificial Sequence
  ENSG00000144455_20 (sequence is synthesized)
atatactctttggagagggatgatgtgaccagctcatagactagggcctataccatgtaataggtactcaaacttttttaaaataaatgaatcaataaatgaatgtctttatgtaatcgg

SEQ ID NO: 387563 - DNA, 120 bp, Artificial Sequence
  ENSG00000144455_21 (sequence is synthesized)
gcttaacccaaaaggtcccccttctgggaaagaccgagtgaagaaaggtggatcctacatgtgccataggtcccaagagtactatgatccctattttcaagatgtggcatctgagatgtt

SEQ ID NO: 387564 - DNA, 120 bp, Artificial Sequence
  ENSG00000144455_22 (sequence is synthesized)
gagaagacacacagccagcaggtggaaggccttctcatctctagaaccatgctgctcaatacgtaggcatcagcaatatgcagctattgaacgtttgacatgtggcaagtttgaattgag

SEQ ID NO: 387565 - DNA, 120 bp, Artificial Sequence
  ENSG00000144455_23 (sequence is synthesized)
atgtgctagtttaagaaaaatagattgcctcaacaccaacattgcctgtagctactccatgaggcaagatggacccagactccactgtgtggactgacctcccagaaggatcctcctgtc

SEQ ID NO: 387566 - DNA, 120 bp, Artificial Sequence
  ENSG00000144455_24 (sequence is synthesized)
cctgaaggccactctgccttcagctacaggccccagtgctgattgtgatacttaacaagggctttcagatgtctgaaacaagagtatagcataaagttaagaatgcggcttctggagaga

SEQ ID NO: 387567 - DNA, 120 bp, Artificial Sequence
  ENSG00000144455_25 (sequence is synthesized)
cagacttggtttcaaattcagctctgtgaccttgggtgcacagcaaagtcttcttctccccccgatgaaagaatgggaaggactcaggaaggctcaacttgcaaactccccagtatcaag

SEQ ID NO: 387568 - DNA, 120 bp, Artificial Sequence
  ENSG00000144455_26 (sequence is synthesized)
cccagctcatttccagtatgtattttcaaaggccatgtcatttttgaagtgcctgagaagaaaacagaactgccagcagactatgggacaaacgactaaatgccctccagacgttccaga

SEQ ID NO: 387569 - DNA, 120 bp, Artificial Sequence
  ENSG00000144455_27 (sequence is synthesized)
gtcctctgcctctcaggcttcagttcttcctgaaggaatctggagctggaaagcaggaagcaatttgctgtggaattttttccatcacagactccaagttcctcagcctttggactcttg

SEQ ID NO: 387570 - DNA, 88 bp, Artificial Sequence
  ENSG00000144455_28 (sequence is synthesized)
tccatcacagactccaagttcctcagcctttggactcttgaacttacaccagtgttttggcaggagcgttgtcagcttccctactttt

SEQ ID NO: 387571 - DNA, 120 bp, Artificial Sequence
  ENSG00000144455_29 (sequence is synthesized)
gctcttcaacttgaagacggcctatcgtgagactttacctcgtgattatgtgagtcaattctcctaataaactccccttcgtatgtacatataccctattacttctgtccctttagagaa

SEQ ID NO: 387572 - DNA, 120 bp, Artificial Sequence
  ENSG00000144455_30 (sequence is synthesized)
ccctgactaatacagtagagattgcctggacttattaataataatgactctgtttagttaatgtaacagacagataaagacaaatgagtgacacccatgcaattaaaataattttggtgg

SEQ ID NO: 387573 - DNA, 120 bp, Artificial Sequence
  ENSG00000144455_31 (sequence is synthesized)
ggagtgagaggagttggttctccactcacagtggaaagttttagcgtatactgctgcacatgacatgggagtattttgcacttccactggaaaaaagtaaggggaataaaaacccctgga

SEQ ID NO: 387574 - DNA, 120 bp, Artificial Sequence
  ENSG00000144455_32 (sequence is synthesized)
ttctacttgctgacttgagagtgactaaagcgatttatctgaaggttccccagggtggattcatagtggactcaggccagattctctgctgatgctttgaacttatgtccagagcatcat

SEQ ID NO: 387575 - DNA, 120 bp, Artificial Sequence
  ENSG00000144455_33 (sequence is synthesized)
ctccaccacaaaagagcttgcctgctctgtgtcctggccaaagagatgcacgtgctctctcactgggttgtggctcttgagtaactcctggaattacccagctggaatttctattccttt

SEQ ID NO: 387576 - DNA, 120 bp, Artificial Sequence
  ENSG00000144455_34 (sequence is synthesized)
ggaccacaaatttcatatcttcacctgctgcctatatcatgctaaaagatggaaatgtctcaactaaaccatgtaggtggactagcctcattaacaagataagcaatgggccattttctc

SEQ ID NO: 387577 - DNA, 120 bp, Artificial Sequence
  ENSG00000144455_35 (sequence is synthesized)
actggttattaactatgtacattatctatgaaataacatatctggtcatggttactactctattctgtagggtggaatagaaaaaggtagaggatatatatttcagttgcatttttaaaa

SEQ ID NO: 387578 - DNA, 75 bp, Artificial Sequence
  ENSG00000144455_36 (sequence is synthesized)
aggtagaggatatatatttcagttgcatttttaaaattgtttattttgttttttaattgacaaaggtagacaagg

SEQ ID NO: 387579 - DNA, 120 bp, Artificial Sequence
  ENSG00000144455_37 (sequence is synthesized)
gcttctgacccgggccgagccgggaactcagcgccagctctgttcctggcggggctgaggcttccctcacattccaggccacctggcaaacgtcctgaggctgccactccttctgggctc

SEQ ID NO: 387580 - DNA, 120 bp, Artificial Sequence
  ENSG00000144455_38 (sequence is synthesized)
caacaggacaaaggaaggctataagcttcttgaaggcagagattatatctcattcaatcttctatctcaagtatctactgcaaaaccaagcaaacggcgatctgagcacctgatggcaga

SEQ ID NO: 387581 - DNA, 120 bp, Artificial Sequence
  ENSG00000144455_39 (sequence is synthesized)
actggaagaggtgaaagaaaaccccagggacactctggacatgttctgtattatttggatccagactggtctgaatttatcaaaagagattaacatgatataaaccaagagggaaatgaa

SEQ ID NO: 387582 - DNA, 120 bp, Artificial Sequence
  ENSG00000144455_40 (sequence is synthesized)
gaaacgaagcatgttcattttggattgaagaaaagtttgtcattataatgtatcttcagatttggttgccgtgcagggcaatttactgttcttttgatctttttctctgtttaaaaagac

SEQ ID NO: 387583 - DNA, 120 bp, Artificial Sequence
  ENSG00000144455_41 (sequence is synthesized)
atggactaggcgaggaatggagcaggtgaagcaccgctgacattattagtgtgcgtgtgaacctctgatatgctaataggcaaagtgggtggaatggaattgctcttaaataagtaaaaa

SEQ ID NO: 387584 - DNA, 120 bp, Artificial Sequence
  ENSG00000144455_42 (sequence is synthesized)
gtaaaatctaattttgtttttctaaactttcctttgctaatgcaaggcaggagagttttgtgtgtgtttaaatagaccaaagtctcactggggagagtcagaggtctgggattctcatat

SEQ ID NO: 387585 - DNA, 120 bp, Artificial Sequence
  ENSG00000144455_43 (sequence is synthesized)
tttggagatagtaatttgattttcctaggatccttttttttttttttttttagcagaaaaatgtggtaacagtgtcatccagtcacagccatggagacgacccagtagggattcatagaa

SEQ ID NO: 387586 - DNA, 120 bp, Artificial Sequence
  ENSG00000144455_44 (sequence is synthesized)
ttttgcaaatgctcctctgtcccgtgagatgaaattcctttcccatccaaagtacccacccaaagagaaaactatcctaggacttttgcttcttccagaaattacttcagacatctcccc

SEQ ID NO: 387587 - DNA, 120 bp, Artificial Sequence
  ENSG00000144455_45 (sequence is synthesized)
ctttcagactctctctctttcccctgctgtttcatttcctctggttgtagtaatgtagaaaccctttgtgtcgtgcaggggctaagagcgtgctctctgaagccacgcagcctcccagac

SEQ ID NO: 387588 - DNA, 120 bp, Artificial Sequence
  ENSG00000144455_46 (sequence is synthesized)
agtctagacactgctgttgatgaactgtaccatcttgattatttcactgaacccctttgaggttttcctcacatagaaaatggggatagtaatagttcctactgcctagtgttgttttga

SEQ ID NO: 387589 - DNA, 120 bp, Artificial Sequence
  ENSG00000144455_47 (sequence is synthesized)
agattaaatgaaactgtgcatgtaaagtggtaagcaccaaatggtgttagcagttgttattgttgctattattattactattacttttaacttgtaggtgtttgagccaagcccagggcc

SEQ ID NO: 387590 - DNA, 120 bp, Artificial Sequence
  ENSG00000144455_48 (sequence is synthesized)
tcctgcatgtgccagcttcagtagctgcaccagcagtccccattgggcactgtggcagtggtggtgatggaggaggaggtggtggtaaagaggggaacaagtggattaagcagagggagg

SEQ ID NO: 387591 - DNA, 89 bp, Artificial Sequence
  ENSG00000144455_49 (sequence is synthesized)
ggtggtaaagaggggaacaagtggattaagcagagggaggtgaggcaggaggaaggcatgatgggagggtaatatggttaggctttgta

SEQ ID NO: 387592 - DNA, 120 bp, Artificial Sequence
  ENSG00000144455_50 (sequence is synthesized)
ttatgggggcagtttcctacacgctgttctcatctcgtggtagtgagtgagttctcgctagatctgatgattttataaggggctcttcccgcttcaatcctcatactctctctcctgccg

SEQ ID NO: 387593 - DNA, 70 bp, Artificial Sequence
  ENSG00000144455_51 (sequence is synthesized)
ggctcttcccgcttcaatcctcatactctctctcctgccgccatgtgagggaaggtcttaggcagccatg

SEQ ID NO: 387594 - DNA, 120 bp, Artificial Sequence
  ENSG00000144455_52 (sequence is synthesized)
gttggggtgcgcgcggacccggcacccacggcggcggcggcggcagcagcagcaggaggaggagaaagacgaggaggaggaggaggactagctgagcggcgcctccttcccagcccgcag

SEQ ID NO: 387595 - DNA, 120 bp, Artificial Sequence
  ENSG00000144460_0 (sequence is synthesized)
taattgaagaaacactgagctgaactacaagtctatttcttatggtgctggattactcctacagaactgccctgagatcaaccgtgagagagggctctgacagacacaagtcaccttctg

SEQ ID NO: 387596 - DNA, 120 bp, Artificial Sequence
  ENSG00000144460_1 (sequence is synthesized)
gttattgcacttagctctccctggggacttaaattttggcagtgttcctctttacatgatatcctccaagatgatgagttctaatcctgaggaagaccctttggacacatttctccagta

SEQ ID NO: 387597 - DNA, 120 bp, Artificial Sequence
  ENSG00000144460_2 (sequence is synthesized)
cattgaggatatggggatgaaggcctatgatggcttggttattcagaatgcgtcagatattgctcgagagaatgatcgcttgagaaatgaaactaacctagcctatttgaaagagaagaa

SEQ ID NO: 387598 - DNA, 120 bp, Artificial Sequence
  ENSG00000144460_3 (sequence is synthesized)
tgaaaaacgccgaagacaagaagaagcaataaagcgcataggtggagaagtagggcgaggccacgaaggaagttacgtgggcaaacatttccgcatgggattcatgacaatgcctgctcc

SEQ ID NO: 387599 - DNA, 120 bp, Artificial Sequence
  ENSG00000144460_4 (sequence is synthesized)
tcaggacagacttccccatccttgctccagtggcttttctgtgagatcacagtccctgcactcggttgggggcacagacgatgacagcagctgtggctcacggagacaaccaccacccaa

SEQ ID NO: 387600 - DNA, 120 bp, Artificial Sequence
  ENSG00000144460_5 (sequence is synthesized)
acccaagagggaccccagcaccaagctgagcacctcatcagagacagtcagcagcactgcagccagtaagagcgggaaaacccctgagaggactgaagcgtcagctaaaccaagacccca

SEQ ID NO: 387601 - DNA, 120 bp, Artificial Sequence
  ENSG00000144460_6 (sequence is synthesized)
cagcgatgaatattccaagaagattcctcctcccaaaccgaagcgaaatccgaacactcagctgagcacatctttcgatgaaacgtacatcaaaaagcatgggccccggaggacgtcgct

SEQ ID NO: 387602 - DNA, 120 bp, Artificial Sequence
  ENSG00000144460_7 (sequence is synthesized)
gccgcgggactcctccttgtcccagatgggcagccccgcgggagaccccgaggaagaggagcccgtgtacatcgagatggtggggaacattctcagagacttcaggaaggaggacgatga

SEQ ID NO: 387603 - DNA, 120 bp, Artificial Sequence
  ENSG00000144460_8 (sequence is synthesized)
ccagagcgaggccgtctacgaggaaatgaagtaccctatctttgacgacttgggccaagacgccaaatgtgacttcgaccatcacagctgttcttcgcagtgtgctactcccacggtgcc

SEQ ID NO: 387604 - DNA, 120 bp, Artificial Sequence
  ENSG00000144460_9 (sequence is synthesized)
tgacttggacttcgccaaggcctcagtgccatgcccccccaaggggctgctttgcgacatccctccgcccttccccaacctgctttctcacagacccccgctgctggtatttccccccgc

SEQ ID NO: 387605 - DNA, 120 bp, Artificial Sequence
  ENSG00000144460_10 (sequence is synthesized)
ccccgtgcattgctcccccaactccgacgagtccccgcttacccctctggaggtcacgaagcttcccgtgctggaaaacgtgtcttacatgaaacagccagccggggcgtcgccctccac

SEQ ID NO: 387606 - DNA, 120 bp, Artificial Sequence
  ENSG00000144460_11 (sequence is synthesized)
gctgccgtcccacgtccccggccatgcgaaactggagaaagagcaggccgcggccctgggacctgcctctgccacccctgcgctctcctcgtcgcccccacccccgtctacgctgtaccg

SEQ ID NO: 387607 - DNA, 120 bp, Artificial Sequence
  ENSG00000144460_12 (sequence is synthesized)
aacccagtctccccatggctaccctaaaagtcactccacctctccctcccccgtcagcatggggaggtccctgactcccctgagcctcaaaaggcctcccccttacgacgctgtgcattc

SEQ ID NO: 387608 - DNA, 120 bp, Artificial Sequence
  ENSG00000144460_13 (sequence is synthesized)
gggcagcctctcaaggagctctccttcagtgcctcactcgacccccagacccgtgtcgcaagatggggccaagatggtcaacgccgcggtgaacacctacggggcagccccgggtggctc

SEQ ID NO: 387609 - DNA, 120 bp, Artificial Sequence
  ENSG00000144460_14 (sequence is synthesized)
ccggtcccggacacccacgagcccgctggaggagctgaccagcctcttctcctccggccgcagcctgctgcgcaagtcgtccagtggccggcgctccaaagagcctgcagagaaatcaac

SEQ ID NO: 387610 - DNA, 120 bp, Artificial Sequence
  ENSG00000144460_15 (sequence is synthesized)
agaggaactgaaagtccgaagccacagcacggagccattaccaaagttggacaacaaggaaagaggccaccatggggcgtcttcctccagagagcctgtcaaagctcaggaatgggatgg

SEQ ID NO: 387611 - DNA, 120 bp, Artificial Sequence
  ENSG00000144460_16 (sequence is synthesized)
aacaccagggacacctgtggtcaccagtcgactaggaagatgctctgtgagccccaccttgttagcgggaaaccacagttcagagcctaaagtaagctgcaaattaggccggtctgcgtc

SEQ ID NO: 387612 - DNA, 120 bp, Artificial Sequence
  ENSG00000144460_17 (sequence is synthesized)
gacgtcaggtgtgcctcctccatcagtcactcccctcaggcaaagcagtgacctgcaacagagccaggtaccatcatcgttagccaatcgtgattgacttcctgtgatacaacttgccaa

SEQ ID NO: 387613 - DNA, 120 bp, Artificial Sequence
  ENSG00000144460_18 (sequence is synthesized)
atgcttcccacctctgtctgtcctgttgctgtagacaactttcgcatttgcttttatttttctatgtgtgtatgggttaggggatgcgggggatgagttctggcagtctgtgttttcatt

SEQ ID NO: 387614 - DNA, 120 bp, Artificial Sequence
  ENSG00000144460_19 (sequence is synthesized)
ggtggtgaaactttctttgctgtttgttaccaaatcgtttttgtctctggtttccatcattctgtaatataaatgtagtaaacttgtactatatgtattggcttagtggttcttttttaa

SEQ ID NO: 387615 - DNA, 120 bp, Artificial Sequence
  ENSG00000144460_20 (sequence is synthesized)
attctttctctctttcatgttttgtgtacttttatactgtctctgaaaatttatcaatatttgataaatttatctactttgttttatgtagatttctttttaaatgttttgtccagaaca

SEQ ID NO: 387616 - DNA, 120 bp, Artificial Sequence
  ENSG00000144460_21 (sequence is synthesized)
ctcgcacagatgttgtcaatgaatttgtacatatttcttagctcttatcctattatactgtaatatttctggtggttttatttttatttagcttggagcatgactgtaagacactgttga

SEQ ID NO: 387617 - DNA, 120 bp, Artificial Sequence
  ENSG00000144460_22 (sequence is synthesized)
atattgatgtccttataaatattcatatcccgattcatttggattgagtatggcagctagtctttcttctttcttaggctattgactggcctaagacaatttgactggccagacaaattg

SEQ ID NO: 387618 - DNA, 120 bp, Artificial Sequence
  ENSG00000144460_23 (sequence is synthesized)
actggccagataatctagatatttaacaaaaactgcagattaataaggcaacctttaaatgaatgacttttctctcttataccaacaatatcagaaatgttctcagaaagggaatgtaag

SEQ ID NO: 387619 - DNA, 120 bp, Artificial Sequence
  ENSG00000144460_24 (sequence is synthesized)
tgttcatgcatggtaaatgagatctcaattatcacttggagaaaagagacaagaaataaaggcataaactgaaatatcatttaatcctttacagcataatatgttgctctgatgttcgtt

SEQ ID NO: 387620 - DNA, 120 bp, Artificial Sequence
  ENSG00000144460_25 (sequence is synthesized)
tgggtacgtggttgtggatggggaattagtatggggaaaaatcactacacataaatgtcctatctttagctcacccaataggaattcaatacattgacttaatttgtgaggcttaattgt

SEQ ID NO: 387621 - DNA, 120 bp, Artificial Sequence
  ENSG00000144460_26 (sequence is synthesized)
cgttactgttaagtattataggtgttaagtagggtggtgtcattctggaatgttttctctctgcttcctagcttcaatctttgcattcatgaaactcttctgaaatagcaacttataaaa

SEQ ID NO: 387622 - DNA, 120 bp, Artificial Sequence
  ENSG00000144460_27 (sequence is synthesized)
cactgatgatacctccaagggaactgcccattactgatgagaaaattacatattcatctattattttaaatgtcaggctattttaaaaacataactaagtagaataattgcgttttcttc

SEQ ID NO: 387623 - DNA, 120 bp, Artificial Sequence
  ENSG00000144460_28 (sequence is synthesized)
taatgagagacattgtgcctcttagtgtttttgtctgacttaaatatgcaaaatagttgatttataaatatatgaggtatctgcaaatacaagaaatgagaggcttctctcaagggtatc

SEQ ID NO: 387624 - DNA, 120 bp, Artificial Sequence
  ENSG00000144460_29 (sequence is synthesized)
tcaagtaccatttagaatttcttgtgtcttaatttaaaatttaaatgcctttatataaatgttaaatgcctttataactaaatgtaccaactcaaacactttttggatataaaagaagta

SEQ ID NO: 387625 - DNA, 120 bp, Artificial Sequence
  ENSG00000144460_30 (sequence is synthesized)
gaaacagtaagacactgaataaaataaataagataaactgccaacttagctaattaaagctattccaaaaatattgtacttaccaacatttaaagcttaaaaacattgggtactgaaaga

SEQ ID NO: 387626 - DNA, 120 bp, Artificial Sequence
  ENSG00000144460_31 (sequence is synthesized)
agagaagtttagctaattggcagaggattgcactaatacaatcaagttttcaagtttatgacccttgctagtatattaccttcaatatctcagagatgttttgtattatttgttttgttt

SEQ ID NO: 387627 - DNA, 120 bp, Artificial Sequence
  ENSG00000144460_32 (sequence is synthesized)
tgcttttttcctagttgtctttatagctgtttcaccctaagccccttcaaactctcaatgaaagcaggttcttgggataaacttccagaatagagacaaggtataccctttgtgcctttg

SEQ ID NO: 387628 - DNA, 120 bp, Artificial Sequence
  ENSG00000144460_33 (sequence is synthesized)
cattatcaactctttgttcacctgatgggaagttcttcgtttttcaaaatgtagcaagggagaaagcccaggacgcctttatatgctgttagtttccttacctgctgatagagattctga

SEQ ID NO: 387629 - DNA, 120 bp, Artificial Sequence
  ENSG00000144460_34 (sequence is synthesized)
cacacagtcaaatcatacatgggctgtcagagctataaattagaaggctggcctctaggcttctcctctgtggcttatagccagttgtaatatacatgcattcctatactctagagatga

SEQ ID NO: 387630 - DNA, 120 bp, Artificial Sequence
  ENSG00000144460_35 (sequence is synthesized)
ttcctatactctagagatgaagtggtaagcatagctcatatgaacactgctctgaactcctctgacttagcattcaacttaagtcaagaaatacttattggctgggcgtggtggctcacg

SEQ ID NO: 387631 - DNA, 120 bp, Artificial Sequence
  ENSG00000144460_36 (sequence is synthesized)
agtaattgtgtgcatggctcggctgtgcagggagggtggaggcaaaattgatatcaaataagggtatcaaactgagatctagatgttccatttaagttgttgttcattttcattagccac

SEQ ID NO: 387632 - DNA, 120 bp, Artificial Sequence
  ENSG00000144460_37 (sequence is synthesized)
gccaggggtgaaatgcttataacttaaccattctctgtagtaagaacatttgttttcaatggatttatatttttcctctccataaagactgaattagtgctatagtgaatataaatgaag

SEQ ID NO: 387633 - DNA, 120 bp, Artificial Sequence
  ENSG00000144460_38 (sequence is synthesized)
ggtgtttctttaccctcttttccttttattatttactaatcagacttcagctcagttagataaaagagagaggttctgttgcctagatgtgaggcctttaatgaggatgggagcccccag

SEQ ID NO: 387634 - DNA, 120 bp, Artificial Sequence
  ENSG00000144460_39 (sequence is synthesized)
ggagccgaaatccaaagtagaacgatgccgctttccggtttcttgcaatttcttcagttgcttctcccttttccaatgggcctagtgagcaggaactatccaaggtgctagaacgctggc

SEQ ID NO: 387635 - DNA, 120 bp, Artificial Sequence
  ENSG00000144460_40 (sequence is synthesized)
agccttgccgttcaatgcagacggattgcagaaacagagaagaaagattactgcttatttcagaagaatataatcaaatgaggtacattagccagcttggtgattgcttctggtcctgta

SEQ ID NO: 387636 - DNA, 120 bp, Artificial Sequence
  ENSG00000144460_41 (sequence is synthesized)
atcatctgtgtagcaaagtgggtaaaatcattcaatttcttccctgctggacctggaaggagaggggctgtgtgttcatccccacccattagctatgccctcttttctccgaatgtcgat

SEQ ID NO: 387637 - DNA, 120 bp, Artificial Sequence
  ENSG00000144460_42 (sequence is synthesized)
ttaaggaagcaagcacctgtcttccgccactgcatcttcctagcaaactttaaaggccattttatctgataggaaggacatcgagaatgctctgatctagtgatgaagaatctgggagtc

SEQ ID NO: 387638 - DNA, 120 bp, Artificial Sequence
  ENSG00000144468_0 (sequence is synthesized)
acaactaagcatgcgccgcggccgagccgtccgctttaaggccctcccctcccgcacccggccccaggaacccggggcgccccggatcgggaacgtgcgtgatgacgcacgtgcgcgcga

SEQ ID NO: 387639 - DNA, 120 bp, Artificial Sequence
  ENSG00000144468_1 (sequence is synthesized)
agacgtggggacgcaggcgggtcgtagagagcgttcagccgtctgtatatctccccagatacctgaaactgaccacctgagtacgttttcccattgctgagctgtttccctgatatctgg

SEQ ID NO: 387640 - DNA, 120 bp, Artificial Sequence
  ENSG00000144468_2 (sequence is synthesized)
ccatgcaacggagatcaagagggataaatactggacttattctactcctttctcaaatcttccatgttgggatcaacaatattccacctgtcaccctagcaactttggccctcaacatct

SEQ ID NO: 387641 - DNA, 120 bp, Artificial Sequence
  ENSG00000144468_3 (sequence is synthesized)
ggttcttcttgaaccctcagaagccactgtatagctcctgccttagtgtggagaagtgttaccagcaaaaagactggcagcgtttactgctctctccccttcaccatgctgatgattggc

SEQ ID NO: 387642 - DNA, 120 bp, Artificial Sequence
  ENSG00000144468_4 (sequence is synthesized)
atttgtatttcaatatggcatccatgctctggaaaggaataaatctagaaagaagactgggaagtagatggtttgcctatgttatcaccgcattttctgtacttactggagtggtatacc

SEQ ID NO: 387643 - DNA, 120 bp, Artificial Sequence
  ENSG00000144468_5 (sequence is synthesized)
tgctcttgcaatttgctgttgccgaatttatggatgaacctgacttcaaaaggagctgtgctgtaggtttctcaggagttttgtttgctttgaaagttcttaacaaccattattgccctg

SEQ ID NO: 387644 - DNA, 120 bp, Artificial Sequence
  ENSG00000144468_6 (sequence is synthesized)
gaggctttgtcaacattttgggctttcctgtaccgaacagatttgcttgttgggtcgaacttgtggctattcatttattctcaccagggacttccttcgctgggcatctggctgggattc

SEQ ID NO: 387645 - DNA, 120 bp, Artificial Sequence
  ENSG00000144468_7 (sequence is synthesized)
ttgttggactaatgtacactcaagggcctctgaagaaaatcatggaagcatgtgcaggcggtttttcctccagtgttggttacccaggacggcaatactactttaatagttcaggcagct

SEQ ID NO: 387646 - DNA, 120 bp, Artificial Sequence
  ENSG00000144468_8 (sequence is synthesized)
ctggatatcaggattattatccgcatggcaggccagatcactatgaagaagcacccaggaactatgacacgtacacagcaggactgagtgaagaagaacagctcgagagagcattacaag

SEQ ID NO: 387647 - DNA, 120 bp, Artificial Sequence
  ENSG00000144468_9 (sequence is synthesized)
ccagcctctgggaccgaggaaataccagaaatagcccaccaccctacgggtttcatctctcaccagaagaaatgaggagacagcggcttcacagattcgatagccagtgaggtggcatct

SEQ ID NO: 387648 - DNA, 120 bp, Artificial Sequence
  ENSG00000144468_10 (sequence is synthesized)
tgggaagacatggcctattcgtgtaattattgcccatttggctcattccccaagcccctaattcattttaattcattttaaacaaaagcagagtacaccggtattgctccagatcgctca

SEQ ID NO: 387649 - DNA, 120 bp, Artificial Sequence
  ENSG00000144468_11 (sequence is synthesized)
catcacctgggacagtcccatggcccctatgagtcaactcacagcttgcggggagtgggccttctcctggccttgttcttgctcataaacaggtcacttcctccatgaagagaccagttt

SEQ ID NO: 387650 - DNA, 120 bp, Artificial Sequence
  ENSG00000144468_12 (sequence is synthesized)
ccacgctcccatctctcactgctgactcagcgatgcctctgcctcggtctgcttttgaagactgtgaccttcaccaggaggttttacttacaccagtcgggaagattagtccctcattct

SEQ ID NO: 387651 - DNA, 120 bp, Artificial Sequence
  ENSG00000144468_13 (sequence is synthesized)
gcctggagtgccccgtgtttgacttggcagcgggtgtggagccatccccgcgtcctcctggcgcattgccactgtggctgtccaggaacaggatgtggctgccttggccgaatgttgtcc

SEQ ID NO: 387652 - DNA, 120 bp, Artificial Sequence
  ENSG00000144468_14 (sequence is synthesized)
tactctccccaaccccggcgcctcagctcctcagctcctcgggcccctgcgtctggctggtgtttgcagggctttcgctctgctctggtattgctctgcctttatagaaagtcttattga

SEQ ID NO: 387653 - DNA, 120 bp, Artificial Sequence
  ENSG00000144468_15 (sequence is synthesized)
agaagtgtaagaaagacctaaggtggggaagactcctacacacaccattagtatcagtgacaccagcaatgtaggttcccagccccttcccagtggcagcttgtgtgtccaggagatagg

SEQ ID NO: 387654 - DNA, 120 bp, Artificial Sequence
  ENSG00000144468_16 (sequence is synthesized)
acatcatttaacgcatcagcaaagtagcagcagatgccacatacagagtagagcgaaggcatttggtggatcggtcactagagatctatcttgcagaaagtatgtttttcctcataaaag

SEQ ID NO: 387655 - DNA, 120 bp, Artificial Sequence
  ENSG00000144468_17 (sequence is synthesized)
tgcctcttaattggccattgtaccagccacttgtcctagccaaatgtccaaaacacgcccttgggccccgccacgttacaatccacagattgtctgtctgagtcgtttaaggcatttcct

SEQ ID NO: 387656 - DNA, 120 bp, Artificial Sequence
  ENSG00000144468_18 (sequence is synthesized)
ggtgcttgtgttccatgaataaaaggacaaagtcagaagatcactgatgtcttactgtcaacagagatattttaaaagagagaagcaggaaaagatcttccttttttgatctacaactta

SEQ ID NO: 387657 - DNA, 120 bp, Artificial Sequence
  ENSG00000144468_19 (sequence is synthesized)
tatagttttctgattatgcacataatagatatgccttccagatgcataaggcaaacatctggaaagaaatatacccaaatcttagcaggggttatctttgggagtggagtacatgggatt

SEQ ID NO: 387658 - DNA, 120 bp, Artificial Sequence
  ENSG00000144468_20 (sequence is synthesized)
catatttaataacatatagtcaagaaaacagacttaaaaataaatactatgtgtccattgagaaaattcacaatataaacagaaatacaaataaatacatacacaattttaaagtcacct

SEQ ID NO: 387659 - DNA, 120 bp, Artificial Sequence
  ENSG00000144468_21 (sequence is synthesized)
gtagccctacccttagaggtacccagggttaacattttggtggtattgtcttatcaatttttccgttgatacattcagcaaatttggagcacattgaccatggagttttgtgtccaaatc

SEQ ID NO: 387660 - DNA, 120 bp, Artificial Sequence
  ENSG00000144468_22 (sequence is synthesized)
caatctgaatttacctggaagaggccttgacacctgcatggaaatgagctaagaaaaccactggagccttgggagctctttggcctcctggctggcccagtaatatctgagctcctttgg

SEQ ID NO: 387661 - DNA, 120 bp, Artificial Sequence
  ENSG00000144468_23 (sequence is synthesized)
ttaatttataactgatataaaactacatcttctttataatataaattgtacctgtgagtctagaagctttaaatgtgtttaaattaaaatattcaagctaaatgttactgctctctccca

SEQ ID NO: 387662 - DNA, 120 bp, Artificial Sequence
  ENSG00000144468_24 (sequence is synthesized)
aattctgtaagtttgactcccgttaccccaattagaagtaacttctttgtttcatgccacttttatagcatttggtaattctgctataacacatcttgcccctattattaactgtgcaca

SEQ ID NO: 387663 - DNA, 120 bp, Artificial Sequence
  ENSG00000144468_25 (sequence is synthesized)
gctacacaaaggtgtgccttctacgtgggaacatggattgtgaatgactctgtaatgaggcctgagtcttagttatctttccactcactccccgtctcccctttccaaccccaaaggctc

SEQ ID NO: 387664 - DNA, 120 bp, Artificial Sequence
  ENSG00000144468_26 (sequence is synthesized)
acgataggggctcactaaatgtcagtgtttcaccaaagtattttttccattgtattaagagtccagtcactgtatatggaagtattttattttttatttttttatatcacttgagtccac

SEQ ID NO: 387665 - DNA, 120 bp, Artificial Sequence
  ENSG00000144468_27 (sequence is synthesized)
tagtagtacttccttgctctgtttgacttgtcagatacaaagacacgggattagattttgggtggtaaaattgtgatacgcatggctgttgatggagtggaacatcttagtgatgtgaga

SEQ ID NO: 387666 - DNA, 120 bp, Artificial Sequence
  ENSG00000144468_28 (sequence is synthesized)
aaggtcattttagttataaatgtaaaccaattactttagcacaacaataaagatgttctggaaattattataattattttagttaatggacttgcctgtaacaagtgcttatgtttggaa

SEQ ID NO: 387667 - DNA, 120 bp, Artificial Sequence
  ENSG00000144468_29 (sequence is synthesized)
tgtccattttattttattttcctctacaataaggaatccctaaagttatgccaacaaactggaattggattgagaaagacaaaagcaagtgagcaagtgtattagactaattatctctag

SEQ ID NO: 387668 - DNA, 120 bp, Artificial Sequence
  ENSG00000144468_30 (sequence is synthesized)
tagggaataagcacttagagctaattttttaatttggtttatttattagtagctccctgattgtctgttaagcccctggttcccacagtttggtgtggtcagtcaacttaagcgaccttt

SEQ ID NO: 387669 - DNA, 120 bp, Artificial Sequence
  ENSG00000144468_31 (sequence is synthesized)
taatgcagaatctttacttggttctgaagaggaggcagtagttaaaattgcttcctcttaatgactctgaatgtattgcctgtgattccaaagttgtacataattgttcagacctcctcc

SEQ ID NO: 387670 - DNA, 120 bp, Artificial Sequence
  ENSG00000144468_32 (sequence is synthesized)
atccttttaaattgcctgctgcagtaaataactagtttgagtagaactagatcctgtctatctatttggcacatgttctgctgcctggggagtaagcaagctaaagggatgagaaagacc

SEQ ID NO: 387671 - DNA, 120 bp, Artificial Sequence
  ENSG00000144468_33 (sequence is synthesized)
acctccccctaccctggaaattgcactgcaaggcagggcgagaatggggtagctggcagacctggcctccttgttcccagtcttagtttttcttgagagattcagtattcagtaaagaat

SEQ ID NO: 387672 - DNA, 120 bp, Artificial Sequence
  ENSG00000144468_34 (sequence is synthesized)
agcattcaattagtcaaaaaatatatatataacttcttcctttcccttcccatgaatcattgcagtcattccctaagtttcttctctttttttttcatggctgctagtattttattttag

SEQ ID NO: 387673 - DNA, 120 bp, Artificial Sequence
  ENSG00000144468_35 (sequence is synthesized)
aatcacagactctcagcttagagagtcacagtatctcaattatttgctctgttcaatacttaacaatacctcctcactcaattctacataactccagcttagtcttccaaaattcacttt

SEQ ID NO: 387674 - DNA, 120 bp, Artificial Sequence
  ENSG00000144468_36 (sequence is synthesized)
catgatgccactcagcatctcaaatacctttcattggctctctgctgccaaaggataaaggtcaaagtcattagcctcaacagtgggcttcaaccagcctttggacctcagccccattta

SEQ ID NO: 387675 - DNA, 120 bp, Artificial Sequence
  ENSG00000144468_37 (sequence is synthesized)
tccatcacagaggctggtaactagtctcactgctcaggctgtgagtgttcctgatcttgtgacattctgtgctgtgcttttacatggaacagctctttcctctctcttggcccattcaga

SEQ ID NO: 387676 - DNA, 120 bp, Artificial Sequence
  ENSG00000144468_38 (sequence is synthesized)
tcctcctcatccagcccccatctgaatcctgtaacagacacaaccacatctacacagtttccacataccacttggaattgctggttatgctgcaatgagagaatgtctttgtctttaaat

SEQ ID NO: 387677 - DNA, 120 bp, Artificial Sequence
  ENSG00000144468_39 (sequence is synthesized)
tgtaagcttcatgagggcagggaccatctgtttctctgtctctcctcacagtgccttgagcagtacgttgtctggaatgtcagaaccaataaatacttgtggattgaaacaaaaagagaa

SEQ ID NO: 387678 - DNA, 120 bp, Artificial Sequence
  ENSG00000144468_40 (sequence is synthesized)
gaagacgtggggacgcaggcgggtcgtagagagcgggtccattgtagggggagaaagaaatattcaggatttaaagcagctgctctaaaggctacattcactgcaatgttgagaagggag

SEQ ID NO: 387679 - DNA, 120 bp, Artificial Sequence
  ENSG00000144468_41 (sequence is synthesized)
cctcttaaacagaatcttacctgtaaaactcaggagccgagaagctttaagaacagtgaggttgaagggcacaggctcttggtccttggcagcgatattaggaggcgtgcctagggaacc

SEQ ID NO: 387680 - DNA, 120 bp, Artificial Sequence
  ENSG00000144468_42 (sequence is synthesized)
tcggattccggggagctggacgtgaaactctgtggtggaatagaaatcctcagggcatgagctatacctaaaacgtaatggtattaagaattctggttcagccgtctgtatatctcccca

SEQ ID NO: 387681 - DNA, 120 bp, Artificial Sequence
  ENSG00000144468_43 (sequence is synthesized)
ataaaggtcagaacagacaaaggacccagatgcctgggaagcctgaagcaggccgcagtttggacctaaggaatcctttgaggctgcagggtccctgtagtggagttgagcaaagactca

SEQ ID NO: 387682 - DNA, 87 bp, Artificial Sequence
  ENSG00000144468_44 (sequence is synthesized)
tctttggccttctgatctcttcagctttgtttggagacagtctctttctgcatcactgtaaccgctgcctccagggttcaaacgatt

SEQ ID NO: 387683 - DNA, 120 bp, Artificial Sequence
  ENSG00000144468_45 (sequence is synthesized)
tgtatttttagtagagacggtttcaccacgtttgccaagctggtcccgaactcctgacctcaggggtccattgtagggggagaaagaaatattcaggatttaaagcagctgctctaaagg

SEQ ID NO: 387684 - DNA, 120 bp, Artificial Sequence
  ENSG00000144468_46 (sequence is synthesized)
cttagtctctagatgtaaaaaccgggaaagccatattagaaaaaatatttagatttcaaattaatatgtagtgctttgttaacagagcatttaatgatccctttgaatcctgtttatgag

SEQ ID NO: 387685 - DNA, 120 bp, Artificial Sequence
  ENSG00000144468_47 (sequence is synthesized)
agacgtggggacgcaggcgggtcgtagagagcgggtccattgtagggggagaaagaaatattcaggatttaaagcagctgctctaaaggctacattcactgcaatgttgagaaggttcag

SEQ ID NO: 387686 - DNA, 120 bp, Artificial Sequence
  ENSG00000144468_48 (sequence is synthesized)
gtaaggtagtctgaaaaagagctatttgtagcaaattaaattttaaacagttcagaaaaaggatatgtagatgaaaactgtgtgcagattgtgattacaaagaatggggtgtgatgccat

SEQ ID NO: 387687 - DNA, 120 bp, Artificial Sequence
  ENSG00000144468_49 (sequence is synthesized)
attcccagcaacctaagctaataaggtgccagactgtgtatgtattgttaaagtggttctttttatagtcctgctgtacttgatgctttggcattaaagtcaagaaacttaaaattctta

SEQ ID NO: 387688 - DNA, 120 bp, Artificial Sequence
  ENSG00000144468_50 (sequence is synthesized)
gaattgaaggacacaggaaccccatggaaaacgacccagcatgtggaagctgctgtctgatgcctcctggaagaggagggtcaccctgagggtgtggcccttggccctccctctctcatt

SEQ ID NO: 387689 - DNA, 120 bp, Artificial Sequence
  ENSG00000144468_51 (sequence is synthesized)
tcattcagccgtgccaaattgactgagtagacagtcctactgccttctgtagggacaagaaagagtgaagtcccctaggaagggtagggaggatggctctcctaacaccttctttgagga

SEQ ID NO: 387690 - DNA, 120 bp, Artificial Sequence
  ENSG00000144468_52 (sequence is synthesized)
aggttctccatttagccagagtgtctctgcttgtacagagacatcaaagccgaggcttggtactttggcaggcaaagactaaggaacttcagcggtttttcctccagtgttggttaccca

SEQ ID NO: 387691 - DNA, 120 bp, Artificial Sequence
  ENSG00000144468_53 (sequence is synthesized)
tggaagcatgtgcaggtacagaataaaacacctttggcatgacaacagcttggaagttcatgttaattttaatgtgaacagaagcaaccccaagtttccctgtggttcagctcaagaatt

SEQ ID NO: 387692 - DNA, 120 bp, Artificial Sequence
  ENSG00000144468_54 (sequence is synthesized)
gagagcgtgagtttccgcgtctgtttggtccggctgctgtcgttggttgtgagcggcatctctcgccgtttccccgggctgcgggagctggcggccgggctggggctgctgggcggagct

SEQ ID NO: 387693 - DNA, 120 bp, Artificial Sequence
  ENSG00000144476_0 (sequence is synthesized)
acagttgttgcaaagtgctcagcactaagggagccagcgcacagcacagccaggaaggcgagcgagcccagccagcccagccagcccagccagcccggaggtcatttgattgcccgcctc

SEQ ID NO: 387694 - DNA, 120 bp, Artificial Sequence
  ENSG00000144476_1 (sequence is synthesized)
agaacgatggatctgcatctcttcgactactcagagccagggaacttctcggacatcagctggccatgcaacagcagcgactgcatcgtggtggacacggtgatgtgtcccaacatgccc

SEQ ID NO: 387695 - DNA, 120 bp, Artificial Sequence
  ENSG00000144476_2 (sequence is synthesized)
aacaaaagcgtcctgctctacacgctctccttcatttacattttcatcttcgtcatcggcatgattgccaactccgtggtggtctgggtgaatatccaggccaagaccacaggctatgac

SEQ ID NO: 387696 - DNA, 120 bp, Artificial Sequence
  ENSG00000144476_3 (sequence is synthesized)
acgcactgctacatcttgaacctggccattgccgacctgtgggttgtcctcaccatcccagtctgggtggtcagtctcgtgcagcacaaccagtggcccatgggcgagctcacgtgcaaa

SEQ ID NO: 387697 - DNA, 120 bp, Artificial Sequence
  ENSG00000144476_4 (sequence is synthesized)
gtcacacacctcatcttctccatcaacctcttcggcagcattttcttcctcacgtgcatgagcgtggaccgctacctctccatcacctacttcaccaacacccccagcagcaggaagaag

SEQ ID NO: 387698 - DNA, 120 bp, Artificial Sequence
  ENSG00000144476_5 (sequence is synthesized)
atggtacgccgtgtcgtctgcatcctggtgtggctgctggccttctgcgtgtctctgcctgacacctactacctgaagaccgtcacgtctgcgtccaacaatgagacctactgccggtcc

SEQ ID NO: 387699 - DNA, 120 bp, Artificial Sequence
  ENSG00000144476_6 (sequence is synthesized)
ttctaccccgagcacagcatcaaggagtggctgatcggcatggagctggtctccgttgtcttgggctttgccgttcccttctccattatcgctgtcttctacttcctgctggccagagcc

SEQ ID NO: 387700 - DNA, 120 bp, Artificial Sequence
  ENSG00000144476_7 (sequence is synthesized)
atctcggcgtccagtgaccaggagaagcacagcagccggaagatcatcttctcctacgtggtggtcttccttgtctgctggctgccctaccacgtggcggtgctgctggacatcttctcc

SEQ ID NO: 387701 - DNA, 120 bp, Artificial Sequence
  ENSG00000144476_8 (sequence is synthesized)
caaccctgtcctctacagcttcatcaatcgcaactacaggtacgagctgatgaaggccttcatcttcaagtactcggccaaaacagggctcaccaagctcatcgatgcctccagagtctc

SEQ ID NO: 387702 - DNA, 120 bp, Artificial Sequence
  ENSG00000144476_9 (sequence is synthesized)
agagacggagtactctgccttggagcagagcaccaaatgatctgccctggagaggctctgggacgggtttacttgtttttgaacagggtgatgggccctatggttttctagagcaaagca

SEQ ID NO: 387703 - DNA, 120 bp, Artificial Sequence
  ENSG00000144476_10 (sequence is synthesized)
aagtagcttcgggtcttgatgcttgagtagagtgaagaggggagcacgtgccccctgcatccattctctctttctcttgatgacgcagctgtcatttggctgtgcgtgctgacagttttg

SEQ ID NO: 387704 - DNA, 120 bp, Artificial Sequence
  ENSG00000144476_11 (sequence is synthesized)
caacaggcagagctgtgtcgcacagcagtgctgtgcgtcagagccagctgaggacaggcttgcctggacttctgtaagataggattttctgtgtttcctgaattttttatatggtgattt

SEQ ID NO: 387705 - DNA, 120 bp, Artificial Sequence
  ENSG00000144476_12 (sequence is synthesized)
gtatttaaattttaagactttattttctcactattggtgtaccttataaatgtatttgaaagttaaatatattttaaatattgtttgggaggcatagtgctgacatatattcagagtgtt

SEQ ID NO: 387706 - DNA, 120 bp, Artificial Sequence
  ENSG00000144476_13 (sequence is synthesized)
tgacatatattcagagtgttgtagttttaaggttagcgtgacttcagttttgactaaggatgacactaattgttagctgttttgaaattatatatatataaatatatataaatatataaa

SEQ ID NO: 387707 - DNA, 120 bp, Artificial Sequence
  ENSG00000144476_14 (sequence is synthesized)
aatgttttatttaccatagttttatatctgtgtggtgttttgtaccggcacgggatatggaacgaaaactgctttgtaatgcagtttgtgacattaatagtattgtaaagttacatttta

SEQ ID NO: 387708 - DNA, 120 bp, Artificial Sequence
  ENSG00000144476_15 (sequence is synthesized)
aaataaacaaaaaactgttctggactgcaaatctgcacacacaacgaacagttgcatttcagagagttctctcaatttgtaagttatttttttttaataaagatttttgtttcctaaaaa

SEQ ID NO: 387709 - DNA, 120 bp, Artificial Sequence
  ENSG00000144481_0 (sequence is synthesized)
agagaccagcaggatccttgggtgaaagaaaatcctgcttgacaaaaaccgtcacttaggaaaagatgtcctttcgggcagccaggctcagcatgaggaacagaaggaatgacactctgg

SEQ ID NO: 387710 - DNA, 120 bp, Artificial Sequence
  ENSG00000144481_1 (sequence is synthesized)
acagcacccggaccctgtactccagcgcgtctcggagcacagacttgtcttacagtgaaagcgacttggtgaattttattcaagcaaattttaagaaacgagaatgtgtcttctttacca

SEQ ID NO: 387711 - DNA, 120 bp, Artificial Sequence
  ENSG00000144481_2 (sequence is synthesized)
aagattccaaggccacggagaatgtgtgcaagtgtggctatgcccagagccagcacatggaaggcacccagatcaaccaaagtgagaaatggaactacaagaaacacaccaaggaatttc

SEQ ID NO: 387712 - DNA, 120 bp, Artificial Sequence
  ENSG00000144481_3 (sequence is synthesized)
ctaccgacgcctttggggatattcagtttgagacactggggaagaaagggaagtatatacgtctgtcctgcgacacggacgcggaaatcctttacgagctgctgacccagcactggcacc

SEQ ID NO: 387713 - DNA, 120 bp, Artificial Sequence
  ENSG00000144481_4 (sequence is synthesized)
tgaaaacacccaacctggtcatttctgtgaccgggggcgccaagaacttcgccctgaagccgcgcatgcgcaagatcttcagccggctcatctacatcgcgcagtccaaaggtgcttgga

SEQ ID NO: 387714 - DNA, 120 bp, Artificial Sequence
  ENSG00000144481_5 (sequence is synthesized)
ttctcacgggaggcacccattatggcctgatgaagtacatcggggaggtggtgagagataacaccatcagcaggagttcagaggagaatattgtggccattggcatagcagcttggggca

SEQ ID NO: 387715 - DNA, 120 bp, Artificial Sequence
  ENSG00000144481_6 (sequence is synthesized)
tggtctccaaccgggacaccctcatcaggaattgcgatgctgagggctattttttagcccagtaccttatggatgacttcacaagagatccactgtatatcctggacaacaaccacacac

SEQ ID NO: 387716 - DNA, 120 bp, Artificial Sequence
  ENSG00000144481_7 (sequence is synthesized)
atttgctgctcgtggacaatggctgtcatggacatcccactgtcgaagcaaagctccggaatcagctagagaagtatatctctgagcgcactattcaagattccaactatggtggcaaga

SEQ ID NO: 387717 - DNA, 120 bp, Artificial Sequence
  ENSG00000144481_8 (sequence is synthesized)
tccccattgtgtgttttgcccaaggaggtggaaaagagactttgaaagccatcaatacctccatcaaaaataaaattccttgtgtggtggtggaaggctcgggccagatcgctgatgtga

SEQ ID NO: 387718 - DNA, 120 bp, Artificial Sequence
  ENSG00000144481_9 (sequence is synthesized)
tcgctagcctggtggaggtggaggatgccctgacatcttctgccgtcaaggagaagctggtgcgctttttaccccgcacggtgtcccggctgcctgaggaggagactgagagttggatca

SEQ ID NO: 387719 - DNA, 120 bp, Artificial Sequence
  ENSG00000144481_10 (sequence is synthesized)
aatggctcaaagaaattctcgaatgttctcacctattaacagttattaaaatggaagaagctggggatgaaattgtgagcaatgccatctcctacgctctatacaaagccttcagcacca

SEQ ID NO: 387720 - DNA, 120 bp, Artificial Sequence
  ENSG00000144481_11 (sequence is synthesized)
gtgagcaagacaaggataactggaatgggcagctgaagcttctgctggagtggaaccagctggacttagccaatgatgagattttcaccaatgaccgccgatgggagtctgctgaccttc

SEQ ID NO: 387721 - DNA, 120 bp, Artificial Sequence
  ENSG00000144481_12 (sequence is synthesized)
aagaagtcatgtttacggctctcataaaggacagacccaagtttgtccgcctctttctggagaatggcttgaacctacggaagtttctcacccatgatgtcctcactgaactcttctcca

SEQ ID NO: 387722 - DNA, 120 bp, Artificial Sequence
  ENSG00000144481_13 (sequence is synthesized)
accacttcagcacgcttgtgtaccggaatctgcagatcgccaagaattcctataatgatgccctcctcacgtttgtctggaaactggttgcgaacttccgaagaggcttccggaaggaag

SEQ ID NO: 387723 - DNA, 120 bp, Artificial Sequence
  ENSG00000144481_14 (sequence is synthesized)
acagaaatggccgggacgagatggacatagaactccacgacgtgtctcctattactcggcaccccctgcaagctctcttcatctgggccattcttcagaataagaaggaactctccaaag

SEQ ID NO: 387724 - DNA, 120 bp, Artificial Sequence
  ENSG00000144481_15 (sequence is synthesized)
tcatttgggagcagaccaggggctgcactctggcagccctgggagccagcaagcttctgaagactctggccaaagtgaagaacgacatcaatgctgctggggagtccgaggagctggcta

SEQ ID NO: 387725 - DNA, 120 bp, Artificial Sequence
  ENSG00000144481_16 (sequence is synthesized)
atgagtacgagacccgggctgttgagctgttcactgagtgttacagcagcgatgaagacttggcagaacagctgctggtctattcctgtgaagcttggggtggaagcaactgtctggagc

SEQ ID NO: 387726 - DNA, 120 bp, Artificial Sequence
  ENSG00000144481_17 (sequence is synthesized)
tggcggtggaggccacagaccagcatttcatcgcccagcctggggtccagaattttctttctaagcaatggtatggagagatttcccgagacaccaagaactggaagattatcctgtgtc

SEQ ID NO: 387727 - DNA, 120 bp, Artificial Sequence
  ENSG00000144481_18 (sequence is synthesized)
tgtttattatacccttggtgggctgtggctttgtatcatttaggaagaaacctgtcgacaagcacaagaagctgctttggtactatgtggcgttcttcacctcccccttcgtggtcttct

SEQ ID NO: 387728 - DNA, 120 bp, Artificial Sequence
  ENSG00000144481_19 (sequence is synthesized)
cctggaatgtggtcttctacatcgccttcctcctgctgtttgcctacgtgctgctcatggatttccattcggtgccacacccccccgagctggtcctgtactcgctggtctttgtcctct

SEQ ID NO: 387729 - DNA, 120 bp, Artificial Sequence
  ENSG00000144481_20 (sequence is synthesized)
tctgtgatgaagtgagacagtggtacgtaaatggggtgaattattttactgacctgtggaatgtgatggacacgctggggcttttttacttcatagcaggaattgtatttcggctccact

SEQ ID NO: 387730 - DNA, 120 bp, Artificial Sequence
  ENSG00000144481_21 (sequence is synthesized)
cttctaataaaagctctttgtattctggacgagtcattttctgtctggactacattattttcactctaagattgatccacatttttactgtaagcagaaacttaggacccaagattataa

SEQ ID NO: 387731 - DNA, 120 bp, Artificial Sequence
  ENSG00000144481_22 (sequence is synthesized)
tgctgcagaggatgctgatcgatgtgttcttcttcctgttcctctttgcggtgtggatggtggcctttggcgtggccaggcaagggatccttaggcagaatgagcagcgctggaggtgga

SEQ ID NO: 387732 - DNA, 120 bp, Artificial Sequence
  ENSG00000144481_23 (sequence is synthesized)
gttcggtcatctacgagccctacctggccatgttcggccaggtgcccagtgacgtggatggtaccacgtatgactttgcccactgcaccttcactgggaatgagtccaagccactgtgtg

SEQ ID NO: 387733 - DNA, 120 bp, Artificial Sequence
  ENSG00000144481_24 (sequence is synthesized)
tggagctggatgagcacaacctgccccggttccccgagtggatcaccatccccctggtgtgcatctacatgttatccaccaacatcctgctggtcaacctgctggtcgccatgtttggct

SEQ ID NO: 387734 - DNA, 120 bp, Artificial Sequence
  ENSG00000144481_25 (sequence is synthesized)
acacggtgggcaccgtccaggagaacaatgaccaggtctggaagttccagaggtacttcctggtgcaggagtactgcagccgcctcaatatccccttccccttcatcgtcttcgcttact

SEQ ID NO: 387735 - DNA, 120 bp, Artificial Sequence
  ENSG00000144481_26 (sequence is synthesized)
tctacatggtggtgaagaagtgcttcaagtgttgctgcaaggagaaaaacatggagtcttctgtctgctgtttcaaaaatgaagacaatgagactctggcatgggagggtgtcatgaagg

SEQ ID NO: 387736 - DNA, 120 bp, Artificial Sequence
  ENSG00000144481_27 (sequence is synthesized)
aaaactaccttgtcaagatcaacacaaaagccaacgacacctcagaggaaatgaggcatcgatttagacaactggatacaaagcttaatgatctcaagggtcttctgaaagagattgcta

SEQ ID NO: 387737 - DNA, 120 bp, Artificial Sequence
  ENSG00000144481_28 (sequence is synthesized)
ataaaatcaaataaaactgtatgaactctaatggagaaaaatctaattatagcaagatcatattaaggaatgctgatgaacaattttgctatcgactactaaatgagagattttcagacc

SEQ ID NO: 387738 - DNA, 120 bp, Artificial Sequence
  ENSG00000144481_29 (sequence is synthesized)
cctgggtacatggtggatgattttaaatcaccctagtgtgctgagaccttgagaataaagtgtgtgattggtttcatacttgaagacggatataaaggaagaatatttcctttatgtgtt

SEQ ID NO: 387739 - DNA, 120 bp, Artificial Sequence
  ENSG00000144481_30 (sequence is synthesized)
tctccagaatggtgcctgtttctctctgtgtctcaatgcctgggactggaggttgatagtttaagtgtgttcttaccgcctcctttttcctttaatcttatttttgatgaacacatatat

SEQ ID NO: 387740 - DNA, 120 bp, Artificial Sequence
  ENSG00000144481_31 (sequence is synthesized)
aggagaacatctatcctatgaataagaacctggtcatgctttactcctgtattgttattttgttcatttccaattgattctctacttttcccttttttgtattatgtgactaattagttg

SEQ ID NO: 387741 - DNA, 120 bp, Artificial Sequence
  ENSG00000144481_32 (sequence is synthesized)
gcatattgttaaaagtctctcaaattaggccagattctaaaacatgctgcagcaagaggaccccgctctcttcaggaaaagtgttttcatttctcaggatgcttcttacctgtcagagga

SEQ ID NO: 387742 - DNA, 120 bp, Artificial Sequence
  ENSG00000144481_33 (sequence is synthesized)
ggtgacaaggcagtctcttgctctcttggactcaccaggctcctattgaaggaaccacccccattcctaaatatgtgaaaagtcgcccaaaatgcaaccttgaaaggcactactgacttt

SEQ ID NO: 387743 - DNA, 120 bp, Artificial Sequence
  ENSG00000144481_34 (sequence is synthesized)
gttcttattggatactcctcttattatttttccattaaaaataatagctggctattatagaaaatttagaccatacagagatgtagaaagaacataaattgtccccattaccttaaggta

SEQ ID NO: 387744 - DNA, 120 bp, Artificial Sequence
  ENSG00000144481_35 (sequence is synthesized)
atcactgctaacaatttctggatggtttttcaagtctattttttttctatgtatgtctcaattctctttcaaaattttacagaatgttatcatactacatatatactttttatgtaagct

SEQ ID NO: 387745 - DNA, 120 bp, Artificial Sequence
  ENSG00000144481_36 (sequence is synthesized)
ttttcacttagtattttatcaaatatgtttttattatattcatagccttcttaaacattatatcaataattgcataataggcaacctctagcgattaccataattttgctcattgaaggc

SEQ ID NO: 387746 - DNA, 120 bp, Artificial Sequence
  ENSG00000144481_37 (sequence is synthesized)
tatctccagttgatcattgggatgagcatctttgtgcatgaatcctattgctgtatttgggaaaattttccaaggttagattccaataaatatctatttattattaaatattaaaatatc

SEQ ID NO: 387747 - DNA, 120 bp, Artificial Sequence
  ENSG00000144481_38 (sequence is synthesized)
attaaaaccatttataaggctttttcataaatgtatagcaaataggaattattaacttgagcataagatatgagatacatgaacctgaactattaaaataaaatattatatttaaccctt

SEQ ID NO: 387748 - DNA, 77 bp, Artificial Sequence
  ENSG00000144481_39 (sequence is synthesized)
tggatggtgaagggaatggtatagaattggagagattatcttactgaacacctgtagtcccagctttctctggaagt

SEQ ID NO: 387749 - DNA, 120 bp, Artificial Sequence
  ENSG00000144481_40 (sequence is synthesized)
atcttactgaacacctgtagtcccagctttctctggaagtggtcgtatttgagcaggatgtgcacaaggcaattgaaatgcccataattagtttctcagctttgaatacactataaactc

SEQ ID NO: 387750 - DNA, 120 bp, Artificial Sequence
  ENSG00000144481_41 (sequence is synthesized)
actggctgaaggaggaaattttagaaggaagctactaaaagatctaatttgaaaaactacaaaagcattaactaaaaaagtttattttccttttgtctgggcagtagtgaaaataactac

SEQ ID NO: 387751 - DNA, 120 bp, Artificial Sequence
  ENSG00000144481_42 (sequence is synthesized)
tcacaacattcactatgtttgcaaggaattaacacaaataaaagatgcctttttacttaaacaccaagacagaaaacttgcccaatactgagaagcaacttgcattagagagggaactgt

SEQ ID NO: 387752 - DNA, 120 bp, Artificial Sequence
  ENSG00000144481_43 (sequence is synthesized)
taaatgttttcaacccagttcatctggtggatgtttttgcaggttactctgagaattttgcttatgaaaaatcattatttttagtgtagttcacaataatgtattgaacatacttctaat

SEQ ID NO: 387753 - DNA, 120 bp, Artificial Sequence
  ENSG00000144481_44 (sequence is synthesized)
caaaggtgctatgtccttgtgtatggtactaaatgtgtcctgtgtacttttgcacaactgagaatcctgcagcttggtttaatgagtgtgttcatgaaataaataatggaggaattgtca

SEQ ID NO: 387754 - DNA, 120 bp, Artificial Sequence
  ENSG00000144481_45 (sequence is synthesized)
gctttttgataggggctttttgatacgtgtataaccaatactttattctcactgtagtcaaggactcattgcaattcagaaatgagaagctgatccggaactccactacaggtggtcttt

SEQ ID NO: 387755 - DNA, 120 bp, Artificial Sequence
  ENSG00000144481_46 (sequence is synthesized)
tacctggccatgttcggccaggtgcccagtgacgtggatggtaagcctgacttggctcagatggaaacagcttggaggaggcatttgctccctgaaccaacccccagggctgccccggag

SEQ ID NO: 387756 - DNA, 120 bp, Artificial Sequence
  ENSG00000144481_47 (sequence is synthesized)
ctgcctttctccaccagagactcttcctcagggaggacttggtgaattttattcaagcaaattttaagaaacgagaatgtgtcttctttaccaaagattccaaggccacgctcaatgaaa

SEQ ID NO: 387757 - DNA, 120 bp, Artificial Sequence
  ENSG00000144481_48 (sequence is synthesized)
taccggtgggacaggaggaggtctgctaggtcacatggaagaaagaccatggcatgggcctgtggcctgaaccctggggctctgtgatggagccagccagatcatggggaagtctgcctt

SEQ ID NO: 387758 - DNA, 120 bp, Artificial Sequence
  ENSG00000144481_49 (sequence is synthesized)
tcaaggagtgcctttgggaccttaaaggaattgaaaacaaggatgacgtacctaattaactgctgggaaagagttaacaatgaatgttttgttcattaaaatgtgttctcagcaatctca

SEQ ID NO: 387759 - DNA, 120 bp, Artificial Sequence
  ENSG00000144481_50 (sequence is synthesized)
ccccagcagaataggagagtgaggaagactaagcactgcctgtctccgttgcccgccacccccgcaccccctcccaagaagcaaaccccaaagtgaggatgtcaatacaaggagtttatt

SEQ ID NO: 387760 - DNA, 120 bp, Artificial Sequence
  ENSG00000144481_51 (sequence is synthesized)
ctttgtatcatttaggtacaaaccaaggcacataatcgtgtgtgagtgtgtgtgccagtgtgtgtacatgcatccacatatgtgtgctctcatgtaaatgattaaaaagcctggaactta

SEQ ID NO: 387761 - DNA, 120 bp, Artificial Sequence
  ENSG00000144481_52 (sequence is synthesized)
aaagagactttgaaatcaagaagatttgggaggagaatttcagtgacatgaataacctgtgtacttagtgttggccttgacagtcaacctgccaaagagaagagttgacattaattcggg

SEQ ID NO: 387762 - DNA, 120 bp, Artificial Sequence
  ENSG00000144481_53 (sequence is synthesized)
agacttaaagattgtaaccggcatatatattagaaagctatggccaacctatctgcattgagatgagctgtgatcatacacacacagattgcccccaaaccagatgtttccagaccacct

SEQ ID NO: 387763 - DNA, 120 bp, Artificial Sequence
  ENSG00000144481_54 (sequence is synthesized)
cccccatcctccaataagcttgggtgggtggacagatcccaaaggatggtgggacagtggaagctatggagagagaagaggaacatcaggaagtagcctgggctcaggaagtgccctaac

SEQ ID NO: 387764 - DNA, 120 bp, Artificial Sequence
  ENSG00000144481_55 (sequence is synthesized)
tgggaactgttccaaaacagagggagaatgtgtgcaagtgtggctatgcccagagccagcacatggaaggcacccagatcaaccaaagtgagaaatggaactacaagaaacacaccaagg

SEQ ID NO: 387765 - DNA, 120 bp, Artificial Sequence
  ENSG00000144481_56 (sequence is synthesized)
gagacaggtagggctgccatgacagcaggaaccccctcgcttcctcggtgggaggcatctttctaaagccaagaggaatagaagttgcttctgaagttcaaaagtcactattttcccaaa

SEQ ID NO: 387766 - DNA, 120 bp, Artificial Sequence
  ENSG00000144481_57 (sequence is synthesized)
taccagtaagccatctgatttcccagtaagccatcctgggcttttctttgttgaaagctttttgattgctgattttcattttcttcatttgttgtttgtctgttcaggctttgtatttct

SEQ ID NO: 387767 - DNA, 120 bp, Artificial Sequence
  ENSG00000144481_58 (sequence is synthesized)
tcttgattcaggtctttgtaagttgtacatttctgggatatttccatttcttctaggttgtccaccttgtttgcatataattgttcatactagccccttctgatccctttcatttctatg

SEQ ID NO: 387768 - DNA, 120 bp, Artificial Sequence
  ENSG00000144481_59 (sequence is synthesized)
tcttttcaaaaaaccaactcttactttcaatgattttttttcccattgtttttcaactctcttttttaaaaatgtattttgctcttggagtttttgctctactttaaacagcttactaaa

SEQ ID NO: 387769 - DNA, 120 bp, Artificial Sequence
  ENSG00000144481_60 (sequence is synthesized)
gtcattttactattaacaaatacaaggctctttcaaaagctcctatagggaatacaaaatttccccatctccttataccagaaaacaaagttatttacaattcatcttaagtctcttaat

SEQ ID NO: 387770 - DNA, 120 bp, Artificial Sequence
  ENSG00000144481_61 (sequence is synthesized)
gatctcaagggtcttctgaaagagattgctaataaaatcaaataaaactgtatgaactctaatggagaaaaatctaattatagcaaggtgagtcattctaatagctttttactttgctct

SEQ ID NO: 387771 - DNA, 80 bp, Artificial Sequence
  ENSG00000144485_0 (sequence is synthesized)
gcagcggagggcgccggcactccggtccccgccgctccccgtccccgctgctcctagcccctgccgcgtccccggcggag

SEQ ID NO: 387772 - DNA, 120 bp, Artificial Sequence
  ENSG00000144485_1 (sequence is synthesized)
cggcggagcgggcatggcgccacccgcggcgcctggccgggaccgtgtgggccgtgaggatgaggacggctgggagacgcgaggggaccgcaaggcccggaagcccctggtggagaagaa

SEQ ID NO: 387773 - DNA, 120 bp, Artificial Sequence
  ENSG00000144485_2 (sequence is synthesized)
gcggcgcgcgcggatcaacgagagcctgcaggagctgcggctgctgctggcgggcgccgaggtgcaggccaagctggagaacgccgaagtgctggagctgacggtgcggcgggtccaggg

SEQ ID NO: 387774 - DNA, 120 bp, Artificial Sequence
  ENSG00000144485_3 (sequence is synthesized)
tgtgctgcggggccgggcgcgcgagcgcgagcagctgcaggcggaagcgagcgagcgcttcgctgccggctacatccagtgcatgcacgaggtgcacacgttcgtgtccacgtgccaggc

SEQ ID NO: 387775 - DNA, 120 bp, Artificial Sequence
  ENSG00000144485_4 (sequence is synthesized)
catcgacgctaccgtcgctgccgagctcctgaaccatctgctcgagtccatgccgctgcgtgagggcagcagcttccaggatctgctgggggacgccctggcggggccacctagagcccc

SEQ ID NO: 387776 - DNA, 120 bp, Artificial Sequence
  ENSG00000144485_5 (sequence is synthesized)
cagccccccgggtcctggggacgacctgtgctccgacctggaggaggcccctgaggctgaactgagtcaggctcctgctgaggggcccgacttggtgcccgcagccctgggcagcctgac

SEQ ID NO: 387777 - DNA, 120 bp, Artificial Sequence
  ENSG00000144485_6 (sequence is synthesized)
cacagcccaaattgcccggagtgtctggaggccttggtgaccaatgccagccagagtcctgcgggggtgggcccggccctccctggatctcctccctcctcccaggggttcagatgtggt

SEQ ID NO: 387778 - DNA, 120 bp, Artificial Sequence
  ENSG00000144485_7 (sequence is synthesized)
ggggtagggccctggaagtctcccaggtcttccctccctcctctgatggatggcttgcagggcagcccctggtaaccagcccagtcaggccccagccccgtttcttaagaaacttttagg

SEQ ID NO: 387779 - DNA, 120 bp, Artificial Sequence
  ENSG00000144485_8 (sequence is synthesized)
gaccctgcagctctggagtgggtggagggagggagctacgggcaggaggaagaattttgtagagctgccagcgctctcccaggttcacccacccaggcttcaccagccctgtgcgggctc

SEQ ID NO: 387780 - DNA, 120 bp, Artificial Sequence
  ENSG00000144485_9 (sequence is synthesized)
tgggggcagaggtggcagaaatggtgctgggcactagtgttccaggcagccctgggctaaacaaaagcttgaacttgccacttcagcggggagatgagaggcaggtgcactgagctgcac

SEQ ID NO: 387781 - DNA, 120 bp, Artificial Sequence
  ENSG00000144485_10 (sequence is synthesized)
tgcccagagctgtgatgctctgtacatcttgtttgtagcacacttgagtttgtgtattccattgacatcaaatgtgacaattttactaaataaagaattttggagttagttacccttgaa

SEQ ID NO: 387782 - DNA, 80 bp, Artificial Sequence
  ENSG00000144485_11 (sequence is synthesized)
gggcgggggcgccggccgcgggcgcctgtaacccctgccagacggaggacttccctcccggcgcccctgtcctgtcggcg

SEQ ID NO: 387783 - DNA, 80 bp, Artificial Sequence
  ENSG00000144485_12 (sequence is synthesized)
ctgggtgagccgcgtccccgcgggccgggtgggctgggccacgcagtcgccgctcaccgcgcgggacgcggctctctccc

SEQ ID NO: 387784 - DNA, 120 bp, Artificial Sequence
  ENSG00000144485_13 (sequence is synthesized)
gtgctggcggagggcggcgtcgggggtccggcccggcgtctggacgagtccggaagaaactcaggggccgccccgccaccgctgcccaatggaccctgcctccccggggcttggcagcca

SEQ ID NO: 387785 - DNA, 120 bp, Artificial Sequence
  ENSG00000144485_14 (sequence is synthesized)
ccccagccgggacctgaaacccctctaggtccagagaccgcggacttgactgtggctctgcacaccagggacgcatctcctggggccagtggccccagcgctcaactctggaggcgccat

SEQ ID NO: 387786 - DNA, 120 bp, Artificial Sequence
  ENSG00000144488_0 (sequence is synthesized)
agagccggcagcttcatccacgtctgaaacaggaagccccagcctgtgcatgagtcgccactgagagcccgggccagaggatggagaagcagcgggcactcgtggccgccaaggatgggg

SEQ ID NO: 387787 - DNA, 120 bp, Artificial Sequence
  ENSG00000144488_1 (sequence is synthesized)
atgtggcgacgttggagcggctgctggaggctggcgccctgggcccgggcatcaccgatgctctgggggccggcctggttcaccacgccacccgggctggccacctggactgcgtcaagt

SEQ ID NO: 387788 - DNA, 120 bp, Artificial Sequence
  ENSG00000144488_2 (sequence is synthesized)
tcttggtgcagcgggcccagctgcccggcaaccagcgggcccacaacggggccaccccagcgcatgacgccgctgccacgggcagcctggccgagctgtgctggctggtccgcgaggggg

SEQ ID NO: 387789 - DNA, 120 bp, Artificial Sequence
  ENSG00000144488_3 (sequence is synthesized)
gctgcggtctgcaggaccaagatgcctcgggcgtctccccgctgcacctggccgcccgttttggacacccagtgctggtggagtggctgctccacgagggccactcggccacgctagaga

SEQ ID NO: 387790 - DNA, 120 bp, Artificial Sequence
  ENSG00000144488_4 (sequence is synthesized)
cccgggagggagcccggccgctgcaccacgctgccgtcagtggggacctgacctgcctcaagctcctgacagccgcgcatggcagcagcgtgaaccggcggacacgcagtggcgcctccc

SEQ ID NO: 387791 - DNA, 120 bp, Artificial Sequence
  ENSG00000144488_5 (sequence is synthesized)
cactctacctggcctgccaggagggccacctgcacctggcccagttcctggtgaaggactgtggcgctgacgtgcaccttcgtgctctcgatggcatgagcgccctgcacgctgccgccg

SEQ ID NO: 387792 - DNA, 120 bp, Artificial Sequence
  ENSG00000144488_6 (sequence is synthesized)
cccgtggccactactccctcgtcgtctggctggtcacattcaccgacatcggactcacggcacgggacaatgagggggccacggccctgcactttgcagcccgaggcggccacacgccca

SEQ ID NO: 387793 - DNA, 120 bp, Artificial Sequence
  ENSG00000144488_7 (sequence is synthesized)
ttctagaccgactcctgctcatgggtacccccatcctgagagactcctggggtgggacccccctccacgacgcagcagagaacgggcagatggagtgctgccagaccctagtctcccacc

SEQ ID NO: 387794 - DNA, 120 bp, Artificial Sequence
  ENSG00000144488_8 (sequence is synthesized)
acgtggacccctccctgcgggatgaagatggttacacggcggcagacctggcggagtaccatggacaccgggactgcgcccagtacctgcgggaggtggcccagccggtgcccctgctga

SEQ ID NO: 387795 - DNA, 120 bp, Artificial Sequence
  ENSG00000144488_9 (sequence is synthesized)
tgacgcccccaccaccaccgttccccccacctccactgttggccacgaggcgctccctggaggatggaagaagaggaggcccagggccagggaaccccagccccatgtccctcagcccgg

SEQ ID NO: 387796 - DNA, 120 bp, Artificial Sequence
  ENSG00000144488_10 (sequence is synthesized)
cctggcctggccatcctgaccagcctcttcccagggagcagatgaccagcccggcccctccgaggatcatcaccagtgccacggctgaccccgaggggacagagacggcgctggcggggg

SEQ ID NO: 387797 - DNA, 120 bp, Artificial Sequence
  ENSG00000144488_11 (sequence is synthesized)
acacctcagatggcctggccgcactacagctggatgggctgccctcaggcgacatcgacgggctggtgcccacgcgggatgagcgcggccagcccatcccagagtggaagcggcaggtga

SEQ ID NO: 387798 - DNA, 120 bp, Artificial Sequence
  ENSG00000144488_12 (sequence is synthesized)
tggtgcggaagctgcaggcgcgcctgggcgcagagagctccgcagaggcccaggacaatggtgggagctcaggccccacggagcaggcggcctggaggtactcacagactcatcaggcca

SEQ ID NO: 387799 - DNA, 120 bp, Artificial Sequence
  ENSG00000144488_13 (sequence is synthesized)
tcctggggccctttggggagctgctgacagaggatgacctggtctacctggagaagcagattgcagacctgcagcttcggcgccgctgtcaggagtatgagagtgagctgggccggttgg

SEQ ID NO: 387800 - DNA, 120 bp, Artificial Sequence
  ENSG00000144488_14 (sequence is synthesized)
cggctgagctgcaggccctgctgcccgagcccctggtcagcatcacggtcaacagccacttcctgccccgggcgcccggactggaggttgaggaggcctcaatcccagcggctgagcccg

SEQ ID NO: 387801 - DNA, 120 bp, Artificial Sequence
  ENSG00000144488_15 (sequence is synthesized)
cagggtctgcggaggcctcagaggtggcccccggggtgcagcccctgcccttctggtgcagccacatctcccgcctggtacgcagcctgtccctgctgctgaagggcgtgcatgggctag

SEQ ID NO: 387802 - DNA, 120 bp, Artificial Sequence
  ENSG00000144488_16 (sequence is synthesized)
tacagggggatgagaagccatccacccggcccctgcaggacacctgcagggaggcctcggccagcccccctcggagcgaggcccagcgccagatccaggagtggggggtgtctgtgcgga

SEQ ID NO: 387803 - DNA, 120 bp, Artificial Sequence
  ENSG00000144488_17 (sequence is synthesized)
cgctgcggggcaacttcgagtcggcctctggcccactctgtggcttcaaccctggcccctgcgagccgggggcccagcacaggcagtgcctgagtggctgctggccagccctgcctaagc

SEQ ID NO: 387804 - DNA, 120 bp, Artificial Sequence
  ENSG00000144488_18 (sequence is synthesized)
cccgcagtggcctggcttcaggggagcccaggcctggcgacacagaggaggccagcgactctggcatcagctgcgaggaggtgccatcagaggcgggtgccgcagccggcccagacctgg

SEQ ID NO: 387805 - DNA, 120 bp, Artificial Sequence
  ENSG00000144488_19 (sequence is synthesized)
gggccaggaggccgccaggagccctgggccaccctccccgcccagcgagggcccccggctgggccacctgtggcagcagcgcagcaccatcacccacctgctgggcaactggaaggccat

SEQ ID NO: 387806 - DNA, 120 bp, Artificial Sequence
  ENSG00000144488_20 (sequence is synthesized)
cccacctgctgggcaactggaaggccatcatggctcacgtgcccgcccggcagctgcggcggctgagccggcagccccgcggggctttgtcccccgagcagttcctgccccacgtggacg

SEQ ID NO: 387807 - DNA, 120 bp, Artificial Sequence
  ENSG00000144488_21 (sequence is synthesized)
gggctccggtgccctacagcagcctctcactggatctcttcatgctgggttacttccagctgctggagtgcgacctgccggcggaggagcggaagctgcgccacctgctgtgcttcgagg

SEQ ID NO: 387808 - DNA, 120 bp, Artificial Sequence
  ENSG00000144488_22 (sequence is synthesized)
tcttcgagcacctgggcacccacggctgggaggctgtgcgcgccttccacaaggccgtgaccgacgaggtggccgccggccgccgggcctggaccgacggcttcgaggacatcaaagccc

SEQ ID NO: 387809 - DNA, 120 bp, Artificial Sequence
  ENSG00000144488_23 (sequence is synthesized)
gcttctttggctccagccagcgtcccgcctgggatacggagcctggccgcaagtcaggtctgaccctgctcgggcccctgcctcacgccgccgtcccctgcagcggccctgagcccacag

SEQ ID NO: 387810 - DNA, 120 bp, Artificial Sequence
  ENSG00000144488_24 (sequence is synthesized)
cacagcggctggggtcccgctcccagcagggcagcttcaacggtgaggacatctgcggctacatcaaccgcagctttgccttctggaaggagaaggaagctgagatgttcaactttggag

SEQ ID NO: 387811 - DNA, 120 bp, Artificial Sequence
  ENSG00000144488_25 (sequence is synthesized)
aatgaccctactggcagcctgctttccagaatgtggtttgggggtgacttggagtttctcttttcttttccttgctcacacccttggtgttcaggtgagccgggcaaggctgcctccagt

SEQ ID NO: 387812 - DNA, 120 bp, Artificial Sequence
  ENSG00000144488_26 (sequence is synthesized)
cctaccagttatcggaggctgcgggactgttctgttgtggcatggttctcctccgagctgggactcagactccttctcaccactgcacccaggaagccccttggcaggtcctgaagtgag

SEQ ID NO: 387813 - DNA, 120 bp, Artificial Sequence
  ENSG00000144488_27 (sequence is synthesized)
gcaatgggccaccccagtccagggcacctctgcccagccggcccccgagacctgggatgctgcctgtttctcacttgtccttccccagtgtcaccagttcccttggcgtcctgtccctca

SEQ ID NO: 387814 - DNA, 120 bp, Artificial Sequence
  ENSG00000144488_28 (sequence is synthesized)
gtttctgtggtgctggtggcctcggccacatccatctttcatgtgagtctgaggtggccccaggccctggtcctgcccctgtttctcctgctgaccttgggtcacaccccttcacctccc

SEQ ID NO: 387815 - DNA, 120 bp, Artificial Sequence
  ENSG00000144488_29 (sequence is synthesized)
atctgtgaatttgggggagctggagtgattccgaggacagattccatgggcaggaggccttcctgccaggccatccctgctggtcacacaccgatgcccgccaggccagtgccccagccc

SEQ ID NO: 387816 - DNA, 120 bp, Artificial Sequence
  ENSG00000144488_30 (sequence is synthesized)
agggtgctccggaggccctgcttcctcaaaggaggctccccatggggcccctgtcctccagcctgaccagccctggcctagtcgtgggccccagcaaggctggagagcagggacgtggga

SEQ ID NO: 387817 - DNA, 120 bp, Artificial Sequence
  ENSG00000144488_31 (sequence is synthesized)
gtagcagtggctgagagagtcctccaggcagggtggctggtgcccactctcaaaggctgctgcacacagaggagaatgccggcaggggtgggcagcagccagacctcaggggggcgtgga

SEQ ID NO: 387818 - DNA, 120 bp, Artificial Sequence
  ENSG00000144488_32 (sequence is synthesized)
tactccgtgagggcacctgggtgtcacccacagtgcacctcttcacaggggcctgggtactggagggagggatacaggaagggagatggattccgtcctcgggggctctgggtgctgcgg

SEQ ID NO: 387819 - DNA, 120 bp, Artificial Sequence
  ENSG00000144488_33 (sequence is synthesized)
agtattcctgggcatggtgctgggcatggctggcatagggtgtggcttgtccccagcttctgatggcagccaggagaatgggtcatcacccaggctctggggctgaggagggctgggccc

SEQ ID NO: 387820 - DNA, 120 bp, Artificial Sequence
  ENSG00000144488_34 (sequence is synthesized)
aagcccacagggactttggaggtggggctctgcagctgtgagatggcccagcagggagtggcagggacgggaggcttcaggaatattcctcctggcatccaggccccctgggacagagga

SEQ ID NO: 387821 - DNA, 120 bp, Artificial Sequence
  ENSG00000144488_35 (sequence is synthesized)
gggtgcagtcaggcgacaggcttatcaggactccctgcctcaatccctggggattgtccaggcaaaacctggagggcagcgggcaagctgttggatggaacagagagaccctcgcagctg

SEQ ID NO: 387822 - DNA, 120 bp, Artificial Sequence
  ENSG00000144488_36 (sequence is synthesized)
actagggcccaaggggacggacactcaagaagatgtaaaattgggaggggtggtattggccattggggcaggcagggccgggaagggaagtagcaccggccgcagccccaagccagtggc

SEQ ID NO: 387823 - DNA, 120 bp, Artificial Sequence
  ENSG00000144488_37 (sequence is synthesized)
ttttccacaagggcctatcctgcagccggcccgctccggcttcctccactgctgaagaccctgctgtagagctgaagctgaacatgtgtttgctaaataaagattcccattcctagcgca

SEQ ID NO: 387824 - DNA, 120 bp, Artificial Sequence
  ENSG00000144488_38 (sequence is synthesized)
ttttccaggtaggtggaagtggaagtcagggcgcccgaagcccagaactgaatccaagacccaggggcccctctcctctgtggcctcagctgctgcttccgccggaggatgaagtgaacc

SEQ ID NO: 387825 - DNA, 120 bp, Artificial Sequence
  ENSG00000144488_39 (sequence is synthesized)
tgaccagaggactctgagcagagccccttcacctgctctggaggcatgggtcccacgtatccttccacttggcggatttgtggcacatgcctgcctgtgccaagcgttgttctaggcctt

SEQ ID NO: 387826 - DNA, 120 bp, Artificial Sequence
  ENSG00000144488_40 (sequence is synthesized)
gcggtgtgccgcaggctctcccatcgaccaggcgggggcgggccccactgactccccagagaaggtccagtggggcccccgaggtgttctggggcagggtgggctggggtcagctcccag

SEQ ID NO: 387827 - DNA, 120 bp, Artificial Sequence
  ENSG00000144504_0 (sequence is synthesized)
ggcaagcagtcgggacgggagcgcgggcgtccgcggtggctgcagtcccgtcggtctccctgctgtccggcgcgagctcttcgagtcttgcttgggatgtttcagcagcccctgagaagg

SEQ ID NO: 387828 - DNA, 120 bp, Artificial Sequence
  ENSG00000144504_1 (sequence is synthesized)
aagaggaggaagctgagggcccgctgagggcgcaggacctgagggagtcctacatccagctcgtccagggtgtgcaggagtggcaggatggttgcatgtaccagggggagtttgggttga

SEQ ID NO: 387829 - DNA, 120 bp, Artificial Sequence
  ENSG00000144504_2 (sequence is synthesized)
acatgaagcttggatatggcaaattctcttggcccacaggcgagtcataccatgggcagttttaccgggaccactgccatggcctgggtacctacatgtggccagatggctccagtttca

SEQ ID NO: 387830 - DNA, 120 bp, Artificial Sequence
  ENSG00000144504_3 (sequence is synthesized)
cgggcacattttacctcagccaccgagaaggctacggcaccatgtacatgaagacacggcttttccaggggctatacaaagcggaccagcggtttgggccaggtgtcgagacctaccccg

SEQ ID NO: 387831 - DNA, 120 bp, Artificial Sequence
  ENSG00000144504_4 (sequence is synthesized)
atggcagccaggacgtggggctgtggttccgagagcagctcatcaagctgtgcacccagatccccagtggcttctccctcctcagataccctgagttctccagcttcatcacccacagcc

SEQ ID NO: 387832 - DNA, 120 bp, Artificial Sequence
  ENSG00000144504_5 (sequence is synthesized)
ctgccaggatcagcctctcagaagaggagaaaacggagtggggactgcaggagggacaggatccctttttctatgactataagcggtttcttctgaatgacaacctaacgctgcctccag

SEQ ID NO: 387833 - DNA, 120 bp, Artificial Sequence
  ENSG00000144504_6 (sequence is synthesized)
aaatgtatgtctactcgaccaacagtgaccacctgcccatgacaagctctttccgcaaagagctggacgcccgcatcttcctcaatgaaattcctccgttcgttgaggatggagaaccat

SEQ ID NO: 387834 - DNA, 120 bp, Artificial Sequence
  ENSG00000144504_7 (sequence is synthesized)
ggttcataatcaatgagacccctttgttggtcaaaatccagaagcaaacttacaagttcaggaacaagccagctcacaccagctggaacatgggcgccatcctggaggggaagcgcagtg

SEQ ID NO: 387835 - DNA, 120 bp, Artificial Sequence
  ENSG00000144504_8 (sequence is synthesized)
gctttgcaccctgtgggcccaaagagcaactttccatggagatgatcctaaaggctgaggaagggaaccacgaatggatttgtaggatcctgaaggacaactttgctagtgctgacgtgg

SEQ ID NO: 387836 - DNA, 120 bp, Artificial Sequence
  ENSG00000144504_9 (sequence is synthesized)
cggacgcaaagggctacactgtgcttgctgcggctgctactcactgccacaacgacattgtcaaccttctcctggactgtggggccgacgtgaacaagtgctcagatgagggtctcacgg

SEQ ID NO: 387837 - DNA, 120 bp, Artificial Sequence
  ENSG00000144504_10 (sequence is synthesized)
cactcagcatgtgtttcctcctccactaccccgcccagtccttcaagcccaatgttgctgaacggaccatacctgagccccaggaacctccaaaattcccagttgttccaatcctttcat

SEQ ID NO: 387838 - DNA, 120 bp, Artificial Sequence
  ENSG00000144504_11 (sequence is synthesized)
catcatttatggacacaaacctggagtctctgtactatgaggtgaacgtgccttcccagggtagctatgagctgaggccaccgccagcaccactgctcctgccacgcgtctcaggcagcc

SEQ ID NO: 387839 - DNA, 120 bp, Artificial Sequence
  ENSG00000144504_12 (sequence is synthesized)
acgagggcggccacttccaggacaccgggcagtgtggggggtccatagaccacaggagcagctctctgaagggggactccccgttggtgaagggcagccttggccatgtggaaagcgggc

SEQ ID NO: 387840 - DNA, 120 bp, Artificial Sequence
  ENSG00000144504_13 (sequence is synthesized)
tgctggagagaagcgcccagtcccacagcttgctgaagatggcctcgccctcaccgtgcaccagcagcttcgacaaagggaccatgcggaggatggcgctgtccatgatcgagcggagga

SEQ ID NO: 387841 - DNA, 120 bp, Artificial Sequence
  ENSG00000144504_14 (sequence is synthesized)
agcgctggcggaccatcaagctgctgctgcgccggggcgcggaccccaacctgtgctgcgtgcccatgcaggtcctgttccttgctgtgaaggccggggacgtggatggggtgaggctgc

SEQ ID NO: 387842 - DNA, 120 bp, Artificial Sequence
  ENSG00000144504_15 (sequence is synthesized)
tgctggagcacggggcgaggaccgacatctgctttccgccgcagctgagcaccctgacaccactccacatcgctgccgcccttcctggggaggagggggtacagattgtggagctgctgt

SEQ ID NO: 387843 - DNA, 120 bp, Artificial Sequence
  ENSG00000144504_16 (sequence is synthesized)
tgcatgccatcaccgatgtggacgccaaggcatccgacgaggacgacacttacaagcccggcaagctggacctgctgccctcaagtctgaagctcagcaatgagccaggccctccccaag

SEQ ID NO: 387844 - DNA, 120 bp, Artificial Sequence
  ENSG00000144504_17 (sequence is synthesized)
cctactacagcacggacacagccctcccggaggaggggggcaggacggctctgcacatggcctgcgagcgggaggatgacaacaagtgtgccagggacatagtccggctccttctatccc

SEQ ID NO: 387845 - DNA, 120 bp, Artificial Sequence
  ENSG00000144504_18 (sequence is synthesized)
acggagcaaatcctaacctgctgtggagtggccactccccgctctccctgtccattgccagtgggaatgagctggttgtgaaggagctcctgacccagggagctgaccccaacctgcccc

SEQ ID NO: 387846 - DNA, 120 bp, Artificial Sequence
  ENSG00000144504_19 (sequence is synthesized)
tgaccaaaggcttgggcagtgccctgtgtgttgcctgtgacctgacctacgagcaccagaggaacatggacagcaagctggccctgattgaccgactcatcagtcacggggccgacatcc

SEQ ID NO: 387847 - DNA, 120 bp, Artificial Sequence
  ENSG00000144504_20 (sequence is synthesized)
tgaagcctgtaatgctcaggcagggagaaaaggaggcagtgggcacagccgtggactatggctacttcagattcttccaggaccggaggattgcccgctgccccttccacacgctgatgc

SEQ ID NO: 387848 - DNA, 120 bp, Artificial Sequence
  ENSG00000144504_21 (sequence is synthesized)
cagcagagcgcgagacgttcctggcgcggaagcggctcctggagtacatgggcttgcagctacggcaggctgtctttgccaaggagagccagtgggaccccacgtggctgtacctgtgca

SEQ ID NO: 387849 - DNA, 120 bp, Artificial Sequence
  ENSG00000144504_22 (sequence is synthesized)
agagagcggagctgatccccagccacaggatgaagaagaagggccccagcctgcccaggggcctggatgtgaaggagcaggggcaaattcccttcttcaagttctgctaccagtgtggcc

SEQ ID NO: 387850 - DNA, 120 bp, Artificial Sequence
  ENSG00000144504_23 (sequence is synthesized)
gctccatcggggtccgcctcttgccctgccctcgctgctacgggatcctgacctgcagcaagtactgcaagaccaaggcctggaccgagttccacaagaaggactgcggggacctggtgg

SEQ ID NO: 387851 - DNA, 120 bp, Artificial Sequence
  ENSG00000144504_24 (sequence is synthesized)
ccatcgtgacacaactggagcaagtttccaggaggagagaagaattccagtgaagcagcagctgcacgtccgaggcttggggaggacccaggactgtgtgggtttcttacctgcctgagc

SEQ ID NO: 387852 - DNA, 120 bp, Artificial Sequence
  ENSG00000144504_25 (sequence is synthesized)
cacctcagggaatcttccagcctaatgcaggcatttctgcacctttggggtcatgctttgtagcagtgtctcccttgcgacctcgcaataaattggccccacggggtgattttgacagtc

SEQ ID NO: 387853 - DNA, 120 bp, Artificial Sequence
  ENSG00000144504_26 (sequence is synthesized)
acgcgacgctctccgtaggcgcagggctggcaagcagtcgggacgggagcgcgggcgtccgcggtggctgcagtcccgtcggtctccctgctgtccggcgcgagctcttcgagtcttgct

SEQ ID NO: 387854 - DNA, 120 bp, Artificial Sequence
  ENSG00000144504_27 (sequence is synthesized)
tggttggaagaccacagacatggaaggggcccatgcctcccttagcttagaggacgaagtctctggggctggcagccgccaacgcccgctagaggggaagggcggcgagacccctgctgc

SEQ ID NO: 387855 - DNA, 120 bp, Artificial Sequence
  ENSG00000144504_28 (sequence is synthesized)
cattcatcaatccatccacccacccaatcacccacccacctaccatccattcatccatcagcacacccatgcaacatccattctttcaggcatctgttcatctacccacacacctaccta

SEQ ID NO: 387856 - DNA, 120 bp, Artificial Sequence
  ENSG00000144504_29 (sequence is synthesized)
ttcatctacccatccagccatccattcatccatcaattcatgcatgcaatatccattcatgcagccatccattcatctacctacccacctacccatttgtccacccacccacccgtccag

SEQ ID NO: 387857 - DNA, 120 bp, Artificial Sequence
  ENSG00000144504_30 (sequence is synthesized)
tcattcatcagtccacccacttaacatccatttatccagccatccactcatctacccacccacctacccattaattcacccactcacccacctttccatccattcatccatcagtatact

SEQ ID NO: 387858 - DNA, 120 bp, Artificial Sequence
  ENSG00000144504_31 (sequence is synthesized)
cacgcaacattgatccacccaccaaccccttcatccatcagtccacccatggaacatccattcatccagccatccattcatctacccatctacctactcattcatctacctacccaccca

SEQ ID NO: 387859 - DNA, 120 bp, Artificial Sequence
  ENSG00000144504_32 (sequence is synthesized)
cccatccattcatccatcagtctacccatgcaacatccattcatccaaccatccattcatccaaccatccattcatctacccacctacctacccagtcatccactcacctacccatctat

SEQ ID NO: 387860 - DNA, 120 bp, Artificial Sequence
  ENSG00000144504_33 (sequence is synthesized)
ccatctatcaatctattcatgcatctttcatccatccacccacccatccattcatccatcaatccaccaatgcggcacccattcatccacccacccacttatccatctattcatctaccc

SEQ ID NO: 387861 - DNA, 120 bp, Artificial Sequence
  ENSG00000144504_34 (sequence is synthesized)
acccacttatccatctattcatccacccacccatccatccatcttcccacccacccatccattcatccacccacccatccattcatccatcaattcactcatgcaacatacatccaccta

SEQ ID NO: 387862 - DNA, 120 bp, Artificial Sequence
  ENSG00000144504_35 (sequence is synthesized)
cccaaccatccatccatccatcatgcagacatcaactgggcttgtaattgttgaagactgttaggtacagaagcatctataatgcacaggttctcgattgtgaaaaggggttgtgtacac

SEQ ID NO: 387863 - DNA, 120 bp, Artificial Sequence
  ENSG00000144504_36 (sequence is synthesized)
accaggaggcatcagtgttgtgtgatgagtaagccatgagataatgcatgttgtctactcagacaaaaatggatgagcagagggtggaatgtgggtgttggtgctgagactggaaccaca

SEQ ID NO: 387864 - DNA, 120 bp, Artificial Sequence
  ENSG00000144504_37 (sequence is synthesized)
tgtatgttggtctccatcctacccagggcctttgctgttacagcccatttcttagcaaacacccagatgaatcagagatgcatggatgtactcgcagccagcacattcctgtcgggacag

SEQ ID NO: 387865 - DNA, 120 bp, Artificial Sequence
  ENSG00000144504_38 (sequence is synthesized)
acatatagcccaagcatcttgacctccaggtggcatgtctgcaccaccgtgtgcaacctagtggattgtgagcagctgcgggtgcagctgccagcactcagggtacctgaggagtgaaca

SEQ ID NO: 387866 - DNA, 120 bp, Artificial Sequence
  ENSG00000144504_39 (sequence is synthesized)
gtggggggctgagccacaagagggagaggcattggagggaggtggtccagctggaccctttctcgtgggaggtgcagaacctggtctaggaccactgaaacttgttgtgttgccaggaac

SEQ ID NO: 387867 - DNA, 120 bp, Artificial Sequence
  ENSG00000144504_40 (sequence is synthesized)
cccgcaggagcttagctgtgagggtcacacatgtgggtggccctctgtggccccctctgcaggagcagagctgaggtacatggggacactgattgtccacacctccacctcgccgttcag

SEQ ID NO: 387868 - DNA, 120 bp, Artificial Sequence
  ENSG00000144504_41 (sequence is synthesized)
cagaaacccactcagctgagtgtgacactcgtggtccagtgcagaagggtttggggcagagtgcctgttccattcctctgtcccacacttgtccctttgccaagctcccgaatgagcact

SEQ ID NO: 387869 - DNA, 120 bp, Artificial Sequence
  ENSG00000144504_42 (sequence is synthesized)
ggttcctgccctgccatagggtggcctcatgagggcatcaggacacccagtgacccttcccacccctgagggccaggtgcatcatcctgagtcctgcctcatctccctccagactcactg

SEQ ID NO: 387870 - DNA, 120 bp, Artificial Sequence
  ENSG00000144504_43 (sequence is synthesized)
gtggagggccaccatcagggctgaatcctatgctcagcagacccacgtctcttccctgtgccagtgggaggcgttgtgtctggagatgtgtgtctgaatgtgtgagcatccctgtgtcgg

SEQ ID NO: 387871 - DNA, 120 bp, Artificial Sequence
  ENSG00000144504_44 (sequence is synthesized)
tggctccacgccatggccagccctgtgggggtgccacggtgacgggctgttttcagtgccaccccagccctgtgggggtgccacggtgacgggctgttttcagtaccacgccagccctgc

SEQ ID NO: 387872 - DNA, 120 bp, Artificial Sequence
  ENSG00000144504_45 (sequence is synthesized)
tttggcctttggcactggcctgaagtgtctctgtgggagcctcagcaggggccactgtcaggggtcctatcctagccatagtgcacgtgagtgacacctgcctgggcagctctcacaccc

SEQ ID NO: 387873 - DNA, 120 bp, Artificial Sequence
  ENSG00000144504_46 (sequence is synthesized)
ctgctgtccaccctgtctataccagtgtgtctcaaaatgtggtctatgcacccccgggggtccaagaccctttcagggagtctgtggggtcaaaatgattctcttgataaccctgagact

SEQ ID NO: 387874 - DNA, 120 bp, Artificial Sequence
  ENSG00000144504_47 (sequence is synthesized)
ctgttagccttctccttgtgttgatgttggtggatggtatgaagacagggccgtgcagaccaccagcccccagcgtgcagggcagcagtgcccggcctgcttgggggcatggtattcctt

SEQ ID NO: 387875 - DNA, 120 bp, Artificial Sequence
  ENSG00000144504_48 (sequence is synthesized)
caccacggtgtgcacttgcggggatgcctgtctcactgaagaatgcctttgacaaagcagaaaagcaatgacaaattgcattaaatcttgctccttgcgtacacacccctcgaatattct

SEQ ID NO: 387876 - DNA, 120 bp, Artificial Sequence
  ENSG00000144504_49 (sequence is synthesized)
gggtcggaaaacatgggaaggacactgatgtgtgtctgccacagaccaaggcacaccgcttccccgcaagaagcgcttcccccagggccagagtagcaacagaatgcggcatcttcccaa

SEQ ID NO: 387877 - DNA, 120 bp, Artificial Sequence
  ENSG00000144504_50 (sequence is synthesized)
cctcctgccccatttttgattggaagaatgaccactggtatgtggctgttcattctcctgaacacagcctgccactttaaggaaaacatatgacactatttgttgctggcgaaatttaca

SEQ ID NO: 387878 - DNA, 120 bp, Artificial Sequence
  ENSG00000144504_51 (sequence is synthesized)
ttttcaagtgaatagcagaattctggacacttgccaccaccaccaagaccttcatagcttcccttaactttgagacatgggtgttcagaggtttttcacgtgagatggcgttagcagcgc

SEQ ID NO: 387879 - DNA, 120 bp, Artificial Sequence
  ENSG00000144504_52 (sequence is synthesized)
agttttgtgatactgcctgaagacatgccgacagtgcccagatctcttctattggtgagccagcttttcccacacggccaagttctgatgttgaaccattgccaggtgggtgaagatcca

SEQ ID NO: 387880 - DNA, 120 bp, Artificial Sequence
  ENSG00000144504_53 (sequence is synthesized)
ttgacagtgagaggtgggcccgtgggcttcagtgcagccaggcgcagaaggctggttcatgagtgtccagctccgccaggtagctagctcaccacccccagcctgggttcatgtagttca

SEQ ID NO: 387881 - DNA, 120 bp, Artificial Sequence
  ENSG00000144504_54 (sequence is synthesized)
aataggaagaccacgatgatcagaaaggctgctcaaatactccttcgtccagccgcgtacctgggggaggctgaatctccactcacttccaccaaggctgtgcagagcagataggggaat

SEQ ID NO: 387882 - DNA, 120 bp, Artificial Sequence
  ENSG00000144504_55 (sequence is synthesized)
ccagcaaaggtggaaaacagtgccatccttctccccaactggttttgttttgtaaaataactttttgtgacagtgttacttattagtaacatgcagtgggtttgttatggttaacaagtt

SEQ ID NO: 387883 - DNA, 72 bp, Artificial Sequence
  ENSG00000144504_56 (sequence is synthesized)
tattagtaacatgcagtgggtttgttatggttaacaagttggtgagcattattgagaggtgaagccagctga

SEQ ID NO: 387884 - DNA, 120 bp, Artificial Sequence
  ENSG00000144504_57 (sequence is synthesized)
aatgcaccaatcagcactctgtaaaattgaccaatcagcgttctgtaaaatggaccaatcagtggtctgtaaaatggaccagtcagcaggatgtgggcggggccaaaaaagggaataaaa

SEQ ID NO: 387885 - DNA, 120 bp, Artificial Sequence
  ENSG00000144504_58 (sequence is synthesized)
gaataaaagctggccaccgccaggctccccaccagcctgcagcgacaacctgcttagtttcctttctgtgctgtggaagctttgttctttcagtcttcacaataaatcttgctgctgctc

SEQ ID NO: 387886 - DNA, 120 bp, Artificial Sequence
  ENSG00000144504_59 (sequence is synthesized)
aaaggcccgcccacctggaaggccttcgccaggctgaggccgcggtgccgcatgaggtacgcggtgcagacggcggccgagcggctgcggccgttcttgcagtagactaggcaggcgccg

SEQ ID NO: 387887 - DNA, 120 bp, Artificial Sequence
  ENSG00000144504_60 (sequence is synthesized)
gactaggcaggcgccgccggcgcgcaccgcggcctccatggcggcgcacgtgggctccaggtgcgccagcaggtcctcagccgggtcgtcgaacacgggcacgcgcagctctgccacgcc

SEQ ID NO: 387888 - DNA, 120 bp, Artificial Sequence
  ENSG00000144504_61 (sequence is synthesized)
ggctgctggcgggagacgttgacgcacagcgtgactcccgcgcgcgccagctgctcctccgcgcccgcggctcgcgcgctcccgaggaagagtgagggcgcgacgcgcaccaacggtgga

SEQ ID NO: 387889 - DNA, 120 bp, Artificial Sequence
  ENSG00000144504_62 (sequence is synthesized)
cgagaggccgctagcagcgccctgcggaccggcccgcagccccggcgcccgccccggactcacggcgggggcgtcggtcgaggtgtaccgcaggatgacctggaagggctggtgcgcctg

SEQ ID NO: 387890 - DNA, 120 bp, Artificial Sequence
  ENSG00000144504_63 (sequence is synthesized)
atctgtccacctatccacctgtccatcctagtatgagctggctgcctctcgagctgccttccgaccttccatgggtccacatgtgtgggcagtctgttttctgtccagcttggggctggc

SEQ ID NO: 387891 - DNA, 120 bp, Artificial Sequence
  ENSG00000144504_64 (sequence is synthesized)
actcctggcccttgaatgaggaccctgctgtgggcacccacgtcctgcaggcagctggagtgggacagagggccatcgatctcaggagatgccgccagcaggcccgggctggacaggccg

SEQ ID NO: 387892 - DNA, 120 bp, Artificial Sequence
  ENSG00000144504_65 (sequence is synthesized)
actggtcctgcctctagagcctggcagcatctctcctatccgttggcagccttactgtgcattccacttcctgtgtggccttgggcaatcgctgcaccctctgtgcctcggttttctctc

SEQ ID NO: 387893 - DNA, 120 bp, Artificial Sequence
  ENSG00000144504_66 (sequence is synthesized)
caagtggagtggggatgcagcggcacctgccccgggactgtgggatgaaatgagatgctgggttgtgctcgggggttgtgctcagcagtcactgaaggcactgcagccacttcactcttc

SEQ ID NO: 387894 - DNA, 120 bp, Artificial Sequence
  ENSG00000144504_67 (sequence is synthesized)
ctcctcccctagggcctctggtggctggcctttatccttccaagagtgatgggacgggaacttttaggcccatcaacaggaagggtgctaggctaaagtttttcctccttgagaaatgtc

SEQ ID NO: 387895 - DNA, 120 bp, Artificial Sequence
  ENSG00000144504_68 (sequence is synthesized)
cagagaaaagcatctttcccaacttccaaaatcacacccatggtttgctggggtcccaggatgaggtttgggaagctgtgacttaagaagataagttcttattctgggcagacgttttaa

SEQ ID NO: 387896 - DNA, 120 bp, Artificial Sequence
  ENSG00000144504_69 (sequence is synthesized)
aattatgaattgccatagcaactcgtatatttaccttggtgaaattgcctgtgtctaggcttaagcagaaggcagcgaatgttctaaaagacaaaatgagaacaagttttgcacccccag

SEQ ID NO: 387897 - DNA, 120 bp, Artificial Sequence
  ENSG00000144504_70 (sequence is synthesized)
gctaggtcctgagcccacattcaatgcagctgaaactgaaaaggcctctgttggcgcttgccatggaaagtccaggggtaaggtagcctcaggcctggctggatccaggattctaatgat

SEQ ID NO: 387898 - DNA, 120 bp, Artificial Sequence
  ENSG00000144504_71 (sequence is synthesized)
gtaactaggtcctctctctttccatctccacgagggggttctaagactgaccttgttccatctgcccagcccctgggggtggcatcaaacacccctgggaaagagaaaggccccagcagg

SEQ ID NO: 387899 - DNA, 120 bp, Artificial Sequence
  ENSG00000144504_72 (sequence is synthesized)
acgctggtctgacttggggatgcatgaagtgcatcaagatggggcaggggtaaggcgtcctctggttggccaggcctggcccaggcactggggctgggtcccttggggaatcctctctgt

SEQ ID NO: 387900 - DNA, 120 bp, Artificial Sequence
  ENSG00000144504_73 (sequence is synthesized)
agggagagggcatctgttgtcagaagaaagggaagggacactaagctgtgaaaactgccatgcccttcacgtcggggtcaggtctgggtggactgtgagcatggatggctgtgcgggcac

SEQ ID NO: 387901 - DNA, 120 bp, Artificial Sequence
  ENSG00000144504_74 (sequence is synthesized)
tccaggcccaccctgtttctgagaaaaaggtggtgcttggcactcagcatgaggtctcctggctggaagcccttgtcatgaatgtcacattctttttttttttcgagatggaatttcact

SEQ ID NO: 387902 - DNA, 120 bp, Artificial Sequence
  ENSG00000144504_75 (sequence is synthesized)
tgtttgtggagctcacgtgtccaaccagtgctgaagagttataaatcagagtcctcccctgtgcctactggggcctacagccagccttccagggccagcctgtcacctgtgaacctggca

SEQ ID NO: 387903 - DNA, 120 bp, Artificial Sequence
  ENSG00000144504_76 (sequence is synthesized)
gggagctcagcagcatggggctcctgagtggggacaggaccctccaaacctaagatcaaggtcaccagggagaaggcatgtccgtgctctcctgactcaggatgtctaggtagttttaag

SEQ ID NO: 387904 - DNA, 120 bp, Artificial Sequence
  ENSG00000144504_77 (sequence is synthesized)
cctccccacagtcccccacctgaggagaagacagagagggagcctggctatcaggctgactgcctggtaacccctctgggtgcttcagttgccgactctaatagtcgcatgccaggcatc

SEQ ID NO: 387905 - DNA, 120 bp, Artificial Sequence
  ENSG00000144504_78 (sequence is synthesized)
cctgagttctgccacagccctgggtggtccccattcattgccaaccaggcatggtggctcagcctcaagggcatcccgtcaggttctggaagagcagcaatttctcaccaacttctccat

SEQ ID NO: 387906 - DNA, 120 bp, Artificial Sequence
  ENSG00000144504_79 (sequence is synthesized)
cctccgtgaagcccctgctttcaggggttagttctggagtggcccagccctggggccttcccctctgtcaggggaagtgacatggtggccactgatgagactgtctgtgtatgttcaggt

SEQ ID NO: 387907 - DNA, 120 bp, Artificial Sequence
  ENSG00000144504_80 (sequence is synthesized)
aaggctgggggctctccctgcaggcaggactgggcctggagggcctcctcatacttctggagctgagaccagaagcccgggttcggttctgctaccgggcgagcgctcttcaccatctgc

SEQ ID NO: 387908 - DNA, 120 bp, Artificial Sequence
  ENSG00000144504_81 (sequence is synthesized)
aaacaagaagtgtactgaataaccccaagtcgcgctaatggccagcaggggccaaggcgggcccagctgtaagagtgggccccgcccaacccggaagtgcctctctgcttccctaagccc

SEQ ID NO: 387909 - DNA, 120 bp, Artificial Sequence
  ENSG00000144504_82 (sequence is synthesized)
agccactggacaaaaagatatttcggtcctggggaagtttatttgtttagctacaagtagcttttttacttttaatgattaaaatggtaccaataataaggatatagactgaaaataaaa

SEQ ID NO: 387910 - DNA, 120 bp, Artificial Sequence
  ENSG00000144504_83 (sequence is synthesized)
acagcgtgactcccgcgcgcgccagctgctcctccgcgcccgcggctcgcgcgctcccgaggaagagtgagggcgcgacgcgcaccaacggtggaggaaggcccagctgtttcccaccat

SEQ ID NO: 387911 - DNA, 120 bp, Artificial Sequence
  ENSG00000144504_84 (sequence is synthesized)
ggtgcctctgtacatcccagtccagttcctgaaatgcgctctgtagcctggagagctcctgcgcatcctgtgaagccccatcaagaatccgctctcctgcagtccttccccgaggccctc

SEQ ID NO: 387912 - DNA, 120 bp, Artificial Sequence
  ENSG00000144504_85 (sequence is synthesized)
cctcatctcgttccctccgcaggcctcgagttacccttgcgccttccacatttactgaatgaacaaaggccggggctggaatcaggcagggcttgagcaagtcgtggctccacgtgctag

SEQ ID NO: 387913 - DNA, 120 bp, Artificial Sequence
  ENSG00000144504_86 (sequence is synthesized)
cgcagtgttgaagcaaactaaggggaagcgcatcctgaaggccccttggaaaggggagacttatattcaggaggaggcgggcctcctttcaacccacgctcagcatcacaaggacgcagg

SEQ ID NO: 387914 - DNA, 120 bp, Artificial Sequence
  ENSG00000144504_87 (sequence is synthesized)
caggagaggcaaagggttttggtgctgaggttttatctttagctcaacagatccagccgcaaaatatttagctgagaaaaaatcttcgaaggggaatctgattttatattttttttctta

SEQ ID NO: 387915 - DNA, 120 bp, Artificial Sequence
  ENSG00000144504_88 (sequence is synthesized)
agaagtgcctttcccagcggacggcttcttccctctctgaggccacacccacccgtgagcaagcggcttcacagggcattttgctctggaataaattagcctgctagttcttcgaagaaa

SEQ ID NO: 387916 - DNA, 120 bp, Artificial Sequence
  ENSG00000144524_0 (sequence is synthesized)
ggcgacgggtcggcggagacagaaaagcgccggacgccggggtgatcatggacgcttgacaacctgcgggcaggcgccgggaggccgagccagcgactaagaggaccgagaggtggcgtg

SEQ ID NO: 387917 - DNA, 120 bp, Artificial Sequence
  ENSG00000144524_1 (sequence is synthesized)
gacagatttcaaggccagagaatggcaggggaacagaaaccctcaagtaatctcctggagcagtttattttactagccaaaggtaccagtggctcagccctcactgctctcataagccag

SEQ ID NO: 387918 - DNA, 120 bp, Artificial Sequence
  ENSG00000144524_2 (sequence is synthesized)
gtcttagaggctcccggagtgtatgtctttggagaacttctggagctggccaacgtgcaggagcttgcggaaggagctaatgctgcttatttgcagttgttgaacctgtttgcctatggg

SEQ ID NO: 387919 - DNA, 120 bp, Artificial Sequence
  ENSG00000144524_3 (sequence is synthesized)
acatacccagattacatagccaacaaggagagcctgccagaactgagcacagctcagcagaacaagctgaagcatcttaccatcgtgagcttggcatcaagaatgaagtgtatcccctac

SEQ ID NO: 387920 - DNA, 120 bp, Artificial Sequence
  ENSG00000144524_4 (sequence is synthesized)
tccgtgttgctgaaagacctggagatgcggaatctccgggaactagaagaccttatcattgaggctgtctacactgacatcatccagggcaagctggaccagcgaaaccagctgctggaa

SEQ ID NO: 387921 - DNA, 120 bp, Artificial Sequence
  ENSG00000144524_5 (sequence is synthesized)
gtggatttctgcattggccgtgacatccgaaagaaggatatcaataatattgtcaagaccctgcatgaatggtgtgatggctgtgaagcagttctactgggcatcgagcagcaagttctg

SEQ ID NO: 387922 - DNA, 120 bp, Artificial Sequence
  ENSG00000144524_6 (sequence is synthesized)
agagccaaccagtacaaagagaaccacaaccgaactcagcagcaggtagaagcagaggttaccaacatcaagaagacactcaaagccaccgcatcctcctcggctcaggagatggagcag

SEQ ID NO: 387923 - DNA, 120 bp, Artificial Sequence
  ENSG00000144524_7 (sequence is synthesized)
cagctggctgaacgggagtgtccccctcacgctgagcagaggcagcccaccaagaagatgtccaaagtgaaaggtctggtctccagccgccactagggccggctggggcagctggcactc

SEQ ID NO: 387924 - DNA, 120 bp, Artificial Sequence
  ENSG00000144524_8 (sequence is synthesized)
accaggcctgggtcaggtggggaggggacaccaagggcccatttcctcccctctctacctgcagtgagttccagacctgcccgtcccctcaccagcgcctccccaccctgttggtactgt

SEQ ID NO: 387925 - DNA, 120 bp, Artificial Sequence
  ENSG00000144524_9 (sequence is synthesized)
tccagaaaaactgttactccccctcacccactccctccttccccagttgttcccttcagactcaggggctccaccaatgccatcccaaaacagggtcagacactgcccagcttccctcca

SEQ ID NO: 387926 - DNA, 120 bp, Artificial Sequence
  ENSG00000144524_10 (sequence is synthesized)
gcttgtctccctcccagtttttcttttgctccacgtcattttgtcaggctggttataagccggaggcagctttaaccagcccccagggatgattgtgaaggaggcccctccccttgtgag

SEQ ID NO: 387927 - DNA, 120 bp, Artificial Sequence
  ENSG00000144524_11 (sequence is synthesized)
gagggggcactcctctccagcccctggtaccacagtcctcacgatggtgcagtgatttctagccaggcgtcaagatgcgctgctttccctctcctgcctcatcccttgttggcagctcca

SEQ ID NO: 387928 - DNA, 120 bp, Artificial Sequence
  ENSG00000144524_12 (sequence is synthesized)
gttcaggccgtggagggacgtgatgctgggctgtgtttactaaacccacgggttttcagcctcttaagcccagctccgatctccaattagttgagagcgctgggttgactaacctctggt

SEQ ID NO: 387929 - DNA, 120 bp, Artificial Sequence
  ENSG00000144524_13 (sequence is synthesized)
atctgagcacagacagagggtgctgtgggtctgctgggtggcagaaatggttccttccggcttggcgttctctcctggccactcttcctgctgcctctgactactcagccttgttttcgg

SEQ ID NO: 387930 - DNA, 120 bp, Artificial Sequence
  ENSG00000144524_14 (sequence is synthesized)
tgtgtaggccccagctgcccactggaactgccggctaatgcttgctctcccaagatctttaactcctcctggctgcacctgggtagggatggtggcatcgatgcccctctgtctgctgaa

SEQ ID NO: 387931 - DNA, 120 bp, Artificial Sequence
  ENSG00000144524_15 (sequence is synthesized)
ggacctgttgctgcttctgtcttttcacccctccttggctgatgacccagagccctctgatgatggcattctcctggcaagagaaaaagacttaactagacttctgaacttgaacagttt

SEQ ID NO: 387932 - DNA, 120 bp, Artificial Sequence
  ENSG00000144524_16 (sequence is synthesized)
caggttatattttaatttttttttttttgtacaggttctgattctaatacatttcaacatgcttttgtcccccctcgtgtcaatatttgttatagactaatcgccggggatttttcacct

SEQ ID NO: 387933 - DNA, 85 bp, Artificial Sequence
  ENSG00000144524_17 (sequence is synthesized)
gtcctggactgattaaagttcattgaggaaaaagcacattttacaacaaaaaaataaaagtgtagatttaatgtatgtgactggg

SEQ ID NO: 387934 - DNA, 120 bp, Artificial Sequence
  ENSG00000144524_18 (sequence is synthesized)
acaaaaaaataaaagtgtagatttaatgtatgtgactggggtttggggttgcatacctggtggatcttgaggggctgggattagggtggttcaggaaaatgtgatgctgtttccccatgt

SEQ ID NO: 387935 - DNA, 120 bp, Artificial Sequence
  ENSG00000144524_19 (sequence is synthesized)
ttagccatggtcaaaaaatggatttctcctttttctaaaatgtccagcaactgcctactgttgatcaaatgttgaagtattcttgtttcccttttaagccaatccatgtgcccacataac

SEQ ID NO: 387936 - DNA, 120 bp, Artificial Sequence
  ENSG00000144524_20 (sequence is synthesized)
attatgcccaagtggagagttcactttaatttccaaagtatgtttcatgcagccccctgtcagctgctctgtggaaaaggggttctgttatgaaataaatgttgcactccctgcatccca

SEQ ID NO: 387937 - DNA, 120 bp, Artificial Sequence
  ENSG00000144524_21 (sequence is synthesized)
tcccagcatcccctgcactcggttcctctgtaacttagactccagtgtgccgcgcagtgtgcgcaaattcacaaacccgcccgctgagttggtcgtttcggaatcccgagacttgaaacc

SEQ ID NO: 387938 - DNA, 120 bp, Artificial Sequence
  ENSG00000144524_22 (sequence is synthesized)
gttagctgctgcagctgctgcccttgctgttattatcatttatggttattattgaaattttgcctctttctcaaggctcaactcaaactccatctcttccatgaattctttctttttatc

SEQ ID NO: 387939 - DNA, 120 bp, Artificial Sequence
  ENSG00000144524_23 (sequence is synthesized)
ttctgtactttccaaatgatactgttctctttccctctcccctcccctttcatctctttctcttacccctgtctcctccccatccctctcctcctctcttctagtagcttgtacctttct

SEQ ID NO: 387940 - DNA, 120 bp, Artificial Sequence
  ENSG00000144524_24 (sequence is synthesized)
tctggtagttctgccttggatttgtagctatggaaacatctgattgtaagaccgaggacaagtccagggccatgaagttgcacacctccaggtggttggtggccctggagttgtgccatg

SEQ ID NO: 387941 - DNA, 120 bp, Artificial Sequence
  ENSG00000144524_25 (sequence is synthesized)
cagcagccctggcaaagcccatcttgttcatccttgattcttctcagtacagagcattgcacacaacagatgctcgatgaagatatgtttaatttaattgaatgtcacaaggggcacaaa

SEQ ID NO: 387942 - DNA, 120 bp, Artificial Sequence
  ENSG00000144524_26 (sequence is synthesized)
tagtactccattaagataattgccacatcattttgcttgtttgctttttaggagactaaactctgtgtttgtagaaactgagtcttttcttctttggaagtacatagtcttccaaagaag

SEQ ID NO: 387943 - DNA, 120 bp, Artificial Sequence
  ENSG00000144524_27 (sequence is synthesized)
acaggaatatttgtcaaatgaataagtgcaaagtcatgatagtgattcagtagtagatttggtttggggagttggtgagcttattccataaaagaaatcctaattttattttgtgtcttg

SEQ ID NO: 387944 - DNA, 120 bp, Artificial Sequence
  ENSG00000144524_28 (sequence is synthesized)
aacaacaacaaccagttaacgtaattgacagcagagaagttccaggcagaacagtggctctttcgtttttcttctacacatggctttttgccatcagcatcagtgaagacttgcggaagg

SEQ ID NO: 387945 - DNA, 120 bp, Artificial Sequence
  ENSG00000144524_29 (sequence is synthesized)
ctcagcagcaggtagaagcagagagggaaaaacgtgatgtccccctcctgaatcttataacaacagctttcttctggttaccaacatcaagaagacactcaaagccaccgcatcctcctc

SEQ ID NO: 387946 - DNA, 120 bp, Artificial Sequence
  ENSG00000144524_30 (sequence is synthesized)
agtttggaagaccatcaaggtttgagatataaagcatggggtagtggggagacttcttgacctggctgcctcccattttgctgtgcccggtgggtgacctcacaaagggaatgttccttc

SEQ ID NO: 387947 - DNA, 120 bp, Artificial Sequence
  ENSG00000144524_31 (sequence is synthesized)
gtgtatgtctttggagaacttctggagctggccaacgtgcaggaggtaagaacggtttgcaaacaatttctctttattctaagactctgtaattctccaggtttccaaagaatttcagtg

SEQ ID NO: 387948 - DNA, 120 bp, Artificial Sequence
  ENSG00000144524_32 (sequence is synthesized)
ctgaagtattgtgaacctgtgaggtaccctattgtgagacagatgggaattggtggggcagagggagagattgagagaatatccttggctccttttatccagtatttttatcttaccttg

SEQ ID NO: 387949 - DNA, 120 bp, Artificial Sequence
  ENSG00000144524_33 (sequence is synthesized)
ccaagtaatcaaatagtacagaataaacagccatggcatctttgacacatgctcacccgtcctctgtttgaacactacagtgattggtagacagtttggtctgtggtgaacttttttttt

SEQ ID NO: 387950 - DNA, 120 bp, Artificial Sequence
  ENSG00000144524_34 (sequence is synthesized)
aagacccttctcaccctcaaaagaagatgacagcccgcagagagttaacttctgtttacatggaactcagacatctgcaaatcatgcttgcggaaggagctaatgctgcttatttgcagt

SEQ ID NO: 387951 - DNA, 120 bp, Artificial Sequence
  ENSG00000144524_35 (sequence is synthesized)
atataggaggtggtttgcttttgttgggcagtttatcaccttcatgaccaccacaacacctttgctgttggctccacacccacagtcagttttaacaggagtttcagtgaatcagttagt

SEQ ID NO: 387952 - DNA, 120 bp, Artificial Sequence
  ENSG00000144524_36 (sequence is synthesized)
tgtaaccaaaggagttgccggccttcagtttattggattcggtgctgtgtgtctgcctattcctcttgatggggaaactggagcagttccctacagtccagccatttcaggtgcccaatt

SEQ ID NO: 387953 - DNA, 120 bp, Artificial Sequence
  ENSG00000144524_37 (sequence is synthesized)
atgtctcctctacctgtgatgttcagagatgagaagagccacttttactttttcactgtaaatttttatttaatgtcagccttgcttgccgaactataaactctgtgaggaggtctgtag

SEQ ID NO: 387954 - DNA, 120 bp, Artificial Sequence
  ENSG00000144524_38 (sequence is synthesized)
tgctcaccattgtttctttagagctgaatacgtagcctgacacacagtaggctttcaataaaaatttaatttaccagaagtggaaaatgagttttatgaagaaaatttcagaaaactgag

SEQ ID NO: 387955 - DNA, 120 bp, Artificial Sequence
  ENSG00000144524_39 (sequence is synthesized)
ttcatttttcaacacaagagatgaccaaggggtaatatgttccttcaggttcatgaacagcctgcatgaatatgccaagtagttgttttgtaactgtggaagattggctaagaggagatg

SEQ ID NO: 387956 - DNA, 120 bp, Artificial Sequence
  ENSG00000144524_40 (sequence is synthesized)
gatggaaagtaaagtcagaaagaccttattgatttaggccagtgggagaagtgttggagtatctgctctggagaaaatgctcttttccggctagttttgttaattatgtttctgaaaagg

SEQ ID NO: 387957 - DNA, 120 bp, Artificial Sequence
  ENSG00000144524_41 (sequence is synthesized)
ggggctagattggatggtctttaccaggtttcttccccttctgattcagggacttcaggaggtttgtggtaacctgagaaagtagcctgaggtattatggtgctggagttctccataggg

SEQ ID NO: 387958 - DNA, 120 bp, Artificial Sequence
  ENSG00000144524_42 (sequence is synthesized)
tgcttagcagaccacctttatctccccatacattgcgtttttccatatgtgagctgagaataagctggttgcctttcagtgatctgaaattatagatgcatttcttggaagctttatttt

SEQ ID NO: 387959 - DNA, 120 bp, Artificial Sequence
  ENSG00000144524_43 (sequence is synthesized)
ttttaatggctaaaattgagtagtatcgctattgctgtctgtagactaccacttgctattcctgtttagagtttactgggcttggtaagttggaagggtaacaggagcacgtttgtgatt

SEQ ID NO: 387960 - DNA, 120 bp, Artificial Sequence
  ENSG00000144524_44 (sequence is synthesized)
taggagtagattcatgcattcttaaggaccagaaacctccagtgcaatatcgataaggaagattggtcagggacacacagcagaaacatactgctattgaacataagatggacatgaata

SEQ ID NO: 387961 - DNA, 120 bp, Artificial Sequence
  ENSG00000144535_0 (sequence is synthesized)
tttcgcccttgtcgcagctgaaccgccgactacgagctcctgcaccgcgcacacaccccgcgcgcttcgctctcggcctcgcccggccaccgtcgctctctagaacgccgcgcccgtgac

SEQ ID NO: 387962 - DNA, 120 bp, Artificial Sequence
  ENSG00000144535_1 (sequence is synthesized)
ccggaagagcattctccttagcaactgcgggactgcggcggcgccggcctccggggagaaacgcgaatgacaacagagctgctcaaggcgggaactctgagctaagcagtggaggtttct

SEQ ID NO: 387963 - DNA, 120 bp, Artificial Sequence
  ENSG00000144535_2 (sequence is synthesized)
ctggatctggagagaagagtgaccttggagccaataatgagccatcctgactacagaatgaacctccggcccctggggacccccagaggtgtgtctgctgtggctggtccacatgacatt

SEQ ID NO: 387964 - DNA, 120 bp, Artificial Sequence
  ENSG00000144535_3 (sequence is synthesized)
ggtgcttcgccaggtgacaaaaagtcaaagaacaggtccacacgagggaagaaaaagagcatatttgaaacttacatgtccaaggaggatgtttcagaaggcttgaagagaggaacactc

SEQ ID NO: 387965 - DNA, 120 bp, Artificial Sequence
  ENSG00000144535_4 (sequence is synthesized)
atccagggtgtattgagaattaatccaaagaagtttcatgaagccttcattccttccccggatggtgatcgagacatttttattgatggggttgttgctcgtaatagagccttaaatggg

SEQ ID NO: 387966 - DNA, 120 bp, Artificial Sequence
  ENSG00000144535_5 (sequence is synthesized)
gatctggtggtcgtgaaactgcttcccgaggagcattggaaggtagttaaaccagagagcaatgacaaagaaacagaagctgcgtatgaatcagatatccccgaggagctctgtggacac

SEQ ID NO: 387967 - DNA, 120 bp, Artificial Sequence
  ENSG00000144535_6 (sequence is synthesized)
catctcccgcaacagtccctgaaaagctataatgacagtcctgatgtcattgtagaggctcagtttgatggcagcgactcagaagatggacatggcatcacacaaaatgtgctggttgat

SEQ ID NO: 387968 - DNA, 120 bp, Artificial Sequence
  ENSG00000144535_7 (sequence is synthesized)
ggtgttaagaaactctcagtttgtgtttctgagaaaggaagagaggatggtgatgcaccggttacaaaagatgagaccacctgcatttcacaagacacaagagctttatcggagaaatcc

SEQ ID NO: 387969 - DNA, 120 bp, Artificial Sequence
  ENSG00000144535_8 (sequence is synthesized)
ctgcaaagatcagcaaaggtggtttacatcttggagaaaaaacattctcgagcagcaaccggcttcctcaaactcttggctgataagaacagcgaactgtttaggaaatacgccctgttt

SEQ ID NO: 387970 - DNA, 120 bp, Artificial Sequence
  ENSG00000144535_9 (sequence is synthesized)
tctccctcagaccaccgagtgcctagaatttatgtgcctctcaaggactgtccccaggactttgtggcacggcctaaagattatgccaacacactgttcatctgccgcattgtggactgg

SEQ ID NO: 387971 - DNA, 120 bp, Artificial Sequence
  ENSG00000144535_10 (sequence is synthesized)
aaggaggactgcaattttgccctggggcagctggctaagagtcttgggcaggctggtgaaattgagcctgaaacagaaggaatactaacagagtatggcgtggatttctctgatttctct

SEQ ID NO: 387972 - DNA, 120 bp, Artificial Sequence
  ENSG00000144535_11 (sequence is synthesized)
tcagaagttctagaatgtcttcctcaaggcctgccatggacaattccaccagaggagttcagcaagagaagggatttaagaaaagactgtatcttcaccattgacccatcaaccgcccga

SEQ ID NO: 387973 - DNA, 120 bp, Artificial Sequence
  ENSG00000144535_12 (sequence is synthesized)
gacctcgatgatgccctctcctgcaagccactcgctgacggcaacttcaaagtgggagttcacattgctgacgtgagttactttgttccggagggatctgatctggataaagtggctgcc

SEQ ID NO: 387974 - DNA, 120 bp, Artificial Sequence
  ENSG00000144535_13 (sequence is synthesized)
gagagggctacaagcgtctacttggttcaaaaggtggtccccatgcttcccaggctgctgtgtgaggagctgtgcagcctcaaccccatgtccgacaagctgaccttctctgtgatctgg

SEQ ID NO: 387975 - DNA, 120 bp, Artificial Sequence
  ENSG00000144535_14 (sequence is synthesized)
atccttgatgaatggtttggccggaccatcatccgctcctgcaccaaacttagctacgagcatgcacagagcatgattgaaagcccaactgagaaaatccctgcgaaagagctgcccccc

SEQ ID NO: 387976 - DNA, 120 bp, Artificial Sequence
  ENSG00000144535_15 (sequence is synthesized)
atttccccagagcatagcagcgaggaggtacaccaggccgtcttgaatctccacggaattgccaagcagttacgccagcagcgctttgtggacggcgcacttcgtttggatcagctaaag

SEQ ID NO: 387977 - DNA, 120 bp, Artificial Sequence
  ENSG00000144535_16 (sequence is synthesized)
cttgctttcactctggaccacgagaccggattgcctcaaggatgtcatatctatgagtaccgcgagagcaacaagctcgtggaggagttcatgctcttggccaacatggcagtggcccac

SEQ ID NO: 387978 - DNA, 120 bp, Artificial Sequence
  ENSG00000144535_17 (sequence is synthesized)
aagatccaccgcgccttccccgagcaggccctgctgcgccggcaccccccgccccaaacaaggatgctcagtgacctggtggaattctgcgaccagatggggctgcccgtggacttcagc

SEQ ID NO: 387979 - DNA, 120 bp, Artificial Sequence
  ENSG00000144535_18 (sequence is synthesized)
tccgcaggagccctcaataaaagcctgacccaaacatttggagatgacaagtactcactggcccgcaaggaggtgctcaccaacatgtgctcccggcccatgcagatggcactgtacttc

SEQ ID NO: 387980 - DNA, 120 bp, Artificial Sequence
  ENSG00000144535_19 (sequence is synthesized)
tgctcggggctgctgcaggacccagcgcagttccggcactacgcgctcaatgtgcccctgtacacacacttcacctcgcccatccgccgctttgccgacgtcctggtgcaccgcctcctg

SEQ ID NO: 387981 - DNA, 120 bp, Artificial Sequence
  ENSG00000144535_20 (sequence is synthesized)
gctgccgcgttaggctatagggagcgactagacatggcgcccgataccctgcagaaacaggcggaccactgtaacgaccgccgcatggcgtccaagcgcgtgcaggagctcagtaccagt

SEQ ID NO: 387982 - DNA, 120 bp, Artificial Sequence
  ENSG00000144535_21 (sequence is synthesized)
ctcttctttgctgttctggtcaaggagagtggccccctggagtcagaagccatggtgatgggcatcctgaagcaagccttcgacgtgctggtgctgcgctacggcgtgcagaagcgcatc

SEQ ID NO: 387983 - DNA, 120 bp, Artificial Sequence
  ENSG00000144535_22 (sequence is synthesized)
tactgcaacgcactggccctgcggtcccaccacttccagaaggtgggcaagaagccggaactcacgctggtctgggagcctgaggacatggagcaggagccagcacagcaggtcatcacc

SEQ ID NO: 387984 - DNA, 120 bp, Artificial Sequence
  ENSG00000144535_23 (sequence is synthesized)
atcttcagcctggtggaggtggtcctgcaggcagagtccacagccctcaagtacagcgccatcctgaagcggccaggcacccagggccacctgggccctgagaaggaggaggaggagtct

SEQ ID NO: 387985 - DNA, 120 bp, Artificial Sequence
  ENSG00000144535_24 (sequence is synthesized)
gacggtgagcccgaggactcaagcaccagctgagctccaccagccgcctgccccgcctgccccgcctgcctgtcccgccacactggctttaggacctgttgacacggaggggggttttta

SEQ ID NO: 387986 - DNA, 120 bp, Artificial Sequence
  ENSG00000144535_25 (sequence is synthesized)
atttggtttttaacaactcaggggtttgtttttatttttatttaatttttgcagctcaacttttaaacaaactgcaggggagagggtggggctggaaggaaggctgaggcctggtcagca

SEQ ID NO: 387987 - DNA, 120 bp, Artificial Sequence
  ENSG00000144535_26 (sequence is synthesized)
gtgaccccagcagagcaggccccagtcctcctgggaggctggccccccttttttctgggccctactgccctcctctgcccaggaaatgggggggtttcagcaactcagtgtcacagaata

SEQ ID NO: 387988 - DNA, 120 bp, Artificial Sequence
  ENSG00000144535_27 (sequence is synthesized)
aaatcaagtgtggagtgccatctggtgtgtagggcgcctctgggaagcctgggcagcagaatgccccttgcacccagggcaagggacccagttcaggcttcacccctcgctgctgagccg

SEQ ID NO: 387989 - DNA, 120 bp, Artificial Sequence
  ENSG00000144535_28 (sequence is synthesized)
atgtcaacacctggaactttcctgtcagttccaacacgattcagagctggctgcctggcagatgattgatactggagtctcattctgcctgattaaaaatggaattagtatgcaacactg

SEQ ID NO: 387990 - DNA, 120 bp, Artificial Sequence
  ENSG00000144535_29 (sequence is synthesized)
atgcgggggttgtccatctctgtatccccagtgccagcactgcacctcgccccaagcagttgtccaataaatgagcagtgagtaaatgaaagaatgagcaaagccttgtaacaggaaagg

SEQ ID NO: 387991 - DNA, 120 bp, Artificial Sequence
  ENSG00000144535_30 (sequence is synthesized)
ggccggcggcgtctgccgtgcaagacctggcccagtggagcagagcctggaggttcaggagccgggtctggaaggctccttccggtggaagaggggcccggagccagccggcgcctggca

SEQ ID NO: 387992 - DNA, 120 bp, Artificial Sequence
  ENSG00000144535_31 (sequence is synthesized)
gcccctctgctgaagatgcagaagcacagccctccacagaggaacgcctgcctgagactcggggcatatgtgacagggatccagacacacgactgtttttccttcagcaacagagccgtg

SEQ ID NO: 387993 - DNA, 120 bp, Artificial Sequence
  ENSG00000144535_32 (sequence is synthesized)
tattggaagcaaagccccaaaacacgataagagtagaggagcagacaacccagttgcagatttgaagaagcatgtggaattccttgtggcggagaaggaaagattatggaaagaaagtaa

SEQ ID NO: 387994 - DNA, 120 bp, Artificial Sequence
  ENSG00000144535_33 (sequence is synthesized)
acaggtaaaggctgaaaaggccagacttctaaaaggtccagtagaaaaggagctggatgtgggtgctgattttgtggaaaagtcagagttacggagctcgcctctgcattcagaaactgc

SEQ ID NO: 387995 - DNA, 120 bp, Artificial Sequence
  ENSG00000144535_34 (sequence is synthesized)
tataccctcttcagccttgcagaggtttgcagcagatgccaggaaagccaagtacattccaatacccaatcttttccctcagattttccatctccagagcttccctttatggagctttct

SEQ ID NO: 387996 - DNA, 120 bp, Artificial Sequence
  ENSG00000144535_35 (sequence is synthesized)
gaggatattctgaaaggatttatgagtaactaaaatggaaggccatagaagaagggagaagaggaaataatactaagtcatacagttaatccagcaacaaaaaatgaaaagggaaagcca

SEQ ID NO: 387997 - DNA, 120 bp, Artificial Sequence
  ENSG00000144535_36 (sequence is synthesized)
caggcaagggtaatcctggaaatgcctcgtcatctggtgtactgtaggagaagacgcattgccaggatgtggggaacagtcgctgtgaagcgtgtcacatacctgattcactgacttgag

SEQ ID NO: 387998 - DNA, 120 bp, Artificial Sequence
  ENSG00000144535_37 (sequence is synthesized)
ctgatgatgccgacctggcagacactaaactcgtggagggtcagtttctcttgacaccaaccaaatggctgcctgaaagaattttttcaagcaacaattatttttcttatcttcagggtt

SEQ ID NO: 387999 - DNA, 120 bp, Artificial Sequence
  ENSG00000144535_38 (sequence is synthesized)
aaaatgtataaaagtatgttatgtataattaatctgttatgtcataagtgatcatgcaaaacctaaatattatggcagcctgaggggctgcttcgtatttgaaacatgctttgtctcagg

SEQ ID NO: 388000 - DNA, 120 bp, Artificial Sequence
  ENSG00000144535_39 (sequence is synthesized)
tttagaggtaataagcaccacaagacaggaacaggaaaagtgctctgagatttgagaggagggaaccactatttcccattaggattgtctagagatgctttattggaagtgacatgtttg

SEQ ID NO: 388001 - DNA, 120 bp, Artificial Sequence
  ENSG00000144535_40 (sequence is synthesized)
gctttcacctgagctacttgttgaagatctcgtgtgattcagtcaggactgtatttggtcatttaatcagaaaagttagagcagagaatcataaaaagtgaattaaaaaaaaaaaacttt

SEQ ID NO: 388002 - DNA, 120 bp, Artificial Sequence
  ENSG00000144535_41 (sequence is synthesized)
tctttgagtgtgggtatgttgattggagttctgtgttatctttcttgcttaaaccacacttgtaatgcagcatttatcactttgagttttggtggagtgagaatttagacagtggagaag

SEQ ID NO: 388003 - DNA, 120 bp, Artificial Sequence
  ENSG00000144535_42 (sequence is synthesized)
cagtatgaatatagactctcttcagatttgtacagtttttgctccaatttttttgttgttaccatgcccatacctaatttaaaaataattttaatgtcttttttagtttttccaaagtat

SEQ ID NO: 388004 - DNA, 120 bp, Artificial Sequence
  ENSG00000144535_43 (sequence is synthesized)
tcaatttagttatagaaacaattgtttttatattcctatttcaccattttgcacaattcacttgtattctttaattatagaagctagtgtcattttcagatgtgggatgaaacagctgac

SEQ ID NO: 388005 - DNA, 120 bp, Artificial Sequence
  ENSG00000144535_44 (sequence is synthesized)
gctgggattacaggtgtgagccaacatgctcgactaaacacagctgacttctagctgtgcacatagctcatagtggcagaaatggtgaagggcaacgtataaagtggcataatggcatga

SEQ ID NO: 388006 - DNA, 120 bp, Artificial Sequence
  ENSG00000144535_45 (sequence is synthesized)
tggcataatggcatgaggctttatgtttcagaagcatccatcagtgtgtttcatatgggaatgcagtgtgcttactctaccaagcaagttgattaatagagtattgctcttgcatactga

SEQ ID NO: 388007 - DNA, 120 bp, Artificial Sequence
  ENSG00000144535_46 (sequence is synthesized)
catgaggaatttctaaattatactctatatatttgagtactaactgtgctccaggcagcatgctaagtgtgggagattagaatgaatggaaagcctggggatggatctggctcacagacc

SEQ ID NO: 388008 - DNA, 120 bp, Artificial Sequence
  ENSG00000144535_47 (sequence is synthesized)
agtactagactattgtcttactttttttttaagtacactgattaagtattggaattccctctctgctgcagagtaaataacacaatgccattgatatagtcctaatttttgacctgtggc

SEQ ID NO: 388009 - DNA, 120 bp, Artificial Sequence
  ENSG00000144535_48 (sequence is synthesized)
ggctggctttctttccacgagcatggccagatgacgaggctcacccgcagcactactcacacctccaggaagggaagttgatggcagggttctggctgcagccaggcctgcgggagcttc

SEQ ID NO: 388010 - DNA, 120 bp, Artificial Sequence
  ENSG00000144535_49 (sequence is synthesized)
ctccctgatctctctcactcaaggggaaagctcagggctgggcatgaaggctggggaaaggcagggaaggcagagtccccccaggctggtcaaggccccgatagccccatgtctccctga

SEQ ID NO: 388011 - DNA, 120 bp, Artificial Sequence
  ENSG00000144535_50 (sequence is synthesized)
gggggcggctttccccatgaagagggtcctggtcaccaaggcatgaggacatgcccaaggctggcccatcacaacaggctccagctcttgtgcacatgtgtgatcttcttgtcccaccaa

SEQ ID NO: 388012 - DNA, 120 bp, Artificial Sequence
  ENSG00000144535_51 (sequence is synthesized)
aggcgggaaaaagaagtgcgtggcctcctgccccagatttggtggtagggtcagtggtgctgacctcagtgctgtgtgataccagccccccagcctttgcctggttcatgtcccacatcg

SEQ ID NO: 388013 - DNA, 120 bp, Artificial Sequence
  ENSG00000144535_52 (sequence is synthesized)
cctatcggtccccgctccttcagtctgggaccttggcctgctcagtccttctgtggggagccacatccattcacagtgactgttgagtctaatgacagacacccaagtgctgcaaagcca

SEQ ID NO: 388014 - DNA, 120 bp, Artificial Sequence
  ENSG00000144535_53 (sequence is synthesized)
gagcagcagcccctgaaagggtgactctggggtctcaccccatccccactcctgccctgtcctctggtgagggcttccctcctgctgcctcagactgtcctgtctaccctcagagaccct

SEQ ID NO: 388015 - DNA, 120 bp, Artificial Sequence
  ENSG00000144535_54 (sequence is synthesized)
gttgggaggcttccctccaacaaggcaccgtccccagaggagaagggagcccagcactcctgggactgtggggtccttggtccactcaccactgccacatgcctcagggagccctcagag

SEQ ID NO: 388016 - DNA, 120 bp, Artificial Sequence
  ENSG00000144535_55 (sequence is synthesized)
caggggctgagctggggccccagggttcccatgccctgggcgagcatggtgccctcttacagcctgggctgcccgagtgttccaggcatcctgtcattcagcagagatctttcctcggtg

SEQ ID NO: 388017 - DNA, 120 bp, Artificial Sequence
  ENSG00000144535_56 (sequence is synthesized)
ccttctctggattgggtgggctgctgagctctggggctgctgcagtgaattatttaatagatgggtgcttccctgctctccagggtccccctctgggagagccagcacaggagctaacca

SEQ ID NO: 388018 - DNA, 120 bp, Artificial Sequence
  ENSG00000144535_57 (sequence is synthesized)
gtcagaggagaaggcggtgtagaccaactggtgcagggagaccatgggggtgctgggcaagacagggacttggcggaacacatgagatgaggtagctgggaggttgtctttaagctgaga

SEQ ID NO: 388019 - DNA, 120 bp, Artificial Sequence
  ENSG00000144535_58 (sequence is synthesized)
cctgaagggtgattgatagagagccaggccggctgcagcgtgggaaagcctgcgcacctgtccccaaaccccagcggtccctcccatcccacccaccctctgcaggctcgtggaggagtt

SEQ ID NO: 388020 - DNA, 120 bp, Artificial Sequence
  ENSG00000144535_59 (sequence is synthesized)
ccaggaggcctcgaggagcccagggcagtgccaggaggtgccatggctgcagcactgtccctgcaggagagtggccccctggagtcagaagccatggtgatgggcatcctgaagcaagcc

SEQ ID NO: 388021 - DNA, 120 bp, Artificial Sequence
  ENSG00000144535_60 (sequence is synthesized)
ttcgacgtgctggtgctgcgctacggcgtgcagaagcgcatctactgcaacgtgagtgccctgggagagcccgggggcgggcagggcagcccaagccatcccgcactggaggggcacagg

SEQ ID NO: 388022 - DNA, 120 bp, Artificial Sequence
  ENSG00000144535_61 (sequence is synthesized)
acactccacccctcgctcccccagccctagcacaaagcccacctgatgggccttgctgagacgcccagctctcccacctgggatggtggctccaggcccagggtcaggcctggccccctt

SEQ ID NO: 388023 - DNA, 120 bp, Artificial Sequence
  ENSG00000144535_62 (sequence is synthesized)
ccccaaggacccaggaaccagagagcaggcccctccatggccagtacagctcggcagggtgtgcaggctttggggactgtgtttataggaacgtgaaggaatgaaaggccagcgaatggt

SEQ ID NO: 388024 - DNA, 120 bp, Artificial Sequence
  ENSG00000144535_63 (sequence is synthesized)
ccgtggccgctttggaaactgtgtcccctgaagacaaggaagagagctgtccctggctcggctcctgccctgagtgactgttgactcacagttctctctccaaggggacatgggcctgtc

SEQ ID NO: 388025 - DNA, 120 bp, Artificial Sequence
  ENSG00000144535_64 (sequence is synthesized)
ctaatgctgccttaggggcttggctccagctggccctggggtctgcaggtcaccacctgcctctgtgcctggctttgaatttcctaacatccagagtgccctgggagtacagtgtccagc

SEQ ID NO: 388026 - DNA, 120 bp, Artificial Sequence
  ENSG00000144535_65 (sequence is synthesized)
ccgttgtgtgcagtaaacgtggtgttcataaccgggagctgggcagaagaggaacgacagagtccccctgcggaccctgggggctctgtatcctgaagttcaagcctagctcaccctgct

SEQ ID NO: 388027 - DNA, 120 bp, Artificial Sequence
  ENSG00000144535_66 (sequence is synthesized)
gtgggcccagccctgcctgcactgacagatggcaccagcagggggcgcagcgctccgccgccacagttctctgtccccacctcagtgcagtcagccctggaccccccaccacttgccccc

SEQ ID NO: 388028 - DNA, 120 bp, Artificial Sequence
  ENSG00000144535_67 (sequence is synthesized)
catagcacacagagccacgggccttcccagcccccacccctggcccttggtcactctcacctgctgcctcagctgaaggtggcctggcagggcctccctgaagctccctccagccaggca

SEQ ID NO: 388029 - DNA, 120 bp, Artificial Sequence
  ENSG00000144535_68 (sequence is synthesized)
agggtgggccagggccgagggctgagggccgcctccaagcattgaagccctccagggtggaagggcaggcagcagcatccagagctgaggcctgaggcttggtgtttgcactccaggcac

SEQ ID NO: 388030 - DNA, 120 bp, Artificial Sequence
  ENSG00000144535_69 (sequence is synthesized)
gccccctaagtcctgatgacccctctcctgcctcctgcggtgcccctcattccttcatctgtgtcccctgggctcccccagcactgcagcctcccgggtggggttttagggccctcccag

SEQ ID NO: 388031 - DNA, 120 bp, Artificial Sequence
  ENSG00000144535_70 (sequence is synthesized)
ctcacccagaccccctcctgtgggtcctgctttctggcaccaccttcccttccttgggggcaaccacagtggagagaggaggggctctgcctgtcccgctaatgcaggggtgctggcctt

SEQ ID NO: 388032 - DNA, 120 bp, Artificial Sequence
  ENSG00000144535_71 (sequence is synthesized)
ctagggtcctttagagaacctgatgaaagctatgagtttacacccaagaaattgtctggaaccgttttcaccaacagtgtgccctgaacgcggacccaggccctcaggttgtgtttcata

SEQ ID NO: 388033 - DNA, 120 bp, Artificial Sequence
  ENSG00000144535_72 (sequence is synthesized)
agccttgggagcgctcaggatgcatctgactccccaactctgccctgacccagggcattcttcctggagggggcccccattacagacaggcgagcagaggcttccagaggccgaaggagg

SEQ ID NO: 388034 - DNA, 120 bp, Artificial Sequence
  ENSG00000144535_73 (sequence is synthesized)
ggagacccagccaggccaccctccagagcatctcagtctgcaagccccttggtgtgctcagagcttccagtcacactgctcatgcctatccgtgcacagccagggattgcccttcgtgga

SEQ ID NO: 388035 - DNA, 120 bp, Artificial Sequence
  ENSG00000144535_74 (sequence is synthesized)
ggaaaacttcatgaaacaaaaaacaagctccgtggggaacacagaccatagaggaaaaagaaagctgtagaaaaagaaatgatgaatgccttcctggaggtgagaaagccatcgtgaaac

SEQ ID NO: 388036 - DNA, 120 bp, Artificial Sequence
  ENSG00000144535_75 (sequence is synthesized)
ataaaagaagaaagagatgttcagagagagcttcggatagagagactttctggcctggtgggactcggctgccctcattgcacccttaggcatggaaagctgcattctgaacaccagcaa

SEQ ID NO: 388037 - DNA, 120 bp, Artificial Sequence
  ENSG00000144535_76 (sequence is synthesized)
gcctagctataaatcttcttggacaggaaataaaagagtcagagaccaagccatctctgccctgcatacaaactctcttggttgagttgtgcccagtagttcagtgctttcagaaaagac

SEQ ID NO: 388038 - DNA, 120 bp, Artificial Sequence
  ENSG00000144535_77 (sequence is synthesized)
caggcatgagccaccgtgcttggccaaaattcactagattttgaaagcagttcttgacccatggcttatgtgaaagcaaatgcccgatcagggtgcagtggttgccctgtgctggagcat

SEQ ID NO: 388039 - DNA, 120 bp, Artificial Sequence
  ENSG00000144535_78 (sequence is synthesized)
tcactagggaaaaagaccgcagaccctgggaggctgcagaccctgtgacctgaatgctggatgctggagggaacctccagaccacttgtgaaatgtgaaagagaacagtggaatagaact

SEQ ID NO: 388040 - DNA, 120 bp, Artificial Sequence
  ENSG00000144535_79 (sequence is synthesized)
gaaactgacgttccctgagcatgctgaaggcagactgtacagcccaatgtagacgcacaggaggagtgactgggtttggaatgaaatgtagaaaaggaagcaagctaaatcaccagggga

SEQ ID NO: 388041 - DNA, 120 bp, Artificial Sequence
  ENSG00000144535_80 (sequence is synthesized)
aacccttgagaccacaagaatgaagaggtcatggccctgtcattccagaggaggctggagcagctcttcaggaaatgtggatgtgcgaagaggacaagcctggctgagcctaaaaggggc

SEQ ID NO: 388042 - DNA, 120 bp, Artificial Sequence
  ENSG00000144535_81 (sequence is synthesized)
agagccaaattcagacctgcttgccacagtggaagatttgtgagattatttgaatcccttatatctttggatagtggtagttcttggaataatatggaaagaatagtttcaggatttttt

SEQ ID NO: 388043 - DNA, 120 bp, Artificial Sequence
  ENSG00000144535_82 (sequence is synthesized)
gctggggcccctcccatgtccctgcctctgacgccatcacctccaaggaggtacaagccaagctggagctccagagatcggagccgctccggagttagccagagcccgaaaagcctgcat

SEQ ID NO: 388044 - DNA, 120 bp, Artificial Sequence
  ENSG00000144535_83 (sequence is synthesized)
agaacagtgatagctatgaagagcattaaacatgtcagacaaacttgtggaagctgaattcgattgcaaggctatactcttgttcacgacatctagactttatgatccatgtaccataat

SEQ ID NO: 388045 - DNA, 120 bp, Artificial Sequence
  ENSG00000144535_84 (sequence is synthesized)
catgatgggagctaccatcttctgagtgcccgcagacaccaggcaaggggcttacccaggttagttctagtctaaaaccattcaagaaggatattcacaataaaaaataaaaataaaacc

SEQ ID NO: 388046 - DNA, 80 bp, Artificial Sequence
  ENSG00000144550_0 (sequence is synthesized)
actgtcagggcgcgagcggctggagcgcacgcagggctggagcgagtgcagccgccgccgccgccgacaccgcggcacat

SEQ ID NO: 388047 - DNA, 120 bp, Artificial Sequence
  ENSG00000144550_1 (sequence is synthesized)
ccctggtctcgcagcctcctgcggctctggtcgcccgaccagccatgtctctcggcggagcctccgagcgcagcgtcccggccaccaagattgaaattaccgtgtcctgccggaacctgc

SEQ ID NO: 388048 - DNA, 120 bp, Artificial Sequence
  ENSG00000144550_2 (sequence is synthesized)
tagaccttgataccttctccaagtccgaccccatggtggtgctttacacgcagagccgggccagccaggagtggcgggagttcggacggaccgaggtgattgataacacgctgaacccag

SEQ ID NO: 388049 - DNA, 120 bp, Artificial Sequence
  ENSG00000144550_3 (sequence is synthesized)
acttcgtgcgcaaattcgtcctcgactatttctttgaggaaaagcaaaatctgcgcttcgatgtgtacaacgtggactccaaaaccaacatctccaaaccgaaggatttcctgggacaag

SEQ ID NO: 388050 - DNA, 120 bp, Artificial Sequence
  ENSG00000144550_4 (sequence is synthesized)
cgttcctggccctgggagaggtgattggaggccagggcagccgagtagagcgaaccctcacgggtgtaccaggcaagaagtgtgggaccatattgctgactgcagaagagcttagcaatt

SEQ ID NO: 388051 - DNA, 120 bp, Artificial Sequence
  ENSG00000144550_5 (sequence is synthesized)
gtcgggacattgccaccatgcagctgtgtgcaaacaagctggacaagaaggacttctttgggaaatcagaccccttccttgtgttctacaggagcaatgaggatggcacgttcaccatct

SEQ ID NO: 388052 - DNA, 120 bp, Artificial Sequence
  ENSG00000144550_6 (sequence is synthesized)
gccacaagacagaggttgtgaaaaacacgctgaatcctgtgtggcagcccttcagcatccctgtgcgggctctgtgcaatggagactatgacagaacggtgaagattgatgtgtacgact

SEQ ID NO: 388053 - DNA, 120 bp, Artificial Sequence
  ENSG00000144550_7 (sequence is synthesized)
gggaccgggatggaagccacgatttcattggtgagttcaccaccagctaccgggagctgagcaaggcccagaaccagttcacagtatatgaggttcttaaccctcggaagaaatgtaaga

SEQ ID NO: 388054 - DNA, 120 bp, Artificial Sequence
  ENSG00000144550_8 (sequence is synthesized)
aagaaatatgtcaactcaggaactgtgacgctgctctccttctctgtggactctgaattcacttttgttgattacatcaagggagggacacagctgaacttcacagtagccattgacttc

SEQ ID NO: 388055 - DNA, 120 bp, Artificial Sequence
  ENSG00000144550_9 (sequence is synthesized)
acggcttccaatgggaatcctctgcagcctacctccctgcactacatgagtccctaccagctcagcgcctatgccatggccctcaaggcagtgggagagatcatccaggactatgacagt

SEQ ID NO: 388056 - DNA, 120 bp, Artificial Sequence
  ENSG00000144550_10 (sequence is synthesized)
gataagctcttcccagcttatggctttggggccaagctgcccccagagggacggatctcccaccagttccccctgaacaacaatgatgaggaccccaactgtgcgggcatcgagggtgtg

SEQ ID NO: 388057 - DNA, 120 bp, Artificial Sequence
  ENSG00000144550_11 (sequence is synthesized)
ctggagagctatttccagagcctgcgcacagtgcagctctatgggcccacctactttgctcctgtcatcaaccaagtggccagggctgcagccaagatctctgatggctcccagtactat

SEQ ID NO: 388058 - DNA, 120 bp, Artificial Sequence
  ENSG00000144550_12 (sequence is synthesized)
gttctgctcatcatcactgatggggtcatctctgacatgacgcagaccaaggaggccatcgtcagcgcctcctcattgcccatgtctatcattatcgtcggtgtaggaccagccatgttt

SEQ ID NO: 388059 - DNA, 120 bp, Artificial Sequence
  ENSG00000144550_13 (sequence is synthesized)
gaggcaatggaagagttggacggtgatgatgtgcgcgtgtcctctaggggacgctacgcagagcgggacatcgttcagttcgtcccattccgagactatgttgaccggtcggggaaccag

SEQ ID NO: 388060 - DNA, 120 bp, Artificial Sequence
  ENSG00000144550_14 (sequence is synthesized)
gtgttgagcatggcccgactggccaaggatgtgctggccgagatcccggagcagctgctgtcctatatgcgcaccagagacatccagcctcggcccccaccccctgccaaccccagcccg

SEQ ID NO: 388061 - DNA, 120 bp, Artificial Sequence
  ENSG00000144550_15 (sequence is synthesized)
atcccagctccagagcagccctgaggattccacatatccaatgcctcacagtctgcaagcctgctcacccactgcttctgctttaagccagaggcacctggaaccctggacttcactggg

SEQ ID NO: 388062 - DNA, 120 bp, Artificial Sequence
  ENSG00000144550_16 (sequence is synthesized)
agggccaacttggaggatcagtgctggctgacaagccctccgcctccttgcctgcagagggcctggcactatcaccacctctctgccttcatgccaataataaagctgatctttattcca

SEQ ID NO: 388063 - DNA, 120 bp, Artificial Sequence
  ENSG00000144550_17 (sequence is synthesized)
gcgggacatcgttcaggaaggttgctgcagccttggcacatccgtggtgtaggtcgggaggtccccaaggcccctgccctctagtggagacaaccaacaataaataatcacacaaagaaa

SEQ ID NO: 388064 - DNA, 120 bp, Artificial Sequence
  ENSG00000144554_0 (sequence is synthesized)
gtcagagcggcgtcgggcctggcgggaaagtcgaaaactacgggcggcgacggcttctcggaagtaatttaagtgcacaagacattggtcaaaatggtttccaaaagaagactgtcaaaa

SEQ ID NO: 388065 - DNA, 120 bp, Artificial Sequence
  ENSG00000144554_1 (sequence is synthesized)
tctgaggataaagagagcctgacagaagatgcctccaaaaccaggaagcaaccactttccaaaaagacaaagaaatctcatattgctaatgaagttgaagaaaatgacagcatctttgta

SEQ ID NO: 388066 - DNA, 120 bp, Artificial Sequence
  ENSG00000144554_2 (sequence is synthesized)
aagcttcttaagatatcaggaattattcttaaaacgggagagagtcagaatcaactagctgtggatcaaatagctttccaaaagaagctctttcagaccctgaggagacacccttcctat

SEQ ID NO: 388067 - DNA, 120 bp, Artificial Sequence
  ENSG00000144554_3 (sequence is synthesized)
cccaaaataatagaagaatttgttagtggcctggagtcttacattgaggatgaagacagtttcaggaactgccttttgtcttgtgagcgtctgcaggatgaggaagccagtatgggtgca

SEQ ID NO: 388068 - DNA, 120 bp, Artificial Sequence
  ENSG00000144554_4 (sequence is synthesized)
tcttattctaagagtctcatcaaactgcttctggggattgacatactgcagcctgccattatcaaaaccttatttgagaagttgccagaatatttttttgaaaacaagaacagtgatgaa

SEQ ID NO: 388069 - DNA, 120 bp, Artificial Sequence
  ENSG00000144554_5 (sequence is synthesized)
atcaacatacctcgactcattgtcagtcaactaaaatggcttgacagagttgtggatggcaaggacctcaccaccaagatcatgcagctgatcagtattgctccagagaacctgcagcat

SEQ ID NO: 388070 - DNA, 120 bp, Artificial Sequence
  ENSG00000144554_6 (sequence is synthesized)
gacatcatcaccagcctacctgagatcctaggggattcccagcacgctgatgtggggaaagaactcagtgacctactgatagagaatacttcactcactgtcccaatcctggatgtcctt

SEQ ID NO: 388071 - DNA, 120 bp, Artificial Sequence
  ENSG00000144554_7 (sequence is synthesized)
tcaagcctccgacttgacccaaacttcctattgaaggttcgccagttggtgatggataagttgtcgtctattagattggaggatttacctgtgataataaagttcattcttcattccgta

SEQ ID NO: 388072 - DNA, 120 bp, Artificial Sequence
  ENSG00000144554_8 (sequence is synthesized)
acagccatggatacacttgaggtaatttctgagcttcgggagaagttggatctgcagcattgtgttttgccatcacggttacaggcttcccaagtaaagttgaaaagtaaaggacgagca

SEQ ID NO: 388073 - DNA, 120 bp, Artificial Sequence
  ENSG00000144554_9 (sequence is synthesized)
agttcctcaggaaatcaagaaagcagcggtcagagctgtattattctcctctttgatgtaataaagtcagctattagatatgagaaaaccatttcagaagcctggattaaggcaattgaa

SEQ ID NO: 388074 - DNA, 120 bp, Artificial Sequence
  ENSG00000144554_10 (sequence is synthesized)
aacactgcctcagtatctgaacacaaggtgtttgacctggtgatgcttttcatcatctatagcaccaatactcagacaaagaagtacattgacagggtgctaagaaataagattcgatca

SEQ ID NO: 388075 - DNA, 120 bp, Artificial Sequence
  ENSG00000144554_11 (sequence is synthesized)
ggctgcattcaagaacagctgctccagagtacattctctgttcattacttagttcttaaggatatgtgttcatccattctgtcgctggctcagagtttgcttcactctctagaccagagt

SEQ ID NO: 388076 - DNA, 120 bp, Artificial Sequence
  ENSG00000144554_12 (sequence is synthesized)
ataatttcatttggcagtctcctatacaaatatgcatttaagttttttgacacgtactgccagcaggaagtggttggtgccttagtgacccatatctgcagtgggaatgaagctgaagtt

SEQ ID NO: 388077 - DNA, 120 bp, Artificial Sequence
  ENSG00000144554_13 (sequence is synthesized)
gatactgccttagatgtccttctagagttggtagtgttaaacccatctgctatgatgatgaatgctgtctttgtaaagggcattttagattatctggataacatatcccctcagcaaata

SEQ ID NO: 388078 - DNA, 120 bp, Artificial Sequence
  ENSG00000144554_14 (sequence is synthesized)
cgaaaactcttctatgttctcagcacactggcatttagcaaacagaatgaagccagcagccacatccaggatgacatgcacttggtgataagaaagcagctctctagcaccgtattcaag

SEQ ID NO: 388079 - DNA, 120 bp, Artificial Sequence
  ENSG00000144554_15 (sequence is synthesized)
tacaagctcattgggattattggtgctgtgaccatggctggcatcatggcggcagacagaagtgaatcacctagtttgacccaagagagagccaacctgagcgatgagcagtgcacacag

SEQ ID NO: 388080 - DNA, 120 bp, Artificial Sequence
  ENSG00000144554_16 (sequence is synthesized)
gtgacctccttgttgcagttggttcattcctgcagtgagcagtctcctcaggcctctgcactttactatgatgaatttgccaacctgatccaacatgaaaagctggatccaaaagccctg

SEQ ID NO: 388081 - DNA, 120 bp, Artificial Sequence
  ENSG00000144554_17 (sequence is synthesized)
gaatgggttgggcataccatctgtaatgatttccaggatgccttcgtagtggactcctgtgttgttccggaaggtgactttccatttcctgtgaaagcactgtacggactggaagaatac

SEQ ID NO: 388082 - DNA, 120 bp, Artificial Sequence
  ENSG00000144554_18 (sequence is synthesized)
gacactcaggatgggattgccataaacctcctgccgctgctgttttctcaggactttgcaaaagatgggggtccggtgacctcacaggaatcaggccaaaaattggtgtctccgctgtgc

SEQ ID NO: 388083 - DNA, 120 bp, Artificial Sequence
  ENSG00000144554_19 (sequence is synthesized)
ctggctccgtatttccggttactgagactttgtgtggagagacagcataacggaaacttggaggagattgatggtctactagattgtcctatattcctaactgacctggagcctggagag

SEQ ID NO: 388084 - DNA, 120 bp, Artificial Sequence
  ENSG00000144554_20 (sequence is synthesized)
aagttggagtccatgtctgctaaagagcgttcattcatgtgttctctcatatttcttactctcaactggttccgagagattgtaaatgccttctgccaggaaacatcacctgagatgaag

SEQ ID NO: 388085 - DNA, 120 bp, Artificial Sequence
  ENSG00000144554_21 (sequence is synthesized)
cttggcagtcaccccagactatgtccctcctcttggaaactttgatgtggaaactttagatataacacctcatactgttactgctatttcagcaaaaatcagaaagaaaggaaaaataga

SEQ ID NO: 388086 - DNA, 120 bp, Artificial Sequence
  ENSG00000144554_22 (sequence is synthesized)
aaggaaacaaaaaacagatggcagcaagacatcctcctctgacacactttcagaagagaaaaattcagaatgtgaccctacgccatctcatagaggccagctaaacaaggagttcacagg

SEQ ID NO: 388087 - DNA, 120 bp, Artificial Sequence
  ENSG00000144554_23 (sequence is synthesized)
gaaggaagaaaagacatcattgttactacataattcccatgcttttttccgagagctggacattgaggtcttctctattctacattgtggacttgtgacgaagttcatcttagatactga

SEQ ID NO: 388088 - DNA, 120 bp, Artificial Sequence
  ENSG00000144554_24 (sequence is synthesized)
aatgcacactgaagctacagaagttgtgcaacttgggccccctgagctgcttttcttgctggaagatctctcccagaagctggagagtatgctgacacctcctattgccaggagagtccc

SEQ ID NO: 388089 - DNA, 120 bp, Artificial Sequence
  ENSG00000144554_25 (sequence is synthesized)
ctttctcaagaacaaaggaagccggaatattggattctcacatctccaacagagatctgcccaagaaattgttcattgtgtttttcaactgctgaccccaatgtgtaaccacctggagaa

SEQ ID NO: 388090 - DNA, 120 bp, Artificial Sequence
  ENSG00000144554_26 (sequence is synthesized)
cattcacaactattttcagtgtttagctgctgagaatcacggtgtagttgatggaccaggagtgaaagttcaggagtaccacataatgtcttcctgctatcagaggctgctgcagatttt

SEQ ID NO: 388091 - DNA, 120 bp, Artificial Sequence
  ENSG00000144554_27 (sequence is synthesized)
tcatgggctttttgcttggagtggattttctcaacctgaaaatcagaatttactgtattcagccctccatgtccttagtagccgactgaaacagggagaacacagccagcctttggagga

SEQ ID NO: 388092 - DNA, 120 bp, Artificial Sequence
  ENSG00000144554_28 (sequence is synthesized)
actactcagccagagcgtccattacttgcagaatttccatcaaagcattcccagtttccagtgtgctctttatctcatcagacttttgatggttattttggagaaatcaacagcttctgc

SEQ ID NO: 388093 - DNA, 120 bp, Artificial Sequence
  ENSG00000144554_29 (sequence is synthesized)
tcagaacaaagaaaaaattgcttcccttgccagacaattcctctgtcgggtgtggccaagtggggataaagagaagagcaacatctctaatgaccagctccatgctctgctctgtatcta

SEQ ID NO: 388094 - DNA, 120 bp, Artificial Sequence
  ENSG00000144554_30 (sequence is synthesized)
cctggagcacacagagagcattctgaaggccatagaggagattgctggtgttggtgtcccagaactgatcaactctcctaaagatgcatcttcctccacattccctacactgaccaggca

SEQ ID NO: 388095 - DNA, 120 bp, Artificial Sequence
  ENSG00000144554_31 (sequence is synthesized)
tacttttgttgttttcttccgtgtgatgatggctgaactagagaagacggtgaaaaaaattgagcctggcacagcagcagactcgcagcagattcatgaagagaaactcctctactggaa

SEQ ID NO: 388096 - DNA, 120 bp, Artificial Sequence
  ENSG00000144554_32 (sequence is synthesized)
catggctgttcgagacttcagtatcctcatcaacttgataaaggtatttgatagtcatcctgttctgcatgtatgtttgaagtatgggcgtctctttgtggaagcatttctgaagcaatg

SEQ ID NO: 388097 - DNA, 120 bp, Artificial Sequence
  ENSG00000144554_33 (sequence is synthesized)
tatgccgctcctagacttcagttttagaaaacaccgggaagatgttctgagcttactggaaaccttccagttggacacaaggctgcttcatcacctgtgtgggcattccaagattcacca

SEQ ID NO: 388098 - DNA, 120 bp, Artificial Sequence
  ENSG00000144554_34 (sequence is synthesized)
ggacacgagactcacccaacatgtgcctctgctcaaaaagaccctggaacttttagtttgcagagtcaaagctatgctcactctcaacaattgtagagaggctttctggctgggcaatct

SEQ ID NO: 388099 - DNA, 120 bp, Artificial Sequence
  ENSG00000144554_35 (sequence is synthesized)
aaaaaaccgggacttgcagggtgaagagattaagtcccaaaattcccaggagagcacagcagatgagagtgaggatgacatgtcatcccaggcctccaagagcaaagccactgaggtatc

SEQ ID NO: 388100 - DNA, 120 bp, Artificial Sequence
  ENSG00000144554_36 (sequence is synthesized)
tctacaaaacccaccagagtctggcactgatggttgcattttgttaattgttctaagttggtggagcagaactttgcctacttatgtttattgtcaaatgcttctatgcccatttccatt

SEQ ID NO: 388101 - DNA, 120 bp, Artificial Sequence
  ENSG00000144554_37 (sequence is synthesized)
ccctccataacagcttctgtgcttatataatttttgggacccagaagaaacaacgacacaatcttagaatcactcctgagtatctcgagttgtggcatttgttatagagttgacaatttt

SEQ ID NO: 388102 - DNA, 120 bp, Artificial Sequence
  ENSG00000144554_38 (sequence is synthesized)
ctgcattatagcctctcattttccatgaattcatatctgaaaccattttagaagggagaagtcatcgaagtattttctgagtgttgagaagaatgagttaaaccatttaaacacatttga

SEQ ID NO: 388103 - DNA, 120 bp, Artificial Sequence
  ENSG00000144554_39 (sequence is synthesized)
aacatacaaaaatagaaatgtgaaagcatttggtgaaagccaaagcacagagtcagaagctgccaccttagagaactgaaataaaaatagaagttcttacgcttttttgtggtacagatg

SEQ ID NO: 388104 - DNA, 88 bp, Artificial Sequence
  ENSG00000144554_40 (sequence is synthesized)
ataaaaatagaagttcttacgcttttttgtggtacagatgctttcgacaatttaaagaaagctaaataaaaatgtagacatggctggc

SEQ ID NO: 388105 - DNA, 120 bp, Artificial Sequence
  ENSG00000144554_41 (sequence is synthesized)
ggccaaggtaggaggattgcttgagtccgggagctcaaggcaaagctgcacaacataacaagaccctatctccacaaaaaaaatgaaaaataaacctgggtgcggtggctcacacctgta

SEQ ID NO: 388106 - DNA, 120 bp, Artificial Sequence
  ENSG00000144554_42 (sequence is synthesized)
tgctggagaaaaggagcaagatagtgatgagagttatgatgactctgattagaccccagataaattgttgcctgcttctgtgtctctgccagcctgtgatcattttgtgttagagtttga

SEQ ID NO: 388107 - DNA, 75 bp, Artificial Sequence
  ENSG00000144554_43 (sequence is synthesized)
tgtctctgccagcctgtgatcattttgtgttagagtttgaaatccgctgtttgcctttcttactggtaggatcgg

SEQ ID NO: 388108 - DNA, 120 bp, Artificial Sequence
  ENSG00000144554_44 (sequence is synthesized)
ttcttaaagtggggtctttattaacttgtggacatcatggattgtctaacaccatcacagtccctggctcaggattctaatgtagcattatttattggtttggataaacccagctgtgct

SEQ ID NO: 388109 - DNA, 120 bp, Artificial Sequence
  ENSG00000144554_45 (sequence is synthesized)
acactgcagagtaaaatctctgagtcatgattctggactttgggagctagttttgaaactctgatttattgtagaacttaggcttgtaccaattttacaaataaattctgttctaagttc

SEQ ID NO: 388110 - DNA, 120 bp, Artificial Sequence
  ENSG00000144554_46 (sequence is synthesized)
gtctctcgaggccccgctcccctgcggcctaatctctaagtccgggccgcggtcggcgttctcctctggggctccgcgccccgaaccttggcttcctcatctgccctgagatgggataat

SEQ ID NO: 388111 - DNA, 77 bp, Artificial Sequence
  ENSG00000144554_47 (sequence is synthesized)
tttattgaacctttcctgtattgatgtattgatgggcatttatagtctttccaacttttcacaaagtaattttctag

SEQ ID NO: 388112 - DNA, 79 bp, Artificial Sequence
  ENSG00000144554_48 (sequence is synthesized)
tgtcagtgggattacaggtgtttgacctggtgatgcttttcatcatctatagcaccaatactcagacaaagaagtacat

SEQ ID NO: 388113 - DNA, 120 bp, Artificial Sequence
  ENSG00000144554_49 (sequence is synthesized)
ggaaagaactcaggtggataaaccctctgtcatcatctaagtgaggctcagctatgggggttctatcactgcagtatgcaaagagcagtagtaatatggtctcttctatctaaaaagagg

SEQ ID NO: 388114 - DNA, 120 bp, Artificial Sequence
  ENSG00000144554_50 (sequence is synthesized)
atgataccccccttcatgagtagggtatgggatttgacttaaaaaaaaaaggtatatatttgaatagatccacatactttctttttttttttttttttttctgagacagtcttgctctgt

SEQ ID NO: 388115 - DNA, 120 bp, Artificial Sequence
  ENSG00000144554_51 (sequence is synthesized)
ctgttatgagcgtgaagtctggcttaggattagatatctaaatttggccagtggagaagttgaccatgatcccttaagtttcattaacttgttcttcagggggtccttaaccctggctgc

SEQ ID NO: 388116 - DNA, 120 bp, Artificial Sequence
  ENSG00000144554_52 (sequence is synthesized)
acattaaaatcatttgtggagcctattaaacatctaccttctttgggttcctaggtgattcattctaatgcacagtcctgcatcagaccgcttgcggagacccattgcttactgtcattc

SEQ ID NO: 388117 - DNA, 120 bp, Artificial Sequence
  ENSG00000144554_53 (sequence is synthesized)
atttgaaaaatagtaattggtagggaagtattgaagaaggggagaacaatatccctaggtaataaagtttccatcttaatgcaactttttattgtactagaagtattttttttaaattca

SEQ ID NO: 388118 - DNA, 120 bp, Artificial Sequence
  ENSG00000144554_54 (sequence is synthesized)
gtttgtaatacttccttttgtatagttgtctgcaaagctacctccaaaacatccagtgatttcttgccctcatccttttgggcaggatgctccttctgggcaaagtactacgccatccac

SEQ ID NO: 388119 - DNA, 120 bp, Artificial Sequence
  ENSG00000144554_55 (sequence is synthesized)
tttacctgcctgatgccagctcatctccttttgtatagtctttttttttttttagcatctgtcaccgtctgttgggcgcagtggctcatgcctttaatcccagcatgttgggcggctgaa

SEQ ID NO: 388120 - DNA, 89 bp, Artificial Sequence
  ENSG00000144554_56 (sequence is synthesized)
tgagaccagcctggacaacatggtgaaaagccgtctttcaaaaacatacaaaaattaggtgggcgtggtggtacgcacttataattcta

SEQ ID NO: 388121 - DNA, 120 bp, Artificial Sequence
  ENSG00000144554_57 (sequence is synthesized)
actcaggaggctgagatgggaggatcaattgagcgtggaaggtcgaagctacagtgagctgtgatgacaccactgtaactgtactcaagcctgggcatcagagtaagaccctgtctcaaa

SEQ ID NO: 388122 - DNA, 120 bp, Artificial Sequence
  ENSG00000144554_58 (sequence is synthesized)
aaacaaacaaacaaaaaaaaaagcaatctatcactgtccttctcactatgttgtgctcctgtagcaccacctacatgtgtctctcatacttatcagatttcattgtaaatgttttgggtt

SEQ ID NO: 388123 - DNA, 120 bp, Artificial Sequence
  ENSG00000144554_59 (sequence is synthesized)
ttctttttcctttttgcggggaaggatacataccaaactaaatagtggtgttctctgggtagtggggattgtgatggaaggcttcttgtttctacttttattatttgaatttttataatg

SEQ ID NO: 388124 - DNA, 120 bp, Artificial Sequence
  ENSG00000144554_60 (sequence is synthesized)
agcatgtattattttttgcagtcaaaacaatttttaaagaaacatactataaacggtaacttaatggcaactaagtatgtcctttattttcatactctaataaatgattttctcaagtca

SEQ ID NO: 388125 - DNA, 120 bp, Artificial Sequence
  ENSG00000144554_61 (sequence is synthesized)
ttgtgaaaagtgtagatactcccaggggagtgtgtggaacaaatgagcattatccattctgtgttttaattagaggaaaagctgctgtttcattgtagcaaatgtactgatttgttaact

SEQ ID NO: 388126 - DNA, 120 bp, Artificial Sequence
  ENSG00000144554_62 (sequence is synthesized)
tggttccgagagtcaccccagactatgtccctcctcttggaaactttgatgtggaaactttagatataacacctcatactgttactgctatttcagcaaaaatcagaaagaaaggaaaaa

SEQ ID NO: 388127 - DNA, 120 bp, Artificial Sequence
  ENSG00000144559_0 (sequence is synthesized)
ccccacactcagccttgtgtccctcgatccagtctccgacttccatttcccaccctaaaccgcctacccggtgtctgttccccgcccggttgtcctcgccctgctgcgctgagtgtcccc

SEQ ID NO: 388128 - DNA, 120 bp, Artificial Sequence
  ENSG00000144559_1 (sequence is synthesized)
tgttagcctcgaccccatggcgctgcagacgctgcagagctcgtgggtgaccttccgcaagatcctgtctcacttccccgaggagctgagtctggctttcgtctacggctccggggtgta

SEQ ID NO: 388129 - DNA, 120 bp, Artificial Sequence
  ENSG00000144559_2 (sequence is synthesized)
ccgccaggcagggccgagttcagaccagaagaatgctatgctggactttgtgttcacagtagatgaccctgtcgcatggcattcaaagaacctgaagaaaaattggagtcactactcttt

SEQ ID NO: 388130 - DNA, 120 bp, Artificial Sequence
  ENSG00000144559_3 (sequence is synthesized)
cctaaaagttttagggcccaagattatcacgtccatccagaataactatggcgctggagtttactacaattcattgatcatgtgtaatggtaggcttatcaaatatggagttattagcac

SEQ ID NO: 388131 - DNA, 120 bp, Artificial Sequence
  ENSG00000144559_4 (sequence is synthesized)
taacgttctgattgaagatctcctcaactggaataacttatacattgctggacgactccaaaaaccggtgaaaattatctcagtgaacgaggatgtcactcttagatcagccctcgatag

SEQ ID NO: 388132 - DNA, 120 bp, Artificial Sequence
  ENSG00000144559_5 (sequence is synthesized)
gctgtgaccgctgctttcctcatgctccccgaaagcttttctgaagaagacctcttcatagagattgccggtctctcctattcaggtgactttcggatggtggttggagaagataaaaca

SEQ ID NO: 388133 - DNA, 120 bp, Artificial Sequence
  ENSG00000144559_6 (sequence is synthesized)
aaagtgttgaatattgtgaagcccaatatagcccactttcgagagctctatggcagcatactacaggaaaatcctcaagtggtgtataaaagccagcaaggctggctggagatagataaa

SEQ ID NO: 388134 - DNA, 120 bp, Artificial Sequence
  ENSG00000144559_7 (sequence is synthesized)
agcccagaaggacagttcactcagctgatgacattgcccaaaaccttacagcaacagataaatcatattatggaccctcctggaaaaaacagagatgtggaagaaactttattccaagtg

SEQ ID NO: 388135 - DNA, 120 bp, Artificial Sequence
  ENSG00000144559_8 (sequence is synthesized)
gctcatgatcccgactgtggagatgtggtgcgactagggctttcagcaatcgtgagaccgtctagtataagacagagcacgaaaggcatttttactgctggcctgaagaagtcagtgatt

SEQ ID NO: 388136 - DNA, 120 bp, Artificial Sequence
  ENSG00000144559_9 (sequence is synthesized)
tatagttcactaaaactgcacaaaatgtggaaagggtggctgaggaaaacatcctgattttgcttgcttttatatatgttatgtgtagatgaataaagtgtttgatcctttttgacagaa

SEQ ID NO: 388137 - DNA, 120 bp, Artificial Sequence
  ENSG00000144559_10 (sequence is synthesized)
ctgagacaagttcctagttcacctttcattgaagaaccagatcagcacagtagcagaatcttccgaactgacatttttcctttgagtgaaaattatctcagtgaacgaggatgtcactct

SEQ ID NO: 388138 - DNA, 120 bp, Artificial Sequence
  ENSG00000144559_11 (sequence is synthesized)
atcccgactgtggagatgtggtgcgactaggtacgtttatgaatttgatgttgaggaaatgccagccatggggaaaagcagactttgtttgtgattggaatgtattatttcttccttttt

SEQ ID NO: 388139 - DNA, 120 bp, Artificial Sequence
  ENSG00000144559_12 (sequence is synthesized)
gtttagcgagatagagagattgcctctcagaagaagaaagcactaaaaatttgagggttttctaaatctgcatttttatttgtttgaagtaagatggtgaaaatacttctgtttttaaat

SEQ ID NO: 388140 - DNA, 120 bp, Artificial Sequence
  ENSG00000144559_13 (sequence is synthesized)
tcctggatcctaaatcactgtcaaagggagaaacaatgtttcttttggttcctagagcacaacttctagaatttatttaaaagatgtgtctgtgttttgtggtggtctgagaaaagagat

SEQ ID NO: 388141 - DNA, 120 bp, Artificial Sequence
  ENSG00000144559_14 (sequence is synthesized)
tggtggcatttttttgtgcttttataacatcgagaacacagctttcctcaatcaactccatttgatgtgtctcatacattgttgagtacattccctcagacatggcccacgttccacagc

SEQ ID NO: 388142 - DNA, 120 bp, Artificial Sequence
  ENSG00000144559_15 (sequence is synthesized)
attttccccagcactgccctgatgtttatccaaaactctgaacccaggccaggtgcagtggctcacgcctgtactcccaacactttaggaagtccaggagggagaatcacttgaggccag

SEQ ID NO: 388143 - DNA, 89 bp, Artificial Sequence
  ENSG00000144559_16 (sequence is synthesized)
tctgcaaaaattacaaaagtcagctaacttgggagtctgaggtgggaggatcgcttgagcagttggaggctgcaatgagctaggatcgc

SEQ ID NO: 388144 - DNA, 120 bp, Artificial Sequence
  ENSG00000144559_17 (sequence is synthesized)
atcgcttgagcagttggaggctgcaatgagctaggatcgcaccactacactccaggcttggtgatagagcagcccgtatctcttaaaaaacaaacaaaaaaaagagcctgaaccttatct

SEQ ID NO: 388145 - DNA, 120 bp, Artificial Sequence
  ENSG00000144559_18 (sequence is synthesized)
tcagagactaacttccctttaaggtgctaaagtaaatatttactgagctcctccgcgtgccagatagaatttccagtaatgctttgcaaagaccatcgcactgcagtggatgagctgcag

SEQ ID NO: 388146 - DNA, 120 bp, Artificial Sequence
  ENSG00000144559_19 (sequence is synthesized)
caggcgctccacgcccactctcctcctgggcctgcactaggtttgcagagtgtgtgtttaggtcaccagctccccatcctgaagatagctctgtacgaggcacactgttgtttgtttgaa

SEQ ID NO: 388147 - DNA, 120 bp, Artificial Sequence
  ENSG00000144559_20 (sequence is synthesized)
gctggcctttgtcttaacttggctggttatttacctgggttattagagtgccagctaaatatgtatgttcttgtggtcaggaaacattcacactcctgctggacgttgttatagtcggga

SEQ ID NO: 388148 - DNA, 120 bp, Artificial Sequence
  ENSG00000144559_21 (sequence is synthesized)
aatatgtatgtttttatagtatgtatattcttatagtcaggaaacattcacactcctgccagacgtcttgaacttggggacagagcagggactggagtccttcctcatgtcccattaact

SEQ ID NO: 388149 - DNA, 88 bp, Artificial Sequence
  ENSG00000144559_22 (sequence is synthesized)
cagagcagggactggagtccttcctcatgtcccattaactgtcattgcagtgtgaggaggtggttgggtgtgactgacttattttatt

SEQ ID NO: 388150 - DNA, 63 bp, Artificial Sequence
  ENSG00000144559_23 (sequence is synthesized)
gcgttagctgggattacaggcgtgtgccaccttgtaggagagacagggtttcaccatgttggc

SEQ ID NO: 388151 - DNA, 120 bp, Artificial Sequence
  ENSG00000144559_24 (sequence is synthesized)
gcaagggacggaagctctgcctgtgcgaccgccgcccacccgagcctatctgggctgcgtcttctcgccgctgctcttcgtggcccaacgccccaatccttgcgtgtgcttgcagtccca

SEQ ID NO: 388152 - DNA, 120 bp, Artificial Sequence
  ENSG00000144559_25 (sequence is synthesized)
ctggagtgtagtgtcatgatcatggctcactgcaacccactgcagcctcaaccacctggactgaagctgtcttcctacctcaacctcctgagtatctgggaccacacatgtgcatcactg

SEQ ID NO: 388153 - DNA, 120 bp, Artificial Sequence
  ENSG00000144559_26 (sequence is synthesized)
tgcctggctaggtgaaaattatctcagtgaacgaggatgtcactcttagatcagccctcgatagaaatctgaagagtgctgtgaccgctgctttcctcatgctccccgaaagcttttctg

SEQ ID NO: 388154 - DNA, 120 bp, Artificial Sequence
  ENSG00000144559_27 (sequence is synthesized)
tggttacagtgtaaagctttgtatcttttaggtgcttgtgaaatgctgagctttgatggccataaactgggatattgcagtaaggtacaaacaggcataacagcagcagaacctggtggt

SEQ ID NO: 388155 - DNA, 120 bp, Artificial Sequence
  ENSG00000144559_28 (sequence is synthesized)
cgaacaatgtcagaccattggcagtgctgttggaagctttactgcccttctgaattttctgagacacttcctgtgtgcagggtttttccctcatattgttttatttatcaaagttacaga

SEQ ID NO: 388156 - DNA, 120 bp, Artificial Sequence
  ENSG00000144559_29 (sequence is synthesized)
tgcataggattgcaaaaacagcagcatctgtgctccccctcctcttccccttctctgagacaactgcttccatctgtcttagtgggttatttttgttgttactgccatttctctaaatgg

SEQ ID NO: 388157 - DNA, 120 bp, Artificial Sequence
  ENSG00000144559_30 (sequence is synthesized)
taagttttcgttgctccttctctacgtttcaactttaggtatcatctattgacttctctctatgggaggttagaagtcaactctggcacccaccctcatcaaatgtacgcaccctcccat

SEQ ID NO: 388158 - DNA, 120 bp, Artificial Sequence
  ENSG00000144559_31 (sequence is synthesized)
atttaccaaatttttaaatcatgtcacctggtattttatctttacactcatgctttcaagtgaaaattccagtgcattattttcctcaagagaaagcagtggcagataagtactttctaa

SEQ ID NO: 388159 - DNA, 120 bp, Artificial Sequence
  ENSG00000144559_32 (sequence is synthesized)
tttttttatatgtcactcaagccgttggaagcttcataggtaaagcataacttaaatataagtttattctaactaatcccaatatgtggcctcaaaacataagtccataaatgtcatttc

SEQ ID NO: 388160 - DNA, 120 bp, Artificial Sequence
  ENSG00000144559_33 (sequence is synthesized)
taagattattttacataaatactcaaatttgttgtcatttttgtagccaaagctaagtagaggatggggcctgtgaatttagaaccatcctagtgataaatatcaaatatttagataaaa

SEQ ID NO: 388161 - DNA, 120 bp, Artificial Sequence
  ENSG00000144559_34 (sequence is synthesized)
acctaaatatttacccctctagctttatggagccattaaataataacatttttctccttctcttcatagagtttatagacaaaactagaaaattcaggtatttggtatatacttttttgt

SEQ ID NO: 388162 - DNA, 120 bp, Artificial Sequence
  ENSG00000144559_35 (sequence is synthesized)
ttcaggtatttggtatatacttttttgttttttttgataccatcttggtcttgtcacccaggctgtagtgcagtggcacaatcaccactcatcgtagcctcaacttcccaggctcaagtg

SEQ ID NO: 388163 - DNA, 120 bp, Artificial Sequence
  ENSG00000144559_36 (sequence is synthesized)
cagaactgtaggcttgcaccaccatgtctggcttttttttgttttctttttttttttcgtagagccggatatctcactcttttgctagggctgatgttgaatttttgtgctcaagcaatt

SEQ ID NO: 388164 - DNA, 120 bp, Artificial Sequence
  ENSG00000144559_37 (sequence is synthesized)
gtgtgttttcagaatgaaagtttttctcgtagatgtaatcatttggtttttatcttttcatgttatggaattgagaaccagaaatctcaagcagatttaagtcataaaatgccctttgag

SEQ ID NO: 388165 - DNA, 120 bp, Artificial Sequence
  ENSG00000144559_38 (sequence is synthesized)
ggtcagctaacccatccccttgttttaaggggaagaggcacagagctgttcggtcatcggcttggactcacacagccgggtggcgccacggctggctgctctggtctcctggccctcaat

SEQ ID NO: 388166 - DNA, 120 bp, Artificial Sequence
  ENSG00000144559_39 (sequence is synthesized)
cccactgcccttttcattgtcactgtgacagcaggacagagatagatttggtggtttgattggctgactagaaagaatatttagtttcaagttttaaaactgttaagatgactaacatct

SEQ ID NO: 388167 - DNA, 120 bp, Artificial Sequence
  ENSG00000144559_40 (sequence is synthesized)
ggtcatctcagtgcctggatttgacgcggcctccacgagtgtcaactgcagcaccacttcctttgactgctggatttaagacaaatataaattttaaaaccaaaagtcagaaattgatcc

SEQ ID NO: 388168 - DNA, 120 bp, Artificial Sequence
  ENSG00000144559_41 (sequence is synthesized)
ttgagagtggcttctattcttttctcaggtagaaatggaatattataggacaagaattgtcctttttgaagggacttagactcctgaacacttacccattcagtttcagaaaaagagagt

SEQ ID NO: 388169 - DNA, 120 bp, Artificial Sequence
  ENSG00000144559_42 (sequence is synthesized)
ttccttagcttgctgcctcgccaggggtgtgggtgcatatatgtttgtgtgatttttaaagagaagccctgagttttggagtatttgtaggatttaaagcacttccatagacgtcgtctt

SEQ ID NO: 388170 - DNA, 120 bp, Artificial Sequence
  ENSG00000144559_43 (sequence is synthesized)
gcagggccgagttcagaccagaagtcatatctgacggcagcttccagaacatgctggctcccatatccacagagcactttcctccaacacggctccctacccttccctgtgcttccccca

SEQ ID NO: 388171 - DNA, 120 bp, Artificial Sequence
  ENSG00000144560_0 (sequence is synthesized)
acatttcagagcagtccgggttgtggacgccaggagtttgccaaacacagcaaacactggtgtgtgagcggctgaaggggactctttccactccgatctccctccctcccagcctgtttt

SEQ ID NO: 388172 - DNA, 120 bp, Artificial Sequence
  ENSG00000144560_1 (sequence is synthesized)
gatttactaggacttcctcctccgggcgaggcgggggaaggacgccgccgagcgcctggagttgtgcgcgtgtgcgtgtgcgcgtgtgcgagtgtgaagtgcagcgctggagtgcaacat

SEQ ID NO: 388173 - DNA, 120 bp, Artificial Sequence
  ENSG00000144560_2 (sequence is synthesized)
gctgtaatgggaggaaacccagcggcgtcggagcgcccgggaccgccgcggccgttctgagcgcagtggcgccgagcagcccctcccgcagccggtgtgacctgtcccttcaggctccaa

SEQ ID NO: 388174 - DNA, 120 bp, Artificial Sequence
  ENSG00000144560_3 (sequence is synthesized)
ccaggaatggagacgccattggatgttttgtccagggcagcatctctggtgcatgctgatgacgaaaaacgcgaagctgctctcaggggagaacccagaatacagaccctgccggtggcc

SEQ ID NO: 388175 - DNA, 120 bp, Artificial Sequence
  ENSG00000144560_4 (sequence is synthesized)
tctgccctcagcagtcaccgcaccggccctcccccaatcagccccagcaagaggaagttcagcatggagccaggtgacgaggacctagactgtgacaacgaccacgtctccaaaatgagt

SEQ ID NO: 388176 - DNA, 120 bp, Artificial Sequence
  ENSG00000144560_5 (sequence is synthesized)
cgcatcttcaacccccatctgaacaagactgccaatggagactgccgcagagacccccgggagcggagccgcagccccatcgagcgcgctgtggcccccaccatgagcctgcacggcagc

SEQ ID NO: 388177 - DNA, 120 bp, Artificial Sequence
  ENSG00000144560_6 (sequence is synthesized)
cacctgtacacctccctccccagccttggcctggagcagcccctcgcactgaccaagaacagcctggacgccagcaggccagccggcctctcgcccacactgaccccgggggagcggcag

SEQ ID NO: 388178 - DNA, 120 bp, Artificial Sequence
  ENSG00000144560_7 (sequence is synthesized)
cagaaccggccctccgtgatcacctgtgcctcggctggcgcccgcaactgcaacctctcgcactgccccatcgcgcacagcggctgtgccgcgcccgggcctgccagctaccggaggcca

SEQ ID NO: 388179 - DNA, 120 bp, Artificial Sequence
  ENSG00000144560_8 (sequence is synthesized)
ccgagcgctgccaccacctgtgaccccgtggtggaggagcatttccgcaggagcctgggcaagaattacaaggagcccgagccggcacccaactccgtgtccatcacgggctccgtggac

SEQ ID NO: 388180 - DNA, 120 bp, Artificial Sequence
  ENSG00000144560_9 (sequence is synthesized)
gaccactttgccaaagctctgggtgacacgtggctccagatcaaagcggccaaggacggagcatccagcagccctgagtccgcctctcgcaggggccagcccgccagcccctctgcccac

SEQ ID NO: 388181 - DNA, 120 bp, Artificial Sequence
  ENSG00000144560_10 (sequence is synthesized)
atggtcagccacagtcactccccctctgtggtctcctgaagggagcgcctcctccaacaacacgtggatctgcatggtttgcctgagctttgaacagtcagtacttaaaaaaaaaaaaat

SEQ ID NO: 388182 - DNA, 120 bp, Artificial Sequence
  ENSG00000144560_11 (sequence is synthesized)
catgggggtggggtggggggaagggaagggatggtttatttgcaaaaaccatgttgttgggatttgtgttctgtttttgtacttgcttggtatccgtacaagggggccctcaaacatgat

SEQ ID NO: 388183 - DNA, 120 bp, Artificial Sequence
  ENSG00000144560_12 (sequence is synthesized)
agcaggaactacgcgtggaacatctgtctaatgtagcatccttacttcctgcctcagttaccaaagaaacctctgatgcaggtctgctgccccgacggggccaggactccacagcgcttt

SEQ ID NO: 388184 - DNA, 120 bp, Artificial Sequence
  ENSG00000144560_13 (sequence is synthesized)
ctcagtcacaagccatgatgaattggtgactcagacgctttgtgctttttcctttgcttcttgagaccggggtgtgtgtggctcagcttccacggcgtgtttggttcggtccatgtgtgt

SEQ ID NO: 388185 - DNA, 120 bp, Artificial Sequence
  ENSG00000144560_14 (sequence is synthesized)
gcgtgtgtatacttgaagagaactgtcgtgtctgatttgcactattggaggaggactaaagttgcctgacaactttatgtgttatgccagaactctgagggcaaactgctgaaaaacaaa

SEQ ID NO: 388186 - DNA, 120 bp, Artificial Sequence
  ENSG00000144560_15 (sequence is synthesized)
taaggatgacatttctgaccatttgtgtgtttgttgttgttactgtttttgttttttttaatgtagacaatacagctttggaaggggaagtctcatacaggttataggtctttctctctc

SEQ ID NO: 388187 - DNA, 120 bp, Artificial Sequence
  ENSG00000144560_16 (sequence is synthesized)
tagatttcaggtgcttgcaactggactgcagactctaccaatcacgggcattttatcttctctgaacactgcagtttgttagactagagctgaggttggaggattccatagtgctttaaa

SEQ ID NO: 388188 - DNA, 120 bp, Artificial Sequence
  ENSG00000144560_17 (sequence is synthesized)
cgtgatgcatgttttaatggagaaaaaatagctggtttctattaattatatagacagtaaacaaaaaccttaatacttactatcttcttttcagaattagtttatttttgtcagttacag

SEQ ID NO: 388189 - DNA, 120 bp, Artificial Sequence
  ENSG00000144560_18 (sequence is synthesized)
tcctagatatacttactgctggtacagttgtactctaagattggtatttgatattcactttactcacaagtagtgcgggaggccagctcctggcaggccctcgcgatgagcagtgggtca

SEQ ID NO: 388190 - DNA, 120 bp, Artificial Sequence
  ENSG00000144560_19 (sequence is synthesized)
gctgcggtgtgggatgctggagtttggctgcaggctgacatcatttatttttgcatccctgtctgctttgttacaagctcccaggggaggtggggtttgtgtcttccaacttccctacat

SEQ ID NO: 388191 - DNA, 120 bp, Artificial Sequence
  ENSG00000144560_20 (sequence is synthesized)
gcagaaactgctccctttgaactctcttggctgaacagcagattactgacagacaatctgtgatatggtgttttatacgcttcctcgtacgctggggccaaggcagtatacattcctctg

SEQ ID NO: 388192 - DNA, 120 bp, Artificial Sequence
  ENSG00000144560_21 (sequence is synthesized)
actttatactgttattactgcatttattatttgctatattaatagctactaactagaaattagatgaagcaagcatgacagacacagctgtggaggtcacagctgctcctttttggtcaa

SEQ ID NO: 388193 - DNA, 120 bp, Artificial Sequence
  ENSG00000144560_22 (sequence is synthesized)
tgagcgtttctatcccctccccctggggtgtgctgtgtcccacctggcccaccagaggctcacgacgatggcacctgaccaggtgacgtgggcgtggtcacctcacctgcaaggctttgt

SEQ ID NO: 388194 - DNA, 120 bp, Artificial Sequence
  ENSG00000144560_23 (sequence is synthesized)
ggactctgcacaccgtatgacccccggttttacagtttttagctgttgaattttggaaattggcactgggtgaaaaggtcggaggactggctcttgtagtcacagagtggctgcaggcct

SEQ ID NO: 388195 - DNA, 120 bp, Artificial Sequence
  ENSG00000144560_24 (sequence is synthesized)
ttgaaaagtggaggaaagaaaagcccttctccttgccccgcacacatttcactcccactgtactgggcttccaagctttggcattcaggcccctatattttctgtaggaaaaatcgttga

SEQ ID NO: 388196 - DNA, 120 bp, Artificial Sequence
  ENSG00000144560_25 (sequence is synthesized)
gaacacttttctatatgggtgattttgagaccatcgttacgctgtgcgtaaagaatgtacagagaaatttgtaggtattttttgaagaacattaatttgttaatgatatgtagctattta

SEQ ID NO: 388197 - DNA, 120 bp, Artificial Sequence
  ENSG00000144560_26 (sequence is synthesized)
atttttccctttcctattgtaatcattcattttttttgttgttcggaaaaaaaaagttgatctttttttttgtcgtagatttgtctgtaaaagtgcaggaacagttattctatgagaaca

SEQ ID NO: 388198 - DNA, 120 bp, Artificial Sequence
  ENSG00000144560_27 (sequence is synthesized)
ctgcatctgcattcatagccacgagtttgttattgctacaggctactgagcgtcgtaacaggaaaaccacccacagctgaccggctcggtggaggacactcctgggacaggtctctttgt

SEQ ID NO: 388199 - DNA, 120 bp, Artificial Sequence
  ENSG00000144560_28 (sequence is synthesized)
cagtgaacaagggcgtcactctgggaggggtcggcggtgctggcggccgggtccctggtgcactgacctatctgggataggcagtaccctggaggggggcctggggcagaggaggcagca

SEQ ID NO: 388200 - DNA, 120 bp, Artificial Sequence
  ENSG00000144560_29 (sequence is synthesized)
gaaaaccaaacatttcactgagaaagccccctccctgctctaagaaggggctccgtgaagttcttcccagagccgcgctgcctgcagtgcgctctgaccttctcttcatgtgtgtaaatc

SEQ ID NO: 388201 - DNA, 120 bp, Artificial Sequence
  ENSG00000144560_30 (sequence is synthesized)
tgtaatataccattctctgtggcctgtttttcctggaagaagaaaaaaaaaggtttggcaggccatctttttttgtacttaaaagtagccttaagaacaataataaagtgctcttaaacc

SEQ ID NO: 388202 - DNA, 120 bp, Artificial Sequence
  ENSG00000144560_31 (sequence is synthesized)
gttttgtccagggcagcatctctggtgcatgctgatgacgaaaaaccgtcacctgggaacttgttagaaatgcagaatcgtagtcctcgctgcggaactgatgactgagaatacgcattt

SEQ ID NO: 388203 - DNA, 120 bp, Artificial Sequence
  ENSG00000144560_32 (sequence is synthesized)
atagccctcatgtcagcgctgccggcttgcagcgggctgtgagaggggccggcgccgctttgtcctaggaaacgggctgcgcgtttctctttttcactcttttccatttccaggaaggac

SEQ ID NO: 388204 - DNA, 120 bp, Artificial Sequence
  ENSG00000144560_33 (sequence is synthesized)
ttgtaaggacttctgaaacgctgttttcatactcgatcggggatacagtacatacaccgtctaccagtaagcccttgaagggtttcgtgtgagctcgatttttttgtgcctgattttttt

SEQ ID NO: 388205 - DNA, 120 bp, Artificial Sequence
  ENSG00000144560_34 (sequence is synthesized)
ttttttaacttttgcatactttgttttgatagtctgaggctgggcctctgcctttgtgaagttgaagagccaggagctactcagcaacaattgatttttgaaacttaactcttttggggc

SEQ ID NO: 388206 - DNA, 120 bp, Artificial Sequence
  ENSG00000144560_35 (sequence is synthesized)
aaaagcaaagagctggttttctttgctagcccaataaatgctatttatgaagatggacctgttgaactatcagtacttggacaagatgaacaacaatatcggcattctgtgctacgaagg

SEQ ID NO: 388207 - DNA, 80 bp, Artificial Sequence
  ENSG00000144560_36 (sequence is synthesized)
gcccggtccgcgcgtgcgtgtgcgtgtgcgtgtttggcgggggcccgtgcgggggctcgggcgcgagcccgcctgtgcgt

SEQ ID NO: 388208 - DNA, 120 bp, Artificial Sequence
  ENSG00000144560_37 (sequence is synthesized)
aaccaggaatggagacgccattggatgttttgtccagggcagcatctctggtgcatgctgatgacgaaaaacggtcttgctctgttgcccagactggagtatagtggcacaatcttggct

SEQ ID NO: 388209 - DNA, 120 bp, Artificial Sequence
  ENSG00000144560_38 (sequence is synthesized)
ctatgggggcaaaagctaaaaggggtaatagagatagcaataagggagccaaagctgtgaggaaagtccttggcagagagatgagaaagaactagattggggaggacgcacaaagaaaca

SEQ ID NO: 388210 - DNA, 120 bp, Artificial Sequence
  ENSG00000144560_39 (sequence is synthesized)
atagtatgagaggtgctttgtgttgccacccaagggctgggggattgcaggcgatccttgcgcttgggcagacagcacgtcacggcttttatctgccggctcgcattgcaatgggcgtcc

SEQ ID NO: 388211 - DNA, 120 bp, Artificial Sequence
  ENSG00000144560_40 (sequence is synthesized)
tataaaaaaagaaaaaagtgagccagaatggggctagccacaagttgaacaatttgaaggagattgacttcacggtgtcttctccccagctgctcgaccgtgagacaaagaagtattatt

SEQ ID NO: 388212 - DNA, 120 bp, Artificial Sequence
  ENSG00000144560_41 (sequence is synthesized)
aattttaaccccaccacacatacaacagttaccactcttgtctaacatacaagtgttgggttaaggccatctagggaggggccccaaagatgcataaaggcacataactgaacggacctg

SEQ ID NO: 388213 - DNA, 120 bp, Artificial Sequence
  ENSG00000144560_42 (sequence is synthesized)
tccctgaccttatgtgcggattcttttcctttgctgtaagccttgtgtgaggctgcacagtcttaggatgaggcgttgtctgattgcagaggccatgggttcttgcctccagctaacctg

SEQ ID NO: 388214 - DNA, 72 bp, Artificial Sequence
  ENSG00000144560_43 (sequence is synthesized)
accttagtgaaatctccagctctgccagatcttttgtgtcatgagaaaaaaccaaaacaacttagttcctgc

SEQ ID NO: 388215 - DNA, 120 bp, Artificial Sequence
  ENSG00000144560_44 (sequence is synthesized)
tttgtgtcatgagaaaaaaccaaaacaacttagttcctgcccatccagggcttatctttgaagtaataagaggagaatgaaagacttgaagaaaagagtggcacttggatacatttccac

SEQ ID NO: 388216 - DNA, 120 bp, Artificial Sequence
  ENSG00000144560_45 (sequence is synthesized)
atccagttttgtgcctgagactgcttgccaagtttgtgaggcccaaggctttcttgtgggaggacgctgggctgtcttcatgctctttggcaatgattaaagtgaggaacaagactgcca

SEQ ID NO: 388217 - DNA, 120 bp, Artificial Sequence
  ENSG00000144560_46 (sequence is synthesized)
tgccatggaatttatctcgctgtgttacctccctcctctgtctggcttactctaatttctgggagggctaggattttgtcttgcagctactcgttcttcacaccaggcaagtgttgtctc

SEQ ID NO: 388218 - DNA, 120 bp, Artificial Sequence
  ENSG00000144560_47 (sequence is synthesized)
cttatgaatgactccagtgtcttttgactaaagataagcattgaaattgcctgactagcccaaggatactcagcgagttggtgatacaagcgaagctgctctcaggggagaacccagaat

SEQ ID NO: 388219 - DNA, 120 bp, Artificial Sequence
  ENSG00000144560_48 (sequence is synthesized)
agtgcccgcctaggatggggatgaggcccggggcggggccgggtgccgtgcagcctcagcggctctgataggcctggcacggagccactcagagtcctttgggtgttcgcggggatgccg

SEQ ID NO: 388220 - DNA, 120 bp, Artificial Sequence
  ENSG00000144560_49 (sequence is synthesized)
tgggctctctcgggcacagtcctgaccaggagcggaggcgacttccatctcccgggcaggatgcgtgcggttttctgccgtccccgggagcacatgacgcctgggaagcagtggccggga

SEQ ID NO: 388221 - DNA, 120 bp, Artificial Sequence
  ENSG00000144560_50 (sequence is synthesized)
ggcctttctaaaacgcccagcccgtccctggaggccacaggttattgcctgtgttctcttctcttttgatagccagccaagaagagggaacgcagggtgactcaccaggtgcccacctgg

SEQ ID NO: 388222 - DNA, 120 bp, Artificial Sequence
  ENSG00000144560_51 (sequence is synthesized)
actggatttaagtcagaagagaaggaagatgtgagtattcattaaacgtctctgcgaagcctgtaaccccacaccggctcttcgaagggctaagatccagtgagacaccgtgctgttcct

SEQ ID NO: 388223 - DNA, 66 bp, Artificial Sequence
  ENSG00000144560_52 (sequence is synthesized)
gaatggagacgccattggatgttttgtccagggcagcatctctggtgcatgctgatgacgaaaaca

SEQ ID NO: 388224 - DNA, 120 bp, Artificial Sequence
  ENSG00000144560_53 (sequence is synthesized)
gcactttcctagtttactcagaggcctctgaggctacctgagagccagagtctagggaatggaggaccaagaatagaaggcgaagctgctctcaggggagaacccagaatacagaccctg

SEQ ID NO: 388225 - DNA, 120 bp, Artificial Sequence
  ENSG00000144566_0 (sequence is synthesized)
agttcgctgcgtgcagcgacgtggcggcggggccggcaccgggcagcggaagtggctccggcggtgggacttgagtgtttgtgttttggttcgtgaaggagccggcggctggccttaggg

SEQ ID NO: 388226 - DNA, 120 bp, Artificial Sequence
  ENSG00000144566_1 (sequence is synthesized)
gaggaggcagagggaggaggaggaggaagaattagtcggaactccagcgccggcggcggcggcggcggcggaggaggagaaaggaaagaggaagggggagcggcgagaggcggagacgga

SEQ ID NO: 388227 - DNA, 120 bp, Artificial Sequence
  ENSG00000144566_2 (sequence is synthesized)
gcccgacaggggcggcaccacggcacgagccccgcacagtccagtgtgaggggagcggcgctaagagcaggcgacgccgccgccgccaccaccaccgccatagatacactctcatcctac

SEQ ID NO: 388228 - DNA, 120 bp, Artificial Sequence
  ENSG00000144566_3 (sequence is synthesized)
gggccacgcctgggccttgctgccaggaagcttcggccccgcagctcggcttgctgcggtctcaggtttctttacctccagaaagaagaatattggccccttgaattctggaagttcatt

SEQ ID NO: 388229 - DNA, 120 bp, Artificial Sequence
  ENSG00000144566_4 (sequence is synthesized)
gaagagtctgaaattagggacttatttcaaatttggacatggctagtcgaggcgcaacaagacccaacgggccaaatacgggaaataaaatatgccagttcaaactagtacttctgggag

SEQ ID NO: 388230 - DNA, 120 bp, Artificial Sequence
  ENSG00000144566_5 (sequence is synthesized)
agtccgctgttggcaaatcaagcctagtgcttcgttttgtgaaaggccaatttcatgaatttcaagagagtaccattggggctgcttttctaacccaaactgtatgtcttgatgacacta

SEQ ID NO: 388231 - DNA, 120 bp, Artificial Sequence
  ENSG00000144566_6 (sequence is synthesized)
cagtaaagtttgaaatatgggatacagctggtcaagaacgataccatagcctagcaccaatgtactacagaggagcacaagcagccatagttgtatatgatatcacaaatgaggagtcct

SEQ ID NO: 388232 - DNA, 120 bp, Artificial Sequence
  ENSG00000144566_7 (sequence is synthesized)
ttgcaagagcaaaaaattgggttaaagaacttcagaggcaagcaagtcctaacattgtaatagctttatcgggaaacaaggccgacctagcaaataaaagagcagtagatttccaggaag

SEQ ID NO: 388233 - DNA, 120 bp, Artificial Sequence
  ENSG00000144566_8 (sequence is synthesized)
cacagtcctatgcagatgacaatagtttattattcatggagacatccgctaaaacatcaatgaatgtaaatgaaatattcatggcaatagctaaaaaattgccaaagaatgaaccacaaa

SEQ ID NO: 388234 - DNA, 120 bp, Artificial Sequence
  ENSG00000144566_9 (sequence is synthesized)
atccaggagcaaattctgccagaggaagaggagtagaccttaccgaacccacacaaccaaccaggaatcagtgttgtagtaactaaacctctagtttgaactagctggaatagtcttctg

SEQ ID NO: 388235 - DNA, 120 bp, Artificial Sequence
  ENSG00000144566_10 (sequence is synthesized)
acttaatttttaataacatgcatgggtccctctcactaatgtttcaacaatagggaaaaatgagaactatgtggacacttgtttcattggaaggttagggggaataatttctcatcacta

SEQ ID NO: 388236 - DNA, 120 bp, Artificial Sequence
  ENSG00000144566_11 (sequence is synthesized)
ggaatatagacaaatgactgtctgggcccacacagttaaccagcccatttctccacactggtacagtagtcacctgtgaaaaaaaaattggaacttactaatttgggcttttcaaaaaca

SEQ ID NO: 388237 - DNA, 120 bp, Artificial Sequence
  ENSG00000144566_12 (sequence is synthesized)
ttctttgtttagaaggagattctaaagttatttatgatgcttagccatagtattcaggcaaatgttcatttctcctggtacctgtatttaaaatgtacattccacattttaataaattaa

SEQ ID NO: 388238 - DNA, 120 bp, Artificial Sequence
  ENSG00000144566_13 (sequence is synthesized)
ccacaagaaaataatcccacatatacaaggtcaggggtggggaagagtattaatggtatcttaattatacccagtctggttttttttttttaaatggggtaaaaatcaaatgcaacccca

SEQ ID NO: 388239 - DNA, 120 bp, Artificial Sequence
  ENSG00000144566_14 (sequence is synthesized)
tcttgttttaggaattttgagaactaataaatgcaccttaatggtcagtgttcctttcaaacatgtgagttctttaacaaaaatgaaataaaccaggtgtctgtgatttctaattaatca

SEQ ID NO: 388240 - DNA, 120 bp, Artificial Sequence
  ENSG00000144566_15 (sequence is synthesized)
ccgctggccattacacaggttttgttgtttggggtggggagggggcttttgttcccttttgacataatatagtcaatgcactaacaattatgtatattcaaacttgattattttaaattc

SEQ ID NO: 388241 - DNA, 120 bp, Artificial Sequence
  ENSG00000144566_16 (sequence is synthesized)
gatcttcagctgtactgtaaatagggtactgcattgtagtctccatatctgtattacttttctgtaatatttaagagttgcttaaaagcatacaaaatgtactgttactaaaacagctaa

SEQ ID NO: 388242 - DNA, 120 bp, Artificial Sequence
  ENSG00000144566_17 (sequence is synthesized)
ttatttctctctccccctttgacaggaaggggcttcagttgttcctccatggctagaaccataataaacaatgtacccgtaatttgtaacataaagtattgcaatatgttagtaacaatc

SEQ ID NO: 388243 - DNA, 120 bp, Artificial Sequence
  ENSG00000144566_18 (sequence is synthesized)
ttgcagccttcctttccaaagttcattttattttgatcagttcagtatattgcactaattattttaggtattttcattatatgaaagctaccatgtgtcagagatgatttaatctattta

SEQ ID NO: 388244 - DNA, 120 bp, Artificial Sequence
  ENSG00000144566_19 (sequence is synthesized)
agtgttggactgctaggagaacttgtacatttatgataatgcagaattaggaaaacggttcaccagtgtttagttttatattgaggtgctcaggttggaataaagtggtataaaaagcaa

SEQ ID NO: 388245 - DNA, 120 bp, Artificial Sequence
  ENSG00000144566_20 (sequence is synthesized)
ttgacagaaaatattttgatgttccaattgtgtgattatgaatagctaaataagtcatagagtgaagaaaagagctgttcagcttaccttagctttaaaacttgcctttatctttgttaa

SEQ ID NO: 388246 - DNA, 120 bp, Artificial Sequence
  ENSG00000144566_21 (sequence is synthesized)
caagagagtaccattggggtaactctcgaagtgataaaagctgtttctttgtgaaatatgggcccgaaaagaaaaccaactgctagtgctggtgatggaagtgaagagaaaatgaagcgg

SEQ ID NO: 388247 - DNA, 120 bp, Artificial Sequence
  ENSG00000144566_22 (sequence is synthesized)
aatatctctttttaaatgatcaatataagcaaaacaagtgtgaagcatatttggtttgactgtctcttttttaaaaaatttttgggggtgggtttgtgtgtatgtttatgtgtgtgtgtg

SEQ ID NO: 388248 - DNA, 120 bp, Artificial Sequence
  ENSG00000144566_23 (sequence is synthesized)
agagagagagagagattataccacttttctaagtcccttccacaaaacaatattttgttggtaatattgttaaatttgaaagatgattacctattaggttgtaatactgtcagtttaggc

SEQ ID NO: 388249 - DNA, 120 bp, Artificial Sequence
  ENSG00000144566_24 (sequence is synthesized)
agcttcttccaggtgagttaagccttaacctcttaacctgatagttcagacagacagattttgcaaaggtttcgctgggaaatttggataaatattttttttattagattatacttttta

SEQ ID NO: 388250 - DNA, 120 bp, Artificial Sequence
  ENSG00000144566_25 (sequence is synthesized)
aaaatcaaattattggtaaatataactcagaagaacatgacacataagtatacagattgacaaattattttaatgtaaacattataaggaagatgatttcaaagcatagaggcgtaagga

SEQ ID NO: 388251 - DNA, 120 bp, Artificial Sequence
  ENSG00000144566_26 (sequence is synthesized)
cggccccgcagctcggcttgctgcggtctcaggtaaccgaaccgcccctcctcctgcgcagcgggggcctggaccccaggttatccgcggtccccagcctgtccgcggccctgccggtac

SEQ ID NO: 388252 - DNA, 120 bp, Artificial Sequence
  ENSG00000144566_27 (sequence is synthesized)
cagtgccctggaccagagaactatcgaacccggcgtcttgttctgccagccctggtgactcatcctccaggggctctggagaccgggatttggggactgactgagggagcgacgggtgtc

SEQ ID NO: 388253 - DNA, 120 bp, Artificial Sequence
  ENSG00000144566_28 (sequence is synthesized)
accctttcccttctcaagatggcgccgtggaaagtgtactggaggccgcggttccgcctggtctccgtcctggcagtcctgggggtctcggtcaaagcaaggtttctttacctccagaaa

SEQ ID NO: 388254 - DNA, 120 bp, Artificial Sequence
  ENSG00000144566_29 (sequence is synthesized)
gatagatgtatacaagcaggtgttttctatattatgaaaacatttggagaaaaatgattgacttattgtagtccttttctttcagctgcttttctaacccaaactgtatgtcttgatgac

SEQ ID NO: 388255 - DNA, 80 bp, Artificial Sequence
  ENSG00000144567_0 (sequence is synthesized)
ggctcctcgcgggctcgggcggcggctgcggcggggctatggcgagcggcggtggcgggggtaacactggcgcgggtggg

SEQ ID NO: 388256 - DNA, 120 bp, Artificial Sequence
  ENSG00000144567_1 (sequence is synthesized)
gggccggggatgggcctgagcctgggcctgggtctgggtctgagcctaggcatgagtgaggccaccagtgaggcagaggaggaggcggccacggccgaggcggtgggacgcctggccacg

SEQ ID NO: 388257 - DNA, 120 bp, Artificial Sequence
  ENSG00000144567_2 (sequence is synthesized)
acgctgtggctgcggctccgcggctgggaggcggtgctggcggcggcgcagcggttgctggtgtgggagaagccgctgcacagcctggtcacggcggccgcgctcaacggcctcttctgg

SEQ ID NO: 388258 - DNA, 120 bp, Artificial Sequence
  ENSG00000144567_3 (sequence is synthesized)
ttgctgtcttcctcgtccctccggcccttcttcctactcagcgtctcacttttggcctattttctgctggatctctggcagcctcgctttctccctgacgtttcagcatcatccccagag

SEQ ID NO: 388259 - DNA, 120 bp, Artificial Sequence
  ENSG00000144567_4 (sequence is synthesized)
gagccacactctgacagtgagggtgcggggtcaggcgcccggccgcacctgctgagtgtgcccgagttgtgcagatacctggctgagagctggctcaccttccagattcacctgcaggag

SEQ ID NO: 388260 - DNA, 120 bp, Artificial Sequence
  ENSG00000144567_5 (sequence is synthesized)
ctgctgcagtacaagaggcagaatccagctcagttctgcgttcgagtctgctctggctgtgctgtgttggctgtgttgggacactatgttccagggattatgatttcctacattgtcttg

SEQ ID NO: 388261 - DNA, 120 bp, Artificial Sequence
  ENSG00000144567_6 (sequence is synthesized)
ttgagtatcctgctgtggcccctggtggtttatcatgagctgatccagaggatgtacactcgcctggagcccctgctcatgcagctggactacagcatgaaggcagaagccaatgccctg

SEQ ID NO: 388262 - DNA, 120 bp, Artificial Sequence
  ENSG00000144567_7 (sequence is synthesized)
catcacaaacacgacaagaggaagcgtcaggggaagaatgcacccccaggaggtgatgagccactggcagagacagagagtgaaagcgaggcagagctggctggcttctccccagtggtg

SEQ ID NO: 388263 - DNA, 120 bp, Artificial Sequence
  ENSG00000144567_8 (sequence is synthesized)
gatgtgaagaaaacagcattggccttggccattacagactcagagctgtcagatgaggaggcttctatcttggagagtggtggcttctccgtatcccgggccacaactccgcagctgact

SEQ ID NO: 388264 - DNA, 120 bp, Artificial Sequence
  ENSG00000144567_9 (sequence is synthesized)
gatgtctccgaggatttggaccagcagagcctgccaagtgaaccagaggagaccctaagccgggacctaggggagggagaggagggagagctggcccctcccgaagacctactaggccgt

SEQ ID NO: 388265 - DNA, 120 bp, Artificial Sequence
  ENSG00000144567_10 (sequence is synthesized)
cctcaagctctgtcaaggcaagccctggactcggaggaagaggaagaggatgtggcagctaaggaaaccttgttgcggctctcatcccccctccactttgtgaacacgcacttcaatggg

SEQ ID NO: 388266 - DNA, 120 bp, Artificial Sequence
  ENSG00000144567_11 (sequence is synthesized)
gcagggtcccccccagatggagtgaaatgctcccctggaggaccagtggagacactgagccccgagacagtgagtggtggcctcactgctctgcccggcaccctgtcacctccactttgc

SEQ ID NO: 388267 - DNA, 120 bp, Artificial Sequence
  ENSG00000144567_12 (sequence is synthesized)
cttgttggaagtgacccagccccctccccttccattctcccacctgttccccaggactcaccccagcccctgcctgcccctgaggaagaagaggcactcaccactgaggactttgagttg

SEQ ID NO: 388268 - DNA, 120 bp, Artificial Sequence
  ENSG00000144567_13 (sequence is synthesized)
ctggatcagggggagctggagcagctgaatgcagagctgggcttggagccagagacaccgccaaaaccccctgatgctccacccctggggcccgacatccattctctggtacagtcagac

SEQ ID NO: 388269 - DNA, 120 bp, Artificial Sequence
  ENSG00000144567_14 (sequence is synthesized)
caagaagctcaggccgtggcagagccatgagccagccgttgaggaaggagctgcaggcacagtagggcttcctggctaggagtgttgctgtttcctcctttgcctaccactctggggtgg

SEQ ID NO: 388270 - DNA, 120 bp, Artificial Sequence
  ENSG00000144567_15 (sequence is synthesized)
ggcagtgtgtggggaagctggctgtcggatggtagctattccaccctctgcctgcctgcctgcctgctgtcctgggcatggtgcagtacctgtgcctaggattggttttaaatttgtaaa

SEQ ID NO: 388271 - DNA, 120 bp, Artificial Sequence
  ENSG00000144567_16 (sequence is synthesized)
taattttccatttgggttagtggatgtgaacagggctagggaagtccttcccacagcctgcgcttgcctccctgcctcatctctattctcattccactatgccccaagccctggtggtct

SEQ ID NO: 388272 - DNA, 120 bp, Artificial Sequence
  ENSG00000144567_17 (sequence is synthesized)
ggccctttctttttcctcctatcctcagggacctgtgctgctctgccctcatgtcccacttggttgtttagttgaggcactttataatttttctcttgtcttgtgttcctttctgcttta

SEQ ID NO: 388273 - DNA, 120 bp, Artificial Sequence
  ENSG00000144567_18 (sequence is synthesized)
cctggggcagtgggtcaggccagtagttacactcttaggtcactgtagtctgtgtaaccttcactgcatccttgccccattcagcccggcctttcatgatgcaggagagcagggatcccg

SEQ ID NO: 388274 - DNA, 120 bp, Artificial Sequence
  ENSG00000144567_19 (sequence is synthesized)
cagtacatggcgccagcactggagttggtgagcatgtgctctctcttgagattaggagcttccttactgctcctctgggtgatccaagtgtagtgggaccccctactagggtcaggaagt

SEQ ID NO: 388275 - DNA, 120 bp, Artificial Sequence
  ENSG00000144567_20 (sequence is synthesized)
ggacactaacatctgtgcaggtgttgacttgaaaaataaagtgttgattggctagaactgctgcctccctgactgtgagctgccttccacaccctgcactgcactgtgttctctcctcac

SEQ ID NO: 388276 - DNA, 120 bp, Artificial Sequence
  ENSG00000144567_21 (sequence is synthesized)
ccttaacctgcttcactccagtctgttctggctgtttattaccttgttgcaaaacagggccgaagcaaggattaccttgacaaccctagcttctccttagccatcttccttgacagtgtg

SEQ ID NO: 388277 - DNA, 120 bp, Artificial Sequence
  ENSG00000144567_22 (sequence is synthesized)
atctgtttagtgagatttagcatgtgtgaataaagtatatgcaggaggaaattgctttgtcttcccaatcggtagaaattcgggaccataaaaattgtgttttaccatgtggcctacaac

SEQ ID NO: 388278 - DNA, 120 bp, Artificial Sequence
  ENSG00000144567_23 (sequence is synthesized)
cttaacactgctttcttaagaagtcttcacccatctacatgctaacaactcactcagcctggatttatctttactggggaagccaaacaagcaatagaggacctttacctgtgttagaaa

SEQ ID NO: 388279 - DNA, 120 bp, Artificial Sequence
  ENSG00000144567_24 (sequence is synthesized)
tgagttggagccaaggaacactgaagaaatagtatcttaacagttactgagtccattgtatgtgcttggctctgctctgagtgatttatatgtattaagatttttcctcacaggtcagat

SEQ ID NO: 388280 - DNA, 120 bp, Artificial Sequence
  ENSG00000144567_25 (sequence is synthesized)
atatactgttactaacttcattttatagacaggttaagcttcctgaaggccacaggtcccagtaaattgtggagccagaacccaaacccaagaagttttggcttcagcaaatgcatcaga

SEQ ID NO: 388281 - DNA, 120 bp, Artificial Sequence
  ENSG00000144567_26 (sequence is synthesized)
cagcccctgtccattaatagggcacaggtaggaagatgcacaaggatgtgggaactatagagaaccaatctgatgccttggcttaacaaagagtggacatggcaagccttcctctttggg

SEQ ID NO: 388282 - DNA, 120 bp, Artificial Sequence
  ENSG00000144567_27 (sequence is synthesized)
gaagaaaagcccagaactgagcagatggcctcctttatgagttcatgtcctccgccttcagctggaggtaccatatggcgatgctacctgtctttctgctggaggtaccatatggtaatg

SEQ ID NO: 388283 - DNA, 120 bp, Artificial Sequence
  ENSG00000144567_28 (sequence is synthesized)
ctgcctggctgtctgctggaggtaccatatggtaatgctgcctgtctttctgaggttgacttttatgccatgtctttcctaagtgtgtaagaatttttctgtttgcttcacatttgactg

SEQ ID NO: 388284 - DNA, 120 bp, Artificial Sequence
  ENSG00000144567_29 (sequence is synthesized)
agaatcattctagggtttgattgagcccctgtcctgtgccactaaaggaactcgaacttttcatcacttagagatttcagaggggaatggaaaaacagttctaatcaataagcaagcaat

SEQ ID NO: 388285 - DNA, 120 bp, Artificial Sequence
  ENSG00000144567_30 (sequence is synthesized)
tcaagaaaaatagaattaatcaggcaatgactgcaacatgtcctatctttaatctattttcttattaagcttggacattgacaatagaaccagaagcttgtagctggatcaaaatattct

SEQ ID NO: 388286 - DNA, 120 bp, Artificial Sequence
  ENSG00000144567_31 (sequence is synthesized)
acaatagaaccagaagcttgtagctggatcaaaatattctccataggcctggagtttcatgagggtctattcttttgttgttgttgttttggttttttgttttttgtgggtttttttttt

SEQ ID NO: 388287 - DNA, 120 bp, Artificial Sequence
  ENSG00000144567_32 (sequence is synthesized)
ggcgcccagcctcatgagggtctattctttacattcaccatggtctgatggttgctacatgtttgtctatgattttttttttctattatcaggtgtcttggccggttcatgccccacgat

SEQ ID NO: 388288 - DNA, 120 bp, Artificial Sequence
  ENSG00000144567_33 (sequence is synthesized)
gaaagggccagaggttttcatatgagtaaaagaaaaaagcagaaatgtgaaacctacaattaggctaaacaaaaatcaactggaaaagtacaggctgaggggagaagagttggctacatg

SEQ ID NO: 388289 - DNA, 120 bp, Artificial Sequence
  ENSG00000144567_34 (sequence is synthesized)
tttatgttaggggaggagggagtacattttagctatgtattcaaacagctaatagtttaatgttgctgcttataaacttaattttaggctgcattaataaaagtgtagtctccaaaacaa

SEQ ID NO: 388290 - DNA, 120 bp, Artificial Sequence
  ENSG00000144567_35 (sequence is synthesized)
atcacttggcctgggggcatgacccatccccagtttttgcaggctgacatccgcttgaattgcccatttttttctatctctgagtcgtgagtcgcgagttaggcctggaggtgccattac

SEQ ID NO: 388291 - DNA, 120 bp, Artificial Sequence
  ENSG00000144567_36 (sequence is synthesized)
gccaccgggctggagagctcctccaggctacagtcggcttcccagtcccagccatagtagagcctccttcggatccgggcactcagcttctggtgtcctgggaggaactgaaacagggca

SEQ ID NO: 388292 - DNA, 120 bp, Artificial Sequence
  ENSG00000144567_37 (sequence is synthesized)
cttcccgagcgagcagaagcagaccctaccggggatactgggaatctggaagcccacttcctgccccacacggggataccggggcagcaccacactccctagccgccctgcctactgtgg

SEQ ID NO: 388293 - DNA, 120 bp, Artificial Sequence
  ENSG00000144567_38 (sequence is synthesized)
ctgctggatctctggcagcctcgctttctccctgacgtttcagcatcatccccagaggagccacactctgacaggtgagtacaggccacctcttgaagacaaatgcccacatcctgtcct

SEQ ID NO: 388294 - DNA, 120 bp, Artificial Sequence
  ENSG00000144567_39 (sequence is synthesized)
gcttgctggtgccagtgtcaccatggagcagggcagtgccccagcattgtgaatgaactggtaacaagccatgggtttttcatggtcctaggctcctgtgtaggtgtttgcgtgcctgct

SEQ ID NO: 388295 - DNA, 120 bp, Artificial Sequence
  ENSG00000144567_40 (sequence is synthesized)
ggggtcatttgcttttttagactaaagatatctttggcattctcagagggatttaagtgtctaggaagctggtatctgaggcctccaggggtcatgtcatgtctccccagtgagggtgcg

SEQ ID NO: 388296 - DNA, 120 bp, Artificial Sequence
  ENSG00000144579_0 (sequence is synthesized)
cgcctagccgcgccggtcccagaagtggcgaaagccgcagccgagtccaggtcacgccgaagccgttgcccttttaagggggagccttgaaacggcgcctgggttccatgtttgcatccg

SEQ ID NO: 388297 - DNA, 120 bp, Artificial Sequence
  ENSG00000144579_1 (sequence is synthesized)
cctcgcgggaaggaaactccatgttgtaacaaagtttcctccgcgccccctccctccccctcccccctagaacctggctcccctcccctccggagctcgcggggatccctccctcccacc

SEQ ID NO: 388298 - DNA, 120 bp, Artificial Sequence
  ENSG00000144579_2 (sequence is synthesized)
cccgcgccccgattccggccccagccgggggggaggccgggcgcccgggccagagtccggccggagcggagcgcgcccggccccatggacagctcggccgtcattactcagatcagcaag

SEQ ID NO: 388299 - DNA, 120 bp, Artificial Sequence
  ENSG00000144579_3 (sequence is synthesized)
cagatcagcaaggaggaggctcggggcccgctgcggggcaaaggtgaccagaagtcagcagcttcccagaagccccgaagccggggcatcctccactcactcttctgctgtgtctgccgg

SEQ ID NO: 388300 - DNA, 120 bp, Artificial Sequence
  ENSG00000144579_4 (sequence is synthesized)
gatgatggggaggccctgcctgctcacagcggggcgcccctgcttgtggaggagaatggcgccatccctaagcagaccccagtccaatacctgctccctgaggccaaggcccaggactca

SEQ ID NO: 388301 - DNA, 120 bp, Artificial Sequence
  ENSG00000144579_5 (sequence is synthesized)
gacaagatctgcgtggtcatcgacctggacgagaccctggtgcacagctccttcaagccagtgaacaacgcggacttcatcatccctgtggagattgatggggtggtccaccaggtctac

SEQ ID NO: 388302 - DNA, 120 bp, Artificial Sequence
  ENSG00000144579_6 (sequence is synthesized)
gtgttgaagcgtcctcacgtggatgagttcctgcagcgaatgggcgagctctttgaatgtgtgctgttcactgctagcctcgccaagtacgcagacccagtagctgacctgctggacaaa

SEQ ID NO: 388303 - DNA, 120 bp, Artificial Sequence
  ENSG00000144579_7 (sequence is synthesized)
tggggggccttccgggcccggctgtttcgagagtcctgcgtcttccaccgggggaactacgtgaaggacctgagccggttgggtcgagacctgcggcgggtgctcatcctggacaattca

SEQ ID NO: 388304 - DNA, 120 bp, Artificial Sequence
  ENSG00000144579_8 (sequence is synthesized)
cctgcctcctatgtcttccatccagacaatgctgtaccggtggcctcgtggtttgacaacatgagtgacacagagctccacgacctcctccccttcttcgagcaactcagccgtgtggac

SEQ ID NO: 388305 - DNA, 120 bp, Artificial Sequence
  ENSG00000144579_9 (sequence is synthesized)
gacgtgtactcagtgctcaggcagccacggccagggagctagtgagggtgatggggccaggacctgcccctgaccaatgatacccacacctcctcccaggaagactgcccaggcctttgt

SEQ ID NO: 388306 - DNA, 120 bp, Artificial Sequence
  ENSG00000144579_10 (sequence is synthesized)
ccccgtgtcagtgccttcaaacctcctcccctattctcaggggacctggggggccctgcctgctgctccctttttctgtctctgtccatgctgccatgtttctctgctgccaaattgggc

SEQ ID NO: 388307 - DNA, 120 bp, Artificial Sequence
  ENSG00000144579_11 (sequence is synthesized)
cccttggccccttccggttctgcttcctgggggcagggttcctgccttggacccccagtctgggaacggtggacatcaagtgccttgcatagagccccctcttccccgcccagctttccc

SEQ ID NO: 388308 - DNA, 120 bp, Artificial Sequence
  ENSG00000144579_12 (sequence is synthesized)
aggggcacagctctaggctgggaggggagaaccagcccctccccctgccccacctcctcccttgggactgagagggcccctaccaacctttgcctctgccttggagggaggggaggtctg

SEQ ID NO: 388309 - DNA, 120 bp, Artificial Sequence
  ENSG00000144579_13 (sequence is synthesized)
ttaccactggggaaggcagcaggagtctgtccttcaggccccacagtgcagcttctccagggccgacagctgagggctgctccctgcatcatccaagcaatgacctcagacttctgcctt

SEQ ID NO: 388310 - DNA, 120 bp, Artificial Sequence
  ENSG00000144579_14 (sequence is synthesized)
aaccagccccggggcttggctcccccagctctgagcgtgggggcataggcaggaccccccttgtggtgccatataaatatgtacatgtgtatatagatttttaggggaaggagagaggga

SEQ ID NO: 388311 - DNA, 120 bp, Artificial Sequence
  ENSG00000144579_15 (sequence is synthesized)
agggtcagggtagagacacccctcccttgcccctttcctgggcccagaagttggggggagggagggaaaggatttttacattttttaaactgctattttctgaatggaacaagctgggcc

SEQ ID NO: 388312 - DNA, 120 bp, Artificial Sequence
  ENSG00000144579_16 (sequence is synthesized)
aaggggcccaggccctgtcctctgtccctcacacccctttgctccgttcattcattcaaaaaaacatttcttgagcaccttctgtgcccagcatatgctaggcccaccagctaagtgtgt

SEQ ID NO: 388313 - DNA, 120 bp, Artificial Sequence
  ENSG00000144579_17 (sequence is synthesized)
gtggggggtctctacgccagctcatcagtgcctccttgcccatccttcaccggtgcctttgggggatctgtaggaggtgggaccttctgtggggtttggggatctccaggaagcccgacc

SEQ ID NO: 388314 - DNA, 120 bp, Artificial Sequence
  ENSG00000144579_18 (sequence is synthesized)
aagctgtccccttcccctgtgccaacccatctcctacagccccctgcctgatcccctgctggctgggggcagctcccaggatatcctgccttccaactgtttctgaagcccctcctccta

SEQ ID NO: 388315 - DNA, 120 bp, Artificial Sequence
  ENSG00000144579_19 (sequence is synthesized)
acatggcgattccggaggtcaaggccttgggctctccccagggtctaacggttaaggggacccacataccagtgccaagggggatgtcaagtggtgatgtcgttgtgctcccctccccca

SEQ ID NO: 388316 - DNA, 120 bp, Artificial Sequence
  ENSG00000144579_20 (sequence is synthesized)
gagcgggtgggcggggggtgaatatggttggcctgcatcaggtggccttcccatttaagtgccttctctgtgactgagagccctagtgtgatgagaactaaagagaaagccagaccccta

SEQ ID NO: 388317 - DNA, 120 bp, Artificial Sequence
  ENSG00000144579_21 (sequence is synthesized)
ggaggcgccgaccccctcggaggcacagagaggacggccggcacttccaagagtcgcttggcgcccgcggggagagtcgtgcgcctagtgggcacgcaccaccccgcaaagcctcgccgc

SEQ ID NO: 388318 - DNA, 120 bp, Artificial Sequence
  ENSG00000144579_22 (sequence is synthesized)
cccgacgaggctgcgtcccccagcgtggctgggccggggtgggggggtctgtcttctccttttccccgtgtggacctcaggatctggacgctgcccccaggtctgcccaccctcgcctgg

SEQ ID NO: 388319 - DNA, 120 bp, Artificial Sequence
  ENSG00000144579_23 (sequence is synthesized)
tgagattagggggcgcagccagagcaggcctaggaaaacgccagcagcgtgtggcgatcacggtgatgaagcgcaatggtggccgccccgtgggctacccaggagcaggaggagggccga

SEQ ID NO: 388320 - DNA, 120 bp, Artificial Sequence
  ENSG00000144579_24 (sequence is synthesized)
tccccagttggggggtgggtgccctcccagtccttcctgcattcattgcctgtgcctgccgcccactcccctcatccacctgccctgtagccatatggtcttttcccctcgcacaaagca

SEQ ID NO: 388321 - DNA, 120 bp, Artificial Sequence
  ENSG00000144579_25 (sequence is synthesized)
gagcatctgccatgcacaggggcccccacagggcaacggagtttggaaagtttcaatttttcgaattgccagttgtgacctactgatggcccacagaattaatttagtgggttctgattg

SEQ ID NO: 388322 - DNA, 120 bp, Artificial Sequence
  ENSG00000144579_26 (sequence is synthesized)
ttacaaaatagtaacgacgagtgaaaagaacttcataaacgaggaaaaagaccaacccgcagacccacggcgcgcaccacggaggggcttgcagcgagaagacagggacctccgttccca

SEQ ID NO: 388323 - DNA, 120 bp, Artificial Sequence
  ENSG00000144579_27 (sequence is synthesized)
agtgcccagcactgcgccacaggccgggtggaacgggccttgagggcctctggtttgaggtcccccacggtcgggctttgggcccaccgcgtgcggcgccgtgctgggctcctaggatcg

SEQ ID NO: 388324 - DNA, 120 bp, Artificial Sequence
  ENSG00000144579_28 (sequence is synthesized)
gcagcgagtccagtgactcccaccgcacccccagtaatcacagggcggccgtcgaccgcgggcaggggagggggtctgggaaggcccctggagaaggtggcatttcctcgaggtgaccag

SEQ ID NO: 388325 - DNA, 120 bp, Artificial Sequence
  ENSG00000144579_29 (sequence is synthesized)
ggactgccctgggtcccaggccctggctgtcctgagcaggggtgctcaggtaaggtggggtcaggaggcaccgcaatggggctgatcagcagcagtcatggaggctgtgagaggcaggga

SEQ ID NO: 388326 - DNA, 120 bp, Artificial Sequence
  ENSG00000144579_30 (sequence is synthesized)
gagagcaccccaggacctccttctccaggccacgcactccctatgtgggcgccttaatacctgctagacctatttgtctgggagctgcaggagccttgcagttgattgtggagccctgac

SEQ ID NO: 388327 - DNA, 120 bp, Artificial Sequence
  ENSG00000144579_31 (sequence is synthesized)
aggggcgtttcagagaaagtcaggagctgccttcgtgtgtctggatgaaggggccacggcaagatcctcctggctcaggggttcacacctgggcacacatgcaggattctgcaggccagt

SEQ ID NO: 388328 - DNA, 120 bp, Artificial Sequence
  ENSG00000144580_0 (sequence is synthesized)
agttgtcttgccgggactgtccatcttttcccgccgttcactggcttttggaggagggtcagagttcacgccgctctctggaaataactgctcaaagccagaagttgcggggactagtgg

SEQ ID NO: 388329 - DNA, 120 bp, Artificial Sequence
  ENSG00000144580_1 (sequence is synthesized)
tcgcggacgtccttccggtcctaaatcttaaggggcaaaggacatactctgggactgttaactaggccctggaggcgggaagaggatgtgtgggtggggtcaggggtgagaggtcagagg

SEQ ID NO: 388330 - DNA, 120 bp, Artificial Sequence
  ENSG00000144580_2 (sequence is synthesized)
gccgcgaagtgggcggagcgagccggagtcggatggcggctacggcggctcattgttttccgctgcaggggtgctgaaggggggacgcgggtcggacgcgtccggctgtggaagagagcg

SEQ ID NO: 388331 - DNA, 120 bp, Artificial Sequence
  ENSG00000144580_3 (sequence is synthesized)
gcggccgctcacaacatgcacagcctggcgacggctgcgcctgtgcctactacactggcacaagtggatagagaaaagatctatcagtggatcaatgagctgtccagtcctgagactagg

SEQ ID NO: 388332 - DNA, 120 bp, Artificial Sequence
  ENSG00000144580_4 (sequence is synthesized)
gaaaatgctttgctggagctaagtaagaagcgagaatctgttcctgaccttgcacccatgctgtggcattcatttggtactattgcagcacttttacaggaaattgtaaatatttatcca

SEQ ID NO: 388333 - DNA, 120 bp, Artificial Sequence
  ENSG00000144580_5 (sequence is synthesized)
tctatcaacccacccaccttgacagcacaccagtctaacagagtttgcaatgctctggcattactgcaatgtgtagcatcacatccagaaaccaggtcagcgtttctcgcagcacacatc

SEQ ID NO: 388334 - DNA, 120 bp, Artificial Sequence
  ENSG00000144580_6 (sequence is synthesized)
ccactttttttgtacccctttttgcacactgtcagcaaaacacgtccctttgagtatctccggctcaccagccttggagttattggggccctggtgaaaacagatgaacaagaagtaatc

SEQ ID NO: 388335 - DNA, 120 bp, Artificial Sequence
  ENSG00000144580_7 (sequence is synthesized)
aactttttattaacaacagaaattatccctttatgtttgcgaattatggaatctggaagtgaactttctaaaacagttgccacattcatcctccagaagatcttgttagatgacactggt

SEQ ID NO: 388336 - DNA, 120 bp, Artificial Sequence
  ENSG00000144580_8 (sequence is synthesized)
ttggcttatatatgtcagacgtatgagcgtttctcccatgttgccatgatcttgggtaagatggtcctgcagctatccaaagagccttctgcccgtctgctgaagcatgtagtgagatgt

SEQ ID NO: 388337 - DNA, 120 bp, Artificial Sequence
  ENSG00000144580_9 (sequence is synthesized)
taccttcgactttcagataaccccagggcacgtgaagcactcagacagtgcctccctgaccagctgaaagacacaaccttcgcccaggtgctaaaagatgacaccaccacgaaacgctgg

SEQ ID NO: 388338 - DNA, 120 bp, Artificial Sequence
  ENSG00000144580_10 (sequence is synthesized)
cttgcacaactggtgaagaacctgcaagagggccaggtcaccgatccccggggtatccccctgccccctcagtgatccttccctgttccctcccactactcccccaagttggggaaagga

SEQ ID NO: 388339 - DNA, 120 bp, Artificial Sequence
  ENSG00000144580_11 (sequence is synthesized)
gggggaacctacgagaaaaacagctcaggttttatcaccgactgggaatagacaacctcaatgctgaaccgcactggagaaaaggggcaaggtacccctgctgaggtgtatgggctgcca

SEQ ID NO: 388340 - DNA, 120 bp, Artificial Sequence
  ENSG00000144580_12 (sequence is synthesized)
tctcaggctgtcttgaggacctgggctccctctgctactcccaggaaatgggctcctgacacagcagtctgccaccacagccccaggagggtgtcaacaccagcaaatgctgtatttgca

SEQ ID NO: 388341 - DNA, 120 bp, Artificial Sequence
  ENSG00000144580_13 (sequence is synthesized)
gcatgtccaagatgacccttctcccctacctctacctagccactggcagggaggggagacagtggtgatagcagcagcactctaggcatggtgaacgcctgggaccaagccatgtggcgt

SEQ ID NO: 388342 - DNA, 120 bp, Artificial Sequence
  ENSG00000144580_14 (sequence is synthesized)
tttttattttgcctttctggaagactcaagatatgtctcttcattctctctcagtatttgtttactttggtttttttgtttttaatctcagagagaggtgtgtttagtgggcacaagctg

SEQ ID NO: 388343 - DNA, 120 bp, Artificial Sequence
  ENSG00000144580_15 (sequence is synthesized)
taatattcagcaaaactttgtcgactggcactgtttacaagtctgttagctgcataagctcaataaaaagttggtctgggcattacatcccctctggcaggccaatagctgcatcaagct

SEQ ID NO: 388344 - DNA, 120 bp, Artificial Sequence
  ENSG00000144580_16 (sequence is synthesized)
ccttgtttctggctttagctgctagttttcccaaatctcagtgctttccctttttgaacttcccttctattaaacttaaaacagatgtcttaattaatcaggctgtcttggaagggtatt

SEQ ID NO: 388345 - DNA, 120 bp, Artificial Sequence
  ENSG00000144580_17 (sequence is synthesized)
gtattgggagacaaggggcggtggtggacctcaccttcaatccaagttttcaaagatattttctcaataactctaaaagggaggtgcttgggattaaggtgacagtccacttgatccttt

SEQ ID NO: 388346 - DNA, 120 bp, Artificial Sequence
  ENSG00000144580_18 (sequence is synthesized)
tctttgttttagtgtgaatttcagcagctccatctgtcttcatgattgtacttgagcagtattagctgtatgagttaattttattcagattgaagatggagggctgggttctgctcactc

SEQ ID NO: 388347 - DNA, 120 bp, Artificial Sequence
  ENSG00000144580_19 (sequence is synthesized)
ttttttttttttttttttttgaccattctcttttagtctatgggaattacagggttgccgctaaaatattcacttgttcatatcgtgtcagagatttcctcttctctggagcttaggtgg

SEQ ID NO: 388348 - DNA, 120 bp, Artificial Sequence
  ENSG00000144580_20 (sequence is synthesized)
gagcttaggtggctcttcacaatccataggcttgaatctgcaacctagtgtaaactgccttgctttccccggttctttcccctgctagcacctgctttctcatccctatctccagtcaaa

SEQ ID NO: 388349 - DNA, 120 bp, Artificial Sequence
  ENSG00000144580_21 (sequence is synthesized)
gatgggattgcttaatccaactctggagagggaccaagtcttttctgcccacatctcacacaattgaggtgtctgaacaagcttggggagggtctataaggggtaggctcaaaaaaaaaa

SEQ ID NO: 388350 - DNA, 120 bp, Artificial Sequence
  ENSG00000144580_22 (sequence is synthesized)
aaacccatttgcagaggcagttttgccaacacaagggctctttcaagccgactttcacaaagagagccggacttgttagttggcttctgtctctttagagccaagaaaatagtaattaag

SEQ ID NO: 388351 - DNA, 120 bp, Artificial Sequence
  ENSG00000144580_23 (sequence is synthesized)
tggcctagatataggaagggcagaataagcacttactccccctgccttccaagatgaagaggagaagcaggccaaccctcaataattgcaagcctgaagagaagtgatcttagagaaagc

SEQ ID NO: 388352 - DNA, 120 bp, Artificial Sequence
  ENSG00000144580_24 (sequence is synthesized)
agagaacagaatggactggatagacatcttgactctattcagcccgtagtctgtgatctggagagtccagttaaggtaacccagatttttgacaaccgccttcctgctgagccaaagttt

SEQ ID NO: 388353 - DNA, 120 bp, Artificial Sequence
  ENSG00000144580_25 (sequence is synthesized)
tctcattacccctccactggggaagcagctgaggcccagggccttgctccctgggaaattctcttctctccatctttcggtgcattggccatgttactgtgccaaagtgtcttaattctt

SEQ ID NO: 388354 - DNA, 120 bp, Artificial Sequence
  ENSG00000144580_26 (sequence is synthesized)
gtcccatctattctcagctggccttggaacccacataggagttggtgggggagggatggaatgggtattattcattgtagttgatcctggtgtgtgtattatataaagagacccctcccc

SEQ ID NO: 388355 - DNA, 120 bp, Artificial Sequence
  ENSG00000144580_27 (sequence is synthesized)
ttattttgtgttttccatccctctcccttaacaggattgaaataaaacatgcttctgtttttgtaaaaataatttttcctttacactggagattttattctatcagtatatgggtaacta

SEQ ID NO: 388356 - DNA, 120 bp, Artificial Sequence
  ENSG00000144580_28 (sequence is synthesized)
ggcactttggtcaggtgatccttgtcatgcctgcttctcccctctgtctacctacacaacacacacacacacacacacacagccctgctaagatggcagtagtggttcttttgtgaacat

SEQ ID NO: 388357 - DNA, 120 bp, Artificial Sequence
  ENSG00000144580_29 (sequence is synthesized)
gttttttggggagactccatctgaggtacaaaagctgtttgggaggctgggagggggatgatgccccttacctgataaaagtatgttttactgggacagaacttcactcctggccatatt

SEQ ID NO: 388358 - DNA, 120 bp, Artificial Sequence
  ENSG00000144580_30 (sequence is synthesized)
ggccagaacttagtgccagtgtagggagagacttccatagtgacaaggtaatgcttgaaacatcttacgaactttgatgttcatttcctcaagttcaaggcttggagcacatctccagga

SEQ ID NO: 388359 - DNA, 120 bp, Artificial Sequence
  ENSG00000144580_31 (sequence is synthesized)
ttgtttccatgcctggctgtcagtgggacacagctgccctatgcttccacgttcttttttcaagagccttagagggcctgtggcctgtttcactggtggaacaggagcagcattggtagc

SEQ ID NO: 388360 - DNA, 120 bp, Artificial Sequence
  ENSG00000144580_32 (sequence is synthesized)
cttcagagcatgccttgcttactaactacatattattcctctgctcattgttcctgctgcttaaaggctaggaaaagggggatatacaaagttgttgctttcaaaaactcagagaaaaaa

SEQ ID NO: 388361 - DNA, 120 bp, Artificial Sequence
  ENSG00000144580_33 (sequence is synthesized)
acccacataggagttggtgggggagggatgtgtattatataaagagacccctccccttattttgtgttttccatccctctcccttaacaggattgaaataaaacatgcttctgtttttgt

SEQ ID NO: 388362 - DNA, 120 bp, Artificial Sequence
  ENSG00000144580_34 (sequence is synthesized)
ctaccatagttttgttttcactgctcatctcttattaaggtttttaaccataaaactgaagcaatttctgtaaagacacaaattgataacttagtatagaattaaaattcattaagttat

SEQ ID NO: 388363 - DNA, 120 bp, Artificial Sequence
  ENSG00000144580_35 (sequence is synthesized)
cataagtttgatgatatccttgttaatgtactgatttttgaattattttatttgccataatccatatatttctaacatgagtattttgacagtatttaataaatcagaaagctgtttgaa

SEQ ID NO: 388364 - DNA, 120 bp, Artificial Sequence
  ENSG00000144580_36 (sequence is synthesized)
gagacagaacttagattcttttaaaaatctgaaatgctgaattttagtagccatcagtttcatcttctcactgtaactctccatcctactgtgaaattccagagagtctaggcgattcca

SEQ ID NO: 388365 - DNA, 120 bp, Artificial Sequence
  ENSG00000144580_37 (sequence is synthesized)
aaggaaaccttatgatgcattactcctgttgtttgaattttctgttgctactctacgtggtcagagagagaagtatattttcaaagatctcttaaaaaggaacacagcccagagggctct

SEQ ID NO: 388366 - DNA, 120 bp, Artificial Sequence
  ENSG00000144580_38 (sequence is synthesized)
aagagagcggcggccgctcacaacatgcacagcctggcgacggctgcgaaatagaagaccaacttaaactgtcagtaccctgtgtgacacttggagttaaccattggtaacttactttga

SEQ ID NO: 388367 - DNA, 76 bp, Artificial Sequence
  ENSG00000144580_39 (sequence is synthesized)
ggtgtgatcttggctcaccgcaacctcgaccttctgggttcagtaacgacaccacaccaggctaatttttgtattt

SEQ ID NO: 388368 - DNA, 65 bp, Artificial Sequence
  ENSG00000144580_40 (sequence is synthesized)
ttgcacactgtcagcaaaacacgtccctttgagtatctccggctcaccagccttggagttaaagt

SEQ ID NO: 388369 - DNA, 120 bp, Artificial Sequence
  ENSG00000144583_0 (sequence is synthesized)
acagttctctcctcctcttgctccctctccctccagcttcttttcctctcatcccctttccctcctccatccctccgcggcgtctgcgtcaggcccccacgagcgtgacgcgcggggtct

SEQ ID NO: 388370 - DNA, 120 bp, Artificial Sequence
  ENSG00000144583_1 (sequence is synthesized)
gggtgggagctgtccactcgcccggggtgctgaatgcagcagcggcggccgcggcgccggcggcggagatagccgagagcctccctcgctgcaagaaccttgtttccagttctcggacgg

SEQ ID NO: 388371 - DNA, 120 bp, Artificial Sequence
  ENSG00000144583_2 (sequence is synthesized)
tcagctcgccgccccgccacctcccttccagcaccacccctttgggaatcgagccagtgggggcagcggcgggtgctgagcaacggcggaagacgagacaacacctggcagcagcctgga

SEQ ID NO: 388372 - DNA, 120 bp, Artificial Sequence
  ENSG00000144583_3 (sequence is synthesized)
atctgatttgcttcctctcggcttttataagagatatatttatatacggttttggggagtcgcgaggaccaagctggagccaagtgccggctgcctcccacctcggccacactgcttcgc

SEQ ID NO: 388373 - DNA, 120 bp, Artificial Sequence
  ENSG00000144583_4 (sequence is synthesized)
tcccccctccccaccttcagctggcaccgcaaacaagccttacctcgttgcatctgcgaggagaggtagcaacagcgagcctagccagccagaggcggtggagaggaggaaggggcgggg

SEQ ID NO: 388374 - DNA, 120 bp, Artificial Sequence
  ENSG00000144583_5 (sequence is synthesized)
tgggggggcagagagcgggccgaggccgcccttggtgggggtagcgggggcagagctgccgagcagacccggcagccgccctcctccgcccccaccctccagaagcactcttgcctgaga

SEQ ID NO: 388375 - DNA, 120 bp, Artificial Sequence
  ENSG00000144583_6 (sequence is synthesized)
accgaattattccactagtattatttcattttttattactccccctcctcactccccagccgcccccacccccacgccggcctcgcctctggttgcatggcagcgctgcccgggcgcggg

SEQ ID NO: 388376 - DNA, 120 bp, Artificial Sequence
  ENSG00000144583_7 (sequence is synthesized)
ggctcagggctggcccccagggaagggggaggaggaggaggatcatgaaggccggagtcgcgaccgcgccggacggcgggcagcagccagaggacgagccggagcagcccccgccccgga

SEQ ID NO: 388377 - DNA, 120 bp, Artificial Sequence
  ENSG00000144583_8 (sequence is synthesized)
gacacccggacgccgagcagcagtcgcctccgccgccgcagcagcagctgcgggcgcgggccgacccggagccggaggaggagggcgaccgcgacccagaggaggaagaggaggagaagg

SEQ ID NO: 388378 - DNA, 120 bp, Artificial Sequence
  ENSG00000144583_9 (sequence is synthesized)
cgaggccactcgcccgcccggacctgcccttctctcggctcttgcccctcgaccgaagggacctttgatggaaccgaggggagggcgccacggatttgccgactgcagcaggggtgggct

SEQ ID NO: 388379 - DNA, 120 bp, Artificial Sequence
  ENSG00000144583_10 (sequence is synthesized)
gggggctgagataatgtaaccactcctttctcctgttctctcccacacgcccctctcctctacccctattctctgctccactgccctctcaccccggtacacacacccttcctctagcca

SEQ ID NO: 388380 - DNA, 120 bp, Artificial Sequence
  ENSG00000144583_11 (sequence is synthesized)
ggatcttcatgctcaggaaggaggcgcctctgcaagggttaaacgatcttttctttttctcccatcctttttccttcccaaacctctattttacctcccttctcctaattggctttcccc

SEQ ID NO: 388381 - DNA, 120 bp, Artificial Sequence
  ENSG00000144583_12 (sequence is synthesized)
tcttcggtgtaaccctttggctgcggaggcaaagcacaagcccctagcccagtttcacctgcaacacccctcccccacccaactgctctcttaaaagcaactctggtgcttctgggggtt

SEQ ID NO: 388382 - DNA, 120 bp, Artificial Sequence
  ENSG00000144583_13 (sequence is synthesized)
aattgccccagttttctgcccaggagaattaaaacttctcccaatcttctctcctcccctaccttgactcccccaacccctaccacctgagaaaaacgatcttttctctctcacacatgc

SEQ ID NO: 388383 - DNA, 120 bp, Artificial Sequence
  ENSG00000144583_14 (sequence is synthesized)
agtcctcaattcttcattgagctagttttctctaagcccagctcaatccactccagatttgatttacaattgtccccacccttttatataaaagaaagatttctcactgcgtaggaattt

SEQ ID NO: 388384 - DNA, 120 bp, Artificial Sequence
  ENSG00000144583_15 (sequence is synthesized)
gagaagaacccaataatcctttcctggggaacttttaaacaattcgacattgatttaaacaattcgacagaggctctagtggcccctccaccacgcttcttcaatccctctgctcctacc

SEQ ID NO: 388385 - DNA, 120 bp, Artificial Sequence
  ENSG00000144583_16 (sequence is synthesized)
agtgtcctcaggtcaaaagcagaaaggagacacactgaacaaagttggaggttggggtgggtgtgtgagggcaagaaaaacttttttgttattgggctttccaggtggagttcagaacca

SEQ ID NO: 388386 - DNA, 120 bp, Artificial Sequence
  ENSG00000144583_17 (sequence is synthesized)
gtgactcacacttctcagtcctgggagcaatttatttgctacttggaggggttgtaagaaaagccagtgagaaagcagactccccccacaacacagatccactgtggacccccaaaacct

SEQ ID NO: 388387 - DNA, 120 bp, Artificial Sequence
  ENSG00000144583_18 (sequence is synthesized)
gtcctgtccccctcttttaagactccagccacccctcttgggctctctacttccacggggcacatgctgatgcccctgtgtgggctgctctggtggtggtggtgctgctgctccggctgg

SEQ ID NO: 388388 - DNA, 120 bp, Artificial Sequence
  ENSG00000144583_19 (sequence is synthesized)
tactgctatggattgtgtgccccagccccccagatgttgcgccaccagggtctcctcaagtgccgctgccgcatgctcttcaatgacctgaaggttttcttactgcggcgccctcctcaa

SEQ ID NO: 388389 - DNA, 120 bp, Artificial Sequence
  ENSG00000144583_20 (sequence is synthesized)
gagaagtggtgggcagggagccccctcctgtgccacctccaccccccttgccaccttcttctgtggaagatgactggggtggcccagccacagagccacctgcctcgctgctcagcagtg

SEQ ID NO: 388390 - DNA, 120 bp, Artificial Sequence
  ENSG00000144583_21 (sequence is synthesized)
cctcctcagatgacttctgtaaggagaagaccgaggatcgctactcactgggcagcagcttggacagtggtatgaggaccccactctgccgcatctgcttccaggggccagaacaggggg

SEQ ID NO: 388391 - DNA, 120 bp, Artificial Sequence
  ENSG00000144583_22 (sequence is synthesized)
agctgctgagcccatgccgctgtgatggctcggtcaagtgcacacaccagccttgcctcatcaagtggatcagcgagcggggctgctggagctgcgagctgtgctactacaagtaccacg

SEQ ID NO: 388392 - DNA, 120 bp, Artificial Sequence
  ENSG00000144583_23 (sequence is synthesized)
tcatcgccataagcacaaaaaatcctctgcagtggcaggccatctctctgacggtcattgagaaggttcaggttgcagccgccatcctgggctccctcttcctcatcgccagtatttctt

SEQ ID NO: 388393 - DNA, 120 bp, Artificial Sequence
  ENSG00000144583_24 (sequence is synthesized)
ggctcatctggtcaactttcagcccctcggcaagatggcagcgccaagaccttctcttccagatctgctacgggatgtatggcttcatggacgtggtgtgcataggtctcatcatccatg

SEQ ID NO: 388394 - DNA, 120 bp, Artificial Sequence
  ENSG00000144583_25 (sequence is synthesized)
aaggaccctcggtgtaccgcatctttaaacggtggcaggctgtcaaccagcagtggaaagtgctgaactatgacaagacaaaagacctggaggatcaaaaggcaggaggcaggaccaacc

SEQ ID NO: 388395 - DNA, 120 bp, Artificial Sequence
  ENSG00000144583_26 (sequence is synthesized)
cccggacctcctcatccacccaggccaatatcccctcctcggaagaggagaccgcaggcacccctgcccctgagcagggccctgcccaggctgccggccacccctcaggccctctgtccc

SEQ ID NO: 388396 - DNA, 120 bp, Artificial Sequence
  ENSG00000144583_27 (sequence is synthesized)
atcaccactgtgcttataccatcctgcacatcctgagtcacttgagacctcatgaacagcgaagtcccccaggcagcagccgagagctggtcatgagagtcacgacagtgtgagagcaga

SEQ ID NO: 388397 - DNA, 120 bp, Artificial Sequence
  ENSG00000144583_28 (sequence is synthesized)
ggcccggaaggaaggccatgaccaccactgagggcccggagcagggtggggaggtgcagtggcacccccagagccaacagagggagcaggcagagggtgggggacctggcgggagccctg

SEQ ID NO: 388398 - DNA, 120 bp, Artificial Sequence
  ENSG00000144583_29 (sequence is synthesized)
gggtagtgtcagagcgggagtgaggctggtgcaggagcagttctgctatttccaatcagtcaatgccactctccacaacaacaatgaaaaccaacaccaactcaacaacaaagtgcaata

SEQ ID NO: 388399 - DNA, 120 bp, Artificial Sequence
  ENSG00000144583_30 (sequence is synthesized)
caggctgaacctggcccaacagaaaaaccctgccccaatgcacctgcaggcaaggtacccgaagaagcagaggctgagggcaggcaaagcctgtgtgactgtggcagtgccggaggccaa

SEQ ID NO: 388400 - DNA, 120 bp, Artificial Sequence
  ENSG00000144583_31 (sequence is synthesized)
gggggccaagaggaaaagcatctgtggtctgctctgctctcaccctgtttggttttgtttctcctggggctgtgttctgcaggcagccagaaaaggaggaggcacgggtgagctggcagg

SEQ ID NO: 388401 - DNA, 120 bp, Artificial Sequence
  ENSG00000144583_32 (sequence is synthesized)
gacacactgcctttggggctcctgggctcatttggatgggcaagattcgctgacaaatggctgtggggatggtggggtggatggtcagggagggatgctcagggagggatatgctggtgt

SEQ ID NO: 388402 - DNA, 120 bp, Artificial Sequence
  ENSG00000144583_33 (sequence is synthesized)
gagcagccagagggagagtgtgtctccttcctgaaggaacttccaaatggaactcccgatttcaggtgggctaaaagagggcttaggtttggaaaagggtgtccttctgtgcccttgtta

SEQ ID NO: 388403 - DNA, 76 bp, Artificial Sequence
  ENSG00000144583_34 (sequence is synthesized)
gaaaagtacagatttccagtggatatttcaagcacagttctgctgctgtggcttcagctttggaagctgtcaatcc

SEQ ID NO: 388404 - DNA, 120 bp, Artificial Sequence
  ENSG00000144583_35 (sequence is synthesized)
gttctgctgctgtggcttcagctttggaagctgtcaatcccggagcaactttcccaactacccaaccccaccatggccaggacatgtgcaatgccagccccttcttgtcttggcacatgc

SEQ ID NO: 388405 - DNA, 120 bp, Artificial Sequence
  ENSG00000144583_36 (sequence is synthesized)
acagacccagtcccctcacggtagggcacccctgacctacgggcttccaagagagcagctgcagtggttgggaggagcttgaccagtgtgccccaaggagtggagtagagcccaatctaa

SEQ ID NO: 388406 - DNA, 120 bp, Artificial Sequence
  ENSG00000144583_37 (sequence is synthesized)
gtattccttgctgcttggaaccctccctgtttggaaccctccccaaagaggcagtcaggctgatgctcagtgctttgtgctccctgctccttcccgcgtagccaggtgggcccaagggtg

SEQ ID NO: 388407 - DNA, 120 bp, Artificial Sequence
  ENSG00000144583_38 (sequence is synthesized)
cctggcagggagcactacccctggacccctcctgctcgctctggggaccctgccagggaaggccactgggtgttcacctgcaaagtttctggttgtcactgcacagtggtcgcgtcatcc

SEQ ID NO: 388408 - DNA, 120 bp, Artificial Sequence
  ENSG00000144583_39 (sequence is synthesized)
atgggtattaaaaggacactgtcaagtacttttttaaactagtttttagggttttttaaaactctctgttgtttgtaatattctcttaaaagcttgaaaataaaacttctttccctacca

SEQ ID NO: 388409 - DNA, 120 bp, Artificial Sequence
  ENSG00000144589_0 (sequence is synthesized)
acttcctttccatcattgataggcgccgggcagctgagctggtaggaggaccagacggggaggttcggctccgccccccagcgtcccgtggccatgacgaccgctcagagggactccctg

SEQ ID NO: 388410 - DNA, 120 bp, Artificial Sequence
  ENSG00000144589_1 (sequence is synthesized)
ttgtggaagctcgcggggttgctgcgggagtccggggatgtggtcctgtctggctgtagcaccctgagcctgctgactcccacactgcaacagctgaaccacgtatttgagctgcacctg

SEQ ID NO: 388411 - DNA, 120 bp, Artificial Sequence
  ENSG00000144589_2 (sequence is synthesized)
gggccatggggccctggccagacaggctttgtggctctgccctcccatcctgccgactcccctgttattcttcagcttcagtttctcttcgatgtgctgcagaaaacactttcactcaag

SEQ ID NO: 388412 - DNA, 120 bp, Artificial Sequence
  ENSG00000144589_3 (sequence is synthesized)
ctggtccatgttgctggtcctggccccacagggcccatcaagattttccccttcaaatcccttcggcacctggagctccgaggtgttcccctccactgtctgcatggcctccgaggcatc

SEQ ID NO: 388413 - DNA, 120 bp, Artificial Sequence
  ENSG00000144589_4 (sequence is synthesized)
tactcccagctggagaccctgatttgcagcaggagcctccaggcattagaggagctcctctcagcctgcggcggcgacttctgctctgccctcccttggctggctctgctttctgccaac

SEQ ID NO: 388414 - DNA, 120 bp, Artificial Sequence
  ENSG00000144589_5 (sequence is synthesized)
ttcagctacaatgcactgaccgccttagacagctccctgcgcctcttgtcagctctgcgtttcttgaacctaagccacaatcaagtccaggactgtcagggattcctgatggatttgtgt

SEQ ID NO: 388415 - DNA, 120 bp, Artificial Sequence
  ENSG00000144589_6 (sequence is synthesized)
gagctccaccatctggacatctcctataatcgcctgcatttggtgccaagaatgggaccctcaggggctgctctgggggtcctgatactgcgaggcaatgagcttcggagcctgcatggc

SEQ ID NO: 388416 - DNA, 120 bp, Artificial Sequence
  ENSG00000144589_7 (sequence is synthesized)
ctagagcagctgaggaatctgcggcacctggatttggcatacaacctgctggaaggacaccgggagctgtcaccactgtggctgctggctgagctccgcaagctctacctggaggggaac

SEQ ID NO: 388417 - DNA, 120 bp, Artificial Sequence
  ENSG00000144589_8 (sequence is synthesized)
cctctttggttccaccctgagcaccgagcagccactgcccagtacttgtcaccccgggccagggatgctgctactggcttccttctcgatggcaaggtcttgtcactgacagattttcag

SEQ ID NO: 388418 - DNA, 120 bp, Artificial Sequence
  ENSG00000144589_9 (sequence is synthesized)
actcacacatccttggggctcagccccatgggcccacctttgccctggccagtggggagtactcctgaaacctcaggtggccctgacctgagtgacagcctctcctcagggggtgttgtg

SEQ ID NO: 388419 - DNA, 120 bp, Artificial Sequence
  ENSG00000144589_10 (sequence is synthesized)
acccagcccctgcttcataaggttaagagccgagtccgtgtgaggcgggcaagcatctctgaacccagtgatacggacccggagccccgaactctgaacccctctccggctggatggttc

SEQ ID NO: 388420 - DNA, 120 bp, Artificial Sequence
  ENSG00000144589_11 (sequence is synthesized)
gtgcagcagcacccggagctggagctcatgagcagcttccgggaacggttcggccgcaactggctgcagtacaggagtcacctggagccctccggaaaccctctgccggccacccccact

SEQ ID NO: 388421 - DNA, 120 bp, Artificial Sequence
  ENSG00000144589_12 (sequence is synthesized)
acttctgcacccagtgcacctccagccagctcccagggccccgacactgcacccagaccttcacccccgcaggaggaagccagaggcccccaggagtcaccacagaaaatgtcagaggag

SEQ ID NO: 388422 - DNA, 120 bp, Artificial Sequence
  ENSG00000144589_13 (sequence is synthesized)
gtcagggcggagccacaggaggaggaagaggagaaggaggggaaggaggagaaggaggagggggagatggtggaacagggagaagaggaggcaggagaggaggaagaagaggagcaggac

SEQ ID NO: 388423 - DNA, 120 bp, Artificial Sequence
  ENSG00000144589_14 (sequence is synthesized)
cagaaggaagtggaagcggaactctgtcgccccttgttggtgtgtcccctggaggggcctgagggcgtacggggcagggaatgctttctcagggtcacttctgcccacctgtttgaggtg

SEQ ID NO: 388424 - DNA, 120 bp, Artificial Sequence
  ENSG00000144589_15 (sequence is synthesized)
accttggagcgactggagctccagagtctggaggcagctgagatagagccggaggcccaggcccagaggtcgcccaggcccacgggctcagatctgctccctggagcccccatcctcagt

SEQ ID NO: 388425 - DNA, 120 bp, Artificial Sequence
  ENSG00000144589_16 (sequence is synthesized)
ctgcgcttctcctacatctgccctgaccggcagttgcgtcgctatttggtgctggagcctgatgcccacgcagctgtccaggagctgcttgccgtgttgaccccagtcaccaatgtggct

SEQ ID NO: 388426 - DNA, 120 bp, Artificial Sequence
  ENSG00000144589_17 (sequence is synthesized)
cgggaacagcttggggaggccagggacctcctgctgggtagattccagtgtctacgctgtggccatgagttcaagccagaggagcccaggatgggattagacagtgaggaaggctggagg

SEQ ID NO: 388427 - DNA, 120 bp, Artificial Sequence
  ENSG00000144589_18 (sequence is synthesized)
cctctgttccaaaagacagaatctcctgctgtgtgtcctaactgtggtagtgaccacgtggttctcctcgctgtgtctcggggaacccccaacagggagcggaaacagggagagcagtct

SEQ ID NO: 388428 - DNA, 120 bp, Artificial Sequence
  ENSG00000144589_19 (sequence is synthesized)
ctggctccttctccgtctgccagccctgtctgccaccctcctggccatggtgaccaccttgacagggccaagaacagcccacctcaggcaccgagcacccgtgaccatggtagttggagc

SEQ ID NO: 388429 - DNA, 120 bp, Artificial Sequence
  ENSG00000144589_20 (sequence is synthesized)
ctcagtcccccccctgagcgctgtggcctccgctctgtggaccaccgactccggctcttcctggatgttgaggtgttcagcgatgcccaggaggagttccagtgctgcctcaaggtgcca

SEQ ID NO: 388430 - DNA, 120 bp, Artificial Sequence
  ENSG00000144589_21 (sequence is synthesized)
gtggcattggcaggccacactggggagttcatgtgccttgtggttgtgtctgaccgcaggctgtacctgttgaaggtgactggggagatgcgtgagcctccagctagctggctgcagctg

SEQ ID NO: 388431 - DNA, 120 bp, Artificial Sequence
  ENSG00000144589_22 (sequence is synthesized)
accctggctgttcccctgcaggatctgagtggcatagagctgggcctggcaggccagagcctgcggctagagtgggcagctggggcgggccgctgtgtgctgctgccccgagatgccagg

SEQ ID NO: 388432 - DNA, 120 bp, Artificial Sequence
  ENSG00000144589_23 (sequence is synthesized)
cattgccgggccttcctagaggagctccttgatgtcttgcagtctctgccccctgcctggaggaactgtgtcagtgccacagaggaggaggtcaccccccagcaccggctctggccattg

SEQ ID NO: 388433 - DNA, 120 bp, Artificial Sequence
  ENSG00000144589_24 (sequence is synthesized)
ctggaaaaagactcatccttggaggctcgccagttcttctaccttcgggcgttcctggttgaaggcccttccacctgcctcgtatccctgttgctgactccgtccaccctgttcctgtta

SEQ ID NO: 388434 - DNA, 120 bp, Artificial Sequence
  ENSG00000144589_25 (sequence is synthesized)
gatgaggatgctgcagggtccccggcagagccctctcctccagcagcatctggcgaagcctctgagaaggtgcctccctcggggccgggccctgctgtgcgtgtcagggagcagcagcca

SEQ ID NO: 388435 - DNA, 120 bp, Artificial Sequence
  ENSG00000144589_26 (sequence is synthesized)
ctcagcagcctgagctccgtgctgctctaccgctcagcccctgaggacttgcggctgctcttctacgatgaggtgtcccggctggagagcttttgggcactccgtgtggtgtgtcaggag

SEQ ID NO: 388436 - DNA, 120 bp, Artificial Sequence
  ENSG00000144589_27 (sequence is synthesized)
cagctgacagccctgcttgcctggatccgggaaccatgggaggagctgttttccatcggactccggacagtgatccaagaggcgctggcccttgaccgatgagggtcccacgctgacctt

SEQ ID NO: 388437 - DNA, 120 bp, Artificial Sequence
  ENSG00000144589_28 (sequence is synthesized)
ggccctgacctcaggagccacgctgtagacattccctctcctggtctctgggtctggcttccaggctctggctgtggatgtcttcagcctctgggtgctggccagtgaggtcccaaatga

SEQ ID NO: 388438 - DNA, 120 bp, Artificial Sequence
  ENSG00000144589_29 (sequence is synthesized)
cccagggcttaagggagaggcgagagaatgatctggcctcaggggacaggccacctggtcaggaggaatatttttcctgcactttttctcaggtatcaataaagttgtttccaactcata

SEQ ID NO: 388439 - DNA, 120 bp, Artificial Sequence
  ENSG00000144589_30 (sequence is synthesized)
cgtggctgagtcggccctgcctcatcagtcacagaaggagagggtggagccttgtttctgagtagggtgggtgtggggcagtggggggcggtaggcctcagaggtattccagagtagaga

SEQ ID NO: 388440 - DNA, 120 bp, Artificial Sequence
  ENSG00000144589_31 (sequence is synthesized)
ttcatggagcttgggaaagggagggtcttggccccaggggcacaggctgctttgtgacccacctcagagtgtggttcacacctcttctccccagcagcactgggacgctggccccaggga

SEQ ID NO: 388441 - DNA, 120 bp, Artificial Sequence
  ENSG00000144589_32 (sequence is synthesized)
tggtggagccgggaattgaatccacagttccctgaaattgagcccgcatcttctgtacaacagggaagatgaaaaagacaggtcctctggaggctttcagtaaacgtcggctggattctg

SEQ ID NO: 388442 - DNA, 120 bp, Artificial Sequence
  ENSG00000144589_33 (sequence is synthesized)
tttacaaagctcagagtcaggatcttttatggggagtgacatgggcctggggaaggggagaggcactgagccaaggtggagacagtgaggccttcgcagagacctcccttgtacccaccc

SEQ ID NO: 388443 - DNA, 120 bp, Artificial Sequence
  ENSG00000144589_34 (sequence is synthesized)
aggcactggcccacgcgcagcacctgtacagtgcccttgcagcaactgtcagttcctggaacctggagaacctctcacttgagggcatagctgagtaacagcctcagtgtgccctgaccc

SEQ ID NO: 388444 - DNA, 120 bp, Artificial Sequence
  ENSG00000144589_35 (sequence is synthesized)
acccaggatcctcagttacccagagcctttgctctcgggcccaggctttctatgaagtggagcagcgtggctgagtcggccctgcctcatcagtcacagaaggagagggtggagccttgt

SEQ ID NO: 388445 - DNA, 120 bp, Artificial Sequence
  ENSG00000144589_36 (sequence is synthesized)
ttctgagtagggcccttccacctgcctcgtatccctgttgctgactccgtccaccctgttcctgttagatgaggatgctgcagggtccccggcagagccctctcctccagcagcatctgg

SEQ ID NO: 388446 - DNA, 120 bp, Artificial Sequence
  ENSG00000144589_37 (sequence is synthesized)
gggcccaggaggctgtggggattaagagagccagagggaagtggcagcaggcctgagggccgggggcctgtgggaggtgtccgtctggggtccgcctgctcacagctgcctctgatccac

SEQ ID NO: 388447 - DNA, 120 bp, Artificial Sequence
  ENSG00000144589_38 (sequence is synthesized)
cctctgtcaggagctgcttgccgtgttgaccccagtcaccaatgtggctcgggaacagcttggggaggccagggacctcctgctgggtagattccagtgtctacgctgtggccatgagtt

SEQ ID NO: 388448 - DNA, 120 bp, Artificial Sequence
  ENSG00000144589_39 (sequence is synthesized)
ccagggaaagtggctctgtgtaggggagtgtgaagggggagccctagggagaaggggctagagtggagagcagttgttctgcctggaggaaaaagaaaaccgtctgcctgctgcatttac

SEQ ID NO: 388449 - DNA, 120 bp, Artificial Sequence
  ENSG00000144589_40 (sequence is synthesized)
gggacacggggggatgttggtgcacagcacccaacttgaggcagccccttggggatgggaaagagaagagcctctttggtgaggaggccaggcctgagtatacccattgctctgcagtca

SEQ ID NO: 388450 - DNA, 120 bp, Artificial Sequence
  ENSG00000144589_41 (sequence is synthesized)
gggatgctgctactggcgtgagtgatcgtcctgtgtccactcttcttcccctttcctgcccagtcctcccccaccttgcaccctcttgccatccctgggtgaggggccaaggacctggac

SEQ ID NO: 388451 - DNA, 120 bp, Artificial Sequence
  ENSG00000144589_42 (sequence is synthesized)
cctgcttactgtgttcttaatacctggagctcagcaggatgggcctaccacatactccctccccctttttgtctttgctcagttccttctcgatggcaaggtcttgtcactgacagattt

SEQ ID NO: 388452 - DNA, 120 bp, Artificial Sequence
  ENSG00000144589_43 (sequence is synthesized)
tcaggtcggtgtggttggggggcgaggactgttgggggaagacacgaagggagggcgctggggagagaacagagggctggctggtgacagggtcttcctggtcagtggaaagtagggtcc

SEQ ID NO: 388453 - DNA, 120 bp, Artificial Sequence
  ENSG00000144591_0 (sequence is synthesized)
cttgcgagaagacacgtgcgcggaaggagcttgcagtagcgggcggcagagctggagtgaagggagctagtgtttaggtagcagtcaccattatgctcaaagcggtgatcctgattggag

SEQ ID NO: 388454 - DNA, 120 bp, Artificial Sequence
  ENSG00000144591_1 (sequence is synthesized)
gccctcaaaagggaactcgcttcagacctttgtcttttgaggtgcccaaaccattgtttcctgtggcaggggtccctatgatccaacaccatattgaagcctgtgcccaggtccctggaa

SEQ ID NO: 388455 - DNA, 120 bp, Artificial Sequence
  ENSG00000144591_2 (sequence is synthesized)
tgcaggagattctgctcattggcttctaccaacctgatgagcccctcacccagttcctagaagccgcccagcaggagtttaaccttccagtcaggtacctgcaggaatttgcccccctag

SEQ ID NO: 388456 - DNA, 120 bp, Artificial Sequence
  ENSG00000144591_3 (sequence is synthesized)
gcacagggggtggtctttaccattttcgagaccagatcctggctgggagccccgaggcattcttcgtgctcaatgctgatgtctgctccgacttccccttgagtgctatgttggaagccc

SEQ ID NO: 388457 - DNA, 120 bp, Artificial Sequence
  ENSG00000144591_4 (sequence is synthesized)
accgacgccagcgtcaccctttcttactccttggcactacggctaacaggacgcaatccctcaactacggctgcatcgttgagaatccacagacacacgaggtattgcactatgtggaga

SEQ ID NO: 388458 - DNA, 120 bp, Artificial Sequence
  ENSG00000144591_5 (sequence is synthesized)
aacccagcacatttatcagtgacatcatcaactgcggcatctacctcttttctcctgaagccttgaagcctcttcgggatgtcttccagcgtaatcagcaggatgggcaattggaggact

SEQ ID NO: 388459 - DNA, 120 bp, Artificial Sequence
  ENSG00000144591_6 (sequence is synthesized)
tggagtcagatcaagtccgcaggttcagccctctacgcctcccgcctctacctgagccgataccaggacactcacccagaacggctggccaagcacaccccagggggcccatggatccga

SEQ ID NO: 388460 - DNA, 120 bp, Artificial Sequence
  ENSG00000144591_7 (sequence is synthesized)
gggaatgtgtacatccacccgaccgccaaggtggccccctcggctgtgctgggccccaacgtctccatcgggaagggggtgaccgtgggtgagggtgtgcggctccgggagagcatcgtc

SEQ ID NO: 388461 - DNA, 120 bp, Artificial Sequence
  ENSG00000144591_8 (sequence is synthesized)
ctccatggagccactttgcaggagcacacgtgtgttctgcatagcatcgtgggctgggggagcaccgtgggacgctgggcccgcgtggagggtacccccagtgaccctaaccccaacgat

SEQ ID NO: 388462 - DNA, 120 bp, Artificial Sequence
  ENSG00000144591_9 (sequence is synthesized)
ccccgagcccgcatggacagtgagagcctcttcaaggacgggaagctgctgcctgctatcaccatcctgggctgccgagtccggatccctgccgaggtgctcatcctgaactcgattgtt

SEQ ID NO: 388463 - DNA, 120 bp, Artificial Sequence
  ENSG00000144591_10 (sequence is synthesized)
ctgccacacaaggagctgagccgaagcttcaccaaccagatcatcctctgagtagggctgccagaaggcccccagctcctacccactccccttgaggctgctgcctgcttggccagcctc

SEQ ID NO: 388464 - DNA, 120 bp, Artificial Sequence
  ENSG00000144591_11 (sequence is synthesized)
tgtccagaaaggaccagagaaagccaggctggatcgtcacatgccggggagcaatgtggatggcctggggactcctgggttttctccctcccgactccctaataaaccccgtgaaccttg

SEQ ID NO: 388465 - DNA, 120 bp, Artificial Sequence
  ENSG00000144591_12 (sequence is synthesized)
agtagcgggcggcagagctggagtgaagggagctagtggtaaagggagctggtggaggggtggcggcaggggtaaggggcaggggacaccctctagacggagagcgggctccgaggtcct

SEQ ID NO: 388466 - DNA, 120 bp, Artificial Sequence
  ENSG00000144591_13 (sequence is synthesized)
ggctggccctcggtgcgcccgcccctgtgttggtcccacaatccctggcaatgagaggccagggtttattggacagagtcagttgtggggttcagagggtcagcaatcaatcaatcctcc

SEQ ID NO: 388467 - DNA, 120 bp, Artificial Sequence
  ENSG00000144591_14 (sequence is synthesized)
gaatccagagatttagacccagtcgtccgtattaggactggaggggggtcaataggttcagtgtttgagatgccaagggaacctgtcttttgatttggggttcaacatacagaggtagca

SEQ ID NO: 388468 - DNA, 120 bp, Artificial Sequence
  ENSG00000144591_15 (sequence is synthesized)
cccctcagctgatggccagtggccccggggagcattcgttcctctgtgtgcacgcgtgtttcttcttttagcaaacagttaccaagggcctgctgtgtgccaggccctgtgtgagtcacc

SEQ ID NO: 388469 - DNA, 120 bp, Artificial Sequence
  ENSG00000144591_16 (sequence is synthesized)
gggggcatgagaccaggggcacagatgggcaggagggctccctccctgctggcagtggcccccagctccctgcccctgtctcccctcccatgacctcccctggtgccctcatccatgctg

SEQ ID NO: 388470 - DNA, 120 bp, Artificial Sequence
  ENSG00000144591_17 (sequence is synthesized)
gtgggccttgggcaggagtagtcctgggagcaagcggtggcggtcaggtgccctggctcatggtatctgtttcctaagatccactgagctggctctcgggtccctggggacaggtacctg

SEQ ID NO: 388471 - DNA, 120 bp, Artificial Sequence
  ENSG00000144591_18 (sequence is synthesized)
ggatgccctaggcctctgagttcttggaagtgggttgagtcagcatttgctggagttcatcctcgcctactagaaggattcttgtttggacatcaatgaatctctgagtatatagagttt

SEQ ID NO: 388472 - DNA, 120 bp, Artificial Sequence
  ENSG00000144591_19 (sequence is synthesized)
ctctgtgggccttgggcaggagtagtcctgggagcaagcgctggcatctctaccatctctctctccctttctttctgtgactgtctctgccctcaccagctgccttgctctggggtgagt

SEQ ID NO: 388473 - DNA, 120 bp, Artificial Sequence
  ENSG00000144591_20 (sequence is synthesized)
ctgagcttgatttctctgctgggatttgagatgtgtgggatttgtgaggtgttgggtccaggcagagactatattgagctttgggtttacatcttgggagagggctaagtgttgctattt

SEQ ID NO: 388474 - DNA, 120 bp, Artificial Sequence
  ENSG00000144591_21 (sequence is synthesized)
tctcacctcacttcctgcttatcttcatgctgtttccccctttcccaaccatgaactcttcccaccaggcataactccaaggaccatcattcacagatgacaatgtgaatggcgccccct

SEQ ID NO: 388475 - DNA, 120 bp, Artificial Sequence
  ENSG00000144591_22 (sequence is synthesized)
caagttatgctgtgcagctgccctgctgtcttcccctaatctagtttctcatctggcctcttcctgctcagatttcactcctatttttaaagtgtggaatgtgagatcaggcaaggatct

SEQ ID NO: 388476 - DNA, 120 bp, Artificial Sequence
  ENSG00000144591_23 (sequence is synthesized)
tggagacaatgtaaagccgtagcatggagactcttaatgataaccaagcacaaattcatatccttgatcacattgttgctcatttctttattgcttttcgtattgagccaggcaaggttt

SEQ ID NO: 388477 - DNA, 120 bp, Artificial Sequence
  ENSG00000144591_24 (sequence is synthesized)
tggtttgaattcagtctctgcctgctgtgaggtctgcaacaaataacacaccctctctgacactcagtttccttatgtgtaaaatgggggtgattagacctaccttgttgggtggtgaag

SEQ ID NO: 388478 - DNA, 120 bp, Artificial Sequence
  ENSG00000144591_25 (sequence is synthesized)
cttagaaatgatatttgtaaaatgcctagtacaacgcagacccttgataaatggtacccttacctcatgctgatctcaagcttaggctgacagataataaaaatggccgggggggagggg

SEQ ID NO: 388479 - DNA, 120 bp, Artificial Sequence
  ENSG00000144591_26 (sequence is synthesized)
gcggggtggaaatggattaatgcagcttggtaggcaaagtctttcttagagtgagtcccagttcaggttggtgggggtaataattgattgaaagatcaggcctggcatggtagctcatgt

SEQ ID NO: 388480 - DNA, 120 bp, Artificial Sequence
  ENSG00000144591_27 (sequence is synthesized)
ctgtaatcccaacgctttttgaggccgagtcaggaggatcgcttgaggccaggagttctagcctagctttggcaacatcaagagaccccttctctacaaaaagtttaaaaattagctaga

SEQ ID NO: 388481 - DNA, 120 bp, Artificial Sequence
  ENSG00000144591_28 (sequence is synthesized)
caaaaagtttaaaaattagctagatgtgatggcctggctgtagtcctagctgctctagaggctgaggcaggtggtgacatggctgtagtcttcaatactcaggaggctgaggtgggagga

SEQ ID NO: 388482 - DNA, 120 bp, Artificial Sequence
  ENSG00000144591_29 (sequence is synthesized)
cagcctgggcaacagagcgagaccctttttcacaaaaataaaacaaaacgaaaaaagatcaggcctccgacttcctccaaattcctcattgtccagaggagaaaatagcccagagtggtg

SEQ ID NO: 388483 - DNA, 120 bp, Artificial Sequence
  ENSG00000144591_30 (sequence is synthesized)
ttgtccagaggagaaaatagcccagagtggtgagtgccctggggccccacagctgagactgaaactggtttctggactttgggccagcaccaaggatttccccaacatcccctcctatta

SEQ ID NO: 388484 - DNA, 120 bp, Artificial Sequence
  ENSG00000144591_31 (sequence is synthesized)
ggctccatctcaacttgctcaccttcctcctcccctctcccttctccacttgccatctccagcagagcctcctgagtccctccccttctaacctcattctgtccctcttccttatccatc

SEQ ID NO: 388485 - DNA, 120 bp, Artificial Sequence
  ENSG00000144591_32 (sequence is synthesized)
ccagttcctcctctgtcactgcctgcccactccccttctggtccatttctcctaagccctgagtgtcccagagacgtctttcagaacagacagcaacacacagttgggcgcacacatgct

SEQ ID NO: 388486 - DNA, 120 bp, Artificial Sequence
  ENSG00000144591_33 (sequence is synthesized)
cgggtgcagacgtgtgcacgtgcacacacagacagacatgcatactctcaggctgaggctccccttggaacatagcaccagagccctgctcaccagtcccagggtcttccctcctggggc

SEQ ID NO: 388487 - DNA, 120 bp, Artificial Sequence
  ENSG00000144591_34 (sequence is synthesized)
tagaagctgttcccttctagggatccttgccttaaccccccaccgccccatctaaggcctcctctgctcatagccatttctcactcccacccgtgtctctgcttccctctccatctctcc

SEQ ID NO: 388488 - DNA, 120 bp, Artificial Sequence
  ENSG00000144591_35 (sequence is synthesized)
tggcctctctgtctctgtctctgctgagctggcatctctaccatctctctctccctttctttctgtgactgtctctgccctcaccagctgccttgctctggggtgagtctgtctgtgttt

SEQ ID NO: 388489 - DNA, 120 bp, Artificial Sequence
  ENSG00000144591_36 (sequence is synthesized)
cattccatccaatgagggggagggtaacttggagggggtaaagggctgaatggggatgagaatgtgaaaatggggggaactccttatggaaatggggcagggatgggaagcaggcctctg

SEQ ID NO: 388490 - DNA, 120 bp, Artificial Sequence
  ENSG00000144591_37 (sequence is synthesized)
cctggggctcccttgtgatagcacccacccaagtgggggctgggtgggagaggttcctgggatgtgagcagccacatcccagagagggccgaaccagacctggagagaggggcttagaga

SEQ ID NO: 388491 - DNA, 120 bp, Artificial Sequence
  ENSG00000144591_38 (sequence is synthesized)
ggtggtgggaatcctcctactcctgtccctgggagactgtgttagccccacagtcggggctcagctgggggactaatgtcagcattcttcctctctgccagggaggactcaccaggcttg

SEQ ID NO: 388492 - DNA, 120 bp, Artificial Sequence
  ENSG00000144591_39 (sequence is synthesized)
tccacccgaccgccaaggtggccccctcggctgtggtgagcactggtcccagccccagggagggaagggtggtggtcggatggatggagggtgcccacgctgcctgagttctgggtgccg

SEQ ID NO: 388493 - DNA, 120 bp, Artificial Sequence
  ENSG00000144591_40 (sequence is synthesized)
gtttcttcactttgtcacagcctattgtgtgtcctcgagcaggtcacttatgccttatctgttctagaagggagttgggtttggggatcctccaagtccctccagggcttatggtgtgtg

SEQ ID NO: 388494 - DNA, 120 bp, Artificial Sequence
  ENSG00000144596_0 (sequence is synthesized)
gagttggtgggcagcaggggagacaatagcgaacatgctgtgtgggctcagccgggagacccctggagaggcggacgatgggccctactccaaaggaggcaaggacgcaggaggggccga

SEQ ID NO: 388495 - DNA, 120 bp, Artificial Sequence
  ENSG00000144596_1 (sequence is synthesized)
cgtttccctggcgtgccgcagacagagcattccagaggagttccgagggatcactgtggtggagctgatcaagaaagaaggcagcacgctgggcctgactatctcaggtggcaccgacaa

SEQ ID NO: 388496 - DNA, 120 bp, Artificial Sequence
  ENSG00000144596_2 (sequence is synthesized)
ggatggaaagcccagggtctccaacctgagacctgggggacttgcagccaggagtgatctgctgaacattggtgactatattcggtctgtgaacgggatccacctgaccaggctccgcca

SEQ ID NO: 388497 - DNA, 120 bp, Artificial Sequence
  ENSG00000144596_3 (sequence is synthesized)
cgatgagatcatcaccctgctcaagaatgtgggcgagcgcgtggtgctggaggtggagtatgagctgcccccgcccgctcctgagaataaccccaggatcatttcaaagacagtggacgt

SEQ ID NO: 388498 - DNA, 120 bp, Artificial Sequence
  ENSG00000144596_4 (sequence is synthesized)
ctccctctacaaggagggcaatagctttggctttgtccttagaggaggtgcccatgaagatgggcacaagtcccgcccgcttgtcctgacctacgtgcggcccggtggccctgccgacag

SEQ ID NO: 388499 - DNA, 120 bp, Artificial Sequence
  ENSG00000144596_5 (sequence is synthesized)
ggagggctccctgaaggtgggcgacaggctgctcagtgtcgatggaatcccgctgcacggggccagccatgccaccgccctggccaccctgcggcagtgcagccacgaggcactctttca

SEQ ID NO: 388500 - DNA, 120 bp, Artificial Sequence
  ENSG00000144596_6 (sequence is synthesized)
ggtggagtatgatgtggccacccctgacacggtggctaatgcttcgggacccttgatggtggaaatagtcaagacgccagggtctgccctggggatctcgctcaccaccacctccctccg

SEQ ID NO: 388501 - DNA, 120 bp, Artificial Sequence
  ENSG00000144596_7 (sequence is synthesized)
gaacaagtcagtcattaccatcgaccgcatcaagccagccagcgtggtggacaggagcggagccctgcaccctggagaccacatcctgtccatcgatggcaccagcatggaacactgctc

SEQ ID NO: 388502 - DNA, 120 bp, Artificial Sequence
  ENSG00000144596_8 (sequence is synthesized)
gctgcttgaggccaccaagctcctggccagcatttcagagaaggtgcggctggagatcctgcctgtgccccagagtcagcggccactgaggccctcagaggcagtgaaagtgcagaggag

SEQ ID NO: 388503 - DNA, 120 bp, Artificial Sequence
  ENSG00000144596_9 (sequence is synthesized)
tgagcagctgcaccgctgggacccctgcgtgccctcctgccacagcccccggcccggccactgcaggatgcccacctgggccacacctgctggccaggaccaaagccgatccttgtcttc

SEQ ID NO: 388504 - DNA, 120 bp, Artificial Sequence
  ENSG00000144596_10 (sequence is synthesized)
aactcccttttcctcgccgaccttgaaccacgccttttcctgcaacaaccccagcacccttccccgtggatcccagcccatgagtcctcgaactacaatggggcggaggaggcagcgaag

SEQ ID NO: 388505 - DNA, 120 bp, Artificial Sequence
  ENSG00000144596_11 (sequence is synthesized)
aagggaacacaagagctcgttgtcgctagcctccagcacggtggggccgggcgggcagattgtgcacacggagaccacggaggtcgtgctctgtggagaccccctcagcggctttggcct

SEQ ID NO: 388506 - DNA, 120 bp, Artificial Sequence
  ENSG00000144596_12 (sequence is synthesized)
ccagctccagggcggcatcttcgccaccgagaccctgtcctccccacccctcgtgtgcttcatcgagcctgacagtccggctgagaggtgtgggctgctgcaggtgggggaccgtgtcct

SEQ ID NO: 388507 - DNA, 120 bp, Artificial Sequence
  ENSG00000144596_13 (sequence is synthesized)
gtccatcaatggcattgccaccgaggacgggactatggaggaagccaaccagctcctgcgggacgccgcactggcccacaaggtcgtgctggaggtggagttcgatgtggcggagtccgt

SEQ ID NO: 388508 - DNA, 120 bp, Artificial Sequence
  ENSG00000144596_14 (sequence is synthesized)
catcccaagcagtggcaccttccacgtgaagctgcccaagaagcgcagcgtggagctgggcatcaccatcagctcggccagcaggaaacgaggggagcccttgatcatctccgacatcaa

SEQ ID NO: 388509 - DNA, 120 bp, Artificial Sequence
  ENSG00000144596_15 (sequence is synthesized)
gaaaggcagcgtggcacacaggacgggcaccctggagccaggcgacaagctactggccattgacaatatccgcctggacaactgccccatggaggacgccgtgcaaatcctgcggcagtg

SEQ ID NO: 388510 - DNA, 120 bp, Artificial Sequence
  ENSG00000144596_16 (sequence is synthesized)
cgaggacctggtgaagctgaagatccggaaggacgaggacaactctgatgagctggagaccacaggtgccgtcagttacacagtggagctgaagcgctacgggggtcccctgggcatcac

SEQ ID NO: 388511 - DNA, 120 bp, Artificial Sequence
  ENSG00000144596_17 (sequence is synthesized)
catttcgggcacggaggaaccttttgaccccattgtcatctcaggcctcaccaagcgtggcctggctgagaggactggtgccatccacgtgggggaccgcattctggccatcaacaacgt

SEQ ID NO: 388512 - DNA, 120 bp, Artificial Sequence
  ENSG00000144596_18 (sequence is synthesized)
tagcctcaagggccggccgctgagcgaggccatccacctcctgcaggtggctggagagaccgtcacactgaagatcaagaagcaactagaccgtcccctcctaccccgcaagtcgggcag

SEQ ID NO: 388513 - DNA, 120 bp, Artificial Sequence
  ENSG00000144596_19 (sequence is synthesized)
cctcagtgagaccagtgatgctgatgaggacccagcagatgccctgaaaggaggcctgccagcagcccgcttctcgccggctgtgcccagtgtggacagtgctgtggagtcttgggacag

SEQ ID NO: 388514 - DNA, 120 bp, Artificial Sequence
  ENSG00000144596_20 (sequence is synthesized)
ctcggccaccgagggtggctttgggggcccagggtcctatacaccacaggcagcagcccggggcacgaccccccaggagcggaggcctggctggctgaggggcagccccccacccaccga

SEQ ID NO: 388515 - DNA, 120 bp, Artificial Sequence
  ENSG00000144596_21 (sequence is synthesized)
gccccggaggacgagctataccccaaccccagctgacgagagctttccagaggaggaggaggaggatgattgggagccgccaacgagcccagcccctggccctgcccgagaggagggctt

SEQ ID NO: 388516 - DNA, 120 bp, Artificial Sequence
  ENSG00000144596_22 (sequence is synthesized)
ctggcgcatgtttggagaagctctcgaagacctggagtcatgtggtcagtcagagctgctgagggaactggaggcatccatcatgacgggcaccgtgcagagggtggccctcgagggcag

SEQ ID NO: 388517 - DNA, 120 bp, Artificial Sequence
  ENSG00000144596_23 (sequence is synthesized)
gcctggccaccggccttggcagaggggccgggaggtacgagcctctcctgcagaaatggaggagctgttgctgcctacacccttggagatgcacaaggtgaccctgcacaaggaccccat

SEQ ID NO: 388518 - DNA, 120 bp, Artificial Sequence
  ENSG00000144596_24 (sequence is synthesized)
gcggcatgactttggtttcagcgtctcagatggcctcctggaaaaaggtgtctatgtccacactgtgcgccctgatgggccagcccaccgtggaggcctccagcccttcgacagggtcct

SEQ ID NO: 388519 - DNA, 120 bp, Artificial Sequence
  ENSG00000144596_25 (sequence is synthesized)
gcaggtcaaccacgtccgtacacgggacttcgactgctgcctggcggtgccactcctggccgaggcgggtgatgtcttggagctgatcatcagccgcaagccgcacacggcacacagcag

SEQ ID NO: 388520 - DNA, 120 bp, Artificial Sequence
  ENSG00000144596_26 (sequence is synthesized)
ccgggccccccgatcgccaggccccagcagtccccggatgctctgaagtcagcatgtgggccgaactcctaaggggccacccaggcagatcctggctcccagacacgtagctgggctgga

SEQ ID NO: 388521 - DNA, 120 bp, Artificial Sequence
  ENSG00000144596_27 (sequence is synthesized)
gaagcggccacccactcattcatctgttggtctggcagactctgagcctgggatgatgcttggtctctgttccccaggtctgtggtgactggggtgccaggcagggaggtcctgccctag

SEQ ID NO: 388522 - DNA, 120 bp, Artificial Sequence
  ENSG00000144596_28 (sequence is synthesized)
ttggagtgacagctggggtctctcgccaagttgggtctccaagatgcccagaggagcctcccttaagaagggttggcacaggctgctcagccgagaggagagaggcctgggggctgtccc

SEQ ID NO: 388523 - DNA, 120 bp, Artificial Sequence
  ENSG00000144596_29 (sequence is synthesized)
aggtctctgtggggcctccttggagaggtcgaagatgtagggagcacttcctcccagcaaagccatggagctggaatgagctgcaaggaggagtgagttctcggtcacaggaggtgagca

SEQ ID NO: 388524 - DNA, 120 bp, Artificial Sequence
  ENSG00000144596_30 (sequence is synthesized)
ggcaggagctggataccccagcgcagtcatgcattggggtatgaggcattcccatgatgcgtgcacacgcgcttgggggttggcttcctgatggggagccacttcatctagagactcggc

SEQ ID NO: 388525 - DNA, 120 bp, Artificial Sequence
  ENSG00000144596_31 (sequence is synthesized)
caccaggaaggatgctgcttcggatgggagcccagctccttcgcttctccagaataggggtttggggcttgctagtcctgagattctgagattcccagaatctggtccccacttatgaga

SEQ ID NO: 388526 - DNA, 120 bp, Artificial Sequence
  ENSG00000144596_32 (sequence is synthesized)
tgattctgaaagtgggtgattctttgatttcagcatctcagtctgaagcttctgggacttgagactgtggttctgggcccattgggcaggctctatgggccttgggctctcagccctcct

SEQ ID NO: 388527 - DNA, 120 bp, Artificial Sequence
  ENSG00000144596_33 (sequence is synthesized)
gcttcttctgtaggccgtgtggccactgacccatctgcacgtccgctcagcccaagcccctccatgtgggaggggtcattttggggcaaaagaccctggagcttccattcacctgccatc

SEQ ID NO: 388528 - DNA, 120 bp, Artificial Sequence
  ENSG00000144596_34 (sequence is synthesized)
cagtgaaaattgaaaagcgatggacgcaggacctgtgaggcggtagcgctcctctttacagccagatcagtggaggaagaggagaaagagggagggagatgggagagaaatgggccagag

SEQ ID NO: 388529 - DNA, 120 bp, Artificial Sequence
  ENSG00000144596_35 (sequence is synthesized)
aaaaagatgggacactcttgcccagtggagggtgtccaaagtgcttattcaaagaagtctattcccacttgaaatctggaagcaccagcatcccttaaaatcattgtcctcagtgtccac

SEQ ID NO: 388530 - DNA, 120 bp, Artificial Sequence
  ENSG00000144596_36 (sequence is synthesized)
aaatcagagaccctcttcattttgagaagggtgtgggcctcccctggtggtctagtgagtggtgcctgggatggagtgggcgggcaggtgtagccagggctggggatgtgctttgcctgg

SEQ ID NO: 388531 - DNA, 120 bp, Artificial Sequence
  ENSG00000144596_37 (sequence is synthesized)
cccagttctcacaggggtctcaggaaaacggggcacccactcccacctccatctgtctccaacctggggtccctggaggccagaaaagtgctcttccatttgagggaacagatgaggagt

SEQ ID NO: 388532 - DNA, 120 bp, Artificial Sequence
  ENSG00000144596_38 (sequence is synthesized)
caagaggtctgttcttttcaccctgggtctgttacctgtttgctgtgtgaccctgtctgggttggacccccagcccctctggacgatcacgggtggacagtctgagcagacacaggcctc

SEQ ID NO: 388533 - DNA, 120 bp, Artificial Sequence
  ENSG00000144596_39 (sequence is synthesized)
ctggtcagggccggaaccatctctgccgacccaccaaggcccccttggggacctgcccacgctgtctcctggaggcctgcctcccttacccctcccctccacttcgctgggctctgcccc

SEQ ID NO: 388534 - DNA, 120 bp, Artificial Sequence
  ENSG00000144596_40 (sequence is synthesized)
ttggtgccctccctgagggccctgcatgcttgtgcctggggtgctcagcgcctctgctatcttggattcccgtgtactcagcccagagtgaaagggcactgtctacctgtcacagggcac

SEQ ID NO: 388535 - DNA, 120 bp, Artificial Sequence
  ENSG00000144596_41 (sequence is synthesized)
caagtgaaagccaagagccctcacttttgagggtgagggacagcacagcagaggtgtggcttctggatgcaagcagccatagctgtgtgaccttggacaggtggctcagcctctctggac

SEQ ID NO: 388536 - DNA, 120 bp, Artificial Sequence
  ENSG00000144596_42 (sequence is synthesized)
ctctgctaagcaacagggctggacaggacacactctcagggcctctcggcttgggaaaactgcattgactccaggactccaggcgagggaagatgcacccgactctaactaatacccccc

SEQ ID NO: 388537 - DNA, 120 bp, Artificial Sequence
  ENSG00000144596_43 (sequence is synthesized)
tccctcctcgggctgaggcctctgccattctcccaaaagtatgcaatcaggcccgcggtgggcctcccagccatgccggcctcctcatatgcaatatttcttctggcttctcatggggat

SEQ ID NO: 388538 - DNA, 120 bp, Artificial Sequence
  ENSG00000144596_44 (sequence is synthesized)
ggttcatccccgacttgaaatttcctgacacctttccccagtgagcgccctgcctgcctatgcattttgggaacagcccctgtgacatgtccccttccacctgccctctcccccaaagct

SEQ ID NO: 388539 - DNA, 120 bp, Artificial Sequence
  ENSG00000144596_45 (sequence is synthesized)
gtatttttctctggctgagattagaacacattccttgtaaagtatttttctacatcgggttttcttagggctctcgggaagcacaaggggctgtattgcaaaggccgcttatggtctgtt

SEQ ID NO: 388540 - DNA, 120 bp, Artificial Sequence
  ENSG00000144596_46 (sequence is synthesized)
tggggccctcgtctaagtctttgtcccaccaggggttgcagtggcttgggggtaggtgccatggggatgattttttaaaataaaattatttaaatccacctagagtagaagtttgctttt

SEQ ID NO: 388541 - DNA, 120 bp, Artificial Sequence
  ENSG00000144596_47 (sequence is synthesized)
taaaaaaatcatggattggcaagagtcagcttctgtatgggtctggtgacatctcacctgcttttgatgattcattaattcaaaaagtttgccatttgcttccatcatccagcccctggg

SEQ ID NO: 388542 - DNA, 120 bp, Artificial Sequence
  ENSG00000144596_48 (sequence is synthesized)
caacatgaatcagacagatttaggtcatgtctgcacattctggtggcaggcagacaatcaacaagtaagcaaataaataattatttcaaaaggcatcaagtgcaacaaagaaaacaaggg

SEQ ID NO: 388543 - DNA, 120 bp, Artificial Sequence
  ENSG00000144596_49 (sequence is synthesized)
agtaacgggatagagggaccagggtgaggggctttagctcacaatattaggaggggtttctctcaagaggcgacatttgcaatgagacctgaagacaggagccagcctccatggagacct

SEQ ID NO: 388544 - DNA, 120 bp, Artificial Sequence
  ENSG00000144596_50 (sequence is synthesized)
ggaggaagagtgtctcaggcagcgggcacagctagtgcaaaggccctgagataggaacgagtttgacggtctcaaggaagagaaagaaggcctgggaggggaatggggctggagactagg

SEQ ID NO: 388545 - DNA, 120 bp, Artificial Sequence
  ENSG00000144596_51 (sequence is synthesized)
ttggaggtagcaggaatcagtcgtgaaggcttgggtagggggagcaaatttgattctctgcgcagcagaaagccagaggcaggcagtggtgcctgcatatggagtctctttagcccaggt

SEQ ID NO: 388546 - DNA, 120 bp, Artificial Sequence
  ENSG00000144596_52 (sequence is synthesized)
tgggaaggtagtggcaggagggcagcctcaggtctggctgctgccctggagtgtccagagagtgtctagggcaggtgagctacagggtctgggacccagaggccagggccaggccccact

SEQ ID NO: 388547 - DNA, 120 bp, Artificial Sequence
  ENSG00000144596_53 (sequence is synthesized)
ggggaggccacagttctgtgagcagaggaagagcttctttccaggaagcgagtactctgtcttgggagtggtgtaggcagggggaaggccaagggaggcagcaggccttgctctaagcgc

SEQ ID NO: 388548 - DNA, 120 bp, Artificial Sequence
  ENSG00000144596_54 (sequence is synthesized)
tttgcaagagcttgctggatcctcccaatagcctttggaggtgggctctattcctgtcccatcattacagatgaggaaacaggcacagagaggttacgtaatttgcccaagtccacacag

SEQ ID NO: 388549 - DNA, 120 bp, Artificial Sequence
  ENSG00000144596_55 (sequence is synthesized)
gtagtaagggatggaaccagggcttgaacacaagccacatggcccagtacacatagagagaggcaggcaggtaggcataggctgtcagaaagagccagaaaatgggggtagggtggtctt

SEQ ID NO: 388550 - DNA, 120 bp, Artificial Sequence
  ENSG00000144596_56 (sequence is synthesized)
ctattctaacattgtctataaatgagttactgagaattttgtctggttagttgggcaaagggctcaactgactcccgagtttgtccatcccaaagggtggggggcgctgttggcaggaag

SEQ ID NO: 388551 - DNA, 120 bp, Artificial Sequence
  ENSG00000144596_57 (sequence is synthesized)
gctgccccaaacatggacctgttgtgaccccagagagcccctaactgggtattaatgagcgcctgcacctgacggtgggggagtgggagaagggcaatcaggtttgctccccctctaccc

SEQ ID NO: 388552 - DNA, 120 bp, Artificial Sequence
  ENSG00000144596_58 (sequence is synthesized)
tttcccccactccgccacccgctttctgcccttctggcaggtcagcccaaggctaaagaggagggactgaaagccgcagcaggtgagcacctaaggccaagagcatcacctccaatcatc

SEQ ID NO: 388553 - DNA, 120 bp, Artificial Sequence
  ENSG00000144596_59 (sequence is synthesized)
ctggtggccttgatggggacaatggtttattccagatggggaaactgaggctcaggtgactgctgccagatctcccagctgtacagggctgggcatgtagcaggtagaatcagtagagcc

SEQ ID NO: 388554 - DNA, 120 bp, Artificial Sequence
  ENSG00000144596_60 (sequence is synthesized)
agtagagccaagagctcatgggcccgggtgcgaatccaggttctttcatggacttgctgtgtacccctgagtgagcaagctgcttcctctgtgagcctccatgtgggaacctctaacctg

SEQ ID NO: 388555 - DNA, 120 bp, Artificial Sequence
  ENSG00000144596_61 (sequence is synthesized)
ggaaaatacctacctttgaggagcgtcctgggattggacgggaagccctttataaaatgtaaagcgtttggcaaacgttgagggggaaatacctcaccagaacacaacccacacatgttg

SEQ ID NO: 388556 - DNA, 120 bp, Artificial Sequence
  ENSG00000144596_62 (sequence is synthesized)
gatgttaaaaaggaaatgtttattttcatgttataaggtgattacaaactcctctaaaaaaagcaaagatgaatttaaaatattgatatacatatttatctaaaaagcaaaagagaaaaa

SEQ ID NO: 388557 - DNA, 120 bp, Artificial Sequence
  ENSG00000144596_63 (sequence is synthesized)
aacccctgcaaaatacagggaatcatatcataaaacatttatacacaaaagcttgtatactgcaagactgaactacacaccaaggatcttgttcaaatacaaatgttcctcctcagaaaa

SEQ ID NO: 388558 - DNA, 120 bp, Artificial Sequence
  ENSG00000144596_64 (sequence is synthesized)
atgcgcctgtcctccctgactgaagaggctgtagatggagggaatggaggcgagtggggtgaggatctgttagagcagttcacatgcattccttcccgcgtggttgaagctaagactgct

SEQ ID NO: 388559 - DNA, 120 bp, Artificial Sequence
  ENSG00000144596_65 (sequence is synthesized)
ccagagtggcctctgtgccctggtgaaggccagggtcttcatggcgagcctctccctgaccactgccagggtaccggtggccaaattgacccctccctggggaggggagggagggccaag

SEQ ID NO: 388560 - DNA, 120 bp, Artificial Sequence
  ENSG00000144596_66 (sequence is synthesized)
ggagcgcccagcctgtgccagttagcgcaagcagctctggagcgggcacaggagcgccggctccaggcgtgggaggctggggcaggctgcacagggctctgccggagggcaggagggcac

SEQ ID NO: 388561 - DNA, 120 bp, Artificial Sequence
  ENSG00000144596_67 (sequence is synthesized)
accgctctccaccccgtctcatctgcccctgttctaactggccaccgacagtcctggtcgcccctaactgcgtctttcccctattccgtgtcaccaaccactgccccggggccccagaac

SEQ ID NO: 388562 - DNA, 120 bp, Artificial Sequence
  ENSG00000144596_68 (sequence is synthesized)
gaactgccaccgaggacgcccgcctgcctgcccgcccacccaccctatggcccctcgagcccaacgctgggccctggggccccgaagactcctcaggccccagcccgcccacccgcctgc

SEQ ID NO: 388563 - DNA, 120 bp, Artificial Sequence
  ENSG00000144596_69 (sequence is synthesized)
caccagggcctgggtggcagggatcatgccagatggagtgggtagaacctggagactggccacaagcatccatacctcgcctaggggctgtgcctacaaccgcagtatgctgtcaccagg

SEQ ID NO: 388564 - DNA, 120 bp, Artificial Sequence
  ENSG00000144596_70 (sequence is synthesized)
aggtggtgggactctatagccaatgtcattttacatatttagtctccagatgcttttcctttagcggggagggttttggaagcattagctgaataagtcgttccctgacctaccacgccc

SEQ ID NO: 388565 - DNA, 120 bp, Artificial Sequence
  ENSG00000144596_71 (sequence is synthesized)
acactccactgccctgcactaagtaacggtggtgtagggtttcacctagcttgggattttcaaagctggtctaaagtcttgaagtttgagtaactgtctggaattcagccctggcctgag

SEQ ID NO: 388566 - DNA, 120 bp, Artificial Sequence
  ENSG00000144596_72 (sequence is synthesized)
cctaccagccatggactcaagcctgagttctgccgtcgtctctgtgagcatgggcaggccctttcctctctctcagtggtgggctaagtgggattaggggagaggatccctctaagcctc

SEQ ID NO: 388567 - DNA, 120 bp, Artificial Sequence
  ENSG00000144596_73 (sequence is synthesized)
acttgttcgacctgtaaaatgggcaagggtttaccctccctgtaatctctgtgactgatcacccagtcctcctggaatgagctttgggcacatctaccggcctggagatgcgactgaggg

SEQ ID NO: 388568 - DNA, 120 bp, Artificial Sequence
  ENSG00000144596_74 (sequence is synthesized)
gtgaaagaattgcccttggtattggggcagcaagaaagaggctaatactaattccatgtgtgtgctgtttggatttgaatgtaatttatgtgtatctcagttctgactttgaagaacaca

SEQ ID NO: 388569 - DNA, 120 bp, Artificial Sequence
  ENSG00000144596_75 (sequence is synthesized)
ggaccgttaaggtaagtattcagtgggaaaatctgccaagcaatgaagtaggcttggttggggagagtgagaggagaaagttgtaccggaaaatgatggtgaaagctgctaccgagactg

SEQ ID NO: 388570 - DNA, 120 bp, Artificial Sequence
  ENSG00000144596_76 (sequence is synthesized)
agaacaaagtctggagcttcctagagatcagggaaaaggggaaataaggtgaggtcacagaagggaggcaagccatttaacagagagaagactttggtcatgttacccaccccttgcacc

SEQ ID NO: 388571 - DNA, 120 bp, Artificial Sequence
  ENSG00000144596_77 (sequence is synthesized)
atctcttgggagggcgaatttattgttggtgtctcataagagggtccatggatagcaaggacaaggtcctcaaacaggttttattgaaggagcctgctcaggggctgtgtgggagcctct

SEQ ID NO: 388572 - DNA, 120 bp, Artificial Sequence
  ENSG00000144596_78 (sequence is synthesized)
ggatgggaaggggtgggtggatgattcctgcttcttgtcaaatcctgtccaggaggtgcccatgaagatgggcacaagtcccgcccgcttgtcctgacctacgtgcggcccggtggccct

SEQ ID NO: 388573 - DNA, 120 bp, Artificial Sequence
  ENSG00000144596_79 (sequence is synthesized)
gccgacaggtgagccgaggcagaagaaatccacacactgcactgacctgccccaactcccctgcgaagaaggtggagtggggtcaccatgccccttccccagatgaagagatcgaggccc

SEQ ID NO: 388574 - DNA, 120 bp, Artificial Sequence
  ENSG00000144596_80 (sequence is synthesized)
tgagggaacactccctgcccggtgtcattcagggagttgttgatggaaccgggatgtaaccccaaatgagggaaacctcgagccctttcttccccaacatactgctgtctcaggggttgg

SEQ ID NO: 388575 - DNA, 120 bp, Artificial Sequence
  ENSG00000144596_81 (sequence is synthesized)
cctttcctgctccttggttttcccgtctgtggaatggtccctaagagttgctatgagagatttgggggcacgctgattggccactgctgtagccgtctgtgactcagtctcctgggtcct

SEQ ID NO: 388576 - DNA, 120 bp, Artificial Sequence
  ENSG00000144596_82 (sequence is synthesized)
ggctgatcgacccagctcggccccgcctgggcccagcccagaagggccaggaggagagaatgtggggaaagaacatgtccagttcccagcccctgatccctcggcctccccagtgggaga

SEQ ID NO: 388577 - DNA, 120 bp, Artificial Sequence
  ENSG00000144596_83 (sequence is synthesized)
ttcctggccattttaagagaagcctggaacggccttgtcagaaatctaaatctgtccttgggacagggccctgtgatgagctattcatagaacccccgagaatagctttggccacctgtt

SEQ ID NO: 388578 - DNA, 120 bp, Artificial Sequence
  ENSG00000144596_84 (sequence is synthesized)
gggagaggcgttccaggctggggatgcgacccaaaccgaggtgaaccctgctggggcccctcccctggcccctgttgagttctttcccaggcgcgggttgtcatcaggccagaatcaccg

SEQ ID NO: 388579 - DNA, 120 bp, Artificial Sequence
  ENSG00000144596_85 (sequence is synthesized)
ctgagaaaccagggtgagggtggagcaatgggaagggaccaggacggctcagagcagcccccaatgccgtgtggcatgggcacagcttgcaccctctctgggccctggtgctgtcctttg

SEQ ID NO: 388580 - DNA, 120 bp, Artificial Sequence
  ENSG00000144596_86 (sequence is synthesized)
tccctgaggcaggagttgggggtgacgcttgaagagcacccccagctcagacatttcagggttctgcactgagtctgtgaattactgcacacccagaggagtggcaggcggcagagccac

SEQ ID NO: 388581 - DNA, 120 bp, Artificial Sequence
  ENSG00000144596_87 (sequence is synthesized)
cccatcctgtcttcatcccccccttgctttatgcagctccccactcctggagtggctcattccttcactcactcatgcgccccttcacccgtcccctcctccccttcctcccccacccat

SEQ ID NO: 388582 - DNA, 120 bp, Artificial Sequence
  ENSG00000144596_88 (sequence is synthesized)
gccacccctggtgagttgggggcctgagtgtgtgggttggggcaggaggaggcctgggatggggggaggtggcagtggccatggatctttaccactgcaaaggctgcatgaccttatgac

SEQ ID NO: 388583 - DNA, 120 bp, Artificial Sequence
  ENSG00000144596_89 (sequence is synthesized)
cttgggccagtcacagcttctctgggcagtaaatagtatgtgctaggcattgtttgatgtgctggggatccagcctagaacaacagaattgaggtgtctgttctcatggagctggcattc

SEQ ID NO: 388584 - DNA, 120 bp, Artificial Sequence
  ENSG00000144596_90 (sequence is synthesized)
tggtggagagaggacagtatccagaatagataagatatggtgtatgtcagttggcaataagtgctatggaaaaaagaaaagaggcaggggagagagatgggacaggctgggggatgctct

SEQ ID NO: 388585 - DNA, 120 bp, Artificial Sequence
  ENSG00000144596_91 (sequence is synthesized)
ctcactaggggagtgagggaatgagcgaggcatggaatgtccagggacagcattccaggagggcggaagagtaagtgcaaaggccctgaggcaggagcatggccagcatggttggtcaca

SEQ ID NO: 388586 - DNA, 120 bp, Artificial Sequence
  ENSG00000144596_92 (sequence is synthesized)
gtgaggaggctgccgtggttggcacaggtgagtgaaaggaggtaagggcagagcagggtgaggtggaagccgggaggccataggaagcggcagcagctgtccaagcgagagctaagggac

SEQ ID NO: 388587 - DNA, 120 bp, Artificial Sequence
  ENSG00000144596_93 (sequence is synthesized)
tgaaccaggctggtggctaaggaggggagaaggcacgggattcaggaaatatgatgacggtccagctggcctgatctgctgagatttagacatgggtgggcgagggcaggagctaagggt

SEQ ID NO: 388588 - DNA, 120 bp, Artificial Sequence
  ENSG00000144596_94 (sequence is synthesized)
gcggccaaagttttaatttccagccactgggtgtgttaatggaggtgccatttcctgagatggggatgggttgtagtgaactttacagtttagtgctggtataccacaggctcttcataa

SEQ ID NO: 388589 - DNA, 120 bp, Artificial Sequence
  ENSG00000144596_95 (sequence is synthesized)
actcaagcaaattcatttcacccagcaaagccctgggatcacagcccctcagacctgagctcctgcccctcctccactgctatcttatctgtcaaattgatataacatttggtagaagat

SEQ ID NO: 388590 - DNA, 120 bp, Artificial Sequence
  ENSG00000144597_0 (sequence is synthesized)
ctctctcacccccacgcagaggagagaacttgcttctggacccgggtgggtgccggctcggctctccttgtcttccagagcggtggcccggaagcacagtcctcccagacgccagcgcca

SEQ ID NO: 388591 - DNA, 120 bp, Artificial Sequence
  ENSG00000144597_1 (sequence is synthesized)
gaagctcggatcgcggctgcaccgggagagcgccgatctgggtgcgaggcaggtgcggggccatgaatgggaccgcaaacccgctgctggaccgcgaggaacattgcctgaggctcgggg

SEQ ID NO: 388592 - DNA, 120 bp, Artificial Sequence
  ENSG00000144597_2 (sequence is synthesized)
agagcttcgagaagcggccgcgggcctccttccacactattcgttatgattttaaaccagcatctatagacacttcctgtgaaggagagcttcaagttggcaaaggagatgaagtcacaa

SEQ ID NO: 388593 - DNA, 120 bp, Artificial Sequence
  ENSG00000144597_3 (sequence is synthesized)
ttacactgccacatatccctggatccacaccacccatgactgtgttcaaggggaacaaacggccttaccagaaagactgtgtgcttattattaatcatgacactggtgaatatgtgctgg

SEQ ID NO: 388594 - DNA, 120 bp, Artificial Sequence
  ENSG00000144597_4 (sequence is synthesized)
aaaaactcagtagcagcattcaggtgaagaaaacaagagctgagggcagcagtaaaatccaggcccgaatggaacagcagcccactcgtcctccacagacgtcacagccaccaccacctc

SEQ ID NO: 388595 - DNA, 120 bp, Artificial Sequence
  ENSG00000144597_5 (sequence is synthesized)
caccacctatgccattcagagctccaacgaagcctccagttggacccaaaacttctcccttgaaagataacccctcacctgaacctcagttggatgacatcaaaagagagctgagggctg

SEQ ID NO: 388596 - DNA, 120 bp, Artificial Sequence
  ENSG00000144597_6 (sequence is synthesized)
aagttgacattattgaacaaatgagcagcagcagtgggagcagctcttcagactctgagagctcttcgggaagtgatgacgatagctccagcagtggaggcgaggacaatggcccagcct

SEQ ID NO: 388597 - DNA, 120 bp, Artificial Sequence
  ENSG00000144597_7 (sequence is synthesized)
ctcctccgcagccttcacaccagcagccctacaacagtaggcctgccgttgccaatggaaccagccggccacaaggaagcaaccagctcatgaacaccctcagaaatgacttgcagttga

SEQ ID NO: 388598 - DNA, 120 bp, Artificial Sequence
  ENSG00000144597_8 (sequence is synthesized)
gtgagtctggcagtgacagtgatgactagtgctggatctttcgaaacctactttttggtgcacaaacatgccgcaagactgagctactttggcgtggagtccattgcaagaggaaaatgt

SEQ ID NO: 388599 - DNA, 120 bp, Artificial Sequence
  ENSG00000144597_9 (sequence is synthesized)
tatggatcagtgactgtagtaggagtttgaggctctggaactctcacatattcaagtctttaacttagtggtgatgggtgattttctcgtgtcatttttgaacaatctcatctttcaaag

SEQ ID NO: 388600 - DNA, 120 bp, Artificial Sequence
  ENSG00000144597_10 (sequence is synthesized)
tttaagtagacctgtagaagagctaacagaattatatttctatttagttaaaattgttaatgaaaaacagataaatgtgccctggtctaagttactcaaaggccatatcttcaccaggcc

SEQ ID NO: 388601 - DNA, 120 bp, Artificial Sequence
  ENSG00000144597_11 (sequence is synthesized)
agagattcagttttaaacctcagcagccatcagtttggccaagtggttggtaccagtggaatgaagtctttgatgggtaggagagagagggaaaacctcaaactacatcatagaagtatg

SEQ ID NO: 388602 - DNA, 120 bp, Artificial Sequence
  ENSG00000144597_12 (sequence is synthesized)
ttaaaaccactttaaattgttgacacaaagtggtaaggaagttttgtctgactcagcctgacaagcctggatagaaatggacctcagaatacagaatggagtccttgagtgtcagttggt

SEQ ID NO: 388603 - DNA, 120 bp, Artificial Sequence
  ENSG00000144597_13 (sequence is synthesized)
gaggaccatggagtcctgccagctcaacctgtcatttacagactaagaaagggaagtacacacctggcttgtggccagtctcctgccccctctctgggctttcctcactgttctctccct

SEQ ID NO: 388604 - DNA, 120 bp, Artificial Sequence
  ENSG00000144597_14 (sequence is synthesized)
tgaatctcatttgtaggaatcaagagattcctatacatgggacttttagatgtacattggcacttggattagattccaaaagacaaaagtgttgggtgcttctagcttgaattcagtccc

SEQ ID NO: 388605 - DNA, 120 bp, Artificial Sequence
  ENSG00000144597_15 (sequence is synthesized)
taaatacatgaggctgggtgagcagatgaaaccggtagccactgtgctgatgcatgtgactccattcagttggggattttggttccatgtggatccatactaagtattcttcagtcagtg

SEQ ID NO: 388606 - DNA, 120 bp, Artificial Sequence
  ENSG00000144597_16 (sequence is synthesized)
gattttagcaaggggaggtaggagtggaagagaggtgtgaagaaacctctccgaacaaatgaaccagcagtaagtttctaaaaatcagaatctagatagaagttctgcaatatgaaatga

SEQ ID NO: 388607 - DNA, 120 bp, Artificial Sequence
  ENSG00000144597_17 (sequence is synthesized)
gcacattctttgataaggcgtatctattcatgcttttgtaccactgttttgtacctgactccctgaccgatttgtattttttatatacaactagaaggaagtcacaagattgccttctac

SEQ ID NO: 388608 - DNA, 120 bp, Artificial Sequence
  ENSG00000144597_18 (sequence is synthesized)
catttccaaatggatctgttgttggaggaaactggttgctagtcaatgttctatatttaatgaatgtgtgataaatcatcctgtaatcagtatggagtaacctgtttttgtagtttggat

SEQ ID NO: 388609 - DNA, 120 bp, Artificial Sequence
  ENSG00000144597_19 (sequence is synthesized)
gaatatgtcctgagaaatttccatccactttggttcagcggacatcaaggtagtaataataatttttcctccacaggtccctccactcatatggcctctccctccccagctagtggaggg

SEQ ID NO: 388610 - DNA, 120 bp, Artificial Sequence
  ENSG00000144597_20 (sequence is synthesized)
gaagcagtctggacttagaaaggaaataggtggtctgtcataggggctttcattagagttaaacttcatagagtcaactgtttcatcatcatagtgagcccagagagccactgcccagca

SEQ ID NO: 388611 - DNA, 120 bp, Artificial Sequence
  ENSG00000144597_21 (sequence is synthesized)
gcatgctcacaccacctaccctagtgtaggtaataggtctacgctaggaccccgtgctgggctctcagcccatcatgagattttggtggatttaatggcaggtaggaacttatttatagt

SEQ ID NO: 388612 - DNA, 120 bp, Artificial Sequence
  ENSG00000144597_22 (sequence is synthesized)
ggattgataattgctttataattccttggtaatgacagctcagggaaggtttcacaaggtcatgatcaggagacttgaattgttactggatgtaggaattgtttcactgctcttaacttg

SEQ ID NO: 388613 - DNA, 120 bp, Artificial Sequence
  ENSG00000144597_23 (sequence is synthesized)
ctcaaactggggcaggttccaggaacttgaactaaaaatatctatttaagcctctctctctttctctcctccccaacttttttctgaaagccttgatttctgtagacagaactatggttt

SEQ ID NO: 388614 - DNA, 120 bp, Artificial Sequence
  ENSG00000144597_24 (sequence is synthesized)
ttggcatgttgggtcaagacgtgtttctataggaaatgcttgcacgtggcactggcttggtgagtcaagcttcctgagcttcagaccgtttgtcctgtcatctgtcctgcccaacactgt

SEQ ID NO: 388615 - DNA, 120 bp, Artificial Sequence
  ENSG00000144597_25 (sequence is synthesized)
atggtttttctctagcacggcttcaattttgttctctgcacaaagcctttggtggttctgccctctgccctccagctttacccaccagagtaagcaatcttttctttttagaaatcaaga

SEQ ID NO: 388616 - DNA, 120 bp, Artificial Sequence
  ENSG00000144597_26 (sequence is synthesized)
atttggcttcacagatggcttctcacagatgccctcctgccagccaaaccggacttgttcttcctgcctctgtgccttctctcattctccttctctccctccataccccacttttgaggt

SEQ ID NO: 388617 - DNA, 120 bp, Artificial Sequence
  ENSG00000144597_27 (sequence is synthesized)
tctgtgggtaccatctttgtggactcttgtcttttttttcaacccacatggagtgccctgtgtgtacatactgaccttttttttttttttttttttttgcttgaactctggtcggtatga

SEQ ID NO: 388618 - DNA, 67 bp, Artificial Sequence
  ENSG00000144597_28 (sequence is synthesized)
ttttttttttttttttttgcttgaactctggtcggtatgagctccttaaaagcaggtactgggctgg

SEQ ID NO: 388619 - DNA, 120 bp, Artificial Sequence
  ENSG00000144597_29 (sequence is synthesized)
tggcgagaccctgtttctacaaaaagaaaaagggaaaaaaaaagcagggactgtcattctcatctcctccctggggtatccacaggaatggacattcaaatggttgtagcctggtggggt

SEQ ID NO: 388620 - DNA, 120 bp, Artificial Sequence
  ENSG00000144597_30 (sequence is synthesized)
agaaggcagagaagactacccagccagtgaagtgcagaggatagacataggaaaacattccaggcatttggagacagctgaaagtatccatgctgactttcatgatttagaagtctttaa

SEQ ID NO: 388621 - DNA, 120 bp, Artificial Sequence
  ENSG00000144597_31 (sequence is synthesized)
ctgaattattaaaattgccttttttttgtgctgtacaatgtctactgtactgtgggtcatttagatgagatgaaaaacttaattaaatctgaagtgtcagaggcgcttagtaagccttag

SEQ ID NO: 388622 - DNA, 120 bp, Artificial Sequence
  ENSG00000144597_32 (sequence is synthesized)
taaagttgtgattgaagaaacttaatacaaatgaactagaggtttgtaatcatgccactcactaacgattttatttctgtagcagaatcattttttctatgtaaggtgttaatgtgtgtg

SEQ ID NO: 388623 - DNA, 120 bp, Artificial Sequence
  ENSG00000144597_33 (sequence is synthesized)
ctatgtaaggtgttaatgtgtgtgtatgtgctttggttgtaggaaaacttgaaaattccaaaatccttattttcctatttgagaggctggttcagcagggtgtgtgtgtgtgtgtgtgtg

SEQ ID NO: 388624 - DNA, 120 bp, Artificial Sequence
  ENSG00000144597_34 (sequence is synthesized)
tacattattttgaaagagaattagtgtgttatgtggataatgttatatacagccaaagtggatgtttctatttggcaaggaaggtaggatttctgaaactcaggccttaaccaataggtt

SEQ ID NO: 388625 - DNA, 120 bp, Artificial Sequence
  ENSG00000144597_35 (sequence is synthesized)
ggaagacaagaccaattgaagagttaggaaatgtgagtttttgttacttctgttattccagtcttggtttcattgtctcattctttatttttaaaatcttgtgcctaaaagtttttttgc

SEQ ID NO: 388626 - DNA, 120 bp, Artificial Sequence
  ENSG00000144597_36 (sequence is synthesized)
ttaattatgaagtagacatgcatgtttacatttatgtaaaatatttgctgtgtaaagtattttttgtttattctcttaaaagatcactatatttaaataaaagtgaaggtcagcaacaca

SEQ ID NO: 388627 - DNA, 120 bp, Artificial Sequence
  ENSG00000144597_37 (sequence is synthesized)
cacaccacctaccctagtgtaggtaataggtctacgctaggaccccgtgctgggctctcagcccatcatgagattttggtggatttaatggcagaaaccccagtgtgatggtggaagcag

SEQ ID NO: 388628 - DNA, 120 bp, Artificial Sequence
  ENSG00000144597_38 (sequence is synthesized)
catgaaaacaacatctccccaggcctcgcagtagaggcgaagggaacagggctgcccatgtgcctgtctctaaagacgccaccctcaggttgatgtcacctgtgggagaccgggtccacc

SEQ ID NO: 388629 - DNA, 120 bp, Artificial Sequence
  ENSG00000144597_39 (sequence is synthesized)
gcttcgtacaaaaacccaagggtgtccctccagctggtaaaaattgggcaatttctacttgaggtctgctgtgggggtggacctcaccttggagatgtctttccagaataaaactaagcc

SEQ ID NO: 388630 - DNA, 120 bp, Artificial Sequence
  ENSG00000144597_40 (sequence is synthesized)
ctactcaggaaaaatggtgatgaaaggcagctcacagacatgcacgactaataatcttattgaaaagggaggagctcaggcacacaggaggacaaggctatgcaatatgcagacatgaaa

SEQ ID NO: 388631 - DNA, 83 bp, Artificial Sequence
  ENSG00000144619_0 (sequence is synthesized)
ggctctgtttttattagaaaaattctcaatcgtcgtcttttaagaatcattgacatagagtaactccacagcatgtgtcttca

SEQ ID NO: 388632 - DNA, 120 bp, Artificial Sequence
  ENSG00000144619_1 (sequence is synthesized)
gaatcattgacatagagtaactccacagcatgtgtcttcaagagcttccctaaaagattaaaggttatacaaaacttaaaagaagcagcaattctattcgcttgttattggacttgaaac

SEQ ID NO: 388633 - DNA, 120 bp, Artificial Sequence
  ENSG00000144619_2 (sequence is synthesized)
tccctttgacctcggaaactgaagatgaggttgccatgggaactgctggtactgcaatcattcattttgtgccttgcagatgattccacactgcatggcccgatttttattcaagaacca

SEQ ID NO: 388634 - DNA, 120 bp, Artificial Sequence
  ENSG00000144619_3 (sequence is synthesized)
agtcctgtaatgttccctttggattctgaggagaaaaaagtgaagctcaattgtgaagttaaaggaaatccaaaacctcatatcaggtggaagttaaatggaacagatgttgacactggt

SEQ ID NO: 388635 - DNA, 120 bp, Artificial Sequence
  ENSG00000144619_4 (sequence is synthesized)
atggatttccgctacagtgttgttgaagggagcttgttgatcaataaccccaataaaacccaagatgctggaacgtaccagtgcacagcgacaaactcgtttggaacaattgttagcaga

SEQ ID NO: 388636 - DNA, 120 bp, Artificial Sequence
  ENSG00000144619_5 (sequence is synthesized)
gaagcaaagcttcagtttgcttatcttgacaactttaaaacaagaacaagaagcactgtgtctgtccgtcgaggtcaaggaatggtgctactgtgtggcccgccaccccattctggagag

SEQ ID NO: 388637 - DNA, 120 bp, Artificial Sequence
  ENSG00000144619_6 (sequence is synthesized)
ctgagttatgcctggatcttcaatgaatacccttcctatcaggataatcgccgctttgtttctcaagagactgggaatctgtatattgccaaagtagaaaaatcagatgttgggaattat

SEQ ID NO: 388638 - DNA, 120 bp, Artificial Sequence
  ENSG00000144619_7 (sequence is synthesized)
acctgtgtggttaccaataccgtgacaaaccacaaggtcctggggccacctacaccactaatattgagaaatgatggagtgatgggtgaatatgagcccaaaatagaagtgcagttccca

SEQ ID NO: 388639 - DNA, 120 bp, Artificial Sequence
  ENSG00000144619_8 (sequence is synthesized)
gaaacagttccgactgcaaaaggagcaacggtgaagctggaatgctttgctttaggaaatccagtaccaactattatctggcgaagagctgatggaaagccaatagcaaggaaagccaga

SEQ ID NO: 388640 - DNA, 120 bp, Artificial Sequence
  ENSG00000144619_9 (sequence is synthesized)
agacacaagtcaaatggaattcttgagatccctaattttcagcaggaggatgctggtttatatgaatgtgtagctgaaaattccagagggaaaaatgtagcaaggggacagctaactttc

SEQ ID NO: 388641 - DNA, 120 bp, Artificial Sequence
  ENSG00000144619_10 (sequence is synthesized)
tatgctcaacctaattggattcaaaaaataaatgatattcacgtggccatggaagaaaatgtcttttgggaatgtaaagcaaatggaaggcctaagcctacatacaagtggctaaaaaat

SEQ ID NO: 388642 - DNA, 120 bp, Artificial Sequence
  ENSG00000144619_11 (sequence is synthesized)
ggcgaacctctgctaactcgggatagaattcaaattgagcaaggaacactcaacataacaatagtgaacctctcagatgctggcatgtatcagtgtttggcagagaataaacatggagtt

SEQ ID NO: 388643 - DNA, 120 bp, Artificial Sequence
  ENSG00000144619_12 (sequence is synthesized)
atcttttccaacgcagagcttagtgttatagctgtaggtccagatttttcaagaacactcttgaaaagagtaactcttgtcaaagtgggaggtgaagttgtcattgagtgtaagccaaaa

SEQ ID NO: 388644 - DNA, 120 bp, Artificial Sequence
  ENSG00000144619_13 (sequence is synthesized)
gcgtctccaaaacctgtttacacctggaagaaaggaagggatatattaaaagaaaatgaaagaattaccatttctgaagatggaaacctcagaatcatcaacgttactaaatcagacgct

SEQ ID NO: 388645 - DNA, 120 bp, Artificial Sequence
  ENSG00000144619_14 (sequence is synthesized)
gggagttatacctgtatagccactaaccattttggaactgctagcagtactggaaacttggtagtgaaagatccaacaagggtaatggtacccccttccagtatggatgtcactgttgga

SEQ ID NO: 388646 - DNA, 120 bp, Artificial Sequence
  ENSG00000144619_15 (sequence is synthesized)
gagagtattgttttaccgtgccaggtaacgcatgatcactcgctagacatcgtgtttacttggtcatttaatggacacctgatagactttgacagagatggggaccactttgaaagagtt

SEQ ID NO: 388647 - DNA, 120 bp, Artificial Sequence
  ENSG00000144619_16 (sequence is synthesized)
ggagggcaggattcagctggtgatttgatgatccgaaacatccaactgaagcatgctgggaaatatgtctgcatggtccaaacaagtgtggacaggctatctgctgctgcagacctgatt

SEQ ID NO: 388648 - DNA, 120 bp, Artificial Sequence
  ENSG00000144619_17 (sequence is synthesized)
gtaagaggtcctccaggtcccccagaggctgtgacaatagacgaaatcacagataccactgctcagctctcctggagacccgggcctgacaaccacagccccatcaccatgtatgtcatt

SEQ ID NO: 388649 - DNA, 120 bp, Artificial Sequence
  ENSG00000144619_18 (sequence is synthesized)
caagccaggactccattctccgtgggctggcaagcagtcagtacagtcccagaactcattgatgggaagacattcacagcgaccgtggtgggtttgaacccttgggttgaatatgaattc

SEQ ID NO: 388650 - DNA, 120 bp, Artificial Sequence
  ENSG00000144619_19 (sequence is synthesized)
cgcacagttgcagccaacgtgattgggattggggagcccagccgcccctcagagaaacggagaacagaagaagctctccccgaagtcacaccagcgaatgtcagtggtggcggaggcagc

SEQ ID NO: 388651 - DNA, 120 bp, Artificial Sequence
  ENSG00000144619_20 (sequence is synthesized)
ggaattacagaatggtcgaggctttggttatgtggtggccttccggccctacggtaaaatgatctggatgctgacagtgctggcctcagctgatgcctctagatacgtgttcaggaatga

SEQ ID NO: 388652 - DNA, 120 bp, Artificial Sequence
  ENSG00000144619_21 (sequence is synthesized)
gagcgtgcaccccttctctccctttgaggttaaagtaggtgtcttcaacaacaaaggagaaggccctttcagtcccaccacggtggtgtattctgcagaagaagaacccaccaaaccacc

SEQ ID NO: 388653 - DNA, 120 bp, Artificial Sequence
  ENSG00000144619_22 (sequence is synthesized)
agccagtatctttgccagaagtctttctgccacagatattgaagttttctgggcctccccactggagaagaatagaggacgaatacaaggttatgaggttaaatattggagacatgaaga

SEQ ID NO: 388654 - DNA, 120 bp, Artificial Sequence
  ENSG00000144619_23 (sequence is synthesized)
caaagaagaaaatgctagaaaaatacgaacagttggaaatcagacatcaacaaaaatcacgaacttaaaaggcagtgtgctgtatcacttagctgtcaaggcatataattctgctgggac

SEQ ID NO: 388655 - DNA, 120 bp, Artificial Sequence
  ENSG00000144619_24 (sequence is synthesized)
aggcccctctagtgcaacagtcaatgtgacaacccgaaagccaccaccaagtcaaccccccggaaacatcatatggaattcatcagactccaaaattatcctgaattgggatcaagtgaa

SEQ ID NO: 388656 - DNA, 120 bp, Artificial Sequence
  ENSG00000144619_25 (sequence is synthesized)
ggccctggataatgagtcggaagtaaaaggatacaaagtcttgtacagatggaacagacaaagcagcacatctgtcattgaaacaaataaaacatcggtggagctttctttgcctttcga

SEQ ID NO: 388657 - DNA, 120 bp, Artificial Sequence
  ENSG00000144619_26 (sequence is synthesized)
tgaagattatataatagaaattaagccattcagcgacggaggagatggcagcagcagtgaacaaattcgaattccaaagatatcaaatgcctacgcgagaggatctggggcttccacttc

SEQ ID NO: 388658 - DNA, 120 bp, Artificial Sequence
  ENSG00000144619_27 (sequence is synthesized)
gaatgcatgtacgctgtcagccatcagtacaataatgatttccctcacagctaggtccagtttatgacaaaagttatctgaaggacttgctgtttataatataagcaacatttagctagt

SEQ ID NO: 388659 - DNA, 120 bp, Artificial Sequence
  ENSG00000144619_28 (sequence is synthesized)
tgttttgaagacacccagtactaagtaatattgttgttcaagtacatcttattactggaataaaaatgttttttgcttctttaggaatggcattatacagtacttcctcaaagcaaatct

SEQ ID NO: 388660 - DNA, 120 bp, Artificial Sequence
  ENSG00000144619_29 (sequence is synthesized)
agctttgtctgaagtttctttggaaactctgcaatgcactgaagacatctgtaatatgatgttaccaaagcagtttacatatgtccttatatgcatattttttattatatatttagtgtt

SEQ ID NO: 388661 - DNA, 120 bp, Artificial Sequence
  ENSG00000144619_30 (sequence is synthesized)
ttatagaattttttaaagttaacatataatgtagatattaattttttcctcggctgtaaaatgctatgggcaacacaatcatgcaattataatttgaaaatatttcctttaaagacagag

SEQ ID NO: 388662 - DNA, 120 bp, Artificial Sequence
  ENSG00000144619_31 (sequence is synthesized)
tttgaaactcatcttggtaaataaattgcaaattactcgtacagttttacaaggatctcatggcagaacagcggaagacttggtccgtaactcaaggctgttgtatgcaaactactcttc

SEQ ID NO: 388663 - DNA, 120 bp, Artificial Sequence
  ENSG00000144619_32 (sequence is synthesized)
tagtggttaatgcacttgacatgtacagtatgtttcccatgccgttgtgattttgacatgtacagtatgttttcatgccgttgtgaattttgttgttcaacccaacttgagatggtttca

SEQ ID NO: 388664 - DNA, 120 bp, Artificial Sequence
  ENSG00000144619_33 (sequence is synthesized)
ggaatggctgcaatctcaaaagctcaatgtactgcccaagaggcaccttgtgcaatattcccatccctgaatttagcattgtacaggaagattttcttttcactcaactgagttagcatt

SEQ ID NO: 388665 - DNA, 120 bp, Artificial Sequence
  ENSG00000144619_34 (sequence is synthesized)
gtctttgtggtagcattatcttagacattaaatttgaagtaacatatatcctgtagtaacatagacccaaagttactatagtcaaccaagtctttcaaaggataaaagatcattttatta

SEQ ID NO: 388666 - DNA, 120 bp, Artificial Sequence
  ENSG00000144619_35 (sequence is synthesized)
tctttaactgtatctattttgaatgtaaatttaaaaaaagtaattctctgtcaatggattcgtaatttctttacaaaatttcttatatataatatgtgtatctctgtaataatagagccc

SEQ ID NO: 388667 - DNA, 120 bp, Artificial Sequence
  ENSG00000144619_36 (sequence is synthesized)
ttcttttgaatcaaaattacatatggactttggaagattgctcctatttcaacaaatagttgctgcaagaatttttaatatgactctataaaagctctttagtacaattgtatggtttct

SEQ ID NO: 388668 - DNA, 120 bp, Artificial Sequence
  ENSG00000144619_37 (sequence is synthesized)
tgatgattctgttttgcaataggtagcctagttgctttatatgctttaccttctaggtcttaaaatcacacattggaaaatgacaatatcaacaaaactgtattcttatgaaaagaacta

SEQ ID NO: 388669 - DNA, 120 bp, Artificial Sequence
  ENSG00000144619_38 (sequence is synthesized)
tttgttacaatgagaaaggttttgtgagtaaaccctactggacagtgacataaaaggcaatggaattttctataaacattttctcatgtaaacatgctgccaccttttcttctttctcag

SEQ ID NO: 388670 - DNA, 120 bp, Artificial Sequence
  ENSG00000144619_39 (sequence is synthesized)
agaactcaaatttgctatagtttgtcatttttgcttacaaataatataacttttcaaccttctagttatatttatccaataaagtcataatcgggattccatttgtgtaaaaactagggt

SEQ ID NO: 388671 - DNA, 120 bp, Artificial Sequence
  ENSG00000144619_40 (sequence is synthesized)
ggtaaccggaaaaaaatattgtcagtatttcaagctgtgttcctttcttagtttgatatggttacttctatgttgaaataaaatttaaaatcacatgcaaaaaaaaaatcagcaaaataa

SEQ ID NO: 388672 - DNA, 120 bp, Artificial Sequence
  ENSG00000144619_41 (sequence is synthesized)
taaaatgaacgaaaaaaaatgacacccagggagttcccaaccccagtgtaaatgatatttaccagtgatctagcatatgtaatcttttttaaaggtattgttaataaatattctgtcatt

SEQ ID NO: 388673 - DNA, 120 bp, Artificial Sequence
  ENSG00000144619_42 (sequence is synthesized)
gttcgacgccaggattggctgcaagtagggagctttcgccgccgccccgggcccctcggactgtgccggcgccgcacccgaggctctcgccagcccggcgccccggtgctgagtgggtga

SEQ ID NO: 388674 - DNA, 120 bp, Artificial Sequence
  ENSG00000144619_43 (sequence is synthesized)
agtaaagataaacttgcagagaccacaaggagaaatattcccaaatctcattgtaatgtctcttctttcccacagattaaaggttatacaaaacttaaaagaagcagcaattctattcgc

SEQ ID NO: 388675 - DNA, 120 bp, Artificial Sequence
  ENSG00000144619_44 (sequence is synthesized)
tactggaaacttggtagtgaaagaattacatccaggctgtattcaatccatatctacatctgtatcttaactgtgtatgtatctgttctcagatctgtaaataaatatccttatcacaaa

SEQ ID NO: 388676 - DNA, 120 bp, Artificial Sequence
  ENSG00000144619_45 (sequence is synthesized)
gttcgacgccaggattggctgcaagtagggagctttcgccgccgccccgggcccctcggactgtgccggcgccgcacccgaggctctcgccagcccggcgccccggtgctgagccggaaa

SEQ ID NO: 388677 - DNA, 120 bp, Artificial Sequence
  ENSG00000144619_46 (sequence is synthesized)
ataagtttgttgcgctgcgaggcagccacaaaacaaggaaccgagagcccggaatgctgcgggaagccttcaagtcagctcctccgactggttcgggctactgccccctctccgtgcgcc

SEQ ID NO: 388678 - DNA, 120 bp, Artificial Sequence
  ENSG00000144619_47 (sequence is synthesized)
ctggcctctggcgccgggttcccggcggggcttttcttctgacagcccagtcacagcccgcagcagagggacgcgaacctggggagtggagggacctgggactaaaggaacaggagcccg

SEQ ID NO: 388679 - DNA, 120 bp, Artificial Sequence
  ENSG00000144619_48 (sequence is synthesized)
tagccgtggtggaaggagccgcgtggagacggaggctgatgtctgtggcgcccgctgggtgccgggctggctgctgagcgctgaggctgcggcggcgagcgacaggccaggtgcctgctc

SEQ ID NO: 388680 - DNA, 120 bp, Artificial Sequence
  ENSG00000144619_49 (sequence is synthesized)
acaggcacctggaggtgatttgggtggcattcatgagaaaattcacgttacccacttcgctaactgatgaaacactgccagagcccacttggactgtttcgcaactttacttaagggaat

SEQ ID NO: 388681 - DNA, 120 bp, Artificial Sequence
  ENSG00000144619_50 (sequence is synthesized)
acaaaagggatacgggaagcacaaagtaaaggggtaggctaaagacaagcagaacaatacatagaagagagaaagggagacgtcaagcagcctgcgcctggaagttgttagtaaaattag

SEQ ID NO: 388682 - DNA, 120 bp, Artificial Sequence
  ENSG00000144619_51 (sequence is synthesized)
tgaccaatgtgaaataagagggcttatattttcacttcatcataatccacagaagattaaccttcaatgggaaattttcttctagaagctgaaacacagcctgttgtgccttactatttt

SEQ ID NO: 388683 - DNA, 120 bp, Artificial Sequence
  ENSG00000144619_52 (sequence is synthesized)
gaggatcttcagccaagatggtttttcttccttcagtgagatcttttgtctatttggcaatggaagaagattagtattagaggatacgtgttggaaatgtggtttttcaggagaccgatg

SEQ ID NO: 388684 - DNA, 120 bp, Artificial Sequence
  ENSG00000144619_53 (sequence is synthesized)
tccagtgtttttttttttacaatcatttccaaccatttcagagctgggtctgccccatcaaagagcaagctctggactgcagatcctcattacgttttcaaccctgtccagtacatcata

SEQ ID NO: 388685 - DNA, 120 bp, Artificial Sequence
  ENSG00000144619_54 (sequence is synthesized)
actgtttaagatagactgactgcaagccctaaatttaaaagactgttaacaaaacgccaaataagatgggtggagaaggatgtagacaagaatgttacaagggaaacaaaaacgattttt

SEQ ID NO: 388686 - DNA, 120 bp, Artificial Sequence
  ENSG00000144619_55 (sequence is synthesized)
ctgcgtggatgatcagtgtagtggaagcagggacttgctgagagctgaaatctctgtttgatttgctgtaacatgtaaagcgaaactgggacattttactttacagtctattaaaggtta

SEQ ID NO: 388687 - DNA, 120 bp, Artificial Sequence
  ENSG00000144619_56 (sequence is synthesized)
cagaagaagctcgtgagtagcacccgagattcagatcatctgttctgccagctgctgttccttaggaaaagcgtttgaattcttgctgctcttcagcgctcatgcggctctgtgttagct

SEQ ID NO: 388688 - DNA, 120 bp, Artificial Sequence
  ENSG00000144619_57 (sequence is synthesized)
cacccttccctttaaatgtttataatgatagaaatcaggccaggagaagcccagctgaacacgcaacgggtttcaatcaagagttgttttcttcattaggtccacttgtacagcaagaga

SEQ ID NO: 388689 - DNA, 120 bp, Artificial Sequence
  ENSG00000144619_58 (sequence is synthesized)
cacacggtgcttagtcctctcaaaagccagccctttcttcattggttcatttgtcaccaagattctaacagaatttcaaaaaaaaatcccacatttcaaataaaattatctcacataagt

SEQ ID NO: 388690 - DNA, 120 bp, Artificial Sequence
  ENSG00000144619_59 (sequence is synthesized)
agccgccgcgagcgccgggagggagggcagcgccgcgccagacggagcccggggttcgacgccaggattggctgcaagtagggagctttcgccgccgccccgggcccctcggactgtgcc

SEQ ID NO: 388691 - DNA, 120 bp, Artificial Sequence
  ENSG00000144619_60 (sequence is synthesized)
taagcatgcaggtatttttgagtacttttattaataaatcttacaaatttttctgcagtatacttccaaagagataatttaattttcctgatgactagcacttcatccccttctcctttt

SEQ ID NO: 388692 - DNA, 120 bp, Artificial Sequence
  ENSG00000144619_61 (sequence is synthesized)
tttccttaagactaccttaaaacaatacttttgaggggcaaagttgtatgcatggagaatttaatccaggcaaatggtgtggttctgcgacacaaatttttctgtagcagtaactgggag

SEQ ID NO: 388693 - DNA, 120 bp, Artificial Sequence
  ENSG00000144619_62 (sequence is synthesized)
ctgcattaacagaaaaatgagttttacattttatacattttaaaagaatctccaagacttagcccctttatttattcacaggagtgatgggtgaatatgagcccaaaatagaagtgcagt

SEQ ID NO: 388694 - DNA, 120 bp, Artificial Sequence
  ENSG00000144619_63 (sequence is synthesized)
agggatatattaaaagaaaatgaaagtgtacatcaggggtttggtagtggctctgctcctctctaaggccagcctggtggaccaagatgctctggacgttgccattgcagaaggaaaaga

SEQ ID NO: 388695 - DNA, 120 bp, Artificial Sequence
  ENSG00000144619_64 (sequence is synthesized)
gccaaacatgcatgggttcttaaagcctctacttagaagtgcaacacttgcactttcactcacatttcattggccaaaacaggtcacatgttcctgcaactcagcagggaaatataatct

SEQ ID NO: 388696 - DNA, 120 bp, Artificial Sequence
  ENSG00000144619_65 (sequence is synthesized)
tgctatgtgcctggaagaaaagagacaacctaatattttgaacagtattaatgactgcttacaactgctacagcttaaccattgttacaagctaattaaattacctttggggaaatagta

SEQ ID NO: 388697 - DNA, 120 bp, Artificial Sequence
  ENSG00000144619_66 (sequence is synthesized)
ggttcgatgcgaggagagccagttagagatgtgtgtgattctcccagtgtgcgtctttgattcgtgtgctaattatgtcgatcctttggggaacacagccaggaagctgggtcctccttg

SEQ ID NO: 388698 - DNA, 120 bp, Artificial Sequence
  ENSG00000144619_67 (sequence is synthesized)
tctaccgaagtggcatcattcatattaatatgtacagataccactgtattgctaaattaattcatcacggcaaacatgatatgattaataattcttagaaaactgctggtaatgaatatg

SEQ ID NO: 388699 - DNA, 120 bp, Artificial Sequence
  ENSG00000144619_68 (sequence is synthesized)
attgaaaggctatcttatttcagaatcatccaatacaattttgagaattatagccattgtatctcttatagtattgtaacgaatgttatcttcaatcctttaattaaatttctttcaagt

SEQ ID NO: 388700 - DNA, 120 bp, Artificial Sequence
  ENSG00000144619_69 (sequence is synthesized)
ctctatagatttgaaattcatgtctaggaacactattccaacaaattaaaaactcaagactcatgtactatttttagaaaacattgtttaaacaatgacattggtaatttttaagatagc

SEQ ID NO: 388701 - DNA, 120 bp, Artificial Sequence
  ENSG00000144619_70 (sequence is synthesized)
tgtcccatttattcagagatatggatatggcttattatactaatagaaggctttgatcacctctatgctttgccttagtcacccagccaaccttgtcagttttaaggaaataaaattccc

SEQ ID NO: 388702 - DNA, 120 bp, Artificial Sequence
  ENSG00000144619_71 (sequence is synthesized)
ctggcttccccagtctctgccgcgggagcctgttgggtggcattcgtttccagcaacttctggggggtttccagtttctttcgagaggcaagacaaccgccccgtcccctccccgggccc

SEQ ID NO: 388703 - DNA, 120 bp, Artificial Sequence
  ENSG00000144635_0 (sequence is synthesized)
atatccgggttcccgccgcctccaccgccaccgcctcagccgcctcgcacatttagtcttgccgggagtggtgtgattcccgaccaagatggcggccgtggggcgagtcggctccttcgg

SEQ ID NO: 388704 - DNA, 120 bp, Artificial Sequence
  ENSG00000144635_1 (sequence is synthesized)
ttcttctccgccgggattatcctcgacttacactggcggccccttgggcaacgagatagcgtcgggcaacggtggcgccgcggcaggcgacgacgaggacgggcagaacctttggtcctg

SEQ ID NO: 388705 - DNA, 120 bp, Artificial Sequence
  ENSG00000144635_2 (sequence is synthesized)
catcctcagcgaggtctccacccgctcgcgctccaagctccctgcggggaagaacgtgctactgctgggtgaagatggagctggaaaaacaagcttaataagaaaaattcagggaataga

SEQ ID NO: 388706 - DNA, 120 bp, Artificial Sequence
  ENSG00000144635_3 (sequence is synthesized)
ggagtataagaaaggaagaggattggaatatttgtacttaaatgtgcatgatgaagacagggatgatcaaacaagatgtaatgtttggatcttagatggagacctatatcacaaaggcct

SEQ ID NO: 388707 - DNA, 120 bp, Artificial Sequence
  ENSG00000144635_4 (sequence is synthesized)
ccttaaattttcactggatgccgtatctctgaaggatactctagttatgctggttgttgacatgtcaaagccttggactgctttggattctttacagaaatgggcaagtgttgttagaga

SEQ ID NO: 388708 - DNA, 120 bp, Artificial Sequence
  ENSG00000144635_5 (sequence is synthesized)
acatgttgacaaactgaaaatccctcctgaagaaatgaaacaaatggaacaaaagttgattagagacttccaagaatatgtagagccaggagaagacttcccggcttctccccagagaag

SEQ ID NO: 388709 - DNA, 120 bp, Artificial Sequence
  ENSG00000144635_6 (sequence is synthesized)
aaatactgcgtcacaagaagacaaagatgacagtgtagttttacctctgggtgcggatacacttacacataacttgggcattccagtactagtagtttgcacaaagtgtgatgccattag

SEQ ID NO: 388710 - DNA, 120 bp, Artificial Sequence
  ENSG00000144635_7 (sequence is synthesized)
tgtattggagaaagaacatgactacagagatgaacattttgattttattcagtcacatatccggaagttttgtttacagtatggtgcagcacttatttacacttcagtaaaagaaaacaa

SEQ ID NO: 388711 - DNA, 120 bp, Artificial Sequence
  ENSG00000144635_8 (sequence is synthesized)
aaatatagacttagtatataaatacatcgttcagaaactatatggatttccctataagattcctgctgttgttgtggaaaaggatgcagtatttattccagcagggtgggataatgataa

SEQ ID NO: 388712 - DNA, 120 bp, Artificial Sequence
  ENSG00000144635_9 (sequence is synthesized)
gaaaataggaatattacatgaaaattttcaaacattaaaagcagaagataattttgaagacatcataactaaaccacctgttcgaaagtttgtacatgagaaggaaattatggcagaaga

SEQ ID NO: 388713 - DNA, 120 bp, Artificial Sequence
  ENSG00000144635_10 (sequence is synthesized)
agagtcccaggaggctccccacgaacaccaaatagatctgtatcatctaatgttgccagcgtgtcacccattcctgctgggtcaaaaaaaattgatccaaacatgaaagctggagctaca

SEQ ID NO: 388714 - DNA, 120 bp, Artificial Sequence
  ENSG00000144635_11 (sequence is synthesized)
agtgaaggcgttctggcaaatttcttcaacagtttgttgagtaaaaagactggctctccaggaggccctggtgtgagtggtggtagccctgcaggtggggctggaggtggaagcagtggt

SEQ ID NO: 388715 - DNA, 120 bp, Artificial Sequence
  ENSG00000144635_12 (sequence is synthesized)
ttaccaccatccaccaaaaagtcaggccagaagcctgtcttagatgttcatgcagaactagacagaattacacgaaaaccagttacagtttctcccacaacacctacatctcctacggaa

SEQ ID NO: 388716 - DNA, 120 bp, Artificial Sequence
  ENSG00000144635_13 (sequence is synthesized)
ggagaagcttcttgaagataccaaataaagccatttattctgttttctgggataatgtaaacatgcctctgccttttccttcaaaagtggaattagaaagctggagtgcttcttcagatg

SEQ ID NO: 388717 - DNA, 120 bp, Artificial Sequence
  ENSG00000144635_14 (sequence is synthesized)
gtcgtgtgtgtgtgtgtgtgtgtgtgtggttacccattttttagaaggagccgtacagaagaaaaattattctacattatgtaggattgctgtttgcattgccattttgcataagaaagt

SEQ ID NO: 388718 - DNA, 120 bp, Artificial Sequence
  ENSG00000144635_15 (sequence is synthesized)
gcataagaaagtaatttttgattttgaaaatctcaaaacttttagatctgaaatacagccatgtgatcgatcatattctaaaggctatttaaaacatgtaaaaggatttggggaacggca

SEQ ID NO: 388719 - DNA, 120 bp, Artificial Sequence
  ENSG00000144635_16 (sequence is synthesized)
gaaaacatgcagtttgggcatttgactgacttggaagtctaagcttattttagttataactattaaaatcatttttaaaaatttgttagttttgctgacagagaaaaatcgtcagttgtc

SEQ ID NO: 388720 - DNA, 120 bp, Artificial Sequence
  ENSG00000144635_17 (sequence is synthesized)
agattttgcacaccacaataaatgtaccaccacacacggaatatgctaagaaaactatcagatagcgtttgatacactagtcattgtctcaatcactgatcctgtaagttgtcatcaaaa

SEQ ID NO: 388721 - DNA, 120 bp, Artificial Sequence
  ENSG00000144635_18 (sequence is synthesized)
tatgatttagaaatattggccaaggtgttgctttaactgaggagaaaagaaagcacactgcctaaatgtgtaaaagaaaaatgcagaggttattaaaatgtaaagaagtaacaatctttg

SEQ ID NO: 388722 - DNA, 120 bp, Artificial Sequence
  ENSG00000144635_19 (sequence is synthesized)
gatttgtctatacatatatatatatatatatggctttgccttaatatacccccttttttgtttgtgactttcaactgtaatcagttaataaagtatttattctctgcattcaggttcaaa

SEQ ID NO: 388723 - DNA, 120 bp, Artificial Sequence
  ENSG00000144635_20 (sequence is synthesized)
ggtaacgactccacctctccctcagcccccgctggctcccccggccttgcgcggacgcctcgggatcccgtgcccgctggagctcggcgccgggcccggccactgcgttcccggcagccc

SEQ ID NO: 388724 - DNA, 120 bp, Artificial Sequence
  ENSG00000144635_21 (sequence is synthesized)
agtctttgattttttttagtgtgtaattttttactagaagttctgtgatgtcatgctggtcaagaaatagctatgtttagccatacttttattaatttgggattgggattcatatatgat

SEQ ID NO: 388725 - DNA, 120 bp, Artificial Sequence
  ENSG00000144635_22 (sequence is synthesized)
acttttaagcatcttaaggtatcctggtgtgcagatacttctttcctaccatacttgaagaatctcagtttttcagttcatcttccctcagatagtgattgttttgttgactcccatttc

SEQ ID NO: 388726 - DNA, 120 bp, Artificial Sequence
  ENSG00000144635_23 (sequence is synthesized)
actttctaattttctgataaaaatattatctactcagcttttttatctatcagctattttttcttctgtagatcacttgccttctcatttttgtatatgatatcttgagtatgcatatct

SEQ ID NO: 388727 - DNA, 120 bp, Artificial Sequence
  ENSG00000144635_24 (sequence is synthesized)
gtagaaaggcaaaaatgtccttttccatctggagggtttctaagtataattttggtgtgtttctaatgtacagtttacataaggatttgttttagcaaaatagaaatcagctattcagct

SEQ ID NO: 388728 - DNA, 120 bp, Artificial Sequence
  ENSG00000144635_25 (sequence is synthesized)
aattaaatcttcgcccttggcatatttatattagcaattgttagtgcagaatccacattctaatatagtgctttggaaatcagattggcatgagtgaatatgtggatcttacagagtttg

SEQ ID NO: 388729 - DNA, 120 bp, Artificial Sequence
  ENSG00000144635_26 (sequence is synthesized)
aataggtagaagctgtgaactttccaacctagagcttggccaagagccaagaaaacattgctagaataattctgttggttctatctattgaggcaggtcttggatcttctctccagttag

SEQ ID NO: 388730 - DNA, 120 bp, Artificial Sequence
  ENSG00000144635_27 (sequence is synthesized)
gcaggtcttggatcttctctccagttagttacccacattagctcacagctatccaagaactttcaattttatatatatatatatatatacacacattttttttttttttttgagatggag

SEQ ID NO: 388731 - DNA, 75 bp, Artificial Sequence
  ENSG00000144635_28 (sequence is synthesized)
ccaggttcaagcgattctggtgcccagctaatttttttgtatttttgtagaaatgggtttcaccatgttggccag

SEQ ID NO: 388732 - DNA, 120 bp, Artificial Sequence
  ENSG00000144635_29 (sequence is synthesized)
cggcccagttttagtctcgactctaacatatcaatctatccaatcagatcccagaagatacactgctttcctatatcttgacttcatgcagtgtataatgttctatagatagagatgttt

SEQ ID NO: 388733 - DNA, 120 bp, Artificial Sequence
  ENSG00000144635_30 (sequence is synthesized)
ctgaaagctctataaaaatgagtatttgcataaataaattgactatccctaatctgaaaatccaaaatgctcaaaaatctgaaacactttgagctccaacatgactctcaaaaggaaatg

SEQ ID NO: 388734 - DNA, 120 bp, Artificial Sequence
  ENSG00000144635_31 (sequence is synthesized)
cttattgaaacattttggattttcagattacggatgctgaactgataagtattaatgcaaatattcagcaatctgaaacacttccacttctggtcgcaagcatttcggatgaaggatact

SEQ ID NO: 388735 - DNA, 120 bp, Artificial Sequence
  ENSG00000144635_32 (sequence is synthesized)
caacttgtagtagttctcactgactgactttaatcttgacatatatatcaagaaaaaataatttttatttagcatataagagtcttcagaatccaaacactcataatataaagcatccat

SEQ ID NO: 388736 - DNA, 120 bp, Artificial Sequence
  ENSG00000144635_33 (sequence is synthesized)
agcaaaaatatttcacattcttttattgagcatcacctcaggccctgtttaggttctaagtgctaaatgggaaggagagtgatacctatagtaaaccaatacatagacatctgtcaagta

SEQ ID NO: 388737 - DNA, 120 bp, Artificial Sequence
  ENSG00000144635_34 (sequence is synthesized)
gtgataagtgctacagaaataaagcaggatgtagggagagtgagcaaggggactgggctgtgagggatgctgtatatgaatgatgggggaaggtctttgataaaggggggagaatgctga

SEQ ID NO: 388738 - DNA, 120 bp, Artificial Sequence
  ENSG00000144635_35 (sequence is synthesized)
aggcagggggaactaaaagtgtacatgccctgaggcagaaatgtatgaggaagacagaggcaggaaagagctgtggggaaggttaagctagttgatgagaggcagaagtaagttactgtg

SEQ ID NO: 388739 - DNA, 120 bp, Artificial Sequence
  ENSG00000144635_36 (sequence is synthesized)
ggtctttatcattaggctacagtaaggactttaggtttcattctgagttagatggaaagagattgagaggttgagcagaggagtgatgtaatctgacttaaccttttagaagaatcactg

SEQ ID NO: 388740 - DNA, 120 bp, Artificial Sequence
  ENSG00000144635_37 (sequence is synthesized)
gctcctgggaagaaaatagactgggtatgtgttatacagcaagaatagaagcaggagacttctgcaattccttttcctaattattcagctcatagaagagccattatatttttatttcag

SEQ ID NO: 388741 - DNA, 120 bp, Artificial Sequence
  ENSG00000144635_38 (sequence is synthesized)
agaaacaagggagaagttgcatttcacttaactaggatattactggcccttttaaaacaccctaactgctgtttagcaaattttataagcatgattaatatgcttgtgactctagggttg

SEQ ID NO: 388742 - DNA, 120 bp, Artificial Sequence
  ENSG00000144635_39 (sequence is synthesized)
tgctgttcaatacggtagccacttgcctcatatgccttttaaatgtaaaattagataaaattaaaaatcatttccttagtcacactagccacatttcaagtgctcagtagccactggtgg

SEQ ID NO: 388743 - DNA, 120 bp, Artificial Sequence
  ENSG00000144635_40 (sequence is synthesized)
ctagtgactgccatattgaacagcacagatatagaatatttccaaaactgtagctagttactggacacctctgctgaaggccttgggtagggcagctcacgcatgtgaatataaatatag

SEQ ID NO: 388744 - DNA, 120 bp, Artificial Sequence
  ENSG00000144635_41 (sequence is synthesized)
tataggtaatgttcaaattcttgaactgttttttaattagtccaatctagagaataaattattaattgtgttagcataatatattaaatttgctcatttgtgcattgctcatttcagttt

SEQ ID NO: 388745 - DNA, 120 bp, Artificial Sequence
  ENSG00000144635_42 (sequence is synthesized)
gtacatgagaaggaaattatggcagaagatgatcaggtgtttcttatgaagctacaggtatgaaattatatcagaagcagacttagtatggttaatgggtaaactgttcttgtgtgtatt

SEQ ID NO: 388746 - DNA, 120 bp, Artificial Sequence
  ENSG00000144635_43 (sequence is synthesized)
ttctttaaaaatacaccagtatatgctatgaatgtctaaactaggattctttttttttttttttttcagtcccttttagcaaagcaaccaccaactgcagctggaaggcctgtggatgcc

SEQ ID NO: 388747 - DNA, 85 bp, Artificial Sequence
  ENSG00000144635_44 (sequence is synthesized)
cgcgctccaagctccctgcggggaagaacgtgctactgctggatggagtttcactcttgttgccccggctagagtgtaatggcaa

SEQ ID NO: 388748 - DNA, 120 bp, Artificial Sequence
  ENSG00000144635_45 (sequence is synthesized)
acagccggcccagccccgccccgcctcgcctcccgacctgtcgcggatggctgggagagaaggggaacacgagacccttgacccaggacctgcggggacccgccctccctcaggtgaaga

SEQ ID NO: 388749 - DNA, 120 bp, Artificial Sequence
  ENSG00000144635_46 (sequence is synthesized)
ccaactaaaagttcatagggtacttgatattctgtgtcctgctgttcattcaccatatcagagtggtacttttatgatgttcccctatccagaattgaactgtttaaattactatattta

SEQ ID NO: 388750 - DNA, 69 bp, Artificial Sequence
  ENSG00000144642_0 (sequence is synthesized)
atgtcactctgggagggagacagcagcaactaagctgtacaaccctttctttttctttctttctttctt

SEQ ID NO: 388751 - DNA, 120 bp, Artificial Sequence
  ENSG00000144642_1 (sequence is synthesized)
tttctttctttctttctctttctctctctcttttttctttttctttaaggtggggaaagagacaaccaagagacaggaagctgatctgcaaggattcggagttgtgctaaaaggactttg

SEQ ID NO: 388752 - DNA, 120 bp, Artificial Sequence
  ENSG00000144642_2 (sequence is synthesized)
atttttttccccctttacgaacgctggcaattgacatcactacagacagcctggttagagaacaaactgcctcatcccaagtggaccccggcagctgggggaagccaggcaagatctggg

SEQ ID NO: 388753 - DNA, 120 bp, Artificial Sequence
  ENSG00000144642_3 (sequence is synthesized)
aaggctgtgtgtgggtgttttttctacagatctcactcctcgccctttttttttttcctttggtgtgtgttttttgttttgttttgttttttaaaaaaattcttgctgtgttggaactag

SEQ ID NO: 388754 - DNA, 120 bp, Artificial Sequence
  ENSG00000144642_4 (sequence is synthesized)
cgagtggtggagtctctgaagcctcatcagtcaccgggactgtcaggaatagtggtttaagaggaagctcggcctggggcactataccctgtcatccagttccctgcctcggagataaag

SEQ ID NO: 388755 - DNA, 120 bp, Artificial Sequence
  ENSG00000144642_5 (sequence is synthesized)
attccagctacatgggcaaacgcctggatcagccacaaatgtacccccagtacacttactactatcctcattatctccaaaccaagcagtcctatgcaccagctccccaccccatggctc

SEQ ID NO: 388756 - DNA, 120 bp, Artificial Sequence
  ENSG00000144642_6 (sequence is synthesized)
ctcccagccccagcacaaacagcagcagcaacaacagcagcaacaacagcagcggggaacagttgagtaaaaccaacctgtacattcgaggcctcccaccaggcaccactgaccaggacc

SEQ ID NO: 388757 - DNA, 120 bp, Artificial Sequence
  ENSG00000144642_7 (sequence is synthesized)
taatcaagctgtgccaaccgtatggaaaaattgtatctacaaaggcaattcttgacaaaaacacaaatcagtgcaaaggttatggttttgtagattttgacagtcctgcagccgcacaga

SEQ ID NO: 388758 - DNA, 120 bp, Artificial Sequence
  ENSG00000144642_8 (sequence is synthesized)
aagcggtagcatctctcaaggcaaatggcgtgcaggcacagatggctaagcaacaagagcaagacccaacaaacctatacatctcaaatctccccatttctatggatgagcaggagcttg

SEQ ID NO: 388759 - DNA, 120 bp, Artificial Sequence
  ENSG00000144642_9 (sequence is synthesized)
agaatatgctgaaaccctttggacatgtcatttccacaagaatactaagagacgctaatggagtcagcagaggtgttggctttgccagaatggagtctactgaaaaatgtgaagtggtaa

SEQ ID NO: 388760 - DNA, 120 bp, Artificial Sequence
  ENSG00000144642_10 (sequence is synthesized)
ttcaacattttaatggaaaatatctgaaaacaccaccaggcatcccagcccccagtgagcctttgctgtgcaaattcgctgatggaggacaaaagaagcgacagaatcaaagcaaatata

SEQ ID NO: 388761 - DNA, 120 bp, Artificial Sequence
  ENSG00000144642_11 (sequence is synthesized)
cccagaatgggaggccttggcccagggaaggagaggctggcatggctttgacctatgaccccacagctgccatacagaatggattttattcttcaccgtacagtattgcaaccaaccgca

SEQ ID NO: 388762 - DNA, 120 bp, Artificial Sequence
  ENSG00000144642_12 (sequence is synthesized)
tgattccacagacatctatcacgccattcattgctgcttcccctgtctccacataccaggtccagagtacttcatggatgcctcatccgccatacgttatgcaaccaacaggtgctgtga

SEQ ID NO: 388763 - DNA, 120 bp, Artificial Sequence
  ENSG00000144642_13 (sequence is synthesized)
ttacaccaaccatggaccatcccatgtcaatgcagccagccaacatgatgggcccactgacacagcagatgaatcacctttcgttgggcacaacaggaacgattcaatcccaagacagga

SEQ ID NO: 388764 - DNA, 120 bp, Artificial Sequence
  ENSG00000144642_14 (sequence is synthesized)
ttatgatactccaccagctgttgtgtcagtatatgactgctgctgctcctatgcaagggacctacattcctcagtacacgcctgtgcctccgacagctgtttctattgaaggtgttgttg

SEQ ID NO: 388765 - DNA, 120 bp, Artificial Sequence
  ENSG00000144642_15 (sequence is synthesized)
ctgatacctctccccagacagtggcaccttcatcccaggacaccagtggtcagcagcaacagatagcagtggacacatccaacgaacatgcacctgcatattcttaccaacagtctaaac

SEQ ID NO: 388766 - DNA, 120 bp, Artificial Sequence
  ENSG00000144642_16 (sequence is synthesized)
cataaacaggactgaagaatgtctgtctgaatctttgccttgaatgaagaaacttcattgaacaagaagttggcttccagtttgcacagacgtcaatggaatgcatttttttgttgttgt

SEQ ID NO: 388767 - DNA, 120 bp, Artificial Sequence
  ENSG00000144642_17 (sequence is synthesized)
tgttgttttttttttagtgttataccttacccaatgaaagcaaagtttttatgtgctgtgcaaatggtcttcatgtggtctgacaatttatttttgccatcatttttttaattaaagaaa

SEQ ID NO: 388768 - DNA, 120 bp, Artificial Sequence
  ENSG00000144642_18 (sequence is synthesized)
aaatttccagaagaggaaaaaaaaactacaaaaaacaaaacattgaaggttgatattttatgtggaagaacatttgaattgaattcagaatttttctgaaggtgtagatacttttttttt

SEQ ID NO: 388769 - DNA, 120 bp, Artificial Sequence
  ENSG00000144642_19 (sequence is synthesized)
ttttttaacagaaaacctgatgtcaagaggtgggcaatagaaatggaaacaaattgtcttcctcaataattaagctactttctctttttcccttcttgttttaatctagtgggtttttta

SEQ ID NO: 388770 - DNA, 120 bp, Artificial Sequence
  ENSG00000144642_20 (sequence is synthesized)
ttttattttttcttagaaatatgtaggtaaggtttatcttgaatcttaattgccttaattttaaggacgtcaaaggctctcgaggcaagctgtcaacgtcttgttgaaaacaaaaatcaa

SEQ ID NO: 388771 - DNA, 120 bp, Artificial Sequence
  ENSG00000144642_21 (sequence is synthesized)
gaaagaattgaaatactgtgccggctttcactggcacagaagtttaagactatgagtttttagggtgaagaaaaaactgtacagtttaaatgaaaatgtttttcttcatttgaagaaaat

SEQ ID NO: 388772 - DNA, 120 bp, Artificial Sequence
  ENSG00000144642_22 (sequence is synthesized)
ttgttgataaaccatggcaactgcaagaattggaaaaatgctgggacttttcatgaactttgtcttaagtgttgacatgaatcattctaaaaggctaaaacattttacagtaaagttatt

SEQ ID NO: 388773 - DNA, 120 bp, Artificial Sequence
  ENSG00000144642_23 (sequence is synthesized)
aaggttggtttaaaaacaactgcattagaaataatgcgtgtttggggggcagaatgcagatttttttaatttacaaagcgtgatcgctagcaaaagcattagtgctttttatctgcagtc

SEQ ID NO: 388774 - DNA, 120 bp, Artificial Sequence
  ENSG00000144642_24 (sequence is synthesized)
ttttttatgagctttacaaagtttttagtcagctttgcttgtcacattgcaaaacctagcttaagagcattaaaaaaaaaaacttaagtagataggagcttatggtcaaaaagtgcaaaa

SEQ ID NO: 388775 - DNA, 120 bp, Artificial Sequence
  ENSG00000144642_25 (sequence is synthesized)
aaaaaaacaaaaaaaaagcaatagatagagaaattgttgacaatttctgtagtctttcctagttgtgatcaaattcagcctatggatggcctattttataccaaagatgaagtgacaccc

SEQ ID NO: 388776 - DNA, 120 bp, Artificial Sequence
  ENSG00000144642_26 (sequence is synthesized)
tattacagtccagaagatagaggttgttttcgtttcttttctttttaaaaaaaaaaaaatttatttgaccgacatggccggaccagttctttctttgttgtttgtttaaactaccttcca

SEQ ID NO: 388777 - DNA, 120 bp, Artificial Sequence
  ENSG00000144642_27 (sequence is synthesized)
ctggtgttttacatagtgcaaaaaaaaaaagagggtggggggagttgtctctcttttctttaaatgtgtattcattgatagcagaagcttgtacctgctgtgtttagcagtttcagcatg

SEQ ID NO: 388778 - DNA, 120 bp, Artificial Sequence
  ENSG00000144642_28 (sequence is synthesized)
aagagttctggatatgaactgattcatagagccaagtggctttaaattctgtgagcttttctggtttctcactagctgtcttgaatagtgaaacctgtattgatggccactagtaaacca

SEQ ID NO: 388779 - DNA, 120 bp, Artificial Sequence
  ENSG00000144642_29 (sequence is synthesized)
agatgcttatttaacaggtggaatattctttatatgaaatttcagctaaagacactttctggacctggtctgaaaggtcatttgtcaaaaaagcttagggatattctgtgaaatggtgag

SEQ ID NO: 388780 - DNA, 120 bp, Artificial Sequence
  ENSG00000144642_30 (sequence is synthesized)
tggtctcctggaaaggtctcattgtatttgaacaatagtcttccctctaaattacaacacctctgggttttgtctttacacctctgtctttgtcatcacctaccatgaatagtcaccttg

SEQ ID NO: 388781 - DNA, 120 bp, Artificial Sequence
  ENSG00000144642_31 (sequence is synthesized)
gttttgcaaatggggagggggtatcatctttttgcctgttttcactgtatttttgtatattggtgttgccgaaagaactttttctttcagtttaattctttgaggcatgtaggaccaata

SEQ ID NO: 388782 - DNA, 120 bp, Artificial Sequence
  ENSG00000144642_32 (sequence is synthesized)
agattgagaattctattggtggaatttagggaagtccttaaaatgctagttgacaatcaaggaacagtatgatttatatcaataagaaccaaaagaattaggtttgatcaatcatttaag

SEQ ID NO: 388783 - DNA, 120 bp, Artificial Sequence
  ENSG00000144642_33 (sequence is synthesized)
ccaaggaggaatacttgcatttagaacaatgcaaaactttgtctaaaatgaattaaattgacccacctgtaaaatatatctacatttttaattcatgagatgatatgtgttcaaccttta

SEQ ID NO: 388784 - DNA, 120 bp, Artificial Sequence
  ENSG00000144642_34 (sequence is synthesized)
cagttttacctgaaattaaggacaatggaatagaatttgttaagtgaaccattcactagattgctttctgaatgaatcctttgaatcaaataggtgaaactcttttcaaaaactaagtca

SEQ ID NO: 388785 - DNA, 120 bp, Artificial Sequence
  ENSG00000144642_35 (sequence is synthesized)
tgtactataaaacagggtaggctttttaaaaactaaaaagttttaaaggtaaatcatattcccattaggtcaacatgagtaataaggttgactcatgtgaaattgtcaatattctactat

SEQ ID NO: 388786 - DNA, 120 bp, Artificial Sequence
  ENSG00000144642_36 (sequence is synthesized)
ttctgtaaactctggttctcttatttgcaaccccatgcactggaagcccaaatcagagaatgactccatatatttatggtcacattggagacaaaagtgtatccaagaaaatgtagtgtg

SEQ ID NO: 388787 - DNA, 120 bp, Artificial Sequence
  ENSG00000144642_37 (sequence is synthesized)
cgttatagagaaattccaactggtcacactcaccattatggtttttcatgctttagagaaaatgctagatttatactgtcttttgttccatccttcagcttcccatgcattataaaggtg

SEQ ID NO: 388788 - DNA, 120 bp, Artificial Sequence
  ENSG00000144642_38 (sequence is synthesized)
gcacttaagtttttatctttgaaaagtgggccccaaagttttttggggtacaaaaagacatgtatgagaaccatattttctgtttctctttttcactctctaaactctttttgtataaat

SEQ ID NO: 388789 - DNA, 120 bp, Artificial Sequence
  ENSG00000144642_39 (sequence is synthesized)
aaggattatcctgggcataattcatttgaatatgaaaccaacatactttctttcatttttgtgaaaaaataaccaaaaacatgtattaatgtgatacaaagaaagtctcattcacacaat

SEQ ID NO: 388790 - DNA, 120 bp, Artificial Sequence
  ENSG00000144642_40 (sequence is synthesized)
caacaatgaggctaagaggtagctaccatgtggctaatgaatgtgcctaggtaacttcctgtttctattcaaaactgctgctttatttgtacattcagaaatatttttttcaactatgaa

SEQ ID NO: 388791 - DNA, 120 bp, Artificial Sequence
  ENSG00000144642_41 (sequence is synthesized)
atttcaatatcaattttttaagccagtttctgcaaaaggaaatgacctgtcatttgatgtgttcatgtgtgttttgtgtttggatagtttatatcatgccattctataaaatgtatgttt

SEQ ID NO: 388792 - DNA, 120 bp, Artificial Sequence
  ENSG00000144642_42 (sequence is synthesized)
tcaaaccaaaaagaaaaaaaatagaaggaaaacaacggcacatactcaaatttgccctgctttgtctgttgtcttacctaagacttgttttgaagagccaagtctgggagagaaaaaaaa

SEQ ID NO: 388793 - DNA, 120 bp, Artificial Sequence
  ENSG00000144642_43 (sequence is synthesized)
gcatcaacaggtaagcagcattacattgtgtggtaataaaccaaaataagttttcaatatatacagacaacagaattcaaatttaatcaacaaaatatattgtagtgatttgtttgtttg

SEQ ID NO: 388794 - DNA, 120 bp, Artificial Sequence
  ENSG00000144642_44 (sequence is synthesized)
agacggagtctcgctctgtcgcccatcctaactaggactataatctttttttttttctttaagttgaagttaattttctgtgcattctggtccaccagattttcaagcatttatttggat

SEQ ID NO: 388795 - DNA, 120 bp, Artificial Sequence
  ENSG00000144642_45 (sequence is synthesized)
atttggatgtttccatttttccttttgactttaatagccaagacttagcttaaacatcaggaaacaaactaaagccacaatccaaatgagagaaacactgtctcgtctaaactctagttt

SEQ ID NO: 388796 - DNA, 120 bp, Artificial Sequence
  ENSG00000144642_46 (sequence is synthesized)
catggtcagtgcaacagtgagttttcttttaataatggtatggtattgtcaagggaggcaaagtgttcatggtaacttggagctccccaatacatggccatgtcttctaaagacaacgta

SEQ ID NO: 388797 - DNA, 120 bp, Artificial Sequence
  ENSG00000144642_47 (sequence is synthesized)
atgagcccaagtgaactgaaggtcatactggcaggtgctgatgacagtttgtccttgaatgctgacatgtcttgaatattgcaaatgtcataatactcttttaaaacagtcctctacctg

SEQ ID NO: 388798 - DNA, 120 bp, Artificial Sequence
  ENSG00000144642_48 (sequence is synthesized)
actctagttttgcgaggattagtttgtttccttggtagatttcaacatttcagaatgttacctccaaatttcacttgaattacttcctcctgtgaccttagcagatctgtcacatttgaa

SEQ ID NO: 388799 - DNA, 120 bp, Artificial Sequence
  ENSG00000144642_49 (sequence is synthesized)
agcatatgactcacttccacccccttctaatgaaaaactgcatggtgttaaaagcactctcattagaaatataaggctgagaactgaagaaggctgtttaaagcaggaatttcactttat

SEQ ID NO: 388800 - DNA, 120 bp, Artificial Sequence
  ENSG00000144642_50 (sequence is synthesized)
tttactatgcctaaaaatacatctttggaccccttgcaaagtgctttaaaagtactttcaatttatgcatgactccaaaaaagtaatttttttttcccaaaaaaacctctttatttaaat

SEQ ID NO: 388801 - DNA, 120 bp, Artificial Sequence
  ENSG00000144642_51 (sequence is synthesized)
aattgggatatttgctaaatacctatttttttttacagtggcctaaaacccctattaatgaaaagtgaaatttgatttaattaggactcttgcagtcatcttcacgactgaggagaagtt

SEQ ID NO: 388802 - DNA, 120 bp, Artificial Sequence
  ENSG00000144642_52 (sequence is synthesized)
tcaataggctgtctagacattatgatgttaataggagattaaaatacatttggcaattcattttcattcttaatttgagtgcatgaaccactgcagatgagctgataagcagaaattctc

SEQ ID NO: 388803 - DNA, 120 bp, Artificial Sequence
  ENSG00000144642_53 (sequence is synthesized)
aagtgggtttcactaataaatgtttttttatatgatttgaaatcaagtaaagggacaatgtttatgtacgtgtataacaacattcagcacatttgaggaatcacacactataataaagct

SEQ ID NO: 388804 - DNA, 120 bp, Artificial Sequence
  ENSG00000144642_54 (sequence is synthesized)
taaacctgtcatagaaccttgatctatattactttgtcttcagtaaaaagtgaaggatgagattttgtctttcatgttattgtagctggcatgcttcaaaattttgagcttactgggact

SEQ ID NO: 388805 - DNA, 120 bp, Artificial Sequence
  ENSG00000144642_55 (sequence is synthesized)
gacagcctctcacttcaatctgagggattgacagaatttaaacaggctcattgattctgtacactctacccttcctgtggcaagtgataatgggatttcattaatgaatcaatttgtttt

SEQ ID NO: 388806 - DNA, 120 bp, Artificial Sequence
  ENSG00000144642_56 (sequence is synthesized)
acaaatgacatccactgtggcattggaagacagttgggtctgactcaagtttaacatttcttaccaaacattcttaagtatgaaattggtcctttaatccaaatgctcttggtcatggct

SEQ ID NO: 388807 - DNA, 120 bp, Artificial Sequence
  ENSG00000144642_57 (sequence is synthesized)
gtcctttgcggattacatagcattcaggaaagtacaaaaactaaacactaaatccccaactggccccaaagaccttttatgatgtgagagacaagagttcaccccagattaatttctttt

SEQ ID NO: 388808 - DNA, 120 bp, Artificial Sequence
  ENSG00000144642_58 (sequence is synthesized)
atcattggctttatactctaacatatagatactctctatagcaaaaaagggatgaatggctttcaatattcatttctgtttatttttgtgagggaaaataatatatcaagaaaattttct

SEQ ID NO: 388809 - DNA, 120 bp, Artificial Sequence
  ENSG00000144642_59 (sequence is synthesized)
tccacttagaaagctttaaagctgaagtagaggtgcagtcaagcttggatctgcaggaagaaccactaggccactgagtcatacttgagcttttcttactactgccccaatttctaaatt

SEQ ID NO: 388810 - DNA, 120 bp, Artificial Sequence
  ENSG00000144642_60 (sequence is synthesized)
gtgcataaatacaatcactctcaatttttgaagggctaattatctactttgtgggtgtgttttgttttttcttttcagcgtgtagggcttgggctctgtttccttttattagcatgtcac

SEQ ID NO: 388811 - DNA, 120 bp, Artificial Sequence
  ENSG00000144642_61 (sequence is synthesized)
ctgagggtggaacaaacaattggaaataaaatttgattattttatttcttataaagtattaatttcttaagggggtttgaaatcattggtaaaattaatatcagtacattatatgtcata

SEQ ID NO: 388812 - DNA, 120 bp, Artificial Sequence
  ENSG00000144642_62 (sequence is synthesized)
aattttgattatctataatgtcttttcttatctaccacaaataattgagagttggctaaattcttgcagaatatatgggaaaaaaatcatagcaaagaattcagcttccctcaaaagaaa

SEQ ID NO: 388813 - DNA, 120 bp, Artificial Sequence
  ENSG00000144642_63 (sequence is synthesized)
gctatttttgtttccttcactccactaaatttgaaccagtagcacggatcaacacgacttctgcaatgagagtataacggtagctcttggtacagtcatattcatatttttaaatctttc

SEQ ID NO: 388814 - DNA, 120 bp, Artificial Sequence
  ENSG00000144642_64 (sequence is synthesized)
tttgaccaaaactattgcattgttttcattacattttgactgcgttacttattaaggccgaatgactttgacacccccgtggattatttttatgatcacatcaaatttaaacaatgtcca

SEQ ID NO: 388815 - DNA, 120 bp, Artificial Sequence
  ENSG00000144642_65 (sequence is synthesized)
aagtgtaactttaatgttatattttgtttcaaaccctctggtctaagattattgagaaagatgttttttcctcctccctcaaatatgttatctcttcatatataaaaaaataagttattc

SEQ ID NO: 388816 - DNA, 120 bp, Artificial Sequence
  ENSG00000144642_66 (sequence is synthesized)
catgcttttcaggaactgtaaaaattatttcaaaaagatatttgaaaaagttttctctattctggacacaaatgcttccatttatttcaaaagaagaagaagaaaaatggaatcttaatt

SEQ ID NO: 388817 - DNA, 120 bp, Artificial Sequence
  ENSG00000144642_67 (sequence is synthesized)
taaaaaaatatatgtagtagtatctgctatgagatattcagtctctataaaaaaaaaaagggacacagcttcttttaaaacccttgtttcagtccatattcaacttcatggaacttctga

SEQ ID NO: 388818 - DNA, 120 bp, Artificial Sequence
  ENSG00000144642_68 (sequence is synthesized)
aacatcattcaattttgaactttatttaagagcatttttgtactgctgtctctgactgtcatggaaagttctgtaattctaaggtgtttctggttttatttttaatttcttcatctgtac

SEQ ID NO: 388819 - DNA, 120 bp, Artificial Sequence
  ENSG00000144642_69 (sequence is synthesized)
cacagtcaaattagcaaccatctcccccatcccttgggctttctgtagatcagtggatgttaggtttaaacttctgttttctttgatgaagctttcaataaaaaatgaaaataaaatcaa

SEQ ID NO: 388820 - DNA, 120 bp, Artificial Sequence
  ENSG00000144642_70 (sequence is synthesized)
agaacttcagccaacaagtcttcaggtgctccttcctatagcagatggtccagttcacagccacatcaggatcagactgttaatttcttctgtaaagaagccagctggcatttggatagg

SEQ ID NO: 388821 - DNA, 120 bp, Artificial Sequence
  ENSG00000144642_71 (sequence is synthesized)
aattgtgttgattctgtagatcactttgtctagctccacagtgagagcctatcaaactagtaagtcacgagtgaccatgagccctggcttcagctcccagtggaacagcagccaaccagc

SEQ ID NO: 388822 - DNA, 120 bp, Artificial Sequence
  ENSG00000144642_72 (sequence is synthesized)
gagagtgcaggcgctgaggacagcgacgatcccgagacgagacccaacggcgagaaaggagagagcaagagatgccatggactacaaggtgatgaataccactatgagctcactacaaga

SEQ ID NO: 388823 - DNA, 120 bp, Artificial Sequence
  ENSG00000144642_73 (sequence is synthesized)
agttttggccagacgatagaccacctccttaggtgtccggggagctgctgaaacataatgaggaagatgctgctgatccaaaggataaaaacacagaaactagaaccaagaagcacctaa

SEQ ID NO: 388824 - DNA, 120 bp, Artificial Sequence
  ENSG00000144642_74 (sequence is synthesized)
agtggactcatgcccagcatccctgcagactgactttctctgagctatagttctgcattggactgtttttcctttgctatcacctgcccaacacacaatcctggatgcttttgattggtt

SEQ ID NO: 388825 - DNA, 75 bp, Artificial Sequence
  ENSG00000144642_75 (sequence is synthesized)
cagaaaaaaagaaaaaaaaaaaaagagagagagagagaacagatttaaaggaatttgtgatgttctgacaagact

SEQ ID NO: 388826 - DNA, 120 bp, Artificial Sequence
  ENSG00000144642_76 (sequence is synthesized)
agaacagatttaaaggaatttgtgatgttctgacaagacttgactcctgactgagttttatggctgatgagggagaaggaaacgatcaagatgacttaggagtttctttgttattctgag

SEQ ID NO: 388827 - DNA, 120 bp, Artificial Sequence
  ENSG00000144642_77 (sequence is synthesized)
aatcgagcagagaagaaagaatactctgagaatgaaagaggaagacagcattcagagcgggacatagtagttttgaggtacatgggattcggtcagtagttggaaatttggatcatgaat

SEQ ID NO: 388828 - DNA, 120 bp, Artificial Sequence
  ENSG00000144642_78 (sequence is synthesized)
acaccaaggcaagaaagacttttttaaaactttaatttttaaactaattatagcacttttgattaatcaagtcttaacaagcgggaatattttggaattttacttctaacaccttatttt

SEQ ID NO: 388829 - DNA, 120 bp, Artificial Sequence
  ENSG00000144642_79 (sequence is synthesized)
taggtctaaaaatagtaaggcaatcctaggctgtcctaatattaatgtagagagtgttttctgagaagtctccctataaatcttggaattatctcatgttgtagctggaaggatctaggg

SEQ ID NO: 388830 - DNA, 120 bp, Artificial Sequence
  ENSG00000144642_80 (sequence is synthesized)
tcatctactccagtggtggctaatttgaatgtctttcgaggccagacagagaacttcagccaacaagtcttcaggtgctccttcctatagcagatggtccagttcacagccacatcagga

SEQ ID NO: 388831 - DNA, 120 bp, Artificial Sequence
  ENSG00000144642_81 (sequence is synthesized)
taaatataggctgaatctgggagaaatacacatttttcctcacagatcacaaccacagaaggtaaaaaaggagaaagatacagagattcttaagaaataacaagcaaacgagtctagctc

SEQ ID NO: 388832 - DNA, 120 bp, Artificial Sequence
  ENSG00000144642_82 (sequence is synthesized)
ttgtgatttttgtattggaaattgagggttggctaattgaagtcagatgttcagtgcagagtgttgcagcgtatcccaatttgttgccttgtttctctgttctctctttgtatgatctat

SEQ ID NO: 388833 - DNA, 120 bp, Artificial Sequence
  ENSG00000144642_83 (sequence is synthesized)
ggagactccaaaaagttatctggggaagaacaatggcacatttaactcagattctattccagacaagcttatcaaacaatttctgtggaacaagtacagtgttattcctgatagaattct

SEQ ID NO: 388834 - DNA, 120 bp, Artificial Sequence
  ENSG00000144642_84 (sequence is synthesized)
gtcgagatagataggacacataggacttatcaaagagggaagcccgtcacctttattagtctggaacttccttttcttcaatcaacaacatatgtgaaccttcttttcttgctagaaata

SEQ ID NO: 388835 - DNA, 120 bp, Artificial Sequence
  ENSG00000144642_85 (sequence is synthesized)
tagaatatatcttccttttgatttttgcataaagtataataatatagctttacagtaaagtatttaaatcttcccttattaggaaccaaaaggtgttttccagttgttctttaatttcat

SEQ ID NO: 388836 - DNA, 120 bp, Artificial Sequence
  ENSG00000144642_86 (sequence is synthesized)
aatgatataatgaatgcaggtgtatgtaacatagtgtatatatgtgtatgtgtatatgtacatgtcagtatgtatatatctccatatgtttgtgatatggcttccttataattgtattag

SEQ ID NO: 388837 - DNA, 120 bp, Artificial Sequence
  ENSG00000144642_87 (sequence is synthesized)
ggcggcccctcctcggcgagccatgcgtgccacgggcagctgagtagctgccgggcgccgctgccaagtctccactccgcttttgtcttgccctccagtgaatgggaagatggagatgga

SEQ ID NO: 388838 - DNA, 120 bp, Artificial Sequence
  ENSG00000144642_88 (sequence is synthesized)
tggatgttgagggagtttctccgcgcccggagcccatcccccgctcccagggggctggcggagcctgccaggcgccgccacagccgccccagccccagccgccgcctcagcagctggctc

SEQ ID NO: 388839 - DNA, 120 bp, Artificial Sequence
  ENSG00000144642_89 (sequence is synthesized)
tgaactgcccggcgagagtgcaggcgctgaggacagcgacgatcccgagacgagacccaacggcgagaaaggagagagcaagagaacttcagccaacaagtcttcaggtgctccttccta

SEQ ID NO: 388840 - DNA, 120 bp, Artificial Sequence
  ENSG00000144642_90 (sequence is synthesized)
tgctgatccatttgggagcattatggaattcaaagcccagaataatgggctctatttaatattgaacaggttcttgataacccgccatttctctccagagctgcttgaaagtccctcctg

SEQ ID NO: 388841 - DNA, 120 bp, Artificial Sequence
  ENSG00000144642_91 (sequence is synthesized)
gacgtgcagagttgcagtggcagttcccatgaagttgtaagctactacccaggatcaagtggtgttaaattgagaagtcatcctgttcacctgactagtggtgaaccctgatttaagaat

SEQ ID NO: 388842 - DNA, 120 bp, Artificial Sequence
  ENSG00000144642_92 (sequence is synthesized)
ttccaaggctaccctcgccatctctatttaaatttatagacgcaacgcactgcctgccctggggtcaccaccgaagcctcctggtggagccctgccctgctgaggacgctcttccagcac

SEQ ID NO: 388843 - DNA, 120 bp, Artificial Sequence
  ENSG00000144642_93 (sequence is synthesized)
agaactcaccaccaaaaagagacggcgcccagctggcgcccgccccgggcacattgcagtaaatgcctggcagcgacttctcgcttctccttcctcctaccccatcgaccctctgttgcc

SEQ ID NO: 388844 - DNA, 120 bp, Artificial Sequence
  ENSG00000144642_94 (sequence is synthesized)
gacctttacgccaaactccggcgcgccgcgagactcgcgtcctcgctgtccccgaggggccccaccccttcccggttctaacctgcgacctggccagaggcaaggtgaatgggaagatgg

SEQ ID NO: 388845 - DNA, 120 bp, Artificial Sequence
  ENSG00000144642_95 (sequence is synthesized)
tggggcgaggctggctgaggttctcaaggagctgagttttgagttcaggtgctcgtgtagcagtggaatgatgcctcctgacctttcagacctttgagacctctgggcggtcttagaaat

SEQ ID NO: 388846 - DNA, 120 bp, Artificial Sequence
  ENSG00000144642_96 (sequence is synthesized)
ttttctttttctttccttgaccctgggaattataaacgagaaattgctttaaaaagtattgttctgtgctaaaattagccttgtttatgaacaagttttatccctagggatttcctgaat

SEQ ID NO: 388847 - DNA, 120 bp, Artificial Sequence
  ENSG00000144642_97 (sequence is synthesized)
tgcaatcccagattaccttgtaaatggggctgtgttgtttgatttgtatagtactgatctgtaggttaaaatacgtttcctttcttttgtttcattctttttttaaaagtctggatccag

SEQ ID NO: 388848 - DNA, 120 bp, Artificial Sequence
  ENSG00000144642_98 (sequence is synthesized)
gtaatggcctgagtcacatttgcttagctactgaagcgatctcaatatgttatcgcttagagttgaaacataatcaaacatacgttatacctggggctcttgcacactatttgatatata

SEQ ID NO: 388849 - DNA, 120 bp, Artificial Sequence
  ENSG00000144642_99 (sequence is synthesized)
tatgttactctacaaagaaacacaaaccttgtatgttgaaatgtaattcctgtttgatcctgcagctagaatgctaaagaaattgcaaatatcaaaagtgacttcaaataccctgaatat

SEQ ID NO: 388850 - DNA, 120 bp, Artificial Sequence
  ENSG00000144642_100 (sequence is synthesized)
aagctagtcaacagtaagtggatggttccagaataccatattctaagacaaagcaggaattagagatcaactgacctcatccataatgttgctcaggtctgtctgtggatctgtccattt

SEQ ID NO: 388851 - DNA, 120 bp, Artificial Sequence
  ENSG00000144642_101 (sequence is synthesized)
tggagtaaaaaacaaggcatgcttctgtgattgtgtttatgaaaactgtagtatttcagatttatgttttgcaattgtgcctgccttgcaataaaacaccttcagttgactcagcaataa

SEQ ID NO: 388852 - DNA, 120 bp, Artificial Sequence
  ENSG00000144642_102 (sequence is synthesized)
tgaaatttgggctaactttgggtggatggttcttctgatcttgacaggaatcaaacatctaggaacagctgctgattatctatgcatctctgcttctgggtgttgctagctgttggatgt

SEQ ID NO: 388853 - DNA, 120 bp, Artificial Sequence
  ENSG00000144642_103 (sequence is synthesized)
gtgatggaagtgactaggccatatgtttctgatcctccagcaggctaattcacatggaagtctcagaatttcaagaatagtaaagagcaagcccaaatgtacaagcactcttaattctgt

SEQ ID NO: 388854 - DNA, 120 bp, Artificial Sequence
  ENSG00000144642_104 (sequence is synthesized)
ttattactaattttctactgtctcattagccaaagcaagtcacttggccaaacagtcaatgtagcagttcactttgaaaaagcttgatatagagagaggcactgcagccattaaaaaaaa

SEQ ID NO: 388855 - DNA, 120 bp, Artificial Sequence
  ENSG00000144642_105 (sequence is synthesized)
cacaggacttcaattttataagagtccagaaagttctgagtaatgcacagaattctacatacacagcaaatgcagccatggcaaaatgtagtccctggtgagggaggcaaacagagaatc

SEQ ID NO: 388856 - DNA, 120 bp, Artificial Sequence
  ENSG00000144642_106 (sequence is synthesized)
aacaatcctttgcttttattggaataataaaaccggagcagtttgtgtctgaatgtgctgtaaaccagattttttttttcatgtaaattctatagccaggatatcacagacattgccatg

SEQ ID NO: 388857 - DNA, 120 bp, Artificial Sequence
  ENSG00000144642_107 (sequence is synthesized)
gcctatttttatggatggtgggtcaagatggcggattcaatgaaatagtatttcataacaaaatgagcatgaagagaatttgggcatgtctaccaaaacacgaaggacaacaacaagagc

SEQ ID NO: 388858 - DNA, 120 bp, Artificial Sequence
  ENSG00000144642_108 (sequence is synthesized)
ccaacaatttagaaaaaaaatactctgggaagaaaggatagatgtctctttgcatggattataattctgatgttttggaaagaaaagagatttctgttactggaccctgggaacttattg

SEQ ID NO: 388859 - DNA, 120 bp, Artificial Sequence
  ENSG00000144642_109 (sequence is synthesized)
aggatgaactgcccggcgagagtgcaggcgctgaggacagcgacgatcccgagacgagacccaacggcgagaaaggagagagcaagtcaggccactcttccatagggctgctgcagtttg

SEQ ID NO: 388860 - DNA, 120 bp, Artificial Sequence
  ENSG00000144642_110 (sequence is synthesized)
ctgggggtctgcttcagaccctagttgcctccatttttcccatgcctggaggtatcaccagtgaagcctgcaaaacagcaaagatggcaccctgctcctttttctggaatctccgtccca

SEQ ID NO: 388861 - DNA, 120 bp, Artificial Sequence
  ENSG00000144642_111 (sequence is synthesized)
gagctccatgggaagaggcccgaggaatgagcacagtcttgacagtttcagtgtgggctgactgtgtcctgaagaatgggctgggaagcagctttacattcagcccctcgaggaaggtga

SEQ ID NO: 388862 - DNA, 120 bp, Artificial Sequence
  ENSG00000144642_112 (sequence is synthesized)
ctcatctgggtttgttgccctgtctgatgctcccctacttgggacactgagaacttcagccaacaagtcttcaggtgctccttcctatagcagatggtccagttcacagccacatcagtc

SEQ ID NO: 388863 - DNA, 120 bp, Artificial Sequence
  ENSG00000144642_113 (sequence is synthesized)
cctgcactaccagtcccatgccagctatacctactgtactggacaccctgctttttcagccagatggagccaaggcagaagcccactggtggaacctaggcagatgccagcagacacaga

SEQ ID NO: 388864 - DNA, 120 bp, Artificial Sequence
  ENSG00000144642_114 (sequence is synthesized)
aacctgggaaacaggctgcacattgagtcatcctctaatggaagatgggatggcaaggaatggacacaagggagaactgacgagggatctacacgtgtaggaacttttctctggatgaga

SEQ ID NO: 388865 - DNA, 120 bp, Artificial Sequence
  ENSG00000144642_115 (sequence is synthesized)
aaaatgtaaatccattcagaaacatttcttctctatcagtgaagctctacttatatttaggggaatagaaacatttgagggtatctaaaatatctggtaatagaggaaatttaatatatt

SEQ ID NO: 388866 - DNA, 120 bp, Artificial Sequence
  ENSG00000144642_116 (sequence is synthesized)
atttggtgtgctttttacccagtgaacagttgaacccattatttacaacttagcattactttagctgaaaaggtatctggagattaagaaaaattatactgatcataatattaaaaatgt

SEQ ID NO: 388867 - DNA, 120 bp, Artificial Sequence
  ENSG00000144642_117 (sequence is synthesized)
aacttattttttattttgtgtttccagagttagaggataccctgtagtgttctagcccacccatatctttctaatttttaagtgtgatcaccattagaacatgaacattaccaaatgggg

SEQ ID NO: 388868 - DNA, 120 bp, Artificial Sequence
  ENSG00000144642_118 (sequence is synthesized)
attaggcttattcatatgtttcatttattttaacctacttgaacactgaactttctttccttataatttgcaaagacaaagtcaacatctggaggaggccatgctgatcccatctatgcc

SEQ ID NO: 388869 - DNA, 120 bp, Artificial Sequence
  ENSG00000144642_119 (sequence is synthesized)
ataacctttacactgctggctcaactgtgagattgcaaagggatcagtgaactagatcgcagacccccagctccttctggccatttctcacctgctctcttcttcctgcccttcatctgc

SEQ ID NO: 388870 - DNA, 120 bp, Artificial Sequence
  ENSG00000144642_120 (sequence is synthesized)
ccacctgtccctctatttttctctctgctgctttcagaccacaaagaaaattgagtgcagtgtcaccttatgatatggattggatgtttgtcctctccaaacctcataatgaaatgtgac

SEQ ID NO: 388871 - DNA, 120 bp, Artificial Sequence
  ENSG00000144642_121 (sequence is synthesized)
ctccagtgttttgaggttggcctggtgggaggtattggatgatgagggtggatccattatgaatggcttagtgctattcccttggtgatgagtgaattcatcagttaattcacaagagat

SEQ ID NO: 388872 - DNA, 120 bp, Artificial Sequence
  ENSG00000144642_122 (sequence is synthesized)
ctggttgtttaagagtctaggacatcccccttctttctctctttctcctgtttttaccatgtaatgtgtttactcctccttccccgtgctccataattggaagcttcctgaggccttcac

SEQ ID NO: 388873 - DNA, 120 bp, Artificial Sequence
  ENSG00000144642_123 (sequence is synthesized)
cagaaggagatgcagcactattcttggtgtacagcccacagcactatgagccaattaagcctcctttctttataaattactccaccttaggtatttctttatagtaatgcaaaaatagac

SEQ ID NO: 388874 - DNA, 120 bp, Artificial Sequence
  ENSG00000144642_124 (sequence is synthesized)
taatagacatcttacctactcatgccactgtttcagaagccacccccgttccacttaaatatcatacatgatggaaaacaaaacaatacacaaggtagaaaacatcctagatagcagctc

SEQ ID NO: 388875 - DNA, 120 bp, Artificial Sequence
  ENSG00000144642_125 (sequence is synthesized)
ctgagggaaggtacacttctacaaaataaaaatcaatgagtttatattttggtagcctgtgatgttatacagaatagacagagattctacttaggattccaattcccttaggcccattaa

SEQ ID NO: 388876 - DNA, 120 bp, Artificial Sequence
  ENSG00000144642_126 (sequence is synthesized)
gtagggcagatggacattagaagagatgccttcaaaagtggacattaatgtactcttaaaagtaatgggtctgacctataaatcatgggaggaatgtagtacaaaatagtgaatgaaata

SEQ ID NO: 388877 - DNA, 120 bp, Artificial Sequence
  ENSG00000144642_127 (sequence is synthesized)
tttatacgttccattgaagcttcgtgtatattctagagggagaagtcccagagagatgggtcttcccctttgttctgaatctattttccaattgctctgacacagctgttggcttcacag

SEQ ID NO: 388878 - DNA, 120 bp, Artificial Sequence
  ENSG00000144642_128 (sequence is synthesized)
tcattctgaagttgattagatcagaaagcagaggcctgcctgcccagcatgaccaatgaaaaacataaagtttgtcgctgtttcaagcctggagcatgtattttgaagttgttttggtgt

SEQ ID NO: 388879 - DNA, 120 bp, Artificial Sequence
  ENSG00000144642_129 (sequence is synthesized)
taaaatctaccaatcacatttggaaatggctgtcagatttatggagcatggctgtaattacattcacagaaatgctcagttgaaagcagtaacgaaggcttattacttttgttttgtttg

SEQ ID NO: 388880 - DNA, 120 bp, Artificial Sequence
  ENSG00000144642_130 (sequence is synthesized)
ttttaataaaacaaaacacttgagtttaaggaaataaattgttacctatggagaaatcttttgacttgttgttggaatgatttagtgtttctaaaacatgtgctgtaggtgagcctaaat

SEQ ID NO: 388881 - DNA, 120 bp, Artificial Sequence
  ENSG00000144642_131 (sequence is synthesized)
gcagattcgtttttgtctgaaggtcagaaaggtttgtaacaactgctaacagtaatatgagatattatgctaactgcttttcaacaattatttcatttaatcttcaaaattaaaaggcaa

SEQ ID NO: 388882 - DNA, 120 bp, Artificial Sequence
  ENSG00000144642_132 (sequence is synthesized)
ggagggagtatgattttcattctccacttacagaatccctcctccctaccagccgagtctgtccttcaccgtattctgatcccaggtccctctaagcacaaagtcatatagataggggag

SEQ ID NO: 388883 - DNA, 120 bp, Artificial Sequence
  ENSG00000144642_133 (sequence is synthesized)
ccttttagtgaagccctatcctccttcgaaaagaattctcctaagtgaatactggcctctaggcccctgtgactatgggcacaacctgggatgctttggggcttcatcgatgggaaactt

SEQ ID NO: 388884 - DNA, 120 bp, Artificial Sequence
  ENSG00000144642_134 (sequence is synthesized)
gagtggcactttgccagcaacagcaacacttccacttgcctttctcgtttagttgccaacttggctccttgaaagccttatgagctgggtacggtggctcatgcctataatcccagagct

SEQ ID NO: 388885 - DNA, 120 bp, Artificial Sequence
  ENSG00000144642_135 (sequence is synthesized)
ctgtctataaaaagaaaaaaaaaaaagcctgatgttgccaaagttacctagtctctaaatataggatccagtaccaacaacattttaactatgtcatcgggagtggtcagctgaattatt

SEQ ID NO: 388886 - DNA, 120 bp, Artificial Sequence
  ENSG00000144642_136 (sequence is synthesized)
gagtcatacaattttagagttggtatgaccttaaatttcatgtggtctgcacccctccatcttcagctgaggaggctggccttcaaggagttggggggattttactaagccatataagtg

SEQ ID NO: 388887 - DNA, 120 bp, Artificial Sequence
  ENSG00000144642_137 (sequence is synthesized)
gggagggtagtctggaataagaaacaacatatattcactcccagttctgaacttttccttatactgtattgccagaacacaccatgaaatttcgctctgcaatagataagagtttcttct

SEQ ID NO: 388888 - DNA, 80 bp, Artificial Sequence
  ENSG00000144642_138 (sequence is synthesized)
tgaaatttcgctctgcaatagataagagtttcttcttgatactatattttactatgttgatactatattatggaaacaat

SEQ ID NO: 388889 - DNA, 88 bp, Artificial Sequence
  ENSG00000144642_139 (sequence is synthesized)
cttttagagtgcaaaaattagtagagacagggtttttccatgttagccaggctgatctcaaactccttacctcaggtcatctgcccac

SEQ ID NO: 388890 - DNA, 82 bp, Artificial Sequence
  ENSG00000144642_140 (sequence is synthesized)
cccatacctggctgaaaattctttattatctcccttcaaagagacaaacagaaaatgaaattgttgtcttagaatatcttac

SEQ ID NO: 388891 - DNA, 120 bp, Artificial Sequence
  ENSG00000144642_141 (sequence is synthesized)
gacaaacagaaaatgaaattgttgtcttagaatatcttacaataaagattagcttacagaaaaccaagactggtcatgaggttttctttctctactctttcacatgttatatgttttgta

SEQ ID NO: 388892 - DNA, 120 bp, Artificial Sequence
  ENSG00000144642_142 (sequence is synthesized)
ggaattttggccaagaatctagaggctaaatctgtatacatggttttaaaaaactgatataactgcaccaaaaactggagagagggcagtggggacatcacatcctagatattgacattt

SEQ ID NO: 388893 - DNA, 120 bp, Artificial Sequence
  ENSG00000144642_143 (sequence is synthesized)
caaatggagatactttctttacaagtgtagattcctaacctttaatgcattctgagaatttgacatggatttgttttatagctctcaaagtattcaatttagaacaacaacaaaaattgc

SEQ ID NO: 388894 - DNA, 78 bp, Artificial Sequence
  ENSG00000144642_144 (sequence is synthesized)
gctctcaaagtattcaatttagaacaacaacaaaaattgcattagaaaacatactatgctgggcccggcgtgggcaga

SEQ ID NO: 388895 - DNA, 120 bp, Artificial Sequence
  ENSG00000144644_0 (sequence is synthesized)
gcgcgtcctcgtccctccgtttgcactggtgttctctccgcggctgcctggtgcacctgcgggtcccccggggggcgctgcctcggcaaccaccgtcgccgcccagactgcgggagccgc

SEQ ID NO: 388896 - DNA, 120 bp, Artificial Sequence
  ENSG00000144644_1 (sequence is synthesized)
gcccggggcagcctggagtgggggagcggagatgagcagcgactcggaccgccagtgtcctgtggacggagatattgatcaacaagagatgattccaagtaagaagaatgctgttcttgt

SEQ ID NO: 388897 - DNA, 120 bp, Artificial Sequence
  ENSG00000144644_2 (sequence is synthesized)
ggatggggttgtgctgaatggtcctacaacagatgcaaaagctggagaaaaatttgttgaagaggcctgtaggctaataatggaagaggtggttttgaaagctacagatgtcaatgagaa

SEQ ID NO: 388898 - DNA, 120 bp, Artificial Sequence
  ENSG00000144644_3 (sequence is synthesized)
ggtgtgtgaatggaggcctcctgaacaactgaaacagcttcttgatttggagatgagagactcaggcgagccaccccataaactattggaactctgtcgggatgtcatacactacagtgt

SEQ ID NO: 388899 - DNA, 120 bp, Artificial Sequence
  ENSG00000144644_4 (sequence is synthesized)
caaaactaaccacccaagatttttcaaccaattgtatgctggacttgattattactccttggtggcccgatttatgaccgaagcattgaatccaagtgtttatacgtatgaggtgtcccc

SEQ ID NO: 388900 - DNA, 120 bp, Artificial Sequence
  ENSG00000144644_5 (sequence is synthesized)
agtgtttctgttagtggaagaagcggttctgaagaaaatgattgaatttattggctggaaagaaggggatggaatatttaacccaggtggctcagtgtccaatatgtatgcaatgaattt

SEQ ID NO: 388901 - DNA, 120 bp, Artificial Sequence
  ENSG00000144644_6 (sequence is synthesized)
agctagatacaaatattgtcctgatattaaggaaaaggggctgtctggttcgccaagattaatccttttcacatctgcagagtgtcattactctatgaagaaggcagcctcttttcttgg

SEQ ID NO: 388902 - DNA, 120 bp, Artificial Sequence
  ENSG00000144644_7 (sequence is synthesized)
gattggcactgagaatgtttgctttgtggaaacagatggaagaggtaaaatgatacctgaggaactggagaagcaagtctggcaagccagaaaagagggggcagcaccgtttcttgtctg

SEQ ID NO: 388903 - DNA, 120 bp, Artificial Sequence
  ENSG00000144644_8 (sequence is synthesized)
tgccacttctggtacaactgtgttgggagcttttgaccctctggatgaaatagcagacatctgcgagaggcacagcctctggcttcatgtagatgcttcttggggtggctcagctttgat

SEQ ID NO: 388904 - DNA, 120 bp, Artificial Sequence
  ENSG00000144644_9 (sequence is synthesized)
gtcgaggaagcaccgcaagcttctgcatggcatccacagggctgactctgtggcctggaacccacacaagatgctgatggctgggatccagtgctgtgctctccttgtgaaagacaaatc

SEQ ID NO: 388905 - DNA, 120 bp, Artificial Sequence
  ENSG00000144644_10 (sequence is synthesized)
tgatcttcttaaaaaatgctactctgccaaggcatcttacctcttccagcaggataaattctatgatgtgagctatgacacaggagacaagtctatccagtgtagcagaagaccagatgc

SEQ ID NO: 388906 - DNA, 120 bp, Artificial Sequence
  ENSG00000144644_11 (sequence is synthesized)
attcaagttctggatgacctggaaggccctgggtacattaggccttgaagaaagagttaatcgtgctcttgctttatctaggtacctagtagatgaaatcaagaaaagagaaggattcaa

SEQ ID NO: 388907 - DNA, 120 bp, Artificial Sequence
  ENSG00000144644_12 (sequence is synthesized)
gttactgatggaacctgaatatgccaatatttgcttttggtacattccaccgagcctcagagagatggaagaaggacccgagttctgggcaaaacttaatttggtggccccagccattaa

SEQ ID NO: 388908 - DNA, 120 bp, Artificial Sequence
  ENSG00000144644_13 (sequence is synthesized)
ggagaggatgatgaagaagggaagcttgatgctgggctaccagccgcaccggggaaaggtcaacttcttccgccaggtggtgatcagccctcaagtgagccgggaggacatggacttcct

SEQ ID NO: 388909 - DNA, 120 bp, Artificial Sequence
  ENSG00000144644_14 (sequence is synthesized)
cctggatgagatagacttactgggtaaagacatgtagctgtggctttggtcccccagaggcatagatcctatcctgggagagtttagatccagaacatcttggagatacacagtagattg

SEQ ID NO: 388910 - DNA, 120 bp, Artificial Sequence
  ENSG00000144644_15 (sequence is synthesized)
ggcccagcaaaaccaaaatgctaagcaatgaatattaaggactctctagctgcctgggcattactgttgctaaaagaagaaagtttaaaaaaaaaaatgattttctcaaggaatgcccct

SEQ ID NO: 388911 - DNA, 120 bp, Artificial Sequence
  ENSG00000144644_16 (sequence is synthesized)
ggaacacagctctgaagagagtttagtaagtaccatgtaggttctggattctaagcttacattgctctttaaagaacttataaactaacggtttaaagcagtggttctcaaagtgtggtc

SEQ ID NO: 388912 - DNA, 120 bp, Artificial Sequence
  ENSG00000144644_17 (sequence is synthesized)
cctggactatcagcatcaaagcatcacctgggaacttgctaaaaatgcagattctcaggctttctctagaccaactggatcagaagctctgggggtgaggcccagtattctgtgttttaa

SEQ ID NO: 388913 - DNA, 120 bp, Artificial Sequence
  ENSG00000144644_18 (sequence is synthesized)
caagcccgtcagggaattctgatgcacagtaaaatccgagaaacactggtttaagaaaaaccttgtaatgatcgaatacccactctgatgttttgccagcaaagggatatctaatatttc

SEQ ID NO: 388914 - DNA, 120 bp, Artificial Sequence
  ENSG00000144644_19 (sequence is synthesized)
agaagcctctgagccagtctttgaaaaaatacaactatggcatctgcagcacaaatatttaaggacatcagaagcatgtcaaagctatttttaaagagagaaactgtataagatgtttac

SEQ ID NO: 388915 - DNA, 120 bp, Artificial Sequence
  ENSG00000144644_20 (sequence is synthesized)
aaagagagaaactgtataagatgtttacttcatagagatttatgttttatgcaggctgaatgtttatctcaaaagttaaaattatccattctcaaaagttaaaattatatatatatatat

SEQ ID NO: 388916 - DNA, 120 bp, Artificial Sequence
  ENSG00000144644_21 (sequence is synthesized)
atataattcaaagcacaataattgaaagcacaataattgacagaaaaatacaggttctattaataaattaataaactgttggtcttcaaaatagaaatgcatgtaatatccatattagtt

SEQ ID NO: 388917 - DNA, 120 bp, Artificial Sequence
  ENSG00000144644_22 (sequence is synthesized)
ttttcttggtagacaactggaaggttttcttttttttcgtctatgactaattttctttattcaagatacctgaactggggtgctttttaagaaaaatttgggaaatatatatgtttctgt

SEQ ID NO: 388918 - DNA, 120 bp, Artificial Sequence
  ENSG00000144644_23 (sequence is synthesized)
gatatacatatatacatatatatgtatatatatacacacacatacatatgtgtgtgtatagtatatatatatatacacacatatatgtttctgtgttcctcttttagcttgaggggcttg

SEQ ID NO: 388919 - DNA, 120 bp, Artificial Sequence
  ENSG00000144644_24 (sequence is synthesized)
tttattatcttgctctgtgcctcatagggaataaacacaatgaagtccagggttgtacaacattccctttcctaagctttgaaatgtcagtatagattattaagtggtttatattacaga

SEQ ID NO: 388920 - DNA, 120 bp, Artificial Sequence
  ENSG00000144644_25 (sequence is synthesized)
atctgggattcagcagactttcagtgtaaatgcttcctccatttctcctgagagtgggtgattttaattctatctctgaccctggtcctaggtttctaggagagttttgtttaactaaga

SEQ ID NO: 388921 - DNA, 120 bp, Artificial Sequence
  ENSG00000144644_26 (sequence is synthesized)
aattgacagaattcataggtgtgggtgtagagttcaccaagataagattatgaatataattaaaggtctgcattaaaaggtgaatgattgaagagtgttaaagcattagacttagcacat

SEQ ID NO: 388922 - DNA, 120 bp, Artificial Sequence
  ENSG00000144644_27 (sequence is synthesized)
tcaataaccttttcgtactccattgttaaccaatgtcatttaaattttgagtactatttgcttttattgcttattttcattttagtgtgcacagtttctcggtatctctattggtcaaag

SEQ ID NO: 388923 - DNA, 120 bp, Artificial Sequence
  ENSG00000144644_28 (sequence is synthesized)
aatattaaatctgtctctgaattacttcaaattctcaggtgaaacctattggtgtgtgtgtgtgtgtgtgtgtgtttattttgcatttcttgttgcctttttgttttaatgtctacataa

SEQ ID NO: 388924 - DNA, 120 bp, Artificial Sequence
  ENSG00000144644_29 (sequence is synthesized)
aatatttctaaaattgatgtttgtaacaatttgggtttcatgaaacaaaaaggaacattactatacttagtgttgttgacttttcttttcctgtcatctcctctttactggattgtacca

SEQ ID NO: 388925 - DNA, 120 bp, Artificial Sequence
  ENSG00000144644_30 (sequence is synthesized)
atacattttagaagtgaactggacttggttggcattttagtttaatgactgaaaaagtaggttgaaagctctctgtattttagttaacaccttgaataaaatggaaaaagcagttatagc

SEQ ID NO: 388926 - DNA, 120 bp, Artificial Sequence
  ENSG00000144644_31 (sequence is synthesized)
atgtctgatagaaaaacagactggcagggaagataactgggttatgattacttagtgtagatgagagtttctgatagaacataaactgcccgcttcagaatcacttgacatgcttcataa

SEQ ID NO: 388927 - DNA, 120 bp, Artificial Sequence
  ENSG00000144644_32 (sequence is synthesized)
aatgccaattctttagccttttctaggatggacttagacattggacattttgaacataggaacctgagttcctatgagaatctacattttgaataggtcccctagctaattcgcactttt

SEQ ID NO: 388928 - DNA, 120 bp, Artificial Sequence
  ENSG00000144644_33 (sequence is synthesized)
actgatattcgagagccgggagtcaaggtgatgttcttttttcaaaagcagtattggctagggtcatagtagtgctggttagtgaagcccaagcaggtcacgctgttatcatctcacagc

SEQ ID NO: 388929 - DNA, 120 bp, Artificial Sequence
  ENSG00000144644_34 (sequence is synthesized)
tgtgtgtgtgtgtgtgtgtctatctgtgtctgtaataggaagacctaaggaaagtaatacttgaaatgtgttgcaagtacatgttttcatttgtgcattatttcatccaatacacatttt

SEQ ID NO: 388930 - DNA, 120 bp, Artificial Sequence
  ENSG00000144644_35 (sequence is synthesized)
atgttttcatttgtgcattatttcatccaatacacattttctcagtacctactaagtgttaggaattatgaacagagcagtcctatcacctccctccaagatcctagcctactgagatgc

SEQ ID NO: 388931 - DNA, 120 bp, Artificial Sequence
  ENSG00000144644_36 (sequence is synthesized)
acaaatgaccctcatttttggcaaggtgaggtatagagtccaagatcaatcaggagggcttctctagtgtgttcttgaggcacactggcagaggctccttggaggaagtgactttcaact

SEQ ID NO: 388932 - DNA, 120 bp, Artificial Sequence
  ENSG00000144644_37 (sequence is synthesized)
tccccacccagatctcatcttgaattgtattcccgtaattcccaggtgttgtgggagggacctggtgggaaataatttgaattatgggggctattttccccatactgcactgatagtgaa

SEQ ID NO: 388933 - DNA, 81 bp, Artificial Sequence
  ENSG00000144644_38 (sequence is synthesized)
acttttgcattcttcctcgttttctcttgctgctgccatgcaagaagtgcctttcggcttccgccatgaattgaggcctcc

SEQ ID NO: 388934 - DNA, 69 bp, Artificial Sequence
  ENSG00000144644_39 (sequence is synthesized)
cttttgcattcttcctcgttttctcttgctgctgccatgcaagaagtgcctttcggcttccgccatgaa

SEQ ID NO: 388935 - DNA, 62 bp, Artificial Sequence
  ENSG00000144644_40 (sequence is synthesized)
ttgactcttgttacgttttagcaaacagactggcggcattttgcccctgtcctagagatttg

SEQ ID NO: 388936 - DNA, 78 bp, Artificial Sequence
  ENSG00000144644_41 (sequence is synthesized)
tatggtatctgatgatgccattaaaagcattcccttttaaaagggaaacagcatcaaagttcagaaaattttcagcct

SEQ ID NO: 388937 - DNA, 120 bp, Artificial Sequence
  ENSG00000144644_42 (sequence is synthesized)
aaaagggaaacagcatcaaagttcagaaaattttcagcctgacgatgcagtagaaaaaacccattttttgaggagaaattcaagctagctgcagaaatttgcctaagtaacaaggagctg

SEQ ID NO: 388938 - DNA, 120 bp, Artificial Sequence
  ENSG00000144644_43 (sequence is synthesized)
tagggaaaatgtctccagggcatgtcataggtcttcatggcagtccctcccatcagacccagaagcctaggaggaataaatgatttcatgggcctggggacacacagggtccccaagctg

SEQ ID NO: 388939 - DNA, 120 bp, Artificial Sequence
  ENSG00000144644_44 (sequence is synthesized)
tgccctgcatcccagctgctccagccattgctaaaaggggccaaggtgcagctcagcccatggtttcagagggtgcaagccccaaaccttagcagcttccatgtggtgttgagcatgtgg

SEQ ID NO: 388940 - DNA, 86 bp, Artificial Sequence
  ENSG00000144644_45 (sequence is synthesized)
ccaaggtgcagctcagcccatggtttcagagggtgcaagccccaaaccttagcagcttccatgtggtgttgagcatgtgggcacac

SEQ ID NO: 388941 - DNA, 75 bp, Artificial Sequence
  ENSG00000144644_46 (sequence is synthesized)
aatttcagaagaggtatggaaacccctggatgcccagataaaagtttgctgcaggggagggggccctcatggaga

SEQ ID NO: 388942 - DNA, 120 bp, Artificial Sequence
  ENSG00000144644_47 (sequence is synthesized)
tgagacaaaggccaccatcttccagaccccagaatggtaggtccactgacagcttacactgtgtgccagcatgtgaaagcagccatgatgggggctataccctgcaaagccacaggggtg

SEQ ID NO: 388943 - DNA, 77 bp, Artificial Sequence
  ENSG00000144644_48 (sequence is synthesized)
gtgacccgaatttgactgccctgctggaattcagacttgcatgggtcctgtaacccctttgttttgaccaatttctc

SEQ ID NO: 388944 - DNA, 88 bp, Artificial Sequence
  ENSG00000144644_49 (sequence is synthesized)
ccatttggaatggctgtatttacccaatatctgtatccccattgtatctaggaagttactagcctgcttttgaccttacaggttcgaa

SEQ ID NO: 388945 - DNA, 120 bp, Artificial Sequence
  ENSG00000144644_50 (sequence is synthesized)
gaagagacttgccttgtctcagatgaaaccttggactgtggacttttgggttaatgctagaatgagttaagactttaggggactgttgggaaggtgtgattggttttgaaatgtgagcac

SEQ ID NO: 388946 - DNA, 86 bp, Artificial Sequence
  ENSG00000144644_51 (sequence is synthesized)
aagactttaggggactgttgggaaggtgtgattggttttgaaatgtgagcacgtgagatttggaggggcaaggggcagaatgacat

SEQ ID NO: 388947 - DNA, 90 bp, Artificial Sequence
  ENSG00000144644_52 (sequence is synthesized)
gatgttgtgggcgggacgcagtgggagataatactgtcatggtagtgcataagtctcacaagctctgatggttttatcaggggtttctgc

SEQ ID NO: 388948 - DNA, 75 bp, Artificial Sequence
  ENSG00000144644_53 (sequence is synthesized)
acttccaccagcctcagggaactgtggaactataagttcaattaaacctttttcttcccagtctcgggtatgtct

SEQ ID NO: 388949 - DNA, 120 bp, Artificial Sequence
  ENSG00000144644_54 (sequence is synthesized)
ttatcagcagcgtgaaaacagactaaaacagaaggggagaagaatgacccaagtggaaggagcagcaggcccaagtctctggatgtgaggtgacacaaaagtctggatgtgacattaagg

SEQ ID NO: 388950 - DNA, 120 bp, Artificial Sequence
  ENSG00000144644_55 (sequence is synthesized)
cattaaggacctgaaaagcaaatgatctgtgagttgtggcggcagcttaagtctcgaagggaaaggcagtgtggaagcaccatgtttacttgccttgtagtaaacattagaaataaaatt

SEQ ID NO: 388951 - DNA, 120 bp, Artificial Sequence
  ENSG00000144644_56 (sequence is synthesized)
gttgtcacactttcaagaacattagaaaagctcaagatataggtgccagacattgctacttgaataggactgaactgctaaacttagatcagtggtggacaggccatagccaaatttagt

SEQ ID NO: 388952 - DNA, 120 bp, Artificial Sequence
  ENSG00000144644_57 (sequence is synthesized)
tttaaatgtgttttgttgagcttatactgttcaaggttaactttcatggtgttaaacattcaaacatttcaatatttgaaatgcttttaaaaaaataaatttataaaaaacctggatttt

SEQ ID NO: 388953 - DNA, 120 bp, Artificial Sequence
  ENSG00000144644_58 (sequence is synthesized)
ttgcttttctcaaagcttagaatgctctcaatcccacatggtaacaactagctgaacatgatgatgcctgactctggaaaaacacagtccctatcatttcttacagtttaaaaaacaaaa

SEQ ID NO: 388954 - DNA, 80 bp, Artificial Sequence
  ENSG00000144645_0 (sequence is synthesized)
catttcccggggatttggagcaggcacgcgcggcccgggcgtccggagctgtagcagcagcagcagccgccgtgccgggg

SEQ ID NO: 388955 - DNA, 120 bp, Artificial Sequence
  ENSG00000144645_1 (sequence is synthesized)
accatggagagggcagtccagggcacagacggcggcgggggtagcaacagcagcagccgcagcagcagccgtgctacctcggcgggctcctcgccctcctgctctctggcgggccggggg

SEQ ID NO: 388956 - DNA, 120 bp, Artificial Sequence
  ENSG00000144645_2 (sequence is synthesized)
ggccgggctcggcggcgggggaagccgcagcagcccgggctctgtggccgctagcccgtccgggggaggcggccgcaggagggagccggcgctcgagggcgtgctcagcaaatacaccaa

SEQ ID NO: 388957 - DNA, 120 bp, Artificial Sequence
  ENSG00000144645_3 (sequence is synthesized)
gtgctcagcaaatacaccaacctcctccagggctggcagaacaggtacttcgtactggatttcgaggctggcatcctgcagtattttgtgaatgagcaaagcaaacaccagaagcctcga

SEQ ID NO: 388958 - DNA, 120 bp, Artificial Sequence
  ENSG00000144645_4 (sequence is synthesized)
ggagtcctgtctttatctggagccatagtgtccctgagcgatgaagctccccacatgctggtggtgtactctgctaatggagagatgtttaaactgagagctgctgatgcaaaagagaaa

SEQ ID NO: 388959 - DNA, 120 bp, Artificial Sequence
  ENSG00000144645_5 (sequence is synthesized)
caattctgggtgactcagcttcgagcttgtgccaaataccacatggaaatgaattctaagagtgctccaagctcccgaagccgaagtctcactttgctcccacatggaacacccaattct

SEQ ID NO: 388960 - DNA, 120 bp, Artificial Sequence
  ENSG00000144645_6 (sequence is synthesized)
gcgtctccctgtagccagagacacctcagtgtgggggcccccggtgttgtcacaatcacgcatcacaagtcgcctgcagccgcccgaagagccaagagtcagtattccggccagcttcac

SEQ ID NO: 388961 - DNA, 120 bp, Artificial Sequence
  ENSG00000144645_7 (sequence is synthesized)
gaagtcagagagatgatgaaccaggtggaagggcagcagaagaaccttgtgcacgccattgagtccctgccagggtccggccccctcactgccttggaccaggacctgctgctcctgaaa

SEQ ID NO: 388962 - DNA, 120 bp, Artificial Sequence
  ENSG00000144645_8 (sequence is synthesized)
gctacctctgctgccaccctcagctgccttggggagtgcctcaacttgttacagcagagtgtgcaccaggcgggccagcccagccagaagccaggagcctcggaaaacatcctgggatgg

SEQ ID NO: 388963 - DNA, 120 bp, Artificial Sequence
  ENSG00000144645_9 (sequence is synthesized)
cacgggtccaagtcacattccacagagcagctgaaaaatgggacacttggctctttgccatcagccagtgccaacataacctgggcaattttaccaaactctgctgaagacgaacaaacc

SEQ ID NO: 388964 - DNA, 120 bp, Artificial Sequence
  ENSG00000144645_10 (sequence is synthesized)
tcacagccagagccagagccaaactcaggctctgaattggttttgtctgaagatgaaaaaagtgacaatgaagataaggaagagacggaattgggcgtcatggaggatcagcgtagtata

SEQ ID NO: 388965 - DNA, 120 bp, Artificial Sequence
  ENSG00000144645_11 (sequence is synthesized)
attcttcatctcatttcacaactcaaacttggaatggatttgaccaaggtggtgcttcccacctttatcctggagaagcgatctttgctggagatgtatgcagatttcatggcgcaccca

SEQ ID NO: 388966 - DNA, 120 bp, Artificial Sequence
  ENSG00000144645_12 (sequence is synthesized)
gacctactgctggccatcaccgctggggccacaccagaggagagagtcatttgcttcgttgagtattatctcacagcctttcacgagggccgcaagggcgctttagccaagaagccctac

SEQ ID NO: 388967 - DNA, 120 bp, Artificial Sequence
  ENSG00000144645_13 (sequence is synthesized)
aaccccatcataggcgagacatttcactgctcctgggaagttcccaaggacagggtcaagcctaagaggactgcttcccgctctcctgccagctgtcacgaacacccaatggccgatgac

SEQ ID NO: 388968 - DNA, 120 bp, Artificial Sequence
  ENSG00000144645_14 (sequence is synthesized)
ccttccaaaagctacaaactaaggtttgtggctgagcaagtgtcccatcacccacccatctcctgcttctactgtgagtgcgaggagaagagactgtgcgtcaacactcatgtatggacc

SEQ ID NO: 388969 - DNA, 120 bp, Artificial Sequence
  ENSG00000144645_15 (sequence is synthesized)
aaaagcaagttcatgggcatgtccgtgggggtctctatgataggggaaggtgtgttgaggctcctggaacacggggaggagtacgtattcaccctgcctagtgcctacgcccggtccatt

SEQ ID NO: 388970 - DNA, 120 bp, Artificial Sequence
  ENSG00000144645_16 (sequence is synthesized)
ctcaccatcccgtgggtggagctcggaggaaaagtcagcatcaactgtgccaagactgggtactcagcgacagtgatattccacacgaagcctttctatggagggaaagtccacagggtt

SEQ ID NO: 388971 - DNA, 120 bp, Artificial Sequence
  ENSG00000144645_17 (sequence is synthesized)
accgcagaagtgaagcacaacccaaccaacaccattgtttgtaaagcccatggggaatggaatggtactttagagttcacctacaacaatggagaaaccaaagtcatcgacacaaccaca

SEQ ID NO: 388972 - DNA, 120 bp, Artificial Sequence
  ENSG00000144645_18 (sequence is synthesized)
ctgccagtgtatcccaagaagatcagacctcttgagaagcagggacccatggagtccaggaacctctggcgggaggtgacccgatacctgcggctgggggacattgacgcagccaccgag

SEQ ID NO: 388973 - DNA, 120 bp, Artificial Sequence
  ENSG00000144645_19 (sequence is synthesized)
cagaagcggcacctggaggagaagcaacgggtggaggaacggaagcgcgagaacctccgcacaccatggaagcccaaatattttatccaggagggcgatggctgggtatacttcaatccc

SEQ ID NO: 388974 - DNA, 120 bp, Artificial Sequence
  ENSG00000144645_20 (sequence is synthesized)
ctctggaaagcacactgatggggtggaggtgcagagctttccagtatagccctgtttttgtaggaatattaaagtagtagagtatcagggttttgttggcattcactgagaccttgtatt

SEQ ID NO: 388975 - DNA, 120 bp, Artificial Sequence
  ENSG00000144645_21 (sequence is synthesized)
agcatccaagaaatgatgagagagagagaaattatatactatgaaaagtgcacccccacactctgctagaggaatgaatttattcaagagccattcggggcacgtgtgtgtacacaccgt

SEQ ID NO: 388976 - DNA, 120 bp, Artificial Sequence
  ENSG00000144645_22 (sequence is synthesized)
atacgttcacacacatgcactatgtaaacatctgagtatgattacacatttaaatactgcactcaccaaggttaaagtgggtaatcataagctcctttttatcaatgaagtttgaagttt

SEQ ID NO: 388977 - DNA, 120 bp, Artificial Sequence
  ENSG00000144645_23 (sequence is synthesized)
ttctatttttcactttgccaaaaatgttttacactcacaaagatattctcacttagtcaactcctgtcaaaatgaaggtgaactggcatggcccgatcactgtccataagggagaaagtg

SEQ ID NO: 388978 - DNA, 120 bp, Artificial Sequence
  ENSG00000144645_24 (sequence is synthesized)
gctcattcctggtagaagtatgggtggttatcatttcaaaattattgtgattctcacctccctccccacctcagtgttttgtctgtccgcgcccaagaaagataagcaagtatttcctgc

SEQ ID NO: 388979 - DNA, 120 bp, Artificial Sequence
  ENSG00000144645_25 (sequence is synthesized)
tggatgggggttggcaggaagctgttaaagatttatgccagagccttgcaggatggagcacctctgggacaactaagagccaaggcccaccaaggagttttccacccgtctctcatggtc

SEQ ID NO: 388980 - DNA, 120 bp, Artificial Sequence
  ENSG00000144645_26 (sequence is synthesized)
acagcgctagtcattcatttttgagaagttgcttcttttacatcagaaaaccagtcaatcatatggagacttcttttgtgatgaaaaagggctttagaagttaaatacatgcatgcacat

SEQ ID NO: 388981 - DNA, 120 bp, Artificial Sequence
  ENSG00000144645_27 (sequence is synthesized)
gaaaacatgcacaaccacagcctcaatcttgtatttagtttggggaaagagaagagaatttcctgtggattattttttcctcaagtgcacctctctggttaacccaaactctgcaagaaa

SEQ ID NO: 388982 - DNA, 120 bp, Artificial Sequence
  ENSG00000144645_28 (sequence is synthesized)
gcactgtgactaaaacatacataacgcctgcataaatattccatggtttcagttaaatttcagtttttagcctttacacatgaggtcaaaggagtgacgaaaatacaaagcaaggaaaaa

SEQ ID NO: 388983 - DNA, 120 bp, Artificial Sequence
  ENSG00000144645_29 (sequence is synthesized)
atgaaatatctggtttttgctgaatgcttaatttattttttactgtgccactccaatatttatcaaatccaaatagcatgaatgcttctctgtagtaatactaattttgtgccttttgtc

SEQ ID NO: 388984 - DNA, 120 bp, Artificial Sequence
  ENSG00000144645_30 (sequence is synthesized)
tgctttcttaagaccagttgttcacactttgtagatattagacaaatatatttcgattgaatacatatctgtgtctgtgttttattttcagggattcaacagttctattaaattggtggc

SEQ ID NO: 388985 - DNA, 120 bp, Artificial Sequence
  ENSG00000144645_31 (sequence is synthesized)
tctaagtgagctcaacttttcctggttaaatatttctagttattgatatgaagagcaatcatatctatatggaaaaagtatttaacacatttaaaaatgtaccagataaacatttatgaa

SEQ ID NO: 388986 - DNA, 120 bp, Artificial Sequence
  ENSG00000144645_32 (sequence is synthesized)
tattttctggtaagtccataagaacatttaactcctacccagtgagtgttgtttcacgagaagagtcactgccagaagtcacaatagaagcctacttaggtccacagtctttaaagcatc

SEQ ID NO: 388987 - DNA, 120 bp, Artificial Sequence
  ENSG00000144645_33 (sequence is synthesized)
tgggtgaatcaagtatctggaaccatcttatttctgacagagaaagtggaacaaatgctattttgagaaaaagaagaaaactcaactcaatgagactgaaaagtaatcactgtgttgttg

SEQ ID NO: 388988 - DNA, 120 bp, Artificial Sequence
  ENSG00000144645_34 (sequence is synthesized)
gattttccagtctgactacaaagcataaaccatctgggaagtaaaacatggagagggctcacttttcttttgaggccaggggtacatttaaaattgtgaaatgttatgtgtcaggagatt

SEQ ID NO: 388989 - DNA, 120 bp, Artificial Sequence
  ENSG00000144645_35 (sequence is synthesized)
tacataaaacatatgtactccaggaataattataaatacccttgtagccactgcttaagcaaagaaacctgtttaccagtaccttaaaagccactattgtgcccctatacaattgtatcc

SEQ ID NO: 388990 - DNA, 120 bp, Artificial Sequence
  ENSG00000144645_36 (sequence is synthesized)
ctctccatgccttcctggaataaccatccccttatgggttttttgttgttcttttagactatacacactatgtgtgtatttctaaacagtgtgattggttttacccatttttgtaaaaat

SEQ ID NO: 388991 - DNA, 120 bp, Artificial Sequence
  ENSG00000144645_37 (sequence is synthesized)
tgaatcataccctagtttgcctatttgagccaatattttctttctagttcaatccttgttgctctatttgttcattttcttgctgagttcatattatgttttattgtggtaaaatatatg

SEQ ID NO: 388992 - DNA, 74 bp, Artificial Sequence
  ENSG00000144645_38 (sequence is synthesized)
tgttttattgtggtaaaatatatgtaacaaaatctaccattttaactattttttttttcccaatctctgctcac

SEQ ID NO: 388993 - DNA, 77 bp, Artificial Sequence
  ENSG00000144645_39 (sequence is synthesized)
cattttaaaaatatactgagaagtggaattgctatatcatatgaaaattctggtttaagttttaaggaattgccaca

SEQ ID NO: 388994 - DNA, 120 bp, Artificial Sequence
  ENSG00000144645_40 (sequence is synthesized)
catatgaaaattctggtttaagttttaaggaattgccacacagtttctcacaagagctggctgccacattttgcaatgccactagcaatgcacaagggatccaatttctccacatcctca

SEQ ID NO: 388995 - DNA, 120 bp, Artificial Sequence
  ENSG00000144645_41 (sequence is synthesized)
ccaatacctattattttgtttttacttttgttgtttctttaaccccatcctaatggctatgaagtgccatctcaatgtggttttgatttatatttccctaatgattagtgatgttgagca

SEQ ID NO: 388996 - DNA, 120 bp, Artificial Sequence
  ENSG00000144645_42 (sequence is synthesized)
tgtgtttttgtggttttggccatttgtaaatctttggagaaatgtttattcaaatccttttgcccattttaaaattaggttctttttgttgagttttaggagtcctttatgggtattaat

SEQ ID NO: 388997 - DNA, 120 bp, Artificial Sequence
  ENSG00000144645_43 (sequence is synthesized)
cctttctggatattaatcctttatcagatatgatgtgcaaatattttcttctgactctttggttgcctcttcactgttaatggtgtcctctgatgtacaaaagtatttaattttgataat

SEQ ID NO: 388998 - DNA, 120 bp, Artificial Sequence
  ENSG00000144645_44 (sequence is synthesized)
gtctaatttatttttctttgtacttgtgcttttgatgtcatatccaagaaatcattgacaaatacaatgctgtgaagtttttgtcctatgatttcttctaagagttttatagttttaggt

SEQ ID NO: 388999 - DNA, 120 bp, Artificial Sequence
  ENSG00000144645_45 (sequence is synthesized)
cttactggggggtagggggtactttgatccattttgagttggtttttatatatggtgttagataagggtccaacttcattcttttgcatgtggatatccagtttccccaacaccatttgt

SEQ ID NO: 389000 - DNA, 120 bp, Artificial Sequence
  ENSG00000144645_46 (sequence is synthesized)
tgaaaagactctgcattccccattgagtgatcttggtaccttgttgaaaatcactggctatatacacgaatgtttatttatggcctattcttttccaatggtcgatgtcagtctttatgc

SEQ ID NO: 389001 - DNA, 120 bp, Artificial Sequence
  ENSG00000144645_47 (sequence is synthesized)
cagtaccacactcttttagttactgtagctttgtagcaagttacaagattaggaagtatgagacctccaacttttttattcttttttcaatattgtttcgtctgtacagggtcatttaag

SEQ ID NO: 389002 - DNA, 120 bp, Artificial Sequence
  ENSG00000144645_48 (sequence is synthesized)
attccatgtgaattttaggatgaaattttctatttttgcaaaaaactctgggattttgatagggattgcattgaatctgtagatccctttgagtagcattgtcttaacagtaagtcttcc

SEQ ID NO: 389003 - DNA, 120 bp, Artificial Sequence
  ENSG00000144645_49 (sequence is synthesized)
aatctgttaaccagaatatctttccatttatttatctgtcttaatttctttcagcatgttttgtagttttcactgggcaagtcttcctcagttaagtttaattcttaagtattttactct

SEQ ID NO: 389004 - DNA, 120 bp, Artificial Sequence
  ENSG00000144645_50 (sequence is synthesized)
ttttggtactactgtaagtagatctttctcagtttcctttttggattgttcaatgttggcatataaaagtgtaagtgccaggcacagtgtcacatgcctatagttccagctactcaggag

SEQ ID NO: 389005 - DNA, 82 bp, Artificial Sequence
  ENSG00000144645_51 (sequence is synthesized)
ggaggctgagacaggaggattgcttgggcccaggagtttgagatttcagcatgctatgattgctacaagacctcatttcgta

SEQ ID NO: 389006 - DNA, 120 bp, Artificial Sequence
  ENSG00000144645_52 (sequence is synthesized)
acacataatactgatttttgtgcattggttttgtatcctttgctgaatttgtttattctaacagttttttggggggtgtgtgggatctaggattttctagatacaatcatgtcatttgct

SEQ ID NO: 389007 - DNA, 120 bp, Artificial Sequence
  ENSG00000144645_53 (sequence is synthesized)
aacagattttacttcttccaaatttggatgtcttttatttcttgttcttgcctaattgctgtacctagaacttcaaatactgtgttgaaggaaggaggcaaaaaaaaaaaaaaaaaaaaa

SEQ ID NO: 389008 - DNA, 120 bp, Artificial Sequence
  ENSG00000144645_54 (sequence is synthesized)
gactagcttgctgtgtggacatgcgtgtacttggacctgtcaaggataagatccagcttctccatcgggttcccctcacagtggcctcgttgttgaatctacctccaaatggcaagataa

SEQ ID NO: 389009 - DNA, 120 bp, Artificial Sequence
  ENSG00000144645_55 (sequence is synthesized)
ggtcccctaaattcgccggtggcctttgaggcacagttggttgcctggctttggaagtggctccatgtagaggatagtacgtgtgcaggagccttcaacagccgccctgcagcagggcca

SEQ ID NO: 389010 - DNA, 120 bp, Artificial Sequence
  ENSG00000144645_56 (sequence is synthesized)
ataccctctacccaacaaagatggcctacttttggagaattagacacagccaccaaaaagactcttccagaggagaaatctcacctgtgcagtgtgtgggaaggacaccaaactcaggct

SEQ ID NO: 389011 - DNA, 120 bp, Artificial Sequence
  ENSG00000144645_57 (sequence is synthesized)
gtgggaaagatgaggatttcccctgcaatggcttgtgagcaaataggaaatcacagctttagaagaatgaatcattctttgcttcatgaagcttatggcagcctcagtggagcaattgat

SEQ ID NO: 389012 - DNA, 120 bp, Artificial Sequence
  ENSG00000144645_58 (sequence is synthesized)
atgggctgcagccactctgccatggtgtggaccgacagcggcgcctcctccctcatcccgctgtgggcagatgcggggagaggctcttgccggtttcctctccattgctcatcaaagatg

SEQ ID NO: 389013 - DNA, 120 bp, Artificial Sequence
  ENSG00000144645_59 (sequence is synthesized)
gctcagcaaatacaccaacctcctccagggctggcagaacagctgctgatgcaaaagagaaacaattctgggtgactcagcttcgagcttgtgccaaataccacatggaaatgaattcta

SEQ ID NO: 389014 - DNA, 120 bp, Artificial Sequence
  ENSG00000144645_60 (sequence is synthesized)
tttcactgctcccgaaggctggagaaatgatctgctttctagagccataaaagttctcttaacataaaaccttctacagaaatgggtttcacaggcaggctgtcttcagtgacttcagtg

SEQ ID NO: 389015 - DNA, 120 bp, Artificial Sequence
  ENSG00000144645_61 (sequence is synthesized)
aagtcgcctgcagccgcccgaagagccaagagtcagtattccggccagcttcacgaagtcagagaggtgaaggcttgtatgctcaacaacatgtgtgaggtcacacagagagtcattggc

SEQ ID NO: 389016 - DNA, 120 bp, Artificial Sequence
  ENSG00000144645_62 (sequence is synthesized)
ctctgccgcctgtcattggtcccttgcccaggagagaacttgtcctgagagggtagatgggtttttcttgctgagcccccaagactggataaataccaggcaggggaagggatggactag

SEQ ID NO: 389017 - DNA, 120 bp, Artificial Sequence
  ENSG00000144645_63 (sequence is synthesized)
ggcagctcggttctgactccagctttggacaaggcttcaggacaggttttctgccacaatattcatgaaaccttctggagggcagaactgagcaactgacacttcccctccagtatccct

SEQ ID NO: 389018 - DNA, 120 bp, Artificial Sequence
  ENSG00000144645_64 (sequence is synthesized)
atgtcagaaaagcatgtcagcctgcctgtgagggatcgcgatgggactgcagactggatactgttctatttttaaaaagaaaatcatcatggcacctgttagatcatctttagtaacaaa

SEQ ID NO: 389019 - DNA, 120 bp, Artificial Sequence
  ENSG00000144645_65 (sequence is synthesized)
ttagttgaggagtgcctcacaggccatctcaacacctgggtgggctggagccctcactgatgaagaattgcctttcagagctttgcctcctgtgggccacaagggctagtcatgcagggg

SEQ ID NO: 389020 - DNA, 120 bp, Artificial Sequence
  ENSG00000144645_66 (sequence is synthesized)
aaggccagcctgagtcctgtgcctaaaatgctgttgctgtcacctgcaaatgtgacactagaagctagaaataatatctgggcaagtgggcagggcactgtgtgcccagctgaagccctt

SEQ ID NO: 389021 - DNA, 120 bp, Artificial Sequence
  ENSG00000144645_67 (sequence is synthesized)
atgctcttgaagttgtggagggattgggaagcactctgagaacagaattggaaattatgaaaatgtaggagccacacgtcttaaagcaggcccacaggaacccagcaacatcaatgaaga

SEQ ID NO: 389022 - DNA, 120 bp, Artificial Sequence
  ENSG00000144645_68 (sequence is synthesized)
gcaggccggtgagggctggggcagatgccactcatcttccagtgataaaacagattgtctagttgttcatgaggagccagaaatctaaatttttatgagaaatctcatatttgcatggtc

SEQ ID NO: 389023 - DNA, 120 bp, Artificial Sequence
  ENSG00000144645_69 (sequence is synthesized)
aaagatttaaaaaaatttaaataccagtaggcaatcaaaatgtatctgtgggctttccttagcccaggtgctggtaacccctgacttctgctacaaagagggattattctgtctatatac

SEQ ID NO: 389024 - DNA, 120 bp, Artificial Sequence
  ENSG00000144645_70 (sequence is synthesized)
gaggctgagaagtgagttagggcaacatagtaggtaactggggtggattcatggttaagagcaggaagagcaggaagccaccactgttctccccagagtcaggctgtggactgaaggaga

SEQ ID NO: 389025 - DNA, 120 bp, Artificial Sequence
  ENSG00000144645_71 (sequence is synthesized)
tttcaaggttggattctggttcagacaggaaagctgcctggagaagactttgcctttatgggtcactgagtggggaccctgtgtgggagccctgcccaggtgaggtaaaaccttgaaaga

SEQ ID NO: 389026 - DNA, 120 bp, Artificial Sequence
  ENSG00000144645_72 (sequence is synthesized)
tccttctgtgaggttagctcccttttctcttgagggagctagtagcttgagagagctagtttgtctggcttctgtggaaggctgtgcattaaacagcaacaacaacaagaaaaaacattt

SEQ ID NO: 389027 - DNA, 120 bp, Artificial Sequence
  ENSG00000144645_73 (sequence is synthesized)
acagttcttcctgagtttaagaaaagccagtatgcccataacagaagggctgggaacatgtaaggaataagagtcatctgaacaccagcacagttattcagtatagtgccttctagtcat

SEQ ID NO: 389028 - DNA, 120 bp, Artificial Sequence
  ENSG00000144645_74 (sequence is synthesized)
aactagatggtattaataccattttaattcttgcctttttctcacttgatatttgattgatggtgtttcttgtgtgtgctgatttgtttgtgactactgcctgctggagagagcctttgt

SEQ ID NO: 389029 - DNA, 120 bp, Artificial Sequence
  ENSG00000144645_75 (sequence is synthesized)
tgggtgttcccctgtgggctggaagtcactggtatgcacacccttgccttttctttcccctggccattcatctagctactctccttttctcttgtcccactgtcaaagtgcttctttttt

SEQ ID NO: 389030 - DNA, 120 bp, Artificial Sequence
  ENSG00000144645_76 (sequence is synthesized)
ttggccaagtaatcagtctcgatggaagccaaccaagctccccttttattttgctcatttcttggggtttcctcctgccatgccagggtaggaaggtcaaggtcatctagatctccaaag

SEQ ID NO: 389031 - DNA, 120 bp, Artificial Sequence
  ENSG00000144645_77 (sequence is synthesized)
agcagctgggctgaggaggggtactgaggccagcagcctggcctgcgtgtgaggtattaagacacggcagacacacagagtggctgcggttatccttgcttccccttttccctgttgaga

SEQ ID NO: 389032 - DNA, 120 bp, Artificial Sequence
  ENSG00000144645_78 (sequence is synthesized)
ccagagggagaaaacacttcctctctgttggttggatttccagtctttgctccagcccttcctaagacctggccaccttccttggctcctgtgagatgccttgagcctcattcagtactt

SEQ ID NO: 389033 - DNA, 120 bp, Artificial Sequence
  ENSG00000144645_79 (sequence is synthesized)
gaagctgagggtctgagtgacaagcggagtgtggctggatccagccttattttgaaggattcctttggcacccaggggcccagggatgaggtgctgttttgggaggctggtaaaagttca

SEQ ID NO: 389034 - DNA, 120 bp, Artificial Sequence
  ENSG00000144645_80 (sequence is synthesized)
agaggtacacactctcctgacagaggaaagctgtttgctgcactggtttactggatagattaactgggttgaggctgtgtaatttaatatgattttaaataaaccttttacagagtctga

SEQ ID NO: 389035 - DNA, 120 bp, Artificial Sequence
  ENSG00000144645_81 (sequence is synthesized)
tatatcattgggttgctgtgaggattaaagaggtttatgtatgtaaaatgcttagaaatatggcaaatgccatatgtgcctgctaccgttgtttgtagtagtagcagaatgccaactact

SEQ ID NO: 389036 - DNA, 120 bp, Artificial Sequence
  ENSG00000144645_82 (sequence is synthesized)
actattagatttgattcccagaatctccgggccctgagaaaggcatgctgcctggtacaagcggagagtagaaacaacacagaggtggagctgggtagccctgggttcaaatctaggctc

SEQ ID NO: 389037 - DNA, 120 bp, Artificial Sequence
  ENSG00000144645_83 (sequence is synthesized)
ctttttccagtggcgtgcccctggaacgttgtgcaccaccattttgactcttttaatgtgcatgcccaggaagctgcttctccctggagtcagtattcaaatcacactttactgcaacag

SEQ ID NO: 389038 - DNA, 120 bp, Artificial Sequence
  ENSG00000144645_84 (sequence is synthesized)
gtgtggaccatcaggaaacggcctctcccctggcgcctggctcccaattcaccacttttagagagctatcccccatcctcatcactttcctatctggctgctgcagcagaaacatttatt

SEQ ID NO: 389039 - DNA, 120 bp, Artificial Sequence
  ENSG00000144645_85 (sequence is synthesized)
ctgctgtgggtgaattgtgatcctacgaatgaggaatctcctattttcattgaaatgggagtcactttaacttcaagtgggagaaattcgaacagacccgttaacatggtgcctattgac

SEQ ID NO: 389040 - DNA, 120 bp, Artificial Sequence
  ENSG00000144645_86 (sequence is synthesized)
atgatgggagcagttacaatatattatgtcgctcccctgaataatggcttcttcgtgtggttcctgctgatacaagctcttgcctcacatgctcgactcctgcatgctcctgagccaggc

SEQ ID NO: 389041 - DNA, 120 bp, Artificial Sequence
  ENSG00000144645_87 (sequence is synthesized)
cgggatctgtggggccatggccaacactcctcttgggcattgagctgcagcccaggttcaggctgccgaggatatgcactgcctcgtcaggagagcagtccttgcagatcctggtgatca

SEQ ID NO: 389042 - DNA, 120 bp, Artificial Sequence
  ENSG00000144645_88 (sequence is synthesized)
gccaggctccaacaggcttcatggactctctgtcatctgcccgcagcctggctctcctatttctgcctctaagtggccgctggaggggagccaaatgcagtgtttccttttgtcaatttt

SEQ ID NO: 389043 - DNA, 120 bp, Artificial Sequence
  ENSG00000144645_89 (sequence is synthesized)
aaaaaagtgacaatgaagataaggaagagacggaattgggcgtcatggaggatcagcgtagtataattcttcatctcatttcacaactcaaacttggaatggatttgaccaagaagtgga

SEQ ID NO: 389044 - DNA, 120 bp, Artificial Sequence
  ENSG00000144645_90 (sequence is synthesized)
tgaccactaacgtcatggagagggtcccacatacgtcacccctcacctctagtcagtagcttcattctagagaatcatgaatgatggaggaaagagattgtaagagaaattgaaattgcc

SEQ ID NO: 389045 - DNA, 120 bp, Artificial Sequence
  ENSG00000144645_91 (sequence is synthesized)
aaggtcagatatggagaagcaagaaaatattgaggggactatattatggcaagctgagtgtctgagcgacttcacgttattcctgtcttgctctaaaataaagaaatatcacaactgtgc

SEQ ID NO: 389046 - DNA, 120 bp, Artificial Sequence
  ENSG00000144645_92 (sequence is synthesized)
tctcccagtaacttttcagacaggcctctagttgctatggtgatggctctcttgttttttgattttttgtttttttaaattgcctttgacagtttgctgtgtttggaggactctgtggtg

SEQ ID NO: 389047 - DNA, 120 bp, Artificial Sequence
  ENSG00000144645_93 (sequence is synthesized)
acacacattgcctctcttatccctggggtggggagatggagctgacattaggaattacttgtcctaattaactgaggaattaaggacaaaggaaaggtgagtgattcccaaagcagcgcg

SEQ ID NO: 389048 - DNA, 120 bp, Artificial Sequence
  ENSG00000144645_94 (sequence is synthesized)
ttcactgagatcttcccaaccatctctttagaattggggttatttagagctgattgagaacaccttaggagtatgtctgtggaaaacgtctatttacgttgaagttttaaaaatgcctac

SEQ ID NO: 389049 - DNA, 120 bp, Artificial Sequence
  ENSG00000144645_95 (sequence is synthesized)
gattacaggcgtgagccaccgtgcccagcgaagccccgtgttttaacgagtgatgttgtagccctcctttgggcagaatatctttctgtgcatgggttgtgttcggtggtttttcctctt

SEQ ID NO: 389050 - DNA, 120 bp, Artificial Sequence
  ENSG00000144647_0 (sequence is synthesized)
ccgccgggcaggcgcacggcggacacctgcgagcctggaggtggcggtcgctgcgaacccggcggcgcggccaaacctgtgctggctgcctgggccttctgggcctcctgggccagaagc

SEQ ID NO: 389051 - DNA, 120 bp, Artificial Sequence
  ENSG00000144647_1 (sequence is synthesized)
gggcctcctgggccagaagctggcgctgggggcggcggcggggtgggaaagcggcgccgccgtggggcctcctggacgcgtcggcggaggtggcttcgtcccgcggagtccaggcttcag

SEQ ID NO: 389052 - DNA, 120 bp, Artificial Sequence
  ENSG00000144647_2 (sequence is synthesized)
tcaggctttcaccagttctcaggatgcccatagggatgggtgaagcctgcctggcctgtggtgcttcccagtggccgtcatctcattagggccccacagtggcattaggatgcacctctc

SEQ ID NO: 389053 - DNA, 120 bp, Artificial Sequence
  ENSG00000144647_3 (sequence is synthesized)
ggcggtgttcaacgccctcctggtgtcggtgctggcagcggtcctgtggaagcatgtgcggctgcgtgagcatgcagccacactggaggaggagctggccctcagccgacaggccacaga

SEQ ID NO: 389054 - DNA, 120 bp, Artificial Sequence
  ENSG00000144647_4 (sequence is synthesized)
gccagccccagcactgaggatcgactacccgaaggcactgcagatcctgatggagggcggcacacacatggtgtgcacgggccgcacgcacacagaccgcatctgccgcttcaagtggct

SEQ ID NO: 389055 - DNA, 120 bp, Artificial Sequence
  ENSG00000144647_5 (sequence is synthesized)
ctgctactccaacgaggctgaggagttcatcttcttccatggcaacacctctgtcatgctgcccaacctgggctcccggcgcttccagccagccctgctcgacctatccaccgtggagga

SEQ ID NO: 389056 - DNA, 120 bp, Artificial Sequence
  ENSG00000144647_6 (sequence is synthesized)
ccacaacactcagtacttcaacttcgtggagctgcctgctgctgccctgcgcttcatgcccaagccggtgttcgtgccagacgtggccctcatcgccaaccgcttcaaccccgacaacct

SEQ ID NO: 389057 - DNA, 120 bp, Artificial Sequence
  ENSG00000144647_7 (sequence is synthesized)
catgcacgtctttcatgacgacctgctgccactcttctacaccctgcggcagtttcccggcctggcccacgaggcacggctcttcttcatggagggctggggcgagggtgcacacttcga

SEQ ID NO: 389058 - DNA, 120 bp, Artificial Sequence
  ENSG00000144647_8 (sequence is synthesized)
cctctacaagctgctcagccccaagcagcctctcctgcgggcacagctgaagaccctgggccggctgctgtgcttctcccatgcttttgtgggcctctccaagatcactacctggtacca

SEQ ID NO: 389059 - DNA, 120 bp, Artificial Sequence
  ENSG00000144647_9 (sequence is synthesized)
gtatggctttgtgcagccccagggcccgaaggccaacatcctcgtctcaggcaatgagatccggcagtttgcacggttcatgacagaaaagctgaacgtgagccacacaggagtccccct

SEQ ID NO: 389060 - DNA, 120 bp, Artificial Sequence
  ENSG00000144647_10 (sequence is synthesized)
ccgaacccagaacagactcattctgaatgaggcagagctgctgctggcactggcccaggagttccagatgaagacagtgacagtgtccctggaggaccacacctttgctgatgtcgtgcg

SEQ ID NO: 389061 - DNA, 120 bp, Artificial Sequence
  ENSG00000144647_11 (sequence is synthesized)
gctggtcagcaatgcctccatgctggtcagcatgcatggggcccagctggtcaccaccctcttcctgccccgtggggcaactgtggtagagctcttcccatatgctgtcaatcccgacca

SEQ ID NO: 389062 - DNA, 120 bp, Artificial Sequence
  ENSG00000144647_12 (sequence is synthesized)
ctacactccctataagacgctggccatgctgcctggcatggacctccagtatgtagcctggcggaacatgatgccagagaacacagtcacacaccctgagcggccctgggatcagggggg

SEQ ID NO: 389063 - DNA, 120 bp, Artificial Sequence
  ENSG00000144647_13 (sequence is synthesized)
catcacccatctggaccgggctgagcaagcccgtatcctgcaaagccgtgaggtcccacggcatctctgttgccggaaccccgagtggctcttccgaatctaccaggacaccaaggtgga

SEQ ID NO: 389064 - DNA, 120 bp, Artificial Sequence
  ENSG00000144647_14 (sequence is synthesized)
catcccgtccctcattcaaaccatacggcgcgtggtgaagggccggccaggaccacggaagcagaagtggacagtcggcctatatccaggcaaggtgcgggaggcacggtgccaggcgtc

SEQ ID NO: 389065 - DNA, 120 bp, Artificial Sequence
  ENSG00000144647_15 (sequence is synthesized)
agtgcatggcgcctccgaggcccgcctcactgtctcctggcagatcccatggaaccttaaatacctgaaggtgagggaggtgaagtacgaggtgtggctgcaggagcagggggagaacac

SEQ ID NO: 389066 - DNA, 120 bp, Artificial Sequence
  ENSG00000144647_16 (sequence is synthesized)
ctacgtgccttacatcctggctctgcagaaccacaccttcactgagaacatcaagcccttcaccacctacctggtgtgggtccgctgcatcttcaacaagatcctcctgggaccctttgc

SEQ ID NO: 389067 - DNA, 120 bp, Artificial Sequence
  ENSG00000144647_17 (sequence is synthesized)
agatgtgctggtgtgcaacacgtagcgagcaggccacagcctggcctcgggaaggtggctcctgcagttcagcgtccctgggcccattaatcccactgtggagacttctgggaactattt

SEQ ID NO: 389068 - DNA, 120 bp, Artificial Sequence
  ENSG00000144647_18 (sequence is synthesized)
attgagcaggcctgtgcctccacatcatcttgttgtctctggggtgtggtgtcacagcactcctctttgccctagagataagggacctgacttccccttctcccatcctgaacatttgta

SEQ ID NO: 389069 - DNA, 120 bp, Artificial Sequence
  ENSG00000144647_19 (sequence is synthesized)
cccctggagaagttccttagcagggaggaggaagaggagaggaggaagcaaagaatcacaaggaacctctggctaggtgatcctgatgtttcctactgagtttttctggtatccagattt

SEQ ID NO: 389070 - DNA, 120 bp, Artificial Sequence
  ENSG00000144647_20 (sequence is synthesized)
ctggaaaccgagtaatcatgtactgtttgattgggtggttcatctgcttccatcccagtgaaatttacctgtagcccagtgaagggtgtgtttggaacattcattaaatgattctaagca

SEQ ID NO: 389071 - DNA, 120 bp, Artificial Sequence
  ENSG00000144647_21 (sequence is synthesized)
aagctggcgctgggggcggcggcggggtgggaaagcggcgccgccgtggggcctcctggacgcgtcggcggaggtggcttcgtcccgcggagtccaggcttcagctcctggcttctcttc

SEQ ID NO: 389072 - DNA, 120 bp, Artificial Sequence
  ENSG00000144648_0 (sequence is synthesized)
ctttcgattgtagcatttctcctttcaggatacagtacgggatcctttctggaatggaggtcttatgagctgctattgaacacggcagagcctgttggtgacctgcacacaggagccctc

SEQ ID NO: 389073 - DNA, 120 bp, Artificial Sequence
  ENSG00000144648_1 (sequence is synthesized)
cagtcagtactgattgaattactcaaggctgcctctctgcaaagttgagcactacaggacgtcgggactgggcatttccttccaacatggccgccactgcctctccgcagccactcgcca

SEQ ID NO: 389074 - DNA, 120 bp, Artificial Sequence
  ENSG00000144648_2 (sequence is synthesized)
ctgaggatgccgattctgagaatagcagcttctattactatgactacctggatgaagtggccttcatgctctgcaggaaggatgcagtggtgtcctttggcaaagtcttcctcccagtct

SEQ ID NO: 389075 - DNA, 120 bp, Artificial Sequence
  ENSG00000144648_3 (sequence is synthesized)
tctatagcctgatttttgtgttgggcctcagcgggaacctccttcttctcatggtcttgctccgttacgtgcctcgcaggcggatggttgagatctatctgctgaatctggccatctcca

SEQ ID NO: 389076 - DNA, 120 bp, Artificial Sequence
  ENSG00000144648_4 (sequence is synthesized)
accttctgtttctggtgacactgcccttctggggcatctccgtggcctggcattgggtcttcgggagtttcttgtgcaagatggtgagcactctttatactattaacttttacagtggca

SEQ ID NO: 389077 - DNA, 120 bp, Artificial Sequence
  ENSG00000144648_5 (sequence is synthesized)
tctttttcattagctgcatgagcctggacaagtacctggagatcgttcatgctcagccctaccacaggctgaggacccgggccaagagcctgctccttgctaccatagtatgggctgtgt

SEQ ID NO: 389078 - DNA, 120 bp, Artificial Sequence
  ENSG00000144648_6 (sequence is synthesized)
ccctggccgtctccatccctgatatggtctttgtacagacacatgaaaatcccaagggtgtgtggaactgccacgcagatttcggcgggcatgggaccatttggaagctcttcctccgct

SEQ ID NO: 389079 - DNA, 120 bp, Artificial Sequence
  ENSG00000144648_7 (sequence is synthesized)
tccagcagaacctcctagggtttctccttccactccttgccatgatcttcttctactcccgtattggttgtgtcttggtgaggctgaggcccgcaggccagggccgggctttaaaaatag

SEQ ID NO: 389080 - DNA, 120 bp, Artificial Sequence
  ENSG00000144648_8 (sequence is synthesized)
ctgcagccttggtggtggccttcttcgtgctatggttcccatacaatctcaccttgtttctgcatacgctgttggacctgcaagtattcgggaactgtgaggtcagccagcatctagact

SEQ ID NO: 389081 - DNA, 120 bp, Artificial Sequence
  ENSG00000144648_9 (sequence is synthesized)
acgcactccaggtaacagagagcatcgccttccttcactgctgcttttcccccatcctgtatgccttctccagtcaccgcttccgccagtacctgaaggctttcctggctgccgtgcttg

SEQ ID NO: 389082 - DNA, 120 bp, Artificial Sequence
  ENSG00000144648_10 (sequence is synthesized)
gatggcacctggcacctggcactgcccaggcctcattatccagctgttctgagagcagcatacttactgcccaagaggaaatgactggcatgaatgaccttggagagaggcagtctgaga

SEQ ID NO: 389083 - DNA, 120 bp, Artificial Sequence
  ENSG00000144648_11 (sequence is synthesized)
actaccctaacaaggaggatgtggggaataaatcagcctgagtgaccaaattttggtctggtgggaacagatgggaaccagctcaattgggtgtccactcaaagtgctctctccaggggc

SEQ ID NO: 389084 - DNA, 120 bp, Artificial Sequence
  ENSG00000144648_12 (sequence is synthesized)
cacgctttcttttctgaattgctacaatctttcttccttccttccttgcttccttccttccttccttccctctctccctccctccctccctcgcttcttcccttcctcctttcctccctt

SEQ ID NO: 389085 - DNA, 87 bp, Artificial Sequence
  ENSG00000144648_13 (sequence is synthesized)
cctccctccctcgcttcttcccttcctcctttcctcccttcctactttccttccttccttctgacagggtcttgctctaagatctcc

SEQ ID NO: 389086 - DNA, 89 bp, Artificial Sequence
  ENSG00000144648_14 (sequence is synthesized)
ctcagcctcctgagtagctggaactacatgcgcgtgccaccacgcacagctaatttttataattttagtagagatggggtttcactgct

SEQ ID NO: 389087 - DNA, 86 bp, Artificial Sequence
  ENSG00000144648_15 (sequence is synthesized)
tttttatagaattgctgtaatagttttccaactggcccctgtccttcctctctcttgctctcctcccatctcatctgcacctagca

SEQ ID NO: 389088 - DNA, 120 bp, Artificial Sequence
  ENSG00000144648_16 (sequence is synthesized)
cctctctcttgctctcctcccatctcatctgcacctagcagccagagtgatcctgatactctcggcctttacttccgcctccctcagagcagcagcctgtcaaaacaccagattacaaca

SEQ ID NO: 389089 - DNA, 120 bp, Artificial Sequence
  ENSG00000144648_17 (sequence is synthesized)
aatttagtttaaaggtctcaattagcgttattggcaattctagaatcaggcaacagactcattgaatcaggaacagattcactccataaaatacagagagtgctgcaatgagctgggtag

SEQ ID NO: 389090 - DNA, 120 bp, Artificial Sequence
  ENSG00000144648_18 (sequence is synthesized)
tgctgcaatgagctgggtagaagaggttagttttatagacaggaaggggctgtcaaaggcagaaagaaatgaagaacaaaaaaaaagattgatttttttttttttgagacaggatctcac

SEQ ID NO: 389091 - DNA, 120 bp, Artificial Sequence
  ENSG00000144648_19 (sequence is synthesized)
ccaatcccacaatcatggctcactgcagccaccacctcctgagctcaagtgatcctcccatctaagcccccaagtagctaggactacaggagcacaccaccacacctggctaatttttgt

SEQ ID NO: 389092 - DNA, 72 bp, Artificial Sequence
  ENSG00000144648_20 (sequence is synthesized)
atttttgtattttttgtggagacagggtctcagtatgttacccaggttggactggaaacccttggctcaagc

SEQ ID NO: 389093 - DNA, 120 bp, Artificial Sequence
  ENSG00000144648_21 (sequence is synthesized)
agggccagattcatcatttcaaagttactttctatatgcggccggaacagggtggttgacatcagttttcttcaggttactttttaataatgattaaaacggggaacttcattatcatga

SEQ ID NO: 389094 - DNA, 120 bp, Artificial Sequence
  ENSG00000144648_22 (sequence is synthesized)
aggtagctcatggtgctcccttccttggtgcagacgggcagttcaaaccacacaaactccagcctgtgggagagggatccttcatcctggacgcacctgccctctgcccagccactataa

SEQ ID NO: 389095 - DNA, 120 bp, Artificial Sequence
  ENSG00000144648_23 (sequence is synthesized)
attcctggagccgcctccctgttgtcccacctctacctctccgggaacccgctgtgctgtgggacaggaggagacctagcggacagcctttggataaagcagcactacaggacgtcggga

SEQ ID NO: 389096 - DNA, 120 bp, Artificial Sequence
  ENSG00000144648_24 (sequence is synthesized)
gtttagaattggggcagaatgggactgagatcttgctgagaaggtatccaggatgaagaagctgaaggtgatgttgggaaggcccttcagttgaaagcaggatatacataggctgctgtc

SEQ ID NO: 389097 - DNA, 120 bp, Artificial Sequence
  ENSG00000144648_25 (sequence is synthesized)
cagagaggggatgagcgcatggaaaggaattacactctgtctgcacttccctgaggaagaggcacctggcgctgccgctctcctcccaggcttgtggtggacattctcaagcaagtcatt

SEQ ID NO: 389098 - DNA, 120 bp, Artificial Sequence
  ENSG00000144648_26 (sequence is synthesized)
agcatttctcctttcaggatacagtacgggatcctttctggaatggaggtcttatgagctgctattgaacacggcagcactacaggacgtcgggactgggcatttccttccaacatggcc

SEQ ID NO: 389099 - DNA, 120 bp, Artificial Sequence
  ENSG00000144648_27 (sequence is synthesized)
gtttcttgtgcaagatggcggtggagaactactgaggacttctgagcagagaggttggtggaagaggaagcaccaaaaatccatctcatcacctagagagcattgtactggcagaactgt

SEQ ID NO: 389100 - DNA, 120 bp, Artificial Sequence
  ENSG00000144648_28 (sequence is synthesized)
cttctgcagcagctcacaggctcccagcaccagccatgtgctaggagtgtccttactgctgcccagaaaagggaggagttgaaggccaggaggcccctggtgcagaggagaggacaggaa

SEQ ID NO: 389101 - DNA, 120 bp, Artificial Sequence
  ENSG00000144648_29 (sequence is synthesized)
caaggcaagatcacagtgttcagcagacacgaaaggcctcagatgggctgttggacccagaaatacacacaggaataagatgcagccttgccttcaagaagtccccagcctagtagaggc

SEQ ID NO: 389102 - DNA, 120 bp, Artificial Sequence
  ENSG00000144648_30 (sequence is synthesized)
aatgtctctataggttatgatttacctccagatgaattaaacaggcaagaaccacacttcccactctgatatgtgatgtgggtggggcacgtgctcattcctggagccgcctccctgttg

SEQ ID NO: 389103 - DNA, 120 bp, Artificial Sequence
  ENSG00000144648_31 (sequence is synthesized)
cttttcccctcgggcagcggaggcgagcaccgcgaacgccgtgtcccgagcgccgccgcctgcggacgcctcacgggccgggaagggatgcggcctttctcctaaggcaccagtttctcc

SEQ ID NO: 389104 - DNA, 120 bp, Artificial Sequence
  ENSG00000144648_32 (sequence is synthesized)
aatgtttaacttatacatgcatcagaatgacagtgaggcgttggtgagagctgctctggttgctaatggagatctggcctgccacagtgggagcagagcttgcccagtgcgccgggacga

SEQ ID NO: 389105 - DNA, 120 bp, Artificial Sequence
  ENSG00000144648_33 (sequence is synthesized)
ctgcgggctccatccattccgctcccagggcggttgtcggccaggaccgtgagctgtcaggtcccccgcgggatccttcctggagcttacactatagtaggaggcagccagtacttgcaa

SEQ ID NO: 389106 - DNA, 120 bp, Artificial Sequence
  ENSG00000144648_34 (sequence is synthesized)
gcacggggtcgcgggaactacgacctcacccaggccaggcgacctttctctcaagaaggagatgtcagaggcccctcgtgacagcgagcttccggggacagggctcctaatgtgtttgtc

SEQ ID NO: 389107 - DNA, 120 bp, Artificial Sequence
  ENSG00000144648_35 (sequence is synthesized)
atctcctgacctcatgatctgccttcctcagcctcctattgatcaaagttttacatgatgcaggagccttcagagtgaagacccaaagatacaggatacagtacgggatcctttctggaa

SEQ ID NO: 389108 - DNA, 120 bp, Artificial Sequence
  ENSG00000144648_36 (sequence is synthesized)
atacaggatacagtacgggatcctttctggaatggaggtcttatgagctgctattgaacacggcagatggagtctcactctgtcgccaggctgcagtacaatggtgtgatctcggctcac

SEQ ID NO: 389109 - DNA, 120 bp, Artificial Sequence
  ENSG00000144648_37 (sequence is synthesized)
cagcctcctgagtagctgggactacagaatcacaccctttctccaggaccactctccttctgctggaagtacgttcttcagtgagttccttgagtctcactctcctgagtttcgtgttgt

SEQ ID NO: 389110 - DNA, 120 bp, Artificial Sequence
  ENSG00000144648_38 (sequence is synthesized)
cgtgttgtgataaattctgtttcccatctggaaatgccctttaccgtgagcagattcttgaacaaccatcaatttcaactcctgattctaatttgatggtgaagagtcccaagtcacact

SEQ ID NO: 389111 - DNA, 120 bp, Artificial Sequence
  ENSG00000144648_39 (sequence is synthesized)
cactgtatcccatggcttccggctcccactgtggccactacgaagtctactctcagtctcagcgtctgctctctgtaatctgtgctttttccttggctgcattaaagatcttctctttgc

SEQ ID NO: 389112 - DNA, 120 bp, Artificial Sequence
  ENSG00000144648_40 (sequence is synthesized)
tttcagcttgtattggatacccacccataagtcccatggcaggcagccatgacatgtttctgacatggcttgctgaagccagagtgggaaattaggactttgtcctccagatattggggc

SEQ ID NO: 389113 - DNA, 120 bp, Artificial Sequence
  ENSG00000144648_41 (sequence is synthesized)
tctgtgttataattgctgatagctgcttcttatcaatgaggtgtagctacagaggctggctgccattggttcacctccattggctgaagcagtctctagggcattaaaacattaaaagga

SEQ ID NO: 389114 - DNA, 120 bp, Artificial Sequence
  ENSG00000144649_0 (sequence is synthesized)
actttgcaaactctgcaaaagtcccgagtagaccgcagaggctcgcggccgcgggtaggctccctcagatccccgtagatctcagtagatccggcgtgtattccccacccgcggagtatc

SEQ ID NO: 389115 - DNA, 120 bp, Artificial Sequence
  ENSG00000144649_1 (sequence is synthesized)
ccggtgtgcagcgatctcccgagagttggcgcagggccacttggctgcagagaacgtgtgcaccttcagtccgggaaacccgccccagccgagtagccgcgcatcctgggaagcctggcg

SEQ ID NO: 389116 - DNA, 120 bp, Artificial Sequence
  ENSG00000144649_2 (sequence is synthesized)
agccacggcgccgggggcggccaaggggaggcgggatgagtctgcgagccggctgagcgcgccgaggagccggccggggcaccgccggggacatggcgtcttggctccggagaaagctgc

SEQ ID NO: 389117 - DNA, 120 bp, Artificial Sequence
  ENSG00000144649_3 (sequence is synthesized)
gtggcaagaggcggccagtgatagcgttctgcctcttgatgatcctatctgcgatggctgtcacccgctttcccccacagcgtccatccgccggcccagaccctggtcccatggagcctc

SEQ ID NO: 389118 - DNA, 120 bp, Artificial Sequence
  ENSG00000144649_4 (sequence is synthesized)
agggggtaactggcgcccctgcaacccatatccggcaggctttgagctccagccggaggcagcgggcaagaaacatgggcttctggagaagccgtgctttgcccaggaactccatcttgg

SEQ ID NO: 389119 - DNA, 120 bp, Artificial Sequence
  ENSG00000144649_5 (sequence is synthesized)
tctgtgctgaggagcaaggccatagagcaagagtggacagaagcagggagtccccaggaggggacctcaggcatccagggagggtgaggagggacattactttgtcaggacatccaagac

SEQ ID NO: 389120 - DNA, 120 bp, Artificial Sequence
  ENSG00000144649_6 (sequence is synthesized)
tcagtactcagcatgttgtgctcctgagggaggatgaggttggagatccaggaaccaaagacctgggccacccccagcatggcagtcccatccaggagacacagagtgaggtggtcaccc

SEQ ID NO: 389121 - DNA, 120 bp, Artificial Sequence
  ENSG00000144649_7 (sequence is synthesized)
tggtcagtccactcccagggagtgacatggcagctttaccggcttggagagctacttctgggctgacactctggccccatacagcagaaggcagggatctgctgggagctgagaacagag

SEQ ID NO: 389122 - DNA, 120 bp, Artificial Sequence
  ENSG00000144649_8 (sequence is synthesized)
ccttgactggtgggcaacaagcagaggatcccaccttggcctcaggagctcatcagtggcctggctctgttgagaagctgcaagggtcagtatggtgtgatgctgagacgctgttgagca

SEQ ID NO: 389123 - DNA, 120 bp, Artificial Sequence
  ENSG00000144649_9 (sequence is synthesized)
gctcgaggactggtgggcaggctcccccatggctgacagaccacgatgtgcagatgctccgtctgttggcacagggggaggtggtggacaaagccagggtccccgcccatgggcaggtgc

SEQ ID NO: 389124 - DNA, 120 bp, Artificial Sequence
  ENSG00000144649_10 (sequence is synthesized)
tacaggttggcttctccactgaggctgcccttcaggacctgtcctctcccaggctcagccaactctgttcccaagggctctgtggcctgatcaagaggcctggggacctgcctgaggtcc

SEQ ID NO: 389125 - DNA, 120 bp, Artificial Sequence
  ENSG00000144649_11 (sequence is synthesized)
tgtccttccacgtagatcgtgtgctggggctgcgccggagcctacctgctgtggcccgccgcttccatagccccctcctgccctaccgatacacagacggtggagcaaggcctgtcatct

SEQ ID NO: 389126 - DNA, 120 bp, Artificial Sequence
  ENSG00000144649_12 (sequence is synthesized)
ggtgggcacccgatgtgcagcacctgagcgacccagatgaggatcagaactctctggccttgggctggctgcagtatcaggccctgctggcacacagctgcaactggccaggccaggccc

SEQ ID NO: 389127 - DNA, 120 bp, Artificial Sequence
  ENSG00000144649_13 (sequence is synthesized)
cgtgcccgggcatccaccataccgagtgggcacgcctggcgctcttcgacttcctgttgcaggtccacgaccgcttggatcgctactgctgtggcttcgagcctgagccctcagacccct

SEQ ID NO: 389128 - DNA, 120 bp, Artificial Sequence
  ENSG00000144649_14 (sequence is synthesized)
cagaacccagccgagctgcggctggtccacatcctggtccggagcagcgatccatctcacctggtctacatcgataacgctggcaaccttcagcaccctgaggacaagctgaactttcgg

SEQ ID NO: 389129 - DNA, 120 bp, Artificial Sequence
  ENSG00000144649_15 (sequence is synthesized)
ctgctggagggcatagatgggtttcctgagtctgccgtgaaggttctcgcatcagggtgtctacagaacatgctgctgaagtcgctgcagatggacccagtgttctgggaaagccaaggc

SEQ ID NO: 389130 - DNA, 120 bp, Artificial Sequence
  ENSG00000144649_16 (sequence is synthesized)
ggagcccaggggctgaagcaggtcctccagaccctggagcagcgaggacaggtgctgctgggacacatccaaaagcacaacctcacactcttcagggacgaggacccataagccgcacac

SEQ ID NO: 389131 - DNA, 120 bp, Artificial Sequence
  ENSG00000144649_17 (sequence is synthesized)
agccctgagtcaatgagcatccatcctgatggccacattttcttgggctcactcatcttgaggacaaatgggaaaagccagaagccagaggggcacaaggatgtcacgggatatttcacc

SEQ ID NO: 389132 - DNA, 120 bp, Artificial Sequence
  ENSG00000144649_18 (sequence is synthesized)
tgcctgggatggtggaggtagtatggggttttcaatctcaaagcgtccctttctgccttctcggctctggctatttattcccttgcaccaacaaatacattcgaaaatgttctgtgagct

SEQ ID NO: 389133 - DNA, 120 bp, Artificial Sequence
  ENSG00000144649_19 (sequence is synthesized)
gctcaagaaactgtaaaaatgtgtgatgcacgtgcatatgcagagtgggagaactttgtgtgtgtgtagaggtgtgtaggtgtgggtggcatgtgtgcccgcctgcatgcaatacctgag

SEQ ID NO: 389134 - DNA, 120 bp, Artificial Sequence
  ENSG00000144649_20 (sequence is synthesized)
accaacctaataaaggtacaatcttcatagaactgcacttgcagcctggagttgctctggctgaaagtagactcaggcttaagaaatgaaacataatgcgtttgtctttatagactttaa

SEQ ID NO: 389135 - DNA, 120 bp, Artificial Sequence
  ENSG00000144649_21 (sequence is synthesized)
attttcaattattactcagttatgtttttggtttaaaaaattataaaagtctaaaagtaatacatgctcagtaaaaacaagtccataaaaaatagaagcatatgacaaaaagcataagtc

SEQ ID NO: 389136 - DNA, 120 bp, Artificial Sequence
  ENSG00000144649_22 (sequence is synthesized)
ccacaaactccctagcggtgtgtatgtgtgtgtgtgttattcatggtcacactacatgcaaattaaaaaatgaaagtgtggtcatgctttgtcaactcactatatttttactttattaac

SEQ ID NO: 389137 - DNA, 120 bp, Artificial Sequence
  ENSG00000144649_23 (sequence is synthesized)
tatattctgtatcagccatctgaattgacccaatctttattggtgactgcatgaaattccaaggcagggatgtgtcatattttctttagctggtcccataatcatgaacatttaagtagc

SEQ ID NO: 389138 - DNA, 120 bp, Artificial Sequence
  ENSG00000144649_24 (sequence is synthesized)
tccaatttttcatcaattacagacattgccgccatgaacatgattgcatggcgtgcaagtatttctgcgaggtagatttccgtacgggatttctggggcaaagggtatgggcattcagta

SEQ ID NO: 389139 - DNA, 120 bp, Artificial Sequence
  ENSG00000144649_25 (sequence is synthesized)
ttctgagagaaactgccaaattgctctctgaaatggtggtgtcaatttacatttctcccaagagggtaggagactgattatttttctacaccttcaccaacacttggcattctcagactt

SEQ ID NO: 389140 - DNA, 120 bp, Artificial Sequence
  ENSG00000144649_26 (sequence is synthesized)
ttgggttttttttggcctatttaggaggaaaaccgattttaaaagctgcatttccttaatcatgaatgaagtcatctttccacttatttgccagacatttgtattttcttttctgcattg

SEQ ID NO: 389141 - DNA, 120 bp, Artificial Sequence
  ENSG00000144649_27 (sequence is synthesized)
tctttttgttttaagatgtttgccctttgcttgttaatttgttggaaatctttgactctaataagtgtgatcaatcttttctctgctgacttggtataaatgttttcttccagcctctaa

SEQ ID NO: 389142 - DNA, 120 bp, Artificial Sequence
  ENSG00000144649_28 (sequence is synthesized)
ttatcaagtgatgctgttcctctaggcctcagccagtttctgtttaacagtctctgctttgccttctgcctggtagacctacactcagccagaggtgggagtgagacacttgtcatccta

SEQ ID NO: 389143 - DNA, 120 bp, Artificial Sequence
  ENSG00000144649_29 (sequence is synthesized)
gaaaatggcaagaagaaaggaatacaaagaaacatttcattgcaaaacataatgtggagctctcacattaggatgaggctcattctactttgtgacttaaccagccgctttgaaataaaa

SEQ ID NO: 389144 - DNA, 120 bp, Artificial Sequence
  ENSG00000144649_30 (sequence is synthesized)
cagatctaatcctgtctcaccaccgagagactgacatgcaagtggacaatgcccaaactacatataataataaaactctatccaccacctctgtagcaaccagctcagagaaccaaccac

SEQ ID NO: 389145 - DNA, 120 bp, Artificial Sequence
  ENSG00000144649_31 (sequence is synthesized)
tggtacgtctcctccacaccatccccttgtcaccccagacccaggtctttctgtgtccttcagaagatgctgttaacaagtttcagagatcagttgatgctggggtttcccagtcttgtt

SEQ ID NO: 389146 - DNA, 120 bp, Artificial Sequence
  ENSG00000144649_32 (sequence is synthesized)
cttttcagcagcagaaccagttgtttgaatatttccaggagtccgcaatatataaagctgacaaaatggagctttaagaatgtgcctgaggaggggtgtggggtgggggctggagccttg

SEQ ID NO: 389147 - DNA, 120 bp, Artificial Sequence
  ENSG00000144649_33 (sequence is synthesized)
ttttcactgtctccactgcccctaagagactccagggaacaactagggctcctggaagtagagtttgagaatggtgtgtctagtcaacatcctcgttgtgccagtaaatgaggaattgca

SEQ ID NO: 389148 - DNA, 120 bp, Artificial Sequence
  ENSG00000144649_34 (sequence is synthesized)
gtctggagggaaaggaatcttcaaggccatacgctagcagcattagggcatgaacccaagactgcagtggctcacaggctggtgctgctcctgtcaaaactagagtccagggtgggaagc

SEQ ID NO: 389149 - DNA, 120 bp, Artificial Sequence
  ENSG00000144649_35 (sequence is synthesized)
ccacttcttctgcataagaagcaaggtgcttcccccggggaagggcttctctatcttctcctgcagtgaggcatagtgtcctcacagcctccctttgctcttagagggtagctgtcagca

SEQ ID NO: 389150 - DNA, 120 bp, Artificial Sequence
  ENSG00000144655_0 (sequence is synthesized)
gcagagcgaggggcggctggaccgacggctgccgggccgagcgcacagagtcgcggcgcagggggcgtccccggccgggacgcgggtcgcgtcgttgtcctccgcgagcgtccggattgc

SEQ ID NO: 389151 - DNA, 120 bp, Artificial Sequence
  ENSG00000144655_1 (sequence is synthesized)
gcgtcgttgtcctccgcgagcgtccggattgcaggctgtctgtccccagaccccagagcacgtccggcaccaccatgactgggctgttgaagaggaaatttgaccagctggatgaggaca

SEQ ID NO: 389152 - DNA, 120 bp, Artificial Sequence
  ENSG00000144655_2 (sequence is synthesized)
actcctcggtctcctcctcctcctcttcctctgggtgccagtctcgctcctgctccccaagctcttctgtctcccgtgcctgggactcagaggaggaaggcccctgggatcagatgcccc

SEQ ID NO: 389153 - DNA, 120 bp, Artificial Sequence
  ENSG00000144655_3 (sequence is synthesized)
tgcctgaccgtgacttctgcggccccagaagtttcacccccctgtctatcctgaagcgggctcgccgggagcgcccaggccgtgtagcctttgatgggatcaccgtcttctacttccccc

SEQ ID NO: 389154 - DNA, 120 bp, Artificial Sequence
  ENSG00000144655_4 (sequence is synthesized)
gctgccagggcttcaccagtgtgcccagccgtggtggctgtactctgggtatggcccttcgccacagtgcttgccgtcgcttctctttggctgagtttgcgcaggagcaagcccgtgcac

SEQ ID NO: 389155 - DNA, 120 bp, Artificial Sequence
  ENSG00000144655_5 (sequence is synthesized)
ggcacgagaagctccgccagcgcttgaaagaggagaagttggagatgctgcagtggaagctttcggcagctggggtaccccaggcagaggcagggctgccacctgtggtggatgccattg

SEQ ID NO: 389156 - DNA, 120 bp, Artificial Sequence
  ENSG00000144655_6 (sequence is synthesized)
atgacgcctctgtggaggaggacttggcagtcgctgtggcaggtggccggttggaagaagtgagcttcctacagccctacccagcccggcgacgtcgagctctgctgagggcttcaggtg

SEQ ID NO: 389157 - DNA, 120 bp, Artificial Sequence
  ENSG00000144655_7 (sequence is synthesized)
tgcgaaggatcgatcgggaggagaagcgggagctgcaggcactgcgccaatcccgggaggattgtggctgtcactgcgataggatctgcgaccctgagacctgcagctgcagcctggcag

SEQ ID NO: 389158 - DNA, 120 bp, Artificial Sequence
  ENSG00000144655_8 (sequence is synthesized)
gcatcaagtgccagatggaccacacagcattcccctgtggctgctgcagggagggctgtgagaaccccatgggccgtgtggaatttaatcaggcaagagttcagacccatttcatccaca

SEQ ID NO: 389159 - DNA, 120 bp, Artificial Sequence
  ENSG00000144655_9 (sequence is synthesized)
cactcacccgcctgcagttggaacaggaggctgagagctttagggagctggaggcccctgcccagggcagcccacccagccctggtgaggaggccctggtccctactttcccactggcca

SEQ ID NO: 389160 - DNA, 120 bp, Artificial Sequence
  ENSG00000144655_10 (sequence is synthesized)
agccccccatgaacaatgagctgggagacaacagctgcagcagcgacatgactgattcttctacagcatcttcatcagcatcgggcactagtgaggctcctgactgccccacccacccag

SEQ ID NO: 389161 - DNA, 120 bp, Artificial Sequence
  ENSG00000144655_11 (sequence is synthesized)
gcctgcctggccctggcttccagcctggcgttgatgatgacagcctggcacgcatcttgagtttcagtgactctgacttcggtggggaggaggaggaagaggaggaagggagcgtgggga

SEQ ID NO: 389162 - DNA, 120 bp, Artificial Sequence
  ENSG00000144655_12 (sequence is synthesized)
acctggacaacctcagctgcttccatccagctgacatctttggtactagtgaccctggtggcctggccagctggacccacagctattctggctgtagcttcacatcaggcgtcctggatg

SEQ ID NO: 389163 - DNA, 120 bp, Artificial Sequence
  ENSG00000144655_13 (sequence is synthesized)
gaagggtcaagggaaggcagccttcctggcacctcagtgccacccagcatggacgctggccggagtagctcagtggatctcagcttgtcttcttgtgactcctttgagttactccaggct

SEQ ID NO: 389164 - DNA, 120 bp, Artificial Sequence
  ENSG00000144655_14 (sequence is synthesized)
ctgccagattatagtctggggcctcactacacatcacagaaggtgtctgacagcctggacaacatcgaggcacctcacttccccctgcctggcctgtctccacctggggatgccagcagt

SEQ ID NO: 389165 - DNA, 120 bp, Artificial Sequence
  ENSG00000144655_15 (sequence is synthesized)
tgcttcctggagtccctcatgggcttctccgagccagccgccgaagccctagatccctttattgacagccagtttgaggacactgtcccagcatctctaatggagcctgtgccggtgtga

SEQ ID NO: 389166 - DNA, 120 bp, Artificial Sequence
  ENSG00000144655_16 (sequence is synthesized)
ggaccaggatgtcttttcccagccccaagagacctgttgctgctttcttgtaattatggggctccccagagtctgcgtaacagtctcccactggctggctcacccacaggtgccatgtgc

SEQ ID NO: 389167 - DNA, 120 bp, Artificial Sequence
  ENSG00000144655_17 (sequence is synthesized)
acactcctggttttcaaacaattctctggatttatttatttgttttaacttttctgtgctgaagagaggactggggggagggggcttcccctttcagctgcccggccccccacacccaca

SEQ ID NO: 389168 - DNA, 120 bp, Artificial Sequence
  ENSG00000144655_18 (sequence is synthesized)
gcttgctcttctatctccacaacgtgagcctggaagaggagaaaatgtggctcctctggagcttggcagaccacttttcggtctttgcgtgatgttccttagcccaaagacggtgagaca

SEQ ID NO: 389169 - DNA, 120 bp, Artificial Sequence
  ENSG00000144655_19 (sequence is synthesized)
gggctgaaatcaggtggcttctgccaccctgagccctagacccatgggtggctaaatccactggactgtgaagactataatttatttccataatttatttggagattgaggaggctttgg

SEQ ID NO: 389170 - DNA, 120 bp, Artificial Sequence
  ENSG00000144655_20 (sequence is synthesized)
ttgcacttctttggctggtgggtaatgccaggggtggggtgggcacaggccctcaagagccccttttgccttgtagtcctacaccttgccctgcctgggctttggtgcagactaggtgtg

SEQ ID NO: 389171 - DNA, 120 bp, Artificial Sequence
  ENSG00000144655_21 (sequence is synthesized)
gatttgagctctgtgatctatgtctgctgcctggctcctagatggctctgtgggcaggtgctggccaaggacatcatctaggcagggggagagcctgggctgaacagctgtgaccaaaac

SEQ ID NO: 389172 - DNA, 120 bp, Artificial Sequence
  ENSG00000144655_22 (sequence is synthesized)
tcccttctgccccaccctgccccctccacttcctgccctctgttccatcttcccccttcccaaaggccacagcctttattccaggcccagggatgtaggagggggaaggaggaaacagga

SEQ ID NO: 389173 - DNA, 120 bp, Artificial Sequence
  ENSG00000144655_23 (sequence is synthesized)
agcccagagagggcaaagggcctacctcggggcgcgaaccatgccccagactattatctcagggctttctgggcactgcacttcagcgtggcccacctgcccatgccctgaggccagttg

SEQ ID NO: 389174 - DNA, 120 bp, Artificial Sequence
  ENSG00000144655_24 (sequence is synthesized)
gcgaggggtggctcctgagggtttttataccctttgtttgctaatgtttaattttgcatcataatttctacattgtccctgagtgtcagaactataatttattccatttctctctgtgtc

SEQ ID NO: 389175 - DNA, 120 bp, Artificial Sequence
  ENSG00000144655_25 (sequence is synthesized)
tgtgccaagaaacgcaggctctgggcctgccccttgcccaggaggccttgccagcctgtgtgcttgtgggaacaccttgtacctgagcttacaggtaccaataaagaggctttattttta

SEQ ID NO: 389176 - DNA, 120 bp, Artificial Sequence
  ENSG00000144659_0 (sequence is synthesized)
agagttcctccggcgcttcctccaccccgggatacacagaacctcatctcctacggtgctgaagcctgcagcagggcaggatgggcaggagagcagagccgcggagtctgcggcgcgggt

SEQ ID NO: 389177 - DNA, 120 bp, Artificial Sequence
  ENSG00000144659_1 (sequence is synthesized)
gaagagcggcgcgtaattcccgcagcaagattgttccgcgcccgcagcccctggactagcaggatccgaaccccggcggctgcgtgcttataggcgcagacgtcagagagcccgcggctt

SEQ ID NO: 389178 - DNA, 120 bp, Artificial Sequence
  ENSG00000144659_2 (sequence is synthesized)
aaagcgcgtcgcctggctagcgccaccccctagccttcttcaaggcctccagggctgggcccaagcgcccgtcgacggcaccctgggcccagaggactcgcgggcctcatctccaatgat

SEQ ID NO: 389179 - DNA, 120 bp, Artificial Sequence
  ENSG00000144659_3 (sequence is synthesized)
tcagaactcacgtccgtcgctgctgcaaccccaagatgtcggagacacggtggaaacgcttatgttacatccggtgatcaaggctttcctgtgtggctccatcagtgggacctgctctac

SEQ ID NO: 389180 - DNA, 120 bp, Artificial Sequence
  ENSG00000144659_4 (sequence is synthesized)
cctccttttccaacctctggatctccttaaaacacgcctgcaaaccctccagccctcagatcatgggtctagacgtgttgggatgttggctgtactcttgaaggtggttcgcacggagag

SEQ ID NO: 389181 - DNA, 120 bp, Artificial Sequence
  ENSG00000144659_5 (sequence is synthesized)
tcttttgggcctttggaaagggatgtccccttccattgtgagatgtgtccctggcgttggaatctactttggcactctctactctttgaagcagtatttcttgcgaggccatcccccaac

SEQ ID NO: 389182 - DNA, 120 bp, Artificial Sequence
  ENSG00000144659_6 (sequence is synthesized)
cgccctggagtcagtcatgctgggggtgggctctcgctctgttgcaggggtctgtatgtcacctatcactgtaatcaagacgcgctatgagagtgggaaatatggctatgagagtatcta

SEQ ID NO: 389183 - DNA, 120 bp, Artificial Sequence
  ENSG00000144659_7 (sequence is synthesized)
cgctgccctgaggagcatctatcacagtgaggggcaccggggcctcttcagtggcctgacagcaactctccttcgagatgcgcccttctcaggaatctacctgatgttttacaaccagac

SEQ ID NO: 389184 - DNA, 120 bp, Artificial Sequence
  ENSG00000144659_8 (sequence is synthesized)
tgtgggatatttgctggtattctggcctcactggtaactcaacctgcggatgttatcaaaactcatatgcagctttatccactgaagtttcaatggattggccaagcagtgacacttatt

SEQ ID NO: 389185 - DNA, 120 bp, Artificial Sequence
  ENSG00000144659_9 (sequence is synthesized)
ttcaaagactatggactacgtggcttcttccaaggtggcatcccccgagccctccgcagaactctaatggcagcaatggcgtggacggtgtatgaagagatgatggccaagatgggcctg

SEQ ID NO: 389186 - DNA, 120 bp, Artificial Sequence
  ENSG00000144659_10 (sequence is synthesized)
aagtcctgaccaagagaggactgggaacgggtgaaatctgttgccctgcttggtttctgccaagggctgctgcttcttactattctgcagtaagatgaagtcctacctggaaaaccaggc

SEQ ID NO: 389187 - DNA, 120 bp, Artificial Sequence
  ENSG00000144659_11 (sequence is synthesized)
agaaattgtgttgcctttgccttcagtaatccccttaaggagaaaatatatggacctgatttcagccttcagaatctccaaaagaggagtcatcaattcatagagcacactagggtgtta

SEQ ID NO: 389188 - DNA, 120 bp, Artificial Sequence
  ENSG00000144659_12 (sequence is synthesized)
ggagagagctttgcatactctgagaggctacttggaaaggcattttcccaggagagctctgtcaggtggctgcgcttcagccccacccctacaccacagggtctccttgggtatgttctt

SEQ ID NO: 389189 - DNA, 120 bp, Artificial Sequence
  ENSG00000144659_13 (sequence is synthesized)
gggcaagcaatcacaaagccagagaagctgtaagctgcctgccgggcctgaggagctccaaccagggaagactggatgtgaggagaggagtcactgtcaccaggtcacagactgactgag

SEQ ID NO: 389190 - DNA, 120 bp, Artificial Sequence
  ENSG00000144659_14 (sequence is synthesized)
gtgatggtaggatgaggaggaacagatgcccttctttaattggttctcagttaacttctcagaggctctggagaacgggacagtggctttctagcctctgaatgttccaaataaaatttt

SEQ ID NO: 389191 - DNA, 120 bp, Artificial Sequence
  ENSG00000144659_15 (sequence is synthesized)
ttggtcttggcccctgtactgttttacctctaaattctggcatttttttttccctgcaattaaagtgctgtactttatttattgaactttatcattgaaagctgtttggaaaacctaaaa

SEQ ID NO: 389192 - DNA, 120 bp, Artificial Sequence
  ENSG00000144659_16 (sequence is synthesized)
gatgttgtcacacttctgttttctttacctgtgccttataaaaatggaccaaacccttttctaaaataaaatagttctagggtggctggttattgacctatgtaggtccctaaaacctaa

SEQ ID NO: 389193 - DNA, 120 bp, Artificial Sequence
  ENSG00000144659_17 (sequence is synthesized)
agacgctaaaggcctgaggccactgcagctgccgcagctctccctctgaggtcttgcgcccgaggtatgaagaaaacatgaggcaccaccagttacatccggtgatcaaggctttcctgt

SEQ ID NO: 389194 - DNA, 120 bp, Artificial Sequence
  ENSG00000144659_18 (sequence is synthesized)
gacgctaaaggcctgaggccactgcagctgccgcagctctccctctgaggtcttgcgcccgaggtaggggcggcttttatttttttttttaatccttaaaggcggagacggcggcggtgg

SEQ ID NO: 389195 - DNA, 120 bp, Artificial Sequence
  ENSG00000144659_19 (sequence is synthesized)
cgactttacgttgacgtctttgaaaacctgcttacctttttcagggctctccagccctcgcctccagatgtgaattggacttaggatagttttttcagggcagtaggaattgcttgtgga

SEQ ID NO: 389196 - DNA, 120 bp, Artificial Sequence
  ENSG00000144659_20 (sequence is synthesized)
gaaaccagaaactgtgaggagaggcactcagctatatggcatgtaccagagaggccaagtatgaagaaaacatgaggcaccaccagttacatccggtgatcaaggctttcctgtgtggct

SEQ ID NO: 389197 - DNA, 120 bp, Artificial Sequence
  ENSG00000144659_21 (sequence is synthesized)
ttatgaggaattccagttataactggcttctttggtggaatttgagatacactctcttctctgttaagcaaatactgcagattacaaatatttcagttccaggtatgaagaaaacatgag

SEQ ID NO: 389198 - DNA, 80 bp, Artificial Sequence
  ENSG00000144668_0 (sequence is synthesized)
agacttctcgggcggactgaggacgccgccgctcggggccgcccctgtgctcgccttcagcgcccgctcagcccgccgtc

SEQ ID NO: 389199 - DNA, 80 bp, Artificial Sequence
  ENSG00000144668_1 (sequence is synthesized)
cattccgcccgtgtccaggcgcagagctcccgccccggggagcttcctggccgtcggcgggccccgcggcccgcgcgctc

SEQ ID NO: 389200 - DNA, 120 bp, Artificial Sequence
  ENSG00000144668_2 (sequence is synthesized)
ccgaggggcgccgggaggctccgcgcgctgctgctggcgctggtggtcgcggggatccccgcgggcgcctacaacctcgacccgcagcgccccgtgcacttccagggccccgctgactcg

SEQ ID NO: 389201 - DNA, 120 bp, Artificial Sequence
  ENSG00000144668_3 (sequence is synthesized)
cccgctgactcgttcttcggctacgcagttctggagcatttccacgacaacacgcgctgggtccttgtgggcgcaccaaaggcagattccaaatacagcccttcagtgaagtctcctggg

SEQ ID NO: 389202 - DNA, 120 bp, Artificial Sequence
  ENSG00000144668_4 (sequence is synthesized)
gctgtgtttaagtgccgtgttcacaccaaccctgaccggagatgcaccgaactggacatggctcgagggaagaatcggggcacgtcctgcggaaagacctgccgggaagaccgcgatgat

SEQ ID NO: 389203 - DNA, 120 bp, Artificial Sequence
  ENSG00000144668_5 (sequence is synthesized)
gagtggatgggggtgagcctggcccgacagcccaaggctgatggccgtgtgttggcctgtgctcatcgctggaagaacatctactatgaagccgaccacatcctaccccatggcttctgc

SEQ ID NO: 389204 - DNA, 120 bp, Artificial Sequence
  ENSG00000144668_6 (sequence is synthesized)
tacatcatcccctccaacctccaggccaaaggcaggacgctgatcccttgctatgaagagtataagaagaagtacggagaggaacacggctcctgccaggctgggatagcgggcttcttc

SEQ ID NO: 389205 - DNA, 120 bp, Artificial Sequence
  ENSG00000144668_7 (sequence is synthesized)
accgaggagctggtggtgatgggtgctccagggtcattttattgggctggaaccatcaaagtgctgaaccttacggacaacacctatttaaaactgaacgacgaagtgatcatgaacagg

SEQ ID NO: 389206 - DNA, 120 bp, Artificial Sequence
  ENSG00000144668_8 (sequence is synthesized)
cggtacacctacctgggctacgcagtgaccgctggccacttctctcacccgtccaccattgatgtggtaggaggtgccccacaggacaaaggcatcggcaaggtttatattttcagagct

SEQ ID NO: 389207 - DNA, 120 bp, Artificial Sequence
  ENSG00000144668_9 (sequence is synthesized)
gaccgaagatcaggcaccttaattaagatctttcaagcatcaggtaaaaagatgggctcttacttcggctcctccttgtgcgcagttgacctgaatggggacggcctctctgacctgctg

SEQ ID NO: 389208 - DNA, 120 bp, Artificial Sequence
  ENSG00000144668_10 (sequence is synthesized)
gtgggggcccccatgttttctgagatcagggatgagggacaggtcactgtctacatcaacagaggaaatggagccctcgaggagcagctggctctgactggggatggtgcctacaatgcg

SEQ ID NO: 389209 - DNA, 120 bp, Artificial Sequence
  ENSG00000144668_11 (sequence is synthesized)
cactttggagagagcattgccagcctggacgatctggacaatgatgggttcccagatgtggccattggtgcacccaaggaggatgacttcgcaggggcggtctatatctatcatggtgat

SEQ ID NO: 389210 - DNA, 120 bp, Artificial Sequence
  ENSG00000144668_12 (sequence is synthesized)
gccggtgggatagtccctcagtactcaatgaaactgtctgggcagaagataaatccagtgctccggatgtttggtcagtccatatcgggaggcattgatatggatggaaatggctatcct

SEQ ID NO: 389211 - DNA, 120 bp, Artificial Sequence
  ENSG00000144668_13 (sequence is synthesized)
gatgtcactgttggagccttcatgtccgacagcgtggttcttctcagagcaaggcctgtcattacggtggatgtctccatcttcctcccgggctccatcaacatcacagcgcctcagtgt

SEQ ID NO: 389212 - DNA, 120 bp, Artificial Sequence
  ENSG00000144668_14 (sequence is synthesized)
cacgacggacagcagcctgtgaactgcctgaacgtcaccacctgcttcagcttccatggcaaacacgttccaggagagattggcctgaattatgttctgatggctgacgtggccaaaaag

SEQ ID NO: 389213 - DNA, 120 bp, Artificial Sequence
  ENSG00000144668_15 (sequence is synthesized)
gagaagggccagatgcccagggtctactttgtgctgctgggagagaccatgggtcaggtcacagagaagctgcagctgacttacatggaggagacgtgtcgtcactatgtggcccatgtg

SEQ ID NO: 389214 - DNA, 120 bp, Artificial Sequence
  ENSG00000144668_16 (sequence is synthesized)
aagcggagggtgcaggacgtcatcagcccgatcgtgtttgaagcagcctacagcctcagtgagcatgtgactggagaggaggagagggaactgccgcctctgacaccagttctccgctgg

SEQ ID NO: 389215 - DNA, 120 bp, Artificial Sequence
  ENSG00000144668_17 (sequence is synthesized)
aaaaagggacaaaagattgcccaaaagaatcagactgtttttgaaaggaattgccgttcagaggactgtgccgcagacctgcagcttcagggtaaactgctgctctccagtatggatgag

SEQ ID NO: 389216 - DNA, 120 bp, Artificial Sequence
  ENSG00000144668_18 (sequence is synthesized)
aaaaccctgtatctagctttgggggctgtgaagaacatctccctaaacatctctatctccaacctcggagatgatgcctatgatgccaacgtgtccttcaatgtttcccgggagctcttc

SEQ ID NO: 389217 - DNA, 120 bp, Artificial Sequence
  ENSG00000144668_19 (sequence is synthesized)
ttcatcaacatgtggcagaaggaggagatgggcatctcctgtgagctgctggaatcggacttcctcaaatgcagcgtgggatttcctttcatgaggtcaaagtcaaagtatgaattcagc

SEQ ID NO: 389218 - DNA, 120 bp, Artificial Sequence
  ENSG00000144668_20 (sequence is synthesized)
gtgatctttgatacaagccacctgtctggggaagaggaagttctcagcttcattgttactgctcagagtggcaacacggagcgctctgaatccctgcatgacaacaccctcgtgctgatg

SEQ ID NO: 389219 - DNA, 120 bp, Artificial Sequence
  ENSG00000144668_21 (sequence is synthesized)
gtgccactgatgcacgaggtggacacgtccatcaccggaatcatgtctccaacctcctttgtatatggcgagtccgtggacgcagccaacttcattcagctggatgacctggagtgtcac

SEQ ID NO: 389220 - DNA, 120 bp, Artificial Sequence
  ENSG00000144668_22 (sequence is synthesized)
tttcagcccatcaatatcacccttcaggtctacaacactggcccaagcacccttccagggtcatctgtcagcatctctttccctaatcgactctcatctggtggtgcagagatgtttcat

SEQ ID NO: 389221 - DNA, 120 bp, Artificial Sequence
  ENSG00000144668_23 (sequence is synthesized)
gtccaggaaatggtggtgggccaagagaagggaaactgctctttccagaaaaacccaactccctgcatcatccctcaagaacaagaaaatatcttccacacaatatttgcttttttcaca

SEQ ID NO: 389222 - DNA, 120 bp, Artificial Sequence
  ENSG00000144668_24 (sequence is synthesized)
aagtctggaagaaaagtcttggactgtgaaaaaccaggaatttcttgcctaacagcacactgtaactttagtgctcttgctaaagaagaaagtcgtactatagacatttacatgctgctg

SEQ ID NO: 389223 - DNA, 120 bp, Artificial Sequence
  ENSG00000144668_25 (sequence is synthesized)
aacacagaaatactgaaaaaggacagttcgtctgtcatccagttcatgtcccgcgccaaggtgaaggtggatcctgccctaagggtggtggaaatagctcatgggaacccagaagaggtg

SEQ ID NO: 389224 - DNA, 120 bp, Artificial Sequence
  ENSG00000144668_26 (sequence is synthesized)
acggtggtcttcgaggccctgcacaatctggagccccgtggctacgtcgtggggtggatcatcgccatcagtttgttggtgggaatcctcatcttcctgctgctggccgtgctgctctgg

SEQ ID NO: 389225 - DNA, 120 bp, Artificial Sequence
  ENSG00000144668_27 (sequence is synthesized)
aagatgggcttctttcgccgaaggtacaaagaaattatcgaagctgagaagaaccggaaagagaatgaagacagttgggactgggtccagaaaaaccagtgagctgccacaccagtcaca

SEQ ID NO: 389226 - DNA, 120 bp, Artificial Sequence
  ENSG00000144668_28 (sequence is synthesized)
tgacctgatcactagcctgtcatccttggtctttgtatcttccatatttggaagaaaaaaatcttctccagatttttcggaggccccactgatgctgttctcttcttcattctatcaagc

SEQ ID NO: 389227 - DNA, 120 bp, Artificial Sequence
  ENSG00000144668_29 (sequence is synthesized)
ccaggtgccagcctgaggcagccacttcggccaggtcacacgaccggggccagcaccacttcctttaaagatgaactctgaactttggagagtgagctacagagccgagcaatatttatg

SEQ ID NO: 389228 - DNA, 120 bp, Artificial Sequence
  ENSG00000144668_30 (sequence is synthesized)
gatgcaacacgcatggtcaaccctcaggggaaaactgttacctaaagtatttttataaatataagccttttatactgattatgtcttttatatttgtatcgatgttttattatttctatt

SEQ ID NO: 389229 - DNA, 120 bp, Artificial Sequence
  ENSG00000144668_31 (sequence is synthesized)
aaatagttatataattcactcaagcactgatatctggcctaaaatcttggaagtacatgtccatgaatacaaattttaaaggatgaaaatcttaccgtactttggaacttgctgtttaaa

SEQ ID NO: 389230 - DNA, 120 bp, Artificial Sequence
  ENSG00000144668_32 (sequence is synthesized)
gcatataaactgtgggtgtggcaagaccccgaagacatttcacatctttatcgcctcgatcaagtgtggagtcacatgctaatgtgtgctaaagaactgtaagtgttttttcatatgtac

SEQ ID NO: 389231 - DNA, 120 bp, Artificial Sequence
  ENSG00000144668_33 (sequence is synthesized)
ttttcattggaagattcccaacaagaatttggatggaaaacctgatccctagcaagaagtctgctctgtatcacctttatatagcagacatgtcaccctgcttctacacagatgatggat

SEQ ID NO: 389232 - DNA, 120 bp, Artificial Sequence
  ENSG00000144668_34 (sequence is synthesized)
gaaagcttggagcaatgccatgtggtcatctggtaaacctcagaatggcgtctcatcctggacatcctgcatcagagttcacacaccacaaggactaaatccttgtcccctaagcaaaga

SEQ ID NO: 389233 - DNA, 120 bp, Artificial Sequence
  ENSG00000144668_35 (sequence is synthesized)
attgggtctgaatgctgtgagggattgcctttttgtggtaattttcattgagagatcttcatttcccctaccaccctggctgtcccagctagtggtgattgcagattccttcccagagag

SEQ ID NO: 389234 - DNA, 120 bp, Artificial Sequence
  ENSG00000144668_36 (sequence is synthesized)
gacatttaaccgttttaaaaaaaatgtcttagattgggttcccaagaagcagtccctgaaacaaggatttgtgtgcaagtaacttattaaggaagtattcccaggggataccagtaagag

SEQ ID NO: 389235 - DNA, 120 bp, Artificial Sequence
  ENSG00000144668_37 (sequence is synthesized)
agtgggggaagcaggacaaggaaggagacaaagccaggcaaatgtttgtcatttcagggagagctccatgaagtttagcctcagcctgatcaggggaactccggaggaaaagttaggcct

SEQ ID NO: 389236 - DNA, 120 bp, Artificial Sequence
  ENSG00000144668_38 (sequence is synthesized)
cagaggtgtcccaacctgaatcaaggggctggctgcacccagaggagatgtaaacgttttattctcaattcctgctggcgtaatggctccagtagctcaggacagtcctctaaaggacaa

SEQ ID NO: 389237 - DNA, 120 bp, Artificial Sequence
  ENSG00000144668_39 (sequence is synthesized)
ccacagatgcatcctcagccaggggagacacagggaaatgatgcaaaagaaatgatgcaaaggatctgagcagaacactgcccctccccaccccctgaatgtgtgagtgctgagttacgg

SEQ ID NO: 389238 - DNA, 120 bp, Artificial Sequence
  ENSG00000144668_40 (sequence is synthesized)
ccttcagtatccaagctctctgtttgacagtagatatattgtcagatgcactgtgctgcttagttttgagtgcagtgtgattttctgaaagggcaatgagatgatggatgtagcatgctc

SEQ ID NO: 389239 - DNA, 120 bp, Artificial Sequence
  ENSG00000144668_41 (sequence is synthesized)
agcactgacctggcccatagtgatcactcaataactgttaacagctatggctgctattcctactgatggataaccatctaataagacagaaaacatggggctaagagcagggtctaacgg

SEQ ID NO: 389240 - DNA, 120 bp, Artificial Sequence
  ENSG00000144668_42 (sequence is synthesized)
agtcttaatggcttattacagcctgccaaagtgccagctacatacacatggcatccagtgcggatgaaacaatctataaaaccaagggtctttcttatagcaccttttttactggaagct

SEQ ID NO: 389241 - DNA, 120 bp, Artificial Sequence
  ENSG00000144668_43 (sequence is synthesized)
aacacgttgggagtccgtgaacattgtcaaaaagacatcaaactcaacttctgggaagacagatttttaatacacatacttggctaatactcacaaacatatctaaagttttggcaaaat

SEQ ID NO: 389242 - DNA, 120 bp, Artificial Sequence
  ENSG00000144668_44 (sequence is synthesized)
tatgagggtgatgggtgggtactaacctggcatggagcaggtgtgtcttttggtttcttatgcagttgactctgctgcagggagattacagatgtaacctcatgcttctcttcctggtga

SEQ ID NO: 389243 - DNA, 120 bp, Artificial Sequence
  ENSG00000144668_45 (sequence is synthesized)
acatgggaatagaccaaaaaaatcaagggtcaatggcatgaactaagctgatcctggaaatcagggatgttgcatctaactgtgggatggaggcacagaggtagctacagggagcaggac

SEQ ID NO: 389244 - DNA, 120 bp, Artificial Sequence
  ENSG00000144668_46 (sequence is synthesized)
gaggcaaagaaagcagctgtcactcagagttcgcttatgagttttatcaaaagcagcaagaaaagcagtcttgggtgggttttatcacttattaacagccatttatgaggcccctgctgt

SEQ ID NO: 389245 - DNA, 120 bp, Artificial Sequence
  ENSG00000144668_47 (sequence is synthesized)
gtgtcaggcactgtgcaaggtgctggaggttccccagagaacacttcagggacattttgcctcagggtggcaaaatgcagtggcatgtggactttttgaatgggatgccatttgcagctt

SEQ ID NO: 389246 - DNA, 120 bp, Artificial Sequence
  ENSG00000144668_48 (sequence is synthesized)
tcctttgatggactcttgttcataatgccatgttttctttaatgaatcatttaggattcttaggtgatatttctggaacagcaccatcaacagctttggccacatgcacttagagcaact

SEQ ID NO: 389247 - DNA, 120 bp, Artificial Sequence
  ENSG00000144668_49 (sequence is synthesized)
aacttgcctcctgccggggtgtaggtgcgttggtgacagtgtagaagggtgattcgcaggcccatgttctgcccaccagcaaagccccactggagaagggtagactcctgtgggcagtct

SEQ ID NO: 389248 - DNA, 120 bp, Artificial Sequence
  ENSG00000144668_50 (sequence is synthesized)
cagagctgggacctatttgcttctgcttgattctgcgtgggtggacccacatgagcagctgtatacccaggaggtcactaagactttataaaggcaggttttaagaaaaccagccttggc

SEQ ID NO: 389249 - DNA, 120 bp, Artificial Sequence
  ENSG00000144668_51 (sequence is synthesized)
atcaccaccagcagatactgaaagcctccccaggaacctgtctggggaaggatgatgcctctgctggtctgatcgtgctgagtagcaggtgggctacggggactggggagttaagcattt

SEQ ID NO: 389250 - DNA, 120 bp, Artificial Sequence
  ENSG00000144668_52 (sequence is synthesized)
tgtgcagtgatagagaagtcaagcatatcgttagcgctctctcaacttgggcagttcacaagctccttcccagctcagaagccctctctatgctctcaggggaagcagatggggtggatc

SEQ ID NO: 389251 - DNA, 120 bp, Artificial Sequence
  ENSG00000144668_53 (sequence is synthesized)
agtacatctgtgttacccttccagaatattatttgaaaattctacagtatgttctactttctccccttcctgcttccatggtttcactgtggaatcctataagatattctcctgagcagt

SEQ ID NO: 389252 - DNA, 120 bp, Artificial Sequence
  ENSG00000144668_54 (sequence is synthesized)
attatttcagtttccttcagcttttagttgaatcttcaatgtggttttaaccaactgttcagagaactgaaatggtttttaaatatgaaaaaggacctttgtaaaaatggagtaaaacag

SEQ ID NO: 389253 - DNA, 120 bp, Artificial Sequence
  ENSG00000144668_55 (sequence is synthesized)
tgccccttttttaaaaaaagttttgcttatgcttaatttacataggactcaggagagtttggaacatcctccaagtgggccatagagctgtcacaaagaagaggccatgatgtttagaaa

SEQ ID NO: 389254 - DNA, 120 bp, Artificial Sequence
  ENSG00000144668_56 (sequence is synthesized)
caaggggacactagcaggaggggcagggtccactggcttagtggcaactgacaggcatccattccgaataactcagcactgaggtttcctcaggcagttctttaggaaaactgtcagcat

SEQ ID NO: 389255 - DNA, 120 bp, Artificial Sequence
  ENSG00000144668_57 (sequence is synthesized)
catgggtactcagaggtatggtagaccttgtagaagatccactaggaagtcctccttcaccaaatcatgtagctactgcccttgagccaaaggcaatgaggtttaaaacaaaaacccaac

SEQ ID NO: 389256 - DNA, 120 bp, Artificial Sequence
  ENSG00000144668_58 (sequence is synthesized)
agcactcctgggaacatcctgttttccatgcggaagcatagcagatccccagacgatccgtgtgctgtatgctacctgttgaaccctagcatggtggctttttaaaaggttatttatgac

SEQ ID NO: 389257 - DNA, 120 bp, Artificial Sequence
  ENSG00000144668_59 (sequence is synthesized)
ttttatttttgggtaaggcattatggccaggtgcatgcagttatgtctgggttacgtgtgaaacgtacatctggtgaactgtatacttggctcaaacttctcaaaatttagaggtgctgg

SEQ ID NO: 389258 - DNA, 120 bp, Artificial Sequence
  ENSG00000144668_60 (sequence is synthesized)
aaaggattgtcacttggagcctttagtagacaaaaggcagaaagtgagcatcatttcagaaatgctttagtatgcacacttttagctgatattttgatatatagaataataatatacaca

SEQ ID NO: 389259 - DNA, 120 bp, Artificial Sequence
  ENSG00000144668_61 (sequence is synthesized)
gtggagaatattcaaagagtggctgaagggagaatacagagccagtagggccaaaatgaaacttctaggatgtcttctgaattttcagcacatggggggaataagtgaacaaatttccca

SEQ ID NO: 389260 - DNA, 120 bp, Artificial Sequence
  ENSG00000144668_62 (sequence is synthesized)
acatcgtgcaatgctttatagcacaatgatctagatttcagactgtgttaaggttttttctttgttgatgttgttgttttaattctaatgtgcacggtgtgactggcagagtgagtttaa

SEQ ID NO: 389261 - DNA, 120 bp, Artificial Sequence
  ENSG00000144668_63 (sequence is synthesized)
aagctttacgagtgattaattgcttggcaggcacccacgctatctgcatttccagaactttactgatgcatccatgtacatttccactgaggaattttggtgggtggggggaggttgtgc

SEQ ID NO: 389262 - DNA, 120 bp, Artificial Sequence
  ENSG00000144668_64 (sequence is synthesized)
tgcctcacaatgtcacgtgtattaaagtctaagcagtcacttctgattcacttgcactgtttgggaaatgtcaggtttacaaaaacatacatgtttggaataaaaaatggctgcaaacaa

SEQ ID NO: 389263 - DNA, 120 bp, Artificial Sequence
  ENSG00000144668_65 (sequence is synthesized)
gtgaggagtcctcccaccccctgcctcccatagcagctggggcggccactgaagccctgacatgctcctgtccctggctgtgtacaccggggtatactccggaggggctgcatcatatgg

SEQ ID NO: 389264 - DNA, 120 bp, Artificial Sequence
  ENSG00000144668_66 (sequence is synthesized)
cccaaaagttgagagagccgtgggcctggctgctcaggagaccgcagccaggacacacctcctctctgggtctcccttttctgatctgcaaaatgataaaataaacagtcttaggggtta

SEQ ID NO: 389265 - DNA, 120 bp, Artificial Sequence
  ENSG00000144671_0 (sequence is synthesized)
ggccagttcctagtcggtggctcccatgctggtctctgatgtttaggaagtggtgtcagcagagactgagctgcaccctttctttggacagatggcaggagaggagaacttcaaggaaga

SEQ ID NO: 389266 - DNA, 120 bp, Artificial Sequence
  ENSG00000144671_1 (sequence is synthesized)
gctcagatcccaggatgcttccaggaacttgaaccagcatgaggtagcaggacatccacattcctggtctctggagatgctgttacgcagattgagggctgtccacaccaagcaggatga

SEQ ID NO: 389267 - DNA, 120 bp, Artificial Sequence
  ENSG00000144671_2 (sequence is synthesized)
caagtttgccaacctcctggatgcggtgggggagtttggcacattccagcagaggctagtagccctcacctttatccccagcatcatgtcggccttcttcatgtttgctgaccacttcgt

SEQ ID NO: 389268 - DNA, 120 bp, Artificial Sequence
  ENSG00000144671_3 (sequence is synthesized)
gttcacagcccagaagccctattgcaataccagctggatcctggcagtgggcccccacctgtccaaagctgagcagctgaatctgaccataccccaagcacccaatggcagtttcctgac

SEQ ID NO: 389269 - DNA, 120 bp, Artificial Sequence
  ENSG00000144671_4 (sequence is synthesized)
atgcttcatgtaccttcctgtgccttggaatctggattctatcatccagtttggcctcaatgacacagacacatgccaagatgggtggatctatcctgacgctaagaagcgatcgctgat

SEQ ID NO: 389270 - DNA, 120 bp, Artificial Sequence
  ENSG00000144671_5 (sequence is synthesized)
caatgagtttgacttggtatgtggcatggagacgaagaaggacactgcacagatcatgttcatggcagggctcccgataggctctctcatcttcaggctcataactgacaagatgggccg

SEQ ID NO: 389271 - DNA, 120 bp, Artificial Sequence
  ENSG00000144671_6 (sequence is synthesized)
ctaccctgccatcctgctgtcactgctggggctgatcatcttcggctttgggacagccttcatgaacagctttcacctgtatttgttctttcgctttggcatctcgcagtcagtggtggg

SEQ ID NO: 389272 - DNA, 120 bp, Artificial Sequence
  ENSG00000144671_7 (sequence is synthesized)
ctacgccatcagcagcatttctttggccactgagtggttagtgggtgagcaccgggcccatgccattatcctgggacactgctttttcgctgttggggccgtgttgctgacagggatcgc

SEQ ID NO: 389273 - DNA, 120 bp, Artificial Sequence
  ENSG00000144671_8 (sequence is synthesized)
ctacagtcttccccactggcagctgctgtttctggtgggtgggatacttgtgatccccttcatctcctatatctggattctcccggagtccccgcggtggctgatgatgaaagggaaggt

SEQ ID NO: 389274 - DNA, 120 bp, Artificial Sequence
  ENSG00000144671_9 (sequence is synthesized)
caagaagaccattccttcaaatctgctggacgagctgcagctgcccagaaagaaggtgactcgggcctctgtcctggacttctgtaagaataggcagctctgcaaggtgaccttggtgat

SEQ ID NO: 389275 - DNA, 120 bp, Artificial Sequence
  ENSG00000144671_10 (sequence is synthesized)
gagctgtgtgtggtttaccgtcagttacacctattttacgttgagcctgagaatgagagagctgggcgtgagcgtccacttcagacacgtggtccccagcatcatggaggtgcctgcccg

SEQ ID NO: 389276 - DNA, 120 bp, Artificial Sequence
  ENSG00000144671_11 (sequence is synthesized)
gctgtgctgcatctttctcctccagcagattgggaggaagtggagcctggctgtgactctcctccaagccatcatctggtgcttgcttctccttttcctccctgaaggggaggatggcct

SEQ ID NO: 389277 - DNA, 120 bp, Artificial Sequence
  ENSG00000144671_12 (sequence is synthesized)
cagactcaagtggccacgttgtccggccacagagctgaaatccatgacgatcttggtgctcatgctcagagagttcagcctggccgccactgtcactgtgttcttcctctacaccgctga

SEQ ID NO: 389278 - DNA, 120 bp, Artificial Sequence
  ENSG00000144671_13 (sequence is synthesized)
gctcctccccactgtgctcagggcgacaggtctggggctggtgtctctggcctcggtggctggagccatcttgtccctgacaatcatcagccagaccccctccctcctgcccatctttct

SEQ ID NO: 389279 - DNA, 120 bp, Artificial Sequence
  ENSG00000144671_14 (sequence is synthesized)
ctgctgcgtcttagccatcgtggccttttccctctcctccctgctgccggaaacgcgagatcagcccctctccgagagcctgaaccactcctcacagataaggaataaggtcaaggacat

SEQ ID NO: 389280 - DNA, 120 bp, Artificial Sequence
  ENSG00000144671_15 (sequence is synthesized)
gaagactaaggaaacatcatctgatgatgtctgaggaagcggccaagaatgtcattctcaatgcccagatcctgagattggacccataccctgtctccaaccctgccttgaagcaattca

SEQ ID NO: 389281 - DNA, 120 bp, Artificial Sequence
  ENSG00000144671_16 (sequence is synthesized)
ataaagaggaagcaaacagccaggctccctgagggccaggcccccagaccatcttgggttggaattgagtggccaagtatggggtcatggattccaggccacaaattccaggcctagttc

SEQ ID NO: 389282 - DNA, 120 bp, Artificial Sequence
  ENSG00000144671_17 (sequence is synthesized)
agtctgggggcagggtcagtccttctcccaggccagcccttgacattaaaaaaaatgccccctccttctgcaggagctctgctgtgattcattccaataaaggtacaatgttggtcttga

SEQ ID NO: 389283 - DNA, 120 bp, Artificial Sequence
  ENSG00000144671_18 (sequence is synthesized)
tttgtatctgacagtttcaacatctgcagtctaaaagtctgtggtttctggattctgtcgacttgtagagtggcttgccttctcaagctataatctctttgcttgatgtacctctgtgag

SEQ ID NO: 389284 - DNA, 120 bp, Artificial Sequence
  ENSG00000144671_19 (sequence is synthesized)
agtcttgcagaatcaacttgaagaaattttcctttagagaaggctcgcttctgcctctgctctgagccaaggggtgccccgcaccaggaactgttaccccttctgagagttttggctcaa

SEQ ID NO: 389285 - DNA, 120 bp, Artificial Sequence
  ENSG00000144671_20 (sequence is synthesized)
aacagagttttaagcttagtttcccctccttgctgctgttgcaaggtaatatgctgacagtcagtactgctcaccttcctccttccccactcctgcctttccagtttggctccatgctgc

SEQ ID NO: 389286 - DNA, 120 bp, Artificial Sequence
  ENSG00000144671_21 (sequence is synthesized)
actgcctcaccactgcaccagccttggtgccccatctctgtggcccaggcttccagcctcccaccttgggcccacctcctggctacagccgacgatgcagatctttgtttgtttttgaag

SEQ ID NO: 389287 - DNA, 120 bp, Artificial Sequence
  ENSG00000144671_22 (sequence is synthesized)
aaaaggtccctagagacctctcctaccttttgcaagaccactggtgtctcagtgtgtgtgtaaacaaaaagcttgagttgtggggaagttgtaggagagttcctaagaacttagtccttc

SEQ ID NO: 389288 - DNA, 120 bp, Artificial Sequence
  ENSG00000144671_23 (sequence is synthesized)
atgacaacagaagcacagcattttctaaaacattaaaaatctcaattacactaaaactccaggatggttgggccaggggggaataaatcatgttaactaagaaagcaagggagggaacta

SEQ ID NO: 389289 - DNA, 120 bp, Artificial Sequence
  ENSG00000144671_24 (sequence is synthesized)
gggaggtgagggtaggggttctccagggacccatggatggctcagggcctggcccaggtgtatccggctggggccagcccgggagatcccggcacttggtgcagcctccctttgacacct

SEQ ID NO: 389290 - DNA, 120 bp, Artificial Sequence
  ENSG00000144671_25 (sequence is synthesized)
agggggcgtggcggcataggcagatggcaagggggcgtggtgtagctgtaagagggcatggcgggggtgtggcagcgtgggcatctgctgggatcccacaggacacagagtcaggggcct

SEQ ID NO: 389291 - DNA, 120 bp, Artificial Sequence
  ENSG00000144671_26 (sequence is synthesized)
aattggacaggcagaagtggaagggatctccgttcctggctgcctggagatgtcagagaatcagtgccctgactgcccttccaccttcatcctccttcctaactccctcatacaccacac

SEQ ID NO: 389292 - DNA, 120 bp, Artificial Sequence
  ENSG00000144671_27 (sequence is synthesized)
cttccaccgcatactctttgcatacccccaagccccatgggttacatttactgagcccttaagaaaggccaggcaaaagaaaaaacaacaaaaaacagaagaagaaggaggaggaggagg

SEQ ID NO: 389293 - DNA, 120 bp, Artificial Sequence
  ENSG00000144674_0 (sequence is synthesized)
atgtgcgggacccgacattgtgcttgtcccatccggtgctccgtagttagcctctgtgagctccacgtaggccgcgcaagcgcccttggcgcacagttcacctgctgccgttgtcgtcgc

SEQ ID NO: 389294 - DNA, 120 bp, Artificial Sequence
  ENSG00000144674_1 (sequence is synthesized)
cgccgcggctcccggggctggatggggggccgaggccagccagtggcacccggaagaaagagacgcggcggcggcgacgccgacaccctcaggacgagtgtccggacttgcccacagcct

SEQ ID NO: 389295 - DNA, 120 bp, Artificial Sequence
  ENSG00000144674_2 (sequence is synthesized)
caaggaggagacggcgaggcccggcccccgctgtccctggtgtaaagaagtcgccgtagccgtcgcggccgggactccccgggctctcgcccttcaggtttcgttgacactcaggaccgt

SEQ ID NO: 389296 - DNA, 120 bp, Artificial Sequence
  ENSG00000144674_3 (sequence is synthesized)
acgtacgctgcgccatgttcaagaaactgaagcaaaagatcagcgaggagcagcagcagctccagcaggcgctggctcctgctcaggcgtcctccaattcttcaacaccaacaagaatga

SEQ ID NO: 389297 - DNA, 120 bp, Artificial Sequence
  ENSG00000144674_4 (sequence is synthesized)
ggagcaggacatcttcatttacagagcaacttgatgaaggtacacccaatagagagtcaggtgacacacagtcttttgcacagaagctccagctccgggtgccctccgtggagtctttgt

SEQ ID NO: 389298 - DNA, 120 bp, Artificial Sequence
  ENSG00000144674_5 (sequence is synthesized)
ttcgaagtccgataaaggaatctctattccggtcttcttctaaagagtctttggtacgaacatcttccagagaatccctgaatcgacttgacctggacagttctactgccagttttgatc

SEQ ID NO: 389299 - DNA, 120 bp, Artificial Sequence
  ENSG00000144674_6 (sequence is synthesized)
caccctctgatatggatagcgaggctgaagacttggtagggaattcagacagtctcaacaaagaacagttgattcagcggttgcgaagaatggaacgaagcttaagtagctacaggggaa

SEQ ID NO: 389300 - DNA, 120 bp, Artificial Sequence
  ENSG00000144674_7 (sequence is synthesized)
aatattctgagcttgttacagcttatcagatgcttcagagagagaagaaaaagctacaaggtatattaagtcagagtcaggataaatcacttcggagaatagcagaattaagagaggagc

SEQ ID NO: 389301 - DNA, 120 bp, Artificial Sequence
  ENSG00000144674_8 (sequence is synthesized)
tccaaatggaccagcaggcaaagaaacatctgcaagaggagtttgatgcatctttagaggagaaagatcagtatatcagtgttctccaaactcaggtttctctactgaaacaacgattac

SEQ ID NO: 389302 - DNA, 120 bp, Artificial Sequence
  ENSG00000144674_9 (sequence is synthesized)
gaaatggcccgatgaatgttgatgtactgaaaccacttcctcagctggaaccacaggctgaagtcttcactaaagaagagaatccagaaagtgatggagagccagtagtggaagatggaa

SEQ ID NO: 389303 - DNA, 120 bp, Artificial Sequence
  ENSG00000144674_10 (sequence is synthesized)
cttctgtaaaaacactggaaacactccagcaaagagtgaagcgtcaagagaacctacttaagcgttgtaaggaaacaattcagtcacataaggaacaatgtacactattaactagtgaaa

SEQ ID NO: 389304 - DNA, 120 bp, Artificial Sequence
  ENSG00000144674_11 (sequence is synthesized)
aagaagctctgcaagaacaactggatgaaagacttcaagaactagaaaagataaaggaccttcatatggccgagaagactaaacttatcactcagttgcgtgatgcaaagaacttaattg

SEQ ID NO: 389305 - DNA, 120 bp, Artificial Sequence
  ENSG00000144674_12 (sequence is synthesized)
aacagcttgaacaagataagggaatggtaatcgcagagacaaaacgtcagatgcatgaaaccctggaaatgaaagaagaagaaattgctcaactccgtagtcgcatcaaacagatgacta

SEQ ID NO: 389306 - DNA, 120 bp, Artificial Sequence
  ENSG00000144674_13 (sequence is synthesized)
cccagggagaggaattacgggaacagaaagaaaagtccgaaagagctgcttttgaggaacttgaaaaagctttgagtacagcccaaaaaacagaggaagcacggagaaaactgaaggcag

SEQ ID NO: 389307 - DNA, 120 bp, Artificial Sequence
  ENSG00000144674_14 (sequence is synthesized)
aaatggatgaacaaataaaaactatcgaaaaaacaagtgaggaggaacgcatcagtcttcaacaggaattaagtcgggtgaaacaggaggttgttgatgtaatgaaaaaatcctcagaag

SEQ ID NO: 389308 - DNA, 120 bp, Artificial Sequence
  ENSG00000144674_15 (sequence is synthesized)
aacaaattgctaagctacagaagcttcatgaaaaggagctggccagaaaagagcaggaactgaccaagaagcttcagacccgagaaagggaatttcaggaacaaatgaaagtagctcttg

SEQ ID NO: 389309 - DNA, 120 bp, Artificial Sequence
  ENSG00000144674_16 (sequence is synthesized)
aaaagagtcaatcagaatatttgaagatcagccaagaaaaagaacagcaagaatctttggccctagaagagttagagttgcagaaaaaagcaatcctcacagaaagtgaaaataaacttc

SEQ ID NO: 389310 - DNA, 120 bp, Artificial Sequence
  ENSG00000144674_17 (sequence is synthesized)
gggaccttcagcaagaagcagagacttacagaactagaattcttgaattggaaagttctttggaaaaaagcttacaagaaaacaaaaatcagtcaaaagatttggctgttcatctggaag

SEQ ID NO: 389311 - DNA, 120 bp, Artificial Sequence
  ENSG00000144674_18 (sequence is synthesized)
ctgaaaaaaataagcacaataaggagattacagtcatggttgaaaaacacaagacagaattggaaagccttaagcatcagcaggatgccctttggactgaaaaactccaagtcttaaagc

SEQ ID NO: 389312 - DNA, 120 bp, Artificial Sequence
  ENSG00000144674_19 (sequence is synthesized)
aacaatatcagactgaaatggaaaaacttagggaaaagtgtgaacaagaaaaagaaacattgttgaaagacaaagagattatcttccaggcccacatagaagaaatgaatgaaaagactt

SEQ ID NO: 389313 - DNA, 120 bp, Artificial Sequence
  ENSG00000144674_20 (sequence is synthesized)
tagaaaagcttgatgtgaagcaaacagaactagaatcattatcttctgaactgtcagaagtattaaaagcccgtcacaaactagaagaggaactttctgttctgaaagatcaaacagata

SEQ ID NO: 389314 - DNA, 120 bp, Artificial Sequence
  ENSG00000144674_21 (sequence is synthesized)
aaatgaagcaggaattagaggccaagatggatgaacagaaaaatcatcaccagcagcaagttgacagtatcattaaagaacacgaggtatctatccagaggactgagaaggcattaaaag

SEQ ID NO: 389315 - DNA, 120 bp, Artificial Sequence
  ENSG00000144674_22 (sequence is synthesized)
atcaaattaatcaacttgagcttctcttgaaggaaagggacaagcatttgaaagagcatcaggctcatgtagaaaatttagaggcagatattaaaaggtctgaaggggaactccagcagg

SEQ ID NO: 389316 - DNA, 120 bp, Artificial Sequence
  ENSG00000144674_23 (sequence is synthesized)
catctgctaagctggacgtttttcagtcttaccagagtgccacacatgagcagacaaaagcatatgaggaacagttggcccaattgcagcagaagttgttggatttggaaacagaaagaa

SEQ ID NO: 389317 - DNA, 120 bp, Artificial Sequence
  ENSG00000144674_24 (sequence is synthesized)
ttcttcttaccaaacaggttgctgaagttgaagcacaaaagaaagatgtttgtactgagttagatgctcacaaaatccaggtgcaggacttaatgcagcaacttgaaaaacaaaatagtg

SEQ ID NO: 389318 - DNA, 120 bp, Artificial Sequence
  ENSG00000144674_25 (sequence is synthesized)
aaatggagcaaaaagtaaaatctttaacccaagtctatgagtccaaacttgaagatggtaacaaagaacaggaacagacaaagcaaatcttggtggaaaaggaaaatatgattttacaaa

SEQ ID NO: 389319 - DNA, 120 bp, Artificial Sequence
  ENSG00000144674_26 (sequence is synthesized)
tgagagaaggacagaagaaagaaattgagatactcacacagaaattgtcagccaaggaggacagtattcatattttgaatgaggaatatgaaaccaaatttaaaaaccaagaaaaaaaga

SEQ ID NO: 389320 - DNA, 120 bp, Artificial Sequence
  ENSG00000144674_27 (sequence is synthesized)
tggaaaaagttaagcagaaagcaaaggagatgcaagaaacgttaaagaaaaaattactggatcaggaagccaaacttaagaaagagcttgaaaatactgctctagagcttagtcagaaag

SEQ ID NO: 389321 - DNA, 120 bp, Artificial Sequence
  ENSG00000144674_28 (sequence is synthesized)
aaaaacagtttaatgccaaaatgctggaaatggcacaggctaactcagctggaatcagtgatgcagtgtcaagactggaaacaaaccaaaaagaacaaatagaaagtcttactgaggttc

SEQ ID NO: 389322 - DNA, 120 bp, Artificial Sequence
  ENSG00000144674_29 (sequence is synthesized)
atcgacgagaactcaatgatgtcatatcaatctgggaaaagaaacttaatcagcaagctgaagaacttcaggaaatacatgaaatccaattacaggaaaaagaacaagaggtagcagaac

SEQ ID NO: 389323 - DNA, 120 bp, Artificial Sequence
  ENSG00000144674_30 (sequence is synthesized)
tgaaacaaaagatcctcctatttgggtgtgaaaaagaagagatgaacaaggaaataacatggctgaaggaagaaggtgttaagcaggatacaacattaaatgaattacaggaacagttaa

SEQ ID NO: 389324 - DNA, 120 bp, Artificial Sequence
  ENSG00000144674_31 (sequence is synthesized)
agcagaagtctgcccatgtgaattctcttgcacaagatgaaactaaactgaaagctcatcttgaaaagctagaggttgacttgaataagtctctgaaggaaaatacttttcttcaagagc

SEQ ID NO: 389325 - DNA, 120 bp, Artificial Sequence
  ENSG00000144674_32 (sequence is synthesized)
agtttgaaatcttcacatgaaaaaagtaacaaaagcctagaggacaagagcttggaatttaaaaaactgtctgaggaactagcgattcagctagatatttgctgtaagaaaaccgaagcc

SEQ ID NO: 389326 - DNA, 120 bp, Artificial Sequence
  ENSG00000144674_33 (sequence is synthesized)
ttattagaagctaaaacaaatgagctaatcaacattagtagtagtaaaactaatgccattctttctaggatttctcattgtcagcaccgtacaactaaagttaaggaggcactgttaatt

SEQ ID NO: 389327 - DNA, 120 bp, Artificial Sequence
  ENSG00000144674_34 (sequence is synthesized)
aaaacttgcacagtttctgaattagaagcacaacttagacagttgacagaggagcaaaatacactaaatatttcttttcaacaggctactcatcagttagaagaaaaagaaaatcaaatt

SEQ ID NO: 389328 - DNA, 120 bp, Artificial Sequence
  ENSG00000144674_35 (sequence is synthesized)
aagagcatgaaggctgatattgaaagtcttgtaacagaaaaagaagccttacagaaggaaggaggcaatcagcaacaggctgcttctgaaaaggagtcttgtataacacagttgaagaaa

SEQ ID NO: 389329 - DNA, 120 bp, Artificial Sequence
  ENSG00000144674_36 (sequence is synthesized)
gagttatctgaaaacatcaatgctgtcacattgatgaaagaagagcttaaagaaaaaaaagttgagattagcagtcttagtaaacaactaactgatttgaatgttcagcttcaaaatagc

SEQ ID NO: 389330 - DNA, 120 bp, Artificial Sequence
  ENSG00000144674_37 (sequence is synthesized)
atcagcctatccgaaaaagaagcagccatttcatcactaagaaagcagtatgatgaagaaaaatgtgaattgctggatcaggtgcaagatttatcttttaaagttgacactctgagtaaa

SEQ ID NO: 389331 - DNA, 120 bp, Artificial Sequence
  ENSG00000144674_38 (sequence is synthesized)
gagaaaatttctgctcttgagcaggtagatgactggtccaataaattctcagaatggaagaagaaagcacagtcaagatttacacagcatcaaaacactgttaaagaattgcagatccag

SEQ ID NO: 389332 - DNA, 120 bp, Artificial Sequence
  ENSG00000144674_39 (sequence is synthesized)
cttgagttaaaatcaaaggaagcttatgaaaaggatgagcagataaatttattgaaggaagagcttgatcagcaaaataaaagatttgattgtttaaagggtgaaatggaagacgacaag

SEQ ID NO: 389333 - DNA, 120 bp, Artificial Sequence
  ENSG00000144674_40 (sequence is synthesized)
agcaagatggagaaaaaggagtctaatttagaaacagagttaaagtctcaaacagcaagaattatggaattagaggaccatattacccagaaaactattgaaatagagtccttaaatgaa

SEQ ID NO: 389334 - DNA, 120 bp, Artificial Sequence
  ENSG00000144674_41 (sequence is synthesized)
gttcttaaaaattacaatcaacaaaaggatattgaacacaaagaattggttcagaaacttcaacattttcaagagttaggagaagaaaaggacaacagggttaaagaagctgaagaaaaa

SEQ ID NO: 389335 - DNA, 120 bp, Artificial Sequence
  ENSG00000144674_42 (sequence is synthesized)
atcttaacacttgaaaaccaagtttattccatgaaagctgaacttgaaactaagaagaaagaattagaacatgtgaatttaagtgtgaaaagcaaagaggaggagttaaaggcattggaa

SEQ ID NO: 389336 - DNA, 120 bp, Artificial Sequence
  ENSG00000144674_43 (sequence is synthesized)
gataggcttgagtcagaaagtgctgcaaaattagcagagttgaagagaaaagctgaacaaaaaattgctgccattaagaagcagttgttatctcaaatggaagagaaagaagaacagtat

SEQ ID NO: 389337 - DNA, 120 bp, Artificial Sequence
  ENSG00000144674_44 (sequence is synthesized)
aaaaaaggtacagaaagccatttgagtgagctaaatacaaaattgcaggaaagagaaagggaagttcacatcttggaagaaaaacttaagtcagtggaaagttcacagtcagaaacatta

SEQ ID NO: 389338 - DNA, 120 bp, Artificial Sequence
  ENSG00000144674_45 (sequence is synthesized)
attgtacccagatcagcaaaaaatgtggcagcatatactgaacaagaagaagcagattcccaaggctgtgtgcagaagacatatgaagaaaaaatcagtgttttacaaagaaacttaact

SEQ ID NO: 389339 - DNA, 120 bp, Artificial Sequence
  ENSG00000144674_46 (sequence is synthesized)
gaaaaagaaaagctattgcagagggtagggcaggaaaaagaagagacagtttcttctcattttgaaatgcgatgccaataccaggagcgcttaataaagctagaacatgctgaggcaaag

SEQ ID NO: 389340 - DNA, 120 bp, Artificial Sequence
  ENSG00000144674_47 (sequence is synthesized)
caacatgaagatcaaagtatgataggtcatcttcaagaggagcttgaagaaaaaaacaagaaatattccttgatagtagcccagcatgtggaaaaagaaggaggtaaaaataacatacag

SEQ ID NO: 389341 - DNA, 120 bp, Artificial Sequence
  ENSG00000144674_48 (sequence is synthesized)
gcaaagcaaaacttggaaaatgtgtttgacgacgtccagaaaaccctccaggagaaggaactaacctgtcagattttggagcaaaagataaaagagctggattcctgcttagtaagacag

SEQ ID NO: 389342 - DNA, 120 bp, Artificial Sequence
  ENSG00000144674_49 (sequence is synthesized)
aaagaagtacatagagttgaaatggaagagttgacctcaaaatatgaaaaattacaggctttacaacagatggatggaagaaataaacccacagaacttttggaagaaaacactgaagaa

SEQ ID NO: 389343 - DNA, 120 bp, Artificial Sequence
  ENSG00000144674_50 (sequence is synthesized)
aagtccaaatcacatttggtccaacccaaattgcttagtaacatggaagcccagcacaatgatctggagtttaaattagccggggcagaacgggagaaacagaaactgggcaaggagatt

SEQ ID NO: 389344 - DNA, 120 bp, Artificial Sequence
  ENSG00000144674_51 (sequence is synthesized)
gttagattgcagaaagaccttcgaatgttgagaaaggagcatcagcaagaattggaaatactaaagaaagaatatgatcaagaaagggaagagaaaatcaaacaggagcaggaagatctt

SEQ ID NO: 389345 - DNA, 120 bp, Artificial Sequence
  ENSG00000144674_52 (sequence is synthesized)
gaactgaagcacaattccacattaaaacagctgatgagggagtttaatacacagctggcacaaaaggaacaagagctggaaatgaccataaaagaaactatcaataaggcccaggaggtg

SEQ ID NO: 389346 - DNA, 120 bp, Artificial Sequence
  ENSG00000144674_53 (sequence is synthesized)
gaggctgaacttttagaaagccatcaagaagagacaaatcagttacttaaaaaaattgctgagaaagatgatgatctaaaacgaacagccaaaagatatgaagaaatccttgatgctcgt

SEQ ID NO: 389347 - DNA, 120 bp, Artificial Sequence
  ENSG00000144674_54 (sequence is synthesized)
gaagaagaaatgactgcaaaagtaagggacctgcagactcaacttgaggagctgcagaagaaataccagcaaaagctagagcaggaggagaaccctggcaatgataatgtaacaattatg

SEQ ID NO: 389348 - DNA, 120 bp, Artificial Sequence
  ENSG00000144674_55 (sequence is synthesized)
gagctacagacacagctagcacagaagacgactttaatcagtgattcgaaattgaaagagcaagagttcagagaacagattcacaatttagaagaccgtttgaagaaatatgaaaagaat

SEQ ID NO: 389349 - DNA, 120 bp, Artificial Sequence
  ENSG00000144674_56 (sequence is synthesized)
gtatatgcaacaactgtggggacaccttacaaaggtggcaatttgtaccatacggatgtctcactctttggagaacctaccgaatttgagtatttgcgaaaagtgctttttgagtatatg

SEQ ID NO: 389350 - DNA, 120 bp, Artificial Sequence
  ENSG00000144674_57 (sequence is synthesized)
atgggtcgtgagactaagaccatggcaaaagttataaccaccgtactgaagttccctgatgatcagactcagaaaattttggaaagagaagatgctcggctgatgtttacttcacctcgc

SEQ ID NO: 389351 - DNA, 120 bp, Artificial Sequence
  ENSG00000144674_58 (sequence is synthesized)
agtggtatcttctgagtaaaccatcagtctgtgcttagttaacatgtgtcatggctccgatcttcatcttgaagaagagtgacattgggtgactgctgcttggaaaactgtccacacttg

SEQ ID NO: 389352 - DNA, 120 bp, Artificial Sequence
  ENSG00000144674_59 (sequence is synthesized)
ctactctttgagaatgaagttgtcattcagggcccctcatgtagccaaaagaccaagaaaaatctggcccacagataagttgcagactgcctttaaaatagattttatcagtggagaaat

SEQ ID NO: 389353 - DNA, 120 bp, Artificial Sequence
  ENSG00000144674_60 (sequence is synthesized)
ggtgatagttttttcttcagttttctcttgggaagagttttatgttgtttaaaagatattttgataacttaacctgctttatgggcttacataatattcctttcatccattctttttaaa

SEQ ID NO: 389354 - DNA, 120 bp, Artificial Sequence
  ENSG00000144674_61 (sequence is synthesized)
gaacggcttacctttcctatttatttttagggtgattttttaaaaagacttgtgcaatacattttgaggtgaaacttagtggattttttctgataaattagagcatttaattgactattt

SEQ ID NO: 389355 - DNA, 120 bp, Artificial Sequence
  ENSG00000144674_62 (sequence is synthesized)
tattcaggttgatctgttgaatatttgctaaagaccagttctttaagctaagacatgtaaaaaatcccaaatggcagtacctcattgtttacttagcttttgtacttatatttttcagag

SEQ ID NO: 389356 - DNA, 120 bp, Artificial Sequence
  ENSG00000144674_63 (sequence is synthesized)
gaaaaaacactactgtaaattgtgaatagccaatacataactgtattgtatgcaaatctgtgattgttggcagtgtcatctctgagaaacagataaataaagtttatttactatataaca

SEQ ID NO: 389357 - DNA, 120 bp, Artificial Sequence
  ENSG00000144674_64 (sequence is synthesized)
accttatttcttctctctcacttttgaaatttagctgtaatagatttcatggtagtgccaaagatttccttttcaaatgtgttttttgaacgaaaagggtttttttttttgactcaatat

SEQ ID NO: 389358 - DNA, 120 bp, Artificial Sequence
  ENSG00000144674_65 (sequence is synthesized)
tattcaaattagtactgttatatgcagatttataaagttgagttgatttctgccaggattgtagtttcctgatgagattctgctaactaggcagcacagtccccttgctagtattgaagc

SEQ ID NO: 389359 - DNA, 120 bp, Artificial Sequence
  ENSG00000144674_66 (sequence is synthesized)
catgggaggagagagatgatgacgttacctatccaacagggctgggtgcagatcaaaagaaatgaatgattcctggggaagtactttgcgaatgctgaagatttatgtgcgtttaaggtg

SEQ ID NO: 389360 - DNA, 120 bp, Artificial Sequence
  ENSG00000144674_67 (sequence is synthesized)
cagctagtgttagagtcttcagaaaagtattaacacagaaggatatttgtgttaaaagacagaagcagcaggtgttggagttcttggttgtaagcaacaaaaagtcaatctaggtaagca

SEQ ID NO: 389361 - DNA, 120 bp, Artificial Sequence
  ENSG00000144674_68 (sequence is synthesized)
gaaaaataatttattgaagactctttaccctacagaatttccctgaggtcccaaaagtctgagctgattgctacgtccagttatactggggagactactctgtgttgcagctgcttcagc

SEQ ID NO: 389362 - DNA, 120 bp, Artificial Sequence
  ENSG00000144674_69 (sequence is synthesized)
ttggcaccagcattgcatctgtcacttcacagcttatatttgtgtggatgcatgaagttctgtctccattgtcatcagatgatgaactttatttgtatgtctgttttttcacatcactca

SEQ ID NO: 389363 - DNA, 120 bp, Artificial Sequence
  ENSG00000144674_70 (sequence is synthesized)
cttatgactcgaagtctcatgtgtttcattgatggagctcaggttaccctgtctcagataaaaagaagattgggttagtaagttttctgagttctaacttacggacttataagagctgtt

SEQ ID NO: 389364 - DNA, 120 bp, Artificial Sequence
  ENSG00000144674_71 (sequence is synthesized)
tatagaaaaaaggttattaaacttttgtcatatttgtagatgcttttcctcacctcccaattaaactgctgctttgatttgtttttcacataaaaatctctttcccattcagagattgta

SEQ ID NO: 389365 - DNA, 120 bp, Artificial Sequence
  ENSG00000144674_72 (sequence is synthesized)
gaaatagactcttgaattttttgtatttcaataaaaaaaattaaatctttaatatagcttaagtatgaaggatctgatttgtgtgtcttgccccatatggatggccagttgtcccaacat

SEQ ID NO: 389366 - DNA, 120 bp, Artificial Sequence
  ENSG00000144674_73 (sequence is synthesized)
ttattgaatgtctatcctgatgcaaaatgttacttttatcataagctaaatatgtatatgtctgtctggatgtatatatgtgtatatagagtatgtgtatatttgtatactattcctcac

SEQ ID NO: 389367 - DNA, 120 bp, Artificial Sequence
  ENSG00000144674_74 (sequence is synthesized)
gacctctcagttccaccctaaccacagcagtttgtgcacggataccacagaccagagttccatttgtttattcattcattcatttatttgacaaatatttattaactgccttttgtaaag

SEQ ID NO: 389368 - DNA, 120 bp, Artificial Sequence
  ENSG00000144674_75 (sequence is synthesized)
tgcagactacaaaaagaggcgtcctccaattcttcaacaccaacaagaatgaggagcaggacatcttcatttacagagcaacttgatgaagagaatccctgaatcgacttgacctggaca

SEQ ID NO: 389369 - DNA, 120 bp, Artificial Sequence
  ENSG00000144674_76 (sequence is synthesized)
gacgtttgggtataaagagaggatagagagtaggcaagctgtcagagcttattagcttggtattgtgtgaaaattaaatttactgatctaacacactttcttttttttatgagagagagt

SEQ ID NO: 389370 - DNA, 120 bp, Artificial Sequence
  ENSG00000144674_77 (sequence is synthesized)
ttttatgagagagagtctcgctctgttgcctaggctagagtgcagtggtgagatcttggctcgctgtaacctccataatctccatctccgcggttcaagtgattcccctgcctcagcttc

SEQ ID NO: 389371 - DNA, 120 bp, Artificial Sequence
  ENSG00000144674_78 (sequence is synthesized)
gttgggattacaggcgtaagccaccgcgcttggccacactttctttttaaaacatttaaaaaattttaacaatttctttcaatatttatatttctctttcattgttgatgttcagtataa

SEQ ID NO: 389372 - DNA, 120 bp, Artificial Sequence
  ENSG00000144674_79 (sequence is synthesized)
attgttgatgttcagtataaccaacacactttcattaagcagtttgtttatccatccctcccacctggcagtaggctatgattagggacaaaaaaaggaaaagatagattaattgaagca

SEQ ID NO: 389373 - DNA, 120 bp, Artificial Sequence
  ENSG00000144674_80 (sequence is synthesized)
gtgactgcataattcaagaagagagtgcataattcaagaagaatgtcgaaaatctcatcagactgagtgtacccagagctcaaggctgagaaaattttggctgacttgcattttacagaa

SEQ ID NO: 389374 - DNA, 120 bp, Artificial Sequence
  ENSG00000144674_81 (sequence is synthesized)
gaagaaataaaaatggccaagtaatttttattttaagtggaataatttcagtactaattttcagtccatacgatggcttaaaaaagagttaaattaaaaaacttcctgagctaacaaaaa

SEQ ID NO: 389375 - DNA, 120 bp, Artificial Sequence
  ENSG00000144674_82 (sequence is synthesized)
caaccagaaagcagattgagatttttgttgaaagattttttaaaatagcataatttgaaagtttaaaacaaaaaatatttttcttcacttatgaaagccttttatataagttgccataaa

SEQ ID NO: 389376 - DNA, 120 bp, Artificial Sequence
  ENSG00000144674_83 (sequence is synthesized)
aaagtgttagtgacaaaaatgtaatttgtttttgtatgaaattattatccgtaagataatatgtgtaactcaaaaatgctttccgtgtaaaaggataataaatagtattttagattttaa

SEQ ID NO: 389377 - DNA, 120 bp, Artificial Sequence
  ENSG00000144674_84 (sequence is synthesized)
catcttcatttacagagcaacttgatgaaggtacacccaatagagagctactagccgggatgatagcagagcctgcttttctctctgagtatactatctttgctttggattcctccaaac

SEQ ID NO: 389378 - DNA, 120 bp, Artificial Sequence
  ENSG00000144674_85 (sequence is synthesized)
atcctaaaacacagagtgacagtgtgaatgcatctactcatgcctcgaaatctcctgacagtgttaatggaagtgaaccaagcattcctcagtcaggtgacacacagtcttttgcacaga

SEQ ID NO: 389379 - DNA, 80 bp, Artificial Sequence
  ENSG00000144677_0 (sequence is synthesized)
gggcctcccgctccgcctccccgtgcgcggctctcccgggcgcggctccggggttcatggtgacgaggcggcggccgctc

SEQ ID NO: 389380 - DNA, 80 bp, Artificial Sequence
  ENSG00000144677_1 (sequence is synthesized)
ttgcggggggccgggcctgcgggcggccgccgcgccgcgcacccatggacggcccggccatcatcacccaggtgaccaac

SEQ ID NO: 389381 - DNA, 120 bp, Artificial Sequence
  ENSG00000144677_2 (sequence is synthesized)
aggaggacgagggccggttgccgggcgcgggcgagaaagcctcccagtgcaacgtcagcttaaagaagcagaggagccgcagcatccttagctccttcttctgctgcttccgtgattaca

SEQ ID NO: 389382 - DNA, 120 bp, Artificial Sequence
  ENSG00000144677_3 (sequence is synthesized)
atgtggaggcccctccacccagcagccccagtgtgcttccgccactggtggaggagaatggtgggcttcagaagggtgaccagaggcaggtcattcccataccaagtccaccagctaagt

SEQ ID NO: 389383 - DNA, 120 bp, Artificial Sequence
  ENSG00000144677_4 (sequence is synthesized)
accttcttccagaggtgacggtgcttgactatggaaagaaatgtgtggtcattgatttagatgaaacattggtgcacagttcgtttaagcctattagtaatgctgattttattgttccgg

SEQ ID NO: 389384 - DNA, 120 bp, Artificial Sequence
  ENSG00000144677_5 (sequence is synthesized)
ttgaaatcgatggaactatacatcaggtgtatgtgctgaagcggccacatgtggacgagttcctccagaggatggggcagctttttgaatgtgtgctctttactgccagcttggccaagt

SEQ ID NO: 389385 - DNA, 120 bp, Artificial Sequence
  ENSG00000144677_6 (sequence is synthesized)
atgcagaccctgtggctgacctcctagaccgctggggtgtgttccgggcccggctcttcagagaatcatgtgtttttcatcgtgggaactacgtgaaggacctgagtcgccttgggcggg

SEQ ID NO: 389386 - DNA, 120 bp, Artificial Sequence
  ENSG00000144677_7 (sequence is synthesized)
agctgagcaaagtgatcattgttgacaattcccctgcctcatacatcttccatcctgagaatgcagtgcctgtgcagtcctggttcgatgacatgacggacacggagctgctggacctca

SEQ ID NO: 389387 - DNA, 120 bp, Artificial Sequence
  ENSG00000144677_8 (sequence is synthesized)
tccccttctttgagggcctgagccgggaggacgacgtgtacagcatgctgcacagactctgcaataggtagccctggcctctgcctgcctcccgcctgtgcactctggaacctctggcct

SEQ ID NO: 389388 - DNA, 120 bp, Artificial Sequence
  ENSG00000144677_9 (sequence is synthesized)
caggggacctgcctgtcctcagctccctgggagctgaaagtgaggatactccgtgctccaggccacagggtgaatgtggccatgcctacctgttttgtttttttaagaacagaaacaact

SEQ ID NO: 389389 - DNA, 120 bp, Artificial Sequence
  ENSG00000144677_10 (sequence is synthesized)
ttttaagaacagaaacaactattttaaaagaactcttttaagaaatttcataaagggacatgcattttactgggtttgcttttcttaaaacataccaaaaaagaaaaaaatagaaaaaaa

SEQ ID NO: 389390 - DNA, 120 bp, Artificial Sequence
  ENSG00000144677_11 (sequence is synthesized)
tatcagacttcctttcaactgtcctcccctccaagcagaccacctgtccccttctatcccagctcagagcagctgacccaactcagaatctctttcctacaggatgaagtgccttttgaa

SEQ ID NO: 389391 - DNA, 120 bp, Artificial Sequence
  ENSG00000144677_12 (sequence is synthesized)
tgttattttaagccgagagttaatttttctacacaacatatttccagacatcttttagtcttttattgtcttagatactataagaagatgaacatgacaattttctagaacctggtagcg

SEQ ID NO: 389392 - DNA, 120 bp, Artificial Sequence
  ENSG00000144677_13 (sequence is synthesized)
tgtgtgtgtgtggcggggggtgctgagggaggggagtgagtcacaggagcctgtcccccaacaggtgtgactgctctgacaacctgtggcatgctgcagggtcaggctcctgataggagg

SEQ ID NO: 389393 - DNA, 120 bp, Artificial Sequence
  ENSG00000144677_14 (sequence is synthesized)
atttcatgactatgtcattgtctccactcatttttgacccagtttggaatgtatctgcaattgtgtggctcaacactttaggaaacaatagattattttatattattatttctgatggtg

SEQ ID NO: 389394 - DNA, 120 bp, Artificial Sequence
  ENSG00000144677_15 (sequence is synthesized)
acaagtttgtcttgaggtcacattttctccttgaaaagtgacatcctgtcacttctgctctcacactactgccatacatttgtgttttttgttgttattgtttgggtagagcagttacaa

SEQ ID NO: 389395 - DNA, 120 bp, Artificial Sequence
  ENSG00000144677_16 (sequence is synthesized)
gaaaccctaaaacccttggatataaaagaaatctgtttattgatttttaaatctttcctttccaaaagctggatacacatggagctgtttgggaattttccttgctgctaccgcgctgcc

SEQ ID NO: 389396 - DNA, 120 bp, Artificial Sequence
  ENSG00000144677_17 (sequence is synthesized)
accaaatggaattgaccagcggctgttacactgttctttgccactgtgcctatgctcagaatatgctcactgctaagctacaaactcggacagggtcagaaacagaggtgtcccatccca

SEQ ID NO: 389397 - DNA, 120 bp, Artificial Sequence
  ENSG00000144677_18 (sequence is synthesized)
accacttaggtgtagcatggattttaaactgcagtcagtatcagatcctgtttgataaataagctgactgttctctcttgagaacctgtggcctcaaccagccaccaagctgatgtggcc

SEQ ID NO: 389398 - DNA, 120 bp, Artificial Sequence
  ENSG00000144677_19 (sequence is synthesized)
caagtccatctcttggtcttctcctttgaagcacagcctatttctgagccaagggttggggaagcctgtctagatgtgggactcattgccccaaaccagggagaggaagagctcccacag

SEQ ID NO: 389399 - DNA, 120 bp, Artificial Sequence
  ENSG00000144677_20 (sequence is synthesized)
ggagagcccaggctctctttgcagcctttcccagtttggtgtttaagcagtgccatgttccttgtttgacaacaagacagtctgtaaagtattgctcttaaaaacaattaaaaagaaccc

SEQ ID NO: 389400 - DNA, 120 bp, Artificial Sequence
  ENSG00000144677_21 (sequence is synthesized)
tttcatattggcaccattgccttagtcctctgtgggttggtcttcagccagcattctggtgggagtgactggcattaacaagactggaaatcgggggtcaaagtaaaatatctttgtttt

SEQ ID NO: 389401 - DNA, 120 bp, Artificial Sequence
  ENSG00000144677_22 (sequence is synthesized)
gctttcattcacaaagtaatgaagccagctgccaattacatcctcccaacagcactttggtctgtggactgctgtgtgaatattcagaagggaagtaagtattcagggggtaaacaggtc

SEQ ID NO: 389402 - DNA, 120 bp, Artificial Sequence
  ENSG00000144677_23 (sequence is synthesized)
tcccagcattctgagtgttccaaaccagtaatccacatgccaattcaaatagaacagccccttgctagatattaccacagataatgacagttacatggtagaactgcccatgccacaaat

SEQ ID NO: 389403 - DNA, 120 bp, Artificial Sequence
  ENSG00000144677_24 (sequence is synthesized)
atttatttggaaaagtagtcattaaatgaacccactgccttaaatgtcttgaatgttgcagtcaagtgtctgtcatgtgttgatatccacacagaattaggccctaatgagagccttaga

SEQ ID NO: 389404 - DNA, 120 bp, Artificial Sequence
  ENSG00000144677_25 (sequence is synthesized)
ccctcaaccatgcccccttcgttggcatcacagggccttatttggaagagcgggcaaagaggatggaaatcataaaatatttcatgggaatcgaacctagggatagtgctccacttctga

SEQ ID NO: 389405 - DNA, 120 bp, Artificial Sequence
  ENSG00000144677_26 (sequence is synthesized)
cgatggagtgaagacacttggcagacttgagccagacacttcacctagtagttcctgaaactgtgagcaccactgcactaagccagtgcggagctgttagggacgggcccagctcctgca

SEQ ID NO: 389406 - DNA, 120 bp, Artificial Sequence
  ENSG00000144677_27 (sequence is synthesized)
ccacggacacagaatgtctggagagggccagcaggccctctgagggttctggaatctgtgcaccttatttgaccacactccaaaattctgtttttattttaacccttgaatctgctttat

SEQ ID NO: 389407 - DNA, 120 bp, Artificial Sequence
  ENSG00000144677_28 (sequence is synthesized)
tatctatatctatatctatatctatatatttttaatcatctacatgtaaatgaagcaatagaattctaacataaggccaagaaatgagacgaatgtttggggtttatgttttttaaggta

SEQ ID NO: 389408 - DNA, 120 bp, Artificial Sequence
  ENSG00000144677_29 (sequence is synthesized)
ggtttatgttttttaaggtaaatacgggtattgtttttaattattaccatgtattaaattgtgggctttgaaacctaatgaaacctgttagccacttctctgtgccatatacttcccatg

SEQ ID NO: 389409 - DNA, 120 bp, Artificial Sequence
  ENSG00000144677_30 (sequence is synthesized)
ttaccaaaatacccccaactctttagccaaaagagaaccctgacctcctgagtttccatgctcctttctgtaccaggtttaaatgtagtcttctggagaagtatttttgacattgagctc

SEQ ID NO: 389410 - DNA, 120 bp, Artificial Sequence
  ENSG00000144677_31 (sequence is synthesized)
tgggacaggacaccttgggtttgtggactgcagcccactatgatgttattacttctctggccaggcctccagtggaagtgcacaggcactcccaatgttgttaatgctctgtcttccatt

SEQ ID NO: 389411 - DNA, 120 bp, Artificial Sequence
  ENSG00000144677_32 (sequence is synthesized)
tgttctggaatcctacgtgttggtctgtggttccatgcattagctgtttgtaaataatgcatttgcatactgaaaaaggaatgccacctgccacagttgatggtgaggaagctcctttga

SEQ ID NO: 389412 - DNA, 120 bp, Artificial Sequence
  ENSG00000144677_33 (sequence is synthesized)
cgtggtgcaattttgatgagatgtctctggggacacgaggatgccctaatgatgctgacttgtcatggttgcagcatttgaacttttggtgttaaaaaaaaaaacctgtaagtctgtaac

SEQ ID NO: 389413 - DNA, 120 bp, Artificial Sequence
  ENSG00000144677_34 (sequence is synthesized)
ctggcaacattttacaaccctgtatttttaaagatggctttctaataaaaaatccagaaccacacagccctatggtcaaacaatcctacgtttgtgcctctgcttttaaaggtgctgtgc

SEQ ID NO: 389414 - DNA, 120 bp, Artificial Sequence
  ENSG00000144677_35 (sequence is synthesized)
tggacagttggcatgccagggttcgagaagagtgaatggcttgacgtacttgcagttaactgtgcaaaattggctggctgcctctgttcctactgtactgtaactttgatcatgtctgtt

SEQ ID NO: 389415 - DNA, 120 bp, Artificial Sequence
  ENSG00000144677_36 (sequence is synthesized)
cctgttccattctcccaggagcttctctgcagactgacacaccctcccccaccccgggtagtggagatgctggtgtctgggtagtcatggatttctgctggacatttgaatgtgataaac

SEQ ID NO: 389416 - DNA, 120 bp, Artificial Sequence
  ENSG00000144677_37 (sequence is synthesized)
aatccagcattacttaggaaatgctacatgcggaatgtgcacgtttccaggggcgagtattgtcaatcaaaaggtttgcaatgatttccttcctgccaaaaataaacatgtgaaactgca

SEQ ID NO: 389417 - DNA, 120 bp, Artificial Sequence
  ENSG00000144677_38 (sequence is synthesized)
tttgaaaggaagaatcctggaacctcccacagctgtgaaaatgaaaccactttggctgcttcactctttatacagagaaggaaagacctggcctcccagtgcaacgtcagcttaaagaag

SEQ ID NO: 389418 - DNA, 120 bp, Artificial Sequence
  ENSG00000144677_39 (sequence is synthesized)
aaatcgatggaactatacatcagcaggcaacaggaaaatgccacaagtcacccacttatggtggactctcgggaaaaagtgtccattttcaatgccagctgctccagactgatcttatca

SEQ ID NO: 389419 - DNA, 120 bp, Artificial Sequence
  ENSG00000144677_40 (sequence is synthesized)
ttcctgcatcgttttctccagagaatctttagcaaatacccaccccaaaagaaaaagggggaagggtgtgagttttcggatccgcaggctgctatgaataaagatgccgtagtcagttgg

SEQ ID NO: 389420 - DNA, 120 bp, Artificial Sequence
  ENSG00000144677_41 (sequence is synthesized)
gggcagcgaattcccagaggaggaccctctacctcttgcaccctgcttgctcaggacatttggaacacaaagcccaggcctattagatgtggaagcagattccaggcccatttctactgc

SEQ ID NO: 389421 - DNA, 120 bp, Artificial Sequence
  ENSG00000144677_42 (sequence is synthesized)
tgagtccttaagtatctatgcctctcagaattcagcatgccagaggaagaaggaaggccatggacagaatgggacagatgacctctagggttccatccaccctgcatatttacttttgac

SEQ ID NO: 389422 - DNA, 120 bp, Artificial Sequence
  ENSG00000144677_43 (sequence is synthesized)
ctggagaaatgaggatttggagcctttgagtttccagctgcttctgcagcagcggcttgggttagcagccattgccaccatcacagccacaacctggacctacagaccagaagcctccag

SEQ ID NO: 389423 - DNA, 120 bp, Artificial Sequence
  ENSG00000144677_44 (sequence is synthesized)
gggctgggaggagtcagcaccccaatggcaaagaccatggaggacctttaagggcaaggacagcgtaaaacagattgctggacactcacaaatatatgcatacctcatgctgtatacaca

SEQ ID NO: 389424 - DNA, 120 bp, Artificial Sequence
  ENSG00000144677_45 (sequence is synthesized)
cacatacatacatgcccttcagctgcattgttgtgatcttgcgcgtcgttgacatgctcatctcatcgaaagtgtgttctgaaggtgcacctgtgtgcaggggctgtctgcactctccta

SEQ ID NO: 389425 - DNA, 120 bp, Artificial Sequence
  ENSG00000144677_46 (sequence is synthesized)
gcggccgccgcgccgcgcacccatggacggcccggccatcatcacccaggtgaccaaccccaaggaggacgagggccggttgccgggcgcgggcgagaaagattctctttctgagaaggg

SEQ ID NO: 389426 - DNA, 120 bp, Artificial Sequence
  ENSG00000144677_47 (sequence is synthesized)
aagggcaagaagacgagtggcagaagaatcagaaagttgtctacacacctgggtggcaggtgtaaccctcgctaaagagagaaggaggacagccaggcgcggtggttcacgcctataatc

SEQ ID NO: 389427 - DNA, 120 bp, Artificial Sequence
  ENSG00000144677_48 (sequence is synthesized)
ccaagcctcccagtgcaacgtcagcttaaagaagcagaggagccgcagcatccttagctccttcttctgctgcttccgtgattacaatgtggaggcccctccacccagcagccccagtgt

SEQ ID NO: 389428 - DNA, 80 bp, Artificial Sequence
  ENSG00000144681_0 (sequence is synthesized)
agaagcccgctcgcccgctgccgagtggcagtcacgactgtgaggtcgccggcgaggtggccgcgggcgcggcggggcgg

SEQ ID NO: 389429 - DNA, 120 bp, Artificial Sequence
  ENSG00000144681_1 (sequence is synthesized)
gaggtgggcagggcggggagggagagggagcgaggctggaggagggcacgtcggcgcctcggcgaggatgggagtccccaggacccggagctgagcagcctggcgcgcggcgggcagggc

SEQ ID NO: 389430 - DNA, 120 bp, Artificial Sequence
  ENSG00000144681_2 (sequence is synthesized)
gcgcaggacagaagcctcgctgttcctccgggagcccaacaccgttcccgcgcggccacgatgatccctccgagcagcccccgcgaggacggcgtggacgggctgcccaaggaggcggtg

SEQ ID NO: 389431 - DNA, 120 bp, Artificial Sequence
  ENSG00000144681_3 (sequence is synthesized)
ggcgccgagcaaccgccctctcctgcatccaccagcagccaggaatccaagctccagaaactaaaacgatcactttctttcaagaccaagagtttacggagcaaaagtgctgacaacttc

SEQ ID NO: 389432 - DNA, 120 bp, Artificial Sequence
  ENSG00000144681_4 (sequence is synthesized)
ttccagcgaaccaacagcgaagacatgaaactgcaagcacacatggtggctgagatcagccccagctccagcccactccctgctccaggaagcctgacgtccacacccgccagggctggt

SEQ ID NO: 389433 - DNA, 120 bp, Artificial Sequence
  ENSG00000144681_5 (sequence is synthesized)
ctgcatccaggtggcaaggctcatgcctttcaggaatacatcttcaagaagcccactttctgtgatgtctgcaaccacatgatagtgggaacaaatgctaagcatggactgcgctgcaaa

SEQ ID NO: 389434 - DNA, 120 bp, Artificial Sequence
  ENSG00000144681_6 (sequence is synthesized)
gcctgtaagatgagcatccaccacaagtgcacagatggcctggcaccccagcggtgcatgggcaagctgccaaaggggtttcggcgttactacagctcccccttgctcattcatgaacag

SEQ ID NO: 389435 - DNA, 120 bp, Artificial Sequence
  ENSG00000144681_7 (sequence is synthesized)
tttggctgcattaaagaagttatgcccattgcctgtggcaataaggtggaccctgtctacgagaccctccgcttcggcacctccctggcccagaggacaaagaagggcagctccggcagt

SEQ ID NO: 389436 - DNA, 120 bp, Artificial Sequence
  ENSG00000144681_8 (sequence is synthesized)
ggctctgactcacctcacagaacctctacttcagatcttgtggaggttcctgaggaagccaatgggccaggaggcgggtatgacctaaggaaacgcagcaacagcgtgtttacatatcca

SEQ ID NO: 389437 - DNA, 120 bp, Artificial Sequence
  ENSG00000144681_9 (sequence is synthesized)
gaaaatggcactgatgatttcagagatccagcgaagaacataaaccaccagggatctctttccaaagacccattacagatgaacacctatgttgccttgtacaaatttgtaccacaggag

SEQ ID NO: 389438 - DNA, 120 bp, Artificial Sequence
  ENSG00000144681_10 (sequence is synthesized)
aatgaagatttggaaatgaggccaggagacataattactcttttagaggattccaatgaagactggtggaaagggaaaattcaagacagaattggcttctttccagccaactttgttcag

SEQ ID NO: 389439 - DNA, 120 bp, Artificial Sequence
  ENSG00000144681_11 (sequence is synthesized)
agactacaacaaaatgagaagatttttagatgtgttagaaccttcattgggtgtaaggaacaggggcagataacactgaaagagaatcagatctgcgtgagttctgaagaagaacaagat

SEQ ID NO: 389440 - DNA, 120 bp, Artificial Sequence
  ENSG00000144681_12 (sequence is synthesized)
ggttttatcagagtcctcagtggaaaaaagaaaggcctcatcccccttgatgtactagaaaacatctgattgctggctcctcctccgtttgcagtaggcaagctctgctgcgatgcctct

SEQ ID NO: 389441 - DNA, 120 bp, Artificial Sequence
  ENSG00000144681_13 (sequence is synthesized)
aaaacagagggcccactgcacagcatatccaggctgccacaggtggggacgaggctgagagagtcagcaggcagagccagatgccatgcttggcagcagcagtaggactataaaccacag

SEQ ID NO: 389442 - DNA, 120 bp, Artificial Sequence
  ENSG00000144681_14 (sequence is synthesized)
ctgtcccccaggatcccactcctttcctgtctgtgtggtgtaagttaacacactggagtgtgctccagtttgcagggtagcccagtgcaaggttcagatccatgtagctaagtattatcc

SEQ ID NO: 389443 - DNA, 120 bp, Artificial Sequence
  ENSG00000144681_15 (sequence is synthesized)
tgcttccagacctatgtcaccagtaccaatcagtcagtgtcatcacatttcaggccccaagcaatctctgtgcaaagcatcagaaagacctgcttcccagcccccagcattccagtgctc

SEQ ID NO: 389444 - DNA, 120 bp, Artificial Sequence
  ENSG00000144681_16 (sequence is synthesized)
tccaggcttcctctctttgtgattgtgctgtccagagtgtccagcttgttctttctttctcttcagtcctctgagtacatctggtggtgtgcattagatgtgagggctatgttgacatgg

SEQ ID NO: 389445 - DNA, 120 bp, Artificial Sequence
  ENSG00000144681_17 (sequence is synthesized)
catcacctccaaagacctgacctgcctaaagactgatgacaggccatccttcctgctgttctaggtactggcctgggtgacagagcaggacatgagacatagatacagtggggaggagaa

SEQ ID NO: 389446 - DNA, 120 bp, Artificial Sequence
  ENSG00000144681_18 (sequence is synthesized)
gtggggaaaggtggagcagagagttcttacttattgaagattatacagccctttcggttatgaagtccctgcttgaaggcaatggacctggggaagagactatcacaaaaagtctccatt

SEQ ID NO: 389447 - DNA, 120 bp, Artificial Sequence
  ENSG00000144681_19 (sequence is synthesized)
ttcattttacatcctctctattggaggcagcacttttccctcatgctgtcctataggactccactttgaaggttgtgcctacgttgcagggaactaggaacatggaggggaaccaacaac

SEQ ID NO: 389448 - DNA, 120 bp, Artificial Sequence
  ENSG00000144681_20 (sequence is synthesized)
agcatcttagaagaaatgtagccaaattggagtccattcttctttagggcagtatatgaaatcctagcagatgtaaaatggaaaagaatcctaatgcttcttccttcagaaagtagagga

SEQ ID NO: 389449 - DNA, 120 bp, Artificial Sequence
  ENSG00000144681_21 (sequence is synthesized)
actaggggcccaattagcatcatctaggggaatctctattactctgtacttatactaatgtttacaagaatgcaatatactgtgatgccttcctactcaagcctcctagcattcaaactt

SEQ ID NO: 389450 - DNA, 120 bp, Artificial Sequence
  ENSG00000144681_22 (sequence is synthesized)
ccatcctattagtcattaacatggttaaacttcaattcacaatcaccttggaatcaatgtcagtttgatttattttgttacagagcaataaaatcattagaacaatggtttttaaaagac

SEQ ID NO: 389451 - DNA, 120 bp, Artificial Sequence
  ENSG00000144681_23 (sequence is synthesized)
ttaagtggatgcatcctatgcatgtaagcattatttcccaaaccaaagcatcattcatctccatttatttcttttgttcccgctcagtgtgaagttgggaactgagaggggatggctgct

SEQ ID NO: 389452 - DNA, 120 bp, Artificial Sequence
  ENSG00000144681_24 (sequence is synthesized)
ggtttcacagaagtttggatgccttactcttatcttaaagccagcatccagaatttcctccctctctgatgccacatgcaaaaccaggtgtacgatgtcaagatggattctttgagagcc

SEQ ID NO: 389453 - DNA, 120 bp, Artificial Sequence
  ENSG00000144681_25 (sequence is synthesized)
agggtagatcatatgactgcctttctgtaaaattggatgcctagtacaaatgctctttgcctctaattcagtattccatttaataaaaacaatacagtggctggaaaggagcatcagaaa

SEQ ID NO: 389454 - DNA, 120 bp, Artificial Sequence
  ENSG00000144681_26 (sequence is synthesized)
caaacacattccagatatgagccaaatagggtgtcattttaataaacttaataatatgtataaatctgaatgagtggggtcacattcaaagtattcactttgagaaaagatatacttact

SEQ ID NO: 389455 - DNA, 120 bp, Artificial Sequence
  ENSG00000144681_27 (sequence is synthesized)
ccaatgatgtcagtgttgtaggagctaaacatgcaaactaaaattttaggaatctcacttggtgatacctgttcataaacgaaacgtgatagtggcaggcgacgacatctcgtcccccat

SEQ ID NO: 389456 - DNA, 120 bp, Artificial Sequence
  ENSG00000144681_28 (sequence is synthesized)
atatacagattatcctggtaaataattggggatacacataaaaacacctgaaccaaagcatatacaaagtactagggaaagccacaagtggaaacaatagttctacctcaggaggaagag

SEQ ID NO: 389457 - DNA, 120 bp, Artificial Sequence
  ENSG00000144681_29 (sequence is synthesized)
aggacggcgtggacgggctgcccaaggaggcggtgggcgccgagcaaccgccctctcctgcatccaccagcagccaggaatccaagccctatggatgacgtgaactgagtggttcttgac

SEQ ID NO: 389458 - DNA, 120 bp, Artificial Sequence
  ENSG00000144681_30 (sequence is synthesized)
ccagaaaaccaaatgaactcttgaggaatcatgtccatcaaaagtttagttggcctgtagtgctgagagcaacacaaatgattctgcacagtgacactgacttgaagatatcttgtatcc

SEQ ID NO: 389459 - DNA, 120 bp, Artificial Sequence
  ENSG00000144681_31 (sequence is synthesized)
gaagttatgcccattgttgcctcctactgcaaactttgtgtctcaagtctttgtaccttggtgagcacagcctcccagtagaggagataaagctgatccctgcaagaacctggaaatcag

SEQ ID NO: 389460 - DNA, 120 bp, Artificial Sequence
  ENSG00000144681_32 (sequence is synthesized)
tcagtatttctccatgtgaaaaagtaagtccatctgtgcccctcctaatgctttatagctgtgattctcaaactttagcatgtatctaatgacctgcaaggctggttaacacacaggccc

SEQ ID NO: 389461 - DNA, 120 bp, Artificial Sequence
  ENSG00000144681_33 (sequence is synthesized)
tgtccccagagtttttgattcatcagatctgaggcagggcctcagaagttgcattcctaaggagttcccaggtggcactgacaatgctgtccaaggaacacactttgggaagcaccactt

SEQ ID NO: 389462 - DNA, 120 bp, Artificial Sequence
  ENSG00000144681_34 (sequence is synthesized)
tagtacatgctcaacagaactgctaatgggagttttcatgaaggttgaacgttaaatgcacttggcatctggtggggcctaatagggaatcaaaaaatatatttaatcaaatatcagata

SEQ ID NO: 389463 - DNA, 120 bp, Artificial Sequence
  ENSG00000144711_0 (sequence is synthesized)
gcttggctggcctggggctcggacttggggccggagccgcgggagccggcggacgctggaccaggagccccgacgtgatcgcgtggcgggtggtcgggtctccgggtggccgggtgtcgg

SEQ ID NO: 389464 - DNA, 120 bp, Artificial Sequence
  ENSG00000144711_1 (sequence is synthesized)
gggatccggcggctcgctggcgggagtcggcggcctctgctgggcctgggtcccggctcccggcccggcccgctcccactgcggccgccatgtggtgcctgcactgcaactcggagagga

SEQ ID NO: 389465 - DNA, 120 bp, Artificial Sequence
  ENSG00000144711_2 (sequence is synthesized)
ggagaggacccagtcccttctggagctagagcttgacagcggcgtcgagggcgaggcccccagcagtgagactggcacatccctggacagcccctcagcctacccccagggccccttggt

SEQ ID NO: 389466 - DNA, 120 bp, Artificial Sequence
  ENSG00000144711_3 (sequence is synthesized)
gcccggttccagcctgagcccggatcactacgagcacacgtcagtgggagcctatgggctgtactcggggccgccggggcaacagcagcgcacgcggaggcccaagctgcagcactcgac

SEQ ID NO: 389467 - DNA, 120 bp, Artificial Sequence
  ENSG00000144711_4 (sequence is synthesized)
ctccatcctgcgcaagcaggctgaggaggaggccatcaagcgctcacgctcactctccgagagctatgagctctcctcggacctgcaggacaagcaggtggagatgctagaacgaaagta

SEQ ID NO: 389468 - DNA, 120 bp, Artificial Sequence
  ENSG00000144711_5 (sequence is synthesized)
tggggggcgcctggtaacccgccatgcggcccgcaccatccagacggcgtttcgccagtaccagatgaacaagaacttcgagcgcttgcgcagctccatgtcagagaaccgcatgtcacg

SEQ ID NO: 389469 - DNA, 120 bp, Artificial Sequence
  ENSG00000144711_6 (sequence is synthesized)
ccggattgtgctgtccaacatgaggatgcagttctcctttgaggggcctgagaaagtgcacagctcctacttcgaggggaagcaggtctcagtgactaacgacggctcccagctgggagc

SEQ ID NO: 389470 - DNA, 120 bp, Artificial Sequence
  ENSG00000144711_7 (sequence is synthesized)
cctggtgtcccctgagtgtggtgacctcagcgagcccaccaccctcaagtctccggccccctccagtgactttgcggacgccatcaccgagctggaggacgccttctctaggcaagtgaa

SEQ ID NO: 389471 - DNA, 120 bp, Artificial Sequence
  ENSG00000144711_8 (sequence is synthesized)
atcactggccgagtccatcgacgatgccctcaactgccgcagcctgcacactgaggaggcaccggccctggatgcggcgcgggcccgggacaccgaaccccagacagccctgcacggcat

SEQ ID NO: 389472 - DNA, 120 bp, Artificial Sequence
  ENSG00000144711_9 (sequence is synthesized)
ggaccaccgcaaactggacgagatgacggcctcgtacagtgatgtcaccctgtacatcgatgaggaggagctgtcgccccctctgcccctctcgcaggcaggggaccggccgtccagcac

SEQ ID NO: 389473 - DNA, 120 bp, Artificial Sequence
  ENSG00000144711_10 (sequence is synthesized)
cgagtcggacctgcggctacgggctgggggcgcagccccagactactgggccctggcccacaaagaggacaaggctgacacggacacgagctgccggagcacgccgtcgctggagcggca

SEQ ID NO: 389474 - DNA, 120 bp, Artificial Sequence
  ENSG00000144711_11 (sequence is synthesized)
ggagcagcggctgcgggtggagcatctgccgctgctcaccatcgagccacccagcgacagctctgtggaccttagtgaccgctcggagcgggggtcactcaagaggcagagtgcttacga

SEQ ID NO: 389475 - DNA, 120 bp, Artificial Sequence
  ENSG00000144711_12 (sequence is synthesized)
acgagcgcagccttggcgggcagcagggcagtcccaagcatggtccccacagcggcgcccccaagagcctcccccgggaggagcctgagttgcggccccggccccccaggcccctggaca

SEQ ID NO: 389476 - DNA, 120 bp, Artificial Sequence
  ENSG00000144711_13 (sequence is synthesized)
cttggccatcaatggctcagccaaccggcagagcaagtctgagtcggactactcagacggtgacaatgacagcatcaacagcacgtccaactccaacgataccatcaactgcagctccga

SEQ ID NO: 389477 - DNA, 120 bp, Artificial Sequence
  ENSG00000144711_14 (sequence is synthesized)
gtcatcgtcccgtgacagcctgcgggagcagacgctcagcaagcagacctaccacaaggaggcccgcaacagctgggactcgcctgcctttagcaacgatgtcatccgcaagaggcacta

SEQ ID NO: 389478 - DNA, 120 bp, Artificial Sequence
  ENSG00000144711_15 (sequence is synthesized)
ccgcatcggcctgaacctcttcaacaagaagcctgagaagggagtccagtacctcatcgagcgtggctttgtgcccgacacgcccgtcggggtggcccacttcctgctgcagcgcaaggg

SEQ ID NO: 389479 - DNA, 120 bp, Artificial Sequence
  ENSG00000144711_16 (sequence is synthesized)
cctcagccggcagatgatcggcgagttcctgggcaaccggcagaagcagttcaaccgtgacgtgctcgactgcgtcgtggacgagatggacttctctaccatggagctggatgaggccct

SEQ ID NO: 389480 - DNA, 120 bp, Artificial Sequence
  ENSG00000144711_17 (sequence is synthesized)
caggaaattccaggcgcacatccgtgtccaaggggaggctcagaaagtggagcggctcatagaggcgttcagccagcgctactgcatctgcaaccctggggtggtgcggcaattccggaa

SEQ ID NO: 389481 - DNA, 120 bp, Artificial Sequence
  ENSG00000144711_18 (sequence is synthesized)
cccagacaccattttcatcctggccttcgccatcatcctgctgaacaccgacatgtacagccccaatgtcaagcccgagcggaaaatgaagctagaggacttcatcaagaacctccgagg

SEQ ID NO: 389482 - DNA, 120 bp, Artificial Sequence
  ENSG00000144711_19 (sequence is synthesized)
tgtggacgatggtgaggacattccccgtgagatgctgatggggatctatgaacggatccgtaagcgagagctaaagaccaatgaggaccatgtgtcccaggtgcagaaggtggagaagct

SEQ ID NO: 389483 - DNA, 120 bp, Artificial Sequence
  ENSG00000144711_20 (sequence is synthesized)
cattgtggggaaaaagccgatcggatccctgcatcccgggctcggctgtgtgctctctctgccccaccgtcggttggtctgctactgccggctctttgaggttccagacccaaacaagcc

SEQ ID NO: 389484 - DNA, 120 bp, Artificial Sequence
  ENSG00000144711_21 (sequence is synthesized)
tgtacggcatgcaggtcctgctcttcgagaaccagtactaccccaatggcatccggctcacctcgtctgtccccggagcagatatcaaagtgttaataaacttcaacgcccccaaccctc

SEQ ID NO: 389485 - DNA, 120 bp, Artificial Sequence
  ENSG00000144711_22 (sequence is synthesized)
aagaccggaagaaattcaccgatgacctgcgggagtccattgcggaagtccaagagatggagaagcacaggatagagtcggagctcgagaagcagaaaggcgtcgtgcggcccagcatgt

SEQ ID NO: 389486 - DNA, 120 bp, Artificial Sequence
  ENSG00000144711_23 (sequence is synthesized)
cccagtgctctagcctcaaaaaggagtcgggcaacggaacactgagccgggcctgcctggacgacagctatgccagcggtgagggcctcaagcgcagcgccctcagcagctccctgcggg

SEQ ID NO: 389487 - DNA, 120 bp, Artificial Sequence
  ENSG00000144711_24 (sequence is synthesized)
acctctcggaagccgggaagcgagggcgtcgcagcagtgcgggatcgctagagagcaatgtggaatttcagcctttcgagccactgcagccgtcagtgctgtgctcctaagccatgggac

SEQ ID NO: 389488 - DNA, 120 bp, Artificial Sequence
  ENSG00000144711_25 (sequence is synthesized)
ccgaggactgccccccggcgcctgcccaggcggaggccctttcagaaagggcgaagctcacgcctgactctgcgggccgcggggccgcgttcccagtggacagcgtggtgagccgtggcc

SEQ ID NO: 389489 - DNA, 120 bp, Artificial Sequence
  ENSG00000144711_26 (sequence is synthesized)
ggacggcaggaggagaggggagccccctctggctgtgtgtcaccttggctggctggctggccagggttttgccgatttccctcctcacatccctcccaccctcggtcatatcattgagat

SEQ ID NO: 389490 - DNA, 120 bp, Artificial Sequence
  ENSG00000144711_27 (sequence is synthesized)
caccgtaccagcaaatctgcaaaccaagcactttgttaatctccagagagagcaaatacagcaatctagagtttagcctttttaaaaatgtgactttaacccgcccacctgtgtcctccc

SEQ ID NO: 389491 - DNA, 120 bp, Artificial Sequence
  ENSG00000144711_28 (sequence is synthesized)
attggcgtggcatttctttggtgtctgctcagaaagaaacagcatgggaccgtgtgattgggtccaggctgggctgtcagggaagcgccctggtgtctccgactcatcaattctcgggtc

SEQ ID NO: 389492 - DNA, 120 bp, Artificial Sequence
  ENSG00000144711_29 (sequence is synthesized)
ttttttaaaagccaggctccccaaagcactctgtctcgcaattttgaggaggctgttccgacctggaagcgttaaactgctgcatgtcatctggcgtcagctgtgaggctgcgctctgcg

SEQ ID NO: 389493 - DNA, 120 bp, Artificial Sequence
  ENSG00000144711_30 (sequence is synthesized)
tgttgtgcgtttgcaaaatgtattggcgtgactgtaaacacatcgttgaagtaaagcgattacatattgagtatgtcagcttttctcaccctcttctgtgctgggaggagagtctaactg

SEQ ID NO: 389494 - DNA, 120 bp, Artificial Sequence
  ENSG00000144711_31 (sequence is synthesized)
taacctttaggttgttccagaaaagattcaggccgtttggcacagaattgctctttctgaagggtagcagtaatgaataggaacagacagaaaaccccaggaggggctttcaggaaactc

SEQ ID NO: 389495 - DNA, 120 bp, Artificial Sequence
  ENSG00000144711_32 (sequence is synthesized)
tccctctccatcgccatcctgcaagctccacagcctcgggctgccagcctgtggcactgtcctcggtgtgtcctggagctgtgctgggcagcagggcctcgcgtaaggaactgctggaac

SEQ ID NO: 389496 - DNA, 120 bp, Artificial Sequence
  ENSG00000144711_33 (sequence is synthesized)
ccactgagcccttcccggggtttcccgccgcactcagtgtgttccttcaggctagtgaggtttcattctgttttatttgcaagcttatcaaaagtttgtggaagatacattgttgggttc

SEQ ID NO: 389497 - DNA, 120 bp, Artificial Sequence
  ENSG00000144711_34 (sequence is synthesized)
cagaggctggagtcatgctgcccacatcttgtttgggaaagcaaaagctcccagtgagctggtgtccccgtgtgtctttcatgggactgtcccctttagagatcccacctgtcagagcca

SEQ ID NO: 389498 - DNA, 120 bp, Artificial Sequence
  ENSG00000144711_35 (sequence is synthesized)
cagcttcggggtcctgtcatcacatcccctgggaggggaggcaggaggaggccgagggccccaggatgtctgcctggtcccttctcactgtgaggacgcccttggcacacctttctcaag

SEQ ID NO: 389499 - DNA, 120 bp, Artificial Sequence
  ENSG00000144711_36 (sequence is synthesized)
tcacacaaattactgcagttacatacagaattgctgacaggagcaggagacgctgagggaaacagctggcaatgtgacaaaagtcttttctgggacaacaatcaaatcatgtatttgtat

SEQ ID NO: 389500 - DNA, 120 bp, Artificial Sequence
  ENSG00000144711_37 (sequence is synthesized)
ttttttaagtttaccaatgaattgtacaacaatgtaaaaataaagttcatcctaatatgctgtgcacatcttgcttaaaaatgtcttcagcacccagtgcagtgatctttccctcacaca

SEQ ID NO: 389501 - DNA, 120 bp, Artificial Sequence
  ENSG00000144711_38 (sequence is synthesized)
ctgcatgcagcaggagcctcttgtttttcttaatgagctgaaaagacagcagatgttcacagctgatgctgggtgttgactcagcgccacgggaagctctgtgcccgcaggtaagcacgc

SEQ ID NO: 389502 - DNA, 120 bp, Artificial Sequence
  ENSG00000144711_39 (sequence is synthesized)
acagtcttacagttctccttgtaaaatatcatcacccttcctgcctgagaaacgagtacatttgtattttatgtaacaacaatagtcaaggcagcattgcaacactgagcagggtgaggt

SEQ ID NO: 389503 - DNA, 120 bp, Artificial Sequence
  ENSG00000144711_40 (sequence is synthesized)
gggggtgctgagcacaggacaagagggaggaggcctgccctccattcagatgcatctgcatcgcccttctgtgtgcagtcacatcgagactgcacacagcatgcatctcctcttggaaaa

SEQ ID NO: 389504 - DNA, 120 bp, Artificial Sequence
  ENSG00000144711_41 (sequence is synthesized)
tatcttttgcctccgagttgttttaagcaattagaatcaggtcctgaatccccagactgttcagagacttcaagggacacctccctcacaagaagcctggcacccccactgtgtaccttt

SEQ ID NO: 389505 - DNA, 120 bp, Artificial Sequence
  ENSG00000144711_42 (sequence is synthesized)
gagaggaaaggagtgcgtttgttttcatctgcattctgtttgtcagtggcaacagactctatcaatgtaaaaccatggttgtgatcatgtggggaaatcaaataaatcctttgaaactct

SEQ ID NO: 389506 - DNA, 120 bp, Artificial Sequence
  ENSG00000144711_43 (sequence is synthesized)
ggggcggcaccgtcctccccgccccctagcacagccgcgcacgcacacacaccttccgaggggggaaactgaggccaggcgcggcgaggccacccgccaaggtcacggcgcacgggcggt

SEQ ID NO: 389507 - DNA, 120 bp, Artificial Sequence
  ENSG00000144711_44 (sequence is synthesized)
cctctcggaagccggggtccatcattagcagtcctcacatgcgccggagagctacatcaacacgagagtgtccatctcgcccacaccagactatgcccaactcatcttccctcctgggct

SEQ ID NO: 389508 - DNA, 120 bp, Artificial Sequence
  ENSG00000144711_45 (sequence is synthesized)
ccttattcgggagcaagagagggaagccccctccccaggcccacctgccctcagccccagccctgccacccccccacccaccggtggtcctgcctcacttgcagcactctgtggctggcc

SEQ ID NO: 389509 - DNA, 120 bp, Artificial Sequence
  ENSG00000144711_46 (sequence is synthesized)
accacctggggcccccagaggggctgccgcaggccgccatgcacgggcatcacacccagtactgccacatgcagaaccctcccccgtaccaccatcaccaccaccaccacccaccccagc

SEQ ID NO: 389510 - DNA, 120 bp, Artificial Sequence
  ENSG00000144711_47 (sequence is synthesized)
acatccagcacgcacaccagtaccaccacggcccccatgggggccacccagcctacggggcccatgcccacggccacccgccgctgccctcggcccacgtggggcacacagtgcaccacc

SEQ ID NO: 389511 - DNA, 120 bp, Artificial Sequence
  ENSG00000144711_48 (sequence is synthesized)
atgggcagccccctgccccgccgccccccaccagcagcaaggccaaacccagcggcatcagcacaattgtgtagacagcctgggtaggggtcccaggctccctgaaacacctgcacacca

SEQ ID NO: 389512 - DNA, 120 bp, Artificial Sequence
  ENSG00000144711_49 (sequence is synthesized)
cacagggcacgcccgggggtcgccagccgcacaccaaacccggggcacttctgttgccatctctcccctctgcccctcacggcccaaccggagccccaggagcccacagggctggtgttg

SEQ ID NO: 389513 - DNA, 120 bp, Artificial Sequence
  ENSG00000144711_50 (sequence is synthesized)
tgtggaacaaaggcccagatttcatttcttgttggcaccctgggctctgctcacctcagtctgagggatgggtgggcctcagacaccatcagccttgaaacggtgagccagccaagtagt

SEQ ID NO: 389514 - DNA, 120 bp, Artificial Sequence
  ENSG00000144711_51 (sequence is synthesized)
gttgaactgcctcccccactccagctctcagctccctgtgccctaatgtacatgcatatgaaaacccaacctagaaaacgaagaaatgagatacaaaaacagacaaaacaaaccccaaaa

SEQ ID NO: 389515 - DNA, 120 bp, Artificial Sequence
  ENSG00000144711_52 (sequence is synthesized)
tctccacctcccactagcccctctccgtgtctccgcggagacgttaccgtggtccagctggagaccaaaaggtgaaaatgctcaagttcaaggccttttgcctggattactggcagttcc

SEQ ID NO: 389516 - DNA, 120 bp, Artificial Sequence
  ENSG00000144711_53 (sequence is synthesized)
gcggccgccatgtggtgcctgcactgcaactcggagaggacccagtcccttctggagctagagcttgacagcggatgaggaaagaatggctagaaaatgaaaatgacgaattcaagctct

SEQ ID NO: 389517 - DNA, 120 bp, Artificial Sequence
  ENSG00000144711_54 (sequence is synthesized)
ttagaatgcagcctgaggcagaggcagggaggagcagggggccaaggaggagccggagagacaaaacctgcaggccccagctgtgcgcactccagtggcagcattgggttccctgtacag

SEQ ID NO: 389518 - DNA, 120 bp, Artificial Sequence
  ENSG00000144711_55 (sequence is synthesized)
ccaccgtggatggctacagaggtgcactaccatcagcagagtggaaggagaatccttggaagctctacccagtgcctacaatctcaaaaacatgttcgccagccccaggaagtcatctgg

SEQ ID NO: 389519 - DNA, 120 bp, Artificial Sequence
  ENSG00000144711_56 (sequence is synthesized)
ctccctctctctgagctcgcctctcccatcccaggccagcctctggacgcagggccagcccctgggctccggcagctgagcttttcctcaccggcggacgcccctcacccatcccgccct

SEQ ID NO: 389520 - DNA, 120 bp, Artificial Sequence
  ENSG00000144711_57 (sequence is synthesized)
gagtgactcactgctcccctggcctgcagccactgctgtctcctggcaggaggcaggcgcaaggttgtgcagaagccacagggtctagtgtgtgagggccgcttggccaggagggtctgg

SEQ ID NO: 389521 - DNA, 120 bp, Artificial Sequence
  ENSG00000144711_58 (sequence is synthesized)
agcagctagacaggaccagggcacagaggctggccggtggatagtggggcctgtggctcagccctgcagtggcctgtggcagccagtgcctcctcttttccctaactttgggggcttttc

SEQ ID NO: 389522 - DNA, 120 bp, Artificial Sequence
  ENSG00000144711_59 (sequence is synthesized)
tttcttcttcctaccatgaagaaggaagggacctgaaaatccgtgaagagagccgttccctggccaggaggagactctgggtggtggggcagtggtggtgggccccttggccactcgctc

SEQ ID NO: 389523 - DNA, 120 bp, Artificial Sequence
  ENSG00000144711_60 (sequence is synthesized)
ctccaccgagccaggcatgaaggggtatggcagtgccgtgtggagccttatgtggaagtactgcatctctgtgaggacactcagcgtcgagggcgaggcccccagcagtgagactggcac

SEQ ID NO: 389524 - DNA, 120 bp, Artificial Sequence
  ENSG00000144711_61 (sequence is synthesized)
ggatgctgcgagagcaaacccggggcagccttctctcgaccctcccctcctcatccccgcgccccgcaccccggatggacgggagggaaaaaccccaaggtgggcccaggtagcagcgag

SEQ ID NO: 389525 - DNA, 120 bp, Artificial Sequence
  ENSG00000144711_62 (sequence is synthesized)
gtggacgcccccgcccagcctggcgaccacggttactcgacgtcctcgctcgctcctgggcacggtgtgagcgcgcgctacgtgccagggccctccacagcccgctgctggcgccgcccc

SEQ ID NO: 389526 - DNA, 120 bp, Artificial Sequence
  ENSG00000144711_63 (sequence is synthesized)
ccgctcccgccccagcctccctggaggagcccgccacccccgggaatgtgactcgccccgcgatttaattttattcccctccacttcttgcctgagccgcctgctcctcttggaaacacg

SEQ ID NO: 389527 - DNA, 120 bp, Artificial Sequence
  ENSG00000144711_64 (sequence is synthesized)
ttgagcctccccgctggagagggagccagaacagggaagaacggattcacacaggatggcttgcagaagacgctatttcgtcgagggcgaggcccccagcagtgagactggcacatccct

SEQ ID NO: 389528 - DNA, 120 bp, Artificial Sequence
  ENSG00000144711_65 (sequence is synthesized)
aaatatataaatatataaatatatatatatatatactgtataggtagtacttgtgtgtgaaaggcaggcgtttcagtccacattagcaatacccaccttacaaggagctccacttaccta

SEQ ID NO: 389529 - DNA, 120 bp, Artificial Sequence
  ENSG00000144711_66 (sequence is synthesized)
agcaatacccaccttacaaggagctccacttacctaataggaagacagtaccttagctgggtgtgtgagacaatagaccaaaccctaaatgctaggaacaaattcagatacttcatattt

SEQ ID NO: 389530 - DNA, 120 bp, Artificial Sequence
  ENSG00000144711_67 (sequence is synthesized)
tcatacaaagaagtccctctaggactggctaaaatctttacacaatcattactaactgtgccaagtaacatagcatctaactgtttaaaaagtccagtattgctttgtataaatccttat

SEQ ID NO: 389531 - DNA, 120 bp, Artificial Sequence
  ENSG00000144711_68 (sequence is synthesized)
tttattaacagaatactatcataaatagtattataatgctgttatttcaggtaagcaaatagctaaactgcagtacactctacagtagcaactcaggacagctggttacaagctggttgt

SEQ ID NO: 389532 - DNA, 120 bp, Artificial Sequence
  ENSG00000144711_69 (sequence is synthesized)
cttaggacattggttacacggattcttagacactttaatggctgcgataactgtgactctccatgatccatgtttcttttatgcgcatatgatttgacgcacactcattcagagtcctcc

SEQ ID NO: 389533 - DNA, 120 bp, Artificial Sequence
  ENSG00000144711_70 (sequence is synthesized)
gagaggggcacccatacacggcagaagtgttcatctccaacatgaaagtgaccagctctcatcctcgtctccccaacaccataacgtcctcatcccgcctccaacccacaccaggccgaa

SEQ ID NO: 389534 - DNA, 120 bp, Artificial Sequence
  ENSG00000144711_71 (sequence is synthesized)
gccctcagagagtgttttcatcaggaaccactctcgaacctgaaggttgactttagcgtttagcaacccagggcggtgtgtgtgtttcccgttttgttttctgagtggtagcagtgatca

SEQ ID NO: 389535 - DNA, 120 bp, Artificial Sequence
  ENSG00000144711_72 (sequence is synthesized)
ccgtaattccatgtagccatgtgctagcagaacccctgtgtcctcaccgtggcccgtgtgaccccagccgacgagtgcccggcggagcccccgctgccttcccatggtccagtgagctgc

SEQ ID NO: 389536 - DNA, 120 bp, Artificial Sequence
  ENSG00000144711_73 (sequence is synthesized)
cagggcatcacatgactctcagctgtgctcttgtcgcttctgtgttgtggtgacaccatgcgctccccagggccagacctgcacgcggcaggtctgtgcccgagtcacccacgggccata

SEQ ID NO: 389537 - DNA, 120 bp, Artificial Sequence
  ENSG00000144711_74 (sequence is synthesized)
tccagctgatgagtttccccattacttgttgtgactctgggcactcactttccttgaagacattggactgactgaggacactgatacaaaatttaaaataaagggacacatcacaaccaa

SEQ ID NO: 389538 - DNA, 80 bp, Artificial Sequence
  ENSG00000144711_75 (sequence is synthesized)
ccctcttcccgcgccgcggccggcactttgcaaaactcctcgcctgcccgctgcggccgcagctccgcgccctgccgccc

SEQ ID NO: 389539 - DNA, 80 bp, Artificial Sequence
  ENSG00000144711_76 (sequence is synthesized)
tccgggcggggggccatggccagcgccgccgagccccccggccaggcggccgagtacctgcaggagctgacccggatcgt

SEQ ID NO: 389540 - DNA, 120 bp, Artificial Sequence
  ENSG00000144711_77 (sequence is synthesized)
tcgtcgccgcgcagcaggagctgctggcgcgccggcgacggcgcatcgaggagctggagcgccaagtggcgcggctgagccgggagaacgccggcctgctggagcgacaccggcgacacc

SEQ ID NO: 389541 - DNA, 120 bp, Artificial Sequence
  ENSG00000144711_78 (sequence is synthesized)
ccgccccgacccgggccccggccccggcccgcagccgctcggcgccatcccggagctcggcggccgccgcgacaagtctgaaggagaaagctcgcggagcgtcaggagctccctggacac

SEQ ID NO: 389542 - DNA, 120 bp, Artificial Sequence
  ENSG00000144711_79 (sequence is synthesized)
aatcgcagcccgccacctgacgccctcgctccagaccggcggggttccggctgcgggagagaggccgccgctcccggcccggcgttcagggcttccggggcagcgtcgagggcgaggccc

SEQ ID NO: 389543 - DNA, 120 bp, Artificial Sequence
  ENSG00000144712_0 (sequence is synthesized)
atattccctcccgccggccggctccgcggcgcgcagccaccatgagcaccgccgccttccacatctccagcctcctggagaagatgacgtccagcgacaaggacttcaggttcatggcca

SEQ ID NO: 389544 - DNA, 120 bp, Artificial Sequence
  ENSG00000144712_1 (sequence is synthesized)
ccagcgacctgatgtcggagttgcagaaggactccatccagctggacgaggacagcgagcgcaaggtggtgaagatgctgctccggctcctggaggacaagaacggtgaggtgcagaacc

SEQ ID NO: 389545 - DNA, 120 bp, Artificial Sequence
  ENSG00000144712_2 (sequence is synthesized)
tggctgtcaagtgcctgggtcctctggtggtcaaagtgaaggagtaccaggtggagaccattgtggacaccctgtgcaccaacatgcggtcagacaaggagcagctgcgagacattgccg

SEQ ID NO: 389546 - DNA, 120 bp, Artificial Sequence
  ENSG00000144712_3 (sequence is synthesized)
gcattggcctcaagaccgtcctctcggagctccctcctgcagccacaggctccgggctggccaccaacgtgtgccggaagatcacaggccagctcaccagtgccattgcccagcaggagg

SEQ ID NO: 389547 - DNA, 120 bp, Artificial Sequence
  ENSG00000144712_4 (sequence is synthesized)
atgtggctgtgcagctggaagccctggacatcctctctgacatgctgagcaggctgggtgtcccgctgggcgccttccacgccagcctcctgcactgtctgctgccacagctgagcagcc

SEQ ID NO: 389548 - DNA, 120 bp, Artificial Sequence
  ENSG00000144712_5 (sequence is synthesized)
cgcgcctggcggtgcgcaagcgggcggtcggagcgcttggccacctggcggccgcctgcagcaccgacctcttcgtcgagctcgctgaccacctactggaccggctgcccggcccgcggg

SEQ ID NO: 389549 - DNA, 120 bp, Artificial Sequence
  ENSG00000144712_6 (sequence is synthesized)
tgcccaccagcccgactgccatccgcaccctgatccaatgtttgggcagcgtcggccgccaggccggccaccgcctcggggctcacctggaccgcctggtgcccctggtggaggatttct

SEQ ID NO: 389550 - DNA, 120 bp, Artificial Sequence
  ENSG00000144712_7 (sequence is synthesized)
gcaacctggatgatgatgagctccgggagtcctgcctccaggcttttgaggccttcttgaggaagtgccccaaggaaatgggtcctcacgtgcccaacgtgaccagcctctgcctccaat

SEQ ID NO: 389551 - DNA, 120 bp, Artificial Sequence
  ENSG00000144712_8 (sequence is synthesized)
acataaaacacgaccccaactacaactacgacagtgatgaggatgaggagcagatggagacagaggatagtgaattcagtgagcaagagagtgaagacgagtacagcgatgacgatgaca

SEQ ID NO: 389552 - DNA, 120 bp, Artificial Sequence
  ENSG00000144712_9 (sequence is synthesized)
tgagctggaaggtgcgccgggcagctgccaagtgcatcgcagccttgatcagctcgcggcctgacctgctgcccgatttccactgcaccctggcacctgtgctcatccgccgcttcaaag

SEQ ID NO: 389553 - DNA, 120 bp, Artificial Sequence
  ENSG00000144712_10 (sequence is synthesized)
aacgcgaggagaacgtcaaggctgacgtcttcactgcttacatcgtgctgctgcggcaaacacagcccccgaagggatggctggaggccatggaggaacccacccagaccggcagcaacc

SEQ ID NO: 389554 - DNA, 120 bp, Artificial Sequence
  ENSG00000144712_11 (sequence is synthesized)
tccatatgctacgtggacaggtgccccttgtggtcaaggccctgcagcggcagcttaaagatcggagcgtcagagcccgccagggatgcttcagcctcctcaccgagctggcgggtgtcc

SEQ ID NO: 389555 - DNA, 120 bp, Artificial Sequence
  ENSG00000144712_12 (sequence is synthesized)
tcccaggcagcctggccgagcatatgcctgtgctggtatcaggcatcatcttctcgctggccgaccgctccagctcctccaccatccggatggatgccctggccttcttgcaggggctgc

SEQ ID NO: 389556 - DNA, 120 bp, Artificial Sequence
  ENSG00000144712_13 (sequence is synthesized)
tgggcaccgaaccagctgaggccttccacccacacttgcctatcctcctgccacctgtgatggcctgtgtggctgactctttctacaagattgcagccgaggccctggtggtgctgcagg

SEQ ID NO: 389557 - DNA, 120 bp, Artificial Sequence
  ENSG00000144712_14 (sequence is synthesized)
agctggtgcgggccctgtggccgctgcacaggcctcggatgctggatcctgagccatatgttggagagatgtctgctgtcaccctggcgcgacttcgtgccactgacctggaccaggagg

SEQ ID NO: 389558 - DNA, 120 bp, Artificial Sequence
  ENSG00000144712_15 (sequence is synthesized)
tgaaggagcgggccatttcctgcatgggccaccttgtaggccacctgggtgaccggcttggggatgacctggagcccacgttactgctcctcctggaccgcctgcggaatgagatcaccc

SEQ ID NO: 389559 - DNA, 120 bp, Artificial Sequence
  ENSG00000144712_16 (sequence is synthesized)
ggctgcccgccatcaaggcgcttacgctggtggccgtatccccactacagcttgacctacagcccatcctggccgaggcactgcacattctggcctcattcctgcggaagaaccagcggg

SEQ ID NO: 389560 - DNA, 120 bp, Artificial Sequence
  ENSG00000144712_17 (sequence is synthesized)
ctttgcgactggccacactggcagccctggacgccctggcccagagccagggcctcagcctcccaccgtctgccgtgcaggccgtgctggctgagctgcctgccctggtcaacgagagcg

SEQ ID NO: 389561 - DNA, 120 bp, Artificial Sequence
  ENSG00000144712_18 (sequence is synthesized)
acatgcatgtggcccagctggctgtggacttccttgccacagtgacccaggcccagccagcctctttggtggaggtcagtggccctgtgctctcagagctgctgcggctgctgcgttcgc

SEQ ID NO: 389562 - DNA, 120 bp, Artificial Sequence
  ENSG00000144712_19 (sequence is synthesized)
cggggttctggcagctgctgaaggcttcctgcaggccctggtagggacccgtcccccgtgtgtggactatgccaaactcatcagcctgctcactgcgcctgtttatgagcaggctgtgga

SEQ ID NO: 389563 - DNA, 120 bp, Artificial Sequence
  ENSG00000144712_20 (sequence is synthesized)
tggtgggcctggcctgcacaagcaggtgttccactcattggcccggtgtgtggcagccctctcagctgcctgtccccaagaggcggcaagcacagccagtcgcctggtctgcgatgccag

SEQ ID NO: 389564 - DNA, 120 bp, Artificial Sequence
  ENSG00000144712_21 (sequence is synthesized)
gtcgccccactccagcacgggggtcaaggtcctggcattcttgtcgctggctgaggtgggtcaggtggctgggccaggccaccagcgggagctgaaggcggtgctcctggaagctttggg

SEQ ID NO: 389565 - DNA, 120 bp, Artificial Sequence
  ENSG00000144712_22 (sequence is synthesized)
gtcacccagtgaggatgtgagggctgcagcctcgtatgcactgggccgtgtgggtgctggcagcctgcccgacttcctgcccttcctgctggagcagatcgaggctgagccccgacgaca

SEQ ID NO: 389566 - DNA, 120 bp, Artificial Sequence
  ENSG00000144712_23 (sequence is synthesized)
gtacctgctgctgcactcactcagggaggccctgggggccgcccagcctgacagcctgaagccctacgccgaggacatctgggccttgctgttccagcgctgcgagggtgctgaggaggg

SEQ ID NO: 389567 - DNA, 120 bp, Artificial Sequence
  ENSG00000144712_24 (sequence is synthesized)
cacccggggggtggtggccgagtgcattgggaagctggtccttgtgaacccttcgttccttctgccccgcttgcggaagcagcttgctgcaggtcggccacacacccggagcaccgtcat

SEQ ID NO: 389568 - DNA, 120 bp, Artificial Sequence
  ENSG00000144712_25 (sequence is synthesized)
cacagcggtcaagttccttatctcggaccagccccatcccattgaccccctcctgaagagcttcatcggagagttcatggagagcctgcaggacccagacctgaacgtgcgccgtgcgac

SEQ ID NO: 389569 - DNA, 120 bp, Artificial Sequence
  ENSG00000144712_26 (sequence is synthesized)
tctggctttcttcaactcagctgtgcacaacaagccctcgctagtccgggacctgctggatgacatcctgcccctcctctaccaggagacaaagatccggcgggacctcatccgagaggt

SEQ ID NO: 389570 - DNA, 120 bp, Artificial Sequence
  ENSG00000144712_27 (sequence is synthesized)
ggagatggggccctttaaacatacagtggacgatgggctggacgtgcggaaggcggcctttgaatgcatgtattcactgcttgagagctgcctgggccagctggatatctgtgagttcct

SEQ ID NO: 389571 - DNA, 120 bp, Artificial Sequence
  ENSG00000144712_28 (sequence is synthesized)
gaaccatgtggaggacgggctgaaggaccactacgacatccggatgctgaccttcatcatggttgcccggctggccaccctgtgtcctgcacctgtcctgcagagggtggaccgactcat

SEQ ID NO: 389572 - DNA, 120 bp, Artificial Sequence
  ENSG00000144712_29 (sequence is synthesized)
tgagccactaagggccacctgcactgccaaggtcaaagctggttctgtgaagcaggagtttgaaaagcaagatgaactgaagcgctctgcaatgagggcagtggctgccctgctgaccat

SEQ ID NO: 389573 - DNA, 120 bp, Artificial Sequence
  ENSG00000144712_30 (sequence is synthesized)
ccccgaggtggggaaaagccccatcatggccgacttctcttcccaaatcagatccaaccctgaacttgctgccctctttgaaagcatccagaaggattccgcttcagcccccagcacaga

SEQ ID NO: 389574 - DNA, 120 bp, Artificial Sequence
  ENSG00000144712_31 (sequence is synthesized)
ctcaatggagctcagctagtcccctcagcaccaaggtgggccctcgcttaagagaaaggagcccacccaagtccgaggcctccccatcccaccatcgcaggtctctacttttgcccttcc

SEQ ID NO: 389575 - DNA, 120 bp, Artificial Sequence
  ENSG00000144712_32 (sequence is synthesized)
accatctcactgggggccctgtcgctcctggtcagggcttacagtgccttctccagggacccaactcaaaggcccccagcccaagctgtgaggctgccaacagttgggccccttccttaa

SEQ ID NO: 389576 - DNA, 120 bp, Artificial Sequence
  ENSG00000144712_33 (sequence is synthesized)
ctcaggacagtcatccaaagaaatagggtgaggaagttttccagtgacttcacactgtacccctccatagtctgtctggttccttcagagggtgtctctgcctcacaaactagtagtatt

SEQ ID NO: 389577 - DNA, 120 bp, Artificial Sequence
  ENSG00000144712_34 (sequence is synthesized)
tagaaataggctgtgctgtcagctgtaaaagatcaggaggcagcagacaccactctggtttcttcactgcattcagcaatgcctgaagttagtgctcaggccgggcatctcaaaagaaaa

SEQ ID NO: 389578 - DNA, 120 bp, Artificial Sequence
  ENSG00000144712_35 (sequence is synthesized)
gatacttgagttattcacattttaaaattcaaaacggttcatttttaagtggcagtgatgaatcagaaatttggaagatgatacgggtttcttttttccagggaggaggaatgggttggg

SEQ ID NO: 389579 - DNA, 120 bp, Artificial Sequence
  ENSG00000144712_36 (sequence is synthesized)
tagggaactggacaggcttggacctcatgtttcatttctaatttcaaaatacttattagcaaattgggcaacaatgggcatcttccatgccaccacccaggcataaccagttggtttgtt

SEQ ID NO: 389580 - DNA, 120 bp, Artificial Sequence
  ENSG00000144712_37 (sequence is synthesized)
tccttctgaggaaggtttcaaatgtgtctagtgttcagtattgaggacaaagaaatacaagtggcaggcccaagtattttctgtgatatcccaggttaataaagattagattctaagtta

SEQ ID NO: 389581 - DNA, 120 bp, Artificial Sequence
  ENSG00000144712_38 (sequence is synthesized)
ctggaacacccagtgtgaggacatgcatgctctgcttctcgggaggaggctacctcaacatcaaagccagcaccttccctatgcaccggcagaagctgcagggctttgtggtcggctaca

SEQ ID NO: 389582 - DNA, 120 bp, Artificial Sequence
  ENSG00000144712_39 (sequence is synthesized)
atggctccaagatcttctgcctccatgtcttctccatttctgccgtggaggtgccgcagattggagaggacgaaggccctgaggtccaagaacattgaaacctgacagtggatgccaaca

SEQ ID NO: 389583 - DNA, 120 bp, Artificial Sequence
  ENSG00000144712_40 (sequence is synthesized)
gctgtggggaggagcctggtgagacgcccatgctgccacgtgcccagcaacgttggagcctgcagcgcttttcccctgccctgctctattttatcttttttaataaagatggctcctgat

SEQ ID NO: 389584 - DNA, 120 bp, Artificial Sequence
  ENSG00000144712_41 (sequence is synthesized)
tgcagggcacctcttttgcaagggccattgagttgccataatcctgggaaggaggccgggagagaatggggagaggggcggagcctggcccaggttgcccgcggagtgcgatcggcctga

SEQ ID NO: 389585 - DNA, 120 bp, Artificial Sequence
  ENSG00000144712_42 (sequence is synthesized)
gtctctgggggtgtgtgcaatccggcgctgcgctgtcagcagggcaagggctggggccggggccaagaccaccaagccaggcccaggcccgcccgcctcccgcggccgccacggccaagg

SEQ ID NO: 389586 - DNA, 120 bp, Artificial Sequence
  ENSG00000144712_43 (sequence is synthesized)
tcaagtgggattcagattcaggggatggagcaggaagggagctggggcagaggatgagactatagcaccctggaatctgcattctgatgcacaccaatgtctgagaaccactcagcctgg

SEQ ID NO: 389587 - DNA, 120 bp, Artificial Sequence
  ENSG00000144712_44 (sequence is synthesized)
cgatgttggcatagccagagagtatctctttctggccaaacaggggctcccctgatgatctgaggccttttcctcagcacgtgtggccgcaggagcatgaggggacataaaggggcagcc

SEQ ID NO: 389588 - DNA, 120 bp, Artificial Sequence
  ENSG00000144713_0 (sequence is synthesized)
gcgctgcctacggaggtggcagccatctccttctcggtaagtgttaatccgtggcaatccgcattcctgcgggattcatctggccccgtcgcccagtggtgcggaggcctccccttcagc

SEQ ID NO: 389589 - DNA, 120 bp, Artificial Sequence
  ENSG00000144713_1 (sequence is synthesized)
gcggtagtgtctgtgggtattgttattgtcagcttactggagcgtgtacaggaacagaacgaagccgccgagttgatagggctttgcgtcccagagcctcctgccctccgcctgtattca

SEQ ID NO: 389590 - DNA, 120 bp, Artificial Sequence
  ENSG00000144713_2 (sequence is synthesized)
gagctgcgggctgcttgtttgttccttggcggtggagggtgctagttgaggccagacttcggggtctcctgggggccgtgggacgaccaggggtggcccagcttgacagctttcagctgg

SEQ ID NO: 389591 - DNA, 120 bp, Artificial Sequence
  ENSG00000144713_3 (sequence is synthesized)
gatctgtggatcccagcgctcaccaatgtcggcccacgtgtattcgttcatgccatggccggcttcttccgctgcagtctctggcccgagggctgctgctgcgggaccgccaaggaaaga

SEQ ID NO: 389592 - DNA, 120 bp, Artificial Sequence
  ENSG00000144713_4 (sequence is synthesized)
cgagctgtaggtcggctggtccagctgcaggcagaaattctggtagtatctctgggaatatgaagatgcaactgcccccaccttgccttcgaggatatcatgggccagaaggcagagtcg

SEQ ID NO: 389593 - DNA, 120 bp, Artificial Sequence
  ENSG00000144713_5 (sequence is synthesized)
ttttgaatacgtggttcattgagtacccactctgggccagttgatggctgcgaagagagcagaaggggtgctgctgtaggaaatcaatggctcggaagaccacactgaggaaggtgtgag

SEQ ID NO: 389594 - DNA, 120 bp, Artificial Sequence
  ENSG00000144713_6 (sequence is synthesized)
ttgatactggaagatctccaggtttgaggcatcttcagaggtatatggtggttttgtgtgtgttgagggtgtggtagcgcagcagctccctagggaattagaaggttttattgaacattt

SEQ ID NO: 389595 - DNA, 120 bp, Artificial Sequence
  ENSG00000144713_7 (sequence is synthesized)
ggtgaggaaaagactcaggttcaagtagatggtcaaggccagtactaccggaaggaccatctgggggttcggacactggtggggtgggatttgctgccccttgcaaattgagagtgtctt

SEQ ID NO: 389596 - DNA, 120 bp, Artificial Sequence
  ENSG00000144713_8 (sequence is synthesized)
ggggtcagttttgatttgctcagctgttggcattctttgggctctgagtgggtgaggtgacccttgacctcctgggatcgcatctggagagtgcctagtattctgccagcttcggaaagg

SEQ ID NO: 389597 - DNA, 120 bp, Artificial Sequence
  ENSG00000144713_9 (sequence is synthesized)
gagggaaagcaagcctggcagaggcacccattccattcccagcttgctccgtagctggcgattggaagacactctgcgacagtgttcagtccctgggcaggaaagcctccttccaggatt

SEQ ID NO: 389598 - DNA, 120 bp, Artificial Sequence
  ENSG00000144713_10 (sequence is synthesized)
cttcctcacctggggccgcttcttccccaaaaggcatcatggccgccctcagaccccttgtgaagcccaagatcgtcaaaaagagaaccaagaagttcatccggcaccagtcagaccgat

SEQ ID NO: 389599 - DNA, 120 bp, Artificial Sequence
  ENSG00000144713_11 (sequence is synthesized)
atgtcaaaattaagcgtaactggcggaaacccagaggcattgacaacagggttcgtagaagattcaagggccagatcttgatgcccaacattggttatggaagcaacaaaaaaacaaagc

SEQ ID NO: 389600 - DNA, 120 bp, Artificial Sequence
  ENSG00000144713_12 (sequence is synthesized)
acatgctgcccagtggcttccggaagttcctggtccacaacgtcaaggagctggaagtgctgctgatgtgcaacaaatcttactgtgccgagatcgctcacaatgtttcctccaagaacc

SEQ ID NO: 389601 - DNA, 120 bp, Artificial Sequence
  ENSG00000144713_13 (sequence is synthesized)
gcaaagccatcgtggaaagagctgcccaactggccatcagagtcaccaaccccaatgccaggctgcgcagtgaagaaaatgagtaggcagctcatgtgcacgttttctgtttaaataaat

SEQ ID NO: 389602 - DNA, 120 bp, Artificial Sequence
  ENSG00000144713_14 (sequence is synthesized)
aggggttacgacccatcagcccttgcgcgccaccgtcccttctctcttcctcggcgctgcctacggaggtggcagccatctccttctcgctggcgattggaagacactctgcgacagtgt

SEQ ID NO: 389603 - DNA, 120 bp, Artificial Sequence
  ENSG00000144713_15 (sequence is synthesized)
tttgcttaagcccctttggaatctcccatttggaggggatttgtaaaggacactcagtccttgaacaggggaatgtggcctcaagtgcacagactagccttagtcatctccagttgaggc

SEQ ID NO: 389604 - DNA, 120 bp, Artificial Sequence
  ENSG00000144713_16 (sequence is synthesized)
tcccaagccacaagtagtcattcttagccttgcttttgtaaagttaggtgacaagttattccatgtgatgcttgtgagaattgagaaaatatgcatggaaatatccagatgaatttctta

SEQ ID NO: 389605 - DNA, 120 bp, Artificial Sequence
  ENSG00000144713_17 (sequence is synthesized)
cacagattcttacgggatgcctaaattgcatcctgtaacttctgtccaaaaagaacaggatgatgtacaaattgctcttccaggtaatccaccacggttaactggaaaagcactttcagt

SEQ ID NO: 389606 - DNA, 120 bp, Artificial Sequence
  ENSG00000144713_18 (sequence is synthesized)
ctcctataaccctcccaccagctgctgcttcaggtataatgttacagcagtttgccaaggcggggacctaactggtgacaattgagcctcttgactggtactcagaatttagtgacacgt

SEQ ID NO: 389607 - DNA, 120 bp, Artificial Sequence
  ENSG00000144713_19 (sequence is synthesized)
ggtactcagaatttagtgacacgtggtcctgattttttttggagacggggtcttgctctcacccaggctgggagtgcagtggcacactgactacagccttgacctccccaggctcaggtg

SEQ ID NO: 389608 - DNA, 120 bp, Artificial Sequence
  ENSG00000144713_20 (sequence is synthesized)
tagctgggactacagatgcacacctccaaacctgggtagtttttgaagtttttttgtagaggtggtctagccatgttgcctaggctcccgaactcctgagctcaagcaatcctgcttcag

SEQ ID NO: 389609 - DNA, 120 bp, Artificial Sequence
  ENSG00000144713_21 (sequence is synthesized)
cctcccaaagtactgggattacaggcatcttctgtagtatataggtcatgagggatatgggatgtggtacttatgagacagaaatgcttacaggatgtttttctgtaaccatcctggtca

SEQ ID NO: 389610 - DNA, 120 bp, Artificial Sequence
  ENSG00000144713_22 (sequence is synthesized)
acttagcagaaatgctgcgctgggtataataaagcttttctacttctagtctagacaggaatcttacagattgtctcctgttcaaaacctagtcataaatatttataatgcaaactggtc

SEQ ID NO: 389611 - DNA, 120 bp, Artificial Sequence
  ENSG00000144713_23 (sequence is synthesized)
ttcgattaacaattggagacgagtcgtgcagaggaaagaagtaacttagaatctaatctttattaacctgggatatcacagaaaatacttgggcctgccacttgtatttctttgtcctca

SEQ ID NO: 389612 - DNA, 120 bp, Artificial Sequence
  ENSG00000144713_24 (sequence is synthesized)
atactgaacactagacacatttgaaaccttcctcagaaggaaacaaaccaactggttatgcctgggtggtggcatggaagatgcccattgttgcccaatttgctaataagtattttgaaa

SEQ ID NO: 389613 - DNA, 120 bp, Artificial Sequence
  ENSG00000144713_25 (sequence is synthesized)
ttagaaatgaaacatgaggtccaagcctgtccagttccctacccaacccattcctcctccctggaaaaaagaaacccgtatcatcttccaaatttctgattcatcactgccacttaaaaa

SEQ ID NO: 389614 - DNA, 120 bp, Artificial Sequence
  ENSG00000144713_26 (sequence is synthesized)
ttctggcaggaactctacaaactcttgggatgcattttggcggggggtgttgtacattctctgagggaatcagaagttgttccttgcaggattttagagaatgcttgttggggaattcaa

SEQ ID NO: 389615 - DNA, 120 bp, Artificial Sequence
  ENSG00000144713_27 (sequence is synthesized)
ggtgtttcctttgctgaaggaggtgacttggtcttctaagtgtagagacccaagaccaggaaaagactgctttgtgaacactgcaataatagccactttccactactacaatatcctttg

SEQ ID NO: 389616 - DNA, 120 bp, Artificial Sequence
  ENSG00000144724_0 (sequence is synthesized)
atgttacttcctgtatggaggcatggccagtttccagccccgcgctcttcgttccttcccagcctgcgccggagccacaactttcaggagcatggactgaaggcgccctcgccccagcgc

SEQ ID NO: 389617 - DNA, 120 bp, Artificial Sequence
  ENSG00000144724_1 (sequence is synthesized)
ccctctgagatcctttgtgttttcctccgtttcctccggccgtttctattttggggggctctccgctccccctgcctctcccctccccttcccctctcgcaaacatgcctccttccttcc

SEQ ID NO: 389618 - DNA, 120 bp, Artificial Sequence
  ENSG00000144724_2 (sequence is synthesized)
cggggccctggaaggagctgcctgcctgaagcccggagacgccgcgccgcgctcagccccgccgccgcccgccggctctcgggctgtgctgcgctgccgactcaagttggggatcctcgg

SEQ ID NO: 389619 - DNA, 120 bp, Artificial Sequence
  ENSG00000144724_3 (sequence is synthesized)
ctgctcgccgccgccgcccgcggtccctgcctgccccaggcccggggcatcgccgccggccgccgactccgcgccctgcccgatcggctctctcctttttaaacggaaagcagcctttct

SEQ ID NO: 389620 - DNA, 120 bp, Artificial Sequence
  ENSG00000144724_4 (sequence is synthesized)
ccgccgagaggatcgtccccagcgtggctctgcgttcccggtcactttttgagattttccggggggcgctcggcggcttcccggattccaaggggactcgggccgccgagcgcggggggc

SEQ ID NO: 389621 - DNA, 120 bp, Artificial Sequence
  ENSG00000144724_5 (sequence is synthesized)
ccgtggagcgggcgagccggggaagcgccccggcttagcggaggctcgcacggaggcaagaacttattcaacaagtttacctccctgctttcctcttttcgatgtgcgttttcggacatg

SEQ ID NO: 389622 - DNA, 120 bp, Artificial Sequence
  ENSG00000144724_6 (sequence is synthesized)
cggaggttactggaaccgtgttggtggattttgttcctgaaaatcaccagttccgtgctccattatgtcgtgtgcttccccgcgttgacagaaggctacgttggggccctgcacgagaat

SEQ ID NO: 389623 - DNA, 120 bp, Artificial Sequence
  ENSG00000144724_7 (sequence is synthesized)
agacacggcagcgcagtgcagatccgcaggcgcaaggcttcaggcgacccgtactgggcctactctggtgcctatggtcctgagcactgggtcacgtctagtgtcagctgtgggggccgt

SEQ ID NO: 389624 - DNA, 120 bp, Artificial Sequence
  ENSG00000144724_8 (sequence is synthesized)
caccagtctcctattgacattttagaccagtatgcgcgtgttggggaagaataccaggaactgcaactcgatggcttcgacaatgagtcttctaacaaaacctggatgaaaaacacaggg

SEQ ID NO: 389625 - DNA, 120 bp, Artificial Sequence
  ENSG00000144724_9 (sequence is synthesized)
aaaacagtcgccatccttctgaaagacgactattttgtcagtggagctggtctacctggcagattcaaagctgagaaggtggaatttcactggggccacagcaatggctcagcgggctct

SEQ ID NO: 389626 - DNA, 120 bp, Artificial Sequence
  ENSG00000144724_10 (sequence is synthesized)
gaacacagcatcaatggcaggaggtttcctgttgagatgcagattttcttttacaatccagatgactttgacagctttcaaaccgcaatttctgagaacagaataatcggagccatggcc

SEQ ID NO: 389627 - DNA, 120 bp, Artificial Sequence
  ENSG00000144724_11 (sequence is synthesized)
atattttttcaagtcagtccgagggacaattctgcactggatcctattatccacgggttgaagggtgtcgtacatcatgagaaggagacctttctggatcctttcgtcctccgggacctc

SEQ ID NO: 389628 - DNA, 120 bp, Artificial Sequence
  ENSG00000144724_12 (sequence is synthesized)
ctgcctgcatccctgggcagctattatcggtacacaggttccttgaccacaccaccgtgtagcgaaatagtggagtggatagtcttccggagacccgtccccatctcttaccatcagctt

SEQ ID NO: 389629 - DNA, 120 bp, Artificial Sequence
  ENSG00000144724_13 (sequence is synthesized)
gaggctttttattccatcttcaccacggagcagcaagaccatgtcaagtcggtggagtatctgagaaataactttcgaccacagcagcgtctgcatgacagggtggtgtccaagtccgcc

SEQ ID NO: 389630 - DNA, 120 bp, Artificial Sequence
  ENSG00000144724_14 (sequence is synthesized)
gtccgtgactcctggaaccacgacatgacagacttcttagaaaacccactggggacagaagcctctaaagtttgcagctctccacccatccacatgaaggtgcagcctctgaaccagacg

SEQ ID NO: 389631 - DNA, 120 bp, Artificial Sequence
  ENSG00000144724_15 (sequence is synthesized)
gcactgcaggtgtcctggagccagccggagactatctaccacccacccatcatgaactacatgatctcctacagctggaccaagaatgaggacgagaaggagaagacgtttacaaaggac

SEQ ID NO: 389632 - DNA, 120 bp, Artificial Sequence
  ENSG00000144724_16 (sequence is synthesized)
agcgacaaagacttgaaagccaccattagccatgtctcacccgatagcctttacctgttccgagtccaggccgtgtgtcggaacgacatgcgcagcgactttagccagacgatgctgttt

SEQ ID NO: 389633 - DNA, 120 bp, Artificial Sequence
  ENSG00000144724_17 (sequence is synthesized)
caagctaataccactcgaatattccaagggaccagaatagtgaaaacaggagtgcccacagcgtctcctgcctcttcagccgacatggcccccatcagctcggggtcttctacctggacg

SEQ ID NO: 389634 - DNA, 120 bp, Artificial Sequence
  ENSG00000144724_18 (sequence is synthesized)
tcctctggcatcccattctcatttgtttccatggcaactgggatgggcccctcctccagtggcagccaggccacagtggcctcggtggtcaccagcacgctgctcgccggcctggggttc

SEQ ID NO: 389635 - DNA, 120 bp, Artificial Sequence
  ENSG00000144724_19 (sequence is synthesized)
ggcggtggtggcatctcctctttccccagcactgtgtggcccacgcgcctcccgacggccgcctcagccagcaagcaggcggctaggccagtcctagccaccacagaggccttggcttct

SEQ ID NO: 389636 - DNA, 120 bp, Artificial Sequence
  ENSG00000144724_20 (sequence is synthesized)
ccagggcccgatggtgattcgtcaccaaccaaggacggcgagggcaccgaggaaggagagaaggatgagaaaagcgagagtgaggatggggagcgggagcacgaggaggatggagagaag

SEQ ID NO: 389637 - DNA, 120 bp, Artificial Sequence
  ENSG00000144724_21 (sequence is synthesized)
gactccgaaaagaaggagaagagtggggtgacccacgctgccgaggagcggaatcagacggagcccagccccacaccctcgtctcctaacaggactgccgagggagggcatcagactata

SEQ ID NO: 389638 - DNA, 120 bp, Artificial Sequence
  ENSG00000144724_22 (sequence is synthesized)
cctgggcatgagcaggatcacactgccgtccccacagaccagacgggcggaaggagggatgccggcccaggcctggaccccgacatggtcacctccacccaagtgccccccaccgccaca

SEQ ID NO: 389639 - DNA, 120 bp, Artificial Sequence
  ENSG00000144724_23 (sequence is synthesized)
gaggagcagtatgcagggagtgatcccaagaggcccgaaatgccatctaaaaagcctatgtcccgcggggaccgattttctgaagacagcagatttatcactgttaatccagcggaaaaa

SEQ ID NO: 389640 - DNA, 120 bp, Artificial Sequence
  ENSG00000144724_24 (sequence is synthesized)
aacacctctggaatgataagccgccctgctccagggaggatggagtggatcatccctctgattgtggtatcagccttgaccttcgtgtgcctcatccttctcattgctgtgctcgtttac

SEQ ID NO: 389641 - DNA, 120 bp, Artificial Sequence
  ENSG00000144724_25 (sequence is synthesized)
tggagagggtgtaacaaaataaagtccaagggctttcccagacgtttccgtgaagtgccttcttctggggagagaggagagaaggggagcagaaaatgttttcagactgctcatttctat

SEQ ID NO: 389642 - DNA, 120 bp, Artificial Sequence
  ENSG00000144724_26 (sequence is synthesized)
gtggaagacagcagttcacctcgagtggtccctaatgaaagtatccctattattcctattccggatgacatggaagccattcctgtcaaacagtttgtcaaacacatcggtgagctctat

SEQ ID NO: 389643 - DNA, 120 bp, Artificial Sequence
  ENSG00000144724_27 (sequence is synthesized)
tctaataaccagcatgggttctctgaggattttgaggaagtccagcgctgtactgctgatatgaacatcactgcagagcattccaatcatccagaaaacaagcacaaaaacagatacatc

SEQ ID NO: 389644 - DNA, 120 bp, Artificial Sequence
  ENSG00000144724_28 (sequence is synthesized)
aacattttagcatatgatcacagtagggtgaagttaagacctttaccaggaaaagactctaagcacagcgactacattaatgcaaactatgttgatggttacaacaaagcaaaagcctac

SEQ ID NO: 389645 - DNA, 120 bp, Artificial Sequence
  ENSG00000144724_29 (sequence is synthesized)
attgccacccaaggacctttgaagtctacatttgaagatttctggaggatgatttgggaacaaaacactggaatcattgtgatgattacgaaccttgtggaaaaaggaagacgaaaatgt

SEQ ID NO: 389646 - DNA, 120 bp, Artificial Sequence
  ENSG00000144724_30 (sequence is synthesized)
gatcagtattggccaacagagaacagtgaggaatatggaaacattattgtcacgctgaagagcacaaaaatacatgcctgctacactgttcgtcgtttttcaatcagaaatacaaaagtg

SEQ ID NO: 389647 - DNA, 120 bp, Artificial Sequence
  ENSG00000144724_31 (sequence is synthesized)
aaaaagggtcagaagggaaatcccaagggtcgtcagaatgaaagggtagtgatccagtatcactatacacagtggcctgacatgggagttcccgagtatgcccttccagtactgactttc

SEQ ID NO: 389648 - DNA, 120 bp, Artificial Sequence
  ENSG00000144724_32 (sequence is synthesized)
gtgaggagatcctcagcagctcggatgccagaaacgggccctgtgttggtgcactgcagtgctggtgtgggcagaacaggcacctatattgtaatagacagcatgctgcaacagataaaa

SEQ ID NO: 389649 - DNA, 120 bp, Artificial Sequence
  ENSG00000144724_33 (sequence is synthesized)
gacaaaagcacagttaacgtcctgggattcctgaagcatatcaggacacagcgtaactacctcgtccagactgaggagcagtacattttcatccatgatgccttgttggaagccattctt

SEQ ID NO: 389650 - DNA, 120 bp, Artificial Sequence
  ENSG00000144724_34 (sequence is synthesized)
ggaaaggagactgaagtatcttcaaatcagctgcacagctatgttaacagcatccttataccaggagtaggaggaaagacacgactggaaaagcaattcaagctggtcacacagtgtaat

SEQ ID NO: 389651 - DNA, 120 bp, Artificial Sequence
  ENSG00000144724_35 (sequence is synthesized)
gcaaaatatgtggaatgtttcagtgctcagaaagagtgtaacaaagaaaagaacagaaactcttcagttgtgccatctgagcgtgctcgagtgggtcttgcaccattgcctggaatgaaa

SEQ ID NO: 389652 - DNA, 120 bp, Artificial Sequence
  ENSG00000144724_36 (sequence is synthesized)
ggaacagattacattaatgcttcttatatcatgggctattataggagcaatgaatttattataactcagcatcctctgccacatactacgaaagatttctggcgaatgatttgggatcat

SEQ ID NO: 389653 - DNA, 120 bp, Artificial Sequence
  ENSG00000144724_37 (sequence is synthesized)
aacgcacagatcattgtcatgctgccagacaaccagagcttggcagaagatgagtttgtgtactggccaagtcgagaagaatccatgaactgtgaggcctttaccgtcacccttatcagc

SEQ ID NO: 389654 - DNA, 120 bp, Artificial Sequence
  ENSG00000144724_38 (sequence is synthesized)
aacccagatgcccccataagtagtacctttgaacttatcaacgtcatcaaggaagaggccttaacaagggatggtcccaccattgttcatgatgagtatggagcagtttcagcaggaatg

SEQ ID NO: 389655 - DNA, 120 bp, Artificial Sequence
  ENSG00000144724_39 (sequence is synthesized)
ttatgtgcccttaccaccctgtcccagcaactggagaatgaaaatgctgtggatgttttccaggttgcaaaaatgatcaatcttatgaggcctggagtattcacagacattgaacaatac

SEQ ID NO: 389656 - DNA, 120 bp, Artificial Sequence
  ENSG00000144724_40 (sequence is synthesized)
cagttcatctataaagcaatgcttagcttggtcagcactaaagaaaatggaaatggtcccatgacagtagacaaaaatggtgctgttcttattgcagatgaatcagaccctgctgagagc

SEQ ID NO: 389657 - DNA, 120 bp, Artificial Sequence
  ENSG00000144724_41 (sequence is synthesized)
atggagtccctagtgtgactggaatcctgaaagggcacttaatttgtaaacttctgaagactgagaacttttttgaggccttttttgccagactctaggttatacaataacccagttact

SEQ ID NO: 389658 - DNA, 120 bp, Artificial Sequence
  ENSG00000144724_42 (sequence is synthesized)
tttttacactgataaaagttttgatatttattttttgccattttatgtcttaatggtatcctactgagcatttgcacctctgttcatttcacacagtgaaacgcaattttacctagtttg

SEQ ID NO: 389659 - DNA, 120 bp, Artificial Sequence
  ENSG00000144724_43 (sequence is synthesized)
cactatatgatcagtgttactgcctataatcttatacaacagcaaaccctgatgtgacattccatgacgacatacatgctacttttttttagttcaatacagtgaaggtctttgttatga

SEQ ID NO: 389660 - DNA, 120 bp, Artificial Sequence
  ENSG00000144724_44 (sequence is synthesized)
cagtgaatattgcttttattattattattgctgaagtggttgcattctactagcaggcaatgctgtacttttcttcagtcctcctctcctttttattttaggcactgttcaatactgtat

SEQ ID NO: 389661 - DNA, 120 bp, Artificial Sequence
  ENSG00000144724_45 (sequence is synthesized)
gccttctgtattttaatggagtggatagcattgttttcttttacagactagcaggctactgggacctaaaaaggtctgttaatgtcatggccttgaaacagttccatttatgctggttaa

SEQ ID NO: 389662 - DNA, 120 bp, Artificial Sequence
  ENSG00000144724_46 (sequence is synthesized)
gagatcccttaagaagttagaaggcttaagaactgcttcatgtgaacatcccttattagttacaaagttatattcacagttttttaaaaatgtgtcaaaataaaggataactctgtatta

SEQ ID NO: 389663 - DNA, 120 bp, Artificial Sequence
  ENSG00000144724_47 (sequence is synthesized)
cagctttcacagtagctatgtggacaatgtgttatttccattttgactctctaaaatagctacatcctaaaatcagggctatctttaacaatagcaagatagcaatattatatacaactc

SEQ ID NO: 389664 - DNA, 120 bp, Artificial Sequence
  ENSG00000144724_48 (sequence is synthesized)
agttatgagaccctttagttattctccattaatgcttcttagtttgtaataccatacctcacagtaggtagaagaatgaaaacttctgcaggtgtgtaattttgaaactagtcctctaaa

SEQ ID NO: 389665 - DNA, 120 bp, Artificial Sequence
  ENSG00000144724_49 (sequence is synthesized)
aattccctattactcctatagcaatctaataaaaactacctacatagttactgttttctttccttctttgccaaatgttttataataaatctcttaattacatacatttttctacttaag

SEQ ID NO: 389666 - DNA, 120 bp, Artificial Sequence
  ENSG00000144724_50 (sequence is synthesized)
attaaattggaaatactgtcttagcaaaagtcttgggactatctaaactcccacacatagataaatctgatttggagagagaaatttaaaatatttaattaaaggtgatacccacatttt

SEQ ID NO: 389667 - DNA, 120 bp, Artificial Sequence
  ENSG00000144724_51 (sequence is synthesized)
caagtttttaaaagagggagatggctttgtatgcttttgtgtagtttagaacagatacacattagtaaaagataccaataatcattagagctcaaggaagttattaggtgcagcctctgg

SEQ ID NO: 389668 - DNA, 120 bp, Artificial Sequence
  ENSG00000144724_52 (sequence is synthesized)
agccatactcacgctgcagtgcataatgggaaaattaggagcattaataagaaatttcagtagtgtttgtaaggaaaataagctacttactgagatctgtttcttctattgcatgtttgc

SEQ ID NO: 389669 - DNA, 120 bp, Artificial Sequence
  ENSG00000144724_53 (sequence is synthesized)
ttttgagggacagcttctgtcaaaagtgaaatcatcaccagaactgggcctgttaggaagaatagggttttatttactttttatgtcaattaacttcaacaaaaaggccacgctggctgc

SEQ ID NO: 389670 - DNA, 120 bp, Artificial Sequence
  ENSG00000144724_54 (sequence is synthesized)
tgtcatgccatctgggtatgcattaaacattaatgatgatcagcactgaggttctatttatcttgatttggctttcataaagtttgtcagaatggtgctggaggaccagaagtgctaagg

SEQ ID NO: 389671 - DNA, 120 bp, Artificial Sequence
  ENSG00000144724_55 (sequence is synthesized)
agaaagaagctatgggccaagttaaagaatttgaatgcaaaggccaggtcaatggagttttcataaactacataatttaccagggtttatctcatcttctcaatacatagatttaacaac

SEQ ID NO: 389672 - DNA, 120 bp, Artificial Sequence
  ENSG00000144724_56 (sequence is synthesized)
atggaatactctgcttttcaagagctgcgtaagctagtcctgagataagatgttcaagagagcatgctaagttgcatgtgctagatgagagacacctttacagcccctccgctccaacca

SEQ ID NO: 389673 - DNA, 120 bp, Artificial Sequence
  ENSG00000144724_57 (sequence is synthesized)
gaggtgacacaggaagctctgtaaagttcaagtaaagcttgaacacaggaacactacaactgccagatgctgaggagaatcaggaaagcaatgagctagactctttttttagtcaattaa

SEQ ID NO: 389674 - DNA, 120 bp, Artificial Sequence
  ENSG00000144724_58 (sequence is synthesized)
gtgggttgttttagatgtatagagtattgatatgagttaacactttttagtagatggcaaagtgggcttgatgttcaaaagtaatgttcgagttagggttcatggtccctttctcagtaa

SEQ ID NO: 389675 - DNA, 120 bp, Artificial Sequence
  ENSG00000144724_59 (sequence is synthesized)
ttttttcttaataaaagtaaacactggttcaaagacaaatagcaagtattccctcctgtgctatttatagagggctcaattcgtagaaaggcataccctccaatgcaattctgtggctgt

SEQ ID NO: 389676 - DNA, 120 bp, Artificial Sequence
  ENSG00000144724_60 (sequence is synthesized)
cccttacagtggtttcagaatcacgaaaaaacagctagtaaataggatagaaacaataaaagaaagagtttagaagttccctgtgagcaatctgtgtgtcttcagcgagcttgaaccaaa

SEQ ID NO: 389677 - DNA, 120 bp, Artificial Sequence
  ENSG00000144724_61 (sequence is synthesized)
gtcttcatatcctgacccactgaattataagcaattgctacttgcccatcttgccaaagtagtccaaacacacttcaatgaggacagttatatttagcaggtcctcacccctgcaagaga

SEQ ID NO: 389678 - DNA, 120 bp, Artificial Sequence
  ENSG00000144724_62 (sequence is synthesized)
cagcatatcctcactattattattcatgtgttattggcaaaaacatagcttgcatctttccagaggcagagtttcaaagacagggttttctttgagacataagcacattgcttaagtaca

SEQ ID NO: 389679 - DNA, 120 bp, Artificial Sequence
  ENSG00000144724_63 (sequence is synthesized)
taacaaggttattaacacttgcactcaggggaaaggaaatagctattgcaaattaatgtgtgcaacttaataaaataagctgtttgtgtatatgaatttagctctaggtaagcaaaatgc

SEQ ID NO: 389680 - DNA, 120 bp, Artificial Sequence
  ENSG00000144724_64 (sequence is synthesized)
acacatcatataaaaataaattgcaatgatcagaccaagtggctgtgctggacatcaaagaaaagacatgctgttgccatcaggagaactctttcttatatgcgatagccaagatatctt

SEQ ID NO: 389681 - DNA, 120 bp, Artificial Sequence
  ENSG00000144724_65 (sequence is synthesized)
ctttaatatgaaaaaagttaatttctgaatttcaaaaagagtaagattagctaattggtcttcctaatttttatgcctttagagtttttagtctattcaagtagaagagtccagcgaggc

SEQ ID NO: 389682 - DNA, 120 bp, Artificial Sequence
  ENSG00000144724_66 (sequence is synthesized)
caaagaagggttacggtgttcaagttctggttgttggagtttttagcccagagtgacatactgaaatcagtaaataattattttataatgacacagcacaactgccttgttatgaatttt

SEQ ID NO: 389683 - DNA, 120 bp, Artificial Sequence
  ENSG00000144724_67 (sequence is synthesized)
ccttgttatgaatttttcttaaatgcatatatactgtatttaaaattaaaatatagataccaatttaccaaagatacatattactaattctaagcaaaactaaaaaaaaaacccaactca

SEQ ID NO: 389684 - DNA, 120 bp, Artificial Sequence
  ENSG00000144724_68 (sequence is synthesized)
aaaatgtagtttgtcttaagaatttagtggttatactggaaatgcattttcaactcctatgttctaaagtttatgttcaaatggtgccagtgaatttttatatgaagggaaaatgcctgc

SEQ ID NO: 389685 - DNA, 120 bp, Artificial Sequence
  ENSG00000144724_69 (sequence is synthesized)
tttttttttttttttaacagatgtaatttcacttaaccctttgcgctttcccttagttgtcatttaacatacaatactggctttacttatctctagaaagaagaaggcatgctacaaata

SEQ ID NO: 389686 - DNA, 120 bp, Artificial Sequence
  ENSG00000144724_70 (sequence is synthesized)
ggaaggaattgtaataatgatatttggcctctactttgtcttagctgttaaactgtttttagtatttttgttaaatatttgcaaagggaagcattttctacagaggataattaatttcaa

SEQ ID NO: 389687 - DNA, 120 bp, Artificial Sequence
  ENSG00000144724_71 (sequence is synthesized)
gaaaaatatcttgagttttaagaaataaacatctccagaaaaggagaaagtcgattttataaaatgtcgcaactctccaacatttggggtagtgactccttttttgttaggacatttgaa

SEQ ID NO: 389688 - DNA, 120 bp, Artificial Sequence
  ENSG00000144724_72 (sequence is synthesized)
actagcaagcagccattgtttctaaagaattctggcttcacattgactcatgtttctttcactccattttgaaatagctaaaaatcattaaaactgtaaatattttgttgcttgggtaag

SEQ ID NO: 389689 - DNA, 120 bp, Artificial Sequence
  ENSG00000144724_73 (sequence is synthesized)
catcttctgggaactttgtatctatggtatataatcatagaattttatattttcatataaagctaatttttttctagtttcaactccgtcatagttttttttcctttttgtggtggatat

SEQ ID NO: 389690 - DNA, 120 bp, Artificial Sequence
  ENSG00000144724_74 (sequence is synthesized)
gtgaattcaactttctgtgtattgaagtagcaaaaaccatctttacattccaaaagaatccaacatgtgttatttctttgaggcagtgattgtgaaagttgggttttctttttaattcca

SEQ ID NO: 389691 - DNA, 120 bp, Artificial Sequence
  ENSG00000144724_75 (sequence is synthesized)
ttgaccatttgtgcaataggaattagacataattagtcactgaaaacattcgtcacattgacccatttggaaaaagtgtgctttttttttttttttaaatttgttcagggggaggggttt

SEQ ID NO: 389692 - DNA, 120 bp, Artificial Sequence
  ENSG00000144724_76 (sequence is synthesized)
tgtaacctgaaatttttccctttttcttctgtttaaactatatcaaatcattctattatagtgttatttaatatgtaaattgtattgctatacataaaataaagtatggtttttgatgta

SEQ ID NO: 389693 - DNA, 120 bp, Artificial Sequence
  ENSG00000144724_77 (sequence is synthesized)
gaactatcagtttggatgcggtgatgataaaaaaaatggatatgctgtagcaattttgggcccctccaacaggctgaatgttgtccttgtatcttgttacttttacatgagtttaccctc

SEQ ID NO: 389694 - DNA, 120 bp, Artificial Sequence
  ENSG00000144724_78 (sequence is synthesized)
agtgctgtgtgatgtttaaagctgggaagatctataaaataagaattaaaagaagatgaactcaaataaagtatattctattattgacatgtttttctcttttctacacagaaaatgttt

SEQ ID NO: 389695 - DNA, 90 bp, Artificial Sequence
  ENSG00000144724_79 (sequence is synthesized)
gtcgcccaggctggagtgcagtatactttggcccagtcatagcccactaaagccttgacctcctgggctcgtgattgttccacctcagct

SEQ ID NO: 389696 - DNA, 120 bp, Artificial Sequence
  ENSG00000144724_80 (sequence is synthesized)
gtctcactgtgttgcccaggctggcctcgaattcctggccttaagcgatcctcccagcttagccttgcaaagtggtgggattataaatgtgtgacaccacacttagatgcccactaatgg

SEQ ID NO: 389697 - DNA, 120 bp, Artificial Sequence
  ENSG00000144724_81 (sequence is synthesized)
tttggtgaaaggattaaaccccccaagaactgaattttcagtaataaggaattgaagattttagtcaagccagagcacacatgattgaacttcagcagtgagggtaccaaagaatattac

SEQ ID NO: 389698 - DNA, 120 bp, Artificial Sequence
  ENSG00000144724_82 (sequence is synthesized)
atttggaaattaaattttaagagagaagaggaaaaaaactgggcgtagagagtatggggagagaataaaatatggtgaatatggtgatgtgattcttgaactgtccttttgtttttttct

SEQ ID NO: 389699 - DNA, 120 bp, Artificial Sequence
  ENSG00000144724_83 (sequence is synthesized)
gtagcacattccccaattagacaatcagaagtgttttcagatgttcccacctatcccctggggagtcaggggcagactcctttttggtagagaaccctctgctgtagaacgtgcaagaaa

SEQ ID NO: 389700 - DNA, 120 bp, Artificial Sequence
  ENSG00000144724_84 (sequence is synthesized)
taataataaatagtaatagtatggaagagtatagaattattacatggtaaaggtggctgtgatttttgacctgataagcttatttagccaattccagaagtttccttattgcaaagtggg

SEQ ID NO: 389701 - DNA, 120 bp, Artificial Sequence
  ENSG00000144724_85 (sequence is synthesized)
cggattttaagtgttccttaccaattgttaaatgtggtgagatggattttatttcccttggattcgtgctatatctgccatggaaagcctgggtggtgttgattgtagctcagattgaaa

SEQ ID NO: 389702 - DNA, 120 bp, Artificial Sequence
  ENSG00000144724_86 (sequence is synthesized)
atgacagccaggagttgcttagttaatggggtatatgttggtcctcaatttgtgcaattcattgtttaatgtgaatgaataatttagggatgaatgattgggttcatttttagacactgg

SEQ ID NO: 389703 - DNA, 120 bp, Artificial Sequence
  ENSG00000144724_87 (sequence is synthesized)
ctaccttaacaggatgatagttgacagagcttcatgttatatttcctcacgtgaagagctaaagttgttgcccaggttaagtcaaaacattagacaaggtcataatgttaattatttgaa

SEQ ID NO: 389704 - DNA, 120 bp, Artificial Sequence
  ENSG00000144724_88 (sequence is synthesized)
tatgttaaactgctgaatatacatacgttggtgcaaaagtaattgcaatcttttgcaccaacttaatatatacacaagtgtatatatatttgtgtggtggtaggactaattacttaaata

SEQ ID NO: 389705 - DNA, 120 bp, Artificial Sequence
  ENSG00000144724_89 (sequence is synthesized)
atttttctcaactttgcatatacttttttcttcctgcatttaatctagtttcatttggattatgtctagtttctgtggaagtagcttcataaataatttaaatgatctttgatttgagac

SEQ ID NO: 389706 - DNA, 120 bp, Artificial Sequence
  ENSG00000144724_90 (sequence is synthesized)
tgactcttaaaaatggaaattgcatttatctgggttagaattttatctaggattttaatttaatagctgttatttttactttcaaattcatattttaatacaattaaaagttgggttttt

SEQ ID NO: 389707 - DNA, 120 bp, Artificial Sequence
  ENSG00000144724_91 (sequence is synthesized)
taatttggggacagacagcaagctgttttattttatttttgcctgccaaggaatgctttttccttgacacggacaagggtgctctttctttttctgttctagctctcctgtgtcttggac

SEQ ID NO: 389708 - DNA, 120 bp, Artificial Sequence
  ENSG00000144724_92 (sequence is synthesized)
ttcttaattctttctggtgggatttttctcccttccttctttacctttcactagagatagagttatcctttcttctggctcttgtttccctcccaagacagctacatctcaccatttgcc

SEQ ID NO: 389709 - DNA, 120 bp, Artificial Sequence
  ENSG00000144724_93 (sequence is synthesized)
ttggcctcctttatttctccttctattcatcttttgtacttggagtggtccgcaaggtgaggagagttgagctcaatgaaaagaaggtagatttttgccttttttatgcagaacaatgtc

SEQ ID NO: 389710 - DNA, 120 bp, Artificial Sequence
  ENSG00000144724_94 (sequence is synthesized)
ttcaaaaaaatcagaacagaaaaaataagatgcattctaatggatctttgacactttttggtaatgaagcttttagttcccatagagttgtgtgtaggtcagaaaatctgccaagtttct

SEQ ID NO: 389711 - DNA, 120 bp, Artificial Sequence
  ENSG00000144724_95 (sequence is synthesized)
tactctatgttcagctcaagtttgctctggcaccaaagaggagagaaacggggggttgcagaaaacagggggttgagagctttatctttttgtcctttactttcatctaaaaaaaaaaaa

SEQ ID NO: 389712 - DNA, 120 bp, Artificial Sequence
  ENSG00000144724_96 (sequence is synthesized)
tgccaagaaagaatgattcttgcaagctaacctctcattagcccatcttcaacagtgtagaagttgggacattttcttcccccttagcctttcattaggctgtcagggctcagcgagctt

SEQ ID NO: 389713 - DNA, 120 bp, Artificial Sequence
  ENSG00000144724_97 (sequence is synthesized)
aataaggtgactgaaagaaaatgtttggagcttcgctattttcacatgaagtgatgtcatatcacatgttgggagccaaaatttgaatgtcacttggttacactgacattgtttttaacc

SEQ ID NO: 389714 - DNA, 120 bp, Artificial Sequence
  ENSG00000144724_98 (sequence is synthesized)
tgtaagggccaaatcttttaatacaaatgaaaatattgggaattgaatcaagcaagctgaatttcaaagcattctttcaaagactacataattggcttgtaccttaaatgatgagcctcc

SEQ ID NO: 389715 - DNA, 120 bp, Artificial Sequence
  ENSG00000144724_99 (sequence is synthesized)
aggccttttggtccatgtgcttactcctatctatcacatttccatggtcaggaatattctgtaggttagggactcaaacaaatggacattcttcatacagagcctcaaggaataccctag

SEQ ID NO: 389716 - DNA, 120 bp, Artificial Sequence
  ENSG00000144724_100 (sequence is synthesized)
agtgcaggaggaatccttgctgggctcaagtcagcctgcagccaatgttagatttttttaaggggcttctccctgtgatcacaggcaacctttgctttttcactgcttgcctctgtgcac

SEQ ID NO: 389717 - DNA, 120 bp, Artificial Sequence
  ENSG00000144724_101 (sequence is synthesized)
ctgtgctcttcccagccccagcaccccaaccagggcttcatttgggccacctggcatgttccgggcatcttcttcacagtggaagggaagataggatcttctgctgaggctcctggggac

SEQ ID NO: 389718 - DNA, 120 bp, Artificial Sequence
  ENSG00000144724_102 (sequence is synthesized)
caggcgacccgtactgggcctactctggtaagtccagttgttctaatggagatcacacaggccagttaacatcccattcaactcacttgaaagcacactttgaatcacttttatgcctga

SEQ ID NO: 389719 - DNA, 120 bp, Artificial Sequence
  ENSG00000144724_103 (sequence is synthesized)
gttctgtttgctcaaatctttcgtagttcactaaaagttgaaatattcgagcctgtttttcctcaaggttataagcaccttaatttatctctaccacctgtttcctcaacctgttttccc

SEQ ID NO: 389720 - DNA, 120 bp, Artificial Sequence
  ENSG00000144724_104 (sequence is synthesized)
ctcaatttgcgtttatttctgaactttactgttaatgagttattgtaccaaacttgtaattttctgaaagacgtagtcttgtcttttctgttttttcaggggctgtgatttcagagagca

SEQ ID NO: 389721 - DNA, 120 bp, Artificial Sequence
  ENSG00000144724_105 (sequence is synthesized)
gaaaatatatggctagtcttgagctgctaaatgtctgctaaacattacaaacatcacatatcagaatgctctattaggctctaagccaagaaatgcaactttatttttaaatcacatctt

SEQ ID NO: 389722 - DNA, 120 bp, Artificial Sequence
  ENSG00000144724_106 (sequence is synthesized)
gttctttgaatatattttagctgtctactcgatggtaatctgcagtccttttcatttttatttttacttttacccttttgagctaatgaagggagagagcattgttctaactatgttgaa

SEQ ID NO: 389723 - DNA, 120 bp, Artificial Sequence
  ENSG00000144724_107 (sequence is synthesized)
tgttacattgcaaataattttcttacattttaaggggacaaaaatgaagaccgaaaactagggatagacttttctggattaggcttcccaaaactcccaaaatatgagaggtggattgtt

SEQ ID NO: 389724 - DNA, 120 bp, Artificial Sequence
  ENSG00000144724_108 (sequence is synthesized)
aattaaggaatgcttgagtaagatagaccactttggaaattactttggcactgaataattcaaactccttctatgaaagagcttggaggcatggagtattagtcttaataataaatctat

SEQ ID NO: 389725 - DNA, 120 bp, Artificial Sequence
  ENSG00000144724_109 (sequence is synthesized)
gtattatgcaatgttgttgcatatagaactgaaagtattcttttcataatgatgctcgggtttaaatcctgaatttctcccagcaaatcctgttaaatttatgccagtgtaaaatttata

SEQ ID NO: 389726 - DNA, 120 bp, Artificial Sequence
  ENSG00000144724_110 (sequence is synthesized)
ggtctgatctttaattataccttatctattggctttttgcatccttttgtctattgataaatctgctgcccctgcagggagaatatcctatctgttttgttttgcagtgaacagatagtg

SEQ ID NO: 389727 - DNA, 120 bp, Artificial Sequence
  ENSG00000144724_111 (sequence is synthesized)
attctgaagttttccatcacacccagtaccttgtgattagaattatctaattagaggctttttgtcaccatttctgataaatgaaggaaattggcagatgaaagccaaaattacatatat

SEQ ID NO: 389728 - DNA, 120 bp, Artificial Sequence
  ENSG00000144724_112 (sequence is synthesized)
atagcatcttgccaagaaacccaaagaaaatttatcattttgtactctgtggctctgacatcagtcaggaggaggcacaaagtggcttgctatttacagttcatcagtttagaataataa

SEQ ID NO: 389729 - DNA, 120 bp, Artificial Sequence
  ENSG00000144724_113 (sequence is synthesized)
tgctgttagtcaggaaattggaagttatatcccattagcatgtccaattgcaaatggcagtgaagagatgaaagcccttaaacttttcccattatgtagttaagaatgaccataagtggt

SEQ ID NO: 389730 - DNA, 120 bp, Artificial Sequence
  ENSG00000144724_114 (sequence is synthesized)
gccatctttgtgatggagtgattgttgatgtctttaactttggtagagttcagaagtctccattttgtatttctggaatgcattgtgtctgaatttgggtattgcctccagtagtagaag

SEQ ID NO: 389731 - DNA, 120 bp, Artificial Sequence
  ENSG00000144724_115 (sequence is synthesized)
gactaatggttcaaattcaagagttggcacactttttctgaaaagatccaggtaacaaacatcaaaagccatgtcgtctttgttgcaactgcccaactctgccattgtagcttaaaagta

SEQ ID NO: 389732 - DNA, 120 bp, Artificial Sequence
  ENSG00000144724_116 (sequence is synthesized)
cccactgacaattctggacagactggctgtgctctgataaaaatttacttatgaatactggaatttgaattttataattttcatgtgtcaggaaatattcttcttttgatttttttctca

SEQ ID NO: 389733 - DNA, 120 bp, Artificial Sequence
  ENSG00000144724_117 (sequence is synthesized)
ttcattaaaaaatatacaaaccattcttgctttgcaggctgtgcaaaaacaggtggctggttggatagggtccacaggttatatagtttgtgaacccttgttccagttgatttttttcct

SEQ ID NO: 389734 - DNA, 120 bp, Artificial Sequence
  ENSG00000144724_118 (sequence is synthesized)
agaaatcagataggagagtcatttgaggaattgcttggaaggatgtggactggtttggaagactgaatgaagtcatttgttaggcataatggaaaaaataagagtaaaagaagaatagaa

SEQ ID NO: 389735 - DNA, 120 bp, Artificial Sequence
  ENSG00000144730_0 (sequence is synthesized)
actcggggctggccagcggcgggcggccggggcgcagagaacggcctggctgggcgagcgcacggccatggccccgtggctgcagctctgctccgtcttctttacggtcaacgcctgcct

SEQ ID NO: 389736 - DNA, 120 bp, Artificial Sequence
  ENSG00000144730_1 (sequence is synthesized)
caacggctcgcagctggctgtggccgctggcgggtccggccgcgcgcggggcgccgacacctgtggctggaggggagtggggccagccagcagaaacagtgggctgtacaacatcacctt

SEQ ID NO: 389737 - DNA, 120 bp, Artificial Sequence
  ENSG00000144730_2 (sequence is synthesized)
caaatatgacaattgtaccacctacttgaatccagtggggaagcatgtgattgctgacgcccagaatatcaccatcagccagtatgcttgccatgaccaagtggcagtcaccattctttg

SEQ ID NO: 389738 - DNA, 120 bp, Artificial Sequence
  ENSG00000144730_3 (sequence is synthesized)
gtccccaggggccctcggcatcgaattcctgaaaggatttcgggtaatactggaggagctgaagtcggagggaagacagtgccaacaactgattctaaaggatccgaagcagctcaacag

SEQ ID NO: 389739 - DNA, 120 bp, Artificial Sequence
  ENSG00000144730_4 (sequence is synthesized)
tagcttcaaaagaactggaatggaatctcaacctttcctgaatatgaaatttgaaacggattatttcgtaaaggttgtcccttttccttccattaaaaacgaaagcaattaccacccttt

SEQ ID NO: 389740 - DNA, 120 bp, Artificial Sequence
  ENSG00000144730_5 (sequence is synthesized)
cttctttagaacccgagcctgtgacctgttgttacagccggacaatctagcttgtaaacccttctggaagcctcggaacctgaacatcagccagcatggctcggacatgcaggtgtcctt

SEQ ID NO: 389741 - DNA, 120 bp, Artificial Sequence
  ENSG00000144730_6 (sequence is synthesized)
cgaccatgcaccgcacaacttcggcttccgtttcttctatcttcactacaagctcaagcacgaaggacctttcaagcgaaagacctgtaagcaggagcaaactacagagacgaccagctg

SEQ ID NO: 389742 - DNA, 120 bp, Artificial Sequence
  ENSG00000144730_7 (sequence is synthesized)
cctccttcaaaatgtttctccaggggattatataattgagctggtggatgacactaacacaacaagaaaagtgatgcattatgccttaaagccagtgcactccccgtgggccgggcccat

SEQ ID NO: 389743 - DNA, 120 bp, Artificial Sequence
  ENSG00000144730_8 (sequence is synthesized)
cagagccgtggccatcacagtgccactggtagtcatatcggcattcgcgacgctcttcactgtgatgtgccgcaagaagcaacaagaaaatatatattcacatttagatgaagagagctc

SEQ ID NO: 389744 - DNA, 120 bp, Artificial Sequence
  ENSG00000144730_9 (sequence is synthesized)
tgagtcttccacatacactgcagcactcccaagagagaggctccggccgcggccgaaggtctttctctgctattccagtaaagatggccagaatcacatgaatgtcgtccagtgtttcgc

SEQ ID NO: 389745 - DNA, 120 bp, Artificial Sequence
  ENSG00000144730_10 (sequence is synthesized)
ctacttcctccaggacttctgtggctgtgaggtggctctggacctgtgggaagacttcagcctctgtagagaagggcagagagaatgggtcatccagaagatccacgagtcccagttcat

SEQ ID NO: 389746 - DNA, 120 bp, Artificial Sequence
  ENSG00000144730_11 (sequence is synthesized)
cattgtggtttgttccaaaggtatgaagtactttgtggacaagaagaactacaaacacaaaggaggtggccgaggctcggggaaaggagagctcttcctggtggcggtgtcagccattgc

SEQ ID NO: 389747 - DNA, 120 bp, Artificial Sequence
  ENSG00000144730_12 (sequence is synthesized)
cgaaaagctccgccaggccaagcagagttcgtccgcggcgctcagcaagtttatcgccgtctactttgattattcctgcgagggagacgtccccggtatcctagacctgagtaccaagta

SEQ ID NO: 389748 - DNA, 120 bp, Artificial Sequence
  ENSG00000144730_13 (sequence is synthesized)
cagactcatggacaatcttcctcagctctgttcccacttgcactcccgagaccacggcctccaggagccggggcagcacacgcgacagggcagcagaaggaactacttccggagcaagtc

SEQ ID NO: 389749 - DNA, 120 bp, Artificial Sequence
  ENSG00000144730_14 (sequence is synthesized)
aggccggtccctatacgtcgccatttgcaacatgcaccagtttattgacgaggagcccgactggttcgaaaagcagttcgttcccttccatcctcctccactgcgctaccgggagccagt

SEQ ID NO: 389750 - DNA, 120 bp, Artificial Sequence
  ENSG00000144730_15 (sequence is synthesized)
cttggagaaatttgattcgggcttggttttaaatgatgtcatgtgcaaaccagggcctgagagtgacttctgcctaaaggtagaggcggctgttcttggggcaaccggaccagccgactc

SEQ ID NO: 389751 - DNA, 120 bp, Artificial Sequence
  ENSG00000144730_16 (sequence is synthesized)
ccagcacgagagtcagcatgggggcctggaccaagacggggaggcccggcctgcccttgacggtagcgccgccctgcaacccctgctgcacacggtgaaagccggcagcccctcggacat

SEQ ID NO: 389752 - DNA, 120 bp, Artificial Sequence
  ENSG00000144730_17 (sequence is synthesized)
gccgcgggactcaggcatctatgactcgtctgtgccctcatccgagctgtctctgccactgatggaaggactctcgacggaccagacagaaacgtcttccctgacggagagcgtgtcctc

SEQ ID NO: 389753 - DNA, 120 bp, Artificial Sequence
  ENSG00000144730_18 (sequence is synthesized)
ctcttcaggcctgggtgaggaggaacctcctgcccttccttccaagctcctctcttctgggtcatgcaaagcagatcttggttgccgcagctacactgatgaactccacgcggtcgcccc

SEQ ID NO: 389754 - DNA, 120 bp, Artificial Sequence
  ENSG00000144730_19 (sequence is synthesized)
tttgtaacaaaacgaaagagtctaagcattgccactttagctgctgcctccctctgattccccagctcatctccctggttgcatggcccacttggagctgaggtctcatacaaggatatt

SEQ ID NO: 389755 - DNA, 120 bp, Artificial Sequence
  ENSG00000144730_20 (sequence is synthesized)
tggagtgaaatgctggccagtacttgttctcccttgccccaaccctttaccggatatcttgacaaactctccaattttctaaaatgatatggagctctgaaaggcatgtccataaggtct

SEQ ID NO: 389756 - DNA, 120 bp, Artificial Sequence
  ENSG00000144730_21 (sequence is synthesized)
gacaacagcttgccaaatttggttagtccttggatcagagcctgttgtgggaggtagggaggaaatatgtaaagaaaaacaggaagatacctgcactaatcattcagacttcattgagct

SEQ ID NO: 389757 - DNA, 120 bp, Artificial Sequence
  ENSG00000144730_22 (sequence is synthesized)
ctgcaaactttgcctgtttgctattggctaccttgatttgaaatgctttgtgaaaaaaggcacttttaacatcatagccacagaaatcaagtgccagtctatctggaatccatgttgtat

SEQ ID NO: 389758 - DNA, 120 bp, Artificial Sequence
  ENSG00000144730_23 (sequence is synthesized)
tgcagataatgttctcatttatttttgatgtagaatttacattgccatgggtgttaaataagctttgagtcaaaagtcaagaaagtgactgaatatacagtcaccttttatgaaatgagt

SEQ ID NO: 389759 - DNA, 120 bp, Artificial Sequence
  ENSG00000144730_24 (sequence is synthesized)
ctctgtgttactgggtggcatgactgattgaggtgaagctcacggggccaggctgaccgtcttgaccgttccacttgagataggttggtcatcgtgcagaaggccccaggacctcagcac

SEQ ID NO: 389760 - DNA, 120 bp, Artificial Sequence
  ENSG00000144730_25 (sequence is synthesized)
acacagcctcctcttggtctgagtaggcatcatgtgggggccagatctgcctgctgtttccatgggttacatttactgtgctgtatctcagatgttggtgtctggaagtttattcttaag

SEQ ID NO: 389761 - DNA, 120 bp, Artificial Sequence
  ENSG00000144730_26 (sequence is synthesized)
agactgctacccagctggtctgtattattggaagttgcagttcgtgctttggttggccttctggtctaaagctgtgtcctgaatattagggatcacaattcactgaaatacagcagtgtg

SEQ ID NO: 389762 - DNA, 120 bp, Artificial Sequence
  ENSG00000144730_27 (sequence is synthesized)
tggaggtgatggccagttaatctgctgaactggttttgactaatgacaaacctctttttaagatggtagaatggaggtgatagtcacaaaagtaaatgttccatttttatgaatgacttt

SEQ ID NO: 389763 - DNA, 120 bp, Artificial Sequence
  ENSG00000144730_28 (sequence is synthesized)
ctacagagtttctatttctaaagaaaaaacaattgttcacatcccatctgatgattagcatgtgtgtaatgaatgctgtcttggtctcccctgtggaaacccttctccctgtgccttaga

SEQ ID NO: 389764 - DNA, 120 bp, Artificial Sequence
  ENSG00000144730_29 (sequence is synthesized)
gcaggtgtgtacatctctcactacctttctcatgggtgctgttagattttggcacccgttttctcagcattcagcccagggaatgtggttttcacttcttcgtcagataagaccaacatg

SEQ ID NO: 389765 - DNA, 120 bp, Artificial Sequence
  ENSG00000144730_30 (sequence is synthesized)
aaggggtatgttgagaaacatcctgaggcaaggtgggaggtgggatggggcaggactttcccttccaagcacatgcatggcaggtggggaaaggggggcttgcacccctgctggaaagaa

SEQ ID NO: 389766 - DNA, 120 bp, Artificial Sequence
  ENSG00000144730_31 (sequence is synthesized)
aaggtttgtgtatatttctgatgcaaatgtcatactcactgctctgtaaaggcagctggcagctttttgggaaaagaacgtgctcgtctgttctctggcatcaagtttcttgcagctgct

SEQ ID NO: 389767 - DNA, 120 bp, Artificial Sequence
  ENSG00000144730_32 (sequence is synthesized)
ctgagggagagacagtgagctgcaagactgcctccccataacaacaggcaactcagagaagagtcattttatgttgttcctatggaatctggaatgagtgcagagctcctacccacacat

SEQ ID NO: 389768 - DNA, 120 bp, Artificial Sequence
  ENSG00000144730_33 (sequence is synthesized)
gactgccccgccatttcatcctaggcattctgtgaaggagattggttagtccaaacttgctaacatacgaaaattcacttggaacatgatgagagatttcttattgaggccaagagatgt

SEQ ID NO: 389769 - DNA, 120 bp, Artificial Sequence
  ENSG00000144730_34 (sequence is synthesized)
ttcctgtcccagaggaaccattaggagtcgcttttagggtattcagctttgttcatgaaataaggcatctctgagaaagtggccccagggagagaatggaggactgggaggagaagcatt

SEQ ID NO: 389770 - DNA, 120 bp, Artificial Sequence
  ENSG00000144730_35 (sequence is synthesized)
aactgagctccaagggtgtgtgggcagagagcttgctatgtgaactcactccttaagaaaatggaagagaaaaagagagtgctagttaaaaaatcgggatgttttagtttggatttaggg

SEQ ID NO: 389771 - DNA, 120 bp, Artificial Sequence
  ENSG00000144730_36 (sequence is synthesized)
taccgagtaatgaaaccatagtgtgattgcctcagaataaattgagaagtccaacttcctagttttgtttaattagtttcactttttctactctccccagtatgctagaaatgggaatcg

SEQ ID NO: 389772 - DNA, 120 bp, Artificial Sequence
  ENSG00000144730_37 (sequence is synthesized)
ttgccctgcagattacggcaaaacatctgttttaagcaaagctgcattttttgactcagaaattgtcccagacggtggatataagatgaaattcagaaaaacgttctgccaagtcacagg

SEQ ID NO: 389773 - DNA, 120 bp, Artificial Sequence
  ENSG00000144730_38 (sequence is synthesized)
cttttagatattatggaaacaagaaatggaaaacaggatgatctccatgagaggccttgatcctgagagtaaaaggcttgtgtagataggttagacaacgtcctctagaaaagagaccag

SEQ ID NO: 389774 - DNA, 120 bp, Artificial Sequence
  ENSG00000144730_39 (sequence is synthesized)
ggataagtccaggtttccaggaaaaccaagaagcctgcgggtagctgaaggtagagtgctagttgttcatcttaacttaccaatgagctacagaaaggacttagcatctgatgtcatcag

SEQ ID NO: 389775 - DNA, 120 bp, Artificial Sequence
  ENSG00000144730_40 (sequence is synthesized)
ctttgccaggagagtgatcaaggaggttaaagctcaggtaaaggtgtgccttctcagagattggctacaagcaacagagaccacctcaacagagaccacctcaacagactcagcccagcc

SEQ ID NO: 389776 - DNA, 120 bp, Artificial Sequence
  ENSG00000144730_41 (sequence is synthesized)
atacaaggtgccaaagctcctccagagggctgtcttgggcctttgaggcaattgatctccagaaagagtcagaagtcattccagtccaggcccaggtattcagatggtgacccagccaga

SEQ ID NO: 389777 - DNA, 120 bp, Artificial Sequence
  ENSG00000144730_42 (sequence is synthesized)
taatagtatcttgagcaaataatagtatcttgagtgcaaataagcaggaagactgtccttcaaaaaatgtggggttacatgattttcagagcctttttttcagagttgagcatcttttct

SEQ ID NO: 389778 - DNA, 120 bp, Artificial Sequence
  ENSG00000144730_43 (sequence is synthesized)
tttaaaagaaataaggggcaagaggaccaattttattccttgaggaaaaatgacacacccttctcccaaaagaaagaaaactctctggccccccaacttcaacactaatttggctccctg

SEQ ID NO: 389779 - DNA, 120 bp, Artificial Sequence
  ENSG00000144730_44 (sequence is synthesized)
aagaagagagaaaatattatttctgtctttattgaagagaaatgggcaatgccaatgtgaaggttactagtcttttttattttctattggtgaagactactactgctcttatttagcaga

SEQ ID NO: 389780 - DNA, 120 bp, Artificial Sequence
  ENSG00000144730_45 (sequence is synthesized)
tcttataccttcagtggtcaccagtatagcaggtgaggtataaggaaaacagcagtgtgatgataaatggtaattaatatactttgtctgtgtcagcaatagggaatggtggggactgtg

SEQ ID NO: 389781 - DNA, 120 bp, Artificial Sequence
  ENSG00000144730_46 (sequence is synthesized)
gcaaactgaagcgcccctgttccacccacagtgggtaattttccagtcgactgtggccatgaagtacttcctgatcttcccatttttcaagaaaagctgacaatctggatttttatatga

SEQ ID NO: 389782 - DNA, 120 bp, Artificial Sequence
  ENSG00000144730_47 (sequence is synthesized)
aaaattctgattttaaaaaatattggcaactaagttaaaattcaagtgaatttagacccagcagaagacatggatggacctgatttggtccactgactaccagtttgttaacctgtgctt

SEQ ID NO: 389783 - DNA, 120 bp, Artificial Sequence
  ENSG00000144730_48 (sequence is synthesized)
tataagatttgaaggaaaggcattcatggtaattacagacggtgccaccagaaaatgctcttgctaaatgcagccagtagttagattgcttctttctccagtctcccccgcaaagaaatt

SEQ ID NO: 389784 - DNA, 120 bp, Artificial Sequence
  ENSG00000144730_49 (sequence is synthesized)
tgacgtgattctgaatgcactggacatgtcttgattgcgtctttacatttcacagtgtcttaaaagaaaggcaagccagttgttaatttcagaatcagatttatgctctctcaatttaaa

SEQ ID NO: 389785 - DNA, 81 bp, Artificial Sequence
  ENSG00000144730_50 (sequence is synthesized)
aatttcatttaaactccacaacctaaagggctttgtttatagttttagctcttggcataatttttttcaggtggtgtgcaa

SEQ ID NO: 389786 - DNA, 120 bp, Artificial Sequence
  ENSG00000144730_51 (sequence is synthesized)
gttttagctcttggcataatttttttcaggtggtgtgcaattctgagcataggccaagacatgattaggaaagcaggcagttgtagagagtaaggcaaggaacctcctagcgtccattag

SEQ ID NO: 389787 - DNA, 120 bp, Artificial Sequence
  ENSG00000144730_52 (sequence is synthesized)
agccaggtatttgcattatcttccgttttaagtggtctgtgaattgactgtgttttggaggtgtgaaacagtatacagagaaaagcttttcctgatactgagatatcagttaggagtcca

SEQ ID NO: 389788 - DNA, 120 bp, Artificial Sequence
  ENSG00000144730_53 (sequence is synthesized)
aatggggtgttgggtcatccttgccatatcacctcctttccaggctcagagtgaaaatagacaaaaggaaatctgactgcaagccagtggctttgattccagtttcagagtttagggact

SEQ ID NO: 389789 - DNA, 120 bp, Artificial Sequence
  ENSG00000144730_54 (sequence is synthesized)
aggagagagtttagattatctagcatattctccccctggtgtcagacagggctgtgcctgaattattccagacatatggctgtagatggtattctttattttataagaaggagattctgt

SEQ ID NO: 389790 - DNA, 120 bp, Artificial Sequence
  ENSG00000144730_55 (sequence is synthesized)
aacctaccctgctgatcagatagttctttgtatgtcttagagaaattcaagccagcttccttttgttcggcttgtagtggagaaagaacagctggtcaccttccatgtattcaaaaacca

SEQ ID NO: 389791 - DNA, 120 bp, Artificial Sequence
  ENSG00000144730_56 (sequence is synthesized)
cagtgaagtcatccccctggtgtttttatttcagtgataaataattccacccacttaaaccattcttcatggctcttgttttccaggggcctaataattttcactgctgtaatgtttctc

SEQ ID NO: 389792 - DNA, 120 bp, Artificial Sequence
  ENSG00000144730_57 (sequence is synthesized)
agcttcacacttagtttagttgcccaaacaatgttggtgccttactcacattggtgccttgtgaagacgaggctcaggatggggattatggggaaattcttgcacacccagctcctctta

SEQ ID NO: 389793 - DNA, 120 bp, Artificial Sequence
  ENSG00000144730_58 (sequence is synthesized)
ccacttaaaaatataatggcactttcacaaaatgatatgtcacctatattcattgagaattatttgactgccacatttttcccctgatgatagtcatctatcataacttgtgtttgtttt

SEQ ID NO: 389794 - DNA, 120 bp, Artificial Sequence
  ENSG00000144730_59 (sequence is synthesized)
cctcctgagatcaaacacttggtgcttattcctgatgtatactctgagaccagctcttaccttctgagtggcagctacccctccctcccaattttagatcctatttttacacatctctat

SEQ ID NO: 389795 - DNA, 120 bp, Artificial Sequence
  ENSG00000144730_60 (sequence is synthesized)
agatatcacctttatttcatgactcacaatattaaatggtacagacttcagtttaaccactggtgtggtaacagcagtagttgctaagtaccaccttcccattgctgtttgagggctaat

SEQ ID NO: 389796 - DNA, 120 bp, Artificial Sequence
  ENSG00000144730_61 (sequence is synthesized)
ttgcaaagacatttgaatctcccagtgaagatgtctggggaattttggccagttgtcttccctcttgcccttttgttctttaaaattcagcttggaccatagacacctccaggatcttgt

SEQ ID NO: 389797 - DNA, 120 bp, Artificial Sequence
  ENSG00000144730_62 (sequence is synthesized)
ttatgttctgctctcaattgaccaagcactgcgttttgcacaatcagaagtctcacaaaagcaaacagttatgactgcatatctgatgtttatatcctataaaatttcaggaagattcag

SEQ ID NO: 389798 - DNA, 120 bp, Artificial Sequence
  ENSG00000144730_63 (sequence is synthesized)
agtcaatcttctatttgtacatgatgtagacaaaattagctgctccaattgttagacaaaaaattgccattggattacactaatgtgctcatctgttgttttaaaagtttggtatcaggc

SEQ ID NO: 389799 - DNA, 120 bp, Artificial Sequence
  ENSG00000144730_64 (sequence is synthesized)
caacaagagcgaaactccgtctcaacaacaacaacaaaaagtttggtatgtttctctcaagaaaaaagcatggtgagtccagacagcagcaaaagcttttgtgaaaaccaattgtgttca

SEQ ID NO: 389800 - DNA, 120 bp, Artificial Sequence
  ENSG00000144730_65 (sequence is synthesized)
aaaccaattgtgttcatctagatagtaagtaactcctatttttactgttaattttttaaaagagaatttttccctgtggaaactccctgttagtacgtcctaggggagaaagcctgtgga

SEQ ID NO: 389801 - DNA, 120 bp, Artificial Sequence
  ENSG00000144730_66 (sequence is synthesized)
atatggtggttattgatggcgttgcctttgtttcatctttgagtttgccctttgtgggatctagtgggataatgagcactgacagaactcttaacagcgtgctgtatttttgacattgaa

SEQ ID NO: 389802 - DNA, 120 bp, Artificial Sequence
  ENSG00000144730_67 (sequence is synthesized)
aatgttaatgacttgatttgtacataactctgtaactaggtgaaagtagatcacagctgacatttacaaaatgtttttgtaccttagaatttctgcattaaataaaatgttttgttttaa

SEQ ID NO: 389803 - DNA, 120 bp, Artificial Sequence
  ENSG00000144730_68 (sequence is synthesized)
atccgctcttcttttcctccgggaaaagaaacgggaagtggccgtgggccggtgaattccgtgtagtggccaagctttgttccaaagagggggaggtggtgacagtctcttgcccactga

SEQ ID NO: 389804 - DNA, 120 bp, Artificial Sequence
  ENSG00000144730_69 (sequence is synthesized)
agcgtgccagacagagtgctaggcatgggggcagaggtgaatcagatgacagccacctctcaccacgaggagtggctgaaagtgtgactggactacaggcaatcctggccttggcaggga

SEQ ID NO: 389805 - DNA, 120 bp, Artificial Sequence
  ENSG00000144730_70 (sequence is synthesized)
gacacctgtggctggagggtaaggcgagggcggcgggtttcttgccgtcgccaactcgcgggggacgcagcgcgcacaggtgctcgcggggaggcgagcccgcgccaacctgtctgctct

SEQ ID NO: 389806 - DNA, 120 bp, Artificial Sequence
  ENSG00000144730_71 (sequence is synthesized)
gctgcccgaccccggctttgtgttgctaatgagatgaggattccatggcacaaagagccaggaagggattaagatgagaatccttgtgactcggagaggcctctctctgccagaaaccgg

SEQ ID NO: 389807 - DNA, 120 bp, Artificial Sequence
  ENSG00000144730_72 (sequence is synthesized)
agctgcagagttcttaccctgcccatgcccccagcagtcgggcttgccctgccttccaagcaccctgtctcagatggacggctgccatgtgcaacaaagcaactaatggggggtggaaag

SEQ ID NO: 389808 - DNA, 120 bp, Artificial Sequence
  ENSG00000144730_73 (sequence is synthesized)
aggtgcctttggggccgggtcctaacaggccgcagcctttgaccatgcttctgaaatcagtcaaagcgtttttccacttttggtgccaacttattgggcaatgaaacctgatgagaacac

SEQ ID NO: 389809 - DNA, 120 bp, Artificial Sequence
  ENSG00000144736_0 (sequence is synthesized)
ccctcacaccgagagttcctgcgcgtggggagttggagagtttgcgtggcgggaacgcggcggcagtgagagcgagcggcgccggcccttgcgtccggtgcggcgatgctgaccccggcg

SEQ ID NO: 389810 - DNA, 120 bp, Artificial Sequence
  ENSG00000144736_1 (sequence is synthesized)
ttcgacctcagccaggatccggacttcctgactatcgccatccgcgtgccctacgcccgggtctccgagttcgacgtctacttcgaggggtctgacttcaagttctacgccaagccatac

SEQ ID NO: 389811 - DNA, 120 bp, Artificial Sequence
  ENSG00000144736_2 (sequence is synthesized)
tttctcagattaacccttcctggaagaattgtagaaaatggaagtgagcaagggtcctatgatgcagataaaggaatttttaccattcgcctgcccaaagaaacccctggccagcatttt

SEQ ID NO: 389812 - DNA, 120 bp, Artificial Sequence
  ENSG00000144736_3 (sequence is synthesized)
gaggggctgaacatgttaactgctcttctggcaccaagaaaatccaggacagcaaaaccacttgtggaagaaataggtgcttctgagattcctgaggaagtagttgacgatgaagagttt

SEQ ID NO: 389813 - DNA, 120 bp, Artificial Sequence
  ENSG00000144736_4 (sequence is synthesized)
gattgggaaattgagcagacaccctgtgaagaggtatcagaaagtgctttgaatccgcagtgccactatggatttggaaacttacgatcaggagtgttgcaacggttacaggatgaactg

SEQ ID NO: 389814 - DNA, 120 bp, Artificial Sequence
  ENSG00000144736_5 (sequence is synthesized)
agtgatgttattgatattaaggatccagatttcacccctgcagctgaacgaagacagaagcgcctggccgctgagctggccaagtttgatcctgatcattatctagctgacttttttgaa

SEQ ID NO: 389815 - DNA, 120 bp, Artificial Sequence
  ENSG00000144736_6 (sequence is synthesized)
gatgaggcgattgaacagattttgaagtataatccttggtggactgacaaatattcaaaaatgatggcctttttggaaaagagtcaggaacaagaaaatcatgctacattagtgtctttt

SEQ ID NO: 389816 - DNA, 120 bp, Artificial Sequence
  ENSG00000144736_7 (sequence is synthesized)
tctgaagaagagaagtatcagctacgaaaatttgtcaataaatcttatctgctggacaagagagcctgtcgtcaagtgtgctacagtttgattgatatccttctggcatattgctatgaa

SEQ ID NO: 389817 - DNA, 120 bp, Artificial Sequence
  ENSG00000144736_8 (sequence is synthesized)
acccgtgtcactgaaggagagaagaatgttgaatctgcatggaatatcaggaaactgagtccaacactatgctggtttgagacttggactaacgttcatgatatcatggtgtcttttgga

SEQ ID NO: 389818 - DNA, 120 bp, Artificial Sequence
  ENSG00000144736_9 (sequence is synthesized)
agaagggtgttgtgttacccactctatcgccatttcaagctggtgatgaaggcctacagggacactataaagatattgcaactgggtaaaagtgcagttttaaagtgtctcctggatatt

SEQ ID NO: 389819 - DNA, 120 bp, Artificial Sequence
  ENSG00000144736_10 (sequence is synthesized)
cacaaaatttttcaggaaaatgacccagcgtacatactgaatgatctctacatctcagactactgtgtgtggattcagaaagtcaaatccaaaaagttggcagctcttgcagaagcctta

SEQ ID NO: 389820 - DNA, 120 bp, Artificial Sequence
  ENSG00000144736_11 (sequence is synthesized)
tgcattaaaagcagcccattcagtttctgggcagcagacactttgctccagctctgaggcaagtgattcggaggactcagacagcagcgtgtcatctggaaacgaagactcaggctcaga

SEQ ID NO: 389821 - DNA, 120 bp, Artificial Sequence
  ENSG00000144736_12 (sequence is synthesized)
ttcagaacaagatgaactcaaagatagtccatctgagacagtcagttctttgcaaggtccctttcttgaagaaagcagtgcctttcttattgttgatggtggagtacgcagaaacacagc

SEQ ID NO: 389822 - DNA, 120 bp, Artificial Sequence
  ENSG00000144736_13 (sequence is synthesized)
catccaggagtctgatgccagtcagggaaagccacttgcctcttcctggcctcttggagtgtctgggcctctgatagaggagcttggggaacaactgaagactacagttcaggtttctga

SEQ ID NO: 389823 - DNA, 120 bp, Artificial Sequence
  ENSG00000144736_14 (sequence is synthesized)
acccaagggcaccactgctgtaaaccgcagcaatattcaggagagagacggctgtcagacaccaaataattgactcttaggtggttttattcattgttgagaaatatggtagattgggtt

SEQ ID NO: 389824 - DNA, 120 bp, Artificial Sequence
  ENSG00000144736_15 (sequence is synthesized)
tcatttaccgaatgagaattcttcattttcactttgtaatttttcttagtatatagtcagcccactgtatttgtgtgttccacatctgtggattcaaccaactgcagatcaaaaatattg

SEQ ID NO: 389825 - DNA, 120 bp, Artificial Sequence
  ENSG00000144736_16 (sequence is synthesized)
aagaaaaaatcgcatctgtaccaaacatgtacagacttttttcttgttattattctctaaataatacagtatgacaactatttccacagcatttacattgtattgggtaatataagtaat

SEQ ID NO: 389826 - DNA, 120 bp, Artificial Sequence
  ENSG00000144736_17 (sequence is synthesized)
ctagtgatgatttaaactgtgcaggaggatgtgggtaggttatatgcaaatactgcaccattttttatcaggggcttgagcatctgaggattttagtatcctcaggagtcctggaaccaa

SEQ ID NO: 389827 - DNA, 120 bp, Artificial Sequence
  ENSG00000144736_18 (sequence is synthesized)
ccccccacagatacggggacaactttatgacattgtttttcaaccaatgaatgtttataccttttgttttccttgccgcgactgtgaagataaagttcaaaagtatttttaccaaagtgt

SEQ ID NO: 389828 - DNA, 120 bp, Artificial Sequence
  ENSG00000144736_19 (sequence is synthesized)
agctaatatttcaagctgaaaataatagttctactgcccgtgtctccagaatgtagagcccatcaatatttttattttaggaggtgtacttgacacccaataaactgcacgtatcaaaag

SEQ ID NO: 389829 - DNA, 120 bp, Artificial Sequence
  ENSG00000144736_20 (sequence is synthesized)
tgtacaatgtgttggcgtatgtataccctgcgtaaaactatcaccacaactgaagtgaggaacggacccatcattcccaagtgcccttgtgccctgttattagtttgcatgtcctagaat

SEQ ID NO: 389830 - DNA, 120 bp, Artificial Sequence
  ENSG00000144736_21 (sequence is synthesized)
tctatgtaaattgaatcatacaatatgtatcccttttttggtcaggcatattttactcagtatagttattttgagattcatccatgtggtagcatgtgtcacgagtttttgtttttatgt

SEQ ID NO: 389831 - DNA, 120 bp, Artificial Sequence
  ENSG00000144736_22 (sequence is synthesized)
ttttcattgctgagtactgcttcattgaatagatttgttcattgacctatcgatggacacctgggttgtttccagtttggggctgttataaataaagctgttatgaacatttgtgtacaa

SEQ ID NO: 389832 - DNA, 120 bp, Artificial Sequence
  ENSG00000144736_23 (sequence is synthesized)
gaagaatgttgaatctgcatggaatatcaggaaactgagtccaacactatgctggtttgaggtaagatgtaaacaggaactgaaacacttacttcatatagaatcttactactccaaaaa

SEQ ID NO: 389833 - DNA, 120 bp, Artificial Sequence
  ENSG00000144736_24 (sequence is synthesized)
aagattgcgctatcgcactccagcctgagtaacagagcgagactgtctaaaaaaaaaaaaaaaaagaacatacagtttgctataccaaggatgaataaaacctggtccctctccttgaag

SEQ ID NO: 389834 - DNA, 120 bp, Artificial Sequence
  ENSG00000144736_25 (sequence is synthesized)
tctatcgccatttcaagctggtgatgaaggcctacagggacactataaagatattgcaactggaattttgctctgttgcccaaggctggagtacagtggcgcgatcttgactcactgcaa

SEQ ID NO: 389835 - DNA, 65 bp, Artificial Sequence
  ENSG00000144736_26 (sequence is synthesized)
atttgtatgtttaggagaggcggggttttgccgtgttgaccaggctggtctggaactcctggcct

SEQ ID NO: 389836 - DNA, 120 bp, Artificial Sequence
  ENSG00000144736_27 (sequence is synthesized)
gaaattagttggcctatgcttactgtgacatttgtcttctctgtggcaattaaaacttcaaaacattcttacaggtcagttgttccttgattctttgggtaacatggctagtgtggcaaa

SEQ ID NO: 389837 - DNA, 120 bp, Artificial Sequence
  ENSG00000144736_28 (sequence is synthesized)
catggtttcatcatgcctgcaaattttgattatatttcctcctcctttcatcaaaccctgctctcaacattacctagtttgtaattaaaataggcttgtgctggggtgatccacactaat

SEQ ID NO: 389838 - DNA, 120 bp, Artificial Sequence
  ENSG00000144736_29 (sequence is synthesized)
catttgacatagttaacctgtgccactttgataagccatagcactgaccttgccttaaccaaatgaacttgacatcttgtagctttaggccttctaagtgttagtttctcttcacagtca

SEQ ID NO: 389839 - DNA, 120 bp, Artificial Sequence
  ENSG00000144736_30 (sequence is synthesized)
gtctagcagtggagctttcattgacattcttcattcattctttattgtatctgcatatgaggaagccacaaagttaatattttttaaaaaggtatggactctgttttcagacttactacc

SEQ ID NO: 389840 - DNA, 120 bp, Artificial Sequence
  ENSG00000144736_31 (sequence is synthesized)
tacttaggggttaaagtcagtaataagtccttgagtaataaaaacgttgtgatatagactggatgaggcaagaacatacaggtagcatggcacagtgggtagcctctggagccattaaga

SEQ ID NO: 389841 - DNA, 120 bp, Artificial Sequence
  ENSG00000144736_32 (sequence is synthesized)
ttggaatttagatcttggtccctcaactcagtggccctgtatcttacccatcctgaagcctccagttttccttctgggaattgaacaggagaggttatggggaggactttccccattttg

SEQ ID NO: 389842 - DNA, 120 bp, Artificial Sequence
  ENSG00000144736_33 (sequence is synthesized)
agtttcctttccacttcttggcagcattatagtaaaggaccgtgaagactaggaaagtcagcccagaacttcccgaaggaatgaagactggagctagaccttgatagtgggctaggtcac

SEQ ID NO: 389843 - DNA, 120 bp, Artificial Sequence
  ENSG00000144736_34 (sequence is synthesized)
atggagaagggaaaaaggcatggaaacaagtctgtagaaagagcattgagaacatatgcagggaagagactccatgaaagcagtgcattaaaaaatgtgtgtttgaaggggtagagtctg

SEQ ID NO: 389844 - DNA, 120 bp, Artificial Sequence
  ENSG00000144736_35 (sequence is synthesized)
gaatctgaaagatgggaaagaggattcttaaaatcgaggcatgagatgagaatatgagtgaacataggagctcaggcaatggcatagaaagggcagatacaaggagcatctccaaggaaa

SEQ ID NO: 389845 - DNA, 120 bp, Artificial Sequence
  ENSG00000144736_36 (sequence is synthesized)
aatcatcaggatttgacgggtgagaccgtagaatgaaagaaattttcaaggtttaagctgggtgattactgtgtctatcatgtattcattcattcttagaacacttaaatggaaaacctg

SEQ ID NO: 389846 - DNA, 120 bp, Artificial Sequence
  ENSG00000144736_37 (sequence is synthesized)
ctgttgcggtgttctgttctaggtattggggattaaccactaaataaaacagaagcccctgctcttttgaaacttactttctagtgttaattatgttaaaaaatttagtgtcagcaattt

SEQ ID NO: 389847 - DNA, 120 bp, Artificial Sequence
  ENSG00000144736_38 (sequence is synthesized)
taggatcttgagatgtcatcatctagctcatgattcttttatgatctaaaagttaaatgggaaatgtcaatgaaagtgcatccagtatcttcatgaactcagtatacagtatttccgcgt

SEQ ID NO: 389848 - DNA, 120 bp, Artificial Sequence
  ENSG00000144736_39 (sequence is synthesized)
ttcagaactgtaaagataagaatgaaactgttaaactgaaaatactgaatttcacagatcaaagaaaatggtactactctagatgtagaattaatagttcaccttataattaataaattt

SEQ ID NO: 389849 - DNA, 120 bp, Artificial Sequence
  ENSG00000144736_40 (sequence is synthesized)
caggaaatatcatgaagtttggaacacctagggaattgctgagttgtaaaaggctccttttgtagactttggttgggttaaaactaggttcatttaaaaaccaggaggaagtagttaggt

SEQ ID NO: 389850 - DNA, 120 bp, Artificial Sequence
  ENSG00000144736_41 (sequence is synthesized)
tgaacaaggctttaatacttgatggcttttgttcatgtgagttttgtcagcttatttctgaagtagtgctatgatgttttagtgttcagttttcttcaattctttaaggtaaaataattt

SEQ ID NO: 389851 - DNA, 120 bp, Artificial Sequence
  ENSG00000144736_42 (sequence is synthesized)
gttattagtagataactccttgacagaaaatgttgacataagaaataaagaagtttgaaatttagaatacagttttccatgttatgttgaaagcttgaattggaagaacattatctaata

SEQ ID NO: 389852 - DNA, 120 bp, Artificial Sequence
  ENSG00000144736_43 (sequence is synthesized)
cctagttgtatttcatagcattttaatgataaccacaactagtcagctgtaacaacagaatataaagattatatgtaattcttttttttttttttttttcgagatggagtctttctctgt

SEQ ID NO: 389853 - DNA, 120 bp, Artificial Sequence
  ENSG00000144741_0 (sequence is synthesized)
aacctgaagctctcagagcttccctgtcttcatctatcagcccagggagaggaatcagtggttttccaaaagctgtacctctttccataaatacaaggatgaagggctgagatgatggca

SEQ ID NO: 389854 - DNA, 120 bp, Artificial Sequence
  ENSG00000144741_1 (sequence is synthesized)
gttagaattatattgagaaatggtagcgggatctgagaaagcaaggccatgagttgaaagcagagagaaggcggttcgagtggagccctgatgaagttcatgctcatggttgcccagcca

SEQ ID NO: 389855 - DNA, 120 bp, Artificial Sequence
  ENSG00000144741_2 (sequence is synthesized)
ttaacacgggctcatcacatctgtttccagattgcttctagaacttagctaccctcgttctataagatggaatgaaaatgcgtactacatacagatcatgaaaagacgcaaagaaaatgc

SEQ ID NO: 389856 - DNA, 120 bp, Artificial Sequence
  ENSG00000144741_3 (sequence is synthesized)
atcttcacattgcagttcagaatcacgccggcctcattctaccgctgctctctcctggatctcggccacggatcttttgctcgcgaaagttcctccgtctagctgcacacaacgctgctg

SEQ ID NO: 389857 - DNA, 120 bp, Artificial Sequence
  ENSG00000144741_4 (sequence is synthesized)
caggaaaccgaggtaagggatttgccgagacttagctccaccacactccccgaggccccgcccctcctctctggccctcccctaggcccaggtgtctcgcgttgcacgtgcagttgttgt

SEQ ID NO: 389858 - DNA, 120 bp, Artificial Sequence
  ENSG00000144741_5 (sequence is synthesized)
ggttctacgtcacgtggtcccggaagttcaagacagacccgcctcaaacatggcggcgcccagcgcgcgaggacgtgatccgcttctgctccggcttggattgtagccttgacgaggtct

SEQ ID NO: 389859 - DNA, 120 bp, Artificial Sequence
  ENSG00000144741_6 (sequence is synthesized)
gagcgaccatggaccggccggggttcgtggcagcgctggtggctggtggggtagcaggtgtttctgttgacttgatattatttcctctggataccattaaaaccaggctgcagagtcccc

SEQ ID NO: 389860 - DNA, 120 bp, Artificial Sequence
  ENSG00000144741_7 (sequence is synthesized)
aaggatttagtaaggctggtggttttcatggaatatatgctggcgttccttctgctgctattggatcctttcctaatgctgctgcattttttatcacctatgaatatgtgaagtggtttt

SEQ ID NO: 389861 - DNA, 120 bp, Artificial Sequence
  ENSG00000144741_8 (sequence is synthesized)
tgcatgctgattcatcttcatatttgacacctatgaaacatatgttggctgcctctgctggagaagtggttgcctgcctgattcgagttccatctgaagtggttaagcagagggcacagg

SEQ ID NO: 389862 - DNA, 120 bp, Artificial Sequence
  ENSG00000144741_9 (sequence is synthesized)
tatctgcttctacaagaacatttcagattttctctaacatcttatatgaagagggtatccaagggttgtatcgaggctataaaagcacagttttaagagagattcctttttctttggtcc

SEQ ID NO: 389863 - DNA, 120 bp, Artificial Sequence
  ENSG00000144741_10 (sequence is synthesized)
agtttcccttatgggagtccttaaaagccctctggtcctggaggcaggatcatgtggtggattcttggcagtcagcagtctgtggagcttttgcaggtggatttgccgctgcagtcacca

SEQ ID NO: 389864 - DNA, 120 bp, Artificial Sequence
  ENSG00000144741_11 (sequence is synthesized)
tggcaaaggctggctccagcactgctgatgggaatgtgctctctgtcctgcatggggtctggcggtcacaggggctggcaggattatttgcaggtgtcttccctcgaatggcagccatca

SEQ ID NO: 389865 - DNA, 120 bp, Artificial Sequence
  ENSG00000144741_12 (sequence is synthesized)
gtctgggaggtttcatctttctgggggcttatgaccgaacgcacagcttgctgttggaagttggcagaaagagtccttgaagcagagacaagcctcacctccacttctgtcaagagaggg

SEQ ID NO: 389866 - DNA, 120 bp, Artificial Sequence
  ENSG00000144741_13 (sequence is synthesized)
gcctgcagtgcaaaccctcttccgctgagcagctgtctgaactataggccccagtgctgaagaccagttgtgctaagataccggcatggagattgtgccatccgtggtataggctggctg

SEQ ID NO: 389867 - DNA, 120 bp, Artificial Sequence
  ENSG00000144741_14 (sequence is synthesized)
gtatgaagtcattggcctgtatgccagagagctaagagaagaaaacggggtctgtggcggtactctgaacaatttcctcagaacctcttaataaataagtttggtaatgctgaggccagg

SEQ ID NO: 389868 - DNA, 120 bp, Artificial Sequence
  ENSG00000144741_15 (sequence is synthesized)
ccttttagagctttcatttgatctgtatctgatctttcatttcctgccacctgatggtggattcagcagaaggcaagatggttataattctaaaagaatagcttgtttgtttgtttggga

SEQ ID NO: 389869 - DNA, 120 bp, Artificial Sequence
  ENSG00000144741_16 (sequence is synthesized)
aaaggagacttggggaagagttgtgtatgtgggtgtttctccccctagttaattcctgttgtgtaagggtaggctttgttgaaaaagaaagaaagattgaactacaggtgcatagcaagc

SEQ ID NO: 389870 - DNA, 120 bp, Artificial Sequence
  ENSG00000144741_17 (sequence is synthesized)
actctttctgggtaactaggctgctggttttaattaccctcagatttcacccataaaaacgcacaattgtattattttacagagatgtgtccagcgccccctgtggtgtgtgagagaaag

SEQ ID NO: 389871 - DNA, 120 bp, Artificial Sequence
  ENSG00000144741_18 (sequence is synthesized)
cagctgcaactcaagtgactaggtgggcccagctggcttcgtgcaggagggcacggtgggtgagccattctcgccattctcatgtcagactgaaaggagggcctgggccagctttgaaaa

SEQ ID NO: 389872 - DNA, 120 bp, Artificial Sequence
  ENSG00000144741_19 (sequence is synthesized)
ggcaggatgaaatggaaaggtcaccacacttagggattttagaccttgactaacaagctccaggtgtagaaaaattcaaaacaaaatgtcaggaatctagcagtgttgtctgccctggag

SEQ ID NO: 389873 - DNA, 120 bp, Artificial Sequence
  ENSG00000144741_20 (sequence is synthesized)
caaacaaacagtatgtgattttgcttcgcctattttttttttcttttttgggggaagataattaaaggcagaatgactgcgtttgtaaaagaaggaccaccaactatactgacatttata

SEQ ID NO: 389874 - DNA, 120 bp, Artificial Sequence
  ENSG00000144741_21 (sequence is synthesized)
aatgaacctttattaaagacacttcaatgccatttgttagacacttcaatattttacatggttttcaatgtacactgtaccaaaatttctataaataaataactttgtacataaaagtaa

SEQ ID NO: 389875 - DNA, 120 bp, Artificial Sequence
  ENSG00000144741_22 (sequence is synthesized)
gcccagctggcttcgtgcaggagggcacgatccaagtcctgtgagcgactgatactccacatgggagttacaactatgtacagatgagtgacgcttgaacccaagcttcctcgcagcctc

SEQ ID NO: 389876 - DNA, 120 bp, Artificial Sequence
  ENSG00000144741_23 (sequence is synthesized)
tcctacctctctttcccgtagagattggtatgacaagaactgaggtagacaaaacctagctttttggtgccaacagcagtggcaccctctgtttcccggggagctgtcctgtcagtggcg

SEQ ID NO: 389877 - DNA, 120 bp, Artificial Sequence
  ENSG00000144741_24 (sequence is synthesized)
tggactcgggactggcgtcacatgctttggggaggtggccattggaaacaagcaagtactgggcttccgcgcgctctggactgcctgaagttaatgaagatgcaggctgtagctctgtgg

SEQ ID NO: 389878 - DNA, 120 bp, Artificial Sequence
  ENSG00000144741_25 (sequence is synthesized)
agtccgggtgatacaaccttgctaaagtccaggaagaatcccctacaaggaaagaacgaacctgtcagacccccacttgaccgtttaagcagctcccaacccacctgttagaagacagtc

SEQ ID NO: 389879 - DNA, 120 bp, Artificial Sequence
  ENSG00000144741_26 (sequence is synthesized)
aaaagttacctttcccatctagagatgccattggctttttcttcacagccgtcagcattctatcgtggttactggggtagagcgacccttggcactcggggcaggacccagcggcagtcc

SEQ ID NO: 389880 - DNA, 120 bp, Artificial Sequence
  ENSG00000144741_27 (sequence is synthesized)
tgctgcactggtgatgtggagaatgctcttggtcactcccacccggctccgggccatttggcgcacttggctgtgcgctgtctctggacacaggctgggggtggaaggcttgtcccctgg

SEQ ID NO: 389881 - DNA, 120 bp, Artificial Sequence
  ENSG00000144741_28 (sequence is synthesized)
agtaacagtccacttcggtgttgcagtcactgcatacgacccggccaccgtgttctgaaggacagcgccaaagatgggttagagtcactgctgtgggagtcttcgtccccacacagagga

SEQ ID NO: 389882 - DNA, 120 bp, Artificial Sequence
  ENSG00000144741_29 (sequence is synthesized)
gggagctgctgctgctggctgctgagcatgtaaaccggatgtccttgcccaccatagccatggtggtttctggctgggtgatgatctgtggcttcaggaagtcatctggggagagaaggg

SEQ ID NO: 389883 - DNA, 120 bp, Artificial Sequence
  ENSG00000144741_30 (sequence is synthesized)
tcaactgtaaagcgctgggttcttggtacacagaggaaccagctgctgttcatgctaacagaaactgacacagacaccaagcaggaaccagagcttgaggtccctgtgcatcctcagccc

SEQ ID NO: 389884 - DNA, 120 bp, Artificial Sequence
  ENSG00000144741_31 (sequence is synthesized)
caccaaccagatgccgtaagagttgcaccatggacatctgacctcatctaattagaagtctgtgagtactgatcacctttatgatcacactccttgattagaaattaacccaccacttct

SEQ ID NO: 389885 - DNA, 120 bp, Artificial Sequence
  ENSG00000144741_32 (sequence is synthesized)
cagttctcaaaccagccagccggcagtttccttaagacaactggctctgcctgctgactttcacacaaaacagtcaggcaccactggtcatgactgcagagatcttacccacaaacctta

SEQ ID NO: 389886 - DNA, 120 bp, Artificial Sequence
  ENSG00000144741_33 (sequence is synthesized)
ctccaaaaggagggggtgtaaaacacttccaaaatgtcagaataaggacctccaaaaatctgcacctccattaaaacaaggaaaacacctggaaaaatggtcaaaagcaactttttcaga

SEQ ID NO: 389887 - DNA, 120 bp, Artificial Sequence
  ENSG00000144741_34 (sequence is synthesized)
attctggaaaaccaaaggcttacaacaatccatggattgttgattcaagcaaatagcaacatctcagaaatgtgagctttgtggtattttaacttatccaaagccccattcttccctccc

SEQ ID NO: 389888 - DNA, 120 bp, Artificial Sequence
  ENSG00000144741_35 (sequence is synthesized)
cagctccatggtagccttgaaacccagcagcctagcaaccactcaagggtcagaatgggctccccaaaagccccatcctcagaactgacaccatgtggcctatctggcagcaacacggaa

SEQ ID NO: 389889 - DNA, 120 bp, Artificial Sequence
  ENSG00000144741_36 (sequence is synthesized)
agccccattcacaggatttgcattgatttgccctgatctagtttgccgagcaggagaagccctagccccagggcacatgactacaacaatcagtagccactgttcaacagcgcagctgtc

SEQ ID NO: 389890 - DNA, 120 bp, Artificial Sequence
  ENSG00000144741_37 (sequence is synthesized)
tgaggggacaatacccatggggcaaacaagcagctggccaaaaaactataaaggaaaatgtggggaatacagtgttaatggtgggctttgaaaaggtccaatacattcctggggatctag

SEQ ID NO: 389891 - DNA, 120 bp, Artificial Sequence
  ENSG00000144741_38 (sequence is synthesized)
acagccacatgcaggtgcaaggccatgtgcacacccaggaaagacgtgagggggtcctcatttgtcacctgtggctgagcatgactgtctacacaaataggaagtgatggcacaccccaa

SEQ ID NO: 389892 - DNA, 120 bp, Artificial Sequence
  ENSG00000144741_39 (sequence is synthesized)
cacaaacacacaagccgtcggtaaaggataggagacagtggttgtggtgacttctctgtccaaccattagctaaccactaaactaaacaagcagggacttaaggggacggactttatata

SEQ ID NO: 389893 - DNA, 120 bp, Artificial Sequence
  ENSG00000144741_40 (sequence is synthesized)
gcctttgtccaggaaaagtcactaggcaagctgtaacaataaacagcaacagcagcaaatcctgggggaggagaaagggaatatccaatttccagagttgccacattattttattttaaa

SEQ ID NO: 389894 - DNA, 120 bp, Artificial Sequence
  ENSG00000144741_41 (sequence is synthesized)
tgcccaattttcaacaaaatattatgaaacactcaaacaggaaaaaaagcagtcaacagaaactgtctctgagggagcccagacttagattcactaaataaactttttaaatcggcaatt

SEQ ID NO: 389895 - DNA, 120 bp, Artificial Sequence
  ENSG00000144741_42 (sequence is synthesized)
actaaataaactttttaaatcggcaattataggcatattcaaacacctcaaggaaaccatgtcttaaaaaaaatatcgaaggatagtggccaggtggggtggctcacgcctataatccca

SEQ ID NO: 389896 - DNA, 120 bp, Artificial Sequence
  ENSG00000144741_43 (sequence is synthesized)
gcggtcacaggggctggcaggggaccatataccagggattttcttgcaagagcaaagcagtggcctccctttgcagagggtcggtcggcagctgcctggacttcgggcgtctcagctggc

SEQ ID NO: 389897 - DNA, 120 bp, Artificial Sequence
  ENSG00000144741_44 (sequence is synthesized)
agtgccacctcctcatcctgatgccgagttggatcacttatgtgattgtagtttttgtgtacctttggcagttttaatctcagctatttgatgatctggaggacatgaagtagattattt

SEQ ID NO: 389898 - DNA, 120 bp, Artificial Sequence
  ENSG00000144741_45 (sequence is synthesized)
aaacatggcggcgcccagcgcgcgaggacgtgatccgcttctgctccggcttggattgtagccttgacgaggtctgagcgaccatggaccggccggggttcgtggcagcgctggtgctgc

SEQ ID NO: 389899 - DNA, 120 bp, Artificial Sequence
  ENSG00000144744_0 (sequence is synthesized)
gcggagaacaatatggcggatggcgaggagccggagaagaaaagaaggagaatagaggagctgctggctgagaaaatggctgttgatggtgggtgtggggacactggagactgggaaggt

SEQ ID NO: 389900 - DNA, 120 bp, Artificial Sequence
  ENSG00000144744_1 (sequence is synthesized)
cgctggaaccatgtaaagaagttcctcgagcgatctggacccttcacacaccctgatttcgaaccgagcactgaatctctccagttcttgttagatacatgtaaagttctagtcattgga

SEQ ID NO: 389901 - DNA, 120 bp, Artificial Sequence
  ENSG00000144744_2 (sequence is synthesized)
gctggcggcttaggatgtgagctcctgaaaaatctggccttgtctggttttagacagattcatgttatagatatggacactatagatgtttccaatctaaataggcagtttttatttagg

SEQ ID NO: 389902 - DNA, 120 bp, Artificial Sequence
  ENSG00000144744_3 (sequence is synthesized)
cctaaagatattggaagacctaaggctgaagttgctgcagaatttctaaatgacagagttcctaattgcaatgtagttccacatttcaacaagattcaagattttaacgacactttctat

SEQ ID NO: 389903 - DNA, 120 bp, Artificial Sequence
  ENSG00000144744_4 (sequence is synthesized)
cgacaatttcatattattgtatgtggactggactctatcatcgccagaagatggataaatggcatgctgatatctcttctaaattatgaagatggtgtcttagatccaagctccattgtc

SEQ ID NO: 389904 - DNA, 120 bp, Artificial Sequence
  ENSG00000144744_5 (sequence is synthesized)
cctttgatagatggggggacagaaggttttaaaggaaatgcccgggtgattctgcctggaatgactgcttgtatcgaatgcacgctggaactttatccaccacaggttaattttcccatg

SEQ ID NO: 389905 - DNA, 120 bp, Artificial Sequence
  ENSG00000144744_6 (sequence is synthesized)
tgcaccattgcatctatgcccaggctaccagaacactgtattgagtatgtaaggatgttgcagtggcctaaggagcagccttttggagaaggggttccattagatggagatgatcctgaa

SEQ ID NO: 389906 - DNA, 120 bp, Artificial Sequence
  ENSG00000144744_7 (sequence is synthesized)
catatacaatggattttccaaaaatccctagagagagcatcacaatataatattaggggtgttacgtataggctcactcaaggggtagtaaaaagaatcattcctgcagtagcttccaca

SEQ ID NO: 389907 - DNA, 120 bp, Artificial Sequence
  ENSG00000144744_8 (sequence is synthesized)
taattacttggtgtttaatgatgtagatgggctgtatacatacacatttgaagcagaaagaaaggaaaactgcccagcttgtagccagcttcctcaaaatattcagttttctccatcagc

SEQ ID NO: 389908 - DNA, 120 bp, Artificial Sequence
  ENSG00000144744_9 (sequence is synthesized)
taaactacaggaggttttggattatctaaccaatagtgcttctctgcaaatgaaatctccagccatcacagccaccctagagggaaaaaatagaacactttacttacagtcggtaacctc

SEQ ID NO: 389909 - DNA, 120 bp, Artificial Sequence
  ENSG00000144744_10 (sequence is synthesized)
tattgaagaacgaacaaggccaaatctctccaaaacattgaaagaattggggcttgttgatggacaagaactggcggttgctgatgtcaccaccccacagactgtactattcaaacttca

SEQ ID NO: 389910 - DNA, 120 bp, Artificial Sequence
  ENSG00000144744_11 (sequence is synthesized)
ttttacttcttaaggaaaatctccacataatagaaaactcatggaaataatatactttgtggatgctaagaagttgaatcgatgtcatttttagcaatagtgttgccacgatttgtcttt

SEQ ID NO: 389911 - DNA, 120 bp, Artificial Sequence
  ENSG00000144744_12 (sequence is synthesized)
ttttatataatgaaccactcttttttaactttgtaaccttcccttgaagacagaattttggtgttggtgcttgtaagcattttcattaataatatgagaaatgatacctggagagagaga

SEQ ID NO: 389912 - DNA, 120 bp, Artificial Sequence
  ENSG00000144744_13 (sequence is synthesized)
ttatgagcaaatgtattgcttcttttagaggaggaagcatacaacctcttttgtgtgaattttgttattatggtcaaagaatgcattcctaagttttcatttgagtacccaaatacacaa

SEQ ID NO: 389913 - DNA, 120 bp, Artificial Sequence
  ENSG00000144744_14 (sequence is synthesized)
aaggtgtccctttaaggaaaataaagaattaagttttaaataacattacattttacaatctgacatctggagtatattgaacataggctatttcttgatataacactcatttaattgtgg

SEQ ID NO: 389914 - DNA, 120 bp, Artificial Sequence
  ENSG00000144744_15 (sequence is synthesized)
ccatccaaatgaatattattgcagaatttatcttgttcataatgatttgtaaatggtgttatagctgaatacctgtgcatgaaaatgggcaatattttcatctgtttacttgtagtgcca

SEQ ID NO: 389915 - DNA, 120 bp, Artificial Sequence
  ENSG00000144744_16 (sequence is synthesized)
tagaggccaatatgcacaatattaactaatgccaagacatggctgtttaaaaaatttaatgttcaaacagttatcactgatgcttttgcactatttattaataaaatcatatattgtgta

SEQ ID NO: 389916 - DNA, 120 bp, Artificial Sequence
  ENSG00000144744_17 (sequence is synthesized)
cccgctcctccccgccctgccgcgcgtgggcacctgggaagaggcggagaacaatatggcggatggcgaggagccaatggctgttgatggtgggtgtggggacactggagactgggaagg

SEQ ID NO: 389917 - DNA, 120 bp, Artificial Sequence
  ENSG00000144744_18 (sequence is synthesized)
aaaaatgacttgagaggataatactaattttattttaaaaaacaaaaactaccattcccattgtaggtaaagttttgtaagaaaattttgggcatcttggtgatagtagttatgtaaaca

SEQ ID NO: 389918 - DNA, 120 bp, Artificial Sequence
  ENSG00000144744_19 (sequence is synthesized)
aatacatgtttttgttttttcgaagaagtctccttccaaaggtttatgtgatttttgggaatatcctcaggttaactgtgctctgaagaaaggaaagaacggtagctcttcctccagttg

SEQ ID NO: 389919 - DNA, 120 bp, Artificial Sequence
  ENSG00000144744_20 (sequence is synthesized)
atgtcagaagagaatactcgctggagtattaggccctagtgagagattggcagggatttgtgagccaaggtttgaatggtgactggagcaataaagttgggaaagagtttgagcttttcc

SEQ ID NO: 389920 - DNA, 120 bp, Artificial Sequence
  ENSG00000144744_21 (sequence is synthesized)
tcctgaaaaatctggtaatatatatacatatatatataaatatttttttcttctttgtgataagtaaaccttacttatctgtcatactagggaatttctcgtgattcttaaccttttctc

SEQ ID NO: 389921 - DNA, 120 bp, Artificial Sequence
  ENSG00000144744_22 (sequence is synthesized)
ttgagcctttgttagataagtttagcatgccaaattccaaacagtaattaaaatggtagaactttggaactttttaaattctaaagctctcagctataaagttattgataaaatttcata

SEQ ID NO: 389922 - DNA, 120 bp, Artificial Sequence
  ENSG00000144744_23 (sequence is synthesized)
cttcagttttcttctctgatctttaacaaacaacttttggtgcttcctctggcaaaacgctcctaacttcaatgaagtaaataacaaaactggcaattcatattttaatgtatagtttca

SEQ ID NO: 389923 - DNA, 120 bp, Artificial Sequence
  ENSG00000144744_24 (sequence is synthesized)
ataaaattgttttgtgaaactaaatttttcttaaaatatgagattgaatattcacaactgattttgtttgaatatttgagtcttaacatttctcatgtaatataagttgaaaatttttgt

SEQ ID NO: 389924 - DNA, 120 bp, Artificial Sequence
  ENSG00000144744_25 (sequence is synthesized)
gagaaaaatctaacttcatgacctcatgtaaaaatttaaaatgctttctgaaacatactccccttttgtagtgctactgtgagaaattaattttgataggagtataggtgtgcttactta

SEQ ID NO: 389925 - DNA, 120 bp, Artificial Sequence
  ENSG00000144744_26 (sequence is synthesized)
aattttgaaatttagttggaatgaacatcttagctttgagtataattaattgcatgttaagaattatgtaagtactaaataatagaggcgtagaattttggactgatagtgtctatctta

SEQ ID NO: 389926 - DNA, 120 bp, Artificial Sequence
  ENSG00000144744_27 (sequence is synthesized)
tatggcggatggcgaggagccggagaagaaaagaaggagaatagaggagctgctggctgagaagttagtgctgccgggaggccggggccctctccggggacccccgcctccccccacccc

SEQ ID NO: 389927 - DNA, 120 bp, Artificial Sequence
  ENSG00000144744_28 (sequence is synthesized)
cgccccgcagccccgggggcctggcgggccgctcccggtatctgcccggtgcgggcgtcggggccaggctgtactgccccagctcctgcaggggccctccggggtgcttgacgtaaaggt

SEQ ID NO: 389928 - DNA, 120 bp, Artificial Sequence
  ENSG00000144744_29 (sequence is synthesized)
tgcttgacgtaaaggtcttgaggaaggacccttgtgcactcctcttcctccatcccaaattgtcagagcagtgaccctgtgaaaaggcaatctaccttaaacacacaggaaaaggacaca

SEQ ID NO: 389929 - DNA, 120 bp, Artificial Sequence
  ENSG00000144744_30 (sequence is synthesized)
tcactcaaggtaagtcagcaaattgtcatgaattatgatgttgggatgacttagggctgggatgctttcaggagaataatcgataagtgagtttagacagtaccatccacttgaagttca

SEQ ID NO: 389930 - DNA, 120 bp, Artificial Sequence
  ENSG00000144744_31 (sequence is synthesized)
gtaaaggtaccatgtaattcatactacttattagctagggggaatttaataaaattattgaatcttacttacttaggctataagtcatccaagtcaaactgtccattttatcttccactg

SEQ ID NO: 389931 - DNA, 120 bp, Artificial Sequence
  ENSG00000144746_0 (sequence is synthesized)
gcaaagccgaccgagacggagccgctgtcaactctccaactcagctcagctgatcggttgccgccgccgccgccgccagattctggaggcgaagaacgcaaagctgagaacatggacgtt

SEQ ID NO: 389932 - DNA, 120 bp, Artificial Sequence
  ENSG00000144746_1 (sequence is synthesized)
aatatcgccccactccgcgcctgggacgatttcttcccgggttccgatcgctttgcccggccggacttcagggacatttccaaatggaacaaccgcgtagtgagcaacctgctctattac

SEQ ID NO: 389933 - DNA, 120 bp, Artificial Sequence
  ENSG00000144746_2 (sequence is synthesized)
cagaccaactacctggtggtggctgccatgatgatttccattgtggggtttctgagtcccttcaacatgatcctgggaggaatcgtggtggtgctggtgttcacagggtttgtgtgggca

SEQ ID NO: 389934 - DNA, 120 bp, Artificial Sequence
  ENSG00000144746_3 (sequence is synthesized)
gcccacaataaagacgtccttcgccggatgaagaagcgctaccccacgacgttcgttatggtggtcatgttggcgagctatttccttatctccatgtttggaggagtcatggtctttgtg

SEQ ID NO: 389935 - DNA, 120 bp, Artificial Sequence
  ENSG00000144746_4 (sequence is synthesized)
tttggcattacttttcctttgctgttgatgtttatccatgcatcgttgagacttcggaacctcaagaacaaactggagaataaaatggaaggaataggtttgaagaggacaccgatgggc

SEQ ID NO: 389936 - DNA, 120 bp, Artificial Sequence
  ENSG00000144746_5 (sequence is synthesized)
attgtcctggatgccctagaacagcaggaagaaggcatcaacagactcactgactatatcagcaaagtgaaggaataaacataacttacctgagctagggttgcagcagaaattgagttg

SEQ ID NO: 389937 - DNA, 120 bp, Artificial Sequence
  ENSG00000144746_6 (sequence is synthesized)
cagcttgcccttgtccagacctatgttctgcttgcgtttttgaaacaggaggtgcacgtaccacccaattatctatggcagcatgcatgtataggccgaactattatcagctctgatgtt

SEQ ID NO: 389938 - DNA, 120 bp, Artificial Sequence
  ENSG00000144746_7 (sequence is synthesized)
tcagagagaagacctcagaaaccgaaagaaaaccaccaccctcctattgtgtctgaagtttcacgtgtgtttatgaaatctaatgggaaatggatcacacgatttctttaagggaattaa

SEQ ID NO: 389939 - DNA, 120 bp, Artificial Sequence
  ENSG00000144746_8 (sequence is synthesized)
tgaaaaggctgttaaagtagatgacatcatgtgttagcctgttcctaatcccctagaattgtaatgtgtgggatataaattagtttttattattctcttaaaaatcaaagatgatctcta

SEQ ID NO: 389940 - DNA, 120 bp, Artificial Sequence
  ENSG00000144746_9 (sequence is synthesized)
tcactttgccacctgtttgatgtgcagtggaaactggttaagccagttgttcatacttcctttacaaatataaagatagctgtttaggatattttgttacatttttgtaaatttttgaaa

SEQ ID NO: 389941 - DNA, 120 bp, Artificial Sequence
  ENSG00000144746_10 (sequence is synthesized)
tgctagtaatgtgttttcaccagcaagtatttgttgcaaacttaatgtcattttccttaagatggttacagctatgtaacctgtattattctggacggacttattaaaatacaaacagac

SEQ ID NO: 389942 - DNA, 120 bp, Artificial Sequence
  ENSG00000144746_11 (sequence is synthesized)
aaaaaataaaacaaaacttgagttctatttaccttgcacattttttgttgttacagtgaaaaaaatggtccaagaaaatgtttgccatttttgcattgtttcgtttttaactggaacatt

SEQ ID NO: 389943 - DNA, 120 bp, Artificial Sequence
  ENSG00000144746_12 (sequence is synthesized)
tagaaagaaggaaatgaatgtgcattttattaattccttaggggcacaaggaggacaataatagctgatcttttgaaatttgaaaaacgtctttagatgaccaagcaaaaagactttaaa

SEQ ID NO: 389944 - DNA, 120 bp, Artificial Sequence
  ENSG00000144746_13 (sequence is synthesized)
aaatggtaatgaaaatggaatgcagctactgcagctaataaaaaattttagatagcaattgttacaaccatatgcctttatagctagacattagaattatgatagcatgagtttatacat

SEQ ID NO: 389945 - DNA, 120 bp, Artificial Sequence
  ENSG00000144746_14 (sequence is synthesized)
tctattatttttcctccctttctcatgtttttataaataggtaataaaaaatgttttgcctgccaattgaatgatttcgtagctgaagtagaaacatttaggtttctgtagcattaaatt

SEQ ID NO: 389946 - DNA, 120 bp, Artificial Sequence
  ENSG00000144746_15 (sequence is synthesized)
gtgaagacaactggagtggtacttactgaagaaactctctgtatgtcctagaataagaagcaatgatgtgctgcttctgatttttcttgcattttaaattctcagccaacctacagccat

SEQ ID NO: 389947 - DNA, 120 bp, Artificial Sequence
  ENSG00000144746_16 (sequence is synthesized)
gatctttagcacagtgatatcaccatgacttcacagacatggtctagaatctgtacccttacccacatatgaagaataaaattgattaaaggtttttttggtgagactttatttaatgca

SEQ ID NO: 389948 - DNA, 120 bp, Artificial Sequence
  ENSG00000144746_17 (sequence is synthesized)
ctggtggtggctgccatgatgatttccattgtgggatagaaccatgtagctgctgaaggaatgagcccatgatttctcagctgaagtaactcctcaccatgtggcctgatcatttggcct

SEQ ID NO: 389949 - DNA, 120 bp, Artificial Sequence
  ENSG00000144746_18 (sequence is synthesized)
atggagatgttgcaggagggtggaattgacagctgccactttatgctttcagttactcaagatggtttctgagtcccttcaacatgatcctgggaggaatcgtggtggtgctggtgttca

SEQ ID NO: 389950 - DNA, 120 bp, Artificial Sequence
  ENSG00000144746_19 (sequence is synthesized)
ccaacgggaattccataacccatttcttatatgtgttggcatgtcagcaaaagtgtcagaattttctaaaacagctttctacttgttatccaactagacccagataacacagaactgagg

SEQ ID NO: 389951 - DNA, 120 bp, Artificial Sequence
  ENSG00000144747_0 (sequence is synthesized)
gtagatttggttgctgtgtacgtggaagaagcaagcgcatgcgcacatgggcccccttcgtctcagctgtgcgggaacggccgagggtaacatcccgggctcgcgggaggctgtcggggt

SEQ ID NO: 389952 - DNA, 120 bp, Artificial Sequence
  ENSG00000144747_1 (sequence is synthesized)
aatggccacacgctgacagaaccagccgagtggaaaaggggagcgaagccgttcctctgcacccttccccaggcctgaggccttcccgcttggtgctgccgccgccactgccggctgagg

SEQ ID NO: 389953 - DNA, 120 bp, Artificial Sequence
  ENSG00000144747_2 (sequence is synthesized)
aggggcgatgagttggttcaacgcctcccagctctccagcttcgctaagcaggccctgtcccaggcccagaagtctattgacagggttctggacatccaggaagaggagccgagcatctg

SEQ ID NO: 389954 - DNA, 120 bp, Artificial Sequence
  ENSG00000144747_3 (sequence is synthesized)
ggccgagaccattccgtatggagagccgggaataagttcccctgtcagtggaggatgggatacttcaacctgggggttgaaatcaaacactgaacctcagagtccaccaatagcctctcc

SEQ ID NO: 389955 - DNA, 120 bp, Artificial Sequence
  ENSG00000144747_4 (sequence is synthesized)
taaagcaatcacaaagccagttcggaggactgtggtcgatgaatctgaaaatttcttcagtgcctttctctcgccaactgatgtccagaccattcagaagagtccagtggtatcaaaacc

SEQ ID NO: 389956 - DNA, 120 bp, Artificial Sequence
  ENSG00000144747_5 (sequence is synthesized)
tccagcaaaatcacaacgaccagaagaagaagtgaaaagcagcttacatgaatccttgcacattggccagtcaagaactcctgaaacaactgaatcacaagtaaaagactcttctttgtg

SEQ ID NO: 389957 - DNA, 120 bp, Artificial Sequence
  ENSG00000144747_6 (sequence is synthesized)
tgtttcaggggaaactctggcagcaggtacttcatcacctaaaactgaaggcaagcacgaagaaactgttaataaagaatcggatatgaaggtgccaactgtaagtttgaaagtatctga

SEQ ID NO: 389958 - DNA, 120 bp, Artificial Sequence
  ENSG00000144747_7 (sequence is synthesized)
aagtgtaattgatgtgaaaacaactatggaaagtatatctaatacgtctacgcagtctctcacagcagaaacaaaggacatagctttggaacctaaggaacaaaaacatgaagacaggca

SEQ ID NO: 389959 - DNA, 120 bp, Artificial Sequence
  ENSG00000144747_8 (sequence is synthesized)
gagcaatacaccttctcctcctgttagtaccttttcatcaggtacttctaccaccagtgatattgaagttttagatcatgaaagtgtaataagtgagagctcagcgagctcgagacaaga

SEQ ID NO: 389960 - DNA, 120 bp, Artificial Sequence
  ENSG00000144747_9 (sequence is synthesized)
gactacagattcaaaatcaagtcttcacttgatgcagacatcttttcagcttctctctgcatctgcttgtcctgaatataatcgtttagatgatttccaaaaactcactgagagttgctg

SEQ ID NO: 389961 - DNA, 120 bp, Artificial Sequence
  ENSG00000144747_10 (sequence is synthesized)
ttcatctgatgcttttgaaagaatagactcatttagtgtacagtcattagatagccggagtgtaagtgaaatcaattcagatgatgaattgtcaggcaagggatatgctttagtgcctat

SEQ ID NO: 389962 - DNA, 120 bp, Artificial Sequence
  ENSG00000144747_11 (sequence is synthesized)
tatagttaattcttcaactccaaagtctaaaacagttgaatctgctgaaggaaaatctgaagaagtaaatgaaacattagttatacccactgaggaagcagaaatggaagaaagtggacg

SEQ ID NO: 389963 - DNA, 120 bp, Artificial Sequence
  ENSG00000144747_12 (sequence is synthesized)
aagtgcaactcctgttaactgtgaacagcctgatatcttggtttcttccacaccaataaatgaaggacagactgtgttagacaaggtggctgagcagtgtgaacctgctgaaagtcagcc

SEQ ID NO: 389964 - DNA, 120 bp, Artificial Sequence
  ENSG00000144747_13 (sequence is synthesized)
agaagcactttctgagaaggaagatgtttgcaagacagttgaatttctgaatgaaaagctggaaaaaagggaggctcagttattatctcttagtaaggaaaaagcacttctagaagaagc

SEQ ID NO: 389965 - DNA, 120 bp, Artificial Sequence
  ENSG00000144747_14 (sequence is synthesized)
ttttgataacctgaaagatgaaatgttcagagtgaaagaagaaagcagtagcatttcttccttgaaagatgagtttactcaaagaattgcagaagcagaaaagaaagttcaactagcctg

SEQ ID NO: 389966 - DNA, 120 bp, Artificial Sequence
  ENSG00000144747_15 (sequence is synthesized)
caaagagagagatgctgctaaaaaggaaatcaaaaacataaaagaagaacttgccactagattaaatagtagtgaaactgcagaccttttgaaagagaaagatgagcagatccgagggtt

SEQ ID NO: 389967 - DNA, 120 bp, Artificial Sequence
  ENSG00000144747_16 (sequence is synthesized)
aatggaagaaggagaaaaactttcaaaacagcagctgcacaattctaacatcatcaagaaattaagagctaaagacaaggagaatgaaaatatggttgcaaagctgaacaaaaaagttaa

SEQ ID NO: 389968 - DNA, 120 bp, Artificial Sequence
  ENSG00000144747_17 (sequence is synthesized)
agagctagaagaggagttgcagcatttgaaacaggtccttgatggcaaagaagaggttgagaaacaacatagagaaaatattaaaaaactaaattccatggtagaacgccaagagaaaga

SEQ ID NO: 389969 - DNA, 120 bp, Artificial Sequence
  ENSG00000144747_18 (sequence is synthesized)
tcttggccgtcttcaggtagacatggatgaacttgaagaaaagaaccgaagtattcaggctgccctggatagtgcatacaaagaacttactgatcttcacaaagccaatgctgcaaagga

SEQ ID NO: 389970 - DNA, 120 bp, Artificial Sequence
  ENSG00000144747_19 (sequence is synthesized)
tagtgaggcacaggaagctgctctgagccgtgaaatgaaagctaaagaagaactttctgcagcattagagaaggcccaagaagaagcccgtcagcagcaagaaacattagccattcaagt

SEQ ID NO: 389971 - DNA, 120 bp, Artificial Sequence
  ENSG00000144747_20 (sequence is synthesized)
gggggaccttaggcttgcattgcagcgtacagaacaagcggctgccagaaaggaggattatttacgccatgagatcggtgaacttcagcagagactccaggaagcagagaatcgaaacca

SEQ ID NO: 389972 - DNA, 120 bp, Artificial Sequence
  ENSG00000144747_21 (sequence is synthesized)
ggaactgagtcaaagtgtttcatcaacaacaagaccattgcttcgacaaatagaaaatttgcaagcaaccctgggatcccagacatcgtcgtgggagaaattagagaagaatctttctga

SEQ ID NO: 389973 - DNA, 120 bp, Artificial Sequence
  ENSG00000144747_22 (sequence is synthesized)
taggcttggtgaatcccagaccttgctggcagcagcagttgagagagaacgtgcagctacagaagaactccttgctaacaaaattcagatgtcttccatggagtcacagaattctctttt

SEQ ID NO: 389974 - DNA, 120 bp, Artificial Sequence
  ENSG00000144747_23 (sequence is synthesized)
aagacaggaaaacagtagatttcaagcccagctagaatcagagaaaaataggctgtgtaaactggaggatgagaacaataggtaccaggttgaattggaaaacctaaaagatgaatatgt

SEQ ID NO: 389975 - DNA, 120 bp, Artificial Sequence
  ENSG00000144747_24 (sequence is synthesized)
aagaacacttgaagagacgaggaaagaaaagacattgttgaatagtcagttagaaatggaaagaatgaaagttgaacaagaaaggaagaaagccatttttactcaagaaacaataaaaga

SEQ ID NO: 389976 - DNA, 120 bp, Artificial Sequence
  ENSG00000144747_25 (sequence is synthesized)
aaaggaacgcaagccattttctgtttctagcactcccaccatgtcacgctcaagttcaataagtggtgttgatatggcaggactacagacatcttttctgtctcaggatgagtctcatga

SEQ ID NO: 389977 - DNA, 120 bp, Artificial Sequence
  ENSG00000144747_26 (sequence is synthesized)
tcactcatttggaccaatgcctatatcagcaaatggaagcaatctttatgatgctgtaaggatgggagcaggatcaagcataattgaaaacctacagtctcagctaaagctaagggaagg

SEQ ID NO: 389978 - DNA, 120 bp, Artificial Sequence
  ENSG00000144747_27 (sequence is synthesized)
ggaaatcactcatttacagctagaaattggcaatctagaaaaaactcgatcaataatggctgaagaactagttaaattaacaaatcaaaatgatgaacttgaagagaaggtgaaggagat

SEQ ID NO: 389979 - DNA, 120 bp, Artificial Sequence
  ENSG00000144747_28 (sequence is synthesized)
gtacaacactattctgcagatgtatggagaaaaagcagaagaggcagaagaacttcgattagatctcgaagatgtaaaaaatatgtacaaaactcaaatagatgaacttttaagacaaag

SEQ ID NO: 389980 - DNA, 120 bp, Artificial Sequence
  ENSG00000144747_29 (sequence is synthesized)
tctcagttaacttgtgaaaattgaattcccatcaaactgaatgtaagcatttaatatctaaacatttaatgtggacttccaataaattcttttatagaattagaaagtgggatttactgt

SEQ ID NO: 389981 - DNA, 120 bp, Artificial Sequence
  ENSG00000144747_30 (sequence is synthesized)
tagaaagtgggatttactgtagagtgtaaaaatttttttaaaattgttttacactatgtagtaatatttacagttaaattattttgtgcaatatttgaactttatttttgaaactattct

SEQ ID NO: 389982 - DNA, 120 bp, Artificial Sequence
  ENSG00000144747_31 (sequence is synthesized)
gcattcattttttttccttgaatagcacagagatttattactttatcctcatataaatatggctagagaagaagaatggtgttcatatatgtattgtagatatacaactagttgtatcta

SEQ ID NO: 389983 - DNA, 120 bp, Artificial Sequence
  ENSG00000144747_32 (sequence is synthesized)
ttgtaagtgtttatatatatattaagaacatttgaagagtaatgttaacatactgaaactttgaaatctttcacatttaaaatttcaacatatcttaattactgctcatgaaaatgtaca

SEQ ID NO: 389984 - DNA, 120 bp, Artificial Sequence
  ENSG00000144747_33 (sequence is synthesized)
tacattaagtgttaaagtaaaaaattattaaatctgtggctattaaattttaaactaatttttttcctttaaaagtaagagtcacactgacactgtctgaaatttaaagagtgaatgatt

SEQ ID NO: 389985 - DNA, 120 bp, Artificial Sequence
  ENSG00000144747_34 (sequence is synthesized)
taaacttaaaaaaaattttgatctgaaaatttatttcacccagctttcacaattaagtctgtataaaatgtggtaccttttggtacctatccagagaaacctgtacatattcaatgttat

SEQ ID NO: 389986 - DNA, 120 bp, Artificial Sequence
  ENSG00000144747_35 (sequence is synthesized)
ctagatgtgattggataatggagaaaatttatttataatgattttgcaatggcatcaataacatttaaatgattttgaagaagtattattttactaccctataaaatgaatcgaaaataa

SEQ ID NO: 389987 - DNA, 120 bp, Artificial Sequence
  ENSG00000144747_36 (sequence is synthesized)
taaagttcttaacataatttactctttaaaaattacctgttcatattttgtaaacccatatttttagcacattaaaaatgaatgtttgatattacagaatattcataacaaaatggaaga

SEQ ID NO: 389988 - DNA, 120 bp, Artificial Sequence
  ENSG00000144747_37 (sequence is synthesized)
attataggaattaacttgaatttggcatttttaattttgtgatttatcattttattttttcttgaaatttcaaacacaaggaaagcatagaatagcttttaaaagtagctatgccttctt

SEQ ID NO: 389989 - DNA, 120 bp, Artificial Sequence
  ENSG00000144747_38 (sequence is synthesized)
ccaaatgttattttattcaaaaaggtaaccaggttgtgttttaaacctgtgaaatattgtgatgcattttattactgaaagttatttaactgcctttacttgcacataaaaactctcatt

SEQ ID NO: 389990 - DNA, 120 bp, Artificial Sequence
  ENSG00000144747_39 (sequence is synthesized)
agaaagactccgtctcaaaaaaaaaaaaacaaactcttatttaatttttagttaaaattaaaacactagtacttcagaatatagatacaagtacaccatcttgaagaatttggagttttt

SEQ ID NO: 389991 - DNA, 120 bp, Artificial Sequence
  ENSG00000144747_40 (sequence is synthesized)
aagtacaccatcttgaagaatttggagtttttcagggcaattcaaatgacctcattttttgttctttttgtattccagacagtgtttctgtcattggatctctgattggtagtgttaata

SEQ ID NO: 389992 - DNA, 120 bp, Artificial Sequence
  ENSG00000144747_41 (sequence is synthesized)
aatattctttcagtgtgagccagattcataaaattaattttcttcattttagtagtaaaaagtagtctaatagctttttgtcagcttgatttttttgtgtgtgtaatattcaagggcaga

SEQ ID NO: 389993 - DNA, 120 bp, Artificial Sequence
  ENSG00000144747_42 (sequence is synthesized)
atgacaggacagataagcaataagaaatgtatagaattagaaaatatagtagttccctcttacccatgggacatacgttccaagacccccagtgaacgtctgaaaccatggatagtatag

SEQ ID NO: 389994 - DNA, 120 bp, Artificial Sequence
  ENSG00000144747_43 (sequence is synthesized)
acacctctatacactgttttttcctatacatatatacctatgataaagttctatttataaatcagggacagcaagagataaacaataactgcaaatagaacaattataacagtgcactgt

SEQ ID NO: 389995 - DNA, 120 bp, Artificial Sequence
  ENSG00000144747_44 (sequence is synthesized)
aataaaagtgatgtaaatgtgatatgtctgtctctttctctcaaaatatcttattgtactgtactcacctgtaatcagactgtggttgaccgtgagtaaccgaaaccacagaaagcaaaa

SEQ ID NO: 389996 - DNA, 120 bp, Artificial Sequence
  ENSG00000144747_45 (sequence is synthesized)
tcgtggataaggggagactactctatatgaaacttaagttacaaaattctctgaagcatttgaaactagacgttttggaattataaaatagtccctttaaaatatccactagtagaaaaa

SEQ ID NO: 389997 - DNA, 120 bp, Artificial Sequence
  ENSG00000144747_46 (sequence is synthesized)
aacttcatttgcagagaaaagattgcaataaaactcattcctaaacttttcaattttataaaattaaacattctttttttatccgtattaacaatttctagttacatagtttctagttac

SEQ ID NO: 389998 - DNA, 120 bp, Artificial Sequence
  ENSG00000144747_47 (sequence is synthesized)
atattaccatatattactctttatctacaaataaatagctgatactcaaactgatcatattttgattgttaaacacttggatctctcaatacttctgtaagttaaagtgaacttaaacag

SEQ ID NO: 389999 - DNA, 120 bp, Artificial Sequence
  ENSG00000144747_48 (sequence is synthesized)
tttcttgaaaaactccagtaggtggcagaatacctattgaatattcgttgctatactttgctgtttgtcattaaaacatctctacccatattcttgcaaaataatatttatattttaatg

SEQ ID NO: 390000 - DNA, 120 bp, Artificial Sequence
  ENSG00000144747_49 (sequence is synthesized)
gataggaaaatgatttgcaattagatgtttccattcttgaaagaaaaaagctgcaaataacattttcaagaatataaaaaaatgagtaaacaaagggaaggttgtttggtcatttataga

SEQ ID NO: 390001 - DNA, 120 bp, Artificial Sequence
  ENSG00000144747_50 (sequence is synthesized)
caattaagcacagactgtagatgtccttccaattcttgggaggctaaactgagtctaccatttcttacatttcttttacctattttttgagaattgccagttgtacagtgtttagcatgt

SEQ ID NO: 390002 - DNA, 120 bp, Artificial Sequence
  ENSG00000144747_51 (sequence is synthesized)
ggaatgtaccaaatatatctatgttgtgacttaagatattctaaatgtggataacttctgacctaggaaacatgaagtttgtagtgaagtaagtgaaaagaatgttcaggaaattttttt

SEQ ID NO: 390003 - DNA, 120 bp, Artificial Sequence
  ENSG00000144747_52 (sequence is synthesized)
tctccatctcttcagttggcatttattgagagttttatttgaatgcttattaaaagtatatgatttataatatttagaaaatagaagaaaaaagaaaactgtagatgttttatcttgttt

SEQ ID NO: 390004 - DNA, 120 bp, Artificial Sequence
  ENSG00000144747_53 (sequence is synthesized)
taatactgtatgtttagtacgtatacatttatgttctagtgtatcaaaatttttcattttcattaaagtgaatccaattttccatattctaggtccattttaaaccatgaaaactttaat

SEQ ID NO: 390005 - DNA, 120 bp, Artificial Sequence
  ENSG00000144747_54 (sequence is synthesized)
cacatattttgtaaagggctgaaagtatgatttaaactacagattgatatattttaattctaaatgaaaggtaatgtaaataagcatggatctgattgaataaagattttaaaatagtaa

SEQ ID NO: 390006 - DNA, 120 bp, Artificial Sequence
  ENSG00000144747_55 (sequence is synthesized)
ggaaaacaaatatgagtttatactttatgcttctaactttgagattgacttatcatggcatgaattactatcacagaaattgtctaactttatttctctctattagacattgttgaatag

SEQ ID NO: 390007 - DNA, 120 bp, Artificial Sequence
  ENSG00000144747_56 (sequence is synthesized)
gaagtaaatgaagttttgaggcctaataaatagcacccttcatttccatctgaattctgagcaaattgagaaacaagatgacatagtggcatgtgaagcccaaaatgtatcacatatatc

SEQ ID NO: 390008 - DNA, 120 bp, Artificial Sequence
  ENSG00000144747_57 (sequence is synthesized)
aaagagaaattagctaaggataacagccaactgaacctgctaattgccagaattaggcatattcggctgatctgtcacaggaaatgctgggctggagcaggcctcccatgttttacaacc

SEQ ID NO: 390009 - DNA, 120 bp, Artificial Sequence
  ENSG00000144747_58 (sequence is synthesized)
tgcctacataagacataagcatctaggagcagagaatccctcctcctttcaagcagctctttcccaacagaataaagggaagtcactgagctgtgaatgcctgttctattcagatttacc

SEQ ID NO: 390010 - DNA, 120 bp, Artificial Sequence
  ENSG00000144747_59 (sequence is synthesized)
tcttagataagttgttccagctaccccgggaaggaggggtaaaggggatgagatgtttgaactgtaacaccctgtacatgggaggaaacaacatgagttgttgatggagcatccttccat

SEQ ID NO: 390011 - DNA, 120 bp, Artificial Sequence
  ENSG00000144747_60 (sequence is synthesized)
cttacctttttggcttttaaaaaactttatgcagtcagaaatattgaaatgttttacaggtttgagcatcccagctctgaaatctgaaatgcccccaaatccaaaactttgagtgctgac

SEQ ID NO: 390012 - DNA, 120 bp, Artificial Sequence
  ENSG00000144747_61 (sequence is synthesized)
tgacatgctgctcaaaggaaaagctcaattgagcattttggatttccagatttgggatgctcaaccagtaagtacataatgcaattattccataatctgaaaaaaaaaaaaaaaaaaaaa

SEQ ID NO: 390013 - DNA, 120 bp, Artificial Sequence
  ENSG00000144747_62 (sequence is synthesized)
ttacagtaaaccttataaacggtatacctctcaggaaagttgggaccgtttttctgccactgtttcctttacttaagaaagagctagctcaaggttatatgttgacatgtctatttcaaa

SEQ ID NO: 390014 - DNA, 120 bp, Artificial Sequence
  ENSG00000144749_0 (sequence is synthesized)
gctctctggccgcggcgtggggacagcgaggcgcactggggcctcccagcgcggggccggccgcgccgtccagcccgaggtctacggctttgcgctccgagcccagaggaagatgcctgc

SEQ ID NO: 390015 - DNA, 120 bp, Artificial Sequence
  ENSG00000144749_1 (sequence is synthesized)
cggcaccgagctcgggctgcggggctgaacgcctgtcttccaggcgcagcggcagcactgccctcggccggtgtcggtagcggcactcggcgtgccccgggcggacgaagagcgcaggct

SEQ ID NO: 390016 - DNA, 120 bp, Artificial Sequence
  ENSG00000144749_2 (sequence is synthesized)
acgaagagcgcaggctgggtacaccttgcccgaatcggcggagttcgcagctagcgcgggcgggccggccggcccggatgggcgcggggtttgcggcccccgccgggtgctccggagcgg

SEQ ID NO: 390017 - DNA, 120 bp, Artificial Sequence
  ENSG00000144749_3 (sequence is synthesized)
tgagtgccggagccgcggccgcagagagaacttggggcgggggccatgccccggtgcggagtctagagccgagcggagcgccccgcgggcccgcccgcgtctgcggccgttcgggtcctc

SEQ ID NO: 390018 - DNA, 120 bp, Artificial Sequence
  ENSG00000144749_4 (sequence is synthesized)
cctcacagtccccgcgcccggagttcgcagcgcgctccagacaagatggcgcggccggtccggggagggctcggggccccgcgccgctcgccttgccttctccttctctggctgcttttg

SEQ ID NO: 390019 - DNA, 120 bp, Artificial Sequence
  ENSG00000144749_5 (sequence is synthesized)
tccttctctggctgcttttgcttcggctggagccggtgaccgccgcggccggcccgcgggcgccctgcgcggccgcctgcacttgcgctggggactcgctggactgcggtgggcgcgggc

SEQ ID NO: 390020 - DNA, 120 bp, Artificial Sequence
  ENSG00000144749_6 (sequence is synthesized)
ctgccctcctggacgcggagcctaaacctgagttacaacaaactctctgagattgaccctgctggttttgaggacttgccgaacctacaggaagtgtacctcaataataatgagttgaca

SEQ ID NO: 390021 - DNA, 120 bp, Artificial Sequence
  ENSG00000144749_7 (sequence is synthesized)
gcggtaccatccctgggcgctgcttcatcacatgtcgtctctctctttctgcagcacaacaagattcgcagcgtggaggggagccagctgaaggcctacctttccttagaagtgttagat

SEQ ID NO: 390022 - DNA, 120 bp, Artificial Sequence
  ENSG00000144749_8 (sequence is synthesized)
ctgagtttgaacaacatcacggaagtgcggaacacctgctttccacacggaccgcctataaaggagctcaacctggcaggcaatcggattggcaccctggagttgggagcatttgatggt

SEQ ID NO: 390023 - DNA, 120 bp, Artificial Sequence
  ENSG00000144749_9 (sequence is synthesized)
ctgtcacggtcgctgctaactcttcgcctgagcaaaaacaggatcacccagcttcctgtaagagcattcaagctacccaggctgacacaactggacctcaatcggaacaggattcggctg

SEQ ID NO: 390024 - DNA, 120 bp, Artificial Sequence
  ENSG00000144749_10 (sequence is synthesized)
atagagggcctcaccttccaggggctcaacagcttggaggtgctgaagcttcagcgaaacaacatcagcaaactgacagatggggccttctggggactgtccaagatgcatgtgctgcac

SEQ ID NO: 390025 - DNA, 120 bp, Artificial Sequence
  ENSG00000144749_11 (sequence is synthesized)
ctggagtacaacagcctggtagaagtgaacagcggctcgctctacggcctcacggccctgcatcagctccacctcagcaacaattccatcgctcgcattcaccgcaagggctggagcttc

SEQ ID NO: 390026 - DNA, 120 bp, Artificial Sequence
  ENSG00000144749_12 (sequence is synthesized)
tgccagaagctgcatgagttggtcctgtccttcaacaacctgacacggctggacgaggagagcctggccgagctgagcagcctgagtgtcctgcgtctcagccacaattccatcagccac

SEQ ID NO: 390027 - DNA, 120 bp, Artificial Sequence
  ENSG00000144749_13 (sequence is synthesized)
attgcggagggtgccttcaagggactcaggagcctgcgagtcttggatctggaccataacgagatttcgggcacaatagaggacacgagcggcgccttctcagggctcgacagcctcagc

SEQ ID NO: 390028 - DNA, 120 bp, Artificial Sequence
  ENSG00000144749_14 (sequence is synthesized)
aagctgactctgtttggaaacaagatcaagtctgtggctaagagagcattctcggggctggaaggcctggagcacctgaaccttggagggaatgcgatcagatctgtccagtttgatgcc

SEQ ID NO: 390029 - DNA, 120 bp, Artificial Sequence
  ENSG00000144749_15 (sequence is synthesized)
tttgtgaagatgaagaatcttaaagagctccatatcagcagcgacagcttcctgtgtgactgccagctgaagtggctgcccccgtggctaattggcaggatgctgcaggcctttgtgaca

SEQ ID NO: 390030 - DNA, 120 bp, Artificial Sequence
  ENSG00000144749_16 (sequence is synthesized)
gccacctgtgcccacccagaatcactgaagggtcagagcattttctctgtgccaccagagagtttcgtgtgcgatgacttcctgaagccacagatcatcacccagccagaaaccaccatg

SEQ ID NO: 390031 - DNA, 120 bp, Artificial Sequence
  ENSG00000144749_17 (sequence is synthesized)
gctatggtgggcaaggacatccggtttacatgctcagcagccagcagcagcagctcccccatgacctttgcctggaagaaagacaatgaagtcctgaccaatgcagacatggagaacttt

SEQ ID NO: 390032 - DNA, 120 bp, Artificial Sequence
  ENSG00000144749_18 (sequence is synthesized)
gtccacgtccacgcgcaggacggggaagtgatggagtacaccaccatcctgcacctccgtcaggtcactttcgggcacgagggccgctaccaatgtgtcatcaccaaccactttggctcc

SEQ ID NO: 390033 - DNA, 120 bp, Artificial Sequence
  ENSG00000144749_19 (sequence is synthesized)
acctattcacataaggccaggctcaccgtgaatgtgttgccatcattcaccaaaacgccccacgacataaccatccggaccaccaccatggcccgcctcgaatgtgctgccacaggtcac

SEQ ID NO: 390034 - DNA, 120 bp, Artificial Sequence
  ENSG00000144749_20 (sequence is synthesized)
ccaaaccctcagattgcctggcagaaggatggaggcacggatttccccgctgcccgtgagcgacgcatgcatgtcatgccggatgacgacgtgtttttcatcactgatgtgaaaatagat

SEQ ID NO: 390035 - DNA, 120 bp, Artificial Sequence
  ENSG00000144749_21 (sequence is synthesized)
ggtatctgtgggagaaacagtggccctccaatgcaaagccacggggaaccctccgccccgcatcacctggttcaagggggaccgcccgctgagcctcactgagcggcaccacttgacccc

SEQ ID NO: 390036 - DNA, 120 bp, Artificial Sequence
  ENSG00000144749_22 (sequence is synthesized)
tgacaaccagctcctggtggttcagaacgtggtggcagaggatgcgggccgatatacctgtgagatgtccaacaccctgggcacggagcgagctcacagccagctgagcgtcctgcccgc

SEQ ID NO: 390037 - DNA, 120 bp, Artificial Sequence
  ENSG00000144749_23 (sequence is synthesized)
agcaggctgcaggaaggatgggaccacggtaggcatcttcaccattgctgtcgtgagcagcatcgtcctgacgtcactggtctgggtgtgcatcatctaccagaccaggaagaagagtga

SEQ ID NO: 390038 - DNA, 120 bp, Artificial Sequence
  ENSG00000144749_24 (sequence is synthesized)
agagtacagtgtcaccaacacagatgaaaccgtcgtgccaccagatgttccaagctacctctcttctcaggggaccctttctgaccgacaagaaaccgtggtcaggaccgagggtggccc

SEQ ID NO: 390039 - DNA, 120 bp, Artificial Sequence
  ENSG00000144749_25 (sequence is synthesized)
tcaggccaatgggcacattgagagcaatggtgtgtgtccaagagatgcaagccactttccagagcccgacactcacagcgttgcctgcaggcagccaaagctctgtgctgggtctgcgta

SEQ ID NO: 390040 - DNA, 120 bp, Artificial Sequence
  ENSG00000144749_26 (sequence is synthesized)
tcacaaagagccgtggaaagcgatggagaaagctgaagggacacctgggccacataagatggaacacggtggccgggtcgtatgcagtgactgcaacaccgaagtggactgttactccag

SEQ ID NO: 390041 - DNA, 120 bp, Artificial Sequence
  ENSG00000144749_27 (sequence is synthesized)
gggacaagccttccacccccagcctgtgtccagagacagcgcacagccaagtgcgccaaatggcccggagccgggtgggagtgaccaagagcattctccacatcaccagtgcagcaggac

SEQ ID NO: 390042 - DNA, 120 bp, Artificial Sequence
  ENSG00000144749_28 (sequence is synthesized)
tgccgctgggtcctgccccgagtgccaagggtcgctctaccccagtaaccacgatagaatgctgacggctgtgaagaaaaagccaatggcatctctagatgggaaaggggattcttcctg

SEQ ID NO: 390043 - DNA, 120 bp, Artificial Sequence
  ENSG00000144749_29 (sequence is synthesized)
gactttagcaaggttgtatcacccggactccacagagctacagcctgcatcttcattaacttcaggcagtccagagcgcgcggaagcccagtacttgcttgtttccaatggccacctccc

SEQ ID NO: 390044 - DNA, 120 bp, Artificial Sequence
  ENSG00000144749_30 (sequence is synthesized)
caaagcatgtgacgccagtcccgagtccacgccactgacaggacagctccccgggaaacagagggtgccactgctgttggcaccaaaaagctaggttttgtctacctcagttcttgtcat

SEQ ID NO: 390045 - DNA, 120 bp, Artificial Sequence
  ENSG00000144749_31 (sequence is synthesized)
accaatctctacgggaaagagaggtaggagaggctgcgaggaagcttgggttcaagcgtcactcatctgtacatagttgtaactcccatgtggagtatcagtcgctcacaggacttggat

SEQ ID NO: 390046 - DNA, 120 bp, Artificial Sequence
  ENSG00000144749_32 (sequence is synthesized)
ctgaagcacagtaaacgcaagaggggatttgtgtacaaaaggcaaaaaaagtatttgatatcattgtacataagagttttcagagatttcatatatatcttttacagaggctattttaat

SEQ ID NO: 390047 - DNA, 120 bp, Artificial Sequence
  ENSG00000144749_33 (sequence is synthesized)
ctttagtgcatggttaacagaaaaaaattatacaattttgacaatattatttttcgtatcaggttgctgtttaattttggagggggtggggaaatagttctggtgccttaacgcatggct

SEQ ID NO: 390048 - DNA, 120 bp, Artificial Sequence
  ENSG00000144749_34 (sequence is synthesized)
ggaatttatagaggctacaaccacatttgttcacaggagtttttggtgcggggtgggaaggatggaaggccttggatttatattgcacttcatagacccctaggctgctgtgcggtggga

SEQ ID NO: 390049 - DNA, 120 bp, Artificial Sequence
  ENSG00000144749_35 (sequence is synthesized)
ctccacatgcgccggaaggagcttcaggtgagcactgctcatgtgtggatgcccctgcaacaggcttccctgtctgtagagccaggggtgcaagtgccatccacacttgcagtgaatggc

SEQ ID NO: 390050 - DNA, 120 bp, Artificial Sequence
  ENSG00000144749_36 (sequence is synthesized)
ttttccttttaggtttaagtcctgtctgtctgtaaggcgtagaatctgtccgtctgtaaggcgtagaatgagggttgttaatccatcacaagcaaaaggtcagaacagttaaacactgcc

SEQ ID NO: 390051 - DNA, 120 bp, Artificial Sequence
  ENSG00000144749_37 (sequence is synthesized)
tttcctcctcctcttattttatgataaaagcaaatgtggccttctcagtatcattcgattgctatttgagacttttaaattaaggtaaaggctgctggtgttggtacctgtggatttttc

SEQ ID NO: 390052 - DNA, 120 bp, Artificial Sequence
  ENSG00000144749_38 (sequence is synthesized)
tatactgatgttttcgttttgccaatataatgagtattacattggccttgggggacagaaaggaggaagttctgacttttcagggctaccttatttctactaaggacccagagcaggcct

SEQ ID NO: 390053 - DNA, 120 bp, Artificial Sequence
  ENSG00000144749_39 (sequence is synthesized)
gtccatgccattccttcgcacagatgaaactgagctgggactggaaaggacagcccttgacctgggttctgggtataatttgcacttttgagactggtagctaaccatcttatgagtgcc

SEQ ID NO: 390054 - DNA, 120 bp, Artificial Sequence
  ENSG00000144749_40 (sequence is synthesized)
aatgtgtcatttagtaaaacttaaatagaaacaaggtccttcaaatgttcctttggccaaaagctgaagggagttactgagaaaatagttaacaattactgtcaggtgtcatcactgttc

SEQ ID NO: 390055 - DNA, 120 bp, Artificial Sequence
  ENSG00000144749_41 (sequence is synthesized)
aaaaggtaagcacatttagaattttgttcttgacagttaactgactaatcttacttccacaaaatatgtgaatttgctgcttctgagaggcaatgtgaaagagggagtattacttttatg

SEQ ID NO: 390056 - DNA, 120 bp, Artificial Sequence
  ENSG00000144749_42 (sequence is synthesized)
tacaaagttatttatttatagaaattttggtacagtgtacattgaaaaccatgtaaaatattgaagtgtctaacaaatggcattgaagtgtctttaataaaggttcatttataaatgtca

SEQ ID NO: 390057 - DNA, 120 bp, Artificial Sequence
  ENSG00000144749_43 (sequence is synthesized)
acatttgatgatcgagaaataccaaagtgggtattttgagcatcagtagactttagtatactgattatggtgttgactgattcgattttaagatatgagcagcatgatttctgaaacctg

SEQ ID NO: 390058 - DNA, 120 bp, Artificial Sequence
  ENSG00000144749_44 (sequence is synthesized)
ctgagtgatttttttcatttgattatttgcagaatatgttcttttgccatagggaatatgtggctgcttagcttactgaagagaggtagcagcaagtacagaaccttctcctgagtggag

SEQ ID NO: 390059 - DNA, 120 bp, Artificial Sequence
  ENSG00000144749_45 (sequence is synthesized)
ccagccaggcccagggtggaaccctcagcgatttgagccccagtcccttcctcatctccccttcacttcctctgcatttggattagcaggggctccaggagtagcagctaggtccctgca

SEQ ID NO: 390060 - DNA, 120 bp, Artificial Sequence
  ENSG00000144749_46 (sequence is synthesized)
gggagccttggcccccaaggtcctgttgggtttggagacagttccaggggtagaaagttcctggggaagggcagctatggcagagtgctcacaggagccattttgagagtgactgtgtgt

SEQ ID NO: 390061 - DNA, 120 bp, Artificial Sequence
  ENSG00000144749_47 (sequence is synthesized)
actatttgaccttcctgctgtgacaagaaaggtcaccgccagcatttcactcttcagtcagagctgccctctctgctggcagcattgattcctgctgcagcttctcacaggagacaagag

SEQ ID NO: 390062 - DNA, 120 bp, Artificial Sequence
  ENSG00000144749_48 (sequence is synthesized)
ttccttttctctccctggcctgtgtctgcaagggctcggggggaaaatttaagaaccaagaaccttgtggaaagttggagagggcaggatgggggcctggtctccaggtgtgatgtctcg

SEQ ID NO: 390063 - DNA, 120 bp, Artificial Sequence
  ENSG00000144749_49 (sequence is synthesized)
cctgggcactgtgacctgctcctggaagctgggaagccattgagtcatcggccatgggatttgcattgttggaggggcctgggctgagttggcctcatccctctgatcctggcgagtggg

SEQ ID NO: 390064 - DNA, 120 bp, Artificial Sequence
  ENSG00000144749_50 (sequence is synthesized)
tcacaagtctgactcagcacccagatgtcctccctggctcagagtcagcgccctgcaggccttgggaggagatgggctccgggctccagacccactggctgggatctggaccataacgag

SEQ ID NO: 390065 - DNA, 120 bp, Artificial Sequence
  ENSG00000144749_51 (sequence is synthesized)
agccggtgaagcgggaggggcgggatcacagcgagcgctccaatggccctcgaggctggccacggtggactccggcagccaatgagcagcaggcggggaggcgtggcggggcgctgttgc

SEQ ID NO: 390066 - DNA, 120 bp, Artificial Sequence
  ENSG00000144749_52 (sequence is synthesized)
attattactgtttactagcagctcggagggaagactggaggagggcaagacagagaggacggctgccgctcgattcccccagcccgtccccagtgacggggagctcagcagagtgcgagt

SEQ ID NO: 390067 - DNA, 120 bp, Artificial Sequence
  ENSG00000144771_0 (sequence is synthesized)
gttttctgcattgaagaaaagcaagggcagggttcagaaagactgaatgtaaagctgggctctgagtctgccatgcccttcgtgtgttgctctgcacattaattaaagggtctacgaggt

SEQ ID NO: 390068 - DNA, 120 bp, Artificial Sequence
  ENSG00000144771_1 (sequence is synthesized)
cagcaaggacgcccaaggagactcagtcatgaaaggtgaactgctcctgttttccagtgtgattgtcctgctccaggtggtatgcagctgcccggacaagtgttactgtcagtcatctac

SEQ ID NO: 390069 - DNA, 120 bp, Artificial Sequence
  ENSG00000144771_2 (sequence is synthesized)
aaattttgtagactgcagccagcagggtctggccgaaatcccttcccatttacctcctcagactcgaacgctgcatttacaagataatcagatacaccatcttcctgcttttgcatttag

SEQ ID NO: 390070 - DNA, 120 bp, Artificial Sequence
  ENSG00000144771_3 (sequence is synthesized)
gtcagtgccatggctcatgaccttaaacttgtccaacaattccctttcaaatctggcccctggagctttccatgggcttcagcacttgcaggttttaaatctaacccagaattcactcct

SEQ ID NO: 390071 - DNA, 120 bp, Artificial Sequence
  ENSG00000144771_4 (sequence is synthesized)
ttccctggaaagcagacttttccattccctccctcagctgagggagcttgatttgtcatcaaacaacataagccaccttcccacatccttgggagagacttgggagaacctaactatact

SEQ ID NO: 390072 - DNA, 120 bp, Artificial Sequence
  ENSG00000144771_5 (sequence is synthesized)
aaatgcaattgccacttgctcggtcttaaactctggctggagaaatttgtctataaagggggactaacagacggcatcatctgtgaatcaccagacacctggaagggaaaggacctcctt

SEQ ID NO: 390073 - DNA, 120 bp, Artificial Sequence
  ENSG00000144771_6 (sequence is synthesized)
aggatccctcatgagctgtaccagccctgccctcttcctgctcctgatccagtgtcctcgcaggctcagtggcccggctctgcccacggtgtggtcctgaggcctcctgagaaccacaac

SEQ ID NO: 390074 - DNA, 120 bp, Artificial Sequence
  ENSG00000144771_7 (sequence is synthesized)
gcgggggagcgagaactcttggagtgcgagctcaaacccaagccaaggccggccaacctgcgtcatgccattgccactgtcatcatcactggcgttgtgtgtgggattgtgtgtctcatg

SEQ ID NO: 390075 - DNA, 120 bp, Artificial Sequence
  ENSG00000144771_8 (sequence is synthesized)
atgttggcagctgccatctatggctgcacctatgcggcaatcacagcccagtaccatgggggacccttggctcaaaccaatgatcctgggaaggtggaagaaaaagagcgatttgacagc

SEQ ID NO: 390076 - DNA, 120 bp, Artificial Sequence
  ENSG00000144771_9 (sequence is synthesized)
tcaccagcctgagagcttttgtctcaaataggattggtcattgcaggccagaagatagtgtctgagtagggctgatgtgtttcctgttagtctgattttgcttttgccaaaagacaaaaa

SEQ ID NO: 390077 - DNA, 86 bp, Artificial Sequence
  ENSG00000144771_10 (sequence is synthesized)
gtctgtaaaaaatatttctggggaggaatttatgttgcgatttttaaaatactataggtaaaataaagatgatacttgtgctctgg

SEQ ID NO: 390078 - DNA, 120 bp, Artificial Sequence
  ENSG00000144771_11 (sequence is synthesized)
aagcctctgaaatgcaccatgtcggtgcccaggctcattctgctctgccttaagtgtccttcgttctctggaccacagccttcccaagaatgaggacctgttcttgctccctgctggacc

SEQ ID NO: 390079 - DNA, 61 bp, Artificial Sequence
  ENSG00000144791_0 (sequence is synthesized)
ctgggctaggcccggacacctgtctgcagcatggataagtatgacgacctgggcctggagg

SEQ ID NO: 390080 - DNA, 120 bp, Artificial Sequence
  ENSG00000144791_1 (sequence is synthesized)
gtctgcagcatggataagtatgacgacctgggcctggaggccagtaaattcatcgaggacctgaacatgtatgaggcctctaaggatgggctcttccgagtggacaagggtgcaggcaac

SEQ ID NO: 390081 - DNA, 120 bp, Artificial Sequence
  ENSG00000144791_2 (sequence is synthesized)
aaccccgagtttgaggaaactcgcagggtgttcgccaccaagatggccaaaatccacctccagcagcagcagcagcagctcctgcaggaggagactctgcccagggggagtagaggccct

SEQ ID NO: 390082 - DNA, 120 bp, Artificial Sequence
  ENSG00000144791_3 (sequence is synthesized)
gtcaatggagggggccgcctgggcccacaggcccgttgggaagttgtgggcagcaagctgactgtggatggtgctgccaagcctcctcttgctgcctcgacaggggcacctggggcagtc

SEQ ID NO: 390083 - DNA, 120 bp, Artificial Sequence
  ENSG00000144791_4 (sequence is synthesized)
accaccctcgctgctgggcagcccccgtacccaccgcaggagcagagatccaggccatacctgcatggcacgaggcatggcagccaggactgtggttccagggagagcctggcgacttct

SEQ ID NO: 390084 - DNA, 120 bp, Artificial Sequence
  ENSG00000144791_5 (sequence is synthesized)
gagatgtctgctttccaccagccaggcccctgtgaggatccttcctgcctcactcatggagactattatgacaacctctccttggcaagcccaaagtggggtgacaaaccaggagtgtcc

SEQ ID NO: 390085 - DNA, 120 bp, Artificial Sequence
  ENSG00000144791_6 (sequence is synthesized)
cccagcatcggcctgagtgtagggagtgggtggcctagctccccggggagtgacccaccactgcccaaaccctgcggggaccatcccctaaatcaccgacagctctccctgagctccagc

SEQ ID NO: 390086 - DNA, 120 bp, Artificial Sequence
  ENSG00000144791_7 (sequence is synthesized)
aggtcttctgagggtagcctcggtggtcagaatagtggcattggtggccgcagcagcgagaagccaacaggcctttggtccactgcctcctcccagcgggtgagccctggcctgccttcc

SEQ ID NO: 390087 - DNA, 120 bp, Artificial Sequence
  ENSG00000144791_8 (sequence is synthesized)
ccaaacttggagaacggagcaccagctgtggggcctgttcagcccaggaccccttctgtgtcagcacccttggccctgagctgccccaggcaaggaggtcttccaagatcaaactcgggg

SEQ ID NO: 390088 - DNA, 120 bp, Artificial Sequence
  ENSG00000144791_9 (sequence is synthesized)
ctggggggtgaggtttcaggtgtgatgtccaaacccaatgtggacccccaaccctggttccaggatgggcccaaatcttacctttccagttctgccccgtcatcctcgccagctggtctg

SEQ ID NO: 390089 - DNA, 120 bp, Artificial Sequence
  ENSG00000144791_10 (sequence is synthesized)
gacggttcacagcagggtgcggtccctgggctggggccgaagcctggctgcacagaccttggcactggtcccaagctcagccccaccagtcttgtccatccagtgatgtccaccctgcct

SEQ ID NO: 390090 - DNA, 120 bp, Artificial Sequence
  ENSG00000144791_11 (sequence is synthesized)
gagttatcttgtaaagagggtcccctgggctggtcttctgatggtagcctgggatctgtgctcctggacagccccagctcccctagggtaaggctgccctgccagcccctcgtcccaggt

SEQ ID NO: 390091 - DNA, 120 bp, Artificial Sequence
  ENSG00000144791_12 (sequence is synthesized)
cctgagctgagaccctctgctgctgagttgaaattagaagccctcacccaacgtctggagcgagagatggatgctcacccgaaggctgattactttggagcctgtgtgaaatgcagcaaa

SEQ ID NO: 390092 - DNA, 120 bp, Artificial Sequence
  ENSG00000144791_13 (sequence is synthesized)
ggggtgtttggggctggccaggcctgtcaggccatggggaacctctaccatgacacatgcttcacctgtgcagcttgcagccggaagctgagaggaaaagccttttattttgtcaacggc

SEQ ID NO: 390093 - DNA, 120 bp, Artificial Sequence
  ENSG00000144791_14 (sequence is synthesized)
aaagtgttttgtgaagaagacttcctgtactctggtttccagcagtcggctgacaggtgttttctttgtggacatctgatcatggacatgatcctgcaagccctggggaagtcctaccac

SEQ ID NO: 390094 - DNA, 120 bp, Artificial Sequence
  ENSG00000144791_15 (sequence is synthesized)
cccggctgtttccgctgtgtcatctgtaatgagtgtttggatggggtgcccttcaccgtggactcagagaacaagatctactgtgtccgagattaccacaaggtgctggcccccaagtgt

SEQ ID NO: 390095 - DNA, 120 bp, Artificial Sequence
  ENSG00000144791_16 (sequence is synthesized)
gcagcctgtgggcttcccatccttccacctgagggctcagatgagaccatccgtgtcgtgtccatggacagagactaccacgtggagtgttaccactgcgaggactgtggtctggagctc

SEQ ID NO: 390096 - DNA, 120 bp, Artificial Sequence
  ENSG00000144791_17 (sequence is synthesized)
aatgatgaagatggccaccgctgttatccgctggaggaccacctgttctgtcactcctgccacgtgaagaggctggagaagagaccctcatctacagcccttcaccagcaccacttctag

SEQ ID NO: 390097 - DNA, 120 bp, Artificial Sequence
  ENSG00000144791_18 (sequence is synthesized)
ccagagccacttgcagacatcacggcaggggatgaggagccggggttgctgctgctgcttccggtggcccctggggtggaagtggggtaggggaagaggaggggcaggagggagagttcc

SEQ ID NO: 390098 - DNA, 120 bp, Artificial Sequence
  ENSG00000144791_19 (sequence is synthesized)
tgtgagcatgtggggggtgcctttcctttaaccagggaggtgaacactacctgcctcctgcgtgtattttccaagtgcttttctctgttgccacattttcctcaggttactcaggaaaat

SEQ ID NO: 390099 - DNA, 120 bp, Artificial Sequence
  ENSG00000144791_20 (sequence is synthesized)
gctccagcatgtgcgagcacatgacctgaggttgcatcatagcaccaaaggaatcctcctgtcccctctgggaacatttcatgcttcagagggagaggtttttattgagcttgtttcaca

SEQ ID NO: 390100 - DNA, 120 bp, Artificial Sequence
  ENSG00000144791_21 (sequence is synthesized)
atatccccttgaagggacagctcagctgccaatacattcaaccctttctcttccttcaggaaaatacctatacccaaatgttccctcccccgacatatatcatggcatgatttaaggctt

SEQ ID NO: 390101 - DNA, 120 bp, Artificial Sequence
  ENSG00000144791_22 (sequence is synthesized)
cttttcacctgagagcttcagttcttctgcagaatggctgcaaatttaattgcattaaggcaagaaggaagctctaatgtgtgctttgtatcctaagataaatttgcttagaaaaccaga

SEQ ID NO: 390102 - DNA, 120 bp, Artificial Sequence
  ENSG00000144791_23 (sequence is synthesized)
gtcaagatttgaaataggtgaggcagggtttcctccttagacactgacagcattctctgtaccccttcaaatccttactctcctaaaggcagctgagtccgcgacagaaatttgccctat

SEQ ID NO: 390103 - DNA, 120 bp, Artificial Sequence
  ENSG00000144791_24 (sequence is synthesized)
gtgagtaaaacatactttgggagaagaacttggtgcaggcaccaggatttttttttttgcccacgtgtttgcgctgtttttctctggagttctcaagagttggtgacttggaaggccgct

SEQ ID NO: 390104 - DNA, 120 bp, Artificial Sequence
  ENSG00000144791_25 (sequence is synthesized)
tctgcaaggcaagtctcaggaacccatgcaggtacatcgcttgcacctgtttttagcttatttaatgacgggcttttgggaagagctgcccgcatactgagagacagcttcttataaaca

SEQ ID NO: 390105 - DNA, 120 bp, Artificial Sequence
  ENSG00000144791_26 (sequence is synthesized)
aggagagtttttgtgtgtgcgagatctctaagccagcgtgggagggagcgcctcaggataagttattatattcatttcgttggtttctctcctgcccaattcttggcacaggcattatgt

SEQ ID NO: 390106 - DNA, 120 bp, Artificial Sequence
  ENSG00000144791_27 (sequence is synthesized)
ttgaagaaaccaggataaggtacactgcttttgtctgtttaatttttttagttgtttcccttcactttcagtcttccacacacaaaaaatacctcacagagcttcaccaaatcacagatt

SEQ ID NO: 390107 - DNA, 120 bp, Artificial Sequence
  ENSG00000144791_28 (sequence is synthesized)
caggaggaatttggctttcacactggactcagataccttcttcagtgtgttggaaatcactggcttcacacaggcccaactccagctggtcagggcagagtgatcgtaactaaaggtcag

SEQ ID NO: 390108 - DNA, 120 bp, Artificial Sequence
  ENSG00000144791_29 (sequence is synthesized)
tggggaatagatccgattcagtgcttttgccttatgcatttcagcatcctggctccccagggtggcaggagctgagggagggccacacactggcaagatttcaagaccactctctgcact

SEQ ID NO: 390109 - DNA, 120 bp, Artificial Sequence
  ENSG00000144791_30 (sequence is synthesized)
gaagaggtaaaatttgcactgcaagtcacatccctgaggccagaggtcagtaccctttggtatttcgattagaagaagctgcaaaagaaaggcagcccattttaccattgccagccaggc

SEQ ID NO: 390110 - DNA, 120 bp, Artificial Sequence
  ENSG00000144791_31 (sequence is synthesized)
cggggacacaggagccggtgtgtgcactctgcctcctcaccttgcacccagagcaagaggactgggtgctgggctgcagaggccggtcagtggagcccctagcacgtgtgaactcaggct

SEQ ID NO: 390111 - DNA, 120 bp, Artificial Sequence
  ENSG00000144791_32 (sequence is synthesized)
tttcattgggcccggctccacttctaggccatgttttgactcatttggtaaccattgcctgtaagcagcacagaattggtgccatggattatcttttccatgttgatggaattcattctg

SEQ ID NO: 390112 - DNA, 120 bp, Artificial Sequence
  ENSG00000144791_33 (sequence is synthesized)
ttggaatcctttggccagatgtcacttcagccagggtgtgcatcatcattggttctttttcacaggctgagcctcctgaaaacccatgaacgctggggctggggaagtgaaccctgaggt

SEQ ID NO: 390113 - DNA, 120 bp, Artificial Sequence
  ENSG00000144791_34 (sequence is synthesized)
ggggaccctctcttcccatcaaatcatccagctcagtgtggggcgtggcaggggggtaaatgaagccagccaatgtgttaacctgtctctgtcaacctaagaatgttggccttactgaca

SEQ ID NO: 390114 - DNA, 120 bp, Artificial Sequence
  ENSG00000144791_35 (sequence is synthesized)
cacctttgctccatgttcaagaccagaagtagctgggatttgtttgcaaattgggtaattagtttaaaaatctgtgattacatttttaaatgaaattttcaaagtggcctagattgaggt

SEQ ID NO: 390115 - DNA, 120 bp, Artificial Sequence
  ENSG00000144791_36 (sequence is synthesized)
gattcagataggtttgcgaatataccattttatattgttgagaaagaacaaaaagggaatttccagatgtcctagaaatcctagcaacagatttctctggttgtcagtttccctggagaa

SEQ ID NO: 390116 - DNA, 120 bp, Artificial Sequence
  ENSG00000144791_37 (sequence is synthesized)
ggcgccagataggaatctccaatcagttgtttttctcttcgcttcaggcccttacacaaaagccatgaagagatgttcacctacccggtattttaaatgttctgtaaattattagccaaa

SEQ ID NO: 390117 - DNA, 120 bp, Artificial Sequence
  ENSG00000144791_38 (sequence is synthesized)
tagaactgtaatggggttgtatttatgggcgcctagaaagaaaacacaaggacttggtaggccaggaagaaaagattttaaaatttagaatgaatagcccttctgggttttctttttgac

SEQ ID NO: 390118 - DNA, 120 bp, Artificial Sequence
  ENSG00000144791_39 (sequence is synthesized)
aattcttggacttgaggtaaaacaaggaggattgtggccggatttcagatcccaaagccagcctccatcttaggcctttgcctcattgtgccttttaggttttcttacccaccgtctcct

SEQ ID NO: 390119 - DNA, 120 bp, Artificial Sequence
  ENSG00000144791_40 (sequence is synthesized)
gttttgtcttttttttcttttctcctacccctatcttgggacattcagaaactgcctgggtggtttgagaagagacaacccagtttgatctgcaatacaaggatccattcgtaatctctc

SEQ ID NO: 390120 - DNA, 120 bp, Artificial Sequence
  ENSG00000144791_41 (sequence is synthesized)
tctcactgatgttattcccccatctgccgtcttggttcatctcaccacagaagggcatttagtcctacccagccatcggctgcgtatgacagcaggatggcacttcccatttctctgtgg

SEQ ID NO: 390121 - DNA, 120 bp, Artificial Sequence
  ENSG00000144791_42 (sequence is synthesized)
ttagtgctcgagtgaaaacctctttcagctgagtcctctgaggttctgctgttgagtcctgggtggctgatggaatgattgaggaggtctggtcaccctcaagcgccgtcatcgccttgt

SEQ ID NO: 390122 - DNA, 120 bp, Artificial Sequence
  ENSG00000144791_43 (sequence is synthesized)
ttccatgggcttctgtcacacaaaatgaagaacagaaatgttaggacttaagagaatgtttggaattcacacctctttgcagtcctttcaaggctgctgctctgtgctgtgtcccatgca

SEQ ID NO: 390123 - DNA, 120 bp, Artificial Sequence
  ENSG00000144791_44 (sequence is synthesized)
tgtgaaagtagagctgtgatggctgctgggacgcttgcaaagatcatgtgtgagaattgagcacaagaccacaaattattactgcttgatgcgcttgttaaaactctatctgccaggaaa

SEQ ID NO: 390124 - DNA, 85 bp, Artificial Sequence
  ENSG00000144791_45 (sequence is synthesized)
gtatgactggctagtttcaccatgttgcccaggatggtctggaactcctgggctcaagtgatctgcccacttccgcctcccaaag

SEQ ID NO: 390125 - DNA, 120 bp, Artificial Sequence
  ENSG00000144791_46 (sequence is synthesized)
ttgggattatggccattagccactgtacctggcacaatttttttttgtaccctcctttatgccaagaatcagtcctaatttctttactatgtgaagtaacttttaaaggtaatagaaaag

SEQ ID NO: 390126 - DNA, 88 bp, Artificial Sequence
  ENSG00000144791_47 (sequence is synthesized)
cctgggcaacagagcgaaacactgtctgtgaaatatattagctatcttttattctgagccaaaacttgacagatgtgggaaatcttca

SEQ ID NO: 390127 - DNA, 120 bp, Artificial Sequence
  ENSG00000144791_48 (sequence is synthesized)
ttattctgagccaaaacttgacagatgtgggaaatcttcatatagtgtatgaaaatttcattgtacagggaaattattttcctctgtgtcttttcttttactataaagtgattcagaatt

SEQ ID NO: 390128 - DNA, 120 bp, Artificial Sequence
  ENSG00000144791_49 (sequence is synthesized)
ttactgttactataaaattatgcaaagtattgtgacaaaactgcatcaatttgttgactattaaagtgctccttgaacattatatttcctgggtcttttctgtgtgtggagtcagcaaac

SEQ ID NO: 390129 - DNA, 120 bp, Artificial Sequence
  ENSG00000144791_50 (sequence is synthesized)
tgttttttgctacctggactttgtcttcttttacagctctggattcttaaaagtaccacataggtagcaaacctgtgaagggtatgagattttaccctacttgcaggctaataaagtgag

SEQ ID NO: 390130 - DNA, 120 bp, Artificial Sequence
  ENSG00000144791_51 (sequence is synthesized)
cacaccacatgggttcatggatcctggcagaagttatgagactcataggtcagagacaaaggacagtttattatagcaatagcagtggccagattatcagcatttacactggttccctga

SEQ ID NO: 390131 - DNA, 120 bp, Artificial Sequence
  ENSG00000144791_52 (sequence is synthesized)
gccccaggccccaagaagagggccaggtgagacctgcacacgcagtgggctgcattacaagaggaacccccatgcttaggggaccctggtatttgataatgggcagtaagcctgcctgac

SEQ ID NO: 390132 - DNA, 120 bp, Artificial Sequence
  ENSG00000144791_53 (sequence is synthesized)
ttttgctccagagacagacactatctctgtcatccaagactgttcactagataaacatccttgaaaatataagtctggaacctggcaattggtgtctattcttaccagatgtataaaaat

SEQ ID NO: 390133 - DNA, 120 bp, Artificial Sequence
  ENSG00000144791_54 (sequence is synthesized)
gtgagaggccttggagaatcatatcccaagaatcagcagtttcttttactggacctttaagattgagacttgtaaggtcctgatgcagtgacttgtaaggtcactttgtctctcttgtga

SEQ ID NO: 390134 - DNA, 120 bp, Artificial Sequence
  ENSG00000144791_55 (sequence is synthesized)
atgttactgttttttctcttctgaggttatgaccaaagaatcctcaaggcgagtgatccttcaggtttgagacagccacatgcaggaagacaggacttgtagagtgttggggccaagtgt

SEQ ID NO: 390135 - DNA, 120 bp, Artificial Sequence
  ENSG00000144791_56 (sequence is synthesized)
gtggttagaatccttggggtggggaaagagtttgttctagactccagtgtagtccttgtggctaccaggtctgacgtgccaaggacacgggaaagctgggagtgaggatactcatagtca

SEQ ID NO: 390136 - DNA, 120 bp, Artificial Sequence
  ENSG00000144791_57 (sequence is synthesized)
tagcaccttacaccagaataaaagttttttttttctttttaagtgatgagagaatggctagtctgattttgccaacatgggctgctatttgcttaagaccttgatggtataaggagtgaa

SEQ ID NO: 390137 - DNA, 120 bp, Artificial Sequence
  ENSG00000144791_58 (sequence is synthesized)
gatgcaatcagggtaaaaggcggtctggagttgtggtgtgctggcaaaccagccctctggggcaaaaaattaaaaagccttgatatggagtgtttgctgatacctatgatgtaaatattc

SEQ ID NO: 390138 - DNA, 120 bp, Artificial Sequence
  ENSG00000144791_59 (sequence is synthesized)
ccgccatggccactttccagctaccagcaaggcatcctggcaccagggattgggaggagatggcatagtcctaagagtcagccttgggcattgggccatgtgggactgggcagtggggta

SEQ ID NO: 390139 - DNA, 120 bp, Artificial Sequence
  ENSG00000144791_60 (sequence is synthesized)
tctggtctggttctaagtgctgtgatgaagcagtagcagctgtaatagctggcatttcccgtgtgctcatcacatagcagatgttattccaaggactgtatgttctttatcatccctcat

SEQ ID NO: 390140 - DNA, 120 bp, Artificial Sequence
  ENSG00000144791_61 (sequence is synthesized)
ttgatagacaagacaactgagacacaaaagggtgaaataaacagtaagtactccatcccaggccatctcatccagagggtgctgtcttgaccactctactactctggttgatgggaggca

SEQ ID NO: 390141 - DNA, 120 bp, Artificial Sequence
  ENSG00000144791_62 (sequence is synthesized)
gtaaattgtccatcagtatacttcttcatcaaagctacatagtcaaaaagccacaggaggctgtgaggagaagctcactgctgctctgttgaagtctgtattggtttcctatggccactc

SEQ ID NO: 390142 - DNA, 120 bp, Artificial Sequence
  ENSG00000144791_63 (sequence is synthesized)
ttaacaaattaccacaacctcagtggcttaaaacaacacaaatatatcattctgtcatcctggacacgagccaaaggttgtcggcagaagcgaattgcttccagaggtgctatagggtgc

SEQ ID NO: 390143 - DNA, 120 bp, Artificial Sequence
  ENSG00000144791_64 (sequence is synthesized)
tgcccattccttgccccttttccgcttctagaggctgcccattttccttggcttgtggctgcatcattctggctgcttctattgtcacacctcctctctgaccctccctgcctccttgta

SEQ ID NO: 390144 - DNA, 120 bp, Artificial Sequence
  ENSG00000144791_65 (sequence is synthesized)
aggacacttgggattacgcccatccagataatctagaataatctcccattttgtgattcttaataacatctgcaaagcctcttttaccttgcagaataagatattcacaggttctggtga

SEQ ID NO: 390145 - DNA, 120 bp, Artificial Sequence
  ENSG00000144791_66 (sequence is synthesized)
ggaggacagggacatctctgaaggggagggaagcaggagatagggtctggaggcatggaattggcttcctaaggccaattcaggctgacttcctagaactaagtcaaaaggaaaacccca

SEQ ID NO: 390146 - DNA, 120 bp, Artificial Sequence
  ENSG00000144791_67 (sequence is synthesized)
aaaaggaccagaggctactccctttgcaacctccccacccccagccccttttctgcatggcaggtgaaaaattgaaagtatcgctaattgatcccctcccacaaccaatcagactggtct

SEQ ID NO: 390147 - DNA, 120 bp, Artificial Sequence
  ENSG00000144791_68 (sequence is synthesized)
acaaccaatcagactggtcttaggccaagtcttcatttgcctaggagtataactttgtaacttcagcctctgattgggcgttttacacaaccagtcagatgtttgtatagggtggtgtaa

SEQ ID NO: 390148 - DNA, 120 bp, Artificial Sequence
  ENSG00000144791_69 (sequence is synthesized)
gtaactttgtaactttgcttcagcctctgattggtcccctcccacaaccaatcaaactgatcatggacctctgcttcatttacatagggtgtacaccaagtaaccaatgggaaacctcta

SEQ ID NO: 390149 - DNA, 120 bp, Artificial Sequence
  ENSG00000144791_70 (sequence is synthesized)
gtatttaaatcccagaaaattctgtaaccgggttcttgagctgcttgggctgctcccaccctgtggagcgtactttcgtttttcaataaatctcttttgttgcttcattctttacttgct

SEQ ID NO: 390150 - DNA, 120 bp, Artificial Sequence
  ENSG00000144791_71 (sequence is synthesized)
ttgtgcgttttgtccatttctttatcaagacgccaagaacctggacaccctccaccggtaacaggaggagcattagtcagcctaccacagactccaacgaacgttttttgagaggaaatg

SEQ ID NO: 390151 - DNA, 120 bp, Artificial Sequence
  ENSG00000144791_72 (sequence is synthesized)
aaagaatattcctaagttattgggtgccttttcttcaggaatccctgaaagtgggggtttgcaattttccctggattgaaaacagaaatgcttcctacacaaacatgattgagaccttgt

SEQ ID NO: 390152 - DNA, 120 bp, Artificial Sequence
  ENSG00000144791_73 (sequence is synthesized)
actctaggtgtaaaaaaacagagtaggtcatactctgtgggttatggtcagagagatctggttagaagttcccaggtaggcgacagccctagatgtgtgacacttctaggagaatctctg

SEQ ID NO: 390153 - DNA, 120 bp, Artificial Sequence
  ENSG00000144791_74 (sequence is synthesized)
gctatgtggatacgtccaggtgtgtaaggcagcctcagggactgccaccacttggtcacatacatgtccctccaactaatcctagctctcaaggacaggtggttctgggccctgtgttgc

SEQ ID NO: 390154 - DNA, 120 bp, Artificial Sequence
  ENSG00000144791_75 (sequence is synthesized)
ccatgagacttggtccacggcaagcctgtgacggagtgaaagtgaggggacacccaatttgaaaactcggcaggaagccagactccatgacatacaaatagatcaaagtgaatcggctcc

SEQ ID NO: 390155 - DNA, 120 bp, Artificial Sequence
  ENSG00000144791_76 (sequence is synthesized)
gttgtttggggaaatacctgaggtttgttgtttcgtgccaagaagattaacaacacggacacacgtgggtgggttaaggagcagaaagtttaacaggcagaaaaaagagaacagctcccc

SEQ ID NO: 390156 - DNA, 120 bp, Artificial Sequence
  ENSG00000144791_77 (sequence is synthesized)
catgcagagggaggaggactccgaatggatctccccattcctggcgggaagcagactgatatatagaggagggggtttgaagaggtggtatttgatttacatagagcccaagggattggt

SEQ ID NO: 390157 - DNA, 120 bp, Artificial Sequence
  ENSG00000144791_78 (sequence is synthesized)
ttgaccaggtgtgccatttacatagccctcgaagaaactggccattccaccttgatcttttattatgcagatagggttttttacttggccagagccttgacacctgcacacatggcaaca

SEQ ID NO: 390158 - DNA, 120 bp, Artificial Sequence
  ENSG00000144791_79 (sequence is synthesized)
aacagaagggaggcgaaatcttccatattggatgcacctgtcttccaggtgcagctgccggcatttatctgtgcaagcttctagcttgcttatttatgcttgcagcttgacttttcaggc

SEQ ID NO: 390159 - DNA, 120 bp, Artificial Sequence
  ENSG00000144791_80 (sequence is synthesized)
tgctttctgttggaaaagaaatggttttgggggctgctttttattaaaagaaaagccttaccaaggactcctgtaccctatctgcctaaattttttttaactactatattaaaaggtctg

SEQ ID NO: 390160 - DNA, 120 bp, Artificial Sequence
  ENSG00000144791_81 (sequence is synthesized)
taagtgggagctggccctaaaagtaggttgtagagattatttggatgtgccaacaagcttcatctgcagcttggactgtctccattggaaggcctctggcagattttgtaaaaagttata

SEQ ID NO: 390161 - DNA, 120 bp, Artificial Sequence
  ENSG00000144791_82 (sequence is synthesized)
taacaattttactataggaaaaacttggctacagatatgaatttatattacccatcattggctggttccttatcctgaacattggtttccttggaatctgattttggcttgtttggcctt

SEQ ID NO: 390162 - DNA, 120 bp, Artificial Sequence
  ENSG00000144791_83 (sequence is synthesized)
taaaaaccccagaagaatggggtttctgccagattattttctggttttcagtctcactgaatgtcacaaaggccttggtttatggttcccaactggtaaagaaacgtcaaactttgcctc

SEQ ID NO: 390163 - DNA, 120 bp, Artificial Sequence
  ENSG00000144791_84 (sequence is synthesized)
tcttagttccttctacatgacaatgggtggcagttgctcatatggaagcatttcttttccccctaaagcctatgagacaggctgcaacttaaacccctattttattaaaggagaggaaat

SEQ ID NO: 390164 - DNA, 120 bp, Artificial Sequence
  ENSG00000144791_85 (sequence is synthesized)
gtccaagagcccagagatagtgggtaaaagcatcataaggactagaaatggggtcttcttgttgctaattagtaggggtgaggggtaagtggcagatgtgactgccgtccatgcccagac

SEQ ID NO: 390165 - DNA, 120 bp, Artificial Sequence
  ENSG00000144791_86 (sequence is synthesized)
agggaattgtccttgaacctactcatgcggtgtcttctggggtacagtgagtccacagggcaggacggccttggagtcaagagcccagactcacattctatctcaggcttcataactcaa

SEQ ID NO: 390166 - DNA, 120 bp, Artificial Sequence
  ENSG00000144791_87 (sequence is synthesized)
aggcttcataactcaattgctccatgaccttaagccaatttagttccctcatctgtaaaaatggggataacaactgaatttacctcatgggattgtgtaatgcccaaccttgtttttact

SEQ ID NO: 390167 - DNA, 69 bp, Artificial Sequence
  ENSG00000144791_88 (sequence is synthesized)
ttcccaggaattcgtctgattgataacgcccaaagccccgggtctatcaccttgtaatagtcttaaagc

SEQ ID NO: 390168 - DNA, 79 bp, Artificial Sequence
  ENSG00000144791_89 (sequence is synthesized)
ttcctcagggctgagaaaattttgagtgttagccgtctctcggtcgctggctaataaaggactcttaattcgtcttaaa

SEQ ID NO: 390169 - DNA, 120 bp, Artificial Sequence
  ENSG00000144791_90 (sequence is synthesized)
gtagacatccaagagaaaagcatcctgcgttgactggggcaagaggcagtcaacaagattctggcaagggtcagccctctagagcttctgtaggaaatggaatgaaggctggttcttggg

SEQ ID NO: 390170 - DNA, 120 bp, Artificial Sequence
  ENSG00000144791_91 (sequence is synthesized)
gatgtggacagggaacaggcagcctctccgccctccagtgccctgaggagcagcctccagaggaagaggagttgccagtctccctggcctgccaggaaaagatataacagagtgctgaaa

SEQ ID NO: 390171 - DNA, 120 bp, Artificial Sequence
  ENSG00000144791_92 (sequence is synthesized)
agtttgagtcccctgacgcctatcttcccagctgaagtcgaacaaggcaacgctccgccttcttgtttcaggccaggcgcggtggctcatgcctgtcatcccggcactttgggaggctga

SEQ ID NO: 390172 - DNA, 120 bp, Artificial Sequence
  ENSG00000144791_93 (sequence is synthesized)
gcagcggaggacccagcgcctggaacgtacctgcgcctcagccgccgcgcgtttgctccggcccgactcgcggcctcggcgccctcccggccgattcagcttcacccggcccagtcggct

SEQ ID NO: 390173 - DNA, 120 bp, Artificial Sequence
  ENSG00000144791_94 (sequence is synthesized)
gctgccttgctgtgagtttccgtgtttggttgcctaaggaggatgtgattttacttttttgctgttttctttttccttttataatttgaagaggagaaaagaactccgctgagcaggccc

SEQ ID NO: 390174 - DNA, 120 bp, Artificial Sequence
  ENSG00000144791_95 (sequence is synthesized)
gggacggcgaagtgccaccagctaccccaacaaggacgtctccaggggaaagggagttggaagcaaacttggtccagctggcgttgaggtctcaacttcggctggactcttaaatcctgg

SEQ ID NO: 390175 - DNA, 120 bp, Artificial Sequence
  ENSG00000144791_96 (sequence is synthesized)
ttctaagacatgaatatctccctgggctcatttacaagatccatgtcctgtccttacagcttttaaggtatccttttaaaaatctcaactctggcctggtgcagtggctcacgcctgtaa

SEQ ID NO: 390176 - DNA, 90 bp, Artificial Sequence
  ENSG00000144791_97 (sequence is synthesized)
tcaactctggcccccttttaggaggcccaggcaggaaaattgcttgaggcctggagtttaagaacagcctgggcaacatagcaagacctc

SEQ ID NO: 390177 - DNA, 120 bp, Artificial Sequence
  ENSG00000144791_98 (sequence is synthesized)
ggtggcatgtgcctgtagtcctagctgcttgagcccaagagtttgaggctgcagcgagctatgatggtgctactgcattccagcaggtgacagcaagaccttgtctccaaaaaaaaaaaa

SEQ ID NO: 390178 - DNA, 120 bp, Artificial Sequence
  ENSG00000144792_0 (sequence is synthesized)
agttccttctgcgctttgttcaagatgtgggtctggcgctttcgtgactcaagaccctcttaggaacttcttcactgaactcaaggaggagatcaggcaagatctgtgctgtgcagatcc

SEQ ID NO: 390179 - DNA, 120 bp, Artificial Sequence
  ENSG00000144792_1 (sequence is synthesized)
tttggattgaggctgctgtgcacaggaatatggatggtgaaactgggactgaggaggagttaattccaaagcatcattcctgaaaaatcagaatcatacatactttcaagagaattccac

SEQ ID NO: 390180 - DNA, 120 bp, Artificial Sequence
  ENSG00000144792_2 (sequence is synthesized)
agagacattgcccaggaagtcaaaatttagaaggctcctctgaagggaaagagaagactagagaggacactggtatgttccaagcaggagaaaatgaggagaaagacaagaaatttcaaa

SEQ ID NO: 390181 - DNA, 120 bp, Artificial Sequence
  ENSG00000144792_3 (sequence is synthesized)
cataagacagttaaagacaataaagtactcacagaagggagtgaccaagaatctgaaaaagacaatagtcagtgctgtgaccctgcaacaaatgagagagttcaggctgaaaagagacag

SEQ ID NO: 390182 - DNA, 120 bp, Artificial Sequence
  ENSG00000144792_4 (sequence is synthesized)
tatgtatgtactgagtgtgggaaagcctttagtcagagtgcaaacctcacagtacatgagcgaatccacacgggagagaaaccctataagtgtaaggagtgtggaaaagctttcagtcat

SEQ ID NO: 390183 - DNA, 120 bp, Artificial Sequence
  ENSG00000144792_5 (sequence is synthesized)
agctctaaccttgttgttcatcggagaatccacactggactgaagccctatacatgcagtgaatgtgggaaatctttcagtggaaagtcacatcttattcggcaccagggaatccacagt

SEQ ID NO: 390184 - DNA, 120 bp, Artificial Sequence
  ENSG00000144792_6 (sequence is synthesized)
ggggagaaaacttatgaatgtaaagagtgtgggaaagcctttagtcggagttcgggccttatatcacatcacagagttcacaccggagagaagccctattcttgtattgagtgtgggaaa

SEQ ID NO: 390185 - DNA, 120 bp, Artificial Sequence
  ENSG00000144792_7 (sequence is synthesized)
gcctttagccgtagttcaaaccttactcaacatcagcgaatgcacagaggaaaaaaagtttacaaatgtaaggagtgtgggaaaacatgtggttctaatacaaagattatggaccatcag

SEQ ID NO: 390186 - DNA, 120 bp, Artificial Sequence
  ENSG00000144792_8 (sequence is synthesized)
agaattcacactggagagaagccttatgaatgtgatgagtgtggaaaaactttcatcttaaggaaaactcttaatgaacaccagagacttcatcgtagagagaaaccttacaaatgtaat

SEQ ID NO: 390187 - DNA, 120 bp, Artificial Sequence
  ENSG00000144792_9 (sequence is synthesized)
gagtgtgggaaggcttttacttctaatcgaaaccttgttgatcatcagagagttcacactggagagaaaccctataaatgtaatgaatgtgggaaaaccttcaggcagacttctcaagtt

SEQ ID NO: 390188 - DNA, 120 bp, Artificial Sequence
  ENSG00000144792_10 (sequence is synthesized)
attctacacttgagaacccacactaaggagaaaccctataaatgtagtgagtgtgggaaagcctatcggtatagttcacagcttattcaacaccagaggaaacataatgaggagaaagaa

SEQ ID NO: 390189 - DNA, 120 bp, Artificial Sequence
  ENSG00000144792_11 (sequence is synthesized)
acctcataaataacaaatattgtgggtagtagggctgactgctgcttttctaaaaagtagttctttagtatcaactttaattctacttctaagaatcatactctacttctaagaaaataa

SEQ ID NO: 390190 - DNA, 120 bp, Artificial Sequence
  ENSG00000144792_12 (sequence is synthesized)
ttagaagtagacaaagattaatgaaagggatgttcatgacagcatcatatacgactgaaagaagaaaactagattttcaacattacagggttgaaatgaatgatgagctatccatatgat

SEQ ID NO: 390191 - DNA, 120 bp, Artificial Sequence
  ENSG00000144792_13 (sequence is synthesized)
ggttctgcagccattgcaaacatttttaaagacaatttaatgccatggggaaatgattggataagacggaagataatgacatacaatccaaaatttaaaaaaatatttttgcataggaaa

SEQ ID NO: 390192 - DNA, 120 bp, Artificial Sequence
  ENSG00000144792_14 (sequence is synthesized)
aattgagaaggaagtaaaccaaaatgttaacagtgatcatctctgggcgataggattataggtgatttctattttcttctgtatacttttctatgctttctagattatctacatgagaat

SEQ ID NO: 390193 - DNA, 120 bp, Artificial Sequence
  ENSG00000144792_15 (sequence is synthesized)
atactaattttatatgcaagaaaaaaagcacagtattttttaaatgcaatgaagacgtgcttattttcactcagcagtgttatgaaaggcacgtagtatatagagcccaaagccctggga

SEQ ID NO: 390194 - DNA, 120 bp, Artificial Sequence
  ENSG00000144792_16 (sequence is synthesized)
ttgcaccctgacactggcatttagcagcagtggaaccgcgagcaagtcccttccttttagagcgtgtttcctgttaagtaaaatcataaacaccgatcctttgtcctttttagttttaag

SEQ ID NO: 390195 - DNA, 120 bp, Artificial Sequence
  ENSG00000144792_17 (sequence is synthesized)
acaagctgactttagagttgtcaacaaaatatataataacactgttaggttaaaagaacacagcaaaaattcactgaaccctcctttcccacagttctggaaggatctgcagatgatgga

SEQ ID NO: 390196 - DNA, 120 bp, Artificial Sequence
  ENSG00000144792_18 (sequence is synthesized)
gaactacctaggcttcatcttttcaacatatgtctacacaaccagaaaaaaatgaaattgaaacaactgtagactcaaaaacttcagatacagtcaccagttaatataaaactagtggga

SEQ ID NO: 390197 - DNA, 120 bp, Artificial Sequence
  ENSG00000144792_19 (sequence is synthesized)
gactctgccttcacatggtatatagagtttaaaggctaaaagtacaaactttggggttggagatatccatgttctaaccccagttctaccatgaactagcttgtcagttttggacaagtc

SEQ ID NO: 390198 - DNA, 120 bp, Artificial Sequence
  ENSG00000144792_20 (sequence is synthesized)
acttaactgctctgagcctcagacctgtgtgtaaaaaaggaacaattacctaccttacaaggttgttgtgaggattaagtgagtaatgcatgaaatatatgataagccagacacgtggta

SEQ ID NO: 390199 - DNA, 120 bp, Artificial Sequence
  ENSG00000144792_21 (sequence is synthesized)
aatgataaaatcttaagtataggacattgtagcagtgtttctaaacactttagggagagtgattaaagagaatttttgtgtaaggtagtacttaggatattttcagatgtattgaacaga

SEQ ID NO: 390200 - DNA, 120 bp, Artificial Sequence
  ENSG00000144792_22 (sequence is synthesized)
ataccaagtactagcagcctagaccttaagaacattgattgattgcttaaggggaatctagaggtaagcagtgctatgtttggtttggcaactcagcacttcatcacacttctctcttaa

SEQ ID NO: 390201 - DNA, 120 bp, Artificial Sequence
  ENSG00000144792_23 (sequence is synthesized)
ctccataattttcagcatgttgactttcatttttcataacctcatggtggcaagacagtggccacagctgcatcttgccttcacacaactccttcagattgggaactggaaaaggagctg

SEQ ID NO: 390202 - DNA, 120 bp, Artificial Sequence
  ENSG00000144792_24 (sequence is synthesized)
agcaatcaatacaacagatgttttctatcttcctctgcctttctttatgaccagtcctccttgaaggtcttagcccatcttccaccaatatttaaaacattttaagtgcttagctcaaag

SEQ ID NO: 390203 - DNA, 120 bp, Artificial Sequence
  ENSG00000144792_25 (sequence is synthesized)
tcactctgaaacacttagaatctccctatttttaactcagccattcctctgtgtatacagtgaatccctaagcccactgttatctgtcttatgcacatagtgaattagtgtttggggaat

SEQ ID NO: 390204 - DNA, 120 bp, Artificial Sequence
  ENSG00000144792_26 (sequence is synthesized)
ttttgataatatgttatttagttctccctctattatacaagaaaattgagtgtcattgaggttaggtgactggctagtaagttgtcggagccaggatttgagctcagatctgactttgaa

SEQ ID NO: 390205 - DNA, 120 bp, Artificial Sequence
  ENSG00000144792_27 (sequence is synthesized)
attcatgctttcttcattataccaaagtgcctctgcccaccatggtggttctgtatgtgagtggaagaccagttggcgttttcccaggtagctgcctctatgaaaggtgattgtatctaa

SEQ ID NO: 390206 - DNA, 120 bp, Artificial Sequence
  ENSG00000144792_28 (sequence is synthesized)
caattatttgatatttgaccatggttttatagggaagatgttatcagtgttctgtgaatggggtttatggcctatctctgtacctcataatttagttttaaggtatatatatttctttct

SEQ ID NO: 390207 - DNA, 120 bp, Artificial Sequence
  ENSG00000144792_29 (sequence is synthesized)
tgctgttaccggaaagaaagaagtgaagggtgaaggttgtatatttgtgtgaaaaaaaattactgattttgtcctattttgataggatagtggtttgcacataatttgtgatataatagt

SEQ ID NO: 390208 - DNA, 120 bp, Artificial Sequence
  ENSG00000144792_30 (sequence is synthesized)
cctttgcatggtcattccaagcagggtttggaaggcctggaacagatttgtagcattcatggacaagcctggtctatcattcctgagcagaattgttgatgctttatatattgctgagca

SEQ ID NO: 390209 - DNA, 120 bp, Artificial Sequence
  ENSG00000144792_31 (sequence is synthesized)
gatattctctgaccaaaacattttttcaccaccatgtcatagtgcctaaaactctttatttagataggctttcttttttgtcttagaagactatgatcttcaagagtatatctcaaggaa

SEQ ID NO: 390210 - DNA, 120 bp, Artificial Sequence
  ENSG00000144792_32 (sequence is synthesized)
ggatatgatgccatctcataaccagagaactgaatataggagagcttcatatttcttgccccaggcaggcgaggattatagtctcttgaggaggccatcacccatcttctaggctaatac

SEQ ID NO: 390211 - DNA, 120 bp, Artificial Sequence
  ENSG00000144792_33 (sequence is synthesized)
ctgccttgagctgtaggaataaacacttgacagtgggttcctgcatcctttcagataaacattcagctataatttgaactgatcacccacctttctccgggagtctcccagggttaccaa

SEQ ID NO: 390212 - DNA, 120 bp, Artificial Sequence
  ENSG00000144792_34 (sequence is synthesized)
cttttacctcagtcagagtttaggcatgcagctcttaccatcctttcaagccctttcataataccctctggaaaccaggaactgtctcttttaatgtgctttctttttctttcttttctt

SEQ ID NO: 390213 - DNA, 84 bp, Artificial Sequence
  ENSG00000144792_35 (sequence is synthesized)
tgaatgtgttttcttcacattcttgttccaatggaaaccgggctgttccccaagggcagtgcttattctgcattcctcaattgc

SEQ ID NO: 390214 - DNA, 120 bp, Artificial Sequence
  ENSG00000144792_36 (sequence is synthesized)
gttccccaagggcagtgcttattctgcattcctcaattgctggtttatgtgtctctcaactcatgtacctctctgtactgccatttcttctctcttctccatcagaaacttagctctaat

SEQ ID NO: 390215 - DNA, 120 bp, Artificial Sequence
  ENSG00000144792_37 (sequence is synthesized)
cagtcatggttgcatacacacgtagtcctaggtactcaggaggctgaggggggaggatcacttgagcccaggagttcactgttacagtgagctatgatcacaattctgcactgcagccta

SEQ ID NO: 390216 - DNA, 120 bp, Artificial Sequence
  ENSG00000144792_38 (sequence is synthesized)
ggtcacggagcaagaccctgtctcagaaacaaaacagtacaaaacaaaaaacccacaaaaacccaacccagtgcttttgaaatatatatcactaaactactgtgtattgctcattcttgt

SEQ ID NO: 390217 - DNA, 120 bp, Artificial Sequence
  ENSG00000144792_39 (sequence is synthesized)
tatttggtttcttgtctactcacatttattcacttacagttttagtaccctgaatattcctgaggaatataaagaggcaataattttagccacagacatcctggttatatagaattgctc

SEQ ID NO: 390218 - DNA, 120 bp, Artificial Sequence
  ENSG00000144792_40 (sequence is synthesized)
ctgtgtagaataaaaatatatatgctctttttagttgagaggaaaatacgaaaatctcattttatatagccttgagtagagggcaatacgtaagacaaagaattctgcttagagaggaaa

SEQ ID NO: 390219 - DNA, 120 bp, Artificial Sequence
  ENSG00000144792_41 (sequence is synthesized)
gtgtcgccctggacttagaaatcttttttcatagatggtgcgtcctgtgttaggtattacttggaagaaaattgaagtaaaaaacagctttaagtaactgagtaattaggattaattagt

SEQ ID NO: 390220 - DNA, 120 bp, Artificial Sequence
  ENSG00000144792_42 (sequence is synthesized)
agctgttgaatctaaatcccttaagactaaatttcattgcagctctgtaccctcagcaggacttcctttcttgattgttttttccatttaatataaaatttaaaagatgcccatattgtc

SEQ ID NO: 390221 - DNA, 120 bp, Artificial Sequence
  ENSG00000144792_43 (sequence is synthesized)
agttgtttttagtcgccagactgtctttaatagcctctgatgttataaaactggagtcatgaaattgttttgcaggaagtagtgataattccttcaataaacgtctgctattcttataaa

SEQ ID NO: 390222 - DNA, 120 bp, Artificial Sequence
  ENSG00000144792_44 (sequence is synthesized)
tttggattgaggctgctgtgcacaggaatatgggtatttcctcttattccttactccactgcacctaatcaataaccaagaaccatgtaaccattgcttagagggacttgaacaggcaga

SEQ ID NO: 390223 - DNA, 120 bp, Artificial Sequence
  ENSG00000144792_45 (sequence is synthesized)
aaagcactgaagtgggcagggggcctctggaccttgaggagtagagttttgtttcagatgggaataagggtgatgtagtagaactcaaaattgggtgtcatgggacttggatttgagtcc

SEQ ID NO: 390224 - DNA, 120 bp, Artificial Sequence
  ENSG00000144792_46 (sequence is synthesized)
cagctttcctctaagttccaagttttccttctgtacatttggatataagactggatagactgggaggttccttccagctctgacatactgagagtctctgaatagtgggaccaggtcaat

SEQ ID NO: 390225 - DNA, 120 bp, Artificial Sequence
  ENSG00000144792_47 (sequence is synthesized)
ctcttagggaatttagtccctgggatgactctgttgagacagaattgccaagaatgcaaatacaccattatggtgtttcccagataatatgaagcacaaaaaggacaaacatgtagagga

SEQ ID NO: 390226 - DNA, 120 bp, Artificial Sequence
  ENSG00000144802_0 (sequence is synthesized)
gtactggcccgcgccgtccgcccgccgacagctccctgagccagcccgggaggcagccgcgcgcagcgagccggtggcgcaggtgtcggggtcctcgagcgcccagcctgggagcatgat

SEQ ID NO: 390227 - DNA, 120 bp, Artificial Sequence
  ENSG00000144802_1 (sequence is synthesized)
tgtggacaagctgctggacgacagccgcggcggagaggggctgcgggacgcggcgggcggctgcggcctcatgaccagcccgctcaacctgagctacttctacggcgcgtcgccgcccgc

SEQ ID NO: 390228 - DNA, 120 bp, Artificial Sequence
  ENSG00000144802_2 (sequence is synthesized)
cgccgccccgggcgcctgcgacgccagctgctcggtcttgggcccctcggcgcccggctcgcccggctccgactcctccgacttctcctctgcctcgtcggtgtcctcctgcggcgccgt

SEQ ID NO: 390229 - DNA, 120 bp, Artificial Sequence
  ENSG00000144802_3 (sequence is synthesized)
ggagtcccggtcgagaggcggcgcccgcgccgagcgccagccagttgagccccatatgggggttggcaggcagcagagaggcccctttcaaggtgttcgggtaaagaactcagtgaagga

SEQ ID NO: 390230 - DNA, 120 bp, Artificial Sequence
  ENSG00000144802_4 (sequence is synthesized)
actcctgttgcacatccgaagtcataaacagaaggcttctggccaagctgtggatgattttaagacacaaggtgtgaacatagaacagttcagagaattgaagaacacagtatcatacag

SEQ ID NO: 390231 - DNA, 120 bp, Artificial Sequence
  ENSG00000144802_5 (sequence is synthesized)
tgggaaaaggaaagggcccgattcgttgtctgatggacctgcttgcaaaaggccagctctgttgcattcccaatttttgacaccacctcaaacaccaacgcccggggagagcatggaaga

SEQ ID NO: 390232 - DNA, 120 bp, Artificial Sequence
  ENSG00000144802_6 (sequence is synthesized)
tgttcatctcaatgaacccaaacaggagagcagtgctgatctgcttcagaacattatcaacattaagaatgaatgcagccccgtttccctgaacacagttcaagttagctggctgaaccc

SEQ ID NO: 390233 - DNA, 120 bp, Artificial Sequence
  ENSG00000144802_7 (sequence is synthesized)
cgtggtggtccctcagagctcccccgcagagcagtgtcaggacttccatggagggcaggtcttttctccacctcagaaatgccaaccattccaagtcaggggctcccaacaaatgataga

SEQ ID NO: 390234 - DNA, 120 bp, Artificial Sequence
  ENSG00000144802_8 (sequence is synthesized)
ccaggcttccctgtaccagtattctccacagaaccagcatgtagagcagcagccacactacacccacaaaccaactctggaatacagtccttttcccatacctccccagtcccccgctta

SEQ ID NO: 390235 - DNA, 120 bp, Artificial Sequence
  ENSG00000144802_9 (sequence is synthesized)
tgaaccaaacctctttgatggtccagaatcacagttttgcccaaaccaaagcttagtttcccttcttggtgatcaaagggaatctgagaatattgctaatcccatgcagacttcctccag

SEQ ID NO: 390236 - DNA, 120 bp, Artificial Sequence
  ENSG00000144802_10 (sequence is synthesized)
tgttcagcagcaaaatgatgctcacttgcacagcttcagcatgatgcccagcagcgcctgtgaggccatggtggggcacgagatggcctctgactcttcaaacacttcactgccattctc

SEQ ID NO: 390237 - DNA, 120 bp, Artificial Sequence
  ENSG00000144802_11 (sequence is synthesized)
aaacatgggaaatccaatgaacaccacacagttagggaaatcactttttcagtggcaggtggagcaggaagaaagcaaattggcaaatatttcccaagaccagtttctttcaaaggatgc

SEQ ID NO: 390238 - DNA, 120 bp, Artificial Sequence
  ENSG00000144802_12 (sequence is synthesized)
agatggtgacacgttccttcatattgctgttgcccaagggagaagggcactttcctatgttcttgcaagaaagatgaatgcacttcacatgctggatattaaagagcacaatggacagag

SEQ ID NO: 390239 - DNA, 120 bp, Artificial Sequence
  ENSG00000144802_13 (sequence is synthesized)
tgcctttcaggtggcagtggctgccaatcagcatctcattgtgcaggatctggtgaacatcggggcacaggtgaacaccacagactgctggggaagaacacctctgcatgtgtgtgctga

SEQ ID NO: 390240 - DNA, 120 bp, Artificial Sequence
  ENSG00000144802_14 (sequence is synthesized)
gaagggccactcccaggtgcttcaggcgattcagaagggagcagtgggaagtaatcagtttgtggatcttgaggcaactaactatgatggcctgactccccttcactgtgcagtcatagc

SEQ ID NO: 390241 - DNA, 120 bp, Artificial Sequence
  ENSG00000144802_15 (sequence is synthesized)
ccacaatgctgtggtccatgaactccagagaaatcaacagcctcattcacctgaagttcaggagcttttactgaagaataagagtctggttgataccattaagtgcctaattcaaatggg

SEQ ID NO: 390242 - DNA, 120 bp, Artificial Sequence
  ENSG00000144802_16 (sequence is synthesized)
gcctctttttggagctgcccagttgcctgtcttttgtgaatgcaaaggcttacaatggcaacactgccctccatgttgctgccagcttgcagtatcggttgacacaattagatgctgtcc

SEQ ID NO: 390243 - DNA, 120 bp, Artificial Sequence
  ENSG00000144802_17 (sequence is synthesized)
gcctgttgatgaggaagggagcagacccaagtactcggaacttggagaacgaacagccagtgcatttggttcccgatggccctgtgggagaacagatccgacgtatcctgaagggaaagt

SEQ ID NO: 390244 - DNA, 120 bp, Artificial Sequence
  ENSG00000144802_18 (sequence is synthesized)
ccattcagcagagagctccaccgtattagctccattagcttggagcctggctagcaacactcactgtcagttaggcagtcctgatgtatctgtacatagaccatttgccttatattggca

SEQ ID NO: 390245 - DNA, 120 bp, Artificial Sequence
  ENSG00000144802_19 (sequence is synthesized)
aatgtaagttgtttctatgaaacaaacatatttagttcactattatatagtgggttatattaaaagaaaagaagaaaaatatctaatttctcttggcagatttgcatatttcatacccag

SEQ ID NO: 390246 - DNA, 120 bp, Artificial Sequence
  ENSG00000144802_20 (sequence is synthesized)
gtatctgggatctagacatctgaatttgatctcaatggtaacattgccttcaattaacagtagcttttgagtaggaaaggactttgatttgtggcacaaaacattattaatatagctatt

SEQ ID NO: 390247 - DNA, 120 bp, Artificial Sequence
  ENSG00000144802_21 (sequence is synthesized)
gacagtttcaaagcaggtaaattgtaaatgtttctttaagaaaaagcatgtgaaaggaaaaaggtaaatacagcattgaggcttcatttggccttagtccctgggagttactggcgttgg

SEQ ID NO: 390248 - DNA, 120 bp, Artificial Sequence
  ENSG00000144802_22 (sequence is synthesized)
acaggcttcagtcattggactagatgaaaggtgtccatggttagaatttgatctttgcaaactgtatataattgttatttttgtccttaaaaatattgtacatacttggttgttaacatg

SEQ ID NO: 390249 - DNA, 120 bp, Artificial Sequence
  ENSG00000144802_23 (sequence is synthesized)
gtcatatttgaaatgtataagtccataaaatagaaaagaacaagtgaattgttgctatttaaaaaaattttacaattcttactaaggagtttttattgtgtaatcactaagtctttgtag

SEQ ID NO: 390250 - DNA, 120 bp, Artificial Sequence
  ENSG00000144802_24 (sequence is synthesized)
ataaagcagatggggagttacggagttgttcctttactggctgaaagatatattcgaattgtaaagatgctttttctcatgcattgaaattatacattatttgtagggaattgcatgctt

SEQ ID NO: 390251 - DNA, 84 bp, Artificial Sequence
  ENSG00000144802_25 (sequence is synthesized)
tcagccttgacttgggctcaagtgatcctcctacctgagccttctgagtaactggaactacaggtgtgcactcctcgcctggct

SEQ ID NO: 390252 - DNA, 120 bp, Artificial Sequence
  ENSG00000144802_26 (sequence is synthesized)
tcctacctgagccttctgagtaactggaactacaggtgtgcactcctcgcctggctaattttttattttttgtacaggcaggatcttgccaccttgcccaggctggtcttgaactcctga

SEQ ID NO: 390253 - DNA, 120 bp, Artificial Sequence
  ENSG00000144802_27 (sequence is synthesized)
gattacaggagtgagccaccatgcccggctggcagttgcatggaagagaacacctctttatggcttaccctctagaatttctaatttatgtgttctgttgaaatttttgtttttttacct

SEQ ID NO: 390254 - DNA, 120 bp, Artificial Sequence
  ENSG00000144802_28 (sequence is synthesized)
gttgaaatttttgtttttttacctttattgaaacaacaaaaagtcagtattgaaacatatcttcctgttttctgttgtcaaatgatgataatgtgccatgatgttttatatatatcattc

SEQ ID NO: 390255 - DNA, 120 bp, Artificial Sequence
  ENSG00000144802_29 (sequence is synthesized)
agaaaaagttttattttttaataacattctattaacattattttgcttgccgctggcatgcctgaggaatgtatttggctttgattacacactaagtttttgtaataaatttgactcatt

SEQ ID NO: 390256 - DNA, 120 bp, Artificial Sequence
  ENSG00000144802_30 (sequence is synthesized)
aaaaaccttttttttttaaaaaaaaaaaaaaagaaaatctcattagtgaacttatctttgcagctgagtacttaaattctttttaaaaagataccctttggattgatcacattgtttgac

SEQ ID NO: 390257 - DNA, 120 bp, Artificial Sequence
  ENSG00000144802_31 (sequence is synthesized)
ccagtatgtcttgtagacacgttagttataatcaccttgtatctctaaatatggtgtgatatgaaccagtccattcacattggaaaaactgatggttttaaataaactaattcactaata

SEQ ID NO: 390258 - DNA, 120 bp, Artificial Sequence
  ENSG00000144802_32 (sequence is synthesized)
ctcttgccacgaggtcagacggcgagttcttagagaaaaaggctgcttagctgctgcttatcatgtaacctcaaaaggaaactgatcgtctttctcatgctgtcacgtacttgggttatt

SEQ ID NO: 390259 - DNA, 120 bp, Artificial Sequence
  ENSG00000144802_33 (sequence is synthesized)
atcgctgattacagctggaaacaattgatttgctcttacgtatttgtgtgacttgactcttcaaacacaaaggttaacaggaagatctcgagggccctggctgaacttcaccttttggct

SEQ ID NO: 390260 - DNA, 120 bp, Artificial Sequence
  ENSG00000144802_34 (sequence is synthesized)
cttactgactagtaaaataggtgagagatatagctaaatataactctacagggaggctaccaaatctggaaatgtaggtgaatacataataaatggtttactgataggttatgacatagg

SEQ ID NO: 390261 - DNA, 120 bp, Artificial Sequence
  ENSG00000144802_35 (sequence is synthesized)
atttaaaaatatttatttttctacattttatggccaccctgtataaaaaggtacattgtgacaagaggcatatagacaaattaataggaaatttaagaggaataaaagattccatttagc

SEQ ID NO: 390262 - DNA, 120 bp, Artificial Sequence
  ENSG00000144802_36 (sequence is synthesized)
ttgggattaagcaaggcattttggagaagggagcattcaaagtgagtctctgaagctgaatcagacattcaggagactgggtgaaaagtgtattctgaggcatagtatctggattttttt

SEQ ID NO: 390263 - DNA, 120 bp, Artificial Sequence
  ENSG00000144802_37 (sequence is synthesized)
ttccagagatgccttaactgggctaacagctcgccgcgccggggcaggcagaggggtgcggggcgcgctccttccaggacttgccagtccccaagaaccaggccaaccggttccctccac

SEQ ID NO: 390264 - DNA, 120 bp, Artificial Sequence
  ENSG00000144802_38 (sequence is synthesized)
aagaaccaggccaaccggttccctccactgactcccgcctccctctgcaggcccagccctgcgccgcgcgccctctccccgggcgcccaggcccggcgggggcctagagggcagggatgg

SEQ ID NO: 390265 - DNA, 120 bp, Artificial Sequence
  ENSG00000144802_39 (sequence is synthesized)
ggcgggaagcgggaggctggaagccgcgcgctgtcggggtttcccggtgaagggcaggcaaacaaccggtcggtctgggcggagccgggcgggcggggcgagggcggagggcggagggcg

SEQ ID NO: 390266 - DNA, 120 bp, Artificial Sequence
  ENSG00000144802_40 (sequence is synthesized)
cattgcctcatcctgtacattttactggaaatcggacgcatccggaggaggggctgggaggcggcccgggcaccgccaatggccgggccgggcgccggggaggtcggcgagcgctgcggc

SEQ ID NO: 390267 - DNA, 120 bp, Artificial Sequence
  ENSG00000144802_41 (sequence is synthesized)
atggccttctgtacaccctctcaaagtttttgagctcctttcatgaaatttcccccttcctgatgtctgataattcatttctttgtcttcaggcttacaatggcaacactgccctccatg

SEQ ID NO: 390268 - DNA, 120 bp, Artificial Sequence
  ENSG00000144802_42 (sequence is synthesized)
tatgatggtaagcaactgaaactttattagattcagagccacttagggggaaccataaggtctaagggtgctaagtatactaagaaggaaggtaattaaagctaaaatattctgtaggta

SEQ ID NO: 390269 - DNA, 120 bp, Artificial Sequence
  ENSG00000144802_43 (sequence is synthesized)
cgaaggtaaattcacagaaaaggtttaagatggggtaggggagaaactggttatatagcaaaagaccttgcttccaagtacagattcaaacttctttcttttttttctgaaattaatggt

SEQ ID NO: 390270 - DNA, 120 bp, Artificial Sequence
  ENSG00000144802_44 (sequence is synthesized)
gatgtaggtgtaattttcttcttgtgaatattttagtggaaagctgtagcagaggataagggtttgggaatagcgttaaaggtcatgacttatttctcagtttttatggaatttttcagt

SEQ ID NO: 390271 - DNA, 120 bp, Artificial Sequence
  ENSG00000144810_0 (sequence is synthesized)
agagaagagtgtccagctcctccagaggctgcccgcccgccgctccttccctgcccacctactatgaggagcagctcctcccacctgcccataaaagccaagtgcatgttaccagcagcg

SEQ ID NO: 390272 - DNA, 120 bp, Artificial Sequence
  ENSG00000144810_1 (sequence is synthesized)
gatcacagcccttccccgatcctctccgtgggagccagcgagcctctctccctgatcttacgtgctcaagggagctcacacgttcaccaactcacccttgaagtcatctcaagaacaaaa

SEQ ID NO: 390273 - DNA, 120 bp, Artificial Sequence
  ENSG00000144810_2 (sequence is synthesized)
gacaactgaaagaagctgttgtgaaggcagagcagcatctgctgaagagacagaaaccagccccagaggtgtcacaggaaggcaccagcaaggacattggtctttgatttgattcagcag

SEQ ID NO: 390274 - DNA, 120 bp, Artificial Sequence
  ENSG00000144810_3 (sequence is synthesized)
tcctgtcaagtataaatgtgatggctgtgctgcctggccctctgcagctgctgggagtgctgcttaccatttccctgagttccatcaggctcattcaggctggtgcctactatgggatca

SEQ ID NO: 390275 - DNA, 120 bp, Artificial Sequence
  ENSG00000144810_4 (sequence is synthesized)
agccgctgccacctcaaattcctcctcagatgccaccacaaattccacaataccagcccctgggtcagcaagtacctcacatgcctttggccaaagatggccttgccatgggcaaggaga

SEQ ID NO: 390276 - DNA, 120 bp, Artificial Sequence
  ENSG00000144810_5 (sequence is synthesized)
tgccccacttgcagtatggcaaagagtatccacacctaccccaatatatgaaggaaattcaaccggcgccaagaatgggcaaggaagccgtacccaagaaaggcaaagaaataccattag

SEQ ID NO: 390277 - DNA, 120 bp, Artificial Sequence
  ENSG00000144810_6 (sequence is synthesized)
ccagtttacgaggggaacaaggtccccgtggagagcctggcccaagaggaccacctgggccccctggtttgccaggtcatgggatacctggaattaaaggaaaaccagggccacagggat

SEQ ID NO: 390278 - DNA, 120 bp, Artificial Sequence
  ENSG00000144810_7 (sequence is synthesized)
atccaggagttggaaagccaggtatgcctggaatgccagggaagccaggagccatgggcatgcctggggcaaaaggagaaattggacagaaaggggaaattgggcctatggggatcccag

SEQ ID NO: 390279 - DNA, 120 bp, Artificial Sequence
  ENSG00000144810_8 (sequence is synthesized)
gaccacaaggacctccagggcctcatggacttcctggcattgggaagccaggtgggccagggttaccagggcaaccaggaccaaagggtgatcgaggacccaaaggactaccaggacctc

SEQ ID NO: 390280 - DNA, 120 bp, Artificial Sequence
  ENSG00000144810_9 (sequence is synthesized)
aaggccttcggggtcctaaaggagacaagggcttcgggatgccaggtgcgccaggtgtaaaggggcctccagggatgcacggccctcccggccctgttggactgccaggagtgggcaaac

SEQ ID NO: 390281 - DNA, 120 bp, Artificial Sequence
  ENSG00000144810_10 (sequence is synthesized)
caggagtgacaggcttccctgggccccagggccccctgggaaagccaggggctccaggagaacctgggccacaaggccctattggggtaccgggggttcaaggacctcctgggatacccg

SEQ ID NO: 390282 - DNA, 120 bp, Artificial Sequence
  ENSG00000144810_11 (sequence is synthesized)
gaattggaaagccaggccaggatgggatcccaggccagccaggatttccaggtggcaaaggggagcaaggactgccagggctaccaggacccccaggccttccagggattgggaaaccag

SEQ ID NO: 390283 - DNA, 120 bp, Artificial Sequence
  ENSG00000144810_12 (sequence is synthesized)
gcttcccaggacccaaaggtgaccggggcatgggaggtgttcctggggctcttggaccaagaggggagaaaggaccaataggtgccccaggaatagggggtcctccaggagagccaggcc

SEQ ID NO: 390284 - DNA, 120 bp, Artificial Sequence
  ENSG00000144810_13 (sequence is synthesized)
tgcctggaatcccaggtcctatgggccctccaggtgctattggttttcctggacccaaaggagaaggtgggattgtagggccacaggggccaccaggtcccaagggtgagccagggcttc

SEQ ID NO: 390285 - DNA, 120 bp, Artificial Sequence
  ENSG00000144810_14 (sequence is synthesized)
aaggcttcccaggaaagccaggtttccttggtgaagtagggcctcctggcatgaggggtttgccaggtcccatagggcccaagggggaagctgggcaaaaaggtgtaccaggactccctg

SEQ ID NO: 390286 - DNA, 120 bp, Artificial Sequence
  ENSG00000144810_15 (sequence is synthesized)
gtgttccagggcttctcggacctaagggagagccaggaatcccaggggatcagggtttacagggccccccaggtatcccagggattgggggccctagtggccccattggaccacctggga

SEQ ID NO: 390287 - DNA, 120 bp, Artificial Sequence
  ENSG00000144810_16 (sequence is synthesized)
ttccaggccccaaaggggagccgggcctcccagggccccctgggttccctggtatagggaaacccggagtggcaggacttcatggccccccagggaagcctggtgcccttggtcctcaag

SEQ ID NO: 390288 - DNA, 120 bp, Artificial Sequence
  ENSG00000144810_17 (sequence is synthesized)
gccagcctggccttccaggacccccaggccctccaggacctccaggacccccagctgtgatgccccctacaccaccaccccagggagagtatctgccagatatggggctgggaattgatg

SEQ ID NO: 390289 - DNA, 120 bp, Artificial Sequence
  ENSG00000144810_18 (sequence is synthesized)
gcgtgaaacccccccatgcctacggggctaagaaaggcaagaatggagggccagcctatgagatgcctgcatttaccgccgagctaaccgcacctttcccaccggtgggggccccagtga

SEQ ID NO: 390290 - DNA, 120 bp, Artificial Sequence
  ENSG00000144810_19 (sequence is synthesized)
agtttaacaaactgctgtataacggcagacagaactacaacccgcagacaggcatcttcacctgtgaggtccctggtgtctactactttgcataccacgttcactgcaaggggggcaacg

SEQ ID NO: 390291 - DNA, 120 bp, Artificial Sequence
  ENSG00000144810_20 (sequence is synthesized)
tgtgggttgctctattcaagaacaacgagcccgtgatgtacacgtacgacgagtacaaaaagggcttcctggaccaggcatctgggagtgcagtgctgctgctcaggcccggagaccggg

SEQ ID NO: 390292 - DNA, 120 bp, Artificial Sequence
  ENSG00000144810_21 (sequence is synthesized)
tgttcctccagatgccctcagaacaggctgcaggactgtatgccgggcagtatgtccactcctccttttcaggatatttattgtatcccatgtaaaaacaaaaaaacaaaaaacaaagaa

SEQ ID NO: 390293 - DNA, 120 bp, Artificial Sequence
  ENSG00000144810_22 (sequence is synthesized)
aagaaagagattttatagaagaaaatgacacaccaaaaaatccaaatgaaaaacataattgcttcaaaacacttacacagttggaaagttatatgtaagtgaaaatttggaccattgtgt

SEQ ID NO: 390294 - DNA, 120 bp, Artificial Sequence
  ENSG00000144810_23 (sequence is synthesized)
tagagttatgtatcaagtactgacacttggttgtacccactggaatcatattagctgttttatgttatatgcttccacagtaacctgcttattcagatcagtcaaaatatatcagtatga

SEQ ID NO: 390295 - DNA, 120 bp, Artificial Sequence
  ENSG00000144810_24 (sequence is synthesized)
aagatcatagctaatgaaaggcactcactcatattgtttactttaaaatatttataaatatgccttaaagaaatacaaatgataacaattacataccgtatttacttgcttaatttcctc

SEQ ID NO: 390296 - DNA, 120 bp, Artificial Sequence
  ENSG00000144810_25 (sequence is synthesized)
tgtatttgtgtagatactttgacatggaatatatggtggggagacccgtagtgttaccgccccagtgggagggggccctggggaccctggtaatgctttagtcaaagggatatctctctt

SEQ ID NO: 390297 - DNA, 120 bp, Artificial Sequence
  ENSG00000144810_26 (sequence is synthesized)
gtatcagaggctgtgtcttttagtaacaggagtcctcgtcagaattgcgtgtctgttgtctctaaaagaatgggtgaaccaatcggcctttgtgaatttattcagtgccttctctgtacc

SEQ ID NO: 390298 - DNA, 120 bp, Artificial Sequence
  ENSG00000144810_27 (sequence is synthesized)
aagcactgggtaaggcacttttgtggagcattagacagtaaccctcaaggagctagagaaccggatgggagacatgagcagtaattaactcacttgttccccagagtttctatttgtttt

SEQ ID NO: 390299 - DNA, 120 bp, Artificial Sequence
  ENSG00000144810_28 (sequence is synthesized)
gattttctttttctgtgacttattttcctattttctttcctccatgtaattttcactatggcccaactaatataaacacctggaaattacaaggaaaaaaaattcttcctctaataactt

SEQ ID NO: 390300 - DNA, 120 bp, Artificial Sequence
  ENSG00000144810_29 (sequence is synthesized)
tccaaatttgtggaatatttatttgtaatagcagttatcagttatgcttatatagcattaaaaattctcctcctttgactacacacacaaccacagtgtggttctaatcatggagatatc

SEQ ID NO: 390301 - DNA, 120 bp, Artificial Sequence
  ENSG00000144810_30 (sequence is synthesized)
gagatatcagtaatttttagtaactgaattttgaggacatttctctgtttagcatgtatgcaaactgatatgtaatctgaggttccaaagtcaatttttttcttttttttttgagatgga

SEQ ID NO: 390302 - DNA, 87 bp, Artificial Sequence
  ENSG00000144810_31 (sequence is synthesized)
cagtagcacgatcttggcttgtcctgtctcagcctcccgagtactgggactactgtcttgcgccaccatgcctggctaatttttgta

SEQ ID NO: 390303 - DNA, 120 bp, Artificial Sequence
  ENSG00000144810_32 (sequence is synthesized)
caggcatgagccaccgtgcccggccaaagtcagctttcaaaatccaagccataattggtgaggggggagtttcagaattacatagaaaaattaatatttgaaaaaataattctgaaattt

SEQ ID NO: 390304 - DNA, 120 bp, Artificial Sequence
  ENSG00000144810_33 (sequence is synthesized)
cgaatttaaaaacagatgtgctgcttctgggtgtaggtagtaaaagtataggaaaagaactgtttccttagaagcggactgtggaagggctatgtagaatgtcaaagggcaacaagagcc

SEQ ID NO: 390305 - DNA, 120 bp, Artificial Sequence
  ENSG00000144810_34 (sequence is synthesized)
tgtgtttttaatgtcatcctgtactcggcacaaatcaaaggccaatacaagtctgaaaagcagaaataaatatttttccaggtttttgcttgggcacatactaactgctttgggcattct

SEQ ID NO: 390306 - DNA, 120 bp, Artificial Sequence
  ENSG00000144810_35 (sequence is synthesized)
aatctggtctccaaacaccaaagacccatttcgagcctgctattagcctgctgctgactctatcacttggagcaataatgtggggttatggtggtggaatcttgtatatttttgtcaaaa

SEQ ID NO: 390307 - DNA, 120 bp, Artificial Sequence
  ENSG00000144810_36 (sequence is synthesized)
ataaaaccatgagttaaggggatagatatagatggaaaaatacacaaataaatacggtatgaaaacacatggaaatgtgtctttgtcaaatctgaatcattattaccatcacaaaaattc

SEQ ID NO: 390308 - DNA, 120 bp, Artificial Sequence
  ENSG00000144810_37 (sequence is synthesized)
ttctcttggccaatatctcatttccctatatagtatacaagcaccatttcttctcaatttttaagaagagaaattagtccattaccacaggggttcttgtcactactaattatacaacaa

SEQ ID NO: 390309 - DNA, 120 bp, Artificial Sequence
  ENSG00000144810_38 (sequence is synthesized)
tcttttcccaacaaaaagatgtcctccacaacctttgttttcaaagcagacagcatctatgtggccaaatatactttgggttgttcttgaggatactggttttgggctgatgactatggt

SEQ ID NO: 390310 - DNA, 120 bp, Artificial Sequence
  ENSG00000144810_39 (sequence is synthesized)
gggcagcatggatccattgggctccttctgctaaacagccacattgaaatggtttaaaagcaagtcagatcaggtgatttgtaaaattgtatttatctgtacatgtatgggcttttaatt

SEQ ID NO: 390311 - DNA, 120 bp, Artificial Sequence
  ENSG00000144810_40 (sequence is synthesized)
cccaccaagaaagagagaaattatctttttagttaaaaccaaatttcacttttcaaaatatcttccaacttatttattggttgtcactcaattgcctatatatatatatatatgtgtgtg

SEQ ID NO: 390312 - DNA, 120 bp, Artificial Sequence
  ENSG00000144810_41 (sequence is synthesized)
tgtgtgtgtgtgcgcgtgagcgcacgtgtgtgtatgcgtgcgcatgtgtgtgtatgtgtattatcagacataggtttctaacttttagatagaagaggagcaacatctatgccaaatact

SEQ ID NO: 390313 - DNA, 120 bp, Artificial Sequence
  ENSG00000144810_42 (sequence is synthesized)
gtgcattctacaatggtgctaatctcagacctaaatgatactccatttaatttaaaaaagagttttaaataattatctatgtgcctgtatttcccttttgagtgctgcacaacatgttaa

SEQ ID NO: 390314 - DNA, 120 bp, Artificial Sequence
  ENSG00000144810_43 (sequence is synthesized)
catattagtgtaaaagcagatgaaacaaccacgtgttctaaagtctagggattgtgctataatccctatttagttcaaaattaaccagaattcttccatgtgaaatggaccaaactcata

SEQ ID NO: 390315 - DNA, 120 bp, Artificial Sequence
  ENSG00000144810_44 (sequence is synthesized)
ttattgttatgtaaatacagagttttaatgcagtatgacatcccacaggggaaaagaatgtctgtagtgggtgactgttatcaaatattttatagaatacaatgaacggtgaacagactg

SEQ ID NO: 390316 - DNA, 120 bp, Artificial Sequence
  ENSG00000144810_45 (sequence is synthesized)
gtaacttgtttgagttcccatgacagatttgagacttgtcaatagcaaatcatttttgtatttaaatttttgtactgatttgaaaaacatcattaaatatctttaaaagtatgtttctca

SEQ ID NO: 390317 - DNA, 120 bp, Artificial Sequence
  ENSG00000144810_46 (sequence is synthesized)
gacaactgaaagtttctgcatgatcttagaaatttgccaaacataaacgtgtcaacgtgaagttaagaagtgagactcacccgtccctgcacagtctatactatgccctttcgcaatagg

SEQ ID NO: 390318 - DNA, 120 bp, Artificial Sequence
  ENSG00000144810_47 (sequence is synthesized)
tccagtttcacctatggaatgagaaagttggggaagaagtcatctagcgtcttgctactcaaagtgtggtccatggaccagcagcatcagcatcacctgggatcttcttggaagaaatgt

SEQ ID NO: 390319 - DNA, 120 bp, Artificial Sequence
  ENSG00000144810_48 (sequence is synthesized)
agaaactcaggcctcaccccagaatctgcctttttataagacccccagatgacaaaactgaaacggagaagtcacacagacggtgaattgcagagccaggagaacagccctggcagccgg

SEQ ID NO: 390320 - DNA, 120 bp, Artificial Sequence
  ENSG00000144810_49 (sequence is synthesized)
ctctggaggtcatgctattaacctttacactctacccctcctgaagaaagatgttaaatgcagaggcaaggaaaattggtgcaaatatcattggaatgagatcactaggggttgtcctaa

SEQ ID NO: 390321 - DNA, 120 bp, Artificial Sequence
  ENSG00000144810_50 (sequence is synthesized)
tagggagaagaaacatcatttttcctcattctattgtcattatttcacagaccatgttgcactttgtagaaaataagtcagaaatacttgactgtgtcacattgttcaaaaggagaaagt

SEQ ID NO: 390322 - DNA, 120 bp, Artificial Sequence
  ENSG00000144810_51 (sequence is synthesized)
gacaactgaaagacgtttccatacagttcctcgctcagaacagcttcagctgtctatgggaaggcttcacaagacaaagagctaggacttggccatttacacaaaaccaaaagtgaatta

SEQ ID NO: 390323 - DNA, 120 bp, Artificial Sequence
  ENSG00000144810_52 (sequence is synthesized)
cccagagtgtgctggcagagagacttgaatgtaaggacatgggaaaatctacacaggttgccaatggtttgtgactgtgagaaaagaaaagaaaaattaaagaaaatcttactagcataa

SEQ ID NO: 390324 - DNA, 120 bp, Artificial Sequence
  ENSG00000144810_53 (sequence is synthesized)
ttcacattggacaacatgagcacattccagtcaatccactttatagacatgatctcactggtctccccaacatccctacaaggaaatgagggggaccagtatggctccacccttaggtca

SEQ ID NO: 390325 - DNA, 120 bp, Artificial Sequence
  ENSG00000144810_54 (sequence is synthesized)
aaagcccatccttcactcccacttgtggctgtgagtgggtggaacacatttaaacaggggaacaaattaccatcttccttgcttttgaccctttaacatgcgggtgagcaagtctgcctt

SEQ ID NO: 390326 - DNA, 120 bp, Artificial Sequence
  ENSG00000144810_55 (sequence is synthesized)
ttccctgcttgaggccatacaattcccaaaacaacttgtctgaaatgttgggggctgagtcattggccagtgatagttttcaaacaactgctggtttgtttctcaaccactgcttggcca

SEQ ID NO: 390327 - DNA, 120 bp, Artificial Sequence
  ENSG00000144810_56 (sequence is synthesized)
tgctgacttggacacaatacagcatgtaataaaagtgcctgggatattttcctccttggcccagagaagacttttagaaggaaagacaatggtgaatacggaaggggagatgaatgcact

SEQ ID NO: 390328 - DNA, 120 bp, Artificial Sequence
  ENSG00000144810_57 (sequence is synthesized)
agaaagatatgttgccagcattgtgctcagccgaagagaagctttgagaccaagaaatgtgagcatattgggcatctagaagttctcccagatagtagcgtagatctccatttttctggg

SEQ ID NO: 390329 - DNA, 120 bp, Artificial Sequence
  ENSG00000144810_58 (sequence is synthesized)
ttgtttgttgttgttgtttgttgttgtcattttctgcactatgctgcctctcaagactcccttatgtgtgctataaaaaaaaatccatgacagaatggtctattctccacaaaaatagtt

SEQ ID NO: 390330 - DNA, 120 bp, Artificial Sequence
  ENSG00000144810_59 (sequence is synthesized)
actattgttgttgaggtgttactaatagttactagtagttacaaaaatagttactaatgttgttgaggtgaagtcaatgggaaagatagtagtaaaatagcaaaaatgtattagatagta

SEQ ID NO: 390331 - DNA, 120 bp, Artificial Sequence
  ENSG00000144810_60 (sequence is synthesized)
tttttcacattgggaatataagacaattcattcaaaaaccaactccttaggattcattttattatcttacacttaaaaatatgtttagatttttctttcttgcactagaaattaaattgt

SEQ ID NO: 390332 - DNA, 120 bp, Artificial Sequence
  ENSG00000144810_61 (sequence is synthesized)
ttatggataaagaactcggcaacttctagcagtcatctgagatgagcaccatatgtgcattatttcactaaagctttcagagcttgagaaaaatagcctgaagaataagattgtttcttt

SEQ ID NO: 390333 - DNA, 120 bp, Artificial Sequence
  ENSG00000144810_62 (sequence is synthesized)
ctgagccaaggttgcaatcttccaagtccaagatgtgcttgaaaatactcattaggtaattgtcaaagcctaggaagaccagtttaagaatatgaaataatattactactgacttctctt

SEQ ID NO: 390334 - DNA, 120 bp, Artificial Sequence
  ENSG00000144810_63 (sequence is synthesized)
tttgtgttcaatccagatggaagctggacacatgagaagtgacgtttgtataatagcaaagaaaagaacagagaacaagaaagcaaaacccttcacacctatgttctctttataggatct

SEQ ID NO: 390335 - DNA, 120 bp, Artificial Sequence
  ENSG00000144810_64 (sequence is synthesized)
cattactgtttgctctctataatccccagaaaatagaaaaagtatatctatccaataagttgtggaaagtctccctctgtccttctataatagagtttccagtcattgttagacaactgc

SEQ ID NO: 390336 - DNA, 120 bp, Artificial Sequence
  ENSG00000144810_65 (sequence is synthesized)
atttcattcaccaatagtggcctattgaaatcatcaacaggagaaacagttgttaatatcaaataaagagtcttgcaatggaagtcaaaatactttactctttcactaacttggtgtatg

SEQ ID NO: 390337 - DNA, 120 bp, Artificial Sequence
  ENSG00000144810_66 (sequence is synthesized)
atcttgagcaagtcatttaacctctctaagtttgcttgcctcatctgtcaaacaagagagatgagataaattatctccacaggcattttcagaactattctagtctttttggaaattggt

SEQ ID NO: 390338 - DNA, 120 bp, Artificial Sequence
  ENSG00000144810_67 (sequence is synthesized)
ttatatttgtagaaaaggttcaatctgtttctggcatggcagtgaccaagtcagaatttctatttgggagatgagaaaaacacattaacaagattaattactgtagctgaaagatacata

SEQ ID NO: 390339 - DNA, 120 bp, Artificial Sequence
  ENSG00000144810_68 (sequence is synthesized)
aatatggattggggtgtatttttaataccacaaaaacttccattcctgagttacttcattagcaactgttacttcaaccatctaggttgaggttttccagtaattctaggtcagcaatta

SEQ ID NO: 390340 - DNA, 120 bp, Artificial Sequence
  ENSG00000144810_69 (sequence is synthesized)
cactgccacccagccaccctcatggggcttcattctaagggaagaattagcagtgagctttttttttttttaaaaaaaaaaaaaaaaaagcctctagtaatccaagccctctctttcaac

SEQ ID NO: 390341 - DNA, 120 bp, Artificial Sequence
  ENSG00000144810_70 (sequence is synthesized)
aggtaaggtaactgaggcccagagaggtaaagttgatttcctgaaaccaaacagctaattaggaacagaacccagattttgttattagttttccagtgtgctttattataacgtttcaag

SEQ ID NO: 390342 - DNA, 120 bp, Artificial Sequence
  ENSG00000144810_71 (sequence is synthesized)
gagacggagttgtgaaacagaggccacagaagctgttgtgaaggcagagcagcatctgctgaagagacagaaaccagccccagaggtgtcacaggaaggcaccagcaaggacattggtct

SEQ ID NO: 390343 - DNA, 120 bp, Artificial Sequence
  ENSG00000144815_0 (sequence is synthesized)
gaggagacgtcgccgggtgaggaagcggggggctagcggcctggcgctgcggcgaccgaccggggcgtcaggatccctggcccccggagagcgaagggcgggcgggtcccggagcaagaa

SEQ ID NO: 390344 - DNA, 120 bp, Artificial Sequence
  ENSG00000144815_1 (sequence is synthesized)
gaattgtatagaaatgtaaaaaacatttatgtgtgcttcacatgtggcatgaaaaaaatgaggacctctggtcaaaattgcctgagttcagaatttcatgctggaaggaaagttagacgt

SEQ ID NO: 390345 - DNA, 120 bp, Artificial Sequence
  ENSG00000144815_2 (sequence is synthesized)
aacttctaatttctagttccagtaagcatctcttcttggaaaatttccaaaaaagagtcctgctctgttgcccaggctggagtacattggtgtgatgatcatggttcactgcagcctcga

SEQ ID NO: 390346 - DNA, 120 bp, Artificial Sequence
  ENSG00000144815_3 (sequence is synthesized)
aattctcctacctcagcctcctgagtaactgggactataggatttctttgaagaaaaatgtgcttcttgaatcaactgcagtctctcctctgcataagagctcttaagggtactagcagg

SEQ ID NO: 390347 - DNA, 120 bp, Artificial Sequence
  ENSG00000144815_4 (sequence is synthesized)
taagggtactagcaggatagaagcaaatgaaactgaaagctcatctgcagctcagaaaagcaaagacatggaattttaaagagtgaaggtagcatggtgtcggccatgggtgaacaagac

SEQ ID NO: 390348 - DNA, 120 bp, Artificial Sequence
  ENSG00000144815_5 (sequence is synthesized)
acagccagacaatgtggaccaatttcttcaaactacggcttttctgctgtctgcttgcagtgttgatggtggtggtgctggtcatcaatgttactcaggtagagtacttggaccatgaga

SEQ ID NO: 390349 - DNA, 120 bp, Artificial Sequence
  ENSG00000144815_6 (sequence is synthesized)
ctgtttcagccactttcatcgacagcagtggacagtttgtttcctcccaggtgacaggaattagccgaaatccctactgtggctatgatcagcagaccctgtccagccaggagcgcatgg

SEQ ID NO: 390350 - DNA, 120 bp, Artificial Sequence
  ENSG00000144815_7 (sequence is synthesized)
aggaggactccttgctggctgccttgcaccggcaggttcctgatgtgggcccagtcccctttgtgaagagcactgacccttcttccagctactttgtcatcttgaactctgctgccttct

SEQ ID NO: 390351 - DNA, 120 bp, Artificial Sequence
  ENSG00000144815_8 (sequence is synthesized)
ttaaggtgggaagccagcttgaggtgctggttcatgtgcaggattttcaaagaaagcccaagaagtatggtggagactacctgcaggccagaattcactccctcaagctgcaggctgggg

SEQ ID NO: 390352 - DNA, 120 bp, Artificial Sequence
  ENSG00000144815_9 (sequence is synthesized)
ctgtgggcagggtggtggattaccagaatgggttttacaaggttttctttactttgctatggccaggcaaagttaaagtatccgtatctctggtccaccccagtgaagggatcagagttc

SEQ ID NO: 390353 - DNA, 120 bp, Artificial Sequence
  ENSG00000144815_10 (sequence is synthesized)
ttcagcgcttacaggaagataaaccagacagggtctatttcaagagtctcttccgttcaggaagaatttctgaaactactgagtgcaacgtgtgtcttcctgggaatctgcccctgtgta

SEQ ID NO: 390354 - DNA, 120 bp, Artificial Sequence
  ENSG00000144815_11 (sequence is synthesized)
actttacagacctctacactggggagccctggttctgcttcaaaccaaagaagctcccttgcagcagcagaattacccatttcaaaggtggatacctgaaaggtctcctaaccgctgcag

SEQ ID NO: 390355 - DNA, 120 bp, Artificial Sequence
  ENSG00000144815_12 (sequence is synthesized)
agagtgctttcttccagagtggtgtcaatatcaaaatgccagtcaactccagtggacctgattgggtaactgtgattcccaggagaataaaagaaactaacagtctagaactatctcaag

SEQ ID NO: 390356 - DNA, 120 bp, Artificial Sequence
  ENSG00000144815_13 (sequence is synthesized)
gctcaggaacttttccttctgggtattattataaagaccagtggaggcccagaaagtttaagatgcgtcagtttaatgaccctgacaacattacagagtgcttacaaagaaaagtggtgc

SEQ ID NO: 390357 - DNA, 120 bp, Artificial Sequence
  ENSG00000144815_14 (sequence is synthesized)
atttatttggtgactcaacaatcaggcaatggtttgaataccttactacatttgttccagatttagtggagtttaacttgggtagtcccaagaatgtgggtcccttccttgcagtggacc

SEQ ID NO: 390358 - DNA, 120 bp, Artificial Sequence
  ENSG00000144815_15 (sequence is synthesized)
agaagcacaacatcctgctcaaataccgctgccatggtccacccatccgcttcacgactgtctttagcaatgagctccattatgtggcgaatgagctgaatggcattgtgggagggaaga

SEQ ID NO: 390359 - DNA, 120 bp, Artificial Sequence
  ENSG00000144815_16 (sequence is synthesized)
acacagtggttgccatagctgtatggtctcacttcagcaccttccctttggaagtgtacatccggcggctcaggaacatccgtcgagcagtggttcggctcctcgatcgaagcccaaaga

SEQ ID NO: 390360 - DNA, 120 bp, Artificial Sequence
  ENSG00000144815_17 (sequence is synthesized)
ccgtggtggtcatccggacggccaacgcccaagagctgggacctgaggtgagccttttcaacagcgactggtacaactttcagctggacaccatccttcggaggatgttctcaggggttg

SEQ ID NO: 390361 - DNA, 120 bp, Artificial Sequence
  ENSG00000144815_18 (sequence is synthesized)
gagtatatctcgtcgatgcctgggagatgaccctggcccattatctaccgcacaagctgcatccagatgaagttattgtgaagaaccagctggacatgttcttgtcctttgtgtgcccct

SEQ ID NO: 390362 - DNA, 120 bp, Artificial Sequence
  ENSG00000144815_19 (sequence is synthesized)
tggaaacctagcctgtcttggaagggactggaggaatcatattcaatgaccttctcaattgacctgagttacagaaagtggccccagtgagagatgactgcccttaataagtataaaatt

SEQ ID NO: 390363 - DNA, 120 bp, Artificial Sequence
  ENSG00000144815_20 (sequence is synthesized)
tcaaaaagatctggacttaatatgatgacttataaggagcttagaaaatgcaggttacatttatatctacctataggattttatccaatgttgacttagccatggtagaactcttaactg

SEQ ID NO: 390364 - DNA, 120 bp, Artificial Sequence
  ENSG00000144815_21 (sequence is synthesized)
catctacacactatattgctcttgtaaccaaagatgctaatgagtgtatttgaattagcttctcctaggaggggtgactactttgctaaagagtatgaaaaatgttttgatggaagggac

SEQ ID NO: 390365 - DNA, 120 bp, Artificial Sequence
  ENSG00000144815_22 (sequence is synthesized)
aagtttggttggtagtagagtgtttgtagcttatctggtaaaggaaattgagtgcatctgcatgcatagcacaagtaatccatcttctggcggttaactagagaaagcttatagtcagag

SEQ ID NO: 390366 - DNA, 120 bp, Artificial Sequence
  ENSG00000144815_23 (sequence is synthesized)
gctcttgtgaatgcactgaagactgctgtgtctcaggagtttctcttgatgatctaccttttctgaattacttgaaaaggccaatgtgcttggttcgagttttttagtgaatatttacaa

SEQ ID NO: 390367 - DNA, 120 bp, Artificial Sequence
  ENSG00000144815_24 (sequence is synthesized)
tttcctgcttttatctagaaaagaagcaaaagggaaatatgaaagcagtatatataaaatctgtgctttggaattgatatttgcatttggtgattgttttttatttgattcagctaaatt

SEQ ID NO: 390368 - DNA, 120 bp, Artificial Sequence
  ENSG00000144815_25 (sequence is synthesized)
ttatgtgttgaatacttactctagaataactacttttggaactggaagggggaaatctgtaaatggaaatttatttttatgttctgaaatttgagggtttaggaattgacttttgtgtaa

SEQ ID NO: 390369 - DNA, 120 bp, Artificial Sequence
  ENSG00000144815_26 (sequence is synthesized)
agaatgctacgatattataaagctgtggaagttttttccactagtttcaggtgtttttttttttgttgttgttgttgttattttgaactacttaccaaaattagaagttaaaatctaatt

SEQ ID NO: 390370 - DNA, 120 bp, Artificial Sequence
  ENSG00000144815_27 (sequence is synthesized)
agaaattaataagatactaaaattcatgacagttttttgtttgtttgtttgtttgttttttggtatttcttgatttgggcataaaaggcacacccattctctcatgcttggaagaagctg

SEQ ID NO: 390371 - DNA, 120 bp, Artificial Sequence
  ENSG00000144815_28 (sequence is synthesized)
ctattcctactggctatctaagaagaatggaattattaattttatttgacttattaattttaaacgagtttaatttgggatcatttagtaagtactcttttctttttgagctgtgataga

SEQ ID NO: 390372 - DNA, 120 bp, Artificial Sequence
  ENSG00000144815_29 (sequence is synthesized)
ttatagtctagtttaagttgctcctaagtagacagatgaagaaactagggaggctttagagaggaagacagatgcttgaagtatgaacaatatatacccttagaagaatgggtcaaataa

SEQ ID NO: 390373 - DNA, 120 bp, Artificial Sequence
  ENSG00000144815_30 (sequence is synthesized)
tttgggtttttaatttaaaataggagggccccagatcttactttcctgtccttgaggaacaccttcaagtttttaaagtattttagggggaaagaagatttttaattgtttctgagccta

SEQ ID NO: 390374 - DNA, 120 bp, Artificial Sequence
  ENSG00000144815_31 (sequence is synthesized)
atgaggtaataaaatatattaaaatagtttaattttaatggtccttacgctttacagtacctaaggatcacttgtagtatctgacaaaaatgcagaattaaagagtcatggcagggtgtg

SEQ ID NO: 390375 - DNA, 120 bp, Artificial Sequence
  ENSG00000144815_32 (sequence is synthesized)
ccagctactagggaggctaaggcagggtgattgattgagcccagtagtttgaggctgcagtgagttatgattgcgccactacactcccacttgggcaacagacaagagatcttatctcta

SEQ ID NO: 390376 - DNA, 120 bp, Artificial Sequence
  ENSG00000144815_33 (sequence is synthesized)
aacagacaagagatcttatctctaaaaaatttttgttaaataataaaagaattaaggccagggatgttggctcacatctgtaatcccagcagggattatagtctcgggaggctgaggtgg

SEQ ID NO: 390377 - DNA, 69 bp, Artificial Sequence
  ENSG00000144815_34 (sequence is synthesized)
tgtggtggcaccacctgtagtcccggttgcagaggttgcagtgagccttgattgtgccactgtactcca

SEQ ID NO: 390378 - DNA, 120 bp, Artificial Sequence
  ENSG00000144815_35 (sequence is synthesized)
cagaggttgcagtgagccttgattgtgccactgtactccagtctgggcaacagggcaagaccctgtctctaaaaaaaaaaaaaaaaaaaaaagagggaccatgatgcctctgggatttat

SEQ ID NO: 390379 - DNA, 120 bp, Artificial Sequence
  ENSG00000144815_36 (sequence is synthesized)
gaaaccaacctttgtggcgagtgctcagtgattctgatgcaatggtggtattccacactgtgagaaacactaagagaagaggtaagatagaatgagggaataaacatggcttgtttatta

SEQ ID NO: 390380 - DNA, 120 bp, Artificial Sequence
  ENSG00000144815_37 (sequence is synthesized)
ttttgggggatttaccaataactggtttaattctgttcatgatccaatagtattggtgatattagctccattttatagatgaggaactcatgtttagatctgaaataaggtatgtgagag

SEQ ID NO: 390381 - DNA, 120 bp, Artificial Sequence
  ENSG00000144815_38 (sequence is synthesized)
tttagatctgaaataaggtatgtgagagtccatatctcttttcagctaaacttgtgagactttcgtaaagaagcgtttgtatttatttatttgtttttgagacagggtcttgctcttttg

SEQ ID NO: 390382 - DNA, 120 bp, Artificial Sequence
  ENSG00000144815_39 (sequence is synthesized)
tcttgtcgtgaaagaacttgacatttcctcaaggatttataaaggaggctgaggagtaattttcccaggagaattttaaaaagaaagcgggcattgctcctccagtggtttggaatgatg

SEQ ID NO: 390383 - DNA, 120 bp, Artificial Sequence
  ENSG00000144815_40 (sequence is synthesized)
ccacttgattgtgcaaatgatttcttatgatcttgtctggttttctgttattttttgatttggtgacatagctctcaaagatttggtgacacagcttcttgagtcactttcatctctctt

SEQ ID NO: 390384 - DNA, 120 bp, Artificial Sequence
  ENSG00000144815_41 (sequence is synthesized)
aaaaaaattttttttttaacaacttttaagttcaggggtacatgtgccagtttgtttcataggtaaacttacgtcatgggggtttgttgtatagatgatttcatcacccaggtgttaagc

SEQ ID NO: 390385 - DNA, 80 bp, Artificial Sequence
  ENSG00000144815_42 (sequence is synthesized)
cctctccctcctcctaccctccaccctccaatagaccccagtgtgtgttgttgccctcagtgagaacaactttcatccca

SEQ ID NO: 390386 - DNA, 120 bp, Artificial Sequence
  ENSG00000144815_43 (sequence is synthesized)
cttatcagtgagaacaactttcatcccacatctaatttgtctttcttcactctggtgtggaaattttgatagagattccaatatcacttaaacgtttcccagaatatttagatagaataa

SEQ ID NO: 390387 - DNA, 120 bp, Artificial Sequence
  ENSG00000144815_44 (sequence is synthesized)
tttagtttcttctgaaaagtttattttaggctagtgccacatggttgtgaatattagcatggtagccaaataatagtttgtttaaatgtatatttcccaatataaatataaggggcatca

SEQ ID NO: 390388 - DNA, 120 bp, Artificial Sequence
  ENSG00000144815_45 (sequence is synthesized)
taatttttaaaaactataaaatctagaagaaaaatctatggataaaatccataattctatcatctgaatgcaatgaacattagcatttaggtatattttcttgcaggttttttaaccata

SEQ ID NO: 390389 - DNA, 120 bp, Artificial Sequence
  ENSG00000144815_46 (sequence is synthesized)
tacttatagagaatatgtaatttgggtctgtgttttttacatataaatatttttctatgttaaatagtcttcataagttaattataaagatctgcttaatagttctgctactgcagtttt

SEQ ID NO: 390390 - DNA, 120 bp, Artificial Sequence
  ENSG00000144815_47 (sequence is synthesized)
cattattagataagttggtcattatagttggacatttaggtttacaatattaaagcagtggtttatatcaatttcagtggtttaaaatatgaatttctattttggaatgaaagtattaat

SEQ ID NO: 390391 - DNA, 120 bp, Artificial Sequence
  ENSG00000144815_48 (sequence is synthesized)
ttaatgtagtgaatctcatattccagaactgagatgattgatttgatgctatttgtgacagacagaacccataataaagcctttctatgcaagttacattttatagaattatcctactaa

SEQ ID NO: 390392 - DNA, 120 bp, Artificial Sequence
  ENSG00000144815_49 (sequence is synthesized)
aagtaacctttcttcagcgaatgcaaaacagacctttggtgttccagtatgattcattttgccattctgaacaactatcattttaattaagaccatttaactgacacttcctggattcag

SEQ ID NO: 390393 - DNA, 120 bp, Artificial Sequence
  ENSG00000144815_50 (sequence is synthesized)
ttattaagtttcagattgaaacttgatccagtttaataactgaatccagtttcacatttatcaatctgaaaacttagtttgcagattggtaaatcagggtacttgacaagaataaatatg

SEQ ID NO: 390394 - DNA, 120 bp, Artificial Sequence
  ENSG00000144815_51 (sequence is synthesized)
gtacgcctttatatattcatgtgttacatgccagaaatgagtctgtttctggaccctgttcaaggaaatagtgatgactgagagaggtacagggaaataaacacccaagggaaacaacag

SEQ ID NO: 390395 - DNA, 120 bp, Artificial Sequence
  ENSG00000144815_52 (sequence is synthesized)
aaataagcctccccaactttctaaaaaactgctcagcattatctctgtggattctgggtaaattcagctttttaacatcagctagtcactaatgccagaaattccacttcaagtgtattt

SEQ ID NO: 390396 - DNA, 120 bp, Artificial Sequence
  ENSG00000144815_53 (sequence is synthesized)
attttcttgtgttaagcattattctacctggtttatgtctacaatgtagtattagtgtacttaggattcttgacacctcagtgtgcaataaataaaattttgaagttgttgtttttcatt

SEQ ID NO: 390397 - DNA, 120 bp, Artificial Sequence
  ENSG00000144815_54 (sequence is synthesized)
tgaaggtgagaccacagcccctgagtgctaaggggacctgggaatcctaggggaatggaggtggtggacgataagaggatggttgagggcaggagtttaaaggacacagaagctaggaga

SEQ ID NO: 390398 - DNA, 120 bp, Artificial Sequence
  ENSG00000144815_55 (sequence is synthesized)
gaagctaggagagcagaaaatgtactccaccaccttctgtctaacttgtctcttaaaagtgcttttacattttaactttttaaaaaaatgtgggccgggcatagtggctcatgcctgtaa

SEQ ID NO: 390399 - DNA, 120 bp, Artificial Sequence
  ENSG00000144815_56 (sequence is synthesized)
tcaataaataaataaataaataaaaaataaaaaagtgtgaacttaaatatatttatatgtgtgtacatatattttcttttttaatattctggttaaatgagaggccatcgggcctctttt

SEQ ID NO: 390400 - DNA, 120 bp, Artificial Sequence
  ENSG00000144815_57 (sequence is synthesized)
taagagtctaatgatgtgtatatctaatgcccattccagctggattgtaacactgcttggggaagataacttaaaaaaaagtagtaccgagattacagcagctagtgtcctaaatggaaa

SEQ ID NO: 390401 - DNA, 120 bp, Artificial Sequence
  ENSG00000144815_58 (sequence is synthesized)
agaagtgaaactaaatgtcataggagaaatcctttcagttttgtgcagtggttcatttgctgttaaatctaccccattaccattccccttactccttgaaaataaagtgatcttcatgtt

SEQ ID NO: 390402 - DNA, 120 bp, Artificial Sequence
  ENSG00000144815_59 (sequence is synthesized)
acaggaccattgctttatttatgtcacagatttcttgtcctttaattagtcagtgaaggcacatgattgcgatactactttttgattgccgtattgtaaaagctatatggtaaaaggtaa

SEQ ID NO: 390403 - DNA, 120 bp, Artificial Sequence
  ENSG00000144815_60 (sequence is synthesized)
ctccctccacccgcccactgcaccctcacgtttaggggccacacagaaaaagcgaaataagatgaggtgaatctaatgagaaggcaactctaatgcccatcaggagattcactaggacat

SEQ ID NO: 390404 - DNA, 120 bp, Artificial Sequence
  ENSG00000144815_61 (sequence is synthesized)
tttaaaaggacgtctttaaggaaaaagttttgtttgtagatgttgcctctgattcctccctgcggctccagtccaggtcttggagccggccctcgaggggaatgtccgggactcgggtcg

SEQ ID NO: 390405 - DNA, 120 bp, Artificial Sequence
  ENSG00000144815_62 (sequence is synthesized)
gtacctttttggtctgggaatttccagtgtgcagaaaaaaaatccacaaatctaggcctcgctgccccctccctgcctcctctggccctcctcagtgcccacgcaacccggttcgaaaga

SEQ ID NO: 390406 - DNA, 120 bp, Artificial Sequence
  ENSG00000144815_63 (sequence is synthesized)
gaggatgaccgtattctgcattttagaaaacaggctcttagcttcccccgcccccgtcctcactagagtggagaactgaaagcgaacgctataaagggcgccagtgagaggggctggcct

SEQ ID NO: 390407 - DNA, 120 bp, Artificial Sequence
  ENSG00000144815_64 (sequence is synthesized)
cctcttgccacgaggtcagacggcgagttcttagagaaaaaggctgcttagctgctgcttatcatgtaacctcaaaaggaaactgatcgtctttctcatgctgtcacgtacttgggttat

SEQ ID NO: 390408 - DNA, 120 bp, Artificial Sequence
  ENSG00000144815_65 (sequence is synthesized)
tatcgctgattacagctggaaacaattgatttgctcttacgtatttgtgtgacttgactcttcaaacacaaaggtatatttttattatctgatattttattaaaatatcttaaatggtaa

SEQ ID NO: 390409 - DNA, 120 bp, Artificial Sequence
  ENSG00000144815_66 (sequence is synthesized)
gaataataacttttagatctgtacagataccccttttttctgtaggggaaaacaagatcattggatcattgaactaaataattataatagtttttaagaaaaataacatttggagctttt

SEQ ID NO: 390410 - DNA, 120 bp, Artificial Sequence
  ENSG00000144815_67 (sequence is synthesized)
atctttggtttatattttttcacttatatcgctgtttataaagttttgaccttcagccaaggtctgagagtgatttaccatgttgaagttcatgtatttaaatagactatttaaattact

SEQ ID NO: 390411 - DNA, 120 bp, Artificial Sequence
  ENSG00000144815_68 (sequence is synthesized)
gttttttattagtaaggaaaaggaaacgttcctatgcccactcctcccactatatcatgtataactctcttgcctgtaaaattgtactcttaatttctaatgtttttctttacttcattt

SEQ ID NO: 390412 - DNA, 120 bp, Artificial Sequence
  ENSG00000144815_69 (sequence is synthesized)
atctgctcccgagtccccagccccgtgctgataggtgcagcccctggagtcgtggctgtgggcataggtgccagggaggggaggcccgggtcgaaggcataggcagaattggagccctgg

SEQ ID NO: 390413 - DNA, 120 bp, Artificial Sequence
  ENSG00000144815_70 (sequence is synthesized)
gttgccaaagcgtcgcagctaagaagccggagcccaggctagtaccggcggggcggggcggggcggggccgggagcgagcatctccatcctcagtttcctccacttgcggcaacgccaca

SEQ ID NO: 390414 - DNA, 120 bp, Artificial Sequence
  ENSG00000144815_71 (sequence is synthesized)
gctcggtacagttcggacctccacgccgcagcgaaagacttctgtcctccaggcaccttcactaacccggtgcggagcacttggcgacgcctccctgcccatctcatatctctcggctca

SEQ ID NO: 390415 - DNA, 120 bp, Artificial Sequence
  ENSG00000144815_72 (sequence is synthesized)
gtcggaggtgaggagacgtcgccgggtgaggaagcggggggctagcggcctggcgctgcggcgaccgaccggggcgtcaggatccctggcccccggagagcgaagggcgggcgggtcccg

SEQ ID NO: 390416 - DNA, 120 bp, Artificial Sequence
  ENSG00000144820_0 (sequence is synthesized)
acttttttcatgttctccttgagtgaaggatgaggaaattgaaagcagagtatgcaccttttattaggagattcaaactgcatcctactggattagcctcaaaagtcctaaaatacaaag

SEQ ID NO: 390417 - DNA, 120 bp, Artificial Sequence
  ENSG00000144820_1 (sequence is synthesized)
acatccatctgacagatcactgaggggaggacttgtttttctgttttagaatagtttccgattaaactttttagctcaagaagaaaagaagctagttatttctcacccaggagtggattt

SEQ ID NO: 390418 - DNA, 120 bp, Artificial Sequence
  ENSG00000144820_2 (sequence is synthesized)
gtggtttggcttcaccatggcttcctgccgtgcctggaaccttagggtgctggtggctgtcgtgtgtggactactgactggcatcattttgggactgggcatctggaggattgtgatcag

SEQ ID NO: 390419 - DNA, 120 bp, Artificial Sequence
  ENSG00000144820_3 (sequence is synthesized)
gatccaaagaggaaaatctacttcctcatcaagcacccctacagagttctgcaggaatggtggaacctgggaaaatggcagatgtatttgtacagaagagtggaaaggactgagatgtac

SEQ ID NO: 390420 - DNA, 120 bp, Artificial Sequence
  ENSG00000144820_4 (sequence is synthesized)
aattgctaatttttgtgaaaatagtacctatatgggttttacttttgccagaatcccagtgggcagatatggaccatccttgcaaacatgtggcaaggatactccaaatgcgggcaatcc

SEQ ID NO: 390421 - DNA, 120 bp, Artificial Sequence
  ENSG00000144820_5 (sequence is synthesized)
aatggcagtccggttgtgcagtctctctctatatggagagatagaattacaaaaagtgacaataggaaattgcaatgaaaatctggaaaccctggaaaagcaggtaaaggatgtcacagc

SEQ ID NO: 390422 - DNA, 120 bp, Artificial Sequence
  ENSG00000144820_6 (sequence is synthesized)
accacttaataacatttcttctgaagtccagattttaacatctgatgccaataaattaactgctgagaacatcactagtgctacgcgagtggttggacagatattcaacacttccagaaa

SEQ ID NO: 390423 - DNA, 120 bp, Artificial Sequence
  ENSG00000144820_7 (sequence is synthesized)
tgcttcacctgaggcaaagaaagttgccatagtaacagtgagtcaactcctagatgccagtgaagatgcttttcaaagagttgctgctactgctaatgatgatgcccttacaacgcttat

SEQ ID NO: 390424 - DNA, 120 bp, Artificial Sequence
  ENSG00000144820_8 (sequence is synthesized)
tgagcaaatggagacttattccttgtctttgggtaatcaatcagtggtggaacctaacatagcaatacagtcagcaaatttctcttcagaaaatgcggtggggccttcaaatgttcgctt

SEQ ID NO: 390425 - DNA, 120 bp, Artificial Sequence
  ENSG00000144820_9 (sequence is synthesized)
ctctgtgcagaaaggagctagcagttctctagtttctagttcaacatttatacatacaaatgtggatggccttaacccagatgcacagactgagcttcaggtcttgcttaatatgacgaa

SEQ ID NO: 390426 - DNA, 120 bp, Artificial Sequence
  ENSG00000144820_10 (sequence is synthesized)
aaattacaccaagacatgcggctttgtagtttatcaaaatgacaagcttttccaatcaaaaacttttacagctaaatcggattttagtcaaaaaattatctcaagcaaaactgatgaaaa

SEQ ID NO: 390427 - DNA, 120 bp, Artificial Sequence
  ENSG00000144820_11 (sequence is synthesized)
tgagcaagatcagagtgcttctgttgacatggtctttagtccaaagtacaaccaaaaagaatttcaactctattcctatgcctgtgtctattggaatttgtcagcgaaggactgggacac

SEQ ID NO: 390428 - DNA, 120 bp, Artificial Sequence
  ENSG00000144820_12 (sequence is synthesized)
atatggctgtcaaaaagacaagggcactgatggattcctgcgctgccgctgcaaccatactactaattttgctgtattaatgactttcaaaaaggattatcaatatcccaaatcacttga

SEQ ID NO: 390429 - DNA, 120 bp, Artificial Sequence
  ENSG00000144820_13 (sequence is synthesized)
ccaacgttggatgtgcactgtctgttactggtctggctctcacagttatatttcagattgtcaccaggaaagtcagaaaaacctcagtaacctgggttttggtcaatctgtgcatatcaa

SEQ ID NO: 390430 - DNA, 120 bp, Artificial Sequence
  ENSG00000144820_14 (sequence is synthesized)
tgttgattttcaacctcctctttgtgtttggaattgaaaactccaataagaacttgcagacaagtgatggtgacatcaataatattgactttgacaataatgacatacccaggacagaca

SEQ ID NO: 390431 - DNA, 120 bp, Artificial Sequence
  ENSG00000144820_15 (sequence is synthesized)
ccattaacatcccgaatcccatgtgcactgcgattgccgccttactgcactattttctgttagtgacatttacctggaacgcactcagcgctgcacagctctattaccttctaataagga

SEQ ID NO: 390432 - DNA, 120 bp, Artificial Sequence
  ENSG00000144820_16 (sequence is synthesized)
ccatgaagcctcttcctcggcatttcattcttttcatctcattaattggatggggagtcccagctatagtagtggctataacagtgggagttatttattctcagaatggaaataatccac

SEQ ID NO: 390433 - DNA, 120 bp, Artificial Sequence
  ENSG00000144820_17 (sequence is synthesized)
agtgggaattagactaccggcaagagaaaatctgctggctggcaattccagaacccaatggtgttataaaaagtccgctgttgtggtcattcatcgtacctgtaaccattatcctcatca

SEQ ID NO: 390434 - DNA, 120 bp, Artificial Sequence
  ENSG00000144820_18 (sequence is synthesized)
gcaatgttgttatgtttattacaatctcgatcaaagtgctgtggaagaataaccagaacctgacaagcacaaaaaaagtttcatccatgaagaagattgttagcacattatctgttgcag

SEQ ID NO: 390435 - DNA, 120 bp, Artificial Sequence
  ENSG00000144820_19 (sequence is synthesized)
ttgtttttggaattacctggattctagcatacctgatgctagttaatgatgatagcatcaggatcgtcttcagctacatattctgccttttcaacactacacagggattgcaaattttta

SEQ ID NO: 390436 - DNA, 120 bp, Artificial Sequence
  ENSG00000144820_20 (sequence is synthesized)
tcctgtacactgttagaacaaaagtcttccagagtgaagcttccaaagtgttgatgttgctatcgtctattgggagaaggaagtcattgccttcagtgacgcggccgaggctgcgtgtaa

SEQ ID NO: 390437 - DNA, 120 bp, Artificial Sequence
  ENSG00000144820_21 (sequence is synthesized)
agatgtataatttcctcaggtcattgccaaccttacatgaacgctttaggctactggaaacctctccgagtactgaggaaatcacactctctgaaagtgacaatgcaaaggaaagcatct

SEQ ID NO: 390438 - DNA, 120 bp, Artificial Sequence
  ENSG00000144820_22 (sequence is synthesized)
agacagtaaaacttacctgttgtggtctttttaatcacctcgtttgagttttatctgtttctctcctttatttcccagtcctctcagaaagtcttcctcaatgtattttgctcaggatta

SEQ ID NO: 390439 - DNA, 120 bp, Artificial Sequence
  ENSG00000144820_23 (sequence is synthesized)
agaattagataaaacctgttgtttattattattcggcataatggacttggtagtttttctatttttcaatagatttgtacttgaataaggtgaagaatttcacacaacatacaagagtac

SEQ ID NO: 390440 - DNA, 120 bp, Artificial Sequence
  ENSG00000144820_24 (sequence is synthesized)
cattgttccttatatcgttaaatctttgtgacacactttgacaaaaatgtagaacctataacaaattcttttacaagttactataaaggacacaaagagaaaactttaccttccagaaca

SEQ ID NO: 390441 - DNA, 120 bp, Artificial Sequence
  ENSG00000144820_25 (sequence is synthesized)
aaatgactcctgatgaacagtgtgtggggatttgcttgtatgtattaaacttttgacctctgaatattttacagtcgtatgtgcttgtacttttatttccaatgaagaatttggcaccaa

SEQ ID NO: 390442 - DNA, 120 bp, Artificial Sequence
  ENSG00000144820_26 (sequence is synthesized)
aaacgtggaaaactgagtggacatggtgttcaggagattgaggctcagctaaattccagcttatttacctgcagttgcttacaaagtgtttggacataattgtgtaaagctagggttttt

SEQ ID NO: 390443 - DNA, 120 bp, Artificial Sequence
  ENSG00000144820_27 (sequence is synthesized)
ctaggctaaagtattaacagagatatctttatttctctcatggatgcagtaactgactgattcctctggaatgtagataagagctgtgactttccacttgacctttagttactagatgga

SEQ ID NO: 390444 - DNA, 120 bp, Artificial Sequence
  ENSG00000144820_28 (sequence is synthesized)
taggttgtctcacgtggagggccatgttatgacttttatgttccccaggcacttgtgcctttgtggaacctttcattcattaatgaaagattaaaaattttattttatgattgcataggt

SEQ ID NO: 390445 - DNA, 120 bp, Artificial Sequence
  ENSG00000144820_29 (sequence is synthesized)
acaaagatgaatatattaatatcctttgagctaagagttctcttttttcttctgagtctaaaagaagttaaaacattactatgggatatgaacactaagcactattgtgtctaatgcata

SEQ ID NO: 390446 - DNA, 120 bp, Artificial Sequence
  ENSG00000144820_30 (sequence is synthesized)
agtcggccttggctgccaggccttctgttgcatcccatcagttaaatcaaggtacaggccaggttactgtgaagggactacgcagggctacctaccaggaagtagggttcactgggggcc

SEQ ID NO: 390447 - DNA, 120 bp, Artificial Sequence
  ENSG00000144820_31 (sequence is synthesized)
atttttggagattagctatcacttttgatcagaacacagtttcaagaaaagatatgtcaacctgtatcctttaactcatgactttgtggaaatgataagaggaaagtatagttttctgat

SEQ ID NO: 390448 - DNA, 120 bp, Artificial Sequence
  ENSG00000144820_32 (sequence is synthesized)
gtaatcgagaaggtagatttaccagctgtcacaactgggctatgaactgaacttacattgggcaataatattctttgttcccagaaatttcactgcagtttgttttgtgcagttgttgtg

SEQ ID NO: 390449 - DNA, 120 bp, Artificial Sequence
  ENSG00000144821_0 (sequence is synthesized)
catttctacttcatatgatcattttaattgtatttacctcatcttaccaaaaagatcatggttgaatcttgcctactcacgtttagggcctttttttggtggattgctttaataaagatg

SEQ ID NO: 390450 - DNA, 120 bp, Artificial Sequence
  ENSG00000144821_1 (sequence is synthesized)
gatctgtcagaccttggagaagccgcagccttcctcagaagaagtgaagctgagctgcttctactacaggccacagccttggatgggaagaagaaatgctggattcctgatggtgagaat

SEQ ID NO: 390451 - DNA, 120 bp, Artificial Sequence
  ENSG00000144821_2 (sequence is synthesized)
gcttatatcgaggctgaggtaaaagggagtgaagatgatggaacagtaattgttgagacagcagatggagagagtctgagcataaaggaggacaaaatccagcagatgaatcctccagag

SEQ ID NO: 390452 - DNA, 120 bp, Artificial Sequence
  ENSG00000144821_3 (sequence is synthesized)
tttgaaatgattgaagacatggcaatgctgactcacctcaatgaggcatccgtgctgcataccctgaagcggcgctatggccagtggatgatctatacatattcaggtctcttctgtgtg

SEQ ID NO: 390453 - DNA, 120 bp, Artificial Sequence
  ENSG00000144821_4 (sequence is synthesized)
accataaacccttacaaatggcttcccgtgtatcagaaagaagtcatggccgcctacaaagggaagaggcgatcagaggctccccctcacatctttgctgttgccaataacgcctttcag

SEQ ID NO: 390454 - DNA, 120 bp, Artificial Sequence
  ENSG00000144821_5 (sequence is synthesized)
gacatgcttcacaatcgagaaaatcagtctatactcttcacaggagaatctggtgctggaaagactgtgaacagcaaacatattatccagtattttgccaccatagcagccatgattgaa

SEQ ID NO: 390455 - DNA, 120 bp, Artificial Sequence
  ENSG00000144821_6 (sequence is synthesized)
tccaggaaaaagcagggggcgttagaagatcaaatcatgcaagcgaatactatcttggaagcatttggaaatgctaaaaccctgagaaatgacaactcctctcgttttggcaaattcatc

SEQ ID NO: 390456 - DNA, 120 bp, Artificial Sequence
  ENSG00000144821_7 (sequence is synthesized)
aggatgcactttggtgccagaggcatgctgtcatctgtggacattgatatctatttgcttgaaaagtccagggtgattttccagcaggctggagagaggaactaccacatattctatcaa

SEQ ID NO: 390457 - DNA, 120 bp, Artificial Sequence
  ENSG00000144821_8 (sequence is synthesized)
attctatctggacaaaaagagcttcatgacctgctcctggtatctgcaaatccctcagacttccacttttgctcctgtggagcagttactgtggagagcttggatgatgctgaagaattg

SEQ ID NO: 390458 - DNA, 120 bp, Artificial Sequence
  ENSG00000144821_9 (sequence is synthesized)
ctggccacagaacaagccatggacatcttgggctttcttcctgatgagaagtatggatgctataaactcactggagccatcatgcactttggaaatatgaaatttaaacagaaacctaga

SEQ ID NO: 390459 - DNA, 120 bp, Artificial Sequence
  ENSG00000144821_10 (sequence is synthesized)
gaagagcaactggaagcagatggcacagaaaatgctgacaaagctgctttcctcatgggcattaactcctctgagttggtaaagtgcttgatccatcctagaatcaaagttggtaacgaa

SEQ ID NO: 390460 - DNA, 120 bp, Artificial Sequence
  ENSG00000144821_11 (sequence is synthesized)
tatgttaccagaggtcaaactatagaacaggtaacctgtgctgtcggtgccctgtccaagtcaatgtatgaaaggatgtttaagtggctagtggcacggatcaacagggccctggatgcc

SEQ ID NO: 390461 - DNA, 120 bp, Artificial Sequence
  ENSG00000144821_12 (sequence is synthesized)
aagctgtcaaggcagttcttcattggcattcttgacatcactggttttgaaatccttgagtataatagccttgagcaactttgcattaattttaccaatgaaaaattacaacaattcttc

SEQ ID NO: 390462 - DNA, 120 bp, Artificial Sequence
  ENSG00000144821_13 (sequence is synthesized)
aattggcacatgtttgttctggagcaagaggaatataagaaagaaagcattgaatgggtgtctattggctttggtctggatttgcaagcttgcatagatctcattgagaagccaatgggc

SEQ ID NO: 390463 - DNA, 120 bp, Artificial Sequence
  ENSG00000144821_14 (sequence is synthesized)
atcctttccatccttgaagaagagtgtatgtttcctaaggctacagacctgactttcaagaccaaactctttgacaaccattttggaaagtcggttcatctccagaagcccaagcctgat

SEQ ID NO: 390464 - DNA, 120 bp, Artificial Sequence
  ENSG00000144821_15 (sequence is synthesized)
aagaagaaatttgaagctcattttgaacttgtccattatgcaggagtggtaccttataatatcagtggttggctggaaaagaacaaagacctccttaatgaaacagtggtagctgtattt

SEQ ID NO: 390465 - DNA, 120 bp, Artificial Sequence
  ENSG00000144821_16 (sequence is synthesized)
cagaagtcttccaacagactcctggcgagcctttttgaaaattacatgagtactgacagtgctataccatttggggagaagaaacgaaagaaaggagcttcattccaaacggttgcatct

SEQ ID NO: 390466 - DNA, 120 bp, Artificial Sequence
  ENSG00000144821_17 (sequence is synthesized)
ctgcataaagaaaacctgaataaattgatgactaatctgaaatcaacagcacctcattttgtgagatgcataaatcccaatgtgaacaaaataccaggtatactggacccttacttggtt

SEQ ID NO: 390467 - DNA, 120 bp, Artificial Sequence
  ENSG00000144821_18 (sequence is synthesized)
ctacagcagttgcgctgtaatggtgtcttggaagggactaggatatgccgtgaaggttttccaaaccgactgcagtatgctgattttaaacaaaggtactgcattctgaatccaaggacc

SEQ ID NO: 390468 - DNA, 120 bp, Artificial Sequence
  ENSG00000144821_19 (sequence is synthesized)
tttccaaagagcaagtttgtgagcagcagaaaagcagctgaagaattacttggctccttggagatagaccatacccagtaccgatttggaatcactaaggtgttttttaaagctgggttt

SEQ ID NO: 390469 - DNA, 120 bp, Artificial Sequence
  ENSG00000144821_20 (sequence is synthesized)
ctgggccaactggaagcaataagagatgagagactatctaaagtcttcacattgttccaagccagagcacagggcaaactgatgcgaatcaaattccagaagattctggaagaaagggat

SEQ ID NO: 390470 - DNA, 120 bp, Artificial Sequence
  ENSG00000144821_21 (sequence is synthesized)
gcacttattttgatccaatggaacataagagctttcatggctgtgaagaactggccctggatgaggctcttcttcaagatcaagcctcttgttaaatcttcagaagtaggagaagaagta

SEQ ID NO: 390471 - DNA, 120 bp, Artificial Sequence
  ENSG00000144821_22 (sequence is synthesized)
gctggactgaaggaagagtgtgcacaattacagaaagccttggagaaatcagagtttcagagggaggaactgaaagcaaagcaagtatccctcactcaggaaaaaaatgacctgattctt

SEQ ID NO: 390472 - DNA, 120 bp, Artificial Sequence
  ENSG00000144821_23 (sequence is synthesized)
cagcttcaggctgagcaagagacactggcaaatgttgaagagcagtgcgagtggctgattaaatccaagatccagctggaggccagagtaaaggagctgtcggagagggtggaggaagaa

SEQ ID NO: 390473 - DNA, 120 bp, Artificial Sequence
  ENSG00000144821_24 (sequence is synthesized)
gaggagataaattctgagctgactgccagggggcggaaactcgaagatgaatgttttgagttgaagaaagaaatcgatgacctggaaacaatgttggtgaagtcagagaaggagaagcgt

SEQ ID NO: 390474 - DNA, 120 bp, Artificial Sequence
  ENSG00000144821_25 (sequence is synthesized)
actacagagcacaaggtcaagaacttgactgaggaagtagagtttctaaatgaggatatcagcaaacttaacagagcagccaaggttgtgcaggaggcccatcagcagaccctggatgac

SEQ ID NO: 390475 - DNA, 120 bp, Artificial Sequence
  ENSG00000144821_26 (sequence is synthesized)
ctgcacatggaggaggagaagctcagcagcctgagcaaagcaaatctgaagctggaacagcaagttgatgagcttgagggtgcccttgagcaggagagaaaagcgagaatgaactgtgaa

SEQ ID NO: 390476 - DNA, 120 bp, Artificial Sequence
  ENSG00000144821_27 (sequence is synthesized)
agggaactgcacaaactggagggcaatttaaagctgaatcgggaaagtatggagaacctggaaagcagccagcgacacctggcagaagagctgaggaaaaaagaattagaattgagtcag

SEQ ID NO: 390477 - DNA, 120 bp, Artificial Sequence
  ENSG00000144821_28 (sequence is synthesized)
atgaattcaaaagtggagaatgagaaaggcctggtagctcagcttcagaagacggttaaagagcttcagactcaaataaaggatttgaaagagaaactagaagctgaaaggaccactcga

SEQ ID NO: 390478 - DNA, 120 bp, Artificial Sequence
  ENSG00000144821_29 (sequence is synthesized)
aaaccaaattccagaagctgcaccgagacatggaagaggccactctgcactttgagacaacttctgcatctttgaagaagagacatgcagacagcctggctgagctcgagggccaggtag

SEQ ID NO: 390479 - DNA, 120 bp, Artificial Sequence
  ENSG00000144821_30 (sequence is synthesized)
aaaatctacagcaggtcaagcagaaactggaaaaagacaagagtgacttgcagctagaagtagatgacctcctgacccgtgttgagcagatgacaagagctaaggcaaatgctgagaaac

SEQ ID NO: 390480 - DNA, 120 bp, Artificial Sequence
  ENSG00000144821_31 (sequence is synthesized)
tctgtactctatatgaagagcgcttgcatgaagcaactgcaaagctagataaggtgactcagttggcaaatgacctggcagcacaaaagacaaagctgtggagtgagagtggcgagttcc

SEQ ID NO: 390481 - DNA, 120 bp, Artificial Sequence
  ENSG00000144821_32 (sequence is synthesized)
tacggaggcttgaagagaaggaggctctgataaaccaactttccagggaaaagagcaacttcactcggcagattgaagacctgagagggcagctggaaaaggagaccaaatcccagagtg

SEQ ID NO: 390482 - DNA, 120 bp, Artificial Sequence
  ENSG00000144821_33 (sequence is synthesized)
ccctggcccatgccctgcagaaggctcagcgtgactgtgaccttctacgagagcagtatgaggaagaacaagaggtcaaggctgagctgcaccggaccttatccaaagtcaatgctgaaa

SEQ ID NO: 390483 - DNA, 120 bp, Artificial Sequence
  ENSG00000144821_34 (sequence is synthesized)
tggtgcaatggagaatgaagtatgaaaacaatgtcatccagagaacagaagacttggaggatgccaagaaggaactggcaattagattgcaggaggcagccgaagccatgggggtggcca

SEQ ID NO: 390484 - DNA, 120 bp, Artificial Sequence
  ENSG00000144821_35 (sequence is synthesized)
atgccagaaatgcctccttggagagagccaggcaccagctgcagctggagctcggggacgccctgtctgacctcgggaaggtccgctctgcagcagccaggctggaccagaagcagctgc

SEQ ID NO: 390485 - DNA, 120 bp, Artificial Sequence
  ENSG00000144821_36 (sequence is synthesized)
agtctggcaaggcccttgccgactggaagcagaagcacgaggagtcccaggcgttgctggatgcctctcagaaggaagttcaggctctcagtacagagctcctcaagctcaagaacacct

SEQ ID NO: 390486 - DNA, 120 bp, Artificial Sequence
  ENSG00000144821_37 (sequence is synthesized)
atgaggagagcatcgtgggccaggagacactcaggagggagaacaagaacctccaagaagagatttctaatctgacaaaccaggttagagaagggaccaagaacttaactgaaatggaaa

SEQ ID NO: 390487 - DNA, 120 bp, Artificial Sequence
  ENSG00000144821_38 (sequence is synthesized)
aggtcaagaaactaattgaagaagagaagacagaagtccaggtgacactggaagaaacagagggagccctggaacgtaatgaaagcaagattcttcatttccagcttgaactcttggaag

SEQ ID NO: 390488 - DNA, 120 bp, Artificial Sequence
  ENSG00000144821_39 (sequence is synthesized)
ctaaagcagaacttgaaagaaagctttcagagaaagatgaagaaatagaaaattttaggaggaagcagcagtgtaccattgactccctgcagtctagtctggattctgaagctaagagca

SEQ ID NO: 390489 - DNA, 120 bp, Artificial Sequence
  ENSG00000144821_40 (sequence is synthesized)
gaattgaggttacccggctgaagaagaagatggaagaggacctcaatgagatggaactccagcttagctgtgccaaccggcaggtgtcagaagcaaccaaatccctgggccagcttcaga

SEQ ID NO: 390490 - DNA, 120 bp, Artificial Sequence
  ENSG00000144821_41 (sequence is synthesized)
ttcaaatcaaggaccttcaaatgcagctggatgacagcacacaactgaacagtgatctgaaggagcaggtggctgtggctgagcggcgcaactctcttcttcagtctgaactagaggatc

SEQ ID NO: 390491 - DNA, 120 bp, Artificial Sequence
  ENSG00000144821_42 (sequence is synthesized)
taaggtccctgcaagagcagacagagcgtggccgcaggctgtcagaagaagagctcctggaagcaacagaaagaatcaatcttttctatacccagaacacaagcctcctcagccagaaga

SEQ ID NO: 390492 - DNA, 120 bp, Artificial Sequence
  ENSG00000144821_43 (sequence is synthesized)
agaaactggaggctgatgttgcccggatgcagaaagaagctgaagaggtggtgcaggagtgtcaaaatgcagaagagaaggccaagaaggcagccattgaggcagcaaacttgtcagaag

SEQ ID NO: 390493 - DNA, 120 bp, Artificial Sequence
  ENSG00000144821_44 (sequence is synthesized)
aactgaagaagaagcaagacaccattgcccacttggaaaggacaagagaaaatatggagcagacaattacagacttacagaaaaggctggctgaagctgaacagatggccctgatgggga

SEQ ID NO: 390494 - DNA, 120 bp, Artificial Sequence
  ENSG00000144821_45 (sequence is synthesized)
gtagaaagcaaatccagaaactagaatccagggttcgtgaactggaaggtgaactggagggtgaaatccgtcgcagtgcagaggcccagaggggagcccgcagacttgagcgatgcatca

SEQ ID NO: 390495 - DNA, 120 bp, Artificial Sequence
  ENSG00000144821_46 (sequence is synthesized)
aagagctgacctatcaggcagaggaagacaagaagaatctgagcaggatgcaaactcagatggataaacttcagctaaaagtgcaaaattacaagcagcaagtcgaggtggcggaaacac

SEQ ID NO: 390496 - DNA, 120 bp, Artificial Sequence
  ENSG00000144821_47 (sequence is synthesized)
aagccaatcaatacctttccaagtataagaaacagcaacatgagttgaatgaagtgaaggaaagggcagaggtggcagaatctcaagtcaataaactcaaaattaaagcaagagagtttg

SEQ ID NO: 390497 - DNA, 120 bp, Artificial Sequence
  ENSG00000144821_48 (sequence is synthesized)
ggaaaaaggttcaagaagaatagcatcccctgctttgaaaggacaacagctggagaagtacaaggaaggtgctgtttcatggccaaaaacttaggttgcatggaaacatttttaaaaaca

SEQ ID NO: 390498 - DNA, 120 bp, Artificial Sequence
  ENSG00000144821_49 (sequence is synthesized)
tgtttaaattgcttttcacaccatataaacaaggcaattagaaaaataattaaagggaatatcattgcttccacagttaatggggattttttgatcctcaaatgcaagtaaactaccttc

SEQ ID NO: 390499 - DNA, 120 bp, Artificial Sequence
  ENSG00000144821_50 (sequence is synthesized)
taatgcttcacatgacagattaaataaatggaagaaccttttcaattctgatgtttaaaaaatgaataaatacttgatcctttgtccatatttcctcttaatgggtaggactcatagaag

SEQ ID NO: 390500 - DNA, 120 bp, Artificial Sequence
  ENSG00000144821_51 (sequence is synthesized)
atgtccttagaccagtcacgcttcatggggactagggcatgttggtgaatggtttttactaaagttaggcaactttggcttgattcacccctaaatctatgaatgtatattgtgagccag

SEQ ID NO: 390501 - DNA, 120 bp, Artificial Sequence
  ENSG00000144821_52 (sequence is synthesized)
cagtggtagaatggaagtcataagatctcctcagcattgtgatataaatatagctatagttaggcaatttgaacatgtaggcaaaactctcctaatcaacacacatgtaggctatatgct

SEQ ID NO: 390502 - DNA, 120 bp, Artificial Sequence
  ENSG00000144821_53 (sequence is synthesized)
ggtacatgctttaaacatggaggtaaccccacacgagacattcagtgacaggtaatatgctggatttgtgcagtaccgatttggctcagctggaggaacatgtcccggaattcctctctc

SEQ ID NO: 390503 - DNA, 120 bp, Artificial Sequence
  ENSG00000144821_54 (sequence is synthesized)
tcatggttctggattggagtaggtcataaagaaatttgcattaatttgatcagcagctattttatactcataaggtcagtgtacagacccaagcatggtgacagcttgaaaatatgactc

SEQ ID NO: 390504 - DNA, 120 bp, Artificial Sequence
  ENSG00000144821_55 (sequence is synthesized)
caggccaaaaaggggagctagaagagaccagagacagctccctggacccagagctcttccagctcctgccagcctcctccttcagctttgcaaagtactggccaggtgtgtgtgcagctc

SEQ ID NO: 390505 - DNA, 120 bp, Artificial Sequence
  ENSG00000144821_56 (sequence is synthesized)
catggcaaccagcatcagcttttcctgagatcacacacagcattgcagtggaggccgtgagacagacatgggttctgtttgttcttatggacttcccttcatccttgctgcattcacagt

SEQ ID NO: 390506 - DNA, 120 bp, Artificial Sequence
  ENSG00000144821_57 (sequence is synthesized)
cgacctacagtgacttcaggcccagaaccagatgcagagggaacagcctggcctagacttctccaccagcacccacaattgtgtaaggctgaagctctataataaatctttattctgtca

SEQ ID NO: 390507 - DNA, 120 bp, Artificial Sequence
  ENSG00000144821_58 (sequence is synthesized)
cttacacccagctgcatgttaactcccagcccctatcaggctgattggttctctcgactgacatagggaatggagagaaaatttagcactttctggcttcatcagcacatgatgacataa

SEQ ID NO: 390508 - DNA, 120 bp, Artificial Sequence
  ENSG00000144821_59 (sequence is synthesized)
ttctggaacatgcctgaaatcctctgggcctgcctcaagaagagatggaagctattgtgactggacccggctaatcttcagctataccatttggggagaagaaacgaaagaaaggagctt

SEQ ID NO: 390509 - DNA, 120 bp, Artificial Sequence
  ENSG00000144821_60 (sequence is synthesized)
agctcattatgtctggctgcttttatggcccctgttggagcattaccaaagaaacttagtgtaactctatattattttcttttatatacaatatctataatcgtgtatagatattccttt

SEQ ID NO: 390510 - DNA, 120 bp, Artificial Sequence
  ENSG00000144821_61 (sequence is synthesized)
atacacaattagatatccttttatacacaattgtgtatagatattcctttatacacaattagatatccctttatacacaattgtgtacagatattcctttatatcaatagtggtgagctt

SEQ ID NO: 390511 - DNA, 120 bp, Artificial Sequence
  ENSG00000144821_62 (sequence is synthesized)
actagctatctatatacgattattgccagattttataattttcttatatttgaggagcttctactgtcatgtgagactcaagacaacaccaaataaatgattatatgtataaggactgtg

SEQ ID NO: 390512 - DNA, 120 bp, Artificial Sequence
  ENSG00000144824_0 (sequence is synthesized)
gtctggtgaggaaatcatcaccctaggacgtaaaccctcccgcccttctttcagctcttaaaaaaagcctgccacgaaagtccctactgcgttgctgcgaacgtagctttgagaagctgg

SEQ ID NO: 390513 - DNA, 120 bp, Artificial Sequence
  ENSG00000144824_1 (sequence is synthesized)
cgcccagtgatggggcaaacagccatgcccttccagcagccgtgaaagccccaacagcaaactgcctgggagcggggcaggtcaccaacttcgttgctcgaactccctgggtgcccgccg

SEQ ID NO: 390514 - DNA, 120 bp, Artificial Sequence
  ENSG00000144824_2 (sequence is synthesized)
cggtggttacaaagggggtcaagagtgccggacccagccgcgcggagcccaccattgcggcccgagggggacccgacgggggcccgacggtgtggcgtggcgcaaggagcgcgcctgcct

SEQ ID NO: 390515 - DNA, 120 bp, Artificial Sequence
  ENSG00000144824_3 (sequence is synthesized)
tctctcgccgccgggaacgggctgcaccaatggccagattccagcaagattatggaagagcatagctacatacaaaaggagctagatttacaaaatggtagcttagaggaagactctgtg

SEQ ID NO: 390516 - DNA, 120 bp, Artificial Sequence
  ENSG00000144824_4 (sequence is synthesized)
gtgcattctgttgagaacgattcccaaaacatgatggagagcctcagcccaaagaaatactcttccagtctgagatttaaagccaatggagactattctggctcctatttaaccctctca

SEQ ID NO: 390517 - DNA, 120 bp, Artificial Sequence
  ENSG00000144824_5 (sequence is synthesized)
caacctgtgcctgcaaagagaagcccttctcctttgggaaccagtgtcagaagcagcccctccttagccaaaatccagggaagcaagcagttctcttatgatggaactgacaaaaatatt

SEQ ID NO: 390518 - DNA, 120 bp, Artificial Sequence
  ENSG00000144824_6 (sequence is synthesized)
cctatgaaacctccaactcctttactcaacactacatcctccctcagtggatatccacttggaagagcagactttgatcattatactggccgggacagtgaaagggccttgaggctctca

SEQ ID NO: 390519 - DNA, 120 bp, Artificial Sequence
  ENSG00000144824_7 (sequence is synthesized)
gagaagcctccctattccaaatatagctcaaggcataaatcgcatgacaatgtctactctcttggagggctggaaggtcggaaggcatctggctcgctcctggccatgtggaatggaagt

SEQ ID NO: 390520 - DNA, 120 bp, Artificial Sequence
  ENSG00000144824_8 (sequence is synthesized)
tccctgagtgatgctggcccgcctcctatcagcagatcgggagccgcaagcatgccttcaagcccaaagcaagccaggaaaatgagcattcaggacagcctggcgcttcaacccaagtta

SEQ ID NO: 390521 - DNA, 120 bp, Artificial Sequence
  ENSG00000144824_9 (sequence is synthesized)
actagacacaaggagcttgcatctgaaaacatcaatttgagaactaggaagtactccagcagcagcctgagtcacatgggagcctacagccgatcacttcccaggttgtacagagccaca

SEQ ID NO: 390522 - DNA, 120 bp, Artificial Sequence
  ENSG00000144824_10 (sequence is synthesized)
gagaaccagctgacacctctcagcttgcctccaagaaactctctgggcaattccaaacgaacaaaacttggggaaaaggatctacctcatagcgtaatagacaatgacaattaccttaat

SEQ ID NO: 390523 - DNA, 120 bp, Artificial Sequence
  ENSG00000144824_11 (sequence is synthesized)
ttttcttctttgagctcaggggctttaccctataaaacctctgcttctgaaggcaatccttatgtaagttctaccctcagtgtccctgccagtccacgagtggctcggaagatgcttctg

SEQ ID NO: 390524 - DNA, 120 bp, Artificial Sequence
  ENSG00000144824_12 (sequence is synthesized)
gcctccacctcctcctgtgcctctgatgactttgatcaggcttcatatgtggggacaaacccgagtcattcacttcttgctggagagtcagacagagtttttgcgaccaggaggaacttc

SEQ ID NO: 390525 - DNA, 120 bp, Artificial Sequence
  ENSG00000144824_13 (sequence is synthesized)
tcttgtggatctgtggaatttgatgaggcagatttggaaagcctcagacaggcctcaggaaccccccagcctgcccttcgggaacggaaaagcagtattagctccatttcaggacgtgat

SEQ ID NO: 390526 - DNA, 120 bp, Artificial Sequence
  ENSG00000144824_14 (sequence is synthesized)
gacctgatggattatcaccggcggcagagggaggaaagactcagggagcaggaaatggagcgattggagagacagcgtctggagaccatcctcagtctctgtgctgaatacacaaagcct

SEQ ID NO: 390527 - DNA, 120 bp, Artificial Sequence
  ENSG00000144824_15 (sequence is synthesized)
gacagtcgcttatctactgggaccaccgtggaagatgtgcagaaaatcaacaaggagcttgagaagctgcagctctctgatgaggagtctgtgtttgaggaagccctcatgagccctgac

SEQ ID NO: 390528 - DNA, 120 bp, Artificial Sequence
  ENSG00000144824_16 (sequence is synthesized)
acaagatacaggtgccaccggaaagactccctccctgatgcagacttggcaagctgtgggagtctcagtcagagcagtgccagcttctttacccccaggagcaccaggaatgatgaacta

SEQ ID NO: 390529 - DNA, 120 bp, Artificial Sequence
  ENSG00000144824_17 (sequence is synthesized)
ctcagtgacctcacccggactcctccaccaccatcctccacctttccgaaagcttccagcgagtcctcttatctaagtatcctaccaaagaccccagagggtataagtgaagaacagaga

SEQ ID NO: 390530 - DNA, 120 bp, Artificial Sequence
  ENSG00000144824_18 (sequence is synthesized)
tctcaggagttggctgcaatggaagaaacccggatagtcattctgaacaacctcgaggaacttaagcaaaaaatcaaagacataaatgatcagatggatgagtctttcagagagttggat

SEQ ID NO: 390531 - DNA, 120 bp, Artificial Sequence
  ENSG00000144824_19 (sequence is synthesized)
atggaatgtgctcttttggatggagaacagaaatctgaaacaactgaacttatgaaggagaaggagattttggatcatctaaaccggaaaatagctgaactggaaaagaacattgttggt

SEQ ID NO: 390532 - DNA, 120 bp, Artificial Sequence
  ENSG00000144824_20 (sequence is synthesized)
gaaaagaccaaggatgctgacctgttggatgttgaaagcaaacactttgaagacctggagttccagcagcttgaacatgagagccgtctagatgaagaaaaggagaacttgactcaacag

SEQ ID NO: 390533 - DNA, 120 bp, Artificial Sequence
  ENSG00000144824_21 (sequence is synthesized)
ctcctgcgtgaagttgctgaatatcaacggaacatcgtttctagaaaggaaaaaatttctgcattgaaaaagcaagccaatcacattgttcagcaggctcagagagagcaagatcatttt

SEQ ID NO: 390534 - DNA, 120 bp, Artificial Sequence
  ENSG00000144824_22 (sequence is synthesized)
gtgaaagaaaagaataatttaataatgatgttgcaaagagaaaaggagaatctttgtaatttggaaaagaaatactccagcctctctggggggaaagggtttcccgttaaccccaatact

SEQ ID NO: 390535 - DNA, 120 bp, Artificial Sequence
  ENSG00000144824_23 (sequence is synthesized)
ttaaaagagggctatatcagtgtaaatgagattaatgagccgtgtggcaattccacgaatctatccccttccactcagtttcctgctgatgctgatgctgttgccactgagcctgccaca

SEQ ID NO: 390536 - DNA, 120 bp, Artificial Sequence
  ENSG00000144824_24 (sequence is synthesized)
atcttccatctccccacatttcagcagtgctactatggggagaagcatcaccccaaaggcccatctgcccctaggacagagtaacagctgtggaagtgtgctccctccctcactggcagc

SEQ ID NO: 390537 - DNA, 120 bp, Artificial Sequence
  ENSG00000144824_25 (sequence is synthesized)
catggccaaagactcagaatctcggaggatgctcagaggttataatcaccaacagatgagtgaaggacacaggcagaaatctgaattttataaccgcacagcatctgaatcaaatgtcta

SEQ ID NO: 390538 - DNA, 120 bp, Artificial Sequence
  ENSG00000144824_26 (sequence is synthesized)
cttgaatagtttccattatccagatcacagctacaaggaccaggcctttgatactctgagcctcgatagctctgatagcatggagaccagcatctctgcttgctcaccagacaacatctc

SEQ ID NO: 390539 - DNA, 120 bp, Artificial Sequence
  ENSG00000144824_27 (sequence is synthesized)
tagtgccagcacttcaaatattgctagaatagaagaaatggagagacttttgaagcaggctcatgcagaaaagacgcggctgctcgaatccagggaacgggaaatggaagccaaaaaacg

SEQ ID NO: 390540 - DNA, 120 bp, Artificial Sequence
  ENSG00000144824_28 (sequence is synthesized)
agccctggaagaagaaaaacgacgccgggaaatcctggaaaaacgattacaggaagaaactagccagaggcagaagttaatagaaaaggaagtaaaaataagggagagacaaagggcaca

SEQ ID NO: 390541 - DNA, 120 bp, Artificial Sequence
  ENSG00000144824_29 (sequence is synthesized)
ggctcgtcctttgacacgctacctgcctgtccggaaggaagactttgatttgcggagccatgtagagactgctggccacaatattgacacctgttaccatgtatcaatcacagagaagac

SEQ ID NO: 390542 - DNA, 120 bp, Artificial Sequence
  ENSG00000144824_30 (sequence is synthesized)
ctgccgaggattcctcatcaaaatgggtgggaaaattaaaacgtggaaaaaacgttggtttgtttttgatcggaacaagcgaacattctcttattatgcagacaagcatgaaactaaatt

SEQ ID NO: 390543 - DNA, 120 bp, Artificial Sequence
  ENSG00000144824_31 (sequence is synthesized)
gaaaggagtaatatactttcaagccattgaagaagtctattatgatcacctcaagaatgctaataagagtcctaatccgttactcacctttagcgtcaagactcatgacagaatctatta

SEQ ID NO: 390544 - DNA, 120 bp, Artificial Sequence
  ENSG00000144824_32 (sequence is synthesized)
tatggtagccccatcgccagaagccatgcggatctggatggatgttatagttacgggggcagaaggttacactcacttcttgttgtagtgaactgaggcaacagtccacttcagggcaga

SEQ ID NO: 390545 - DNA, 120 bp, Artificial Sequence
  ENSG00000144824_33 (sequence is synthesized)
cggcaataatctcttacaagaatgaagccatattcaaccccagatgagaaaacccaacagatccatcccttgagctgtaaacactcagaactcctttcatatcaagacaagttatttgta

SEQ ID NO: 390546 - DNA, 120 bp, Artificial Sequence
  ENSG00000144824_34 (sequence is synthesized)
aaaaataaagaaggggttttaatacaaaccttcataataaatagcaaaataattgaagcttccatgagaaagaaaacactattttgataaattggatcacttataggaacatttctaata

SEQ ID NO: 390547 - DNA, 120 bp, Artificial Sequence
  ENSG00000144824_35 (sequence is synthesized)
aactgtttttaatcagttgtcggatttggtgaaataaactaaacaggttacagaatatctgtatgtacttggaaatacagaataactttatcacccaaatcactggcattgacattattg

SEQ ID NO: 390548 - DNA, 120 bp, Artificial Sequence
  ENSG00000144824_36 (sequence is synthesized)
gtaatcaactggctttttttaaaaaaggtagcattttgttgacagttattttgtaaacataagcaaataagggcttggagggaaatacattttaggaggagttttgccttaattttttaa

SEQ ID NO: 390549 - DNA, 120 bp, Artificial Sequence
  ENSG00000144824_37 (sequence is synthesized)
gtactgcaccaaaaccaaagagctgacctgacttctgtggaacagtagtaactgcaagtgatgaactgcatttcgtattgttctgtatatttcaaaatggtattttgatgccatcaaatg

SEQ ID NO: 390550 - DNA, 120 bp, Artificial Sequence
  ENSG00000144824_38 (sequence is synthesized)
cccaggaaattgactttgcagtgtcaccactggtgtaagctactatatatgtatatatatatgtagtaaaccactttttgtaaaagaagaaagagcaaaaagctgtgtgttttagaaaaa

SEQ ID NO: 390551 - DNA, 120 bp, Artificial Sequence
  ENSG00000144824_39 (sequence is synthesized)
aaagccaggttacgcaacaggcattctgtcatgttgaacaattttaaataaagagaatatctggtgttaggagcttgttttgctgaagatttctccattcctggtgctgagaataaaggc

SEQ ID NO: 390552 - DNA, 120 bp, Artificial Sequence
  ENSG00000144824_40 (sequence is synthesized)
aaccagtagccaatgtcctttagattgtctgatttctttttgttgtggagcacacctgctaactgctccctcaacataactatgaaatcatagctctgttttcaccaaagaacagaccaa

SEQ ID NO: 390553 - DNA, 120 bp, Artificial Sequence
  ENSG00000144824_41 (sequence is synthesized)
ttaacatacttatttgcagaagtggtgtagttctataaaacggcaaatgaagttcaacttaatattctctataatgtattattttattttattttttacaattagccttttttttagtta

SEQ ID NO: 390554 - DNA, 120 bp, Artificial Sequence
  ENSG00000144824_42 (sequence is synthesized)
atttttgtcaaatgaaacgacttcaggcaagtctcttttataatggtttttcaagtgccatttattctagtttatcatgttttgcatgtttgaaagtatgaatgtgctctttcctaaaac

SEQ ID NO: 390555 - DNA, 120 bp, Artificial Sequence
  ENSG00000144824_43 (sequence is synthesized)
atggcaaatgaatagatgtagagaataacaatattacttacaagatgaaatgattagattagaagtgtccctttattaaactttgtcagcctgactgggtacaattcttttgttaatttg

SEQ ID NO: 390556 - DNA, 120 bp, Artificial Sequence
  ENSG00000144824_44 (sequence is synthesized)
cagtgtggtttgtatacacgtatacgtgttatcaataataagattttgcaactggatgacacaagattttacttgaacagtgaaggacaaaaatcatgattgtggaagatatttttaaaa

SEQ ID NO: 390557 - DNA, 120 bp, Artificial Sequence
  ENSG00000144824_45 (sequence is synthesized)
tctgattttgcagcgatcacttttaaaccctgtagtgatgtaagactaaaatataattgctaagattttgttggttaatgtaaagatatgacttttctgcactgtactctcttcatagga

SEQ ID NO: 390558 - DNA, 120 bp, Artificial Sequence
  ENSG00000144824_46 (sequence is synthesized)
ttgtaaaggtgttctaatccaattgcatgatgtagtaagcctcttaaatatgtgtgttaaatatattgagtttggattaaaatgttgacatgatttcacatttgaaaataaactcatctc

SEQ ID NO: 390559 - DNA, 120 bp, Artificial Sequence
  ENSG00000144824_47 (sequence is synthesized)
ttattttgaagttacctatctgtagtatgatggaggatgaattaatcgcaaatgacagttgtagaaactatgtaaagtttgttgtgtgctaacattatgatttgtagtgtataaactgaa

SEQ ID NO: 390560 - DNA, 120 bp, Artificial Sequence
  ENSG00000144824_48 (sequence is synthesized)
gtattccaatagaagtatctctggttacatcctattgcttacaaaatgaaatgaaccctgaaaaactctgacatcatattgttgtctgtttacacagatacatttattgctggggattgc

SEQ ID NO: 390561 - DNA, 120 bp, Artificial Sequence
  ENSG00000144824_49 (sequence is synthesized)
aggtcagactgcaagattgtttgttcagatgtaggcctaacaagggattgttcttttaaaatcttctttaaggcaaaattttctgttttatttctttacagattccagcaagattatgga

SEQ ID NO: 390562 - DNA, 120 bp, Artificial Sequence
  ENSG00000144824_50 (sequence is synthesized)
tgaccacagtctgcagaggccagagagagcaggaaaggaaatggaaaggaacctcaccttcatgcttggggaaaaggagaaacctgtgttaatgtgtcttcccaacatcccactctcttc

SEQ ID NO: 390563 - DNA, 120 bp, Artificial Sequence
  ENSG00000144824_51 (sequence is synthesized)
agcaatcgctggaacagccatgggccatccctgctgagtcaggaaagaagctgagggaagagtcgggattgaaaagcagcagacaaggctggcactgatcccagtttatcctttgagatt

SEQ ID NO: 390564 - DNA, 120 bp, Artificial Sequence
  ENSG00000144824_52 (sequence is synthesized)
atagggtgcagaagagcccaagatgagagtgtgtagctatgagtgcctgccgtgggaagaggccatgaggacggagctgcagctggagtccagaagttcaggcagtgaaagggaggagag

SEQ ID NO: 390565 - DNA, 120 bp, Artificial Sequence
  ENSG00000144824_53 (sequence is synthesized)
accgcgagtcaggaggggccggcgggctcacggagggagacagggtgggcgggggcaaaggctaggcgctagggcggcggcgccagcgtagagcggcggtttggaggaaagatgagacga

SEQ ID NO: 390566 - DNA, 120 bp, Artificial Sequence
  ENSG00000144824_54 (sequence is synthesized)
ctgatgattttatcatgctaattatccaggatgttttcagtgaaatttcaatttaagaggtcattagctgagcgaggtgcagcaaattagggtgtttactgtaaagtaacaaatttgcac

SEQ ID NO: 390567 - DNA, 120 bp, Artificial Sequence
  ENSG00000144824_55 (sequence is synthesized)
tgtaaaaattgtagcagcacagaagagtagaaagaaagcacatttctcttctccctgcaccctttcaggttgtacacctgagtgataagcaggtgtaaaactggtgctaaaattgtctta

SEQ ID NO: 390568 - DNA, 120 bp, Artificial Sequence
  ENSG00000144824_56 (sequence is synthesized)
cctgccttcctaatattttctgtgtatatatggctatctgttataggcatagacagacagacacacacatagtgttctgtactttttttccctcactaaatgccttgggtatctttgcat

SEQ ID NO: 390569 - DNA, 120 bp, Artificial Sequence
  ENSG00000144824_57 (sequence is synthesized)
attagtatacatagctctacctcattctttttaatgaccaattgctcttcttttgtttgcaactaccgtttattttcagggtttttttttttttgctaataaaatccatatgcgcaaata

SEQ ID NO: 390570 - DNA, 120 bp, Artificial Sequence
  ENSG00000144824_58 (sequence is synthesized)
ttgtagcatatatatatttgcacaattctgcaaatgtgtctgtgggatcacttactaaaagtggaattgctgggtcaaagagtttgtgtatttttcactttactcaatatttccaaatcg

SEQ ID NO: 390571 - DNA, 120 bp, Artificial Sequence
  ENSG00000144824_59 (sequence is synthesized)
tacttctaaaagaccatattaaaaaaagagtctatatatccaggtgacactttgactaagtttatatgtgcatataaacacaagtgttctccatacacttgccaaggttgcatattgtca

SEQ ID NO: 390572 - DNA, 120 bp, Artificial Sequence
  ENSG00000144824_60 (sequence is synthesized)
aaatttttcaattagccaaattgatagaagtttaatttgcttttctttaattatacatcaagttggggatctttccatatttttagttattatttgtattttttgacccacttattcatg

SEQ ID NO: 390573 - DNA, 120 bp, Artificial Sequence
  ENSG00000144824_61 (sequence is synthesized)
ttcttcacccatttttttaattgttttatttttcttgtgttttactgagtagtaagagctgtttgtggtaagcagatgagccttttatcataactagtctttattttgactttatttgta

SEQ ID NO: 390574 - DNA, 120 bp, Artificial Sequence
  ENSG00000144824_62 (sequence is synthesized)
gtcttctggttgtatgttggtttaaaattgtcatccttttgaggatttgttaaatggagtttaaggaaaaatcttttaaatttttttttctttttctttttgtacaggacttagaacccc

SEQ ID NO: 390575 - DNA, 120 bp, Artificial Sequence
  ENSG00000144824_63 (sequence is synthesized)
aaaatcttttgttattacgtttttttcacacaggttaagaatttttttctacaacaatttaggttttaaatttctccaaaaatgatttgaaggagcttacaatgaaagatataaatttta

SEQ ID NO: 390576 - DNA, 120 bp, Artificial Sequence
  ENSG00000144824_64 (sequence is synthesized)
ttggactaaaattagaataacaaaaatagtaaataggaggaaaaagcagatatgatattcacaaggtagatttacttatttaggaataagtaggattaatgtattgatttgcttaattga

SEQ ID NO: 390577 - DNA, 120 bp, Artificial Sequence
  ENSG00000144824_65 (sequence is synthesized)
tgcttactattaagttcaactgtgagattctttagttaatcttttgttataagagaaggacacattgactctttaagaggaagatattgtcatggtactaaattctggcagtaatttatc

SEQ ID NO: 390578 - DNA, 120 bp, Artificial Sequence
  ENSG00000144824_66 (sequence is synthesized)
acatgggcattattcaggggagtttgcgtgtttgtttagctacagcaagacttttacactgaatgttcctagtcagaaatcattatctacctagtgagtttttccatgatacacatcagg

SEQ ID NO: 390579 - DNA, 84 bp, Artificial Sequence
  ENSG00000144824_67 (sequence is synthesized)
cattatctacctagtgagtttttccatgatacacatcaggacttcggactgttgaatacatgttggacatcaatcccttctttt

SEQ ID NO: 390580 - DNA, 77 bp, Artificial Sequence
  ENSG00000144824_68 (sequence is synthesized)
agggtgcgccactgagccctacccatcccttctttttgctatagtgaccatgtttaccttactaattctcaatggag

SEQ ID NO: 390581 - DNA, 120 bp, Artificial Sequence
  ENSG00000144824_69 (sequence is synthesized)
gctatagtgaccatgtttaccttactaattctcaatggagactaattctgaacaggacatctgtttctgtgggcagagagttgcaatgattagaaaccaggatagggaagaaagtagggg

SEQ ID NO: 390582 - DNA, 120 bp, Artificial Sequence
  ENSG00000144824_70 (sequence is synthesized)
cagggggaatcaaaagttgttgttcaggcacagtaaatgacccatcacttgaaaagttgagctgttgtcatcagccattgggcttccttagaaaccctttgcttccttttgatcttaaat

SEQ ID NO: 390583 - DNA, 120 bp, Artificial Sequence
  ENSG00000144824_71 (sequence is synthesized)
cttttcacatatcttcctttatggagatctgccagttttttgttaaaaacattaagctgtgtgctgtctctaaagactatcttttgggagacaggtttcctcctggagagggctatgaca

SEQ ID NO: 390584 - DNA, 120 bp, Artificial Sequence
  ENSG00000144824_72 (sequence is synthesized)
agaatgctgttggtgcgtacacgagcagatcttggcagatgtttttaattgctcaagcgtgtaattgtggaataggaggcctctgaagcttagtgcagcatctgttgttgcaagagaggt

SEQ ID NO: 390585 - DNA, 120 bp, Artificial Sequence
  ENSG00000144824_73 (sequence is synthesized)
aagactctgcatcctttagaggcaggaaacatcaaggacacccaggttaccagacagcagtgtagaaagagtacaagtgagcagagctgatggattccaagaaacacatttttttactta

SEQ ID NO: 390586 - DNA, 120 bp, Artificial Sequence
  ENSG00000144824_74 (sequence is synthesized)
ttactttctgaaggtggacatatattaccttgagacagcagacagaaaattctttttaaaacaaccttcctatttgttttgcatgctctttctcttcaattaatttccacactggattat

SEQ ID NO: 390587 - DNA, 120 bp, Artificial Sequence
  ENSG00000144824_75 (sequence is synthesized)
ttgcctaacaaagtacaatgttaataatcgatttagggataaatggagaagagaggaatgtgaaaaacactgtaagttgacttaactatacagaacaatcttaatgatatttagaaaacc

SEQ ID NO: 390588 - DNA, 120 bp, Artificial Sequence
  ENSG00000144824_76 (sequence is synthesized)
tgagagttaccagtcaagaacttgctttatgtaacacttacagatgcagatgactttggaaatatgctaattttagttggcctttgtgaaccaccccctgaggtaaaagttgtctggaaa

SEQ ID NO: 390589 - DNA, 120 bp, Artificial Sequence
  ENSG00000144824_77 (sequence is synthesized)
gtggctcatcttcctccttttgagtcccttgcacccctctctcctttggctgcaaaaagggttttaagaagaaatctgtgaaaaaggggcaagcagaaagtgtcttttcccctatcatct

SEQ ID NO: 390590 - DNA, 120 bp, Artificial Sequence
  ENSG00000144824_78 (sequence is synthesized)
ctcccctttcctgtgtggatcaagtttccccaaagataacatattagaggatgcatatacacacgtaatgtgcttattaaaacatgtcactgttagtagattcctgtccattactggaaa

SEQ ID NO: 390591 - DNA, 120 bp, Artificial Sequence
  ENSG00000144824_79 (sequence is synthesized)
aaaaaattcccagagaaattaaaatgaagggcatatgtttaaaattacaatgttctctgtcactgtaaaacttaaagctactcagtggctaccacaccttggctttctattggttttctt

SEQ ID NO: 390592 - DNA, 120 bp, Artificial Sequence
  ENSG00000144824_80 (sequence is synthesized)
tatttggttaataaatgagattacattgtcctcaccccattctatcataaagcgtttggttttagaatgcttcctggagattttgcttcttataaataacttagaaaaaaactacaaaca

SEQ ID NO: 390593 - DNA, 120 bp, Artificial Sequence
  ENSG00000144824_81 (sequence is synthesized)
tttcctagatggcatttattgctataaacagactcttaagttgtctattattaaatatatctactgtgataaactttctaaaaactttgaattatgcagatgattcccactattaaccat

SEQ ID NO: 390594 - DNA, 120 bp, Artificial Sequence
  ENSG00000144824_82 (sequence is synthesized)
ctttactccctacttgcttataaagtttagagttttgcagattgttctgttattttgtatttttcttaatgccttgcttccacctgtgaaagagatatttttaagccattttggaagtag

SEQ ID NO: 390595 - DNA, 120 bp, Artificial Sequence
  ENSG00000144824_83 (sequence is synthesized)
aaacctaatatgtaatcttgacccaacaggataccgcccttggtgaggctttcctgctaggattactcacagtgattctggaatgccatttcactgttacaggcattcctcatggcttaa

SEQ ID NO: 390596 - DNA, 120 bp, Artificial Sequence
  ENSG00000144824_84 (sequence is synthesized)
aacaggcaccttagtattaggacaatgagctttattgtctgtgataaaaaggtcaacagttgttttattagttgataagatatttcatgtaagatgacaattaaaaagctaaatgtcaaa

SEQ ID NO: 390597 - DNA, 120 bp, Artificial Sequence
  ENSG00000144824_85 (sequence is synthesized)
agcacggtgctctttctttgatcttcttggcttcaaaacaaattagaccaaggcccaagcttcataggcagatgtttctggttgctggcttgtgtctgtagatgtttaagattcaaagac

SEQ ID NO: 390598 - DNA, 120 bp, Artificial Sequence
  ENSG00000144824_86 (sequence is synthesized)
agtaaagagcaaagatcacctgtctattctggatttgtgtttccttccgctctttctcctcatcctatcactcaacatacatcagccccatggcctgaattcatggctacatctgtcgat

SEQ ID NO: 390599 - DNA, 120 bp, Artificial Sequence
  ENSG00000144824_87 (sequence is synthesized)
cctttacctttaaatgacacacctcctcctttaccagctaagaaacacagaaggcagcagcagcagcaggagcaacagcactttagaagtctggaagaaaggaaaaaacagcataaagaa

SEQ ID NO: 390600 - DNA, 120 bp, Artificial Sequence
  ENSG00000144824_88 (sequence is synthesized)
ctggcctttaccacttagcatcaacaaatgaaatgcaaagacttaccttctctgccctgtacacttagataggagctttggaaacagggatgtggccatttcctaaaggtccattcagcc

SEQ ID NO: 390601 - DNA, 120 bp, Artificial Sequence
  ENSG00000144824_89 (sequence is synthesized)
gcccatctgcccctaggacagagtaacagctgtggaagtgtgctccctccctcactggcagccatggccaaagactcagaatctcggaggatgctcagaggaaagtccaagaaaggaaga

SEQ ID NO: 390602 - DNA, 120 bp, Artificial Sequence
  ENSG00000144824_90 (sequence is synthesized)
ttcttgagtttttctctgtaaacttggatttaatctgaaactgtgaacatcataccttgttaatttgctattgtaactaacaccatcaatgagtgcatgttggaagtgttgtatgttttt

SEQ ID NO: 390603 - DNA, 120 bp, Artificial Sequence
  ENSG00000144824_91 (sequence is synthesized)
cctgcccccttgtcatcctttttgatcttgtatctttttccctttctacaatcattctccctcttcattcctgacttgtcctgtgccctcttcttctggctgtggactgtcattaggaag

SEQ ID NO: 390604 - DNA, 120 bp, Artificial Sequence
  ENSG00000144824_92 (sequence is synthesized)
gaggatgctcagaggatgatggtgtaagtataagccttaatcagcactgttaatagaactgacagcgtgagtcgtgcaaagaactttgagaggagagtttaaaacagagagctgagaaac

SEQ ID NO: 390605 - DNA, 120 bp, Artificial Sequence
  ENSG00000144824_93 (sequence is synthesized)
tcagcttctgaagttggaatggttattggcttttgaacaacttgtgaactattcctttgtcagctttagaatgaatgaaatctttgtccttttgttttttgttaaatacaggaaagtcca

SEQ ID NO: 390606 - DNA, 120 bp, Artificial Sequence
  ENSG00000144824_94 (sequence is synthesized)
tgacctcactgtttcattaaccagcatctacagggcagccttggagatggactccaggatatgtgggaatataggatattcatgttcactagccacagctgctatctttctcttctctcc

SEQ ID NO: 390607 - DNA, 120 bp, Artificial Sequence
  ENSG00000144824_95 (sequence is synthesized)
tgctatccttcttcttcccatatcactattaataggcttgtttggctatcttgaaggcctccaggaattaatgttaatttagttgctctgcggacttctcacaagtataaattctttaaa

SEQ ID NO: 390608 - DNA, 120 bp, Artificial Sequence
  ENSG00000144824_96 (sequence is synthesized)
aacataacagaggagttgggaattttatgaaatttctgagtcttacaaacttctctttaagactatgaggaaatgctgacttgtattatttatatcattaaatttgcttgtgtatggtta

SEQ ID NO: 390609 - DNA, 120 bp, Artificial Sequence
  ENSG00000144827_0 (sequence is synthesized)
agtgggacactgcagggtgcggggacaactacgaagatggcggttgcgcgcttggcagctgtggcggcctgggtaccttgtcggagctggggctgggcagccgtccccttcggtccccac

SEQ ID NO: 390610 - DNA, 120 bp, Artificial Sequence
  ENSG00000144827_1 (sequence is synthesized)
cgtggcctcagcgtgctgcttgcacggatacctcagcgggcgccacggtggctcccagcttgtagacaaaagacgtcactctcattccttaatcgaccagaccttccaaacctggcttat

SEQ ID NO: 390611 - DNA, 120 bp, Artificial Sequence
  ENSG00000144827_2 (sequence is synthesized)
aagaagctaaaaggcaaaagtccaggaattatcttcatccctggctatctttcttatatgaatggtacaaaagcgttggcgattgaggagttttgcaaatctctaggtcacgcctgcata

SEQ ID NO: 390612 - DNA, 120 bp, Artificial Sequence
  ENSG00000144827_3 (sequence is synthesized)
aggtttgattactcaggagttggaagttcagatggtaactcagaggaaagcacactggggaaatggagaaaagatgttctttctataattgatgacttagctgatgggccacagattctt

SEQ ID NO: 390613 - DNA, 120 bp, Artificial Sequence
  ENSG00000144827_4 (sequence is synthesized)
gttggatctagccttggagggtggcttatgcttcatgctgcaattgcacgaccagagaaggtcgtggctcttattggtgtagctacagctgcagataccttagtgacaaagtttaatcag

SEQ ID NO: 390614 - DNA, 120 bp, Artificial Sequence
  ENSG00000144827_5 (sequence is synthesized)
cttcctgttgagctaaaaaaggaagtagagatgaaaggtgtgtggagcatgccatcaaaatactctgaagaaggagtttataacgttcagtacagtttcattaaagaagctgaacatcac

SEQ ID NO: 390615 - DNA, 120 bp, Artificial Sequence
  ENSG00000144827_6 (sequence is synthesized)
tgcttgttacatagcccaattcctgtgaactgccccataagattgctccatggcatgaaggatgacattgtaccttggcatacatcaatgcaggttgccgatcgagtactcagcacagat

SEQ ID NO: 390616 - DNA, 120 bp, Artificial Sequence
  ENSG00000144827_7 (sequence is synthesized)
gtggatgtcatcctccgaaaacacagtgatcaccgaatgagggaaaaagcagacattcaacttcttgtttacactattgatgacttaattgataagctctcaactatagttaactagtat

SEQ ID NO: 390617 - DNA, 120 bp, Artificial Sequence
  ENSG00000144827_8 (sequence is synthesized)
cacatgtttagttggtatgtaaactaatgtatccagaagattggaagagggataagaaatgaaagatcctgatactttaggtttttccctttcctctattttgtaaatataagatgagta

SEQ ID NO: 390618 - DNA, 120 bp, Artificial Sequence
  ENSG00000144827_9 (sequence is synthesized)
ttatttaatgatgtatttgcataagtaatgcaaattgtgaagaaggaccagctgctgtttagaaaattttctccttccttctgtccttgattttttttcattaaagtatttccttttttt

SEQ ID NO: 390619 - DNA, 120 bp, Artificial Sequence
  ENSG00000144827_10 (sequence is synthesized)
aaagcgtgaatattttgttttttattatagacagaaatttgtaacattacttctgatttgaaaatgcaattcacaaaatatagggaaatttttattgaagtaaatttgaaatgatggaga

SEQ ID NO: 390620 - DNA, 80 bp, Artificial Sequence
  ENSG00000144827_11 (sequence is synthesized)
tatatatgttatataaactgcacattatattcaaacttaaaattgagctttttttttaaaggcccaaaattgtacagtga

SEQ ID NO: 390621 - DNA, 120 bp, Artificial Sequence
  ENSG00000144827_12 (sequence is synthesized)
tttttttttaaaggcccaaaattgtacagtgatacaaggagctatttctaaaatttggcttatgtataatatatttaaatggggaatttcatctaaaacaatgatgtagtatttttaata

SEQ ID NO: 390622 - DNA, 120 bp, Artificial Sequence
  ENSG00000144827_13 (sequence is synthesized)
ttctgattggtaaaattaaagaggaaattaatctttatatattatttcttgcagaaacattcattattttattaatattgccctaagtacaactaggcaagtgattgccacctaaatcag

SEQ ID NO: 390623 - DNA, 120 bp, Artificial Sequence
  ENSG00000144827_14 (sequence is synthesized)
aagacgttctaaagtcagtaagaaagtgtgaaatgctagtataaaggttattttttttctttcctaaataactaaagtgaggtgtagattgagccttgatattatttagttaatgttttt

SEQ ID NO: 390624 - DNA, 120 bp, Artificial Sequence
  ENSG00000144827_15 (sequence is synthesized)
tattaattaattttggctggactttatttagcttgattaggttattatctgtcaaaccttttaagttgacaacatgactcatatatatacatgtgtataagatgagcatgtgtcgaagac

SEQ ID NO: 390625 - DNA, 120 bp, Artificial Sequence
  ENSG00000144827_16 (sequence is synthesized)
ttattcgactcattaatgaggaaaccagcagatagtaaacctggttcaaagtacaattcaagaaactgagtatttatgggcattgaagaaaaaatgttgagataaaattgctgtgcagaa

SEQ ID NO: 390626 - DNA, 120 bp, Artificial Sequence
  ENSG00000144827_17 (sequence is synthesized)
aaaagtgttaatgaagccgacctgactacttaaccttagagacctgctttacaaggttggcccttgattggcatctgggaacttggagttcagggggcttccaccattcccagaactgat

SEQ ID NO: 390627 - DNA, 120 bp, Artificial Sequence
  ENSG00000144827_18 (sequence is synthesized)
caaagtagcttactatatctaaactgtaaaacaatatagtttctcctgaacacctgctttccttctgggagtctggaattttggtatgtgccaggcagagactacctttgtgaccagctc

SEQ ID NO: 390628 - DNA, 120 bp, Artificial Sequence
  ENSG00000144827_19 (sequence is synthesized)
ccagtaaaaaccccaggcactcagtctctaacaagcttttctggttgacagtgtttcacaagtgctgttacaactggttgctgggagaattaagctcatcctctgtgattccactggcgg

SEQ ID NO: 390629 - DNA, 120 bp, Artificial Sequence
  ENSG00000144827_20 (sequence is synthesized)
aggattcttggaagcttgcacttagtttcccctgacttcaccccatgtgtcttttttcctttgctgattttgttttgtatcctttcactgtaataaatcatggccgtgagcagaactgta

SEQ ID NO: 390630 - DNA, 120 bp, Artificial Sequence
  ENSG00000144827_21 (sequence is synthesized)
gtctgtaaacttgcatcttgtgatttagggtaattttaaaagcaacctttaaaagaccttttttaaaggcctttgtgccacgctgacaaccctggcagaaaaggacatcttaagggaaat

SEQ ID NO: 390631 - DNA, 120 bp, Artificial Sequence
  ENSG00000144827_22 (sequence is synthesized)
attggtaactaagctctttagaggcaataatgtatgtgacaacaaacagatatactagttggctttcatacagtctcttatattatcattttccactggggacttaaggactttatttga

SEQ ID NO: 390632 - DNA, 120 bp, Artificial Sequence
  ENSG00000144834_0 (sequence is synthesized)
gtgcagatgagaaagaggctctcagcgggagggaggcaggcgggcttgattgacacaggagagggctggctttttggagggctcttagcaacggccctggttgagccccctcagccatga

SEQ ID NO: 390633 - DNA, 120 bp, Artificial Sequence
  ENSG00000144834_1 (sequence is synthesized)
gaaaatcaaatcaatgtgccattcttccaggcgcgaggcagcagcggctgcagttcaacatgaaaggaggcttcctccctgcctgctaattacctgctcttcccgatctcatcgtttctg

SEQ ID NO: 390634 - DNA, 120 bp, Artificial Sequence
  ENSG00000144834_2 (sequence is synthesized)
cctttgcaaagtgctactgagaagggggaagaaacgtccgccacccatcccccttgctgcctgggggttcagacttgattgttgcccagccatatcccagccccgtctgcagggagccgg

SEQ ID NO: 390635 - DNA, 120 bp, Artificial Sequence
  ENSG00000144834_3 (sequence is synthesized)
aggctgctgctgctgctattgtgtggatgccgcgcgtgtcttctcttctttccagagatggctaacaggggcccgagctatggcttaagccgagaggtgcaggagaagatcgagcagaag

SEQ ID NO: 390636 - DNA, 120 bp, Artificial Sequence
  ENSG00000144834_4 (sequence is synthesized)
tatgatgcggacctggagaacaagctggtggactggatcatcctgcagtgcgccgaggacatagagcacccgccccccggcagggcccattttcagaaatggttaatggacgggacggtc

SEQ ID NO: 390637 - DNA, 120 bp, Artificial Sequence
  ENSG00000144834_5 (sequence is synthesized)
accaggacaagagcccatacccaagatctcagagtcaaagatggcttttaagcagatggagcaaatctcccagttcctaaaagctgcggagacctatggtgtcagaaccaccgacatctt

SEQ ID NO: 390638 - DNA, 120 bp, Artificial Sequence
  ENSG00000144834_6 (sequence is synthesized)
tcagacggtggatctatgggaagggaaggacatggcagctgtgcagaggaccctgatggctttaggcagcgttgcagtcaccaaggatgatggctgctatcggggagagccatcctggtt

SEQ ID NO: 390639 - DNA, 120 bp, Artificial Sequence
  ENSG00000144834_7 (sequence is synthesized)
tcacaggaaagcccagcagaatcggagaggcttttccgaggagcagcttcgccagggacagaacgtaataggcctgcagatgggcagcaacaagggagcctcccaggcgggcatgacagg

SEQ ID NO: 390640 - DNA, 120 bp, Artificial Sequence
  ENSG00000144834_8 (sequence is synthesized)
gtacgggatgcccaggcagatcatgtaggacgcggcatcctgcccctggtagagaggacgaatgttccacaccatggtctctacgaaaaagaaatagttagtcaccttctgaccttctcc

SEQ ID NO: 390641 - DNA, 120 bp, Artificial Sequence
  ENSG00000144834_9 (sequence is synthesized)
tctttctcaaagccttctgtccctggtttttgcaagtgctgcatttccgccgagaatccgcgttgcctactgctgccacctcctgttcatttagaactatgcaaagactccgcttccgtt

SEQ ID NO: 390642 - DNA, 120 bp, Artificial Sequence
  ENSG00000144834_10 (sequence is synthesized)
ttcctgagctcctcgggccccagagtctctgtttgattatttatttatttatttatttatttgccaaaaattctcctcttcaacttatagaatgcacctaataaagtaattagtcttgtg

SEQ ID NO: 390643 - DNA, 120 bp, Artificial Sequence
  ENSG00000144834_11 (sequence is synthesized)
gggttcagacttgattgtgaaaccccattggcttcattggctccttgatttaaaccacgcccggctttctgccctctttgctgctgctgggccaggttgcccagccatatcccagccccg

SEQ ID NO: 390644 - DNA, 120 bp, Artificial Sequence
  ENSG00000144834_12 (sequence is synthesized)
ggaatggcgctcccaggctacaggaatctctgtagtaaggagcagcattaggaatggggtcctctgggtctttggggcttagtataggagcctggctacacagcccagagcccgtgcctt

SEQ ID NO: 390645 - DNA, 120 bp, Artificial Sequence
  ENSG00000144837_0 (sequence is synthesized)
ataccagctctgagatttccagctcagcgatgcccccaggtccctgggagagctgcttctgggtggggggcctcattttgtggctcagcgttggaagttcaggggatgcacctcctaccc

SEQ ID NO: 390646 - DNA, 120 bp, Artificial Sequence
  ENSG00000144837_1 (sequence is synthesized)
cacagccaaagtgcgctgacttccagagcgccaacctttttgaaggcaccgatctcaaagtccagtttctcctctttgtcccttcgaatcctagctgtgggcagctagtagaaggaagca

SEQ ID NO: 390647 - DNA, 120 bp, Artificial Sequence
  ENSG00000144837_2 (sequence is synthesized)
gtgacctccaaaactctgggttcaatgccactctgggaaccaaactaattatccatggattcagggttttaggaacaaagccttcctggattgacacatttattagaacccttctgcgtg

SEQ ID NO: 390648 - DNA, 120 bp, Artificial Sequence
  ENSG00000144837_3 (sequence is synthesized)
caacgaatgctaatgtgattgccgtggactggatttatgggtctacaggagtctacttctcagctgtgaaaaatgtgattaagttgagcctcgagatctcccttttcctcaataaactcc

SEQ ID NO: 390649 - DNA, 120 bp, Artificial Sequence
  ENSG00000144837_4 (sequence is synthesized)
tggtgctgggtgtgtcggaatcctcaatccacatcattggtgttagcctgggggcccacgttgggggcatggtgggacagctcttcggaggccagctgggacagatcacaggcctggacc

SEQ ID NO: 390650 - DNA, 120 bp, Artificial Sequence
  ENSG00000144837_5 (sequence is synthesized)
ccgctggacctgagtacaccagggccagtgtggaagagcgcttggatgctggagatgccctcttcgtggaagccatccacacagacaccgacaatttgggtattcggattcccgttggac

SEQ ID NO: 390651 - DNA, 120 bp, Artificial Sequence
  ENSG00000144837_6 (sequence is synthesized)
atgtggactacttcgtcaacggaggccaagaccaacctggctgccccaccttcttttacgcaggttatagttatctgatctgtgatcacatgagggctgtgcacctctacatcagcgccc

SEQ ID NO: 390652 - DNA, 120 bp, Artificial Sequence
  ENSG00000144837_7 (sequence is synthesized)
gctgtctggattgctttaacccttttctgctttcctgcccaaggataggactggtggaacaaggtggtgtcaagatagagccgctccccaaggaagtgaaagtctacctcctgactactt

SEQ ID NO: 390653 - DNA, 120 bp, Artificial Sequence
  ENSG00000144837_8 (sequence is synthesized)
ccagtgctccgtactgcatgcatcacagcctcgtggagtttcacttgaaggaactgagaaacaaggacaccaacatcgaggttaccttccttagcagtaacatcacctcttcatctaaga

SEQ ID NO: 390654 - DNA, 120 bp, Artificial Sequence
  ENSG00000144837_9 (sequence is synthesized)
tcaccatacctaagcagcaacgctatgggaaaggaatcatagcccatgccaccccacaatgccagataaaccaagtgaaattcaagtttcagtcttccaaccgagtttggaaaaaagacc

SEQ ID NO: 390655 - DNA, 120 bp, Artificial Sequence
  ENSG00000144837_10 (sequence is synthesized)
ggactaccattattgggaagttctgcactgcccttttgcctgtcaatgacagagaaaagatggtctgcttacctgaaccagtgaacttacaagcaagtgtgactgtttcctgtgacctga

SEQ ID NO: 390656 - DNA, 120 bp, Artificial Sequence
  ENSG00000144837_11 (sequence is synthesized)
agatagcctgtgtgtagtttaacctgggcaggacacatctccctgcattttttttttttttttgagagagaggtgtgatgagggatgtgtgtgtgcagcttattgtagaccattactact

SEQ ID NO: 390657 - DNA, 120 bp, Artificial Sequence
  ENSG00000144837_12 (sequence is synthesized)
aaggagaaaagcaaagctctttcttattttcctcataatcagctaccctggaggggagggagaactcattttacagaacttggtttcctttgccgatcttatgtacatacccattttagc

SEQ ID NO: 390658 - DNA, 120 bp, Artificial Sequence
  ENSG00000144837_13 (sequence is synthesized)
tttcccatgcatacttaactgcacttgctttatctccttgggcattcgtacttaggattcaatagaaacatgtacagggtaaacaattttttaaaaataaaacttcatggagtatctgaa

SEQ ID NO: 390659 - DNA, 120 bp, Artificial Sequence
  ENSG00000144837_14 (sequence is synthesized)
gaattactccataccagctctgagatttccagctcagcgatgcccccaggtccctgggagagctgcttctgggtggggggcctcattttgtggctcagcgttggaagttcagggttttag

SEQ ID NO: 390660 - DNA, 120 bp, Artificial Sequence
  ENSG00000144837_15 (sequence is synthesized)
agtcacacctagtttttccttggactgtggagctttagattgttgagctccttgatcaacctggcccttgagcttccaggctggctcaggcgtcctctcctccaggtggatgcacaagtc

SEQ ID NO: 390661 - DNA, 120 bp, Artificial Sequence
  ENSG00000144837_16 (sequence is synthesized)
gggagttaaataaccaacaggacttctcaactaagaatgatcaagtaaccataataccataagaagttagtgggcaacaaggggaggaatgaatttaccaatggccacatgttccatccc

SEQ ID NO: 390662 - DNA, 120 bp, Artificial Sequence
  ENSG00000144837_17 (sequence is synthesized)
caatgcattccagcttctcactgttgctcctaaccatggcatttccttgaagctaggatgctggtgattgtaacgatgttaaatgtgaagtaaaaatgtgtccagaatccatgaaataca

SEQ ID NO: 390663 - DNA, 120 bp, Artificial Sequence
  ENSG00000144840_0 (sequence is synthesized)
aggcgttaacccagggaaggcagtggcaagatggcgtccctggatcgggtgaaggtactggtgttgggagactcaggtgttgggaaatcttcgttagtccatctcctatgccaaaatcaa

SEQ ID NO: 390664 - DNA, 120 bp, Artificial Sequence
  ENSG00000144840_1 (sequence is synthesized)
gtgctgggaaatccatcatggactgtgggctgctcagtggatgtcagagttcatgattacaaagaaggaaccccagaagagaagacctactacatagaattatgggatgttggaggctct

SEQ ID NO: 390665 - DNA, 120 bp, Artificial Sequence
  ENSG00000144840_2 (sequence is synthesized)
gtgggcagtgccagcagcgtgaaaagcacaagagcagtattctacaactccgtaaatggtattattttcgtacacgacttaacaaataagaagtcctcccaaaacttgcgtcgttggtca

SEQ ID NO: 390666 - DNA, 120 bp, Artificial Sequence
  ENSG00000144840_3 (sequence is synthesized)
ttggaagctctcaacagggatttggtgccaactggagtcttggtgacaaatggggattatgatcaagaacagtttgctgataaccaaataccactgttggtaatagggactaaactggac

SEQ ID NO: 390667 - DNA, 120 bp, Artificial Sequence
  ENSG00000144840_4 (sequence is synthesized)
cagattcatgaaacaaagcgccatgaagttttaactaggactgctttcctggctgaggatttcaatccagaagaaattaatttggactgcacaaatccacggtacttagctgcaggttct

SEQ ID NO: 390668 - DNA, 120 bp, Artificial Sequence
  ENSG00000144840_5 (sequence is synthesized)
tccaatgctgtcaagctcagtaggttttttgataaggtcatagagaagagatactttttaagagaaggtaatcagattccaggctttcctgatcggaaaagatttggggcaggaacatta

SEQ ID NO: 390669 - DNA, 120 bp, Artificial Sequence
  ENSG00000144840_6 (sequence is synthesized)
aagagccttcattatgactgaattacactcatcctttggaagagtgagcaagcagtggcagtttttcacagctcatcttgctgtgttcaattattaccatcacagccttttaacaaaatc

SEQ ID NO: 390670 - DNA, 120 bp, Artificial Sequence
  ENSG00000144840_7 (sequence is synthesized)
atcttaaaatgctacccttcagccttaccctttaatggaaaaatgaaaggaagtgacaatacgggaggtccaaactttgtccctgttctctgtgttccttacctttctgtccctgtgtat

SEQ ID NO: 390671 - DNA, 120 bp, Artificial Sequence
  ENSG00000144840_8 (sequence is synthesized)
agattatgtaaaagccttgtgtaaatatgagatgttgtcaaaatgatgcagtaaatgagcaatgacagtgtactgcagagaaaatttactcttgcctagaactggagggtttttatgggt

SEQ ID NO: 390672 - DNA, 120 bp, Artificial Sequence
  ENSG00000144840_9 (sequence is synthesized)
ctgtaattttcccacactcattgctgaaagcttaattaagtacttcaaaaacgtatctccattgttttaccttcttgaggggaacggtcttgttaaccagccctgagttgtctaccccaa

SEQ ID NO: 390673 - DNA, 120 bp, Artificial Sequence
  ENSG00000144840_10 (sequence is synthesized)
acaatctctgtcattttcaaagatgcaaaatggtgttatttaattgtctccaccattgtcacacacaggaatgcctaataatagcaacccttgtctccctcttctctcctttgcaaatgg

SEQ ID NO: 390674 - DNA, 120 bp, Artificial Sequence
  ENSG00000144840_11 (sequence is synthesized)
ctcagtgactggaagaggcggactaatagccagagttaaatataaatacaaattaataatacatagagaacagcaataccagaaaaaaagaattctggtaaaatgatgtgaaaaattgac

SEQ ID NO: 390675 - DNA, 120 bp, Artificial Sequence
  ENSG00000144840_12 (sequence is synthesized)
agctccctcactcttaaggttgctgctatatacagtctaggttttctgtttggaaataggtagggtaaaatctaagacctgcacaagggcagtgagagacatttacagcctcctctctat

SEQ ID NO: 390676 - DNA, 120 bp, Artificial Sequence
  ENSG00000144840_13 (sequence is synthesized)
ttgtttttttaaggaaaagtcaactcctgaaatgtcccttagctataatcagaaaactaagaatattattctgtgtcaacaatgtatttatggagagaagtaaaaataagttccacagca

SEQ ID NO: 390677 - DNA, 120 bp, Artificial Sequence
  ENSG00000144840_14 (sequence is synthesized)
acacatttacatgaattatgaactaggattcttggatttcataatcactccaaagctttttggggatggtgtgtgtgtgtgtgtgtgtccgtaattgttcatcattactttttttaacct

SEQ ID NO: 390678 - DNA, 120 bp, Artificial Sequence
  ENSG00000144840_15 (sequence is synthesized)
atctttttgcttgcttaatcttctctgccccagttcttcctgagtatatgaatttgatttctaaaaacaatttattcaacactctatcacccgtattctctctctggctctgctgcaggt

SEQ ID NO: 390679 - DNA, 120 bp, Artificial Sequence
  ENSG00000144840_16 (sequence is synthesized)
taaatatacagttttcatttctcatttaaaaaataggtggaaaacaccaaattcactttctgttccattttaattaggtttcagaagtatcttggaaatcaaggtatgctgcaagaggat

SEQ ID NO: 390680 - DNA, 120 bp, Artificial Sequence
  ENSG00000144840_17 (sequence is synthesized)
attaaaataagaatgttagagagtccttttagaaaggcagtcttgggaatttggaaaaggatttttaaagcagctttcatcagctagactgttctccagcctttctttacttcctctttg

SEQ ID NO: 390681 - DNA, 120 bp, Artificial Sequence
  ENSG00000144840_18 (sequence is synthesized)
aaaggacatagccctggtttctttttgacacaaaggaaagctatgcaaatcatgatctgtatgtagaattggtcacaagtatgttgttgcataggctgtacagttgggaagtagaaacca

SEQ ID NO: 390682 - DNA, 120 bp, Artificial Sequence
  ENSG00000144840_19 (sequence is synthesized)
aatgctacccagagacctaacccaattaagctctttgtatttctccttcaagaaataaatcttccttccttctttcttcctctttcttttaattttaaaaaaattcatcctgattttttt

SEQ ID NO: 390683 - DNA, 89 bp, Artificial Sequence
  ENSG00000144840_20 (sequence is synthesized)
attttctatcttatttaaaaaatttaatcccaacactttgggaggcgggtcgatcacttgatatcaggagtttgagaccagcctggcca

SEQ ID NO: 390684 - DNA, 120 bp, Artificial Sequence
  ENSG00000144840_21 (sequence is synthesized)
agcctaggtgacagagtgagactccaactaaaagaaaataaataaataaatatataaatatataaataaataataaaagtaaactattgctgatgactccagggtcaatctggaaaaatt

SEQ ID NO: 390685 - DNA, 120 bp, Artificial Sequence
  ENSG00000144840_22 (sequence is synthesized)
tattgctgatgactccagggtcaatctggaaaaattaacagtattcctcaactccattactttctgcagccaagcttgattccttgaattatagttttctaagaaaaaatagtttttaat

SEQ ID NO: 390686 - DNA, 120 bp, Artificial Sequence
  ENSG00000144840_23 (sequence is synthesized)
aatctaaggtaaatttgttgcaattattagcagcagcataataaggctttttgcgcaaatgaatgttattagctagagttattcaaaaaagaatgaagcacaatttttgctaggacttct

SEQ ID NO: 390687 - DNA, 120 bp, Artificial Sequence
  ENSG00000144840_24 (sequence is synthesized)
tgagaactattcataaaaatgcttttagataataaacaagtataaatgtcaaaatatttttttaaaagtataattggccaggtgctggctcacgcctataatcccagcactctaggagac

SEQ ID NO: 390688 - DNA, 120 bp, Artificial Sequence
  ENSG00000144840_25 (sequence is synthesized)
tgaggcaggaggatcacttgagctcgggagtttgaggctgcagtgattcatgattgcaccactgccttccagcagcctgatgacagagtgggactccatctctttacatatgtatatctt

SEQ ID NO: 390689 - DNA, 120 bp, Artificial Sequence
  ENSG00000144840_26 (sequence is synthesized)
actctcttgatgggacaagttggtagaaataaagattttttttttctgttgtgatttcggtgtctgaccaattttctgactcattgtgaaggtgaccagatatgaaggcatatatatgac

SEQ ID NO: 390690 - DNA, 120 bp, Artificial Sequence
  ENSG00000144840_27 (sequence is synthesized)
tactcctctgtcccttaggtgtataagacttagctggaatccaactaaagatttgggctggtctctccatcttaacgttgatgggattcaggacacataaccccaaaatattgcaccctg

SEQ ID NO: 390691 - DNA, 120 bp, Artificial Sequence
  ENSG00000144840_28 (sequence is synthesized)
ttatttgagaaaactgcagaagcaaggtttctcataccttccccttaccccttctcccctgaagcaggccataaaccctaagtgactgttccctgaagtagatcataaaaccttcattcc

SEQ ID NO: 390692 - DNA, 120 bp, Artificial Sequence
  ENSG00000144840_29 (sequence is synthesized)
ataggtaccctttatcctcacagatacagagacaccaagaagaatctggacaaataggacttgctaagttctccacagtttattaccattagattatgtccttttgtcctctgattatac

SEQ ID NO: 390693 - DNA, 120 bp, Artificial Sequence
  ENSG00000144840_30 (sequence is synthesized)
ttctgcataagactgtacataaaaatacacaagttttcctatttcttttttgtcttcatttctgaagattcctgtcatgtaaaacttacagtaaataaatgtgtgtgcttttctcaataa

SEQ ID NO: 390694 - DNA, 120 bp, Artificial Sequence
  ENSG00000144840_31 (sequence is synthesized)
ggcgcagccaagcccgccctacccgaggtcgcacacgggccgctccggggtcaatggttctttggaggaccaagaggaccaaggcaacagggtaattcattaggggaggatagttaagag

SEQ ID NO: 390695 - DNA, 120 bp, Artificial Sequence
  ENSG00000144840_32 (sequence is synthesized)
ggagcgaaaggaagaagaaatcatgaaatgcaatgcccggccagggaactccgaacaaggaacagggaacaaggtttaccaaggcgaatcctggaacactcccactacagctgcccccag

SEQ ID NO: 390696 - DNA, 120 bp, Artificial Sequence
  ENSG00000144840_33 (sequence is synthesized)
cgcttcaactaccggcttaaatgaaccacgccccttgcgcgacaaagaaaacgcactattcctgcgaccagctggggaagcaccccgctaccttttaccagaccagccaatgagttcagt

SEQ ID NO: 390697 - DNA, 120 bp, Artificial Sequence
  ENSG00000144840_34 (sequence is synthesized)
gatggagaaaggcagataaatacaggaagaacaggttgtagaagctcctttctaattgcttctgcactaggaagcaaagttagttttaactgaggatggggaagagatattagaagttta

SEQ ID NO: 390698 - DNA, 120 bp, Artificial Sequence
  ENSG00000144840_35 (sequence is synthesized)
taaagaggaaaaagtatgaaatagttatctggaagaggaaaatggtaaattaactgtggaattgattgaaggacagctccaaaggttcatgattacaaagaaggaaccccagaagagaag

SEQ ID NO: 390699 - DNA, 120 bp, Artificial Sequence
  ENSG00000144840_36 (sequence is synthesized)
agtggcaagatggcgtccctggatcgggtgaaggtactggtgttgggagactcagagataaaaaagctgcgtaagaaccctcaaggaacttaaaattaagggagtggttccaagatgacc

SEQ ID NO: 390700 - DNA, 120 bp, Artificial Sequence
  ENSG00000144843_0 (sequence is synthesized)
caggtgcgggggccctcgccgccaccctgcttatctggggacagtcccggaacccggtgacccggctccgccccaacccgcgccctcgtccacccgcagcagccaaggcctcttccccgg

SEQ ID NO: 390701 - DNA, 120 bp, Artificial Sequence
  ENSG00000144843_1 (sequence is synthesized)
ccccgggagcccgcgccacgcccgtcgctcgcgcgttccagtccaggctacagcaggggctctccagcctgcattccatggccaacagcagtgcagctgcagaagcacttctggaagcct

SEQ ID NO: 390702 - DNA, 120 bp, Artificial Sequence
  ENSG00000144843_2 (sequence is synthesized)
cctgacttgaactagaccttggacaccctctccagagcccagcaattgtgagggactgatggagaagtatgtggctgctatggtgctgagtgcagctggagatgccctggggtactacaa

SEQ ID NO: 390703 - DNA, 120 bp, Artificial Sequence
  ENSG00000144843_3 (sequence is synthesized)
tgggaagtgggagttcctccaggatggggagaagatacaccggcagttggcccagctgggcggcttggatgccctagacgtgggaaggtggagagttagtgacgacacagtgatgcactt

SEQ ID NO: 390704 - DNA, 120 bp, Artificial Sequence
  ENSG00000144843_4 (sequence is synthesized)
ggccacagcagaagctcttgtggaagctgggaaagcccctaagttgactcaactgtattacctccttgctaagcattaccaagactgcatggaagacatggatgggcgggcaccaggtgg

SEQ ID NO: 390705 - DNA, 120 bp, Artificial Sequence
  ENSG00000144843_5 (sequence is synthesized)
tgcctcggtgcacaacgccatgcagctgaagccgggcaagcccaatggctggaggattcccttcaacagccatgagggcggctgtggggctgccatgcgggccatgtgcatcggtctcag

SEQ ID NO: 390706 - DNA, 120 bp, Artificial Sequence
  ENSG00000144843_6 (sequence is synthesized)
gttcccacaccatagccaactggacacactgatccaagtgagcatcgagagtggtcggatgacccaccaccacccaacaggctacctgggggcccttgcgtctgctctttttacagccta

SEQ ID NO: 390707 - DNA, 120 bp, Artificial Sequence
  ENSG00000144843_7 (sequence is synthesized)
tgctgtgaatagcagaccacccttgcagtggggaaaaggactgatggagctgctaccagaagctaaaaagtacattgtccaatcaggctactttgtagaggaaaatcttcaacactggtc

SEQ ID NO: 390708 - DNA, 120 bp, Artificial Sequence
  ENSG00000144843_8 (sequence is synthesized)
ctacttccaaaccaaatgggaaaattacctaaaacttagagggattttggatggagaatcagcccctaccttccctgagtctttcggtgtgaaggagagggatcagttctacacctccct

SEQ ID NO: 390709 - DNA, 120 bp, Artificial Sequence
  ENSG00000144843_9 (sequence is synthesized)
gagctactctggctggggtggcagcagtgggcacgatgcccccatgattgcctacgatgctgttcttgctgcaggagactcctggaaggagcttgcccaccgagcctttttccatggtgg

SEQ ID NO: 390710 - DNA, 120 bp, Artificial Sequence
  ENSG00000144843_10 (sequence is synthesized)
agacagtgattctacagctgccattgctggctgctggtggggagttatgtatggttttaaaggagtgagtccctccaactatgagaaactagaatacagaaaccggctggaagagacagc

SEQ ID NO: 390711 - DNA, 120 bp, Artificial Sequence
  ENSG00000144843_11 (sequence is synthesized)
tagggctttatattctctcgggtcaaaagaagacactgtaatttccctttagggagacgtgatgttcacttctgatggattcttcttttgtgtatttccttttctgctatttcttttcag

SEQ ID NO: 390712 - DNA, 120 bp, Artificial Sequence
  ENSG00000144843_12 (sequence is synthesized)
tttttccaaagtcaagagtcttaaccttgtactcagggaattttgagataacaagtcccttgggcaccttaagctcagttttttcaggctcatcctgttcttccagaatctatccctttt

SEQ ID NO: 390713 - DNA, 120 bp, Artificial Sequence
  ENSG00000144843_13 (sequence is synthesized)
cttacactgaagagtcctttagctcaattgatagggtcagcgtctcgcaagcaaaaaatctcatgacctcatatttgagtcttcattttcatcatctacttgttctaaaagttttttctg

SEQ ID NO: 390714 - DNA, 120 bp, Artificial Sequence
  ENSG00000144843_14 (sequence is synthesized)
caggaaataccgatatgagaatggggaaatgaaaccaggaagggaagagagctagtatggggtatgttaatgagcaggtttccactgtgggcggttggcactctgccatctgagtcctct

SEQ ID NO: 390715 - DNA, 120 bp, Artificial Sequence
  ENSG00000144843_15 (sequence is synthesized)
gcctaaagcattcctcagaactgtcccatttgaagggcaagcaaacctggggtatttatccactgacttccatctgacactggttgaggaccactgccagggatgctaactccctggtaa

SEQ ID NO: 390716 - DNA, 120 bp, Artificial Sequence
  ENSG00000144843_16 (sequence is synthesized)
ttcttggcttaccctttgtacaaaccaaaccttagtgtcttcaggtaaagactcagagatacttgcaggggcaagctgtaaagggcatgggaacagtgagggacatatgtggggtcctaa

SEQ ID NO: 390717 - DNA, 120 bp, Artificial Sequence
  ENSG00000144843_17 (sequence is synthesized)
caatatctgctaggctggtctacctcctaaatatactctgaatctatcacctctattgccttcttgcactgaggatttttcagctggatttctgcaatccaagctactcaagtctgggag

SEQ ID NO: 390718 - DNA, 120 bp, Artificial Sequence
  ENSG00000144843_18 (sequence is synthesized)
atgctgctctgagctgctctcagtactctcctcatcatggcagttaacacattaccaattttgttattgtctgtttgcttgtttgcattatttctaaacagaacctagcacagtgcttgg

SEQ ID NO: 390719 - DNA, 120 bp, Artificial Sequence
  ENSG00000144843_19 (sequence is synthesized)
gcagccaataggcattaatcagtatctattgagtgttatgaactagcctcctagctcgtgcttccctcattaccctccagagttatgtttacgaataacaaattgaccatgctaaactaa

SEQ ID NO: 390720 - DNA, 120 bp, Artificial Sequence
  ENSG00000144843_20 (sequence is synthesized)
tcatgttccaatgaatacatcacctttcttcatttcttgatgctcttcccaatccttgtctacctgataataaattcttacttgtccttcaagacccaactcagatagatagagcttcct

SEQ ID NO: 390721 - DNA, 120 bp, Artificial Sequence
  ENSG00000144843_21 (sequence is synthesized)
gagtgaaacctgctttgattgttcaggcacttggccaccttctcctcactcctcccacagccttctgtcttggccttgtcatcacatcaatcctgttgtgtggtgctgtgtgtcttctgg

SEQ ID NO: 390722 - DNA, 120 bp, Artificial Sequence
  ENSG00000144843_22 (sequence is synthesized)
gtcagtcctaggcacatgctgcccagcacatgtccacctgggaaatgagatgccatcgtcacattcatttggtcaccctcagtccagccagtgggcttgctctcatttggcctgttctca

SEQ ID NO: 390723 - DNA, 120 bp, Artificial Sequence
  ENSG00000144843_23 (sequence is synthesized)
ggggtgggaaggaagagcgtcccttccttctccttttgagaaaaccacagaactatgactctcatgatttttcctttgtgaaatccctggttttcagctggaagcggtgggtaaatgagg

SEQ ID NO: 390724 - DNA, 120 bp, Artificial Sequence
  ENSG00000144843_24 (sequence is synthesized)
tctgatgatagcagtcctgccaccttctagttcatcccataggaatgtttttccaagtccttccagtctttttagaacgtggtggaggagggttgtgtgtgccccagggggtcgggggta

SEQ ID NO: 390725 - DNA, 120 bp, Artificial Sequence
  ENSG00000144843_25 (sequence is synthesized)
ggggatgcagggaggatcttagcatttgttgttttctagtgcagggctttagccacaattgtaaacaacaggaaaaggctctttagagatcctattagatttgctttgccgattgtcact

SEQ ID NO: 390726 - DNA, 120 bp, Artificial Sequence
  ENSG00000144843_26 (sequence is synthesized)
cttcatcacaggcacatttcaaaaagaggttagactttcagacttcttttttctcaaacctcaaaacttccaccccaaacttcgctctcagctggtgactttgcttctttatgtgtgtgt

SEQ ID NO: 390727 - DNA, 120 bp, Artificial Sequence
  ENSG00000144843_27 (sequence is synthesized)
atgtgtgtcagagaaagagagagagagagagagaagggaggatgagaacgaatggggggaagagataaactttatgcataacattagggtaaatcaataaagatggtctgacacatcgta

SEQ ID NO: 390728 - DNA, 120 bp, Artificial Sequence
  ENSG00000144843_28 (sequence is synthesized)
aaataaatgactagttaaaattaactaactgaatccttaacaaccattctaagaggcagatattattatcccactttatgcgtgagggcccagaaccctggcaagggcggcacactcagt

SEQ ID NO: 390729 - DNA, 120 bp, Artificial Sequence
  ENSG00000144843_29 (sequence is synthesized)
acgctcttcaagcatctgggcacacccggtccactacagtcctacaaagtcggacgtgagcacgggcgaaggcgtcagccggggccacacgggagtcactgaccacagccaggcgagagc

SEQ ID NO: 390730 - DNA, 120 bp, Artificial Sequence
  ENSG00000144843_30 (sequence is synthesized)
cggctttccggtgccgccacattccgggcaccaggctccgggctcttcagagcatttggggcgggcgacggaggtcccgtccactctcgcttgggtgcagaagggcgcggcggtgccagg

SEQ ID NO: 390731 - DNA, 120 bp, Artificial Sequence
  ENSG00000144843_31 (sequence is synthesized)
cctcggccccgcgctcccctcccccgcccctggcgctctccgagtgtggccgaccatgaggattcccagtcttgcaaatcgtgggagcgtgtcaaccgccccgtttctttccaaagccgg

SEQ ID NO: 390732 - DNA, 120 bp, Artificial Sequence
  ENSG00000144843_32 (sequence is synthesized)
gcatggcccggaagcagctgatcagatcttagttctgaatgtatagttcgggtacgagaatgtgacccgtgaaagttcagaggagttaagtaattacagcgttctgaaagcgaacgttaa

SEQ ID NO: 390733 - DNA, 120 bp, Artificial Sequence
  ENSG00000144843_33 (sequence is synthesized)
agggaatttacaaccgaaaaaagatgccggtcttcttcccccatcccagcttgcaattcacagaagcacacattagggtggagccagaaggaattacggaaaggacaatgaggacattga

SEQ ID NO: 390734 - DNA, 120 bp, Artificial Sequence
  ENSG00000144843_34 (sequence is synthesized)
gagggagggtatggggggttaaagttagtcctccgaggccaagaagcagagtgtcttggcctagtgtctgaaaatcgcagcgcaggacggaacttccgagagcctatacctccccacttc

SEQ ID NO: 390735 - DNA, 120 bp, Artificial Sequence
  ENSG00000144843_35 (sequence is synthesized)
cccctccagtttacagatgggcaaaccgctgtcccgggtgtctgtcaggtctagtagcccagaatctcagtgcctaggcttcactgtaaataataaactatgtaaataacatttacaaat

SEQ ID NO: 390736 - DNA, 120 bp, Artificial Sequence
  ENSG00000144843_36 (sequence is synthesized)
atcctttgtgagctcagaaactcagcattaccagtaactgggtagtggaacgcatccatcttcgtcgtttactccttctccaggggctctccagcctgcattccatggccaacagcagtg

SEQ ID NO: 390737 - DNA, 120 bp, Artificial Sequence
  ENSG00000144847_0 (sequence is synthesized)
ttctcaccttcctcaggcaagaagaataaatgtctctggtggaacttttgctctggtggaactgcttttctagaactggtgttgcagcatccctggaagtgtcagagagccctgggagta

SEQ ID NO: 390738 - DNA, 120 bp, Artificial Sequence
  ENSG00000144847_1 (sequence is synthesized)
tccaggtggcccggggtcagccagcagtcctgccctgcactttcactaccagcgctgccctcattaacctcaatgtcatttggatggtcactcctctctccaatgccaaccaacctgaac

SEQ ID NO: 390739 - DNA, 120 bp, Artificial Sequence
  ENSG00000144847_2 (sequence is synthesized)
aggtcatcctgtatcagggtggacagatgtttgatggtgccccccggttccacggtagggtaggatttacaggcaccatgccagctaccaatgtctctatcttcattaataacactcagt

SEQ ID NO: 390740 - DNA, 120 bp, Artificial Sequence
  ENSG00000144847_3 (sequence is synthesized)
tatcagacactggcacctaccagtgcctggtcaacaaccttccagacatagggggcaggaacattggggtcaccggtctcacagtgttagttcccccttctgccccacactgccaaatcc

SEQ ID NO: 390741 - DNA, 120 bp, Artificial Sequence
  ENSG00000144847_4 (sequence is synthesized)
aaggatcccaggatattggcagcgatgtcatcctgctctgtagctcagaggaaggcattcctcgaccaacttacctttgggagaagttagacaataccctcaaactacctccaacagcta

SEQ ID NO: 390742 - DNA, 120 bp, Artificial Sequence
  ENSG00000144847_5 (sequence is synthesized)
ctcaggaccaggtccagggaacagtcaccatccggaacatcagtgccctgtcttcaggtttgtaccagtgcgtggcttctaatgctattggaaccagcacctgtcttctggatctccagg

SEQ ID NO: 390743 - DNA, 120 bp, Artificial Sequence
  ENSG00000144847_6 (sequence is synthesized)
ttatttcaccccagcccaggaacattggactaatagctggagccattggcactggtgcagttattatcattttttgcattgcactaattttaggggcattcttttactggagaagcaaaa

SEQ ID NO: 390744 - DNA, 120 bp, Artificial Sequence
  ENSG00000144847_7 (sequence is synthesized)
ataaagaggaggaagaagaagaaattcctaatgaaataagagaggatgatcttccacccaagtgttcttctgccaaagcatttcacactgagatttcctcctcggacaacaacacactaa

SEQ ID NO: 390745 - DNA, 120 bp, Artificial Sequence
  ENSG00000144847_8 (sequence is synthesized)
cctcttccaatgcctacaacagtcgatactggagcaacaatccaaaagttcatagaaacacagagtcagtcagccacttcagtgacttgggccaatctttctctttccactcaggcaatg

SEQ ID NO: 390746 - DNA, 120 bp, Artificial Sequence
  ENSG00000144847_9 (sequence is synthesized)
ccaacataccatccatttatgctaatgggacccatctggtcccgggtcaacataagactctggtagtgacagccaacagagggtcatcaccacaggtgatgtccaggagcaatggctcag

SEQ ID NO: 390747 - DNA, 120 bp, Artificial Sequence
  ENSG00000144847_10 (sequence is synthesized)
tcagtaggaagcctcggcctccacacactcattcctacaccatcagccacgcaacactggaacgaattggtgcagtacctgtcatggtaccagcccagagtcgggccgggtccttggtat

SEQ ID NO: 390748 - DNA, 120 bp, Artificial Sequence
  ENSG00000144847_11 (sequence is synthesized)
aggacatgaggaaatgttgtgttcagaaatgaataaatggaatgccctcatacaagggggagggtggggtggggagtgctgggaaagaaacacttccttataattatattagtaaaatgc

SEQ ID NO: 390749 - DNA, 120 bp, Artificial Sequence
  ENSG00000144847_12 (sequence is synthesized)
acaaagaagaaggcagtgctgttacttggccactaagatgtgtaaaatggactgaaatgctccatcatgaagacttgcttccccaccaaagatgtcctgggattctgctggatctcaaag

SEQ ID NO: 390750 - DNA, 120 bp, Artificial Sequence
  ENSG00000144847_13 (sequence is synthesized)
aacttaataatttttaagagattaaagtgccagatggagtttaaatattgaaattattttaaaaggtaggtgtctttaagaaaataacaagcaaccctgtgatatgttccgtctctccca

SEQ ID NO: 390751 - DNA, 120 bp, Artificial Sequence
  ENSG00000144847_14 (sequence is synthesized)
attccctcgttatatagagggcttaatggtataaatggttaatattggtcccaacagggctgactcttctatcatataatcaaaactttttacatgagcaaaattcagtaagaaatgggg

SEQ ID NO: 390752 - DNA, 120 bp, Artificial Sequence
  ENSG00000144847_15 (sequence is synthesized)
gaagacaaaggaaacgtctttgagaagccccttcatatttatttatttatctcttcctgaaccatgaatttcatatgtggaatattgctatattgacagattcttgcctgtctgtgttat

SEQ ID NO: 390753 - DNA, 120 bp, Artificial Sequence
  ENSG00000144847_16 (sequence is synthesized)
tctaggatctgttacaggtccatggcaattactgtttattttttcctggaaaaatatttttttataaaaggcttttttttttttttaaatacatgagaggcattgggctaagaaagaaaa

SEQ ID NO: 390754 - DNA, 120 bp, Artificial Sequence
  ENSG00000144847_17 (sequence is synthesized)
gactgttgtataataccttgttcaatggttgtatttagtgagctcatagaggtccatcatatcatgaccgagctaggttgtgtgggcaggaaggtagggctaaggggttgtagccttgct

SEQ ID NO: 390755 - DNA, 120 bp, Artificial Sequence
  ENSG00000144847_18 (sequence is synthesized)
gggcagcctctcagagcaaggttgttcagatctcccttgctattacagtaggttactattaatgagggcagcacctgatgccttttgtactgaggtatgtaactttctccttatttgaca

SEQ ID NO: 390756 - DNA, 120 bp, Artificial Sequence
  ENSG00000144847_19 (sequence is synthesized)
agtagaagttaacttacttgtcagggagggcagacgtttttttgttctgtttcgtttttcaaaataatgctttttgcaaaagaggtaagactgagactaaaggtgttatcttctggtgtg

SEQ ID NO: 390757 - DNA, 120 bp, Artificial Sequence
  ENSG00000144847_20 (sequence is synthesized)
ctcctggaagtgtctaccctacatttgtgtcagctcagggttgcagtgttgcccagatgcattttacatcactgtaaagagattacttttgtggttactacctggcttggctggccttgc

SEQ ID NO: 390758 - DNA, 120 bp, Artificial Sequence
  ENSG00000144847_21 (sequence is synthesized)
ggttcaccagattaatttacaaactcccccactttattttgtgctatgtagatctggccatacttgcattagtgactgtcttgccttaaccacacttaagcaacccacaaatttcttctc

SEQ ID NO: 390759 - DNA, 120 bp, Artificial Sequence
  ENSG00000144847_22 (sequence is synthesized)
agatttgtttcctagattacttatgatactcatcccatgtctcaataagagtgtcttttctttctggatgtgttctcttactccctcttaccaccatactttttgctctcttctcctgca

SEQ ID NO: 390760 - DNA, 120 bp, Artificial Sequence
  ENSG00000144847_23 (sequence is synthesized)
agcgtagtcttcacagggagtggcttcctgacatttttttcagttatgtgaatgaatggaaaccaacagctgctgcaaacactgtttttccaagaaggctacactcagaacctaaccatt

SEQ ID NO: 390761 - DNA, 120 bp, Artificial Sequence
  ENSG00000144847_24 (sequence is synthesized)
gccaaccatttcagtattgataaaaagctgaatttactttagcattacttatttttttttccatttgatggttcttactttgtaaaaatttaaataaatgaatgtctatactttttataa

SEQ ID NO: 390762 - DNA, 120 bp, Artificial Sequence
  ENSG00000144847_25 (sequence is synthesized)
agaaaagtgaaaataccatgacactgaaaagatgatgctatcagatgctgtttagaaagcatttatcttgcatttctttattctttctaattatctaaaattcaataaaattttattcat

SEQ ID NO: 390763 - DNA, 120 bp, Artificial Sequence
  ENSG00000144847_26 (sequence is synthesized)
gtgcgtcagggagagtggccgtcccgctgttgtaagtggagggacggcagtcagctgaccctgcagtgtgcaggcgagcgcagggagtacgccatgtcctgagaaggggcgattctcagg

SEQ ID NO: 390764 - DNA, 120 bp, Artificial Sequence
  ENSG00000144847_27 (sequence is synthesized)
ctctggcagttacagcttctcctcaccctgccgagcaaccaggccacggggctccgtgcatcgccacctagagtgttaccctcttccttgttcacagaggttctccgcagtgtgtgagaa

SEQ ID NO: 390765 - DNA, 120 bp, Artificial Sequence
  ENSG00000144847_28 (sequence is synthesized)
agtcctggggcagggctgggtggcacggctggcgagcccggaacgcctctggtcacagctcagcgtccgcggagccgggcggcgctgcagctgcacttggctcgtctgtgggtctgacag

SEQ ID NO: 390766 - DNA, 120 bp, Artificial Sequence
  ENSG00000144847_29 (sequence is synthesized)
tcccagctctgcgcggggaacagcggcccggcgctgggtgtgggaggaccaggctgccccaagagcgcggagactcacgcccgctcctctcctgttgcgaccgggagccgggtaggaggc

SEQ ID NO: 390767 - DNA, 120 bp, Artificial Sequence
  ENSG00000144847_30 (sequence is synthesized)
agtgtgagcgacacagaagacaggcaagaagaataaatgtctctggtggaacttttgctctggtggaactgcttttctagaactggtggctaaagcaatcctagtgagacaatggcatga

SEQ ID NO: 390768 - DNA, 120 bp, Artificial Sequence
  ENSG00000144847_31 (sequence is synthesized)
gtaatagtaacagaggagttaagcagttgtgattttctgctccaataatagaatgaagtctcaagttttcatgtagacacaagtccctgagacctgccgtgccccagcagatttcctgca

SEQ ID NO: 390769 - DNA, 120 bp, Artificial Sequence
  ENSG00000144847_32 (sequence is synthesized)
aggggcagaagaagtgagcctagaaggatggacttgctgaacttctgtttatcctccaagatgtgattagtcttcatagaactccatagaagttcaggaagcaaggagcaatttgacttt

SEQ ID NO: 390770 - DNA, 120 bp, Artificial Sequence
  ENSG00000144847_33 (sequence is synthesized)
agcagcagtgtggaggatggattggaagtggaccggaggagatcagttgaggctgtcgtggttgttaaagatcatctctacacatatttgagggccagtgtccttaactgtgtcttgtat

SEQ ID NO: 390771 - DNA, 120 bp, Artificial Sequence
  ENSG00000144847_34 (sequence is synthesized)
atttgagaagccgtatgccataatgtattctggagcacacttcttagatttgaatctcagctagcccacttacacacttagacccagaaagaagagggcagcacacctcagggccagcag

SEQ ID NO: 390772 - DNA, 120 bp, Artificial Sequence
  ENSG00000144847_35 (sequence is synthesized)
tgtactctcaactggcggttgggaagaagacagaaagagatagacatgtgggtcgaagtctttactggggtccgtcgtgttacccaagtggctaaagcaatcctagtgagacaatggcat

SEQ ID NO: 390773 - DNA, 120 bp, Artificial Sequence
  ENSG00000144847_36 (sequence is synthesized)
ttctcagcgttcccctctggcgcctttgctgctcctctctctgcacggtggctaaagcaatcctagtgagacaatggcatgagtaatagtaacagaggagttaagcagttgtgattttct

SEQ ID NO: 390774 - DNA, 120 bp, Artificial Sequence
  ENSG00000144847_37 (sequence is synthesized)
aaaagtaattaactttaataggttttgaaaaataacaccctataactgctgaaaaagctttctggatcattttgtgttttcaaatttaaagtgaataaaagattttctctctcttctcta

SEQ ID NO: 390775 - DNA, 120 bp, Artificial Sequence
  ENSG00000144848_0 (sequence is synthesized)
agtgtcacgtgaggccccggtggcggcgcagctacggcaagagagtgagaaggaagggaagccggaaggggcgcgagtgaagcaaagcgaggacagacagctcgcagagggcgaggggtg

SEQ ID NO: 390776 - DNA, 120 bp, Artificial Sequence
  ENSG00000144848_1 (sequence is synthesized)
cgtgtgcgtccgcttctcacctcaggtctcccttcggccccgctgccctccctcgcggctgggtgacagctgggtccggtccgtcgcgggctgcctggggtgcgaggatcgcgcaccccg

SEQ ID NO: 390777 - DNA, 120 bp, Artificial Sequence
  ENSG00000144848_2 (sequence is synthesized)
tcttcgcgcgctgtgcctgccgccccgccccctcgtcccgcccgtcccgtcgcgtcgcgtcccgtcccctcgggtgctgccagccgggtgctgatgcgagtcggtggcagcgaggacatt

SEQ ID NO: 390778 - DNA, 120 bp, Artificial Sequence
  ENSG00000144848_3 (sequence is synthesized)
ttctgactccctggcccctgacacggctgcactttccatcccgtcgcggggccggccgctactccggccccaggatgcagaatgtgattaatactgtgaagggaaaggcactggaagtgg

SEQ ID NO: 390779 - DNA, 120 bp, Artificial Sequence
  ENSG00000144848_4 (sequence is synthesized)
ctgagtacctgaccccggtcctcaaggaatcaaagtttaaggaaacaggtgtaattaccccagaagagtttgtggcagctggagatcacctagtccaccactgtccaacatggcaatggg

SEQ ID NO: 390780 - DNA, 120 bp, Artificial Sequence
  ENSG00000144848_5 (sequence is synthesized)
ctacaggggaagaattgaaagtgaaggcatacctaccaacaggcaaacaatttttggtaaccaaaaatgtgccgtgctataagcggtgcaaacagatggaatattcagatgaattggaag

SEQ ID NO: 390781 - DNA, 120 bp, Artificial Sequence
  ENSG00000144848_6 (sequence is synthesized)
gaagaagatgatggtgatggcggatgggtagatacatatcacaacacaggtattacaggaataacggaagccgttaaagagatcacactggaaaataaggacaatataaggcttcaagat

SEQ ID NO: 390782 - DNA, 120 bp, Artificial Sequence
  ENSG00000144848_7 (sequence is synthesized)
tgctcagcactatgtgaagaggaagaagatgaagatgaaggagaagctgcagatatggaagaatatgaagagagtggattgttggaaacagatgaggctaccctagatacaaggaaaata

SEQ ID NO: 390783 - DNA, 120 bp, Artificial Sequence
  ENSG00000144848_8 (sequence is synthesized)
gtagaagcttgtaaagccaaaactgatgctggcggtgaagatgctattttgcaaaccagaacttatgacctttacatcacttatgataaatattaccagactccacgattatggttgttt

SEQ ID NO: 390784 - DNA, 120 bp, Artificial Sequence
  ENSG00000144848_9 (sequence is synthesized)
ggctatgatgagcaacggcagcctttaacagttgagcacatgtatgaagacatcagtcaggatcatgtgaagaaaacagtgaccattgaaaatcaccctcatctgccaccacctcccatg

SEQ ID NO: 390785 - DNA, 120 bp, Artificial Sequence
  ENSG00000144848_10 (sequence is synthesized)
tgttcagttcacccatgcaggcatgctgaggtgatgaagaaaatcattgagactgttgcagaaggagggggagaacttggagttcatatgtatcttcttattttcttgaaatttgtacaa

SEQ ID NO: 390786 - DNA, 120 bp, Artificial Sequence
  ENSG00000144848_11 (sequence is synthesized)
gctgtcattccaacaatagaatatgactacacaagacacttcacaatgtaatgaagagagcataaaatctatcctaattattggttctgatttttaaagaattaacccatagatgtgacc

SEQ ID NO: 390787 - DNA, 120 bp, Artificial Sequence
  ENSG00000144848_12 (sequence is synthesized)
attgaccatattcatcaatatatacagtttctctaataagggacttatatgtttatgcattaaataaaaatatgttccactaccagccttacttgtttaataaaaatcagtgcaaagaga

SEQ ID NO: 390788 - DNA, 120 bp, Artificial Sequence
  ENSG00000144848_13 (sequence is synthesized)
aggtgagtgctgaagatatactgaagtctttttattttacaataatactaaactaggtggcttttctgcttcataagaaaacatcttgaactttaattttgatttgagtaaaattaggtt

SEQ ID NO: 390789 - DNA, 120 bp, Artificial Sequence
  ENSG00000144848_14 (sequence is synthesized)
ttatgactgtgatttatgggaatttctacttcccatagaagaaaagatgtaacttccccgtcagtttgccacttctcatatttctctgtagttcctctttatttagaaatgagggtgaaa

SEQ ID NO: 390790 - DNA, 120 bp, Artificial Sequence
  ENSG00000144848_15 (sequence is synthesized)
aagtatagaattagctcacttatatctatctattcaatatcttcacttaaaaacaaaggcaaaaccccagtttttgaatgatactatgaagtaatacttaaattggtttagggaattttc

SEQ ID NO: 390791 - DNA, 120 bp, Artificial Sequence
  ENSG00000144848_16 (sequence is synthesized)
tattgcagtgtttcacattttggaaatcatctgttttacagttttatgattaatgttgaacttgattctttcttattttgaatgaactatgaattattcagtgtaacaataatgctaaga

SEQ ID NO: 390792 - DNA, 120 bp, Artificial Sequence
  ENSG00000144848_17 (sequence is synthesized)
ttttttgatgtgattgtatatttcatggatttattacttgagaatctttaaacatagaaccctaacagaaaaaaattttcttactaaaaagtaaaattctctcttgtcctccttagaaat

SEQ ID NO: 390793 - DNA, 120 bp, Artificial Sequence
  ENSG00000144848_18 (sequence is synthesized)
tttcttgtgcttaaatatataagaaaaaggaaaaaaaacttaccaatttgttttaagtttaatatgttaagaatttttttgttctctgtgggtgtttatagaatagatggatctttgtga

SEQ ID NO: 390794 - DNA, 120 bp, Artificial Sequence
  ENSG00000144848_19 (sequence is synthesized)
gtaaccttaatgatacagtagctataacttgttttaacttctcatctgaaaatcctagtagaagtctttcatttatttagaaaatgttatattgtgatagttatgccttgcttagttgat

SEQ ID NO: 390795 - DNA, 120 bp, Artificial Sequence
  ENSG00000144848_20 (sequence is synthesized)
ccccatgtgtagcagtagctcacccttgttacagaggtaactactaatttagaataataatatgagtatctttttcttatgtacatttccagtttaacatgttaccaaaaatgtactttc

SEQ ID NO: 390796 - DNA, 120 bp, Artificial Sequence
  ENSG00000144848_21 (sequence is synthesized)
ccatcaggtaaaagtaaaattaggttgtgtcaatctgaggtgtctctgaagcaaataattcagcttaaacaaatacgttaattaaaagtaatgtactacgtgaagtgctttagatattct

SEQ ID NO: 390797 - DNA, 120 bp, Artificial Sequence
  ENSG00000144848_22 (sequence is synthesized)
taaaatatagtacgttcatttttctcaagacagtagcacctttcttgtatcttactatagttttcctactcagttttcttggattgacaaaagtaatacattcaagttaatgcccaagca

SEQ ID NO: 390798 - DNA, 120 bp, Artificial Sequence
  ENSG00000144848_23 (sequence is synthesized)
aactgttggatcctaaagtacatgtactcatagcatagatttatcaaaaacagtcaaaatcaatgatttacatgccagatagcttgaattagtttgatgctaggttaatacttgacttgg

SEQ ID NO: 390799 - DNA, 120 bp, Artificial Sequence
  ENSG00000144848_24 (sequence is synthesized)
tggtggtttcggctactatgtgttagattagatgtggagactaagatgccacgtctaatcagactgtggggcattgctaataaagtgtgtccctaagaagaactttgaactgatttgata

SEQ ID NO: 390800 - DNA, 120 bp, Artificial Sequence
  ENSG00000144848_25 (sequence is synthesized)
ttgaaacaaaccaaaaacttccagtccaaaccatatttactcctgaagtcctattatgcctaactggcacatctctgctggatgctaggtagcaacttggaagactgtctatatataatt

SEQ ID NO: 390801 - DNA, 120 bp, Artificial Sequence
  ENSG00000144848_26 (sequence is synthesized)
cataatagtaattggtttcccccaatgaaaagtaagctcctaatgtttttaagtgcaatgaacataaaaaaatttcagaatttaattaaagacagtccagtagagctcagtctttggcaa

SEQ ID NO: 390802 - DNA, 120 bp, Artificial Sequence
  ENSG00000144848_27 (sequence is synthesized)
atacatacactaacctagaatcagtctactatacaggatttttatttaatttttttctcttttgctatagtacttcattatagtctattctgcctcattttctgacataactctagcaaa

SEQ ID NO: 390803 - DNA, 120 bp, Artificial Sequence
  ENSG00000144848_28 (sequence is synthesized)
cttaaaggagtctagtaaatgagtacattttgtactcatttaaacatgtatagctttgtcctttttatgtcaaagtaattgtgcttatatgaacacctactcattaagaagtttcaaatt

SEQ ID NO: 390804 - DNA, 120 bp, Artificial Sequence
  ENSG00000144848_29 (sequence is synthesized)
caataatcgaatgagtggtcaggtagtcttaaagagcctcatgttaaatagacacaaatttgcatagttgaattctttaatagacttaatttaagattttgtggggtttttttgagaaat

SEQ ID NO: 390805 - DNA, 120 bp, Artificial Sequence
  ENSG00000144848_30 (sequence is synthesized)
taatggcttaataaaatggataattacaacatgggcttaaaacatagaactatttacaaatcttattttccttagctaaaaacctttaggtatcttcttattttcttgaaatttgtacaa

SEQ ID NO: 390806 - DNA, 120 bp, Artificial Sequence
  ENSG00000144848_31 (sequence is synthesized)
tgtttttgactcagaaatagtcatttagatatggtttgctgtgttgtgactgcctttctgtgaatgtagactgtggagttaaccttgtgatttttctaggtgacctatttgctttctttt

SEQ ID NO: 390807 - DNA, 120 bp, Artificial Sequence
  ENSG00000144848_32 (sequence is synthesized)
attgattagtgaagggagatatatggatgtatgttcttcagttgagagcttgtcagccttagcaagtcaagtgcattttataagttgggattttctttgtatcagtgttttttcacagag

SEQ ID NO: 390808 - DNA, 120 bp, Artificial Sequence
  ENSG00000144848_33 (sequence is synthesized)
ccaaatctgtgaagctgaacctatatacatgattagttcagaatttttcttaaaaaacagttactacatgccaatttctttaggttggttatttctaatagataactttcccagttgact

SEQ ID NO: 390809 - DNA, 120 bp, Artificial Sequence
  ENSG00000144848_34 (sequence is synthesized)
ggaaaatactggtaacatactagtaacaatatttttcagtgaaactcatattctgttgactagttagatgaaacattttgttttctcttccctctagttaaaaacaacctttaatatttt

SEQ ID NO: 390810 - DNA, 120 bp, Artificial Sequence
  ENSG00000144848_35 (sequence is synthesized)
cttctcatattctgcaacctctttactctcaaactttaactccgtggaagaccttgctcattttttcagttttattatgtctgaaactttgctaactatgaaaaataatttaggagccat

SEQ ID NO: 390811 - DNA, 120 bp, Artificial Sequence
  ENSG00000144848_36 (sequence is synthesized)
tagttttagttttgaattatgtaatctaaaaagttttcagtttttagagttattctcttgattcctcttatggtttaaggtcttaggatggtgcttatcaaactgaagcgtatctctctg

SEQ ID NO: 390812 - DNA, 120 bp, Artificial Sequence
  ENSG00000144848_37 (sequence is synthesized)
ataaaataaaacttcaaggacattttagaccattccatgggctgcctcagattgtgccttcaaatcctctggaatcatacatttactctcatattctaagttgactgtctctgtcatgaa

SEQ ID NO: 390813 - DNA, 120 bp, Artificial Sequence
  ENSG00000144848_38 (sequence is synthesized)
gattatagtcgtaaaaactgaagcagcattatttaagccaaggtatgttaaaaagactgtttctttaaaaattatctttttcttggtttctgtgcctagatactaactttgatatcactc

SEQ ID NO: 390814 - DNA, 120 bp, Artificial Sequence
  ENSG00000144848_39 (sequence is synthesized)
ttttctatagtacaggagagagaacagttagccatgaaaagatgtatagataggacaaaaacttcatataaataaatacctttcttcttataagccaaaaaatttatttttacatagaat

SEQ ID NO: 390815 - DNA, 120 bp, Artificial Sequence
  ENSG00000144848_40 (sequence is synthesized)
tggataaattttagaatacctattaggacaaagaaacaaatacaaacctctcaactctaaccaattagcttttcttaaaccctctcagttttggcttattctcagctaaataaacagccc

SEQ ID NO: 390816 - DNA, 120 bp, Artificial Sequence
  ENSG00000144848_41 (sequence is synthesized)
agatcacaagattatagatacctctttgcttttttgtccaactgataccatgtgtctttttttttttttttttaatttgcctgatatgactcttgtttcttagagcaaacagctatcatt

SEQ ID NO: 390817 - DNA, 120 bp, Artificial Sequence
  ENSG00000144848_42 (sequence is synthesized)
ccacattttctcctggaatgatttcctcatctctggttttctgccttccttgtctctcccaattatcagaacactaactaatgccatggtgtctgctgtgactaccatagctttttaaga

SEQ ID NO: 390818 - DNA, 120 bp, Artificial Sequence
  ENSG00000144848_43 (sequence is synthesized)
ttatgccctcccctggtaaaactgttggcatggcataacaatctgttatcttttgtgtttcggaagtggaggggagatattttataatttaactattttaataaatattttatagttatt

SEQ ID NO: 390819 - DNA, 120 bp, Artificial Sequence
  ENSG00000144848_44 (sequence is synthesized)
ggggagtggtgggggagatagtttataatataactattaaaaattaattcactgagagtaatagggtcgatttctttacaaatgaaaatatgtttttcttctttcggtctaatcgatcta

SEQ ID NO: 390820 - DNA, 120 bp, Artificial Sequence
  ENSG00000144848_45 (sequence is synthesized)
gtgttacgcttccggaaggaggggagaagcggcttatcccgccccagcccggcccctttctcacgtcacgtgccgggagagtctagtgtcacgtgaggccccggtggcggcgcagctacg

SEQ ID NO: 390821 - DNA, 120 bp, Artificial Sequence
  ENSG00000144852_0 (sequence is synthesized)
ggcctgctgggttagtgctggcagccccctgaggccaaggacagcagcatgacagtcaccaggactcaccacttcaaggaggggtccctcagagcacctgccatacccctgcacagtgct

SEQ ID NO: 390822 - DNA, 120 bp, Artificial Sequence
  ENSG00000144852_1 (sequence is synthesized)
gcggctgagttggcttcaaaccatccaagaggcccagaagcaaacctggaggtgagacccaaagaaagctggaaccatgctgactttgtacactgtgaggacacagagtctgttcctgga

SEQ ID NO: 390823 - DNA, 120 bp, Artificial Sequence
  ENSG00000144852_2 (sequence is synthesized)
aagcccagtgtcaacgcagatgaggaagtcggaggtccccaaatctgccgtgtatgtggggacaaggccactggctatcacttcaatgtcatgacatgtgaaggatgcaagggctttttc

SEQ ID NO: 390824 - DNA, 120 bp, Artificial Sequence
  ENSG00000144852_3 (sequence is synthesized)
aggagggccatgaaacgcaacgcccggctgaggtgccccttccggaagggcgcctgcgagatcacccggaagacccggcgacagtgccaggcctgccgcctgcgcaagtgcctggagagc

SEQ ID NO: 390825 - DNA, 120 bp, Artificial Sequence
  ENSG00000144852_4 (sequence is synthesized)
ggcatgaagaaggagatgatcatgtccgacgaggccgtggaggagaggcgggccttgatcaagcggaagaaaagtgaacggacagggactcagccactgggagtgcaggggctgacagag

SEQ ID NO: 390826 - DNA, 120 bp, Artificial Sequence
  ENSG00000144852_5 (sequence is synthesized)
gagcagcggatgatgatcagggagctgatggacgctcagatgaaaacctttgacactaccttctcccatttcaagaatttccggctgccaggggtgcttagcagtggctgcgagttgcca

SEQ ID NO: 390827 - DNA, 120 bp, Artificial Sequence
  ENSG00000144852_6 (sequence is synthesized)
gagtctctgcaggccccatcgagggaagaagctgccaagtggagccaggtccggaaagatctgtgctctttgaaggtctctctgcagctgcggggggaggatggcagtgtctggaactac

SEQ ID NO: 390828 - DNA, 120 bp, Artificial Sequence
  ENSG00000144852_7 (sequence is synthesized)
aaacccccagccgacagtggcgggaaagagatcttctccctgctgccccacatggctgacatgtcaacctacatgttcaaaggcatcatcagctttgccaaagtcatctcctacttcagg

SEQ ID NO: 390829 - DNA, 120 bp, Artificial Sequence
  ENSG00000144852_8 (sequence is synthesized)
gacttgcccatcgaggaccagatctccctgctgaagggggccgctttcgagctgtgtcaactgagattcaacacagtgttcaacgcggagactggaacctgggagtgtggccggctgtcc

SEQ ID NO: 390830 - DNA, 120 bp, Artificial Sequence
  ENSG00000144852_9 (sequence is synthesized)
tactgcttggaagacactgcaggtggcttccagcaacttctactggagcccatgctgaaattccactacatgctgaagaagctgcagctgcatgaggaggagtatgtgctgatgcaggcc

SEQ ID NO: 390831 - DNA, 120 bp, Artificial Sequence
  ENSG00000144852_10 (sequence is synthesized)
atctccctcttctccccagaccgcccaggtgtgctgcagcaccgcgtggtggaccagctgcaggagcaattcgccattactctgaagtcctacattgaatgcaatcggccccagcctgct

SEQ ID NO: 390832 - DNA, 120 bp, Artificial Sequence
  ENSG00000144852_11 (sequence is synthesized)
ttgctacgcccctcatgcaggagttgttcggcatcacaggtagctgagcggctgcccttgggtgacacctccgagaggcagccagacccagagccctctgagccgccactcccgggccaa

SEQ ID NO: 390833 - DNA, 120 bp, Artificial Sequence
  ENSG00000144852_12 (sequence is synthesized)
gacagatggacactgccaagagccgacaatgccctgctggcctgtctccctagggaattcctgctatgacagctggctagcattcctcaggaaggacatgggtgccccccacccccagtt

SEQ ID NO: 390834 - DNA, 120 bp, Artificial Sequence
  ENSG00000144852_13 (sequence is synthesized)
cagtctgtagggagtgaagccacagactcttacgtggagagtgcactgacctgtaggtcaggaccatcagagaggcaaggttgccctttccttttaaaaggccctgtggtctggggagaa

SEQ ID NO: 390835 - DNA, 120 bp, Artificial Sequence
  ENSG00000144852_14 (sequence is synthesized)
atccctcagatcccactaaagtgtcaaggtgtggaagggaccaagcgaccaaggatgggccatctggggtctatgcccacatacccacgtttgttcgcttcctgagtcttttcattgcta

SEQ ID NO: 390836 - DNA, 120 bp, Artificial Sequence
  ENSG00000144852_15 (sequence is synthesized)
cctctaatagtcctgtctcccacttcccactcgttcccctcctcttccgagctgctttgtgggctccaggcctgtactcatcggcaggcgcatgagtatctgtgggagtcctctagagag

SEQ ID NO: 390837 - DNA, 120 bp, Artificial Sequence
  ENSG00000144852_16 (sequence is synthesized)
atgagaagccaggaggcctgcaccaaatgtcagaagcttggcatgacctcattccggccacatcattctgtgtctctgcatccatttgaacacattattaagcaccgataataggtagcc

SEQ ID NO: 390838 - DNA, 120 bp, Artificial Sequence
  ENSG00000144852_17 (sequence is synthesized)
tgctgtggggtatacagcattgactcagatatagatcctgagctcacagagtttatagttaaaaaaacaaacagaaacacaaacgatttggatcaaaaggagaaatgataagtgacaaaa

SEQ ID NO: 390839 - DNA, 120 bp, Artificial Sequence
  ENSG00000144852_18 (sequence is synthesized)
gcagcacaaggaatttccctgtgtggatgctgagctgtgatggcgggcactgggtacccaagtgaaggttcccaaggacatgagtctgtaggagcaagggcacaaactgcagctgtgagt

SEQ ID NO: 390840 - DNA, 120 bp, Artificial Sequence
  ENSG00000144852_19 (sequence is synthesized)
gcgtgtgtgtgatttggtgtaggtaggtctgtttgccacttgatggggcctgggtttgttcctggggctggaatgctgggtatgctctgtgacaaggctacgctgacaatcagttaaaca

SEQ ID NO: 390841 - DNA, 120 bp, Artificial Sequence
  ENSG00000144852_20 (sequence is synthesized)
caccggagaagaaccatttacatgcaccttatatttctgtgtacacatctattctcaaagctaaagggtatgaaagtgcctgccttgtttatagccacttgtgagtaaaaatttttttgc

SEQ ID NO: 390842 - DNA, 120 bp, Artificial Sequence
  ENSG00000144852_21 (sequence is synthesized)
attttcacaaattatactttatataaggcattccacacctaagaactagttttgggaaatgtagccctgggtttaatgtcaaatcaaggcaaaaggaattaaataatgtacttttggcta

SEQ ID NO: 390843 - DNA, 120 bp, Artificial Sequence
  ENSG00000144852_22 (sequence is synthesized)
ttcttaaccctttccagctttcccaccctctttggctttagccatggccttctgatctgtgtttctcaggggacctgcaggccccagatatagccccatgctgtcctcctaccccagagc

SEQ ID NO: 390844 - DNA, 120 bp, Artificial Sequence
  ENSG00000144852_23 (sequence is synthesized)
acactgttcaggctacttccactggtactgaaatccagtatttcacttactctttttctttccaatatcctcatgacattcaatatttcacttactctaggtcctccctgcctaaggccc

SEQ ID NO: 390845 - DNA, 120 bp, Artificial Sequence
  ENSG00000144852_24 (sequence is synthesized)
aagtcaactttctgtccagtgggatttgtaatccaatacctcctagccctagcagaatcccatgtggataatcagaaatgtgactggaaaaaggacagagctctatggctgtgggtccca

SEQ ID NO: 390846 - DNA, 120 bp, Artificial Sequence
  ENSG00000144852_25 (sequence is synthesized)
gtccccactgctggcagtaagtccccagcagtgagctgtgtaagcaccttacattctgcgcttggttgaaaacagcaaggcaagcatccacttgagaaatgtcaacccctaggaaatccc

SEQ ID NO: 390847 - DNA, 120 bp, Artificial Sequence
  ENSG00000144852_26 (sequence is synthesized)
agcctcaagtctttctcatcccttgggaagtgcaaattggatagagaagaaaccaattaaaaacaaaacaaacaaatcatacttagatattctggcttttctcaccagggctggattaaa

SEQ ID NO: 390848 - DNA, 120 bp, Artificial Sequence
  ENSG00000144852_27 (sequence is synthesized)
gcatgtacttcaaaataataacaacttaagtcaataaataaatgtaaggaagtccaaatgttcacctgaagacaactgtggtcattttttggcaatcccaggttctcttttctacctgtt

SEQ ID NO: 390849 - DNA, 120 bp, Artificial Sequence
  ENSG00000144852_28 (sequence is synthesized)
tgctcaatcgtggtctccctctccctctcttgttggggcccatgcccctgctttactgttgccagaggcttgtacttgtttgccttttaggtaggagcagttacttccactcccctcacc

SEQ ID NO: 390850 - DNA, 120 bp, Artificial Sequence
  ENSG00000144852_29 (sequence is synthesized)
tgccataaagcatctttataaacaaagcaagtagaagaaacacatcctggtatccaccacattcggcttttgttgattctgttcacttgggagcacctgctgctagggaataagaaggtt

SEQ ID NO: 390851 - DNA, 120 bp, Artificial Sequence
  ENSG00000144852_30 (sequence is synthesized)
gaggctgaagagtgaggactcttcagctcccctctggcaggacccgggagaggaaagagccctcagctggtccatcctccccactcctggtcagccttctgttctgagatcaaagtggtg

SEQ ID NO: 390852 - DNA, 120 bp, Artificial Sequence
  ENSG00000144852_31 (sequence is synthesized)
gggtcacattctcgagaactgtgctcagccccctcatctcacaccctttccctctccctgtgtgcctgcccccctcttacataaccatgctggtgattggcaccgtcataaatcaatact

SEQ ID NO: 390853 - DNA, 120 bp, Artificial Sequence
  ENSG00000144852_32 (sequence is synthesized)
ttgctcactttcacatcaagtaacactatccagggaggtggtttcaacaaaggaggaagtataaggagatctaggttcaaattaatgttgcccctagtggtaaaggacagagaccctcag

SEQ ID NO: 390854 - DNA, 120 bp, Artificial Sequence
  ENSG00000144852_33 (sequence is synthesized)
actgatgaaatgcactcagaattacttagacaaagcggatatttgccactctcttccccttttcctgtgtttttgtagtgaagagacctgaaagaaaaaagtagggagaacataatgaga

SEQ ID NO: 390855 - DNA, 120 bp, Artificial Sequence
  ENSG00000144852_34 (sequence is synthesized)
acaaatacggtaatctcttcatttgctagttcaagtgctggacttgggacttaggaggggcaatggagccgcttagtgcctacatctgacttggactgaaatataggtgagagacaagat

SEQ ID NO: 390856 - DNA, 120 bp, Artificial Sequence
  ENSG00000144852_35 (sequence is synthesized)
tgtctcatatccggggaaatcataacctatgactaggacgggaagaggaagcactgcctttacttcagtgggaatctcggcctcagcctgcaagccaagtgttcacagtgagaaaagcaa

SEQ ID NO: 390857 - DNA, 120 bp, Artificial Sequence
  ENSG00000144852_36 (sequence is synthesized)
gagaataagctaatactcctgtcctgaacaaggcagcggctccttggtaaagctactccttgatcgatcctttgcaccggattgttcaaagtggaccccaggggagaagtcggagcaaag

SEQ ID NO: 390858 - DNA, 120 bp, Artificial Sequence
  ENSG00000144852_37 (sequence is synthesized)
cttatgtaccaggaactatattaggcaccctacatgcaaggtctcatttaacagcggtgcgaggtaaacacggtttctccggatcacaaaggagaaacctggaggcaggagaggttaagg

SEQ ID NO: 390859 - DNA, 120 bp, Artificial Sequence
  ENSG00000144852_38 (sequence is synthesized)
aggttgcttggggtcacaggtagtaagtggcaaagctttcatgcaaacccagcgcctttggattctgaagcccgtgctcttgccagggccccacagtgtcctcacaaactccactgcaga

SEQ ID NO: 390860 - DNA, 120 bp, Artificial Sequence
  ENSG00000144852_39 (sequence is synthesized)
gggcaaaacaccagcctcacctcatctctgtcctcacccaagtgtttctccagaagagcccacaggcctcttgagtccagacaggggagaattgcttgtcaccattactttctcttttgc

SEQ ID NO: 390861 - DNA, 120 bp, Artificial Sequence
  ENSG00000144852_40 (sequence is synthesized)
gagtgagcagtgggcgcgcgggcgggccggcgccggggtgcacggctctgagtaaggacgtgccgtgggtgtgggcatgcttgtgtggagatgcgcgccgagtgtgcgcgtgaacacacg

SEQ ID NO: 390862 - DNA, 120 bp, Artificial Sequence
  ENSG00000144852_41 (sequence is synthesized)
tgcacatgtgagctggtgtccgtgtgcaacaggcagccacctgggggagcgcttgcagtcggccctctgggagatggagggagtcggtaatctctgccctgggatgtgtgctgggcagcc

SEQ ID NO: 390863 - DNA, 120 bp, Artificial Sequence
  ENSG00000144852_42 (sequence is synthesized)
ctggacagggcgtgccctctgtctcccctcagttgctcctgcatcattctttttgtccccttcataattgttgtaatggtttgaaaccacatttgcgggtaggagtgtgaatctggggga

SEQ ID NO: 390864 - DNA, 120 bp, Artificial Sequence
  ENSG00000144857_0 (sequence is synthesized)
gtttctcatagttggcgtcttctaaaggaaaaacactaaaatgaggaactcagcggaccgggagcgacgcagcttgagggaagcatccctagctgttggcgcagaggggcgaggctgaag

SEQ ID NO: 390865 - DNA, 120 bp, Artificial Sequence
  ENSG00000144857_1 (sequence is synthesized)
ccgagtggcccgaggtgtctgaggggctggggcaaaggtgaaagagtttcagaacaagcttcctggaacccatgacccatgaagtcttgtcgacatttataccgtctgagggtagcagct

SEQ ID NO: 390866 - DNA, 120 bp, Artificial Sequence
  ENSG00000144857_2 (sequence is synthesized)
cgaaagtagaagaagtggagtgttgccagggacggcagtatctctttgtgtgaccctggcggcttatgggacgttggcttcagacctttgtgatacaccatgctgcgtgggacgatgacg

SEQ ID NO: 390867 - DNA, 120 bp, Artificial Sequence
  ENSG00000144857_3 (sequence is synthesized)
gcgtggagaggaatgaggcctgaggtcacactggcttgcctcctcctagccacagcaggctgctttgctgacttgaacgaggtccctcaggtcaccgtccagcctgcgtccaccgtccag

SEQ ID NO: 390868 - DNA, 120 bp, Artificial Sequence
  ENSG00000144857_4 (sequence is synthesized)
aagcccggaggcactgtgatcttgggctgcgtggtggaacctccaaggatgaatgtaacctggcgcctgaatggaaaggagctgaatggctcggatgatgctctgggtgtcctcatcacc

SEQ ID NO: 390869 - DNA, 120 bp, Artificial Sequence
  ENSG00000144857_5 (sequence is synthesized)
cacgggaccctcgtcatcactgcccttaacaaccacactgtgggacggtaccagtgtgtggcccggatgcctgcgggggctgtggccagcgtgccagccactgtgacactagccaatctc

SEQ ID NO: 390870 - DNA, 120 bp, Artificial Sequence
  ENSG00000144857_6 (sequence is synthesized)
caggacttcaagttagatgtgcagcacgtgattgaagtggatgagggaaacacagcagtcattgcctgccacctgcctgagagccaccccaaagcccaggtccggtacagcgtcaaacaa

SEQ ID NO: 390871 - DNA, 120 bp, Artificial Sequence
  ENSG00000144857_7 (sequence is synthesized)
gagtggctggaggcctccagaggtaactacctgatcatgccctcagggaacctccagattgtgaatgccagccaggaggacgagggcatgtacaagtgtgcagcctacaacccagtgacc

SEQ ID NO: 390872 - DNA, 120 bp, Artificial Sequence
  ENSG00000144857_8 (sequence is synthesized)
caggaagtgaaaacctccggctccagcgacaggctacgtgtgcgccgctccaccgctgaggctgcccgcatcatctaccccccagaggcccaaaccatcatcgtcaccaaaggccagagt

SEQ ID NO: 390873 - DNA, 120 bp, Artificial Sequence
  ENSG00000144857_9 (sequence is synthesized)
ctcattctggagtgtgtggccagtggaatcccacccccacgggtcacctgggccaaggatgggtccagtgtcaccggctacaacaagacgcgcttcctgctgagcaacctcctcatcgac

SEQ ID NO: 390874 - DNA, 120 bp, Artificial Sequence
  ENSG00000144857_10 (sequence is synthesized)
accaccagcgaggaggactcaggcacctaccgctgcatggccgacaatggggttgggcagcccggggcagcggtcatcctctacaatgtccaggtgtttgaaccccctgaggtcaccatg

SEQ ID NO: 390875 - DNA, 120 bp, Artificial Sequence
  ENSG00000144857_11 (sequence is synthesized)
gagctatcccagctggtcatcccctggggccagagtgccaagcttacctgtgaggtgcgtgggaaccccccgccctccgtgctgtggctgaggaatgctgtgcccctcatctccagccag

SEQ ID NO: 390876 - DNA, 120 bp, Artificial Sequence
  ENSG00000144857_12 (sequence is synthesized)
cgcctccggctctcccgcagggccctgcgcgtgctcagcatggggcctgaggacgaaggcgtctaccagtgcatggccgagaacgaggttgggagcgcccatgccgtagtccagctgcgg

SEQ ID NO: 390877 - DNA, 120 bp, Artificial Sequence
  ENSG00000144857_13 (sequence is synthesized)
acctccaggccaagcataaccccaaggctatggcaggatgctgagctggctactggcacacctcctgtatcaccctccaaactcggcaaccctgagcagatgctgagggggcaaccggcg

SEQ ID NO: 390878 - DNA, 120 bp, Artificial Sequence
  ENSG00000144857_14 (sequence is synthesized)
ctccccagacccccaacgtcagtggggcctgcttccccgcagtgtccaggagagaaggggcagggggctcccgccgaggctcccatcatcctcagctcgccccgcacctccaagacagac

SEQ ID NO: 390879 - DNA, 120 bp, Artificial Sequence
  ENSG00000144857_15 (sequence is synthesized)
tcatatgaactggtgtggcggcctcggcatgagggcagtggccgggcgccaatcctctactatgtggtgaaacaccgcaaggtcacaaattcctctgacgattggaccatctctggcatt

SEQ ID NO: 390880 - DNA, 120 bp, Artificial Sequence
  ENSG00000144857_16 (sequence is synthesized)
ccagccaaccagcaccgcctgaccctcaccagacttgaccccgggagcttgtatgaagtggagatggcagcttacaactgtgcgggagagggccagacagccatggtcaccttccgaact

SEQ ID NO: 390881 - DNA, 120 bp, Artificial Sequence
  ENSG00000144857_17 (sequence is synthesized)
agcagcagccagccagaccacggccgcctctcccccccagaagctcccgacaggcccaccatctccacggcctccgagacctcagtgtacgtgacctggattccccgtgggaatggtggg

SEQ ID NO: 390882 - DNA, 120 bp, Artificial Sequence
  ENSG00000144857_18 (sequence is synthesized)
ttcccaatccagtccttccgtgtggagtacaagaagctaaagaaagtgggagactggattctggccaccagcgccatccccccatcgcggctgtccgtggagatcacgggcctagagaaa

SEQ ID NO: 390883 - DNA, 120 bp, Artificial Sequence
  ENSG00000144857_19 (sequence is synthesized)
ggcacctcctacaagtttcgagtccgggctctgaacatgctgggggagagcgagcccagcgccccctctcggccctacgtggtgtcgggctacagcggtcgcgtgtacgagaggcccgtg

SEQ ID NO: 390884 - DNA, 120 bp, Artificial Sequence
  ENSG00000144857_20 (sequence is synthesized)
gcaggtccttatatcaccttcacggatgcggtcaatgagaccaccatcatgctcaagtggatgtacatcccagcaagtaacaacaacaccccaatccatggcttttatatctattatcga

SEQ ID NO: 390885 - DNA, 120 bp, Artificial Sequence
  ENSG00000144857_21 (sequence is synthesized)
cccacagacagtgacaatgatagtgactacaagaaggatatggtggaaggggacaagtactggcactccatcagccacctgcagccagagacctcctacgacattaagatgcagtgcttc

SEQ ID NO: 390886 - DNA, 120 bp, Artificial Sequence
  ENSG00000144857_22 (sequence is synthesized)
aatgaaggaggggagagcgagttcagcaacgtgatgatctgtgagaccaaagctcggaagtcttctggccagcctggtcgactgccacccccaactctggccccaccacagccgcccctt

SEQ ID NO: 390887 - DNA, 120 bp, Artificial Sequence
  ENSG00000144857_23 (sequence is synthesized)
cctgaaaccatagagcggccggtgggcactggggccatggtggctcgctccagcgacctgccctatctgattgtcggggtcgtcctgggctccatcgttctcatcatcgtcaccttcatc

SEQ ID NO: 390888 - DNA, 120 bp, Artificial Sequence
  ENSG00000144857_24 (sequence is synthesized)
cccttctgcttgtggagggcctggtctaagcaaaaacatacaacagacctgggttttcctcgaagtgcccttccaccctcctgcccgtatactatggtgccattgggaggactcccaggc

SEQ ID NO: 390889 - DNA, 120 bp, Artificial Sequence
  ENSG00000144857_25 (sequence is synthesized)
caccaggccagtggacagccctacctcagtggcatcagtggacgggcctgtgctaatgggatccacatgaataggggctgcccctcggctgcagtgggctacccgggcatgaagccccag

SEQ ID NO: 390890 - DNA, 120 bp, Artificial Sequence
  ENSG00000144857_26 (sequence is synthesized)
cagcactgcccaggcgagcttcagcagcagagtgacaccagcagcctgctgaggcagacccatcttggcaatggatatgacccccaaagtcaccagatcacgaggggtcccaagtctagc

SEQ ID NO: 390891 - DNA, 120 bp, Artificial Sequence
  ENSG00000144857_27 (sequence is synthesized)
ccggacgagggctctttcttatacacactgcccgacgactccactcaccagctgctgcagccccatcacgactgctgccaacgccaggagcagcctgctgctgtgggccagtcaggggtg

SEQ ID NO: 390892 - DNA, 120 bp, Artificial Sequence
  ENSG00000144857_28 (sequence is synthesized)
aggagagcccccgacagtcctgtcctggaagcagtgtgggaccctccatttcactcagggcccccatgctgcttgggccttgtgccagttgaagaggtggacagtcctgactcctgccaa

SEQ ID NO: 390893 - DNA, 120 bp, Artificial Sequence
  ENSG00000144857_29 (sequence is synthesized)
gtgagtggaggagactggtgtccccagcaccccgtaggggcctacgtaggacaggaacctggaatgcagctctccccggggccactggtgcgtgtgtcttttgaaacaccacctctcaca

SEQ ID NO: 390894 - DNA, 120 bp, Artificial Sequence
  ENSG00000144857_30 (sequence is synthesized)
atttaggcagaagctgatatcccagaaagactatatattgttttttttttaaaaaaaaaaagaagaaaaaagagacagagaaaattggtatttatttttctattatagccatatttatat

SEQ ID NO: 390895 - DNA, 120 bp, Artificial Sequence
  ENSG00000144857_31 (sequence is synthesized)
atttatgcacttgtaaataaatgtatatgttttataattctggagagacataaggagtcctacccgttgaggttggagagggaaaataaagaagctgccacctaacaggagtcacccagg

SEQ ID NO: 390896 - DNA, 120 bp, Artificial Sequence
  ENSG00000144857_32 (sequence is synthesized)
aaagcaccgcacaggctggcgcgggacagactcctaacctggggcctctgcagtggcaggcgaggctgcaggaggcccacagataagctggcaagaggaaggatcccaggcacatggttc

SEQ ID NO: 390897 - DNA, 120 bp, Artificial Sequence
  ENSG00000144857_33 (sequence is synthesized)
atcacgagcatgagggaacagcaaggggcacggtatcacagcctggagacacccacacagatggctggatccggtgctacgggaaacattttcctaagatgcccatgagaacagaccaag

SEQ ID NO: 390898 - DNA, 120 bp, Artificial Sequence
  ENSG00000144857_34 (sequence is synthesized)
atgtgtacagcactatgagcattaaaaaaccttccagaatcaataatccgtggcaacatatctctgtaaaaacaaacactgtaacttctaaataaatgtttagtcttccctgtaaccttc

SEQ ID NO: 390899 - DNA, 120 bp, Artificial Sequence
  ENSG00000144857_35 (sequence is synthesized)
cctcctcctcctcctcgcacggtaatgggaggctcctaggcaggagaagcaaaagaaggaattgtttgcgagttcagtcatccaaaaagcttcttccatatggagggaccgggtgcgctg

SEQ ID NO: 390900 - DNA, 120 bp, Artificial Sequence
  ENSG00000144857_36 (sequence is synthesized)
gtcccctgcgttgtcctcctgctgccgcccccgcggccgccgctttctgccgcggggaccctgagccccggcccgccggtgtcagccgccgcgcgcgcgcacagacacacacacagagac

SEQ ID NO: 390901 - DNA, 120 bp, Artificial Sequence
  ENSG00000144857_37 (sequence is synthesized)
acagagacacacaaacacacacagaaaagacacacacgcgcacacacggcgcgcacaccctcacgcccgccacagccacaacacgcccgcacgcgccctccctctccggcccgcaacttc

SEQ ID NO: 390902 - DNA, 120 bp, Artificial Sequence
  ENSG00000144857_38 (sequence is synthesized)
tcggtcctcggctcctttgttgctccagccgcggccgctcgcccgtgttgtgtgtccccggtgtcaccgagcgtgttgtgtgtccgtgcggcgcggcgctgtgtggctccctcgcgccca

SEQ ID NO: 390903 - DNA, 120 bp, Artificial Sequence
  ENSG00000144857_39 (sequence is synthesized)
cgggcgaagaagttggggcgaggcgggcagcgggggtcccgggggctgcagccgctacggggcccaggggcgccgcatctcgttccctgccgcagcggtctggccgggcgatggtggttt

SEQ ID NO: 390904 - DNA, 120 bp, Artificial Sequence
  ENSG00000144857_40 (sequence is synthesized)
gccgcagcggtctggccgggcgatggtggtttcgcctcagcggttcccagaagcttctcgggtggaagaaggatccagccagcctcccaaacttccaccgaaggttgacaccagcgcccc

SEQ ID NO: 390905 - DNA, 120 bp, Artificial Sequence
  ENSG00000144857_41 (sequence is synthesized)
ttcagcagcagagtgacaccagcagcctgctgaggcagacccatcttggcaatggatatgacccccaaagtcaccagatcacgagggcccccatgctgcttgggccttgtgccagttgaa

SEQ ID NO: 390906 - DNA, 120 bp, Artificial Sequence
  ENSG00000144857_42 (sequence is synthesized)
agtgatgggggacccttgtgcccttggaaaacctcactccaagtagaggctgtatctggagtgagtgtctacagagaggggaattggtcagtgcatggcagaacttgacatggcagaact

SEQ ID NO: 390907 - DNA, 120 bp, Artificial Sequence
  ENSG00000144857_43 (sequence is synthesized)
gttccgtgggccccagagcagggccgtgccgtgccttcctacttggtcatcctgtggctgtaggtgcactgtcccaactgctcacacaccttccagtcccctccctccattctcaccaca

SEQ ID NO: 390908 - DNA, 120 bp, Artificial Sequence
  ENSG00000144857_44 (sequence is synthesized)
gttacagtcggagcagggagagacaggacaccaagagacatgggcagggccacgtgtagtctggacagagcccacccagcccagacttggcctcctgtctctctgtgaggggcaagcata

SEQ ID NO: 390909 - DNA, 120 bp, Artificial Sequence
  ENSG00000144857_45 (sequence is synthesized)
gtccgaaggcctggattataaatattagaacataatgaaaaggaaactgtgtggcaaagggataaagggatacagagaaaagaaacaaggaagagatgaggtgacagtttggaccaagga

SEQ ID NO: 390910 - DNA, 120 bp, Artificial Sequence
  ENSG00000144857_46 (sequence is synthesized)
aaatgccaagagaagacttcacactaccttttttttttctggttttgccattcttttattcatgttgttacactcagtataggatagtttattaaaatcattatgtctgtagacattcta

SEQ ID NO: 390911 - DNA, 120 bp, Artificial Sequence
  ENSG00000144857_47 (sequence is synthesized)
tttaatgacattgcaaaataggttctttttagtctctctccttcttcctctcccactcctcccttctggcctgctttcccctcctgcccacccccagatttctctctcctgtcttgactt

SEQ ID NO: 390912 - DNA, 120 bp, Artificial Sequence
  ENSG00000144857_48 (sequence is synthesized)
tgattttcagccctcatcccccagtctctttcatctcttccccaatcccagctttcttccactgctcaaatctgggtgtaaatcccacctcaactgaaaggaaaagaaagaaacaagatt

SEQ ID NO: 390913 - DNA, 80 bp, Artificial Sequence
  ENSG00000144857_49 (sequence is synthesized)
ctcaaggccaagtagaccttacttgacctgactccacagctcaaaatgtacaccttttaactgcttgagtccaggaggct

SEQ ID NO: 390914 - DNA, 120 bp, Artificial Sequence
  ENSG00000144857_50 (sequence is synthesized)
gtgagactctgtctcaagaaaaaaaatatatatatatacctttaaaaatattctatagattttaagagtttttatcaactctttctggttatgaaaggaacatatgttcattatagaaaa

SEQ ID NO: 390915 - DNA, 120 bp, Artificial Sequence
  ENSG00000144857_51 (sequence is synthesized)
cattatagaaaacttagagaatacagaaaactgttttcaaaaaggtaaaacacctaatccaaccactcagaactaactggagactaggggaagaagagcattaatccctgctgtccccag

SEQ ID NO: 390916 - DNA, 120 bp, Artificial Sequence
  ENSG00000144857_52 (sequence is synthesized)
cagaaggttggcagcagcctctgggagaggcctgcctgtcccaccagggccaagggtttctcccactccatctggcacttgctaataagcagctcatacctgggtggcccagcagcaggc

SEQ ID NO: 390917 - DNA, 120 bp, Artificial Sequence
  ENSG00000144857_53 (sequence is synthesized)
aggcaccaggcttggcaacagcacggctctcaggaggggccaccagggcaaagctcagcactgatggccatagctttacctgccaggaagccaaatgccacccgagttgctggggtgtcc

SEQ ID NO: 390918 - DNA, 120 bp, Artificial Sequence
  ENSG00000144857_54 (sequence is synthesized)
aggagctgtgactctgcctcctagctacagaatctgaacacccgtgaggcaccatcccagggcacctgtggaccaggagcagacagagcctaacaggcccctgatgtggaagaaaggatt

SEQ ID NO: 390919 - DNA, 120 bp, Artificial Sequence
  ENSG00000144857_55 (sequence is synthesized)
tcagtggcattcatggggaggacagtggttgaaagtcagaatattcctctccaagtagcagaaatgcaataatgaggcgattccgagtgatggctatgactggtgggaagatttgctcat

SEQ ID NO: 390920 - DNA, 120 bp, Artificial Sequence
  ENSG00000144857_56 (sequence is synthesized)
catttgggaagggagaatgatgggaagctccaaaatcaatttcctccttcctggaggcttgcaggaatgatctcatctctcatgtgtgcagcctgggcctctcaatccttacaatagccc

SEQ ID NO: 390921 - DNA, 120 bp, Artificial Sequence
  ENSG00000144857_57 (sequence is synthesized)
tgaggcagcatacattaagcctttttacaaatgaggaaactgtatcagagagattaattaacttgcccaagatcacacagctaatacccagcagacccagagtgtgagaccatggctgat

SEQ ID NO: 390922 - DNA, 120 bp, Artificial Sequence
  ENSG00000144857_58 (sequence is synthesized)
tccaaatcctgcttcctttctagcctcccttagctccctttaaagtataaaatgctcttctattgacctatgcactaagttgtggcagttagtcagtcagccagtctgttagctggttgg

SEQ ID NO: 390923 - DNA, 120 bp, Artificial Sequence
  ENSG00000144857_59 (sequence is synthesized)
ttagttaccttttctctctggcactctgtcctgcttgttgcaaggttttatggggagaacggcatcttaggctttgtcttgtggggactcaggtggacatcagctcctagtgcctgccca

SEQ ID NO: 390924 - DNA, 120 bp, Artificial Sequence
  ENSG00000144857_60 (sequence is synthesized)
gccgtaaggcccgggcccacctgctgggggatgggggatcactgatggaagggctcacaaagatggaaagggaggtagatacctggaggtgccacatccaagctccagttctgtgtgcac

SEQ ID NO: 390925 - DNA, 120 bp, Artificial Sequence
  ENSG00000144857_61 (sequence is synthesized)
tggctttggccagggggacagccaggggttctcagccagggattctctcccctctggccggcctcagggccagcatctcacagcacacagcaccaggcgactgcctgctgccacacctgc

SEQ ID NO: 390926 - DNA, 120 bp, Artificial Sequence
  ENSG00000144857_62 (sequence is synthesized)
ctgatgggaggtttccttcacggttactttgcgattgggatgggtcagaatgtgtgtgctgggacaggacggtgggtcttgtctcaagctcagcagcggacacagcatgtgcctagaaca

SEQ ID NO: 390927 - DNA, 120 bp, Artificial Sequence
  ENSG00000144857_63 (sequence is synthesized)
gatggccacgtgggaggcctccaggctgctgttctgccctatatgaggtccctgggcctgcactctctgcactgatgaggtgtgccctgcaccaccctctggtgagcttccgggaggccc

SEQ ID NO: 390928 - DNA, 120 bp, Artificial Sequence
  ENSG00000144857_64 (sequence is synthesized)
acatgctctcaatgcacaggaaaacagcagctacctttctgtgcgcttgcctggatccctgccaattcaaaggagtgacatcttacacggagttaggcttagagttggcaccagagatgg

SEQ ID NO: 390929 - DNA, 120 bp, Artificial Sequence
  ENSG00000144857_65 (sequence is synthesized)
aatcactgtgaagctaatgaagttaaacttccatcgtctttcactcactgacagaagcctcacaaggccctaactttgtatgtatcattttccattctttttggggcctccgaaactgta

SEQ ID NO: 390930 - DNA, 120 bp, Artificial Sequence
  ENSG00000144857_66 (sequence is synthesized)
taaatttcaggttttagaaaacctgggtgtgtccctggttggcatataaagcggaatcacacatagtccccttgctccttgaaggttgctgaggaacggcacacattagagagtaaacag

SEQ ID NO: 390931 - DNA, 120 bp, Artificial Sequence
  ENSG00000144857_67 (sequence is synthesized)
gcctttcagtgagttctctgcagtttgtccacagtgttgaaaaaagattacagctttcccagctgtgcacctgaggaagtacataggtgatttgcatttggggaccttgcaatatgagaa

SEQ ID NO: 390932 - DNA, 120 bp, Artificial Sequence
  ENSG00000144857_68 (sequence is synthesized)
atgcatgtgtttaaacagtggattccattcagctcagccggaggccggctctgagatgctcactgagagacagttgggcctgagaaccatagggtggggttgagagcatggcagattctt

SEQ ID NO: 390933 - DNA, 120 bp, Artificial Sequence
  ENSG00000144857_69 (sequence is synthesized)
gtttcccatctcatcttcagcctcacagcgcacatactgagtgcaagcagaaagaaatatctgtaccatttaaactgcctctacactccctcacctttctctctttgccagcacacagtt

SEQ ID NO: 390934 - DNA, 120 bp, Artificial Sequence
  ENSG00000144857_70 (sequence is synthesized)
caagggaattctgtagcacgccccactctacataggttgaaagacccggaatggctgtttgatcccatctccatgctctctgggactgcctcctgggcatgctctacaggacatcctggt

SEQ ID NO: 390935 - DNA, 120 bp, Artificial Sequence
  ENSG00000144857_71 (sequence is synthesized)
aaccgaccgagggggtcgggggaggctgcgttaaggcttccctgagattggtttccttatcattttctccaccgccgctgtcccattttctgatgagtttgcttttaatgatttatccaa

SEQ ID NO: 390936 - DNA, 120 bp, Artificial Sequence
  ENSG00000144857_72 (sequence is synthesized)
acaaagaacataggtcctcagaccaacatgtggaaaccaagggccaaatggcttctaaggtccctcccaactgaataattctggtaaattccatttccatgtgctcactgacggatggtc

SEQ ID NO: 390937 - DNA, 120 bp, Artificial Sequence
  ENSG00000144857_73 (sequence is synthesized)
ctaataaccgctcttatttcttttatgcttgtgaaagtcatagtttttacaaaattacttgagggtgtattataaagattcaacagagcaaagtaaaggccaagtgacttgacatagtca

SEQ ID NO: 390938 - DNA, 120 bp, Artificial Sequence
  ENSG00000144857_74 (sequence is synthesized)
tagctggaagaggagccttaccaagacaggtgtttctagttgccattatacttattctaccttatgaggacccattgtatgaggctagatggaagtgagtaaacagacgtcctacctttg

SEQ ID NO: 390939 - DNA, 120 bp, Artificial Sequence
  ENSG00000144857_75 (sequence is synthesized)
agagacgaccctggagccagtccccagagcagcagccagccagaccacggccgcctctcccgtaagccgctagcagcagggacggacgcgcagtcaggactggaactgcctcagaggcct

SEQ ID NO: 390940 - DNA, 120 bp, Artificial Sequence
  ENSG00000144857_76 (sequence is synthesized)
gttcccatggctgaatggggtcttgcttctccccagaagctcccgacaggcccaccatctccacggcctccgagacctcagtgtacgtgacctggattccccgtgggaatggtgggttcc

SEQ ID NO: 390941 - DNA, 120 bp, Artificial Sequence
  ENSG00000144857_77 (sequence is synthesized)
cttggggggcctcctccctcctagggtctcaggctgggctgctgggccaggctttctttagtcaggagcagatgctcctgttgttgagtgaagactggaaagttacctggactccccggc

SEQ ID NO: 390942 - DNA, 120 bp, Artificial Sequence
  ENSG00000144857_78 (sequence is synthesized)
accagcatgcctccatgttgctgtctgtggtgtttaccacagtcctaaagccttctgcctccctccagaagagcatccagagccatctcccctgcagctcagctctgacagtggcgggtg

SEQ ID NO: 390943 - DNA, 120 bp, Artificial Sequence
  ENSG00000144857_79 (sequence is synthesized)
ttcttgtgaggcctttgagaacttgctttggggaagggctgcccagaagacccctccaggtcctgggccttgaaaggccatgggagaatcagaaggtatttcccagctcctgagttcagt

SEQ ID NO: 390944 - DNA, 120 bp, Artificial Sequence
  ENSG00000144867_0 (sequence is synthesized)
agctgcctccgtaggccatggagccgagcagatccgggtcttcgggtggccgcaatgtcccaagtggacgacacccacctagtcccgaggacaaccgacaaagtccttaatgggcccaga

SEQ ID NO: 390945 - DNA, 120 bp, Artificial Sequence
  ENSG00000144867_1 (sequence is synthesized)
aggaggacggagtcccagagaactacaactcccatcaagcacttgggggatcgccgcggctgagggagagactatggcttaggaaccaccattcgcgtgaggctctgctccccgcgcctg

SEQ ID NO: 390946 - DNA, 120 bp, Artificial Sequence
  ENSG00000144867_2 (sequence is synthesized)
cgcagagtgcagggccacgtcgcttttgctgtaccggggaccacgcgtctcatccatggcttccgcggactcgcgccgggtggcagatggcggcggtgccgggggcaccttccagcccta

SEQ ID NO: 390947 - DNA, 120 bp, Artificial Sequence
  ENSG00000144867_3 (sequence is synthesized)
cctagacaccttgcggcaggagctgcagcagacggacccaacgctgttgtcagtagtggtggcggttcttgcggtgctgctgacgctagtcttctggaagttaatccggagcagaaggag

SEQ ID NO: 390948 - DNA, 120 bp, Artificial Sequence
  ENSG00000144867_4 (sequence is synthesized)
cagtcagagagctgttcttcttgttggcctttgtgattccgggaaaacgttgctctttgtcaggttgttaacaggcctttatagagacactcagacgtccattactgacagctgtgctgt

SEQ ID NO: 390949 - DNA, 120 bp, Artificial Sequence
  ENSG00000144867_5 (sequence is synthesized)
atacagagtcaacaataacaggggcaatagtctgaccttgattgaccttcccggccatgagagtttgaggcttcagttcttagagcggtttaagtcttcagccagggctattgtgtttgt

SEQ ID NO: 390950 - DNA, 120 bp, Artificial Sequence
  ENSG00000144867_6 (sequence is synthesized)
tgtggatagtgcagcattccagcgagaggtgaaagatgtggctgagtttctgtatcaagtcctcattgacagtatgggtctgaagaatacaccatcattcttaatagcctgcaataagca

SEQ ID NO: 390951 - DNA, 120 bp, Artificial Sequence
  ENSG00000144867_7 (sequence is synthesized)
agatattgcaatggcaaaatcagcaaagttaattcaacagcagctggagaaagaactcaacaccttacgagttacccgttctgctgcccccagcacactggacagttccagcactgcccc

SEQ ID NO: 390952 - DNA, 120 bp, Artificial Sequence
  ENSG00000144867_8 (sequence is synthesized)
tgctcagctggggaagaaaggcaaagagtttgaattctcacagttgcccctcaaagtggagttcctggagtgcagtgccaagggtggaagaggggacgtgggctctgctgacatccagga

SEQ ID NO: 390953 - DNA, 120 bp, Artificial Sequence
  ENSG00000144867_9 (sequence is synthesized)
cttggagaaatggctggctaaaattgcctgagaggcagctctaaagcacaagacctggatgtgtgacacacagttttggaaaaaggtctgtggtagtctggagttgatgaggaaggggta

SEQ ID NO: 390954 - DNA, 120 bp, Artificial Sequence
  ENSG00000144867_10 (sequence is synthesized)
caagatgtggttagaaacatttctttgttctggaaacaaagtactgttgaaaccagcttggaattttttttttttttttttttaagttcagttctcccttatggctgcctttcaaacaag

SEQ ID NO: 390955 - DNA, 120 bp, Artificial Sequence
  ENSG00000144867_11 (sequence is synthesized)
gcagactccacacagagaggatatgatgagaatatggccatcacctgaaaagttttcttatcttctgtgcttttggtccctggaaacaaatccgcctatgtatgaagctagttgatttcc

SEQ ID NO: 390956 - DNA, 120 bp, Artificial Sequence
  ENSG00000144867_12 (sequence is synthesized)
agttgcactatttccagttgcctctgaagttcacaggcaatacattgtctagtcctttgcgaatttctctgatttgtgggcacagttatgaagtttccccacatgtgaagacaggtacaa

SEQ ID NO: 390957 - DNA, 120 bp, Artificial Sequence
  ENSG00000144867_13 (sequence is synthesized)
aatagcagagccaagcagacagtgggtctattcttcattagctcagtgacttgtccacactcgtcttagcacttacgtttcaaaagcttgtcacaaacccttggagtcattcccagataa

SEQ ID NO: 390958 - DNA, 120 bp, Artificial Sequence
  ENSG00000144867_14 (sequence is synthesized)
tagaactggaaatgataaatcccctaatgccaagggtctagtgtgttcttagtggttatactgggaagtgtgtggagatttaggtgctgctctgctgctctggatggctgaaggctcctg

SEQ ID NO: 390959 - DNA, 120 bp, Artificial Sequence
  ENSG00000144867_15 (sequence is synthesized)
ggccatcttcatgtgctgcttgaagagctcctattttgtactcctggctagaatgctgtggaacaaatacaaagtgaaaaaagttctctgtagatttctgaagtgcatattcattgatgc

SEQ ID NO: 390960 - DNA, 120 bp, Artificial Sequence
  ENSG00000144867_16 (sequence is synthesized)
caagaaaaaaaaaaagttgcctttttgaagtgatgttttttgctgtcttcttaaacacaaggcttttttgaatgattagtatatttcatggtaaagaaaacagcctgtctggctcaaagc

SEQ ID NO: 390961 - DNA, 120 bp, Artificial Sequence
  ENSG00000144867_17 (sequence is synthesized)
aattaaatagaatgtaatggtgagtacaaatgagtgcacatgtcaggactcaggtctaactccttgtctcctgagcctaaagattgcaacatacacaagaacacactcctattcctaccc

SEQ ID NO: 390962 - DNA, 120 bp, Artificial Sequence
  ENSG00000144867_18 (sequence is synthesized)
cacacactcagggacaagcccaactaaagcttacaaggagaccagggtggctctgtccaggggagaagccagttatggaacagtgcattgagagccatggtaggagaggcccacagttct

SEQ ID NO: 390963 - DNA, 120 bp, Artificial Sequence
  ENSG00000144867_19 (sequence is synthesized)
ctggagcatgcagcaggggcaccccacctggccttgaggatcagggggagtcaaaggataaagcatggggctgatgacgtctgagggagtgtgatcctccatgtatggcctctgcctgct

SEQ ID NO: 390964 - DNA, 120 bp, Artificial Sequence
  ENSG00000144867_20 (sequence is synthesized)
gtctcacatgtcccttctggtggtcacttgggctctaggagtatacgtcacctcagaccatctggcagaaatactccaggctcctaccccaaagcacatgtcagccttgctgctggagca

SEQ ID NO: 390965 - DNA, 120 bp, Artificial Sequence
  ENSG00000144867_21 (sequence is synthesized)
cgaagacaatgtaaatgaaacatgaaatggaggagttgtgagaccctgaccctgagtccttacttgaaagctgctgctggtgttctgagtgtcttttggactcttatttcttgccctttt

SEQ ID NO: 390966 - DNA, 120 bp, Artificial Sequence
  ENSG00000144867_22 (sequence is synthesized)
ccttattaggcaagcagtaacttaggaagtaggtaagagcaataaatgtgacatgttatgtcatcatagtaggagctcatgggaataaaagtcagtggcttgatgcttctgttagaggca

SEQ ID NO: 390967 - DNA, 120 bp, Artificial Sequence
  ENSG00000144867_23 (sequence is synthesized)
cattgctcccctcagacctgggaacatgactgaatgtttaaggatgacaagaagagagcagcgatagatagcaaggaggcctctgaccaagggaaactgctgccaacagctaccaagcca

SEQ ID NO: 390968 - DNA, 120 bp, Artificial Sequence
  ENSG00000144867_24 (sequence is synthesized)
actagccttggatcacacaactgcagccatggtgctcatgattctgatgtcacaccttcatgttgatgtatgtatgatcacccagcaagttaggagtgatcagaaccaatgtgtttccac

SEQ ID NO: 390969 - DNA, 120 bp, Artificial Sequence
  ENSG00000144867_25 (sequence is synthesized)
ttgtaaataggctgtttgctttttccatcttacactcaactttcctgatgcctgcagaacaggagctttgttgataagcttttaagattcacccccttcactcccaccatccccaaaaaa

SEQ ID NO: 390970 - DNA, 120 bp, Artificial Sequence
  ENSG00000144867_26 (sequence is synthesized)
aaatctgtgcaggatactgattgcctgcttctgaactgtgggtatggttggctgtggataatgtagaacatgtaagaaatgatggtctgctgcatgtaccaggccacatctaagagtctt

SEQ ID NO: 390971 - DNA, 120 bp, Artificial Sequence
  ENSG00000144867_27 (sequence is synthesized)
attgttgagcacagccacgtttacactgaatataaactttattcaccattccaggccttgaccttatattcaggaatggcagcctggcatggtgaatagaacttattagggtgcatcgta

SEQ ID NO: 390972 - DNA, 120 bp, Artificial Sequence
  ENSG00000144867_28 (sequence is synthesized)
gatttgctcagtaggggctcaggaattgacacaaatgctgacggagttggaacaagtaaattatatgtctggaagataaatatttaaataattagattaagggtggaaatgataaaagtg

SEQ ID NO: 390973 - DNA, 120 bp, Artificial Sequence
  ENSG00000144867_29 (sequence is synthesized)
tactttgttataaagattggagatcccagtaagagtaatatgctctatgaaaaattgtaagttcttatattacattattagtttatgagtacttgttactgttttcacatttttgcttat

SEQ ID NO: 390974 - DNA, 120 bp, Artificial Sequence
  ENSG00000144867_30 (sequence is synthesized)
actcatacagtactcctactttgctatactcacactggtttatctcccaagcctcaggtagatcatgcttccctgactcccccagacaggtttttcctgtaccctcaaaacatttatcag

SEQ ID NO: 390975 - DNA, 120 bp, Artificial Sequence
  ENSG00000144867_31 (sequence is synthesized)
tgttctcattttatatttatgtgtaattttacattatgttcacctttctcataaattttgccagatcaggaaccgtgtctttggccactgttacatccccagaacgttgactagtgtttt

SEQ ID NO: 390976 - DNA, 120 bp, Artificial Sequence
  ENSG00000144868_0 (sequence is synthesized)
gctttctcctgagccgtcggagggagccggagcgcttctcccgagttggtgatagattggtggtcatccaacatgcagaaatgaatgagcagtgaaaagcagcagagccgatgggtcatg

SEQ ID NO: 390977 - DNA, 120 bp, Artificial Sequence
  ENSG00000144868_1 (sequence is synthesized)
aggatgtaagtgcgtttgaaggcttccacaccctctactccaggacagaatcatgaataaactggaggataagcaggaccagatgataccatgaagagaagtttacaggccctctattgc

SEQ ID NO: 390978 - DNA, 120 bp, Artificial Sequence
  ENSG00000144868_2 (sequence is synthesized)
caactgttaagtttcctgctgatcttggcactgaccgaagcgctggcatttgccatccaggaaccatctcccagggaatctcttcaggtcctcccttcaggcactcccccgggaaccatg

SEQ ID NO: 390979 - DNA, 120 bp, Artificial Sequence
  ENSG00000144868_3 (sequence is synthesized)
gtgacagcaccccacagctctaccagacatacttctgtggtgatgctgacccccaatcccgatggacccccctcacaggctgcagctcccatggcaacaccgacaccccgtgcagagggg

SEQ ID NO: 390980 - DNA, 120 bp, Artificial Sequence
  ENSG00000144868_4 (sequence is synthesized)
caccctcctacgcacaccatctccaccatcgctgcgacagtaaccgccccccattctgaaagctccctgtccacagggcccgctccagcagccatggcaaccacatcctccaagccagag

SEQ ID NO: 390981 - DNA, 120 bp, Artificial Sequence
  ENSG00000144868_5 (sequence is synthesized)
gccctcgagggcaggctgcccccaccatcctgctgacaaagccaccgggggccaccagccgccccaccacagcgcccccccgcactaccacacgcaggccccccaggcccccaggctctt

SEQ ID NO: 390982 - DNA, 120 bp, Artificial Sequence
  ENSG00000144868_6 (sequence is synthesized)
tcttcccgaaaaggggctggtaattcatcacgccctgtcccgcctgcacctggtggccactccaggagtaaagaaggacagcgaggacgaaatccaagctccacacctctggggcagaag

SEQ ID NO: 390983 - DNA, 120 bp, Artificial Sequence
  ENSG00000144868_7 (sequence is synthesized)
cggcccctggggaaaatctttcagatctacaagggcaacttcacagggtctgtggaaccggagccctctaccctcacccccaggaccccactctggggctactcctcttcaccacagccc

SEQ ID NO: 390984 - DNA, 120 bp, Artificial Sequence
  ENSG00000144868_8 (sequence is synthesized)
cagacagtggctgcgaccacagtgcccagcaatacctcatgggcacccaccaccacctccctggggcctgcaaaggacaagccaggccttcgcagagcagcccaggggggtggttctacc

SEQ ID NO: 390985 - DNA, 120 bp, Artificial Sequence
  ENSG00000144868_9 (sequence is synthesized)
ttcaccagccaaggagggacaccagatgccacagcagcctcaggtgcccctgtcagtccacaagctgccccagtgccttctcagcgcccccaccacggtgacccacaggatggccccagc

SEQ ID NO: 390986 - DNA, 120 bp, Artificial Sequence
  ENSG00000144868_10 (sequence is synthesized)
catagtgactcttggcttactgttacccctggcaccagcagacctctgtctaccagctctggggtcttcacggctgccacggggcccaccccagctgccttcgataccagtgtctcagcc

SEQ ID NO: 390987 - DNA, 120 bp, Artificial Sequence
  ENSG00000144868_11 (sequence is synthesized)
ccttcccaggggattcctcagggagcatccacaaccccacaagctccaacccatccctccagggtctcagaaagcactatttctggagccaaggaggagactgtggccaccctcaccatg

SEQ ID NO: 390988 - DNA, 120 bp, Artificial Sequence
  ENSG00000144868_12 (sequence is synthesized)
accgaccgggtgcccagtcctctctccacagtggtatccacagccacaggcaatttcctcaaccgcctggtccccgccgggacctggaagcctgggacagcagggaacatctcccatgtg

SEQ ID NO: 390989 - DNA, 120 bp, Artificial Sequence
  ENSG00000144868_13 (sequence is synthesized)
gccgagggggacaaaccgcagcacagagccaccatctgcctgagcaagatggatatcgcctgggtgatcctggccatcagcgtgcccatctcctcctgctctgtcctgctgacggtgtgc

SEQ ID NO: 390990 - DNA, 120 bp, Artificial Sequence
  ENSG00000144868_14 (sequence is synthesized)
tgcatgaagaggaagaagaagaccgccaacccggagaacaacctgagctactggaacaacaccatcaccatggactacttcaacaggcatgctgtggagctgcccagggagatccagtcc

SEQ ID NO: 390991 - DNA, 120 bp, Artificial Sequence
  ENSG00000144868_15 (sequence is synthesized)
tcagagccccgctccccagccaatggcgactatagagacactgggatggtccttgttaaccccttctgtcaagaaacactgtttgtgggaaacgatcaagtatctgagatctaactacag

SEQ ID NO: 390992 - DNA, 120 bp, Artificial Sequence
  ENSG00000144868_16 (sequence is synthesized)
caggcatcactttgccattccgtatttttcgtctctaaattataaatatacaaatacatatattataaatataacctttgtgtaaccctgacttaatgagaaacattttcagcttttttt

SEQ ID NO: 390993 - DNA, 120 bp, Artificial Sequence
  ENSG00000144868_17 (sequence is synthesized)
cctatgaattgtcaacatcttttttacaagtgtggtttaaaaaaaaaaaaaactttacagaatgatctgtggctttataaaataaaggtatttctaagcaaagcagttgcattgattgct

SEQ ID NO: 390994 - DNA, 120 bp, Artificial Sequence
  ENSG00000144868_18 (sequence is synthesized)
tctcttaataactattcttgagcacctggggatcccaggaaccctggtcaggtgaggtaagagactgacctcctgtagaagctgaatgttacagtgcaagcgcacgattctttgagtgat

SEQ ID NO: 390995 - DNA, 120 bp, Artificial Sequence
  ENSG00000144868_19 (sequence is synthesized)
tcttaaagctctggttcctcttgatttggtgtgaccccatttcctcccttctcatacgcacacctgtaaagggaactggaccgcctcaggggaagacggcagactcatgcacagagaagg

SEQ ID NO: 390996 - DNA, 120 bp, Artificial Sequence
  ENSG00000144868_20 (sequence is synthesized)
aaaagggaacatctcatcacctctgaggatgagtaccctggagccttatgacggcaccattggatgtcatgtttaattccatccaagttgtggatggcaggcaggagcatggagccctca

SEQ ID NO: 390997 - DNA, 120 bp, Artificial Sequence
  ENSG00000144868_21 (sequence is synthesized)
ggaatccatggaggacatcaaggcatcccaaggccatattcccctaacattacttccactgctaacaacaggactgcctttccctggtgggaaaatgctccctttatgcccattcctgta

SEQ ID NO: 390998 - DNA, 120 bp, Artificial Sequence
  ENSG00000144868_22 (sequence is synthesized)
tcccctccaacacccacatctgcattaaacacccgtgcctttctcttggagagggtttagatgcagatcccggccctggagctttaaaatgcttgcccttccttcttcaaggatcaaatg

SEQ ID NO: 390999 - DNA, 120 bp, Artificial Sequence
  ENSG00000144868_23 (sequence is synthesized)
tttattggggttcagctttgttttctcaaaaggccatggtatcgtgcccctgaggaacatgtttatctaagaagctttgaggtagtagagcgataatttttgaaaccttcctcctgcaat

SEQ ID NO: 391000 - DNA, 120 bp, Artificial Sequence
  ENSG00000144868_24 (sequence is synthesized)
ctttaaaaaagaaaaaaaagattgcccaaacaaatcatttgggagaagacatcattatactcctacttggcactgcaaacctgctcgcagcaccagccggtggacttgccatccagctct

SEQ ID NO: 391001 - DNA, 120 bp, Artificial Sequence
  ENSG00000144868_25 (sequence is synthesized)
cagcttccactgctccccttgttcccggccggctggctgcctccccgtgctgtgtccagcacggccaacaacgtcagaccctcagagacgcccaaggggcttccagaggtggccgcttct

SEQ ID NO: 391002 - DNA, 120 bp, Artificial Sequence
  ENSG00000144868_26 (sequence is synthesized)
ctattttttcctgattgtggctgagagagatgattactgctttgacacttcctttctctaaaagaaaaatagtttgatagtatattttgaatatagatgctcttatagtcagattgggaa

SEQ ID NO: 391003 - DNA, 120 bp, Artificial Sequence
  ENSG00000144868_27 (sequence is synthesized)
ttgaacttgaatattgggtcatatgtttgtgttgttgctgtagtctatcatgacttttttctttctgcattttccttaaaaaaaaaaaaaagatggccttcaaaagtgtgttctcaatgt

SEQ ID NO: 391004 - DNA, 120 bp, Artificial Sequence
  ENSG00000144868_28 (sequence is synthesized)
tgtatgaacctccttcacatgagttcggttgttgtctctcttcaaagactcttcaacccacaaagaagcaactaaatgtttctctaagtttaattttctagcgtgttgttgtcttacctt

SEQ ID NO: 391005 - DNA, 120 bp, Artificial Sequence
  ENSG00000144868_29 (sequence is synthesized)
gttgttgtcttacctttttaaccttaccataatatttctgttaactgttacatttaatataccaatgtgtgtaagtatacagagaaaaatctgtttgtaaagtaaaatttatatataata

SEQ ID NO: 391006 - DNA, 120 bp, Artificial Sequence
  ENSG00000144868_30 (sequence is synthesized)
catatgttatatatacatatgtggatgtatgacttatttttccttatccacagatttcagctaccatgtatatataaataaacttattttattagccagaggattctgttgctaatacat

SEQ ID NO: 391007 - DNA, 120 bp, Artificial Sequence
  ENSG00000144868_31 (sequence is synthesized)
gtatgcaaagacagagcctctcatgagaacttggatggtggagtataaacactcatttaaaaataaatccagatgtagttggctgcagtcatctgacagaaccctgattctctcttcaat

SEQ ID NO: 391008 - DNA, 120 bp, Artificial Sequence
  ENSG00000144868_32 (sequence is synthesized)
aatgacgttcatttgtacctcattaattgagagtttttaataatttctccagggtaagaaaactgagtcacacaaggatatatttgtgtaacacaatttcaaaaaggcaaactcttgctc

SEQ ID NO: 391009 - DNA, 120 bp, Artificial Sequence
  ENSG00000144868_33 (sequence is synthesized)
ccttctccatcagacacctgggaatcacagctggggcccctgctttggccgtttgtcctgctggaatctgatggaggaaagacgctctgagagagtaattagacgcagacagagatctct

SEQ ID NO: 391010 - DNA, 120 bp, Artificial Sequence
  ENSG00000144868_34 (sequence is synthesized)
cacaccctctactccaggatgcttttcaacttatggtggtgtgacatcctgataaacacaatacagaatcatgaataaactggaggataagcaggaccagatgataccatgaagagaagt

SEQ ID NO: 391011 - DNA, 120 bp, Artificial Sequence
  ENSG00000144868_35 (sequence is synthesized)
ttacaggccctctattgccaactgttaaggttatctatgaagcacttgtgatgtttttgagcagtaaccaccattttttgagtatgtacatgttacacagcctgtcatataccaatcatg

SEQ ID NO: 391012 - DNA, 120 bp, Artificial Sequence
  ENSG00000144868_36 (sequence is synthesized)
caggtggatccttcttaggctcctcagtttgaacaagctgtcagagtgtatcaaagaataccagataggaggagaagaaaaagtaacagctgaaaaaaaaaaagagggaaaaaagagtag

SEQ ID NO: 391013 - DNA, 120 bp, Artificial Sequence
  ENSG00000144868_37 (sequence is synthesized)
gcactcccctccacccactctccggttccattcagcacactgacttcattcagcagtttttttcctgctttgtatgcaaagacagagcctctcatgagaacttggatggtggagtataaa

SEQ ID NO: 391014 - DNA, 120 bp, Artificial Sequence
  ENSG00000144868_38 (sequence is synthesized)
gagagcaagacggcagcatctacggttctttctgctcaggaatgggaacccagagtgggcagtagagcggaggcaagccatgcagaggcaggagcagatgagaccctagatgccacgaga

SEQ ID NO: 391015 - DNA, 120 bp, Artificial Sequence
  ENSG00000144868_39 (sequence is synthesized)
agctaaacatgtggggaaaataaagagcagattaactcaggaaaattatatggggagctcttatgctactctgaagatctgagactcgttggagaatttacaatcccaaattaactcagg

SEQ ID NO: 391016 - DNA, 120 bp, Artificial Sequence
  ENSG00000144868_40 (sequence is synthesized)
gagaattccaactagactctgaaatgaattagatggagatttaaaatagggcaatttagtgggaagagatacttaatttgaagacagaatcatgaataaactggaggataagcaggacca

SEQ ID NO: 391017 - DNA, 120 bp, Artificial Sequence
  ENSG00000144868_41 (sequence is synthesized)
atctcctcctgctcagatcctatcacctgaaagcatgcccttccacaaatgtgaatacagtactcagggctccatctgaaaatggagtgacccctcttcttcctgtcacacatctgacaa

SEQ ID NO: 391018 - DNA, 120 bp, Artificial Sequence
  ENSG00000144868_42 (sequence is synthesized)
gccatggatgactccccagtgacattcctgggaacccaagagagcttaattcccaactctgttttaaaactcaaggaaattgggactccatgacctcctccagagtcttgatggctactg

SEQ ID NO: 391019 - DNA, 120 bp, Artificial Sequence
  ENSG00000144868_43 (sequence is synthesized)
cctcaggagaaacagagcagttgaagcttttcaactaaatgggaaagggaacagttaacatcttgtgtttgcatagagctgcgcagtttacaaaacgcttctgcatatgtcatctctata

SEQ ID NO: 391020 - DNA, 120 bp, Artificial Sequence
  ENSG00000144868_44 (sequence is synthesized)
ccctccggtgttcaggacaatacaggatagtggatatcaacttgaagatcatcaagacctggactcaagttgcagtaattagttgggtgatcaagatcaatactattagcttctatgacc

SEQ ID NO: 391021 - DNA, 120 bp, Artificial Sequence
  ENSG00000144868_45 (sequence is synthesized)
ttcagttacctgttctgaaaatgggaagagcaatagtgccttcctcaggcagttatcatgtgggctaaataagcttcaaagtgcctgggtcagtgctgggaatatagtagagaccctgta

SEQ ID NO: 391022 - DNA, 120 bp, Artificial Sequence
  ENSG00000144868_46 (sequence is synthesized)
agtctgacttgtacttttctttcttggatgaaaggtgagaccactgaaatagtgaatgttctaacccctaggtggagctttgtccttgagccacccaatagtcatataacacagtttttc

SEQ ID NO: 391023 - DNA, 120 bp, Artificial Sequence
  ENSG00000144868_47 (sequence is synthesized)
tttctagatctctcttgtagaggatgttgggagaacaagaagagaactgtcattaattaagcatccattgtgtgtcaggcattgtgtttggcattttgcatccatgatctctttaattct

SEQ ID NO: 391024 - DNA, 120 bp, Artificial Sequence
  ENSG00000144868_48 (sequence is synthesized)
tttccaggtggaatacatggcagagtcacaatttgaacctaggtctttctgtagccaggctggctttcagtaagtaaatgaaatggtgtttgagaagcactggaaactccctgagagaaa

SEQ ID NO: 391025 - DNA, 120 bp, Artificial Sequence
  ENSG00000144868_49 (sequence is synthesized)
tataatcaggccaggagcatgaacatgtgaggggaagacagcgtggagcagaactttctgttctgactcccaggccttcccgcagggcaggatctctgcatctggcattctaacaacatg

SEQ ID NO: 391026 - DNA, 120 bp, Artificial Sequence
  ENSG00000144868_50 (sequence is synthesized)
ggctgttagagcactggactcgggggcggaggacttggattctgcaacctctaccagcccaggttagcagcatggccttgagcaagttcacctctctaggtttccatgccccaccttcta

SEQ ID NO: 391027 - DNA, 120 bp, Artificial Sequence
  ENSG00000144868_51 (sequence is synthesized)
gaataagaatgtaggctgggggaaggggctgatttgtttcagcacctactgtgcaccagggacaatttgaagtgctggcagatgtatgactgcatttaatcttcccaaggaagctgacgc

SEQ ID NO: 391028 - DNA, 120 bp, Artificial Sequence
  ENSG00000144868_52 (sequence is synthesized)
tgagagaggttaagtaacttactcaagtcatgcaagtaatagattgtcacctagattctaattctaaattcgatgtcccttttgccctattgactaggcctaagatggcatctgtcactt

SEQ ID NO: 391029 - DNA, 120 bp, Artificial Sequence
  ENSG00000144868_53 (sequence is synthesized)
tgattctgtttgcttataactgctcagtagatcagaggcacaaatatctttctaccttagagaggcgtgcaaactatacaaatctgactcacagatacacttttcccctgccagcctgtg

SEQ ID NO: 391030 - DNA, 120 bp, Artificial Sequence
  ENSG00000144868_54 (sequence is synthesized)
ttctgtgtctatggcagtgttttgtggggcatgatgggatgtgcccctacaggctgataactgaagagctgttctgtttgtcctgattgctcccctccctctagctctaactctaccaaa

SEQ ID NO: 391031 - DNA, 120 bp, Artificial Sequence
  ENSG00000144868_55 (sequence is synthesized)
actgagctggagctgaggaaacagcacttttcccacttcccagatggttccctctttatggcttctgtcacaccagctagaactcctccaggtgtttcaccatgccagctgcaggagcag

SEQ ID NO: 391032 - DNA, 120 bp, Artificial Sequence
  ENSG00000144868_56 (sequence is synthesized)
agtgaaaggtagtgacaatgaagaacagagacaccagagaaggggacaggggacccgggatcttgtcccagctctgccactcacatacctgtgacctgtggcaaggcggccagcacttta

SEQ ID NO: 391033 - DNA, 120 bp, Artificial Sequence
  ENSG00000144868_57 (sequence is synthesized)
ggccacagtttttcctctagaataaggaggcggcctgaattagcaagtttcaggctgagcaccacagccccctccttgcccctttcctcttcaaccatctgaagaaagggttttttggaa

SEQ ID NO: 391034 - DNA, 120 bp, Artificial Sequence
  ENSG00000144868_58 (sequence is synthesized)
ggaagggagggaaagaggaaagagatccacaatatttgaaaagttctgtaccagctaatctctcaaatccccgttagccctaacactcagaaattccttctatgttttaaagatttttta

SEQ ID NO: 391035 - DNA, 120 bp, Artificial Sequence
  ENSG00000144868_59 (sequence is synthesized)
aaaaggatctagaagactgaaaagcaaattagaagtctttttgatcaaagcagataagataaagtagaaacttaccctatctcctaaccttgtacagagacctttccaggttgagaggcc

SEQ ID NO: 391036 - DNA, 120 bp, Artificial Sequence
  ENSG00000144868_60 (sequence is synthesized)
agcaaggctggcagctggaaagaaagctacagaattccccaggcagcctacagggccctgggctctgggctgtgaggtctcagcctatacaggtgccagcttgtgcaactgccccacacc

SEQ ID NO: 391037 - DNA, 120 bp, Artificial Sequence
  ENSG00000144868_61 (sequence is synthesized)
ctggcatgaacccacccctgatgctggccagaccctcaggctgctgcgaacagagctggccctctgccaacccccggtgctggcctctctggacagcccagcctgggaccccgactcccc

SEQ ID NO: 391038 - DNA, 120 bp, Artificial Sequence
  ENSG00000144868_62 (sequence is synthesized)
agcacagagatggttggcaccaccaggatgtcagatgtggctcttggcttcagctctcctcatccccagaggctctggtgatgatgaacctggggcaggatatactcagtcctcacttca

SEQ ID NO: 391039 - DNA, 120 bp, Artificial Sequence
  ENSG00000144868_63 (sequence is synthesized)
tggcttctccccaagaggcctctgtcacccttgtccttgtgttacccttctgcagtgtgaatctggacaggccaccccacctctctgacctcagaagccttccctgctcacaagccactc

SEQ ID NO: 391040 - DNA, 120 bp, Artificial Sequence
  ENSG00000144868_64 (sequence is synthesized)
aattcacacatggttaatcaacaatatcgagacataattcttcctcctgggccctgggagtctcagggatgaacagacagggtcacatgtcacactgtgctcagtcaagctgtgtggagc

SEQ ID NO: 391041 - DNA, 120 bp, Artificial Sequence
  ENSG00000144868_65 (sequence is synthesized)
tcagtcaagctgtgtggagcccacctcaggccatctgtgcaggtgggcttttgcatcaatctaaggcaggaatcagctggtaagagcatagactggccaggtgcagtggctcacacctgt

SEQ ID NO: 391042 - DNA, 120 bp, Artificial Sequence
  ENSG00000144891_0 (sequence is synthesized)
actataaattcggagctgcctcctcgccaatgattccagcgcctgacagccaggaccccaggcagcagcgagtgacaggacgtctggaccggcgcgccgctagcagctctgccgggccgc

SEQ ID NO: 391043 - DNA, 120 bp, Artificial Sequence
  ENSG00000144891_1 (sequence is synthesized)
ggcggtgatcgatggggagcggctggagcggacccagcgagtgagggcgcacagccgggacgccgaggcggcgggcgggagacccgcaccagcgcagccggccctcggcgggacgtgacg

SEQ ID NO: 391044 - DNA, 120 bp, Artificial Sequence
  ENSG00000144891_2 (sequence is synthesized)
cagcgcccggggcgcgggtttgatatttgacaaattgatctaaaatggctgggtttttatctgaataactcactgatgccatcccagaaagtcggcaccaggtgtatttgatatagtgtt

SEQ ID NO: 391045 - DNA, 120 bp, Artificial Sequence
  ENSG00000144891_3 (sequence is synthesized)
tgcaacaaattcgacccaggtgatcaaaatgattctcaactcttctactgaagatggtattaaaagaatccaagatgattgtcccaaagctggaaggcataattacatatttgtcatgat

SEQ ID NO: 391046 - DNA, 120 bp, Artificial Sequence
  ENSG00000144891_4 (sequence is synthesized)
tcctactttatacagtatcatctttgtggtgggaatatttggaaacagcttggtggtgatagtcatttacttttatatgaagctgaagactgtggccagtgtttttcttttgaatttagc

SEQ ID NO: 391047 - DNA, 120 bp, Artificial Sequence
  ENSG00000144891_5 (sequence is synthesized)
actggctgacttatgctttttactgactttgccactatgggctgtctacacagctatggaataccgctggccctttggcaattacctatgtaagattgcttcagccagcgtcagtttcaa

SEQ ID NO: 391048 - DNA, 120 bp, Artificial Sequence
  ENSG00000144891_6 (sequence is synthesized)
cctgtacgctagtgtgtttctactcacgtgtctcagcattgatcgatacctggctattgttcacccaatgaagtcccgccttcgacgcacaatgcttgtagccaaagtcacctgcatcat

SEQ ID NO: 391049 - DNA, 120 bp, Artificial Sequence
  ENSG00000144891_7 (sequence is synthesized)
catttggctgctggcaggcttggccagtttgccagctataatccatcgaaatgtatttttcattgagaacaccaatattacagtttgtgctttccattatgagtcccaaaattcaaccct

SEQ ID NO: 391050 - DNA, 120 bp, Artificial Sequence
  ENSG00000144891_8 (sequence is synthesized)
cccgatagggctgggcctgaccaaaaatatactgggtttcctgtttccttttctgatcattcttacaagttatactcttatttggaaggccctaaagaaggcttatgaaattcagaagaa

SEQ ID NO: 391051 - DNA, 120 bp, Artificial Sequence
  ENSG00000144891_9 (sequence is synthesized)
caaatattcacttttctggatgtattgattcaactaggcatcatacgtgactgtagaattgcagatattgtggacacggccatgcctatcaccatttgtatagcttattttaacaattgc

SEQ ID NO: 391052 - DNA, 120 bp, Artificial Sequence
  ENSG00000144891_10 (sequence is synthesized)
ctgaatcctcttttttatggctttctggggaaaaaatttaaaagatattttctccagcttctaaaatatattcccccaaaagccaaatcccactcaaacctttcaacaaaaatgagcacg

SEQ ID NO: 391053 - DNA, 120 bp, Artificial Sequence
  ENSG00000144891_11 (sequence is synthesized)
ctttcctaccgcccctcagataatgtaagctcatccaccaagaagcctgcaccatgttttgaggttgagtgacatgttcgaaacctgtccataaagtaattttgtgaaagaaggagcaag

SEQ ID NO: 391054 - DNA, 120 bp, Artificial Sequence
  ENSG00000144891_12 (sequence is synthesized)
agaacattcctctgcagcacttcactaccaaatgagcattagctacttttcagaattgaaggagaaaatgcattatgtggactgaaccgacttttctaaagctctgaacaaaagcttttc

SEQ ID NO: 391055 - DNA, 120 bp, Artificial Sequence
  ENSG00000144891_13 (sequence is synthesized)
tttccttttgcaacaagacaaagcaaagccacattttgcattagacagatgacggctgctcgaagaacaatgtcagaaactcgatgaatgtgttgatttgagaaattttactgacagaaa

SEQ ID NO: 391056 - DNA, 120 bp, Artificial Sequence
  ENSG00000144891_14 (sequence is synthesized)
tgcaatctccctagcctgcttttgtcctgttattttttatttccacataaaggtatttagaatatattaaatcgttagaggagcaacaggagatgagagttccagattgttctgtccagt

SEQ ID NO: 391057 - DNA, 120 bp, Artificial Sequence
  ENSG00000144891_15 (sequence is synthesized)
ttccaaagggcagtaaagttttcgtgccggttttcagctattagcaactgtgctacacttgcacctggtactgcacattttgtacaaagatatgctaagcagtagtcgtcaagttgcaga

SEQ ID NO: 391058 - DNA, 120 bp, Artificial Sequence
  ENSG00000144891_16 (sequence is synthesized)
tctttttgtgaaattcaacctgtgtcttataggtttccactgccaaaacaatgcccgtaagatggcttatttgtataatggtgttactaaagtcacatataaaagttaaactacttgtaa

SEQ ID NO: 391059 - DNA, 120 bp, Artificial Sequence
  ENSG00000144891_17 (sequence is synthesized)
aggtgctgcactggtcccaagtagtagtgtcttcctagtatattagtttgatttaatatctgagaagtgtatatagtttgtggtaaaaagattatatatcataaagtatgccttcctgtt

SEQ ID NO: 391060 - DNA, 120 bp, Artificial Sequence
  ENSG00000144891_18 (sequence is synthesized)
tatcataaagtatgccttcctgtttaaaaaaagtatatattctacacatatatgtatatgtatatctatatctctaaactgctgttaattgattaaaatctggcaaagttatatttactt

SEQ ID NO: 391061 - DNA, 120 bp, Artificial Sequence
  ENSG00000144891_19 (sequence is synthesized)
cttgctacttcatcatcctcatcgtgaacattattattattatcatcattttccagatgaagaaaatgaatcacaagtcaactgacagtccaaaggctccacagctcagaggaggtagat

SEQ ID NO: 391062 - DNA, 120 bp, Artificial Sequence
  ENSG00000144891_20 (sequence is synthesized)
cttagttcttcctgagaaggtatgaaggtgggtattccaccctacctgaattataggaatttcagatatctgtgagcagctgcaaaggggattttactagatgacatcctgctgggcaca

SEQ ID NO: 391063 - DNA, 120 bp, Artificial Sequence
  ENSG00000144891_21 (sequence is synthesized)
gttttgcaccaaactggacacatgcttgctacttcatcatcctcatcgtgaacattattattattatcatcattttccagatgaagaaaatgaatcacaagtcaactgacagtccaaagg

SEQ ID NO: 391064 - DNA, 120 bp, Artificial Sequence
  ENSG00000144891_22 (sequence is synthesized)
ctccacagctcagaggaggtaaatcatgtgcttaattcagaacttttggctcccatcactatgctcttcccactgtcttaactctggttgtcacctgagccattgtgtttcttctcaggt

SEQ ID NO: 391065 - DNA, 120 bp, Artificial Sequence
  ENSG00000144891_23 (sequence is synthesized)
gggtgctaagtttcatgtcacggtgtcctaactgctggctctatactgggaagctctcggggaccaaggaaagagcgaccgtagttctggtcagcgcctgcccctggagctggccacact

SEQ ID NO: 391066 - DNA, 120 bp, Artificial Sequence
  ENSG00000144891_24 (sequence is synthesized)
ttcccaaatcaggtttgatatttgacaaattgatctaaaatggctgggtttttatctgaataactcactgatgccatcccagaaagtcggcaccagatgaagaaaatgaatcacaagtca

SEQ ID NO: 391067 - DNA, 120 bp, Artificial Sequence
  ENSG00000144891_25 (sequence is synthesized)
gctgtaaatactctgaggaccaaagaaaatatatacgttgttcagatttgccctgaggggtcagtttgtacccaaacatttgctgccacaagtagtaaatgtagaagcaatccaatatct

SEQ ID NO: 391068 - DNA, 120 bp, Artificial Sequence
  ENSG00000144891_26 (sequence is synthesized)
actattttacttttctttcagggttaatcaagtgccttgttataattcttcaaactaaaaacattattataataatgaaaaatatttctgctgaacttccgaataaaaaaatttagtaat

SEQ ID NO: 391069 - DNA, 120 bp, Artificial Sequence
  ENSG00000144891_27 (sequence is synthesized)
agggcatgccattgcaagagaatgctcagccatgttcatctggggacctgctcctggtagagcaataggatctgtgtgcccagcaccactgcccacctagctgtcctggcctgtgcccaa

SEQ ID NO: 391070 - DNA, 120 bp, Artificial Sequence
  ENSG00000144893_0 (sequence is synthesized)
ccaactctcattcatttcgccggttaacatgagagatcatggccgccttcgggcttctcagctatgagcagagaccgctgaagcgcccccggctcgggccgcccgacgtctacccacagg

SEQ ID NO: 391071 - DNA, 120 bp, Artificial Sequence
  ENSG00000144893_1 (sequence is synthesized)
accccaagcagaaggaggatgaacttactgctgtgaatgtaaagcaaggcttcaataatcagccagccttcactggagatgaacatggctcagccagaaatattgtaattaacccatcaa

SEQ ID NO: 391072 - DNA, 120 bp, Artificial Sequence
  ENSG00000144893_2 (sequence is synthesized)
agattggagcttattttagcagcatattagctgagaaactgaagcttaacactttccaggacacgggaaagaagaaaccacaagttaatgctaaagataattattggctggttactgctc

SEQ ID NO: 391073 - DNA, 120 bp, Artificial Sequence
  ENSG00000144893_3 (sequence is synthesized)
gatcccagagtgcaattcatagttggttttctgacttagcaggaaataagccactttctattttggcaaaaaaggttcctatccttagtaaaaaagaggatgtttttgcatatttagcta

SEQ ID NO: 391074 - DNA, 120 bp, Artificial Sequence
  ENSG00000144893_4 (sequence is synthesized)
aatattctgtgccaatggttcgagcaacgtggctgatcaagatgacttgtgcctattattctgctatatctgaagctaaaattaagaaacgtcaggctcctgatccgaatttggagtgga

SEQ ID NO: 391075 - DNA, 120 bp, Artificial Sequence
  ENSG00000144893_5 (sequence is synthesized)
cacagatatctaccagatatcttcgagagcagttggccaagatttctgacttttaccacatggcctccagcacgggcgatggccctgtccctgtgccaccagaggtggagcaagccatga

SEQ ID NO: 391076 - DNA, 120 bp, Artificial Sequence
  ENSG00000144893_6 (sequence is synthesized)
agcaatgggaatacaacgaaaagctagcatttcacatgttccaggaaggaatgttagaaaaacacgaatatttgacatggatcctggatgttttagaaaagatcagaccaatggatgatg

SEQ ID NO: 391077 - DNA, 120 bp, Artificial Sequence
  ENSG00000144893_7 (sequence is synthesized)
atcttcttaaactcttgctaccactaatgctgcagtattcagatgagtttgttcagtcggcctacctgtctcgtcgtcttgcctacttttgtgcccggcgtctttccttgctgctgagcg

SEQ ID NO: 391078 - DNA, 120 bp, Artificial Sequence
  ENSG00000144893_8 (sequence is synthesized)
atagccccaacctccttgctgcccactcaccccacatgatgataggaccaaacaactcgagtatcggggcccccagccctggcccccccggccctggcatgagccccgtgcagctggcct

SEQ ID NO: 391079 - DNA, 120 bp, Artificial Sequence
  ENSG00000144893_9 (sequence is synthesized)
tctcagattttctttcctgtgcacagcatggtcccctggtttatggacttagttgtatgttgcagactgtcactctctgttgcccaagtgccttggtgtggaattattccacaaatgaaa

SEQ ID NO: 391080 - DNA, 120 bp, Artificial Sequence
  ENSG00000144893_10 (sequence is synthesized)
ataagagcgcaaacccaggctcacccctggatctgctgcaggtggccccgtccagcctccccatgccgggtgggaacacggctttcaatcagcaggttcgggcaaggatttatgaagtag

SEQ ID NO: 391081 - DNA, 120 bp, Artificial Sequence
  ENSG00000144893_11 (sequence is synthesized)
aacaacagataaaacaaagaggccgtgcagtggaagttcggtggtcatttgacaagtgccaagaatccacagcaggggtgactattagtcgggttttgcacacgttggaagttttggatc

SEQ ID NO: 391082 - DNA, 120 bp, Artificial Sequence
  ENSG00000144893_12 (sequence is synthesized)
gtcactgttttgaccgaactgattccagcaattccatggagacactttatcataagattttctgggcaaaccaaaacaaagataaccaagaggttgcgcccaacgatgaagctgtggtga

SEQ ID NO: 391083 - DNA, 120 bp, Artificial Sequence
  ENSG00000144893_13 (sequence is synthesized)
cgctgttatgtgaatgggccgtgagctgcaaacggtctggcaagcacagggccatggctgtggcaaaactcctggagaagaggcaagcagaaattgaggcagagagatgtggtgaatcag

SEQ ID NO: 391084 - DNA, 120 bp, Artificial Sequence
  ENSG00000144893_14 (sequence is synthesized)
aagtcttagatgagaaggagtctatttcttcatcctctcttgctggatccagtttgcctgttttccagaatgtgctgttaaggtttttagatacacaggccccctctttgtcggacccaa

SEQ ID NO: 391085 - DNA, 120 bp, Artificial Sequence
  ENSG00000144893_15 (sequence is synthesized)
acagtgaatgtgaaaaggtggaatttgtgaacctggtgctgctcttctgcgagttcatccgccatgatgtcttctcccatgacgcatacatgtgtaccctcatatctcgaggagatttgt

SEQ ID NO: 391086 - DNA, 120 bp, Artificial Sequence
  ENSG00000144893_16 (sequence is synthesized)
cagtcactgcctcaactcggccgcggtcaccagtaggggaaaatgcagatgaacactattcaaaggaccatgatgtgaaaatggagattttttctcctatgcctggagaatcctgtgaga

SEQ ID NO: 391087 - DNA, 120 bp, Artificial Sequence
  ENSG00000144893_17 (sequence is synthesized)
atgccaacacttcgttgggcagaagaatgtcagttaattgtgagaagttggtgaagagggaaaagccaagggaattaatttttccatctaattatgacctccttcgccacttacagtatg

SEQ ID NO: 391088 - DNA, 120 bp, Artificial Sequence
  ENSG00000144893_18 (sequence is synthesized)
caacacattttcctatacctctggatgaatcttcaagtcatgaatgtaaccagcgcacaatccttctctatggagtcggcaaagagcgtgatgaagcaaggcatcagctgaagaagatta

SEQ ID NO: 391089 - DNA, 120 bp, Artificial Sequence
  ENSG00000144893_19 (sequence is synthesized)
ccaaagatatcctgaaaattctaaataagaagagcaccacagagacaggggttggggacgaaggacaaaaagccaggaagaacaaacaggagacatttccaacactggagactgtgttca

SEQ ID NO: 391090 - DNA, 120 bp, Artificial Sequence
  ENSG00000144893_20 (sequence is synthesized)
ctaaactccagctcctttcatattttgatcaacatcaagtgacatctcagatttctaacaatgtgctagaacaaatcacaagctttgcgtcaggaacatcctatcatctccctttggctc

SEQ ID NO: 391091 - DNA, 120 bp, Artificial Sequence
  ENSG00000144893_21 (sequence is synthesized)
accacattcagctcatctttgatctcatggagccagcactgaacatcaacggactaattgacttcgcaatacagttactaaatgaactgagtgttgtggaagctgaactgctcctaaaat

SEQ ID NO: 391092 - DNA, 120 bp, Artificial Sequence
  ENSG00000144893_22 (sequence is synthesized)
cctccagcctggcaggaagttatacaacaggactgtgtgtctgcatcgtggctgttctcaggcgctatcacagttgtctaatcttgaatcctgatcagacagcccaggtgtttgaagggt

SEQ ID NO: 391093 - DNA, 120 bp, Artificial Sequence
  ENSG00000144893_23 (sequence is synthesized)
tgtgtggtgtggtcaagcatgtcgtaaacccctcagaatgttcttcccctgaaagatgcattttagcctacctctatgatctctatgtgtcatgtagccacctcagaagtaaatttggag

SEQ ID NO: 391094 - DNA, 120 bp, Artificial Sequence
  ENSG00000144893_24 (sequence is synthesized)
acctcttcagtagtgcctgttcaaaagtaaagcaaaccatatataataacgtgatgcctgcaaattcgaacttgcgatgggatccagacttcatgatggattttattgagaatccctcag

SEQ ID NO: 391095 - DNA, 120 bp, Artificial Sequence
  ENSG00000144893_25 (sequence is synthesized)
cccgcagcatcaactactcaatgctgggcaagatcctcagtgacaatgcggccaatcgctacagctttgtctgcaatacactcatgaatgtatgtatgggccatcaggatgctggcagga

SEQ ID NO: 391096 - DNA, 120 bp, Artificial Sequence
  ENSG00000144893_26 (sequence is synthesized)
ttaacgacatagccaatttctcctctgagcttacggcttgctgcactgttcttagttcagaatggctgggggttctgaaggctctttgttgttcttcaaatcacgtgtgggggtttaatg

SEQ ID NO: 391097 - DNA, 120 bp, Artificial Sequence
  ENSG00000144893_27 (sequence is synthesized)
atgtactttgcactgtagatgtgagtgacctttcattccatgattcattagctactttcattgctattctgatagcacgacagtgtttttccctggaggacgtcgtgcagcatgtcgcac

SEQ ID NO: 391098 - DNA, 120 bp, Artificial Sequence
  ENSG00000144893_28 (sequence is synthesized)
ttccctctcttctagcagcagcttgtggggatgcggacgccgagcctggggcgagaatgacatgccgactcttgcttcatctcttccgagctccccaggcctgcttcttacctcaagcaa

SEQ ID NO: 391099 - DNA, 120 bp, Artificial Sequence
  ENSG00000144893_29 (sequence is synthesized)
cgggcaaacctttccctggaataagatcatcttgtgatagacacctcttagccgctgctcacaacagcattgaagtgggagccgtgtttgctgtcttaaaagcaattatgatgcttggag

SEQ ID NO: 391100 - DNA, 120 bp, Artificial Sequence
  ENSG00000144893_30 (sequence is synthesized)
atgccaaaattggcaataacagtgtcagctctttaaagaatgatgacttcaccatgagaggtttgcgatgtgatgggaatgctgatgatatctggactgcctcacaaaatccaaaatcct

SEQ ID NO: 391101 - DNA, 120 bp, Artificial Sequence
  ENSG00000144893_31 (sequence is synthesized)
gtgggaaaagcatttccatagaaactgccaatttaagagaatacgctagatatgtactgaggactatctgtcaacaggaatgggtaggagagcattgcttaaaagaacctgaaagattat

SEQ ID NO: 391102 - DNA, 120 bp, Artificial Sequence
  ENSG00000144893_32 (sequence is synthesized)
gtacagacaaagaacttatattggaccctgtgctttcaaatatgcaagcacagaaattactgcagcttatctgttatcctcatggcattaaagaatgtaccgagggggacaatctgcaaa

SEQ ID NO: 391103 - DNA, 120 bp, Artificial Sequence
  ENSG00000144893_33 (sequence is synthesized)
gacagcacattaagcgtattcttcagaatcttgagcagtggacactgaggcaatcctggttagaactccagctaatgatcaaacagtgcttgaaggaccctggctctggttctgtggccg

SEQ ID NO: 391104 - DNA, 120 bp, Artificial Sequence
  ENSG00000144893_34 (sequence is synthesized)
aaatgaacaacttactggacaatattgcaaaggcaacaatagaggtattccagcagtctgcagacctaaataattcttctaattctggcatgagcctcttcaacccaaacagtattggaa

SEQ ID NO: 391105 - DNA, 120 bp, Artificial Sequence
  ENSG00000144893_35 (sequence is synthesized)
gtgctgatacaagtagcacgagacagaatggaataaagacattcctaagttcctccgaacgcaggggtgtatggttggtggcccccctcatcgccaggttgccaacttctgtgcaaggaa

SEQ ID NO: 391106 - DNA, 120 bp, Artificial Sequence
  ENSG00000144893_36 (sequence is synthesized)
gagtgctgaaagccgctggggaagagctggagaagggacagcacttgggttcttcttccaaaaaggaaagggacagacagaaacagaaaagtatgtctcttttgagtcaacaacccttcc

SEQ ID NO: 391107 - DNA, 120 bp, Artificial Sequence
  ENSG00000144893_37 (sequence is synthesized)
tctcactggtacttacctgccttaagggacaagatgaacaaagggaaggcctcctaacatctctccagaatcaagttaaccagattttaagtaactggagagaagaacgataccaagatg

SEQ ID NO: 391108 - DNA, 120 bp, Artificial Sequence
  ENSG00000144893_38 (sequence is synthesized)
acataaaagcgcggcagatgatgcacgaagcattgcaactccgcctaaatttggtaggaggaatgtttgacacggtgcagaggagcacccagtggactacagactgggccctgctactcc

SEQ ID NO: 391109 - DNA, 120 bp, Artificial Sequence
  ENSG00000144893_39 (sequence is synthesized)
ttcagatcattacttcaggaactgttgacatgcacactaacaatgaattattcacaacagttcttgacatgctgggtgttttaatcaatggaacgttagcctctgacctatcaaatgcat

SEQ ID NO: 391110 - DNA, 120 bp, Artificial Sequence
  ENSG00000144893_40 (sequence is synthesized)
cccctgggggatctgaagagaacaagcgtgcatacatgaatttagtaaagaaactgaaaaaagagctaggagacaagcgatcagaaagtattgacaaagttcgacagttactacctttgc

SEQ ID NO: 391111 - DNA, 120 bp, Artificial Sequence
  ENSG00000144893_41 (sequence is synthesized)
cgaaacagacatgtgatgtcatcacttgtgaacctatgggttccttgattgacacaaaaggaaacaaaattgctggatttgactctatagataaaaaacagggtctccaggtctctacga

SEQ ID NO: 391112 - DNA, 120 bp, Artificial Sequence
  ENSG00000144893_42 (sequence is synthesized)
agcagaaggtgtccccgtgggacttgtttgagggtcagaagaacccagctcctttgtcctgggcctggtttgggacagtccgagtggaccgaagagtgatcaagtacgaggagcagcatc

SEQ ID NO: 391113 - DNA, 120 bp, Artificial Sequence
  ENSG00000144893_43 (sequence is synthesized)
acctcctgctgtatcacacacaccccatgcccaagccccgcagttactacctccagccactgcccctgcctcctgaggaggaagaggaagagcccacatctccagtttctcaggaaccag

SEQ ID NO: 391114 - DNA, 120 bp, Artificial Sequence
  ENSG00000144893_44 (sequence is synthesized)
aggaaggaagcgcaagacgaaatctagctcaagagttgatgaatatccacagagcaacatataccgagtgcctcctaattactcgcctatctcctcccaaatgatgcaccatccacagtc

SEQ ID NO: 391115 - DNA, 120 bp, Artificial Sequence
  ENSG00000144893_45 (sequence is synthesized)
caccttgtggggttacaacctcgtgggccagccccagcagcccggctttttccttcagaaccaatctcttactccaggtggctccagattggaccctgcaggctcctttgtcccaaccaa

SEQ ID NO: 391116 - DNA, 120 bp, Artificial Sequence
  ENSG00000144893_46 (sequence is synthesized)
caccaaacaagctctgtcaaacatgctacagcggcgctcaggcgccatgatgcagccgccttctcttcatgcaatcacatcgcagcagcagttgatacagatgaagcttctgcagcagca

SEQ ID NO: 391117 - DNA, 120 bp, Artificial Sequence
  ENSG00000144893_47 (sequence is synthesized)
gcagcaacagcgacttctcaggcaagcccagactcggcctttccaacagggccagccgggggaccaggctgctctctttgctgcgcaagcacggccctcccctcagctccctcagtatcc

SEQ ID NO: 391118 - DNA, 120 bp, Artificial Sequence
  ENSG00000144893_48 (sequence is synthesized)
agggctgcagcaagcacagaccatgccacagggctatacaatgtatgggacacagatgcctttgcagcagacatcgcagcagcaggctggcagtgtggtcctgtctcccagctataactc

SEQ ID NO: 391119 - DNA, 120 bp, Artificial Sequence
  ENSG00000144893_49 (sequence is synthesized)
cagagcctatccggccgcacattccaaccccgtgctaatggaaagactcagacagattcagcagcagccgagtggctatgttcagcagcaggcctcgccgtacctgcagcccctgactgg

SEQ ID NO: 391120 - DNA, 120 bp, Artificial Sequence
  ENSG00000144893_50 (sequence is synthesized)
ctctcagagactgaaccatcaggctctacagcagagccctctggtgggcgggggaattgatgctgtgctgacttctgcacatccaaaccttccctccgtgcccctgcctcaggatcccat

SEQ ID NO: 391121 - DNA, 120 bp, Artificial Sequence
  ENSG00000144893_51 (sequence is synthesized)
gagacccagacagccgcaagttcgacagcagcagagactcctccagatgcagcagccccagcagccccagccccagcagcctccccagccccagcagtcctcgcagtcccagagtcagac

SEQ ID NO: 391122 - DNA, 120 bp, Artificial Sequence
  ENSG00000144893_52 (sequence is synthesized)
ccttggtctccaagcaatgcagccccagcagcccttgtttcccaggcaaggcttgcagcagacccagcagcagcagcagacggccgccttggtgcggcagctccagaagcagctttccag

SEQ ID NO: 391123 - DNA, 120 bp, Artificial Sequence
  ENSG00000144893_53 (sequence is synthesized)
caaccagccacagcaaggagtgactccgtatgggcatccttcacacttctgaatctgcaagaggagaagacatgacgttttatgtttgcactgaaaaacagaaaatcaaatttaatgcat

SEQ ID NO: 391124 - DNA, 120 bp, Artificial Sequence
  ENSG00000144893_54 (sequence is synthesized)
tagtcatcttaaaaatgtccctttttttcatttctttgacattttactatattttatgctacatctcacaaaaaaaaaaaaaggtgtttaaacaaaaagccaaggagaagttgtggtttg

SEQ ID NO: 391125 - DNA, 120 bp, Artificial Sequence
  ENSG00000144893_55 (sequence is synthesized)
attttgttgaattcacctttaaagtaggtttacaaatgtgaatcatgcaggcaggcctactcccggaagagtgtgctagcagaccttttgaaattggtgctttttttgaatctcacattt

SEQ ID NO: 391126 - DNA, 120 bp, Artificial Sequence
  ENSG00000144893_56 (sequence is synthesized)
ctagaaagaatggattatgatggatctaaggtatttatgtatttcattcattaatgatgacgttgtttttttttttttaattttattttccaaactgtgctggaccaaactactgatttg

SEQ ID NO: 391127 - DNA, 120 bp, Artificial Sequence
  ENSG00000144893_57 (sequence is synthesized)
aaaggcatgtcagatcttgacagaaacatggcctgtttattctgcattcacctgtgatggtgaaacggacatttatttgcatcgctctaatttgaaatgtttgtaatctcataagcactt

SEQ ID NO: 391128 - DNA, 120 bp, Artificial Sequence
  ENSG00000144893_58 (sequence is synthesized)
tataaactttgttcttatttatgtaggactcttctttgcttttgttgtggtcaaaaggtgctgaaacagattgttgcttcgtacttaaacttcttaaaccaagaacctaaaccaaggttt

SEQ ID NO: 391129 - DNA, 120 bp, Artificial Sequence
  ENSG00000144893_59 (sequence is synthesized)
ctttgagagccgccctaagatgtgcggaaacctgttagaagtagctgtactcaaatttgttttgaggcaagatcattgatgagagtcattgtgaaggtacaacatgtaaatcctaaaggc

SEQ ID NO: 391130 - DNA, 120 bp, Artificial Sequence
  ENSG00000144893_60 (sequence is synthesized)
ctgaaagaactgcagtggaatcgtccaactatttattgccagttttggttctcctgaaccttatgccaccttaaggggaaaaaaaaatccagtagctggcttgagattccagtgctcaca

SEQ ID NO: 391131 - DNA, 120 bp, Artificial Sequence
  ENSG00000144893_61 (sequence is synthesized)
cttgacatggtttccagagaatctggccccaaagtccagaaggctctggttttcataaaaggtgtatttgctgtttattttgtatggtaagtatttgctcttttgaatttaattattact

SEQ ID NO: 391132 - DNA, 120 bp, Artificial Sequence
  ENSG00000144893_62 (sequence is synthesized)
gtcagtgtcagtcttggttgtgtattgcatatactgtatttataaattggtgcaaaaagcacaagtaaattatacatcaaatttattataaagaaatagtaactattttaactttgttca

SEQ ID NO: 391133 - DNA, 120 bp, Artificial Sequence
  ENSG00000144893_63 (sequence is synthesized)
agtatgtggtaatttgctcctattagagtaaaaaagaaaccagtaaattatcagtttgtgtaacttaagagtattctatataatatttttttagatttagatgcataaaattttgaatgt

SEQ ID NO: 391134 - DNA, 120 bp, Artificial Sequence
  ENSG00000144893_64 (sequence is synthesized)
gaaaattgcagggcattttaaaacatatgtgggggatattttcccatgttctctgttatttcattttcttttgccatatgattttacatataatatagtcaagcatactgtgaatagact

SEQ ID NO: 391135 - DNA, 120 bp, Artificial Sequence
  ENSG00000144893_65 (sequence is synthesized)
tgtctataatgagcagaccatgtaaatctactttttttaaaatgtagctagtacaactttagtagacattttcttttgcaaatcattatctataaataatttatatcttcctgggtgagt

SEQ ID NO: 391136 - DNA, 120 bp, Artificial Sequence
  ENSG00000144893_66 (sequence is synthesized)
tactcattgcaaagtttgactcatgcaaatgacctcaaatacatgtcagcttactttgctgtggcaacatccatgtgaactgctttgtacactgtgaaaatatttcactccagcctgccc

SEQ ID NO: 391137 - DNA, 120 bp, Artificial Sequence
  ENSG00000144893_67 (sequence is synthesized)
attttgtgtttactctgggctggaaaagactttgccaaaacattaaaaactattcttttcactaaattaatagtctatctgctttcagaagatgtatcatctatctgtacacatttttgc

SEQ ID NO: 391138 - DNA, 120 bp, Artificial Sequence
  ENSG00000144893_68 (sequence is synthesized)
tggttttgtatatcagattttttcctctcaagaaacatacttagataagctaatgaagttgttttcttcaaagtaatatatctatataatgactgcattggcaaatcaaccgaaatgtga

SEQ ID NO: 391139 - DNA, 120 bp, Artificial Sequence
  ENSG00000144893_69 (sequence is synthesized)
atgttgtgcctagtgagtgagtcatgttccatcattatttctttccaaatttctttgccagttcagtttgaaccatatattttgtagctcagcattgcaaacaacagtaatactgtttta

SEQ ID NO: 391140 - DNA, 120 bp, Artificial Sequence
  ENSG00000144893_70 (sequence is synthesized)
agaatgagtgttataattgcatagcatttgtatgcactttatactttgcagaggtgagttaaattattaatcattttgcacatgaaagctgtggggcatatcttttttctttttttaggt

SEQ ID NO: 391141 - DNA, 120 bp, Artificial Sequence
  ENSG00000144893_71 (sequence is synthesized)
gaggaagttatgctacgactctaattaattccacgattctattgaaagttgaggaatgctgttttacccctgcgcattataaagaaaataactagaattactttagtcttcagattttct

SEQ ID NO: 391142 - DNA, 120 bp, Artificial Sequence
  ENSG00000144893_72 (sequence is synthesized)
ttttttttttttttttttcttttcttgcaaatgcattcttttgcattaagatggtcacaaggtaaagccctgtggcagaacctggtactttaccttaccagaggaaattaccttagaata

SEQ ID NO: 391143 - DNA, 120 bp, Artificial Sequence
  ENSG00000144893_73 (sequence is synthesized)
tttaccttaccagaggaaattaccttagaataagatggagcgagaccccagctccccttaaagacaagaccttgaaatcaaatggagtcagctatacctatcaatcaatcacagttcttg

SEQ ID NO: 391144 - DNA, 120 bp, Artificial Sequence
  ENSG00000144893_74 (sequence is synthesized)
gatataagaagcccatagactctcttgtttacactgtaggctttttcttaatagggttgcatttgtcagtcattgcatttacccttcttggcctggaagtagaggagatcaatgcgtagc

SEQ ID NO: 391145 - DNA, 120 bp, Artificial Sequence
  ENSG00000144893_75 (sequence is synthesized)
tttgaccacttccagccacagggtactaacatcagacataagttgcaaccaggtcacattttaggctgagatggggctaactgaaagtcagtgtgatgaaaacccaagggcgctattcca

SEQ ID NO: 391146 - DNA, 120 bp, Artificial Sequence
  ENSG00000144893_76 (sequence is synthesized)
catgtctcaaatgattggcaggggctaacttattagtaattctcggttttgtgcactgagatatctaagacctatggcatttttttcccatttataaagctcctataattcttaagtaag

SEQ ID NO: 391147 - DNA, 120 bp, Artificial Sequence
  ENSG00000144893_77 (sequence is synthesized)
tactaggtgaatgtttgaatagatgctggagaaattacactggaaaaccccacccctagatttagataagatcaatcatttaatattccccaaattaattcaggttgaattaagcatgta

SEQ ID NO: 391148 - DNA, 120 bp, Artificial Sequence
  ENSG00000144893_78 (sequence is synthesized)
atataaattcagtgaattacaaaaacacattttgtgtaggattgatcagattttaaatacagtgaaacttcattatatataatagacctagaccctcccaagcattttcccatcccataa

SEQ ID NO: 391149 - DNA, 120 bp, Artificial Sequence
  ENSG00000144893_79 (sequence is synthesized)
agaattaatgaaatgaaatgcttatagagcaacgattcctgctcagaaaaatttccttataaacagctccaaaccaggggtgcctgagctagattttaaagttataaagaagtttcattg

SEQ ID NO: 391150 - DNA, 120 bp, Artificial Sequence
  ENSG00000144893_80 (sequence is synthesized)
tatttttaaaacctttttaatgggtgtatttggacaaaaataacccccttttcacattttatgatgtgcaggtattacattgctttttacatgtggaaaagtgagcctgcatttattttt

SEQ ID NO: 391151 - DNA, 120 bp, Artificial Sequence
  ENSG00000144893_81 (sequence is synthesized)
aaatgcagttattaaaacatttttgtattccccatcaatgaaaattttcagtgtgaacaaatggtgaatcataagacagttcagtgcttattttctgtaggttttagcaaaaaaatttat

SEQ ID NO: 391152 - DNA, 120 bp, Artificial Sequence
  ENSG00000144893_82 (sequence is synthesized)
aaaccacaaaatatttatacatcaggatggtaaatttacatcataaagattgcagatttaatattttccattgtctctgttctgagtgccatgcttgtaacattgataggaggtggacac

SEQ ID NO: 391153 - DNA, 120 bp, Artificial Sequence
  ENSG00000144893_83 (sequence is synthesized)
taggcaactggtattagaagttcatttttttactgaaaaattcaggtacattagccatttgttattttatagtgaaccgtttcaatgtttgtttattgttatttgttggcaaaataaaag

SEQ ID NO: 391154 - DNA, 120 bp, Artificial Sequence
  ENSG00000144893_84 (sequence is synthesized)
tgccttaagttaaaagtttgttttgagatccattaaataaatcagtatcatcagttcataatgcatttatttacaagtccttttattttgcatgttcattgtaaatttaatactgtaaat

SEQ ID NO: 391155 - DNA, 120 bp, Artificial Sequence
  ENSG00000144893_85 (sequence is synthesized)
gtattcaaattcatttacatgcctatggctgcctttgattaaacttcttccaaaaaataaattctgcccagatgttgttgactttattatttcatgtcagattacttgaatatacgttgc

SEQ ID NO: 391156 - DNA, 120 bp, Artificial Sequence
  ENSG00000144893_86 (sequence is synthesized)
tgcataatcactaccaagtgggttctttgctgtgcatttgtatatcccagaatcggaggtttggggattctgaatgactagggtaccttgtaagtgaagctgctcacttccatgtgtcct

SEQ ID NO: 391157 - DNA, 120 bp, Artificial Sequence
  ENSG00000144893_87 (sequence is synthesized)
ctctttacttgccgttgagagaagggagtggtcaggcatctcccatgtgatttctggcttgggaactcccaaggccacacagtggagctgaaaggctgcccctgtcctggtgacaatact

SEQ ID NO: 391158 - DNA, 120 bp, Artificial Sequence
  ENSG00000144893_88 (sequence is synthesized)
cctgggtggacgatttgtaattcggggagggtaggctacaatcattactggaacagtaatcagtgtatgaccaacactattttgagccttacagatatagtttcctctgtcataagctgt

SEQ ID NO: 391159 - DNA, 120 bp, Artificial Sequence
  ENSG00000144893_89 (sequence is synthesized)
ttgaagcttcatggctcacagtggtgcctcatatcttactgtcagcattctaatttctagtttttcttcaaacctcagagttaagcagaagtataattacagtttttaatcattgctgtg

SEQ ID NO: 391160 - DNA, 120 bp, Artificial Sequence
  ENSG00000144893_90 (sequence is synthesized)
tcttatcaaccacggcttttaagaaaatgaaaaatttttcgtttacctttcattgtggtggctggctgtccattcacctcatacggtgtcttcaagttgaaacaggtttcttgtctctaa

SEQ ID NO: 391161 - DNA, 120 bp, Artificial Sequence
  ENSG00000144893_91 (sequence is synthesized)
gtccgctccacagcttcttcccgggaggggagggccaccctcgccttgggcgagcacttcagccaccagcctaggcgccaagaaaagtttttttttttttttttccagtgccccaccccc

SEQ ID NO: 391162 - DNA, 120 bp, Artificial Sequence
  ENSG00000144893_92 (sequence is synthesized)
acccccatcctgcgcccagctggggtgggtttgggtccattggtgaaaaaagtcacacgttcccatcagctgctcctccccctggagacaaggtaggggggagcagaggaggcaggcgcc

SEQ ID NO: 391163 - DNA, 120 bp, Artificial Sequence
  ENSG00000144893_93 (sequence is synthesized)
gcggaggaccctggccgacctctagtccctccgccgccgccaccggagcggtgcgtcccggggctcgagcgcagccgagtacccgccgaaggctgtccccatcagtgcgtgtctgctgcc

SEQ ID NO: 391164 - DNA, 120 bp, Artificial Sequence
  ENSG00000144893_94 (sequence is synthesized)
gggcagcggcagcatccaacctgctttattcctcctgcctgcagcgccacagcgagcgagcgagcgaggagggggagagagggagtctgtctgcaaagtgctgctccctggtgctcagag

SEQ ID NO: 391165 - DNA, 120 bp, Artificial Sequence
  ENSG00000144893_95 (sequence is synthesized)
aacagagtattatggcgcatatgggcattgactcaggaaccactaacatttttgatgaagtagacaagagtgactttaaaactgactttggttcggaatttccaattttttctcctatgc

SEQ ID NO: 391166 - DNA, 120 bp, Artificial Sequence
  ENSG00000144893_96 (sequence is synthesized)
cataaaaaattgagataagtgatgtaaacttccacatgtgttatatgttttgtttatgttaaaatagcgaatatgccttgtgtagaattagactgcatgttataagtctgacctgtttta

SEQ ID NO: 391167 - DNA, 120 bp, Artificial Sequence
  ENSG00000144893_97 (sequence is synthesized)
aagtcatcttcagaagagactttgcacaataacatgtaataaaggtgttggcattaattcttaaatggatttgatgtagttgtatatggtatggtgagtcatggtatctaatatctttga

SEQ ID NO: 391168 - DNA, 120 bp, Artificial Sequence
  ENSG00000144893_98 (sequence is synthesized)
acaaagaatttacaacaaagaatgatttagagtttaatgtaaattttgtattttatacacaccaatacaaacaagtaattacaaacagatcaatcactttcctctcagtagttatgctgt

SEQ ID NO: 391169 - DNA, 120 bp, Artificial Sequence
  ENSG00000144893_99 (sequence is synthesized)
gcaactttgtaatcatatttaattaatttttttcactaaggtaaaatgttcattaacctaattagcagctattttctagaagctaattaataaaggtaagtgtcaatgatggtattattg

SEQ ID NO: 391170 - DNA, 120 bp, Artificial Sequence
  ENSG00000144893_100 (sequence is synthesized)
aactcggaagctcgcgctcccgggccgtgggggcgagaacgccggcggcgagccggcgtcgctcgccgcccccagacagtggcaaacttcgcggcgttcccggagctcgtccgggcgagg

SEQ ID NO: 391171 - DNA, 120 bp, Artificial Sequence
  ENSG00000144893_101 (sequence is synthesized)
cagataccgcacaaataaaatcaaatccaagtcccccatcccaacccgaatgatggaggctgcggcggccggagtgaccccgccgccgccagccccagcccgctagccgcggaccaacag

SEQ ID NO: 391172 - DNA, 120 bp, Artificial Sequence
  ENSG00000144895_0 (sequence is synthesized)
ctctttccgggacaacatggcgccgtccacgccgctcttgacagtccgaggatcagaaggactgtacatggtgaatggaccaccacattttacagaaagcacagtgtttccaagggaatc

SEQ ID NO: 391173 - DNA, 120 bp, Artificial Sequence
  ENSG00000144895_1 (sequence is synthesized)
tgggaagaattgcaaagtctgtatctttagtaaggatgggaccttgtttgcctggggcaatggagaaaaagtaaatattatcagtgtcactaacaagggactactgcactccttcgacct

SEQ ID NO: 391174 - DNA, 120 bp, Artificial Sequence
  ENSG00000144895_2 (sequence is synthesized)
cctgaaggcagtttgccttgaattctcacccaaaaatactgtcctggcaacgtggcagccttacactacttctaaagatggcacagctgggatacccaacctacaactttatgatgtgaa

SEQ ID NO: 391175 - DNA, 120 bp, Artificial Sequence
  ENSG00000144895_3 (sequence is synthesized)
aactgggacatgtttgaaatctttcatccagaaaaaaatgcaaaattggtgtccatcctggtcagaagatgaaactctttgtgcccgcaatgttaacaatgaagttcacttctttgaaaa

SEQ ID NO: 391176 - DNA, 120 bp, Artificial Sequence
  ENSG00000144895_4 (sequence is synthesized)
caacaattttaacacaattgcaaataaattgcatttgcaaaaaattaatgattttgtattatcacctggaccccaaccatacaaggtggctgtctatgttccaggaagtaaaggtgcacc

SEQ ID NO: 391177 - DNA, 120 bp, Artificial Sequence
  ENSG00000144895_5 (sequence is synthesized)
ttcatttgttagattatatcagtaccccaactttgctggacctcatgcagctttagctaataaaagtttctttaaggcagataaagttacaatgctgtggaataaaaaagctactgctgt

SEQ ID NO: 391178 - DNA, 120 bp, Artificial Sequence
  ENSG00000144895_6 (sequence is synthesized)
gttggtaatagctagcacagatgttgacaagacaggagcttcctactatggagaacaaactctacactacattgcaacaaatggagaaagtgctgtagtgcaattaccaaaaaatggccc

SEQ ID NO: 391179 - DNA, 120 bp, Artificial Sequence
  ENSG00000144895_7 (sequence is synthesized)
catttatgatgtagtttggaattctagttctactgagttttgtgctgtatatggttttatgcctgccaaagcgacaattttcaacttgaaatgtgatcctgtatttgactttggaactgg

SEQ ID NO: 391180 - DNA, 120 bp, Artificial Sequence
  ENSG00000144895_8 (sequence is synthesized)
tcctcgtaatgcagcctactatagccctcatggacatatattagtattagctggatttggaaatctgaggggacaaatggaagtgtgggatgtgaaaaactacaaacttatttctaaacc

SEQ ID NO: 391181 - DNA, 120 bp, Artificial Sequence
  ENSG00000144895_9 (sequence is synthesized)
ggtggcttctgattctacatattttgcttggtgcccggatggtgagcatattttaacagctacatgtgctcccaggttacgggttaataatggatacaaaatttggcattatactggctc

SEQ ID NO: 391182 - DNA, 120 bp, Artificial Sequence
  ENSG00000144895_10 (sequence is synthesized)
tatcttgcacaagtatgatgtgccatcaaatgcagaattatggcaggtttcttggcagccatttttggatggaatatttccagcaaaaacaataacttaccaagcagttccaagtgaagt

SEQ ID NO: 391183 - DNA, 120 bp, Artificial Sequence
  ENSG00000144895_11 (sequence is synthesized)
acccaatgaggaacctaaagttgcaacagcttatagacccccagctttaagaaataaaccaatcaccaattccaaattgcatgaagaggaaccacctcagaatatgaaaccacaatcagg

SEQ ID NO: 391184 - DNA, 120 bp, Artificial Sequence
  ENSG00000144895_12 (sequence is synthesized)
aaacgataagccattatcaaaaacagctcttaaaaatcaaaggaagcatgaagctaagaaagctgcaaagcaggaagcaagaagtgacaagagtccagatttggcacctactcctgcccc

SEQ ID NO: 391185 - DNA, 120 bp, Artificial Sequence
  ENSG00000144895_13 (sequence is synthesized)
acagagcacaccacgaaacactgtctctcagtcaatttctggggaccctgagatagacaaaaaaatcaagaacctaaagaagaaactgaaagcaatcgaacaactgaaagaacaagcagc

SEQ ID NO: 391186 - DNA, 120 bp, Artificial Sequence
  ENSG00000144895_14 (sequence is synthesized)
aactggaaaacagctagaaaaaaatcagttggagaaaattcagaaagaaacagcccttctccaggagctggaagatttggaattgggtatttaaagattcacggaaagcaagttgatgac

SEQ ID NO: 391187 - DNA, 120 bp, Artificial Sequence
  ENSG00000144895_15 (sequence is synthesized)
cagaaatcagtgcaaacacatcttctgttaaacccattggtatacacagaatattcctgtgcccacacttaatgtcaatctataattttaaccatttatccaagattctactaagtgtaa

SEQ ID NO: 391188 - DNA, 120 bp, Artificial Sequence
  ENSG00000144895_16 (sequence is synthesized)
tgcatcctatatcatgtcaatatgtgatatagaaaagagatacgtgaattttttagctaagcttgacagattgaaagacaagtgtcatttttttttgtagagggtgatatataccatgta

SEQ ID NO: 391189 - DNA, 120 bp, Artificial Sequence
  ENSG00000144895_17 (sequence is synthesized)
aatgaacaaagacattttaaatttaatcactgtttttattataagttccttagttcagatatcctttattaatttataagatgtgtaaaactacttaattctcacaagactctatgaagt

SEQ ID NO: 391190 - DNA, 120 bp, Artificial Sequence
  ENSG00000144895_18 (sequence is synthesized)
aattcttttaatctctattttataaatgaaaaaactaaggccataaatttaagaaatttgtcagtgtctcaaagctaggaaatggccatctaatcccagagcctatgctttaggtcacta

SEQ ID NO: 391191 - DNA, 120 bp, Artificial Sequence
  ENSG00000144895_19 (sequence is synthesized)
tgatatatactactcctgtatcctcaagtaatgtatcatttagtaacactaagcaccctgcttagttttcatggatactgccaaattgccctatctcaagctttatacttgcaccattta

SEQ ID NO: 391192 - DNA, 120 bp, Artificial Sequence
  ENSG00000144895_20 (sequence is synthesized)
aagttttccacactgttggcaatatcagaagtgataaggctttgaaatgttcgccactttgataaagaggaaatgattgtttgttactgttatatacatgtatttttatcagagatgggt

SEQ ID NO: 391193 - DNA, 120 bp, Artificial Sequence
  ENSG00000144895_21 (sequence is synthesized)
tatgtacttttccacgtttgatagttggttgtatttctttagtgaattgatttttcttttcctttgcccatttttctgtttggatgtttgactttcttcttaatttgtaagagtatccta

SEQ ID NO: 391194 - DNA, 120 bp, Artificial Sequence
  ENSG00000144895_22 (sequence is synthesized)
tgtagtaacaaaatccttttttaaaaatttttaaagaaaaagtatacacacaggacttttttttttctaattcaaaaaatacaaaggcatgcaatgaaaattaagtctgttccactacca

SEQ ID NO: 391195 - DNA, 120 bp, Artificial Sequence
  ENSG00000144895_23 (sequence is synthesized)
cattttccagttttttgtgtatctttctaatgatagataccatatgagtattcaaatatacatacacatacacttaaaaaaaaaagatggcatatactaactgttctgtttggggctttt

SEQ ID NO: 391196 - DNA, 120 bp, Artificial Sequence
  ENSG00000144895_24 (sequence is synthesized)
tggtggtggtgtttgtttgacagggtctcactctgcctcccaggttggagtgcaccttgaactcctggactcaagtgatccttcacctcctccttccaagtatctgacactacaggcttg

SEQ ID NO: 391197 - DNA, 120 bp, Artificial Sequence
  ENSG00000144895_25 (sequence is synthesized)
tatctgacactacaggcttgcatcactatgcccagcttatactcaccatagtggttctgtactcccttaaaatattctggaggccaggcatgctggctcacacctgtaatcccagcacct

SEQ ID NO: 391198 - DNA, 87 bp, Artificial Sequence
  ENSG00000144895_26 (sequence is synthesized)
agcctgggcaacaagagtgaaaccgtctcacacacacacaaaaaaaaatattttggagctccttctatatgagtctctctctcttat

SEQ ID NO: 391199 - DNA, 120 bp, Artificial Sequence
  ENSG00000144895_27 (sequence is synthesized)
atattttggagctccttctatatgagtctctctctcttatctctctcaggatgtgtgtatgtgtttgtttctctggaaaaccctgactaatacagattagctatgtattaggtaatacat

SEQ ID NO: 391200 - DNA, 120 bp, Artificial Sequence
  ENSG00000144895_28 (sequence is synthesized)
aatgcctaatacataactaatatatggacaggaagttaatagactgactgtgccaccttaaaactcgtatgttgaagccctaacctccaacgtggtggtattgggagatgggccttttgg

SEQ ID NO: 391201 - DNA, 120 bp, Artificial Sequence
  ENSG00000144895_29 (sequence is synthesized)
aaggtaagtgtgtttgaatgaggtgaagaggttggggacttcgtgatgggattattgtccttacaagaaaagacaccagagagcttgttctgtctctttgggccatgtgaagacatggtg

SEQ ID NO: 391202 - DNA, 120 bp, Artificial Sequence
  ENSG00000144895_30 (sequence is synthesized)
agaaagcagccagctgtaagccagagagtcctcaccagaacctaaccatgctggtgatatcctcatctcagacttctaacctccagaactgtgagaaaataaacttctttgtttaaacca

SEQ ID NO: 391203 - DNA, 120 bp, Artificial Sequence
  ENSG00000144895_31 (sequence is synthesized)
tttctcagtgtaaaaatactctgacacgatcaattacgtttagtgggggggaaaaagttataaagtttataacctcataagaaagtaattagtctttatgatagtaaatagtgtttgtga

SEQ ID NO: 391204 - DNA, 120 bp, Artificial Sequence
  ENSG00000144895_32 (sequence is synthesized)
atatttatgatctacagtgaatcttgtactctccaaataaacaatgtattgaaagtaatttcaaggtatatggtaagttaatgtaaagagccattatgagctaaaggaaaagaaaaagct

SEQ ID NO: 391205 - DNA, 120 bp, Artificial Sequence
  ENSG00000144895_33 (sequence is synthesized)
gatgaactcatttttattgtataatatttaccgaagatgaaaagaatacatattctctatcaaggaaaatgatcttcagatctgaaaatagtaacttaagcctatttataaggtaggggg

SEQ ID NO: 391206 - DNA, 120 bp, Artificial Sequence
  ENSG00000144895_34 (sequence is synthesized)
aacaatactaagaaaaagtgtagacactagtgtaattgaatacaagcctttattttacaagagttgtatcttaaggaatgagaaaaacttgcaaatttgatagccaaatcatggccagta

SEQ ID NO: 391207 - DNA, 120 bp, Artificial Sequence
  ENSG00000144895_35 (sequence is synthesized)
atcttagtgaaatcataatgaaaaagatattaaaaagggaggacatatatatgcacatagtatatagctagctagattaatttttttttccccaaagaaacaatggacaagtaaaccaaa

SEQ ID NO: 391208 - DNA, 120 bp, Artificial Sequence
  ENSG00000144895_36 (sequence is synthesized)
ctaccatgtgcctggcactcttctcttaaaaccaattactgagagttgggtggtataatcccattacttgcctaagctcacactgcaagtaaatgactgagtagaaattgaagcctacat

SEQ ID NO: 391209 - DNA, 120 bp, Artificial Sequence
  ENSG00000144895_37 (sequence is synthesized)
ttgtcttgctcctaccccatgctttttccactgtgttactgtatctcaccaggaggagactacagtgagtagtattggtgtgtagttatagtgatctttgataatgtattcagagtttaa

SEQ ID NO: 391210 - DNA, 120 bp, Artificial Sequence
  ENSG00000144895_38 (sequence is synthesized)
aacatggcgccgtccacgccgctcttgacagtccgaggatcagaaggactgtacatggtgaatggaccaccacattttacagaaagcacagtgtttccaagagacagggtttcgccatgt

SEQ ID NO: 391211 - DNA, 120 bp, Artificial Sequence
  ENSG00000144895_39 (sequence is synthesized)
tgtgtgtcacgaatataaacacaactggcattatttgaataacagatatttgagtgtcattaataaaatccgtcttttaatgtcatgatgtagtgagatattacctctcgttacacaaaa

SEQ ID NO: 391212 - DNA, 120 bp, Artificial Sequence
  ENSG00000144895_40 (sequence is synthesized)
taccttcaaagttgttcatttctatgtatatgccatgacttgtttatctagttacttagaattaaaaattaatatatgaaaaatataatttaatgctaaagaagttgagttgttttaaac

SEQ ID NO: 391213 - DNA, 120 bp, Artificial Sequence
  ENSG00000144895_41 (sequence is synthesized)
taatcgtatacagtttccattaacttttatgacatcatagggttttcctaaatactgttaatctattaatcaataattactcttacatacatttgcataattctttataagtctgaattc

SEQ ID NO: 391214 - DNA, 120 bp, Artificial Sequence
  ENSG00000144895_42 (sequence is synthesized)
agtgaaaatctgtaacacaaaggttttcttttacaataactttttattatctggtaattgctattaagacatttgaatatcttttcctgaatttaattgctattgaaattctgtgacaca

SEQ ID NO: 391215 - DNA, 120 bp, Artificial Sequence
  ENSG00000144895_43 (sequence is synthesized)
aattttttagatattttatcgtgtagaattttaaacttcagacacctagttctagtaaccatcagcttgtggccaatcttatctcatccatacatctctccagctaccatctcttactaa

SEQ ID NO: 391216 - DNA, 120 bp, Artificial Sequence
  ENSG00000144895_44 (sequence is synthesized)
gtgaaagcaaatcccagatatggttatacttttatatacttgttaaatatgtaattgtaaatatttcagagtagatttctgaagattggggcctttcattttttaaacttagccacaaaa

SEQ ID NO: 391217 - DNA, 120 bp, Artificial Sequence
  ENSG00000144908_0 (sequence is synthesized)
acagtaagtcttcttgacctaagcgggaaagagcgcaggcccctgcggggttggcttttacatggcatttatagacccgcccggagagggtgcgctgcgctcccgccatagtcccaccac

SEQ ID NO: 391218 - DNA, 120 bp, Artificial Sequence
  ENSG00000144908_1 (sequence is synthesized)
cggtgagcgccgcccccactcggctgactctccgcccgccccgcgcccctcccctcacgggctctggccttaaccagagctcgcggactggcggggacaggtcccacctcctggctccca

SEQ ID NO: 391219 - DNA, 120 bp, Artificial Sequence
  ENSG00000144908_2 (sequence is synthesized)
ggacgggtctgcaccaacctcagtttcggggctgcggctcacagaagtctaacctgcccgggacgcccgcaccaactcctgcgcgcggtccttccaaccctcctgctaccatgaagattg

SEQ ID NO: 391220 - DNA, 120 bp, Artificial Sequence
  ENSG00000144908_3 (sequence is synthesized)
cagtgattggacagagcctgtttggccaggaagtttactgccacctgaggaaggagggccacgaagtggtgggtgtgttcactgttccagacaaggatggaaaggccgaccccctgggtc

SEQ ID NO: 391221 - DNA, 120 bp, Artificial Sequence
  ENSG00000144908_4 (sequence is synthesized)
tggaagctgagaaggatggagtgccggtattcaagtactcccggtggcgtgcaaaaggacaggctttgcctgatgtggtggcaaaataccaggctttgggggccgagctcaacgtcctgc

SEQ ID NO: 391222 - DNA, 120 bp, Artificial Sequence
  ENSG00000144908_5 (sequence is synthesized)
ccttctgcagccaattcatccccatggagataatcagtgccccccggcatggctccatcatctatcacccgtcactgctccctaggcaccgaggggcctcggccatcaactggaccctca

SEQ ID NO: 391223 - DNA, 120 bp, Artificial Sequence
  ENSG00000144908_6 (sequence is synthesized)
ttcacggagataagaaaggggggttttccatcttctgggcggatgatggtctggacaccggagacctgctgctgcagaaggagtgtgaggtgctcccggacgacaccgtgagcacgctgt

SEQ ID NO: 391224 - DNA, 120 bp, Artificial Sequence
  ENSG00000144908_7 (sequence is synthesized)
acaaccgcttcctcttccctgaaggcatcaaagggatggtgcaggccgtgaggctgatcgctgagggcaaagcccccagactccctcagcctgaggaaggagccacctatgaggggattc

SEQ ID NO: 391225 - DNA, 120 bp, Artificial Sequence
  ENSG00000144908_8 (sequence is synthesized)
agaagaaggagacagccaagatcaactgggaccagccggcagaggccattcacaactggatccgcgggaacgacaaggtgccgggagcctggacagaggcctgtgaacagaaactgacat

SEQ ID NO: 391226 - DNA, 120 bp, Artificial Sequence
  ENSG00000144908_9 (sequence is synthesized)
ttttcaactcaacgctgaacacttcaggcctggtgcccgagggagacgctttgcccatcccaggagcccatcggccaggggtggtcaccaaagcaggactcatcctctttgggaatgatg

SEQ ID NO: 391227 - DNA, 120 bp, Artificial Sequence
  ENSG00000144908_10 (sequence is synthesized)
acaaaatgctgctggtgaagaatattcagctggaggatggcaaaatgatcctggcctcgaacttctttaagggggcagccagcagtgtccttgagctgacagaggcagagctggttactg

SEQ ID NO: 391228 - DNA, 120 bp, Artificial Sequence
  ENSG00000144908_11 (sequence is synthesized)
cggaggctgtgcggagtgtttggcagcggatcctccccaaagtcctggaggttgaagactccactgatttcttcaagtcaggggccgcgtctgtggacgttgtgaggctggtggaggaag

SEQ ID NO: 391229 - DNA, 120 bp, Artificial Sequence
  ENSG00000144908_12 (sequence is synthesized)
tgaaggagctgtgtgatggcctggagttagaaaatgaagatgtgtacatggcatccacctttggggacttcatccagctgttagtgaggaagctgcgaggggacgatgaggagggcgagt

SEQ ID NO: 391230 - DNA, 120 bp, Artificial Sequence
  ENSG00000144908_13 (sequence is synthesized)
cactgtccgcatgccccaccagctcttcattgggggggagttcgtggatgccgagggcgccaagacctctgagaccatcaatcccaccgatggaagtgtcatctgccaggtatccctggc

SEQ ID NO: 391231 - DNA, 120 bp, Artificial Sequence
  ENSG00000144908_14 (sequence is synthesized)
ccaagtcaccgacgtcgacaaggcagtggccgcagccaaggatgcctttgagaatggacggtgggggaagatcagtgcgcgggaccggggccggctgatgtacaggttggcagatctcat

SEQ ID NO: 391232 - DNA, 120 bp, Artificial Sequence
  ENSG00000144908_15 (sequence is synthesized)
ggagcagcaccaggaggagctggccaccattgaggccctggatgcgggtgccgtctacacgctggccctgaagacccacgtgggcatgtccatccagaccttccgctactttgctggctg

SEQ ID NO: 391233 - DNA, 120 bp, Artificial Sequence
  ENSG00000144908_16 (sequence is synthesized)
gtgtgacaagatccagggctccaccatccccatcaaccaggccagacccaaccgcaacctgaccttgaccaggaaggagcctgttggggtttgtggcatcatcatcccctggaactatcc

SEQ ID NO: 391234 - DNA, 120 bp, Artificial Sequence
  ENSG00000144908_17 (sequence is synthesized)
cctgatgatgctgtcctggaagacagctgcctgcctggctgccgggaacacagtggtgatcaagcctgctcaggtgaccccactcacagccttgaagtttgcagagctgacattaaaggc

SEQ ID NO: 391235 - DNA, 120 bp, Artificial Sequence
  ENSG00000144908_18 (sequence is synthesized)
cggcattcccaaaggtgtggttaacgtcctcccaggatctggctccctggtcggccagagactctcagaccatcctgatgtgaggaaaatcgggttcacaggctccacagaggtgggcaa

SEQ ID NO: 391236 - DNA, 120 bp, Artificial Sequence
  ENSG00000144908_19 (sequence is synthesized)
gcacatcatgaaaagctgtgccataagtaacgtgaagaaggtgtccctggaactgggcgggaagtcacccctcatcatctttgctgactgtgacctcaacaaggctgtgcagatggggat

SEQ ID NO: 391237 - DNA, 120 bp, Artificial Sequence
  ENSG00000144908_20 (sequence is synthesized)
gagttctgttttcttcaacaaaggagagaattgcattgcagcaggccgactctttgtggaggactccattcatgatgagttcgtgcggagagtggtagaagaggtgcggaagatgaaggt

SEQ ID NO: 391238 - DNA, 120 bp, Artificial Sequence
  ENSG00000144908_21 (sequence is synthesized)
gggcaacccgctggacagggacaccgaccacgggccgcagaatcaccatgcccaccttgtgaagctgatggagtactgccagcatggcgtgaaggaaggggccacactggtctgcggcgg

SEQ ID NO: 391239 - DNA, 120 bp, Artificial Sequence
  ENSG00000144908_22 (sequence is synthesized)
gaatcaggtccctcggccagggttcttctttgagccaactgttttcacagacgtggaagaccacatgttcatagccaaggaggagtccttcgggcctgtcatgatcatctctcggtttgc

SEQ ID NO: 391240 - DNA, 120 bp, Artificial Sequence
  ENSG00000144908_23 (sequence is synthesized)
tgatggggacttggatgccgtgctgtctcgggccaatgccacggaatttggcctggcttctggtgtcttcaccagggacatcaacaaggccctgtatgtcagtgacaagctccaggcagg

SEQ ID NO: 391241 - DNA, 120 bp, Artificial Sequence
  ENSG00000144908_24 (sequence is synthesized)
cactgtgtttgtcaacacgtacaacaagaccgacgtggccgctcccttcggaggattcaaacagtctggatttggcaaagatctaggagaggcggctctgaacgagtacctgcgggtcaa

SEQ ID NO: 391242 - DNA, 120 bp, Artificial Sequence
  ENSG00000144908_25 (sequence is synthesized)
gacagtgaccttcgaatactgaagaaaggtctttgtgagaagaaagtccctgcccctccctcgtggctggggccccctccctcttgagcctgggtgcacagcacctcccacctggggggc

SEQ ID NO: 391243 - DNA, 120 bp, Artificial Sequence
  ENSG00000144908_26 (sequence is synthesized)
tagtggaagccctcctgcctgcacaccatgtctgcatcttggacgccctctgtccagtcagaagcagcccttggctgggtgaggtgtgcccctcccagggagaataaagcttctgaagag

SEQ ID NO: 391244 - DNA, 120 bp, Artificial Sequence
  ENSG00000144908_27 (sequence is synthesized)
actgcgctcaagtggacggtcgcgcgtgcagagggaggccggatagcagaccccacaacgtggctcctggggccccgctatcgagagctcaggccccgcgggcacttgcctaggagagga

SEQ ID NO: 391245 - DNA, 120 bp, Artificial Sequence
  ENSG00000144908_28 (sequence is synthesized)
tctgcggcaccaggactgagtagaagggagagagtggagaaggggaattgcagagagaaaaccaggggctgtttttctctcggagaggcgggtaggcactgggcgggcagaagcgccgct

SEQ ID NO: 391246 - DNA, 120 bp, Artificial Sequence
  ENSG00000144908_29 (sequence is synthesized)
atccacccggatgcgcagctgctaaggggccgcctctgcaagcggctgcaaattcccggagggcagcgtctcctttcgctctgctgtgtccgtagcacatggcaggtccttccaaccctc

SEQ ID NO: 391247 - DNA, 120 bp, Artificial Sequence
  ENSG00000144908_30 (sequence is synthesized)
ataaatttgttctgtccacgaggcaaccctggagtctctctgaatctgctgtgattctgagggctgcccaatttgtgaatcgttcattgctcaattaaacttttttaaatttaatttggc

SEQ ID NO: 391248 - DNA, 120 bp, Artificial Sequence
  ENSG00000144908_31 (sequence is synthesized)
tgaagtttttcttttaacatggtgtcagaagcgggatccaaagtacagcttctagcgacccccaggagtactgagtgaacaagcaaggtccttccaaccctcctgctaccatgaagattg

SEQ ID NO: 391249 - DNA, 120 bp, Artificial Sequence
  ENSG00000144908_32 (sequence is synthesized)
ggcagggcggctcagtcacctgggcagctggtactgctgagaggcagggtggcaggctatgggccggagcccacagctgcaggaggggcccggggatcatatgtgagggctgcttgcccc

SEQ ID NO: 391250 - DNA, 120 bp, Artificial Sequence
  ENSG00000144908_33 (sequence is synthesized)
tgcccgaggacaggctggcagggacggccacaggcagaggtgctgtccaggcatgcagcaggagggaaggaggccctggggagcccttgctgtttgggcgcagcaggaagagcagctgca

SEQ ID NO: 391251 - DNA, 120 bp, Artificial Sequence
  ENSG00000144908_34 (sequence is synthesized)
gtgtccactgtcccctcgtcctcctcagctcctggccactgccttttatttttcggttgtgttaaacttgtcttccccacagattgaccagctcacaaaaatagtgaacaaagtagagtt

SEQ ID NO: 391252 - DNA, 120 bp, Artificial Sequence
  ENSG00000144908_35 (sequence is synthesized)
gctggagatttagtggtacagagagggagcttacctgtgcttcccacggcaagcaactcaaatactccttgaagctgcactgtccaacaaggcagccactggtaacatgcagctattaaa

SEQ ID NO: 391253 - DNA, 120 bp, Artificial Sequence
  ENSG00000144908_36 (sequence is synthesized)
tcaattaaaatgaattatactgaaaaattcagttcctcagtctcagccacattctaagtcccctggccaccgtgttggaccgtgcagacttggaactcatccatcaccacagagggctcc

SEQ ID NO: 391254 - DNA, 120 bp, Artificial Sequence
  ENSG00000144908_37 (sequence is synthesized)
attgggcagccctgcctcagatgctctgacacccggtcacttcccattcttggcacctcccggtctcttccctcaggctcttgctcacgtgggcccagactccttggctctccttctccc

SEQ ID NO: 391255 - DNA, 120 bp, Artificial Sequence
  ENSG00000144908_38 (sequence is synthesized)
tctctgattcctttcccaccaccttcctctttcctgtcacagagaaacaacttcctgcttcatctcagacctccaaacttccaccttcaagcccaccacggggctcaggacccactctct

SEQ ID NO: 391256 - DNA, 120 bp, Artificial Sequence
  ENSG00000144908_39 (sequence is synthesized)
ttaaaggcagagaaggcttagacagcaacatggacatttgtgtctgtgttatacctgcagggctttacagtttatataatcatctaagatatcagaagatgtaagatctatgtaatctaa

SEQ ID NO: 391257 - DNA, 120 bp, Artificial Sequence
  ENSG00000144908_40 (sequence is synthesized)
acctttgccaggtagagaggacgggtctgtgtccgttgtgcaatagaagttaggttcacgctgactcccttgttcatatggcaggtgtttcttgggtgactgctgtgtaccaggcaagtc

SEQ ID NO: 391258 - DNA, 120 bp, Artificial Sequence
  ENSG00000144908_41 (sequence is synthesized)
tggtcagtctggggaagggtccaggctcaatgtgggccctggggctgggaaggaggcagggtcctattgctggggatagcaacccactggatctccccaggtgcaggccgtgaggctgat

SEQ ID NO: 391259 - DNA, 84 bp, Artificial Sequence
  ENSG00000144908_42 (sequence is synthesized)
aggctggagcgcccagcacagcaccccttgtgggacaccttcatcactgcctcaggtccgaccacaggaactgtgaaatccttc

SEQ ID NO: 391260 - DNA, 120 bp, Artificial Sequence
  ENSG00000144908_43 (sequence is synthesized)
cggtgctttccatgcagtacacggaactgtagcacagcctgcgggagctcacagcaccctgtgcgtgcatttatcaaacagccatccatgtgcttcttgagcacctgctccatgccaggc

SEQ ID NO: 391261 - DNA, 120 bp, Artificial Sequence
  ENSG00000144908_44 (sequence is synthesized)
attgttgtaaggacttgaggacaattgtatttaatctcccagtaacactggatcagtcaggtccacggtgggaaacaagagtaaacccaaaaaatgtccaaaatgggtatggtggtcagt

SEQ ID NO: 391262 - DNA, 120 bp, Artificial Sequence
  ENSG00000144908_45 (sequence is synthesized)
gttcataaagatgaggaactcctgcacagcactgaggaacaggaaatatagaacaaaggaggaacaggcagaggacgagagctgctcagcaggaggagttcggaccccgctggatgccaa

SEQ ID NO: 391263 - DNA, 120 bp, Artificial Sequence
  ENSG00000144908_46 (sequence is synthesized)
gcatgtaggcgccgggaaatgaacctggcgtgaggcacctcacctcgccacccagtggccccagggcaggagtagggagaagggcttggaacacagccaccgggctctgggttttccctg

SEQ ID NO: 391264 - DNA, 120 bp, Artificial Sequence
  ENSG00000144908_47 (sequence is synthesized)
ctagaggaaactgggcagtgacctctcgaggccatacatcctgatttggccccagtcctggtgagttactcacacgcgtgcctgaggaggcttacccaagagtgcatggccactgtgcta

SEQ ID NO: 391265 - DNA, 120 bp, Artificial Sequence
  ENSG00000144908_48 (sequence is synthesized)
ggccggtgacagcaaacaccagagcagcaggtgctggtgcagccctgatccatgatctgcactgaggatgcgcctgcaactggacctagagagccccagccctgggtccaccctcactgc

SEQ ID NO: 391266 - DNA, 120 bp, Artificial Sequence
  ENSG00000144908_49 (sequence is synthesized)
gcctgcacgcggtgccacaggagagcctggccagggtgacctgggagcagggcccagctggcatgagcaccacagtcattcccacctgctctgtgccccttgcagggtaggggacctcac

SEQ ID NO: 391267 - DNA, 120 bp, Artificial Sequence
  ENSG00000144908_50 (sequence is synthesized)
agctgtgggcatggccaaaggcccctcagctccacctgaatgttggagtatttgcaaggagaacgtgctccaatgtccctgtgtcactgacagctcatgcagatgaacaaccaactcctc

SEQ ID NO: 391268 - DNA, 120 bp, Artificial Sequence
  ENSG00000144908_51 (sequence is synthesized)
aagcacgggctggaggaggctcctgtgggaaagtgggctgtggacccttagagccccagagaggagccaggctgcaggtggaggcatcgcctccagggtccccacagaggacatcgggca

SEQ ID NO: 391269 - DNA, 120 bp, Artificial Sequence
  ENSG00000144908_52 (sequence is synthesized)
aggtctgcacatggttttggttgtcccatcagagggggtgatagagtacagccccccacaacaaagaactgccccgccccaaatgtcagtagtgtgggagccaagaaaccctgctatggg

SEQ ID NO: 391270 - DNA, 120 bp, Artificial Sequence
  ENSG00000144908_53 (sequence is synthesized)
gcagtggtcagagacctttgtcgtgctttgaaaggggctgggctgggctgggcagggcagggcgggtcgtggcccacctggggccacagttcagagccacacttgggtctttgaggctgc

SEQ ID NO: 391271 - DNA, 120 bp, Artificial Sequence
  ENSG00000144908_54 (sequence is synthesized)
ccacccctcccagctgccagcatggggttggggggtgtccacccccatcagactgaggaggaaacagacactgtgtcacccagaagcatccctatgtcaccctgtgaggctggccttgga

SEQ ID NO: 391272 - DNA, 120 bp, Artificial Sequence
  ENSG00000144908_55 (sequence is synthesized)
cccaggactctgggcgcctggtcagcaccccagtgtgaacacatcctgccctggggcctggtcccagcagctcacacagaccagggctcgcccaaaggcaggtaggcagggccactgctg

SEQ ID NO: 391273 - DNA, 120 bp, Artificial Sequence
  ENSG00000144908_56 (sequence is synthesized)
accatgcacctggtgggccgtgattctggaactaatggtctctgcctggcagggaggccgccagggcctctgggcttcacccctccccaccttcacaggggacctcgcctcagtgggaat

SEQ ID NO: 391274 - DNA, 120 bp, Artificial Sequence
  ENSG00000144908_57 (sequence is synthesized)
gttctggagccggaacccaaggttggaatcccagctcctcccctttctagggcaagctcccagcctgtctgtactcagtctccccaactgtcaaatggtaataaaacagtcctgtcctca

SEQ ID NO: 391275 - DNA, 120 bp, Artificial Sequence
  ENSG00000144908_58 (sequence is synthesized)
aaaaaaaaaaaaaaagaagagcaaagcagagctctgagcagcttcctgccccagcatccctggttctgctgctttcttcttcccaggcagccgtgtcacacagacctgcagctgagatgg

SEQ ID NO: 391276 - DNA, 120 bp, Artificial Sequence
  ENSG00000144908_59 (sequence is synthesized)
gtgccatctccctgggttgcttctgcagaggaggcctctcctccccagtggagcctcctacctgccggctattgactgagtgtccagctgaggacagcatccctgcagtgcatttcttgc

SEQ ID NO: 391277 - DNA, 120 bp, Artificial Sequence
  ENSG00000144908_60 (sequence is synthesized)
ccactgatgtgatgtgttcatgactcccagcctctctgtttgctctgccactaatacaaggaggtgccccagcctctgggcccctgcagctgtgccagcggatggtgctgttttgtattc

SEQ ID NO: 391278 - DNA, 120 bp, Artificial Sequence
  ENSG00000144908_61 (sequence is synthesized)
cttaatttgtgcagcaccagctgcgtgcaggcactgtgcttggcaccggggctgtaataggacccagacagatgcgtgcctgccctggccaggctcatgctctgcaggtggggtcagagg

SEQ ID NO: 391279 - DNA, 120 bp, Artificial Sequence
  ENSG00000144908_62 (sequence is synthesized)
tcaacatgcagtagaggaaaggacagcagatggggtgcacaggcaggctgtggttttatacggggcgatcagggaggcaccccagagaagggaacacaggcctgcaggaaatgaggtgtg

SEQ ID NO: 391280 - DNA, 120 bp, Artificial Sequence
  ENSG00000144908_63 (sequence is synthesized)
gagtgggcagcaggaagggcagtccagggggcagtggggcacaggcctggtgtgtacaggccagaaaggaaaggcaggtggccgtgtgaagccgcaaggggtgggggggagtggggaggc

SEQ ID NO: 391281 - DNA, 120 bp, Artificial Sequence
  ENSG00000144908_64 (sequence is synthesized)
actggccgggtcttgcttcttgcagcaaagcatgctttgggcctacccaggtccctgccacctggggtcccaatgcccctacctgccctggagggaccggccccaccagccctctgttcc

SEQ ID NO: 391282 - DNA, 120 bp, Artificial Sequence
  ENSG00000144908_65 (sequence is synthesized)
aacaaacatctgttcaaaaccacttagggccaggtcctatctcagatgcagggacgtagccttgaacatgatggctgtcagggttcgcttcttactgggagggaacttgtgacaagtccg

SEQ ID NO: 391283 - DNA, 120 bp, Artificial Sequence
  ENSG00000144908_66 (sequence is synthesized)
tgagcaagatgcttgcagaggggggtcgtgctgggaagaaggcaagaagaggggcctggaggagacactccagccaggaggcactgggggcctctctggtgtggtggcacctgtgctacc

SEQ ID NO: 391284 - DNA, 120 bp, Artificial Sequence
  ENSG00000144908_67 (sequence is synthesized)
aggtccttgggggaaccagctttggtcgtggagctgcagagaggccagagtggtgggagtgggccaagggggagcaggagggaggagagaaggcctgagaggcaggtaggggccagattg

SEQ ID NO: 391285 - DNA, 120 bp, Artificial Sequence
  ENSG00000144908_68 (sequence is synthesized)
aaggcccatgggccatggtcaggggctcaggttgcatccttagtgtaaagaggagccatgggaccaaatgtacccccgggtgaacaccacgggtgttgcaagtctcccagtagaggtgaa

SEQ ID NO: 391286 - DNA, 120 bp, Artificial Sequence
  ENSG00000144908_69 (sequence is synthesized)
gttactcaggcggcagcaggcggggtccaccggcacatagcaggcggggtcccccggcacacagcacaggctccccagtgctctgcctgctgggtggcatggagttctgctccggccctc

SEQ ID NO: 391287 - DNA, 120 bp, Artificial Sequence
  ENSG00000144908_70 (sequence is synthesized)
tctccctgggctgctccaagccttgggcctcgtcctgctctctcagcaggggggactagacaggtctgatgggcaagcttggcaagggtggctggcaaggtccggggaagccatatgctg

SEQ ID NO: 391288 - DNA, 120 bp, Artificial Sequence
  ENSG00000144908_71 (sequence is synthesized)
tctcagaggtcccacctgtctctccaggctcctgtgccagcccagagaccacagggaaggtcatgctgaggctgggggtcaaaggctggtcactgtttccagttttctctcctccccctg

SEQ ID NO: 391289 - DNA, 120 bp, Artificial Sequence
  ENSG00000144908_72 (sequence is synthesized)
cccccatctttcaagccctgcagaagcccccaagggtacccatgagaggggcccatgtgtgcccacagggctggactcacatgcacgcatgtgtaggctggacactcctgcttcctctgt

SEQ ID NO: 391290 - DNA, 120 bp, Artificial Sequence
  ENSG00000144908_73 (sequence is synthesized)
ccctgtcggcctcctcttcctgccttctcccaggccaccttcctggtgtccaccaggggaatccatgaggcccatggccacccagggaaggctgtggctgccaagtccccaggacgtgat

SEQ ID NO: 391291 - DNA, 120 bp, Artificial Sequence
  ENSG00000144908_74 (sequence is synthesized)
ctgggccccttatgaatcctccccgagttccctcagctccctcctaaccctagtccccatgtcctgctgagaggaccagcaccctcctgggacaggcccacaagccaagccttccaagca

SEQ ID NO: 391292 - DNA, 120 bp, Artificial Sequence
  ENSG00000144908_75 (sequence is synthesized)
gcctgcctgggcagactcaggacctcagagggacggggcagtgccactcctggggccagccagagctgctggggagctgtcaggcagccccaggcctcacacttgtcatggggctgagat

SEQ ID NO: 391293 - DNA, 120 bp, Artificial Sequence
  ENSG00000144908_76 (sequence is synthesized)
gcaccagccacatagcactgccaaggcctggggcctcagggccctgcgaggcatccccttttcccagccacagcttgatgcagacgtagctgggggcagccatgagagaagagatgggcc

SEQ ID NO: 391294 - DNA, 120 bp, Artificial Sequence
  ENSG00000144908_77 (sequence is synthesized)
agtgagtctgggcagtaacgccaagtctctccacccccttccacctgaaggggcttcccactgtccagacaaggcggtgggagctggggaagattcttaaatggctgcctcagattggct

SEQ ID NO: 391295 - DNA, 120 bp, Artificial Sequence
  ENSG00000144908_78 (sequence is synthesized)
ttgtattctggggagtcctggcccactatccactgccagggataacctgggtaagattcatgacctcgctgggcctcgacttctcacctggaagtggggtgagccagagctgcccccacg

SEQ ID NO: 391296 - DNA, 120 bp, Artificial Sequence
  ENSG00000144908_79 (sequence is synthesized)
tggttgctgaggaataagacacttgcagccccgagcagtgccctgcctgtggtgggagctgctgtgacctttgtggtgtcttacaggagaggcggctctgaacgagtacctgcgggtcaa

SEQ ID NO: 391297 - DNA, 120 bp, Artificial Sequence
  ENSG00000144908_80 (sequence is synthesized)
ccggcggaaaggaggctgccccggctgcagctccgggggctccgggggctccaggggctccaggactcggttctcaccgcaagggctcctgcggggcccatcaacttcgccgctgggacg

SEQ ID NO: 391298 - DNA, 120 bp, Artificial Sequence
  ENSG00000144908_81 (sequence is synthesized)
gcctgctcaaagccacccatgctcctgtccttggactcaggcctcacaggaagaccctaggctcctctggagaaaatggaaaaaaccagacccaggaaggaacactgaccctgatttgtc

SEQ ID NO: 391299 - DNA, 120 bp, Artificial Sequence
  ENSG00000144908_82 (sequence is synthesized)
cctgaccacccggctggtcctgagcacagggtgtccgaggcagtttacccacttctctgttctgggaaagctgggctccctacccttcctggctaggcacccatctccaggctgagtgcc

SEQ ID NO: 391300 - DNA, 120 bp, Artificial Sequence
  ENSG00000144908_83 (sequence is synthesized)
ctgtgtgggtgtcaggcaacctagaatcagagagaagccctcccagggagcctgggttcagggcctctctttggtctatcagaaacacctctgggtgtggggtcattaagcctctgtgcc

SEQ ID NO: 391301 - DNA, 120 bp, Artificial Sequence
  ENSG00000144908_84 (sequence is synthesized)
tcagctcccatctctttgaacggcgatgccatggtaacttagcacgtgcagagccttgggagccatgccggccacctgctcttgttattagcagactacaactcacggtaccagcaaaca

SEQ ID NO: 391302 - DNA, 120 bp, Artificial Sequence
  ENSG00000144908_85 (sequence is synthesized)
ctgatggagcaccttttataccagaacaatgtatatgcgttaaatttaatctgcctaacaacactatgagatatgtataaatattatatccttatagaggaaaaaaacagagatttaaat

SEQ ID NO: 391303 - DNA, 120 bp, Artificial Sequence
  ENSG00000144908_86 (sequence is synthesized)
aacttgtccaggatcatccaagctagcccgtggcagagctgggattcagactctgaaattctggctccaaagccgtgatgctggtcttggccatggtagcttcctgttcatatgcactct

SEQ ID NO: 391304 - DNA, 120 bp, Artificial Sequence
  ENSG00000144908_87 (sequence is synthesized)
actactccttctcacatgagcagccgggggtagggagagggcaggcagggatcttcccacacactgacagggtccggacaaaccccatgggcgtggtacccccagccgtgttgctgtgtc

SEQ ID NO: 391305 - DNA, 120 bp, Artificial Sequence
  ENSG00000144908_88 (sequence is synthesized)
cctggcctttgctcgctcttggtgtccagtctgccatgctcccctgtcagaaggtctaggctgctgttgatgtctgcaatgtagtgttttgggtatccaagattgatatatgcagttgca

SEQ ID NO: 391306 - DNA, 120 bp, Artificial Sequence
  ENSG00000144908_89 (sequence is synthesized)
agagaatatctgtctgtggtcaggttccctagaagcagcatctaaggtaaaaattcttgtgcaagtgatttattgagggaatgttccagaaaatcatgcgaggcagtaagggcagaggaa

SEQ ID NO: 391307 - DNA, 120 bp, Artificial Sequence
  ENSG00000144908_90 (sequence is synthesized)
agcaaagcaaaagtaaaggttcaggagaagtctagcctggggctgctcccagggtgggttttggagtattaactgcaccctccaattatacctgcctgtccccacctctgtcagcctttg

SEQ ID NO: 391308 - DNA, 120 bp, Artificial Sequence
  ENSG00000144908_91 (sequence is synthesized)
gtttcagtggcccctggggtggggtggaggacccaccaggcataatccctcggcctctttgtgtacaggagctcttatccatccacagcaagcaaggatgggacagtgcaggccgttatc

SEQ ID NO: 391309 - DNA, 120 bp, Artificial Sequence
  ENSG00000144908_92 (sequence is synthesized)
atccagcccttgctgcagctggaggacagggcaccagccacaggggtctgagcagggcacccacagcatctgtccagagacctgcaaagacaggaatgcaaagaaggcaattaagtgtct

SEQ ID NO: 391310 - DNA, 120 bp, Artificial Sequence
  ENSG00000144908_93 (sequence is synthesized)
taagaggaagctggggttatcagctctctcacaagagctttgtccactgtccagaggtggtcagggtgggaggggagtgaggagagaccagctgagcacacacaccctgctccccacaga

SEQ ID NO: 391311 - DNA, 120 bp, Artificial Sequence
  ENSG00000144908_94 (sequence is synthesized)
tcaacccagaagaccctgggttgaagcatctctcagccacgccctgtggagtctggctgggctttagcttgcagaaagctccagaacatctttgaaaggcaatggggcgagggtcaggcc

SEQ ID NO: 391312 - DNA, 120 bp, Artificial Sequence
  ENSG00000144908_95 (sequence is synthesized)
gagaggcaagttccagttctggcagagcatgcatacagagtaccattcttacacagccactcttaacgcacagtgacatgcacccacccatgagcttatccataactctttttgtacatg

SEQ ID NO: 391313 - DNA, 120 bp, Artificial Sequence
  ENSG00000144908_96 (sequence is synthesized)
tgttttttttcctggcccctaacaaaagcatttgttgaaaaactattgataaacaagcaggccccaaacaattcaaacatcttattaaatacagtaaatctgaggcagacactagagtag

SEQ ID NO: 391314 - DNA, 120 bp, Artificial Sequence
  ENSG00000144908_97 (sequence is synthesized)
cccagagtcatgagctacaatgggggcagttcatgtctggcagccagaatccccttgaactgatggctggacgcaggctctacctgggaccagcttgaagtgctatcctgaagctgcaga

SEQ ID NO: 391315 - DNA, 120 bp, Artificial Sequence
  ENSG00000144908_98 (sequence is synthesized)
ctgcagggccggccagaccctttttcagcctctcctcttcccacctctgtatcccacacaggcatctggtgatgttctccaggtgtttctgtggcagttctgggagctactgggtgattg

SEQ ID NO: 391316 - DNA, 120 bp, Artificial Sequence
  ENSG00000144908_99 (sequence is synthesized)
caagattagtttttttttctaagttgactttctatgtggtgcctgaatgacgttttctttttttgttcagtaggaatccttttttatagaagtaataaagtcattacacttaaaaacaaa

SEQ ID NO: 391317 - DNA, 120 bp, Artificial Sequence
  ENSG00000144908_100 (sequence is synthesized)
ctttcgctctgctgtgtccgtagcacatggcaggtacttggcccatcaagagtgagagagggtgagcgagtgagtgagtcaccggcttggcgagggtctcctctgacccacttagccttg

SEQ ID NO: 391318 - DNA, 120 bp, Artificial Sequence
  ENSG00000144908_101 (sequence is synthesized)
ggagccatttgggatttcagcctggaaggtggatttagagtcagaattcagaaagccctgaggctagaacagagtgtggactttccccaggggtcagccatgagagctgagtcaggtgag

SEQ ID NO: 391319 - DNA, 120 bp, Artificial Sequence
  ENSG00000144908_102 (sequence is synthesized)
ggagagccagtccagtcagggcccaaacatcacaccagaggctctaacagagaactgaatacaaagaagtgttccttgggtattgaagagtggaaggcagagagcccaaagttattgggg

SEQ ID NO: 391320 - DNA, 120 bp, Artificial Sequence
  ENSG00000144908_103 (sequence is synthesized)
agctgggtcctggggaggctatgggaccgaggccatcagatgggccaggctggggctccttgcctgaggctcagaaaaggcttctcagaggaagggatatgagaaacaggagacatttca

SEQ ID NO: 391321 - DNA, 120 bp, Artificial Sequence
  ENSG00000144908_104 (sequence is synthesized)
gcagagtgggctcaggggaggtgcctggtggaggtgaggaggtgcggaagccaagggatgcttccaaagtgggcgcaggctgggcctcccaggcagacaaagcacttccctcaccagcct

SEQ ID NO: 391322 - DNA, 120 bp, Artificial Sequence
  ENSG00000144908_105 (sequence is synthesized)
gggctggaggggacttagctcctgcacgcagaagacagcaagggccagagaagggctggcctggtctctgcttgctcagccaggctctgactactggaatctataggtttcacattttct

SEQ ID NO: 391323 - DNA, 120 bp, Artificial Sequence
  ENSG00000144909_0 (sequence is synthesized)
attcgcgcttgggtctggagatagcgcgagagactcaccggctcctgggaacccagtcgagggcccgggccaggggcataagaggaagttgtcccgagtggctcgcctctggccctggga

SEQ ID NO: 391324 - DNA, 120 bp, Artificial Sequence
  ENSG00000144909_1 (sequence is synthesized)
cgtcccgcccccggcggcctcattccccgaccctcctccccggctgcgcgcgccggccctggctgtatctcgggggctgcggcgggaactgccgagcgggcttgactggacgcactgcct

SEQ ID NO: 391325 - DNA, 120 bp, Artificial Sequence
  ENSG00000144909_2 (sequence is synthesized)
cttgactggacgcactgcctgaggacctgcggaggagacgagggagcgcggcgggtcagccccgaggttaggccgcgggtcccctgtccgtggcgctccgtccttttcccagccgtcttg

SEQ ID NO: 391326 - DNA, 120 bp, Artificial Sequence
  ENSG00000144909_3 (sequence is synthesized)
gctacagaatctgcgacctccccacactccttctcttttgagtatgtcacttaagtcttctcgccggatgctttttcctccttgcttttgccggaaaggagagagatacatgtgaaggat

SEQ ID NO: 391327 - DNA, 120 bp, Artificial Sequence
  ENSG00000144909_4 (sequence is synthesized)
atctgtcctcgttgcttcccctgccctctcaaaagtttaacttctgtgggaatgtgtatcttccttttctggaccatttgacagtcccgccccagccgccgtgtgatttagcaaccggta

SEQ ID NO: 391328 - DNA, 120 bp, Artificial Sequence
  ENSG00000144909_5 (sequence is synthesized)
tcatattcagatcaaatcttaaaaaaaaaaagtcacctacagaactacagaattgttctctcccgctcaagaagggcaagtggactttggcgttaagatgcaggggggtgaaccagtgtc

SEQ ID NO: 391329 - DNA, 120 bp, Artificial Sequence
  ENSG00000144909_6 (sequence is synthesized)
cacaatgaaagtctcggagagcgaaggaaagctggagggccaggccacagcggtgaccccgaacaagaacagcagctgtggaggtggaatcagtagcagcagcagcagccgcggtggcag

SEQ ID NO: 391330 - DNA, 120 bp, Artificial Sequence
  ENSG00000144909_7 (sequence is synthesized)
tgcaaaaggctggcagtacagtgatcacatggaaaatgtgtatggctatttaatgaagtataccaaccttgtcactgggtggcagtacaggttttttgttttaaacaatgaagctgggct

SEQ ID NO: 391331 - DNA, 120 bp, Artificial Sequence
  ENSG00000144909_8 (sequence is synthesized)
gttggagtactttgtgaatgaacagtctagaaatcagaaacctagaggaactttgcagcttgcaggagctgtaatatcacccagtgatgaggattctcacaccttcactgtaaacgctgc

SEQ ID NO: 391332 - DNA, 120 bp, Artificial Sequence
  ENSG00000144909_9 (sequence is synthesized)
cagtggggaacaatataaactcagagctacagatgcaaaagagcgacagcactgggttagcagacttcagatatgtacacagcatcatactgaagctattggaaagaataatcctcctct

SEQ ID NO: 391333 - DNA, 120 bp, Artificial Sequence
  ENSG00000144909_10 (sequence is synthesized)
gaagtcacggagcttctcacttgcatctagtagtaattctcctatatcgcagaggagaccaagtcaaaatgccatttctttttttaatgttggacattccaaactgcaatcactgagcaa

SEQ ID NO: 391334 - DNA, 120 bp, Artificial Sequence
  ENSG00000144909_11 (sequence is synthesized)
aagaactaatttacctccagaccatcttgtggaagtcagagaaatgatgtctcatgctgaaggacaacaaagagacttaattagacgaattgaatgccttcctacttctggccatcttag

SEQ ID NO: 391335 - DNA, 120 bp, Artificial Sequence
  ENSG00000144909_12 (sequence is synthesized)
ttccttggaccaggatctcttaatgctcaaagctacttccatggcaactatgaactgcttaaatgactgctttcatattctccagttacagcatgcatcacatcagaagggctcattgcc

SEQ ID NO: 391336 - DNA, 120 bp, Artificial Sequence
  ENSG00000144909_13 (sequence is synthesized)
ttcaggaacgacaatcgagtggttagaaccaaagatatctttatcaaaccactataaaaatggagctgaccagccctttgcaactgatcagagtaagccggtggcagtcccagaagagca

SEQ ID NO: 391337 - DNA, 120 bp, Artificial Sequence
  ENSG00000144909_14 (sequence is synthesized)
gcctgttgcagaatctggactattagcgagggagcctgaagaaataaatgcagatgatgagatagaggatacatgtgaccacaaagaggatgacctgggagctgtagaagaacaacgtag

SEQ ID NO: 391338 - DNA, 120 bp, Artificial Sequence
  ENSG00000144909_15 (sequence is synthesized)
tgtcatcctacatctcttgtcacagcttaagctgggcatggatttaacaagagtggtgcttcctacatttatcctagagaagcgttccttgctggaaatgtatgcagactttatgtctca

SEQ ID NO: 391339 - DNA, 120 bp, Artificial Sequence
  ENSG00000144909_16 (sequence is synthesized)
tccagacctatttatagccatcactaatggagccacagctgaggacagaatgattcgctttgttgagtactaccttacctcatttcatgaaggccgtaagggagccattgctaaaaaacc

SEQ ID NO: 391340 - DNA, 120 bp, Artificial Sequence
  ENSG00000144909_17 (sequence is synthesized)
atacaatcctatcattggagaaacatttcactgttcctggaagatgccaaaaagcgaggtagcatccagtgtttttagcagttcttccacccagggagtcacaaatcatgctcctttatc

SEQ ID NO: 391341 - DNA, 120 bp, Artificial Sequence
  ENSG00000144909_18 (sequence is synthesized)
gggggagtctttgacccaggtgggatcagactgttacacagtcagatttgttgctgagcaggtttctcatcatcctccagtctcaggattttatgcagaatgtacagagaggaagatgtg

SEQ ID NO: 391342 - DNA, 120 bp, Artificial Sequence
  ENSG00000144909_19 (sequence is synthesized)
gcatgtcaataggcgtgacaatggttggagaaggtatccttagtctgttggagcatggagaagagtacacattttctctaccctgtgcatatgctcggtcaattttgactgttccttggg

SEQ ID NO: 391343 - DNA, 120 bp, Artificial Sequence
  ENSG00000144909_20 (sequence is synthesized)
tagaactgggtggcaaagtcagtgtcaactgtgcaaaaactggatattcagccagcatcacttttcataccaagccattttatggtggcaaactgcatcgggttacagctgaagtaaagc

SEQ ID NO: 391344 - DNA, 120 bp, Artificial Sequence
  ENSG00000144909_21 (sequence is synthesized)
acaacatcaccaacactgtggtatgcagagtgcaaggggaatggaatagtgttcttgagttcacatatagcaatggagagacaaagtatgtggacttgactaaattggcagtgacgaaga

SEQ ID NO: 391345 - DNA, 120 bp, Artificial Sequence
  ENSG00000144909_22 (sequence is synthesized)
aaagagtgagacctctggagaagcaggatccatttgaatccaggcgattgtggaaaaatgtgacagactcgctgagagaatctgaaattgataaggccacagagcataagcataccctgg

SEQ ID NO: 391346 - DNA, 120 bp, Artificial Sequence
  ENSG00000144909_23 (sequence is synthesized)
aagaacgtcagaggactgaagaaaggcatcgtactgaaacaggcacaccttggaaaaccaaatattttattaaagagggagatggctgggtttatcataaaccactttggaaaataattc

SEQ ID NO: 391347 - DNA, 120 bp, Artificial Sequence
  ENSG00000144909_24 (sequence is synthesized)
caacaacacaaccagcagagtgacacatactatctaaaactcgaccaaatgaggttcttctctgtttaccctaaatcctcccagaatggagtcattgcactgagtgacctgcttcctgat

SEQ ID NO: 391348 - DNA, 120 bp, Artificial Sequence
  ENSG00000144909_25 (sequence is synthesized)
tgcgcagactgaaactagctaaacctgaatgtacctactagggcaccataatactgcagcaagaccaaagtggtaaagaaacacagtggaccttttaccaacctgttcatgtgatgtgag

SEQ ID NO: 391349 - DNA, 120 bp, Artificial Sequence
  ENSG00000144909_26 (sequence is synthesized)
caataccatcttaaaacttgttacctgaatcagtagatgaatcttttatccagttcttgctcctaaagttaagtttgaatcccctatttttgcacaggggcagcagatacacacaacaat

SEQ ID NO: 391350 - DNA, 120 bp, Artificial Sequence
  ENSG00000144909_27 (sequence is synthesized)
gagaactcagtgactttgatttctttgtagtgaaaagtgaagtctccgtttcagagtttgtgtctttctttctgtccataactgaagtattcactactcttgtaaaccaaccaagaggag

SEQ ID NO: 391351 - DNA, 120 bp, Artificial Sequence
  ENSG00000144909_28 (sequence is synthesized)
gagaaagatgacccagaagtggattcagccattgtgcctgaaatcagtgtttaaaaaaaaaaatcaaccaggttgtggtaacaaggcattctatttcttcaaaaagactgtatgcctgtg

SEQ ID NO: 391352 - DNA, 120 bp, Artificial Sequence
  ENSG00000144909_29 (sequence is synthesized)
tctgaggaacttacctattatccacctctgttggaactctcttttaaaaagtacatttatagattgatcagaattataaccatggagaattttttcttctgagcattttaatatacttga

SEQ ID NO: 391353 - DNA, 120 bp, Artificial Sequence
  ENSG00000144909_30 (sequence is synthesized)
aaacaacattgacttgaaaaatttcagaacatttttcagtacctagttttattaaatattacacttgagagacactttttaaaaatgtgttaatgtcaatatgatgagattttagccttt

SEQ ID NO: 391354 - DNA, 120 bp, Artificial Sequence
  ENSG00000144909_31 (sequence is synthesized)
ctccagaactaaggcattaaagaaaatagcaaatattaaaaaataaaactgttacttttttccttctttcttttcacctttaggttaatatccagtattatgtgttatccctttggataa

SEQ ID NO: 391355 - DNA, 120 bp, Artificial Sequence
  ENSG00000144909_32 (sequence is synthesized)
gtatgctttattttacctctgttaaaaattaaaataaatgattctattcatatttgtcagtaattcaaaacttatatgtgtaactgaacgcgcatgtaaggtatggttttatttattttt

SEQ ID NO: 391356 - DNA, 120 bp, Artificial Sequence
  ENSG00000144909_33 (sequence is synthesized)
tttttttttgaggaaatttaaatgctaaagaaacaacgaaatgaaaaggtatcaggaaaaaaagatcaggaagttgtattcaggtacaaatctttttttaaataagtattttgttgaggt

SEQ ID NO: 391357 - DNA, 120 bp, Artificial Sequence
  ENSG00000144909_34 (sequence is synthesized)
tgaagaattgctggcaattaaaagaatagagctaattatggctttcatcattcattcatgtatttattgagcacctacttattatggtgctcaacacttgttactgcaagctaccttaat

SEQ ID NO: 391358 - DNA, 120 bp, Artificial Sequence
  ENSG00000144909_35 (sequence is synthesized)
ttcccaagagtggtgccttactctgttttttctgatatggtcttccaatcagtgtgtgtaacatacctgttgtttatcagccattgtaggtggctgtgtctgttgcatcatcataagaag

SEQ ID NO: 391359 - DNA, 120 bp, Artificial Sequence
  ENSG00000144909_36 (sequence is synthesized)
tttaagctttgtgctctgataaattgtgttctgttaaagaggttagtaggatgaaaacagcaaaacaataattttttcaacaaattgtaaattataagaaaaagagttggtttgtgtaca

SEQ ID NO: 391360 - DNA, 120 bp, Artificial Sequence
  ENSG00000144909_37 (sequence is synthesized)
acaattttaatgattcccttgttcatttttgctgtgaaatgcactgaaaaaaatcctcaaaatgagttatagttcctgtgttgggaaaattgacaaataataaaactagagaacaaacaa

SEQ ID NO: 391361 - DNA, 120 bp, Artificial Sequence
  ENSG00000144935_0 (sequence is synthesized)
atctctcgtcctcttcctgggctaggccgccccaggcgcggcccctgcgactcctggcacggccccgtgctcggctgccgccctggcgcgcgccacactgtcgtccccggacgggcgcgg

SEQ ID NO: 391362 - DNA, 120 bp, Artificial Sequence
  ENSG00000144935_1 (sequence is synthesized)
cgccggcggctggggaggggtcgctggccccggggccgcgcatgcgccgccaccaacttggggctgtcagtggagggcgagtgctggttctcaggggaggcgacgcccttcggggccaac

SEQ ID NO: 391363 - DNA, 120 bp, Artificial Sequence
  ENSG00000144935_2 (sequence is synthesized)
gcccttcggggccaacgggcctcgagccgaggcagcagtgggaacgactcatcctttttccagccctggggcgtggctggggtcggggtcggggtcggggccggtgggggccccgccccc

SEQ ID NO: 391364 - DNA, 120 bp, Artificial Sequence
  ENSG00000144935_3 (sequence is synthesized)
gtctcctggcctgcccccttcatgggccgcgatgatggcggccctgtacccgagcacggacctctcgggcgcctcctcctcctccctgccttcctctccatcctcttcctcgccgaacga

SEQ ID NO: 391365 - DNA, 120 bp, Artificial Sequence
  ENSG00000144935_4 (sequence is synthesized)
ggtgatggcgctgaaggatgtgcgggaggtgaaggaggagaatacgctgaatgagaagcttttcttgctggcgtgcgacaagggtgactattatatggttaaaaagattttggaggaaaa

SEQ ID NO: 391366 - DNA, 120 bp, Artificial Sequence
  ENSG00000144935_5 (sequence is synthesized)
cagttcaggtgacttgaacataaattgcgtagatgtgcttgggagaaatgctgttaccataactattgaaaacgaaaacttggatatactgcagcttcttttggactacggttgtcagaa

SEQ ID NO: 391367 - DNA, 120 bp, Artificial Sequence
  ENSG00000144935_6 (sequence is synthesized)
actaatggaacgaattcagaatcctgagtattcaacaactatggatgttgcacctgtcattttagctgctcatcgtaacaactatgaaattcttacaatgctcttaaaacaggatgtatc

SEQ ID NO: 391368 - DNA, 120 bp, Artificial Sequence
  ENSG00000144935_7 (sequence is synthesized)
tctacccaagccccatgcagttggctgtgaatgcacattgtgttctgcaaaaaacaaaaaggatagcctccggcattccaggtttcgtcttgatatatatcgatgtttggccagtccagc

SEQ ID NO: 391369 - DNA, 120 bp, Artificial Sequence
  ENSG00000144935_8 (sequence is synthesized)
tctaataatgttaacagaggaggatccaattctgagagcatttgaacttagtgctgatttaaaagaactaagtcttgtggaggtggaattcaggaatgattatgaggaactagcccggca

SEQ ID NO: 391370 - DNA, 120 bp, Artificial Sequence
  ENSG00000144935_9 (sequence is synthesized)
atgtaaaatgtttgctaaggatttacttgcacaagcccggaattctcgtgaattggaagttattctaaaccatacgtctagtgacgagcctcttgacaaacggggattattagaagaaag

SEQ ID NO: 391371 - DNA, 120 bp, Artificial Sequence
  ENSG00000144935_10 (sequence is synthesized)
aatgaatttaagtcgtctaaaacttgctatcaaatataaccagaaagagtttgtctcccagtctaactgccagcagttcctgaacactgtttggtttggacagatgtcgggttaccgacg

SEQ ID NO: 391372 - DNA, 120 bp, Artificial Sequence
  ENSG00000144935_11 (sequence is synthesized)
caagcccacctgtaagaagataatgactgttttgacagtaggcatcttttggccagttttgtcactttgttatttgatagctcccaaatctcagtttggcagaatcattcacacaccttt

SEQ ID NO: 391373 - DNA, 120 bp, Artificial Sequence
  ENSG00000144935_12 (sequence is synthesized)
tatgaaatttatcattcatggagcatcatatttcacatttctgctgttgcttaatctatactctcttgtctacaatgaggataagaaaaacacaatggggccagcccttgaaagaataga

SEQ ID NO: 391374 - DNA, 120 bp, Artificial Sequence
  ENSG00000144935_13 (sequence is synthesized)
ctatcttcttattctgtggattattgggatgatttggtcagacattaaaagactctggtatgaagggttggaagactttttagaagaatctcgtaatcaactcagttttgtcatgaattc

SEQ ID NO: 391375 - DNA, 120 bp, Artificial Sequence
  ENSG00000144935_14 (sequence is synthesized)
tctttatttggcaacctttgccctcaaagtggttgctcacaacaagtttcatgattttgctgatcggaaggattgggatgcattccatcctacactggtggcagaagggctttttgcatt

SEQ ID NO: 391376 - DNA, 120 bp, Artificial Sequence
  ENSG00000144935_15 (sequence is synthesized)
tgcaaatgttctaagttatcttcgtctcttttttatgtatacaaccagctctatcttgggtccattacagatttcaatgggacagatgttacaagattttggaaaatttcttgggatgtt

SEQ ID NO: 391377 - DNA, 120 bp, Artificial Sequence
  ENSG00000144935_16 (sequence is synthesized)
tcttcttgttttgttttctttcacaattggactgacacaactgtatgataaaggatatacttcaaaggagcagaaggactgtgtaggcatcttctgtgaacagcaaagcaatgatacctt

SEQ ID NO: 391378 - DNA, 120 bp, Artificial Sequence
  ENSG00000144935_17 (sequence is synthesized)
ccattcgttcattggcacctgctttgctttgttctggtatattttctccttagcgcatgtggcaatctttgtcacaagatttagctatggagaagaactgcagtcctttgtgggagctgt

SEQ ID NO: 391379 - DNA, 120 bp, Artificial Sequence
  ENSG00000144935_18 (sequence is synthesized)
gttggtacatacaatgtcgtggttgtgattgtgcttaccaaactgctggtggcaatgcttcataaaagctttcagttgatagcaaatcatgaagacaaagaatggaagtttgctcgagca

SEQ ID NO: 391380 - DNA, 120 bp, Artificial Sequence
  ENSG00000144935_19 (sequence is synthesized)
aaattatggcttagctactttgatgacaaatgtacgttacctccacctttcaacatcattccctcaccaaagactatctgctatatgattagtagcctcagtaagtggatttgctctcat

SEQ ID NO: 391381 - DNA, 120 bp, Artificial Sequence
  ENSG00000144935_20 (sequence is synthesized)
acatcaaaaggcaaggtcaaacggcaaaacagtttaaaggaatggaggaatttgaaacagaagagagatgaaaactatcaaaaagtgatgtgctgcctagtgcatcgttacttgacttcc

SEQ ID NO: 391382 - DNA, 120 bp, Artificial Sequence
  ENSG00000144935_21 (sequence is synthesized)
atgagacagaagatgcaaagtacagatcaggcaactgtggaaaatctaaacgaactgcgccaagatctgtcaaaattccgaaatgaaataagggatttacttggctttcggacttctaaa

SEQ ID NO: 391383 - DNA, 120 bp, Artificial Sequence
  ENSG00000144935_22 (sequence is synthesized)
tatgctatgttttatccaagaaattaaccattttctaaatcatggagcgaataattttcaataacagatccaaaagactatattgcataacttgcaatgaaattaatgagatatatattg

SEQ ID NO: 391384 - DNA, 120 bp, Artificial Sequence
  ENSG00000144935_23 (sequence is synthesized)
aaataaagaattatgtaaaagccattctttaaaatatttatagcataaatatatgttatgtaaagtgtgtatatagaattagttttttaaaccttctgttagtggctttttgcagaagca

SEQ ID NO: 391385 - DNA, 120 bp, Artificial Sequence
  ENSG00000144935_24 (sequence is synthesized)
aaacagattaagtagatagattttgttagcatgctgcttggttttcttacttagtgctttaaaatgtttttttttatgtttaagaggggcagttataaatggacacattgcccagaatgt

SEQ ID NO: 391386 - DNA, 120 bp, Artificial Sequence
  ENSG00000144935_25 (sequence is synthesized)
tttgtaaaatgaagaccagcaaatgtaggctgatctccttcacaggatacacttgaaatatagaagttatgttttaaatatctctgttttaggagttcacatatagttcagcatttattg

SEQ ID NO: 391387 - DNA, 120 bp, Artificial Sequence
  ENSG00000144935_26 (sequence is synthesized)
tctctgttttaggagttcacatatagttcagcatttattgtttaggagtataattttattttatctaaaataatagtctattttttcttttgtattttgttataatcttaagcaacaaag

SEQ ID NO: 391388 - DNA, 120 bp, Artificial Sequence
  ENSG00000144935_27 (sequence is synthesized)
gttagtccacatttaaatttttatagaattatatagtttttgaaaaatacagtcagtagatgttttattttttagctattcagttatgtttataagtttgcatagctacttctcgacatt

SEQ ID NO: 391389 - DNA, 120 bp, Artificial Sequence
  ENSG00000144935_28 (sequence is synthesized)
tggtttgttttaatttttttgtatcataatagtcctatttttttttcaagttggagtgaatgtttttagttttaagatagataggagacacttttttatcacatgtagtcacaacctgtt

SEQ ID NO: 391390 - DNA, 120 bp, Artificial Sequence
  ENSG00000144935_29 (sequence is synthesized)
ttgtttttgtaaaacataggaagtctctttaatgcaatgatttgttttatatttggactaaggttcttgagcttatctcccaaggtactttccataatttaacacagcttctataaaagt

SEQ ID NO: 391391 - DNA, 120 bp, Artificial Sequence
  ENSG00000144935_30 (sequence is synthesized)
gacttcatgcttacttgtggatcattcttgctgcttaagatgaaaagcattggttttttaaaattagagaataaaatatgtatttaaatttttggtgtgttcacataaagggatgtagct

SEQ ID NO: 391392 - DNA, 120 bp, Artificial Sequence
  ENSG00000144935_31 (sequence is synthesized)
aaaatgttttcataggctattatatattctcgcagcatttccagttaagaggatattaggtatataattctcttcttaaccgaatgtcagatggtcttacgccacagggtgcaggtaacc

SEQ ID NO: 391393 - DNA, 120 bp, Artificial Sequence
  ENSG00000144935_32 (sequence is synthesized)
cttggtctgtaagcaccaccgatccagggatcattgtctaaataggttactattgtttgtttcatcttgcttttgcatttttattttttaatttccaaattttaagtgttccctctttgg

SEQ ID NO: 391394 - DNA, 120 bp, Artificial Sequence
  ENSG00000144935_33 (sequence is synthesized)
ggcaaattcttataaaaatgtttattgtaaagttatatattttgtctacgatgggattatgcacttcccaattgggattttacatctggatttttagtcattctaaaaaacacctaatta

SEQ ID NO: 391395 - DNA, 120 bp, Artificial Sequence
  ENSG00000144935_34 (sequence is synthesized)
ttaaaacatttatagagtgcctactgtatgcatgagttgagttgcttctgaggtacattttgaatgacagcatattgtaagaaaaaaaaaggtgaataaaatttgacattagattataaa

SEQ ID NO: 391396 - DNA, 120 bp, Artificial Sequence
  ENSG00000144935_35 (sequence is synthesized)
gtcgctacagaggagcagaggatgacgtgaggacagagtcgcgaacatctcctcggagcgcagctgggccagcggttcccacagccctggagcccaacgtgcgcagaagcgcctcttgga

SEQ ID NO: 391397 - DNA, 120 bp, Artificial Sequence
  ENSG00000144935_36 (sequence is synthesized)
tcaagttagtttgaaaggttttgtctttatttagcccactgattctttcttgattgatggcattgtgaatattgggttcaatttgcaattttacactgttcacaccacaagaatttgaac

SEQ ID NO: 391398 - DNA, 120 bp, Artificial Sequence
  ENSG00000144935_37 (sequence is synthesized)
acttccatgatcactgaagacttaactaacatgtctgtaaagataaatgttcctgaacttgatgataaggaagcatctctcttatttaatatttcttaaatacatggaattttaaaatta

SEQ ID NO: 391399 - DNA, 120 bp, Artificial Sequence
  ENSG00000144959_0 (sequence is synthesized)
gcgggcagaaagttgccggaggtctccgggtggtatcgccctttcctctttgccagcccgctggcgagccgagccagggcaagatgaggtcgtcctgtgtcctgctcaccgccctggtgg

SEQ ID NO: 391400 - DNA, 120 bp, Artificial Sequence
  ENSG00000144959_1 (sequence is synthesized)
cgctggccgcctattacgtctacatcccgctgcctggctccgtgtccgacccctggaagctgatgctgctggacgccactttccggggtgcacagcaagtgagtaacctgatccactacc

SEQ ID NO: 391401 - DNA, 120 bp, Artificial Sequence
  ENSG00000144959_2 (sequence is synthesized)
tgggactgagccatcacctgctggcactgaattttatcattgtttcttttggcaaaaaaagcgcgtggtcttctgcccaagtgaaggtgaccgacacagactttgatggtgtggaagtca

SEQ ID NO: 391402 - DNA, 120 bp, Artificial Sequence
  ENSG00000144959_3 (sequence is synthesized)
gagtgtttgaaggccctccgaagcccgaagagccactgaaacgcagcgtcgtttatatccacggaggaggctgggccttggcaagtgcaaaaatcaggtattatgatgagctgtgtacag

SEQ ID NO: 391403 - DNA, 120 bp, Artificial Sequence
  ENSG00000144959_4 (sequence is synthesized)
caatggctgaggaattgaatgctgtcattgtttccattgaatacaggctagttccaaaggtttattttcctgagcaaattcatgatgttgtacgggccacaaagtatttcctgaagccag

SEQ ID NO: 391404 - DNA, 120 bp, Artificial Sequence
  ENSG00000144959_5 (sequence is synthesized)
aagtcttacagaagtatatggttgatccaggcagaatttgcatttctggtgacagtgctggtggaaatctggctgctgcccttggacaacagtttactcaagatgccagcctaaaaaata

SEQ ID NO: 391405 - DNA, 120 bp, Artificial Sequence
  ENSG00000144959_6 (sequence is synthesized)
agctcaaactacaagctttaatttatccagttcttcaagctttagattttaacacaccatcttatcagcaaaatgtgaacaccccaatcctgccccgctatgtcatggtgaagtattggg

SEQ ID NO: 391406 - DNA, 120 bp, Artificial Sequence
  ENSG00000144959_7 (sequence is synthesized)
tggactacttcaaaggcaactatgactttgtgcaggcaatgatcgttaacaatcacacttcacttgatgtggaagaggctgctgctgtcagggcccgtctaaactggacatccctcttgc

SEQ ID NO: 391407 - DNA, 120 bp, Artificial Sequence
  ENSG00000144959_8 (sequence is synthesized)
ctgcatccttcacaaagaactacaagcctgttgtacagaccacaggcaatgccaggattgtccaggagcttcctcagttgctggatgcccgctccgccccactcattgcagaccaggcag

SEQ ID NO: 391408 - DNA, 120 bp, Artificial Sequence
  ENSG00000144959_9 (sequence is synthesized)
tgctgcagctcctcccaaagacctacattctgacgtgtgagcatgatgtcctcagagacgatggcatcatgtatgccaagcgtttggagagtgccggtgtggaggtgaccctggatcact

SEQ ID NO: 391409 - DNA, 120 bp, Artificial Sequence
  ENSG00000144959_10 (sequence is synthesized)
ttgaggatggctttcacggatgtatgattttcactagctggcccaccaacttctcagtgggaatccggactaggaatagttacatcaagtggctagatcaaaacctgtaaaggagcaaaa

SEQ ID NO: 391410 - DNA, 120 bp, Artificial Sequence
  ENSG00000144959_11 (sequence is synthesized)
cttccagaagcctcgagcccctcttgacctcctacacctgctttggaaagacatgcactttttagttgactaattcttcctcccattcccctctacttgcgagttatggaatttctattc

SEQ ID NO: 391411 - DNA, 120 bp, Artificial Sequence
  ENSG00000144959_12 (sequence is synthesized)
cataactgaagtctttatgataacctaatttttaaaaatgaatttgactaacttaagtgcaaaacatgtaaatttggttcccagagtgggccaatctctctgttcttgttatcttagcca

SEQ ID NO: 391412 - DNA, 120 bp, Artificial Sequence
  ENSG00000144959_13 (sequence is synthesized)
actatactgatacctacagctacagaaagcaggactaggaactggaaataactttgggtcctgccttcattaggacgttctttttagaagcagttcttccagctctggatcatagagtga

SEQ ID NO: 391413 - DNA, 120 bp, Artificial Sequence
  ENSG00000144959_14 (sequence is synthesized)
cctttaataagttaaaaaaacgaggactccttaattctgctagagttaaccttgagttcagagcagtattaaatgcgtgcactttcaggtcagtactggggaccaagtaccctctggtct

SEQ ID NO: 391414 - DNA, 120 bp, Artificial Sequence
  ENSG00000144959_15 (sequence is synthesized)
tttgtgaatggatggttttgtttcctatgggaattttggcaaaggttttctggaaagaacaagtttctcaaaggactttcttcctctagaatgttcattttatgagatcgctatctgtaa

SEQ ID NO: 391415 - DNA, 120 bp, Artificial Sequence
  ENSG00000144959_16 (sequence is synthesized)
gtccagttggattacaggaatacttgaaagttactttctaccactattagaaaatatgaagtcgcatgcactggatatctatatatcattaggtttttgttgtgtttttggttatgctgt

SEQ ID NO: 391416 - DNA, 120 bp, Artificial Sequence
  ENSG00000144959_17 (sequence is synthesized)
cccccttctccttggggagatatttgggagcaaacttatttagatttagagtaaacttttcattatagagcaagtaaaaacagacaaatgaaacaacctagtgtttcacataaaaatact

SEQ ID NO: 391417 - DNA, 120 bp, Artificial Sequence
  ENSG00000144959_18 (sequence is synthesized)
agaaggtctagtctattattgaaaactcaattttttcacttatatggctttaaaatggagctattttgctacaatataatgtattgtttatttttttaagttatttaatgttaatataca

SEQ ID NO: 391418 - DNA, 120 bp, Artificial Sequence
  ENSG00000144959_19 (sequence is synthesized)
tagctagacttaaggtttttcagaaagatgtccataataaatattaaaaacaatggtattttttaaaaaactgccttagggttttaaaaccttccctacagttataaccacgtgtaattt

SEQ ID NO: 391419 - DNA, 120 bp, Artificial Sequence
  ENSG00000144959_20 (sequence is synthesized)
tgtggaaatgatataacagctattaatactactataacataggcataaatattttcgtgtttatatgcatatacaagttaaaataattagaaactatgactgcgcctagtaaagtcatct

SEQ ID NO: 391420 - DNA, 120 bp, Artificial Sequence
  ENSG00000144959_21 (sequence is synthesized)
aggtttatagttcagtagcttaggcaaggcacacactgctcatctccgctttttagggtcagaggaacacaagctcatgttctgagtgaagggcgtacactggcacctggtgttgcctag

SEQ ID NO: 391421 - DNA, 120 bp, Artificial Sequence
  ENSG00000144959_22 (sequence is synthesized)
atcccccatctcctccttccagccaggtctggaagtttcaacagcccaagcttaacttcatgtaaagtcttcactgccagtgggaacatctttgacacaacaagacactccaattgtgat

SEQ ID NO: 391422 - DNA, 120 bp, Artificial Sequence
  ENSG00000144959_23 (sequence is synthesized)
ttgagttgaggatctctgcctgccttcctgccgtccttccttcttccccgatccatgctacttttaggggctgcggagagcagcagcagagctgagtaatgatacagggcaccacggaga

SEQ ID NO: 391423 - DNA, 120 bp, Artificial Sequence
  ENSG00000144959_24 (sequence is synthesized)
gaaagtagaaccatttcactcctgggaagatggggtatttcccacttccagcaacgaaataacaaatgaaaagttgcatacttattgatgtattgtatgagccagtagcattttatgtac

SEQ ID NO: 391424 - DNA, 120 bp, Artificial Sequence
  ENSG00000144959_25 (sequence is synthesized)
aaaacagaagtcaatgcaacagtatgtatgtgtgcctgtgtgtgtataaaaataaccattgaagctaacttgctaatgtacttaggcaagccacttcccatctctgggcctcgtctttcc

SEQ ID NO: 391425 - DNA, 120 bp, Artificial Sequence
  ENSG00000144959_26 (sequence is synthesized)
tccctctaaaatcaaagagctgaattatgtgatccttgaggtctcttccacttataataccaactgtcttgtcagactggcaaattatattggcctctccttatgtggtggtttttttgg

SEQ ID NO: 391426 - DNA, 120 bp, Artificial Sequence
  ENSG00000144959_27 (sequence is synthesized)
taggtcatagttccttatacacagacacctgcatcatcgaaggtctttttttcctaaaaaaaaaaaatgggattttagttcttattctgtgataactatcctcctcatataatactattc

SEQ ID NO: 391427 - DNA, 120 bp, Artificial Sequence
  ENSG00000144959_28 (sequence is synthesized)
tttttgacaccatttgaaggaaccaatatttggaccttattttgaggttgtctgtctcgaagaaaaagaaaataaaatgtataggcagggttccttcaattggcattttccccagaattg

SEQ ID NO: 391428 - DNA, 120 bp, Artificial Sequence
  ENSG00000144959_29 (sequence is synthesized)
tgagccaaagcctatagtaattgcagacagcaaatgattccggatctctaaaaggctctctcagatgaaaagggagtaaaggaaaaaagaggtcaaccactgtttctgataatgtacttg

SEQ ID NO: 391429 - DNA, 120 bp, Artificial Sequence
  ENSG00000144959_30 (sequence is synthesized)
agtttcattgttcttttagtttgtattcttataaaaaatgtttacactctgcagattgattttttttttttagtactgtggctttcttttcctattttatgaaaaaaatgataatctttt

SEQ ID NO: 391430 - DNA, 120 bp, Artificial Sequence
  ENSG00000144959_31 (sequence is synthesized)
acattaatatataaagaaaaaccttgaagtgctgtatagtgaagtataaattaatgttttattgatttgtgaagaatttaagactattatataattatcttggtggatctattttatgca

SEQ ID NO: 391431 - DNA, 120 bp, Artificial Sequence
  ENSG00000144959_32 (sequence is synthesized)
atcttggtggatctattttatgcatgaccttttaacctttgactttgcttatttcccactacgaaggggaaggtagattttatgaatgattttaatagcaaatatattttataaagtgaa

SEQ ID NO: 391432 - DNA, 120 bp, Artificial Sequence
  ENSG00000144959_33 (sequence is synthesized)
aatccagtgtggaggtagcaaagcatctatctattctgaatcatgtttggaaataaaattgctccatctgggaatgtgctttcattttcccgtctcattttctgtttcccatttgaaaac

SEQ ID NO: 391433 - DNA, 120 bp, Artificial Sequence
  ENSG00000144959_34 (sequence is synthesized)
agtgttctcttctcttctttctgtatgccaaattgccagccacaattctttcccaatcttctgcccagtggagtactccagctgtctttcctttagagaggtggttcagtggcctccttg

SEQ ID NO: 391434 - DNA, 120 bp, Artificial Sequence
  ENSG00000144959_35 (sequence is synthesized)
atgacatttgtttcatgtctggatacagtatgtgttgccctcctttggactggctagaatattcataaaagccaggcaggccctgggactattttgggaccttcaatacacatgttagga

SEQ ID NO: 391435 - DNA, 120 bp, Artificial Sequence
  ENSG00000144959_36 (sequence is synthesized)
aaaggatgatcataatgccaagagtttgagctgaattgtttcagccaaagcatcactatcactgaaggcaggttctcaaactgaccttgtcattacaaataaatctaatttcacacttga

SEQ ID NO: 391436 - DNA, 120 bp, Artificial Sequence
  ENSG00000144959_37 (sequence is synthesized)
ctatttccagatttaaaagaaccagtttccatctaaactttaaatgtcccccaaaattggagaaggccttaaatgaatacaacttttgtttttacagatacaggctagttccaaaggttt

SEQ ID NO: 391437 - DNA, 120 bp, Artificial Sequence
  ENSG00000144959_38 (sequence is synthesized)
agagcagcgacagagccttcctcaaacctgtagtgactgccacactttgcaaggacaccgtagagggggcatgtccgcgctccaacttcctcccgacgcagcctctgattggctcctggg

SEQ ID NO: 391438 - DNA, 120 bp, Artificial Sequence
  ENSG00000144962_0 (sequence is synthesized)
ggcgtccccgcgagcaagcagcctgatcaggcctcgcagtgggacgttgggaagccggtgttggcagatgctgtggctgggaggagtccagagcttcgccctgtccccgcggggctgagc

SEQ ID NO: 391439 - DNA, 120 bp, Artificial Sequence
  ENSG00000144962_1 (sequence is synthesized)
cacaactgcttaggagttttgggcaggatcgatggatgcaggaagcagtaggagtttggagaatgcagtgaataggatctatcatgatcagcttgttccaaagataaacacaagcaagaa

SEQ ID NO: 391440 - DNA, 120 bp, Artificial Sequence
  ENSG00000144962_2 (sequence is synthesized)
aatgtccaccttagcgcacccacctaacatcctggaaatgtcacaagagattaagaaaaactgtggaggtaaacaggtagaaatcacacttgaaagaacaaaaatgacaaagggcatcaa

SEQ ID NO: 391441 - DNA, 120 bp, Artificial Sequence
  ENSG00000144962_3 (sequence is synthesized)
agaaaaacaaagcaatgatttagagaaagcagcctttaaacggaaggcagaaggtgaagaaaagccaactagaaagaaacaggcaaagataacagaacttgacaatcagttaatcaccat

SEQ ID NO: 391442 - DNA, 120 bp, Artificial Sequence
  ENSG00000144962_4 (sequence is synthesized)
gcctctgcctcacatccccttaaagaacataatggatgtggaaatgaagttggtctacattgatgaaatgggtgttcgctatgagtttgtagagtccttcatgtctactgggagtcagcc

SEQ ID NO: 391443 - DNA, 120 bp, Artificial Sequence
  ENSG00000144962_5 (sequence is synthesized)
aacatgccaagctgctgaaatagtagaccctttgagtgtacataatttcagctttctgcctcagattgacaaatggcttcaggtagccttaaaggatgccagctcttgctatagacaaaa

SEQ ID NO: 391444 - DNA, 120 bp, Artificial Sequence
  ENSG00000144962_6 (sequence is synthesized)
gaaatacgccttggcagcaggacagttcagaacagcacttgagctttgcagcaaaggagcagttctgggagaaccatttgatgcacctgctgaagatatagcaagcgtggcaagtttcat

SEQ ID NO: 391445 - DNA, 120 bp, Artificial Sequence
  ENSG00000144962_7 (sequence is synthesized)
tgagacaaagcttgttacctgttatctacggatgaggaaaccagatcttgccctgaatcatgcacacaggagcattgttttaaacccagcctatttccggaatcatcttcgtcaagcaac

SEQ ID NO: 391446 - DNA, 120 bp, Artificial Sequence
  ENSG00000144962_8 (sequence is synthesized)
gcccggagtgccatgattgctgactacatgttctggcttggtggaggaagggaagagagcataagcaagctcatcaaactgtattggcaggccatgattgaggaagccatcaccagagct

SEQ ID NO: 391447 - DNA, 120 bp, Artificial Sequence
  ENSG00000144962_9 (sequence is synthesized)
gaatctttctcggttatgtacacaccatttgcgacaaaaataagagctgataaaatagaaaaagtaaaagatgctttcacaaaaactcatcctgcatatgcagagtatatgtacacagat

SEQ ID NO: 391448 - DNA, 120 bp, Artificial Sequence
  ENSG00000144962_10 (sequence is synthesized)
cttcaagcactccacatgttgcctcagacagttgactggtcatcttttcctccccaacaatatctcttgactcttgggttcaaaaacaaagatgatggaaaatttttggaaaaaatatca

SEQ ID NO: 391449 - DNA, 120 bp, Artificial Sequence
  ENSG00000144962_11 (sequence is synthesized)
agcaggaagctgccgatattcacagagcataaaacacctttcggtctgaccagagaagatacagtgaggcaaatggagacaatggggaagcgaatcttgccaatattggattttattaga

SEQ ID NO: 391450 - DNA, 120 bp, Artificial Sequence
  ENSG00000144962_12 (sequence is synthesized)
agcacccaattgaatgggagttttcctgcatcctcaggtgtgatggagaagttgcaatatgccagcctcctcagccagctgcagagagtaaaggagcagtcccaggtgattaatcaagca

SEQ ID NO: 391451 - DNA, 120 bp, Artificial Sequence
  ENSG00000144962_13 (sequence is synthesized)
atggcagagctagcaaccattccctacctacaggacatcagtcaacaggaggcagaattgctgcagtcactaatggcagatgctatggacacccttgaaggaagaagaaacaataatgaa

SEQ ID NO: 391452 - DNA, 120 bp, Artificial Sequence
  ENSG00000144962_14 (sequence is synthesized)
cgtgtgtggaatatgatccaaaaggttggacaaattgaagattttctataccaattagaggacagtttcttaaaaactaaaaaactgagaactgctcgaaggcaaaaaacaaaaatgaag

SEQ ID NO: 391453 - DNA, 120 bp, Artificial Sequence
  ENSG00000144962_15 (sequence is synthesized)
cgacttcaaactgttcagcaaaggtagtcattagggagcaggcactaccactaagatatcccagaagaagaggcaagggcatccactccaatgcccacctagtactgtgaagctggataa

SEQ ID NO: 391454 - DNA, 120 bp, Artificial Sequence
  ENSG00000144962_16 (sequence is synthesized)
caaaagcttgtcaccaaaagaaagaggtggtattcccctcagttcatctttaccaaagacactctatgtttcattaatctcaactggcagcaataaatattctcagcaagtttgacttga

SEQ ID NO: 391455 - DNA, 120 bp, Artificial Sequence
  ENSG00000145002_0 (sequence is synthesized)
atggcgcccgaggagaacgcggggaccgaactcttgctgcagggttttgagcgccgcttcctggcggtgcgcacactgcgctccttcccctggcagagcttagaggcaaagttaagagac

SEQ ID NO: 391456 - DNA, 120 bp, Artificial Sequence
  ENSG00000145002_1 (sequence is synthesized)
tcatcagattctgagctgctgcgggatattttgcagaagactgtgaggcatcctgtgtgtgtgaagcacccgccgtcagtcaagtatgcctggtgctttctctcagaactcatcaaaaag

SEQ ID NO: 391457 - DNA, 120 bp, Artificial Sequence
  ENSG00000145002_2 (sequence is synthesized)
cacgaggctgtccacacggagcctttggacaaactgtacgaggtgctcgcggagactctgatggccaaggagtccacccagggccaccggagctatttgctgtcctcaggaggctcagtc

SEQ ID NO: 391458 - DNA, 120 bp, Artificial Sequence
  ENSG00000145002_3 (sequence is synthesized)
acactctccaagagcacagccatcatctcccacggtaccacaggcctggtcacatgggatgccgccctctaccttgcagaatgggccatcgagaacccggcagccttcattaacaggact

SEQ ID NO: 391459 - DNA, 120 bp, Artificial Sequence
  ENSG00000145002_4 (sequence is synthesized)
gtcctagagcttggcagtggtgccggcctcacaggccttgccatctgcaagatgtgccgcccccgggcatacatcttcagcgaccctcacagccggatcctcgagcagctccgagggaat

SEQ ID NO: 391460 - DNA, 120 bp, Artificial Sequence
  ENSG00000145002_5 (sequence is synthesized)
ggcccagctggactgggacgtagcaatggtccatcagctctctgccttccagccagatgttgtcattgcagcagacgtgctgtattgcccagaagccatcgtgtcgctggtcggggtcct

SEQ ID NO: 391461 - DNA, 120 bp, Artificial Sequence
  ENSG00000145002_6 (sequence is synthesized)
gcagaggctggctgcctgccgggagcacaagcgggctcctgaggtctacgtggcctttaccgtccgcaacccagagacatgccagctgttcaccaccgagctaggccgggatgggatcag

SEQ ID NO: 391462 - DNA, 84 bp, Artificial Sequence
  ENSG00000145002_7 (sequence is synthesized)
gccagctgttcaccaccgagctaggccgggatgggatcagatgggaagcggaagctcatcatgaccagaaactgtttccctatg

SEQ ID NO: 391463 - DNA, 120 bp, Artificial Sequence
  ENSG00000145002_8 (sequence is synthesized)
aagtcactctcgtgggaagaatttttatatgggaaagtggataaaactttcattggactggaatgtttggagattattaaactccaaatcaggaatcaaaactgccctctaataagacat

SEQ ID NO: 391464 - DNA, 120 bp, Artificial Sequence
  ENSG00000145002_9 (sequence is synthesized)
tagctgtctaggcgtgtgggtgccccctttctgccagcagttctggttctcaagaaaatcatcataaatcagacatgaaaattctagctccaaaaatagcattttctttctgcaaataaa

SEQ ID NO: 391465 - DNA, 120 bp, Artificial Sequence
  ENSG00000145002_10 (sequence is synthesized)
tttgagcgccgcttcctggcggtgcgcacactgcgctccttcccctggcaggtgggcggcggggcgagcggagaggcccgcgggggtcgcgggagtccaggggcagacgggatgggtctc

SEQ ID NO: 391466 - DNA, 120 bp, Artificial Sequence
  ENSG00000145012_0 (sequence is synthesized)
gtgggaactttgaggctcagagacagagcagaagacagaacctggtcttctgattccctgtgttctgcttttttcattgttccactggacgctcatcagagggaagatctttttcctcaa

SEQ ID NO: 391467 - DNA, 120 bp, Artificial Sequence
  ENSG00000145012_1 (sequence is synthesized)
ttgcattgcagttggctgaaccttgtgtcaaccatccattccaggagccagctatctgagattccaacaatgtctcacccatcttggctgccacccaaaagcactggtgagcccctcggc

SEQ ID NO: 391468 - DNA, 120 bp, Artificial Sequence
  ENSG00000145012_2 (sequence is synthesized)
catgtgcctgcacggatggagaccacccattcctttgggaaccccagcatttcagtgtctacacaacagccacccaaaaagtttgccccggtagttgctccaaaacctaagtacaaccca

SEQ ID NO: 391469 - DNA, 120 bp, Artificial Sequence
  ENSG00000145012_3 (sequence is synthesized)
tacaaacaacctggaggtgagggtgattttcttccacccccacctccacctctagatgattccagtgcccttccatctatctctggaaactttcctcctccaccacctcttgatgaagag

SEQ ID NO: 391470 - DNA, 120 bp, Artificial Sequence
  ENSG00000145012_4 (sequence is synthesized)
gctttcaaagtacaggggaatcccggaggcaagacacttgaggagaggcgctccagcctggacgctgagattgactccttgaccagcatcttggctgaccttgagtgcagctccccctat

SEQ ID NO: 391471 - DNA, 120 bp, Artificial Sequence
  ENSG00000145012_5 (sequence is synthesized)
aagcctcggcctccacagagctccactggttcaacagcctctcctccagtttcgaccccagtcacaggacacaagagaatggtcatcccgaaccaaccccctctaacagcaaccaagaag

SEQ ID NO: 391472 - DNA, 120 bp, Artificial Sequence
  ENSG00000145012_6 (sequence is synthesized)
tctacattgaaaccacagcctgcaccccaggctggacccatccctgtggctccaatcggaacactcaaaccccagcctcagccagtcccagcctcctacaccacggcctccacttcttca

SEQ ID NO: 391473 - DNA, 120 bp, Artificial Sequence
  ENSG00000145012_7 (sequence is synthesized)
aggcctacctttaatgtgcaggtgaagtcagcccagcccagccctcattatatggctgccccttcatcaggacaaatttatggctcagggccccagggctataacactcagccagttcct

SEQ ID NO: 391474 - DNA, 120 bp, Artificial Sequence
  ENSG00000145012_8 (sequence is synthesized)
gtctctgggcagtgtccacctccttcaacacggggaggcatggattatgcctacattccaccaccaggacttcagccggagcctgggtatgggtatgcccccaaccagggacgctattat

SEQ ID NO: 391475 - DNA, 120 bp, Artificial Sequence
  ENSG00000145012_9 (sequence is synthesized)
gaaggctactatgcagcagggccaggctatgggggcagaaatgactctgaccctacctatggtcaacaaggtcacccaaatacctggaaacgggaaccagggtacactcctcctggagca

SEQ ID NO: 391476 - DNA, 120 bp, Artificial Sequence
  ENSG00000145012_10 (sequence is synthesized)
gggaaccagaaccctcctgggatgtatccagtcactggtcccaagaagacctatatcacagatcctgtttcagccccctgtgcgccaccattgcagccaaagggtggccattcagggcaa

SEQ ID NO: 391477 - DNA, 120 bp, Artificial Sequence
  ENSG00000145012_11 (sequence is synthesized)
ctggggccttcgtcagttgccccttcattccgcccagaggatgagcttgagcacctgaccaaaaagatgctgtatgacatggaaaatccacctgctgacgaatactttggccgctgtgct

SEQ ID NO: 391478 - DNA, 120 bp, Artificial Sequence
  ENSG00000145012_12 (sequence is synthesized)
cgctgtggagaaaacgtagttggggaaggtacaggatgcactgccatggatcaggtcttccacgtggattgttttacctgcatcatctgcaacaacaagctccgagggcagccattctat

SEQ ID NO: 391479 - DNA, 120 bp, Artificial Sequence
  ENSG00000145012_13 (sequence is synthesized)
gctgtggaaaagaaagcatactgcgagccctgctacattaatactctggagcagtgcaatgtgtgttccaagcccatcatggagcggattctccgagccaccgggaaggcctatcatcct

SEQ ID NO: 391480 - DNA, 120 bp, Artificial Sequence
  ENSG00000145012_14 (sequence is synthesized)
cactgtttcacctgcgtgatgtgccaccgcagcctggatgggatcccattcactgtggatgctggcgggctcattcactgcattgaggacttccacaagaaatttgccccgcgatgttct

SEQ ID NO: 391481 - DNA, 120 bp, Artificial Sequence
  ENSG00000145012_15 (sequence is synthesized)
gtgtgcaaggagcctattatgccagccccgggccaggaggagactgtccgtattgtggctttggatcgagatttccatgttcactgctaccgatgcgaggattgcggtggtctcctgtct

SEQ ID NO: 391482 - DNA, 120 bp, Artificial Sequence
  ENSG00000145012_16 (sequence is synthesized)
gaaggagataaccaaggctgctaccccttggatgggcacatcctctgcaagacctgcaactctgcccgcatcagggtgttgaccgccaaggcgagcactgacctttagattcagtcacct

SEQ ID NO: 391483 - DNA, 120 bp, Artificial Sequence
  ENSG00000145012_17 (sequence is synthesized)
gttcagccggcactgagaagaacgaacacaagaaaaagataagaaatactagagtaaaggccatcaaactacgcgatagtctctgttcttcatctgctattaaccttgccttagaaacac

SEQ ID NO: 391484 - DNA, 120 bp, Artificial Sequence
  ENSG00000145012_18 (sequence is synthesized)
ataaattatgagattttttttaaaagttgttaccaaatacacatttcacattgaatcatgtaggatcttgatgggcctttgttcccaaggacttccacatttttgcacagattatgctcc

SEQ ID NO: 391485 - DNA, 120 bp, Artificial Sequence
  ENSG00000145012_19 (sequence is synthesized)
atcccattcacttctgcattcctgtaacttttaatccctatgtttgtctcacttttcatctggttgaatggcttttcttagtgtggtatttgctgtcacatagtttttcctgggtgagtc

SEQ ID NO: 391486 - DNA, 120 bp, Artificial Sequence
  ENSG00000145012_20 (sequence is synthesized)
tgccaactcacaggtgcttttaggcttgaaatctccatcctatcatttccgttttgcctgtgactgtaaagagtagccattcttttcccatgtattgaagaggatattcttctcttgctt

SEQ ID NO: 391487 - DNA, 120 bp, Artificial Sequence
  ENSG00000145012_21 (sequence is synthesized)
tatactactcacgtccttggggagggaaatgcacaatttttttttgttaggctgtaaagaatttaagctgtaaattacataagttagaacaagcccaaatttaatttgcaaccatcagaa

SEQ ID NO: 391488 - DNA, 120 bp, Artificial Sequence
  ENSG00000145012_22 (sequence is synthesized)
ttcagaatctatagtgaccagtgatcaaggctaattggaaaagagttatcggcccatagctaataagtagtgacagacaaccaagcttcaatatttttctaaagaaattacaggtgggat

SEQ ID NO: 391489 - DNA, 120 bp, Artificial Sequence
  ENSG00000145012_23 (sequence is synthesized)
atgctagaaaaggcattttggggttatgtttaaaaaaacattattgtcccacaatattaccttaagatttttcttttccgcactacctgaacattgtaatacagacaaacttgatttctt

SEQ ID NO: 391490 - DNA, 120 bp, Artificial Sequence
  ENSG00000145012_24 (sequence is synthesized)
ctagaagataacattttcaatactgtcccacttctcatcttaaaaatattgtcatgtttattctaatatccaacacaactatcaaaattgcctttttctctagaggatgaaggctgtgaa

SEQ ID NO: 391491 - DNA, 120 bp, Artificial Sequence
  ENSG00000145012_25 (sequence is synthesized)
aaaaccgttcaaattctcttctttttcttttttattaccaggtccattttgcctgacaattgcaaatcagagcatacaaaataaaactgtgcagttttgtttggtttactttcaaaagag

SEQ ID NO: 391492 - DNA, 120 bp, Artificial Sequence
  ENSG00000145012_26 (sequence is synthesized)
tagaaagcttgaaaagattctgaaaccacagtttcattattctcataatccttctgcaactgaaattacatattgcaggagacattttcatatcatcaatgtgacatttacaccacactt

SEQ ID NO: 391493 - DNA, 120 bp, Artificial Sequence
  ENSG00000145012_27 (sequence is synthesized)
tcaaagacaatcactgaaacaaaaattgtctttatgagctaaaaatatgcagaatctctgcctagaatctttattcaaacttttattagccagtgaaacacttgcttgccaactgccaag

SEQ ID NO: 391494 - DNA, 120 bp, Artificial Sequence
  ENSG00000145012_28 (sequence is synthesized)
ccatacttattaagttcgaacatgtttcacttaaggagagacacctagcttagtcatggcaagttgccattttgtaaactaaggattttggactgagatttcttaaatctttcttcaaat

SEQ ID NO: 391495 - DNA, 120 bp, Artificial Sequence
  ENSG00000145012_29 (sequence is synthesized)
ctcccacaagtatatacttttaaattatggagtattttaagtctacaaaaaggtataaataataatataatgaattcctatatacctaatacccagtttaagacaccaaatataacaagt

SEQ ID NO: 391496 - DNA, 120 bp, Artificial Sequence
  ENSG00000145012_30 (sequence is synthesized)
ataattacatcctccaatgtaccgtttccttattccacagatatctttttcattattgtgaagtgatgttcagatttctagttttttttctagtttttaattttaacatcagaactgaaa

SEQ ID NO: 391497 - DNA, 120 bp, Artificial Sequence
  ENSG00000145012_31 (sequence is synthesized)
taaaaaattatggatacgtgttttgaattgcaaactattcctcaggaattccaattaaatttattttacttgaataggaatgatcataaaagtgattctttttttgtgactagaaattct

SEQ ID NO: 391498 - DNA, 120 bp, Artificial Sequence
  ENSG00000145012_32 (sequence is synthesized)
taagccgatggtcactatagctcatccttaatgtatggctcatttgcttttgtcactaaacggttttgtgttagaaccaccaaaattatagcttttaagagcttcctttgaccactgtct

SEQ ID NO: 391499 - DNA, 120 bp, Artificial Sequence
  ENSG00000145012_33 (sequence is synthesized)
ttttcttaccctagttctcttatctttgatcgtatatttctcataatgtgaaatatgatgagattcacttaggggcagcatgttagttttgggaggcaatgtcaactgtgtctctgaatt

SEQ ID NO: 391500 - DNA, 120 bp, Artificial Sequence
  ENSG00000145012_34 (sequence is synthesized)
cctgtcttccaaattgaagccagaccatgctgatgacctcaagtagcactgactatttgacaatagggctgataatgtaatcggcttgaattttgacttagtaactttttatgtaatact

SEQ ID NO: 391501 - DNA, 120 bp, Artificial Sequence
  ENSG00000145012_35 (sequence is synthesized)
ttcggagaaattctctttaggacaaagcagagagtccaatttattgagggatagattgtatctcttaaagtggtcatattattattaattttgccaaaagaagaagaatttattgaatat

SEQ ID NO: 391502 - DNA, 120 bp, Artificial Sequence
  ENSG00000145012_36 (sequence is synthesized)
ttatactataaaatgcagtaacattctacttgcttattacatttaaatccttgtgtaactgaatgtttacatgtcaagaggaaaagctgtaagaaaatgctgtcacagacccatccctgt

SEQ ID NO: 391503 - DNA, 120 bp, Artificial Sequence
  ENSG00000145012_37 (sequence is synthesized)
ggcatcgtcagcagaatactgcttgcttacaatctttattatgcattcttataacataacctcagagtatctttaccaaaggtttttaaagtaaatctctttttaagatagacttattct

SEQ ID NO: 391504 - DNA, 120 bp, Artificial Sequence
  ENSG00000145012_38 (sequence is synthesized)
tttataataatgaatgtgcactcatacatatgtagaaacatttagatttagagttttttttttctttcacaaggtataataaggaaaggatcctacaatattttattctagggtttctta

SEQ ID NO: 391505 - DNA, 120 bp, Artificial Sequence
  ENSG00000145012_39 (sequence is synthesized)
aatatatgatttatattactgtcttttctattaatcatttgatttaaacaatgccaagtcactcttttttagttgcatgaaattttgcctgcaacagagagaaaaagattgtattacttt

SEQ ID NO: 391506 - DNA, 120 bp, Artificial Sequence
  ENSG00000145012_40 (sequence is synthesized)
aatgattataatcatactgtctgctgatataatatcataattgttgtggtttaaatacataaatagtagaaaaatcagagtctataacagaaagtttgtaaaaatatactgattttgaaa

SEQ ID NO: 391507 - DNA, 120 bp, Artificial Sequence
  ENSG00000145012_41 (sequence is synthesized)
agtatcaggaatataaatatttggtaattctgtgtaacaagagagacatggaaaaggaaaaaaatccactatatcatgggctctgcagaacatatcaaaataggatttcttaaatttttc

SEQ ID NO: 391508 - DNA, 120 bp, Artificial Sequence
  ENSG00000145012_42 (sequence is synthesized)
aacccccagaccatactgactcaacatggagtctcactggccaagaaaattgcctttaaaactcgaaaataaggccaggtgtggtgactcacacttgtaatcccagcaatttgggaggct

SEQ ID NO: 391509 - DNA, 78 bp, Artificial Sequence
  ENSG00000145012_43 (sequence is synthesized)
taaaataaaaaccaaattagccagacatggtggcatgcgcttgtttaaaaaaacaaataaataaataatcgactcaaa

SEQ ID NO: 391510 - DNA, 120 bp, Artificial Sequence
  ENSG00000145012_44 (sequence is synthesized)
gcttgtttaaaaaaacaaataaataaataatcgactcaaaaataagtcatgtgtcccagcataaggcatcaggttgttagatgctggcatctctgcagctcaaagatgtgggttcttttt

SEQ ID NO: 391511 - DNA, 120 bp, Artificial Sequence
  ENSG00000145012_45 (sequence is synthesized)
cttgtcattaacacattgttatttctgtaggagcaacttctctgatcaaaattacttttctgggtatgtgctgattaagggggtggacttatcaacactataattgttccctatgaaaga

SEQ ID NO: 391512 - DNA, 120 bp, Artificial Sequence
  ENSG00000145012_46 (sequence is synthesized)
ttccacagagatgtttatggtgaggtttaaaggatatgaaactctacatttaaacaagtattttatatttgggtacagaggaagaaagagagggctttttccatggggctatagtagaga

SEQ ID NO: 391513 - DNA, 120 bp, Artificial Sequence
  ENSG00000145012_47 (sequence is synthesized)
gttagtggaatatagacaggactctgaaaacacaacttccagccatttttttagttagtaaaaatcctattaatgtgaaccagccaggaataacagtgttatttctattggatatggttt

SEQ ID NO: 391514 - DNA, 120 bp, Artificial Sequence
  ENSG00000145012_48 (sequence is synthesized)
gggcttctcttgtcaaatctgtgtcggctgccccctgatccttccattatcaagttttgaagggtgttggggaaattatggcagctgctagggagatcagggaaacactgatgtaacctc

SEQ ID NO: 391515 - DNA, 120 bp, Artificial Sequence
  ENSG00000145012_49 (sequence is synthesized)
aaagcctctcaccattcctcttggcttggaaaggctttattttttcatatacatttctagaaatattgctattctaccttagtatttcacatttgtagttcaaacaagcgattgtccatc

SEQ ID NO: 391516 - DNA, 120 bp, Artificial Sequence
  ENSG00000145012_50 (sequence is synthesized)
tgttgcctagagctatagtacatgtgtgttatgaatgaaatatgacagcatgttccatacccctgctttagccatctgtgggaaaccagcaaactgaaaaagacacctctgcaaaatgtg

SEQ ID NO: 391517 - DNA, 120 bp, Artificial Sequence
  ENSG00000145012_51 (sequence is synthesized)
cctcaagtccatttcttgggatcgctcgtttggtgcactctcgtgggagacaatcagagaacaacatatacttgtgccttattttcaaagaatctatttacactactatgaatattccac

SEQ ID NO: 391518 - DNA, 120 bp, Artificial Sequence
  ENSG00000145012_52 (sequence is synthesized)
attttcaaagaatctatttacactactatgaatattccactgaagagtcaatgatgtaaatgataaccaccaaatctcaaaaatatactcaccaaaaagtaaaaaagtaaaaaaaaaaaa

SEQ ID NO: 391519 - DNA, 120 bp, Artificial Sequence
  ENSG00000145012_53 (sequence is synthesized)
catcttaatatattctagtagtatttattttttccttgtcttggaagtatctcataggtctttaaatgagtaaaacatttttatgccagaaggtgatataatggatgttagtgtttttta

SEQ ID NO: 391520 - DNA, 120 bp, Artificial Sequence
  ENSG00000145012_54 (sequence is synthesized)
tttgattttacagtagttttagtcagataatgaggacagagacttcaacttgattctttaccaccattcagcatattttttaattgtcttcattgtatttgcttaatagtggtccagaca

SEQ ID NO: 391521 - DNA, 120 bp, Artificial Sequence
  ENSG00000145012_55 (sequence is synthesized)
agttcaaaacttgttctcagtgaggcattaatatggtgcaaccatgaatatttcaggccaagttattcacttgacagataactagaatgaaacttttctcatgaggctgttgtttggtta

SEQ ID NO: 391522 - DNA, 120 bp, Artificial Sequence
  ENSG00000145012_56 (sequence is synthesized)
gcatagccttatttcaaaccttaaaaagttacctgactgaagctactatgacttggtaaggattcttcctctcttgctttcttcctcccttcctttcttcctcttccttcctcctcttct

SEQ ID NO: 391523 - DNA, 120 bp, Artificial Sequence
  ENSG00000145012_57 (sequence is synthesized)
tattttctttcctactttccatcctacctattagtgttgctgtacttggattttttgtaaattaaatcaatgcattatgattttagggaattatgattatattcataaggggaaggctac

SEQ ID NO: 391524 - DNA, 120 bp, Artificial Sequence
  ENSG00000145012_58 (sequence is synthesized)
cagaaaatatatgtggcatccataaaatcttcttttataggggcatattttttaggttgtatttattcgtaaagtgaaatgagataatagagtctttctgtttcatgttaatgaattttc

SEQ ID NO: 391525 - DNA, 120 bp, Artificial Sequence
  ENSG00000145012_59 (sequence is synthesized)
atcagggactgaggtcatagattcttggaaaattcatttgtgactgatctagttttctcagctgtatgcaaagtaatctttcaaagactaggttaagattttttttttaagtctgaagca

SEQ ID NO: 391526 - DNA, 120 bp, Artificial Sequence
  ENSG00000145012_60 (sequence is synthesized)
atgtaaccccaaaaaattataattttaatgatggcattttattttattccattgcagcttgataactttccttatagcaaaggaataactattgtattttcagaattttaacacagatta

SEQ ID NO: 391527 - DNA, 120 bp, Artificial Sequence
  ENSG00000145012_61 (sequence is synthesized)
acacttagcctgtaagactaataatatattgtaatagttgatactaaaatatttttcagcaggttggacagcaccagtttttcttagatcacagactacaggcagaatttcccttcaatc

SEQ ID NO: 391528 - DNA, 120 bp, Artificial Sequence
  ENSG00000145012_62 (sequence is synthesized)
cagaaaaaaggacactaatttccttttctatttaattttcctggcccttgtgcaaaaaattgtggactctatcttagttacaacatgcatgtcccttattttgtggagagctgtgtgaaa

SEQ ID NO: 391529 - DNA, 82 bp, Artificial Sequence
  ENSG00000145012_63 (sequence is synthesized)
gtgtttttttctttagctgattgacaggtccccttcaaagttacaaaaaaaagtgctaatttttgctgttaaattctggttg

SEQ ID NO: 391530 - DNA, 120 bp, Artificial Sequence
  ENSG00000145012_64 (sequence is synthesized)
acaaaaaaaagtgctaatttttgctgttaaattctggttgttatttaattgacagaagtctcttgatgcacgaataaatatctctacatctagcctttgttaaaaataaaaattaatatt

SEQ ID NO: 391531 - DNA, 120 bp, Artificial Sequence
  ENSG00000145012_65 (sequence is synthesized)
ctacaaacacctacatatactagagaggggtgaaacactgcagctaattcctttataatactttcagatgattgcattaagcctttcatgttatgtggcattgttaatttttcctagata

SEQ ID NO: 391532 - DNA, 120 bp, Artificial Sequence
  ENSG00000145012_66 (sequence is synthesized)
cccatccacttaagggccagagaaatccttattcatttaactctggtgggcatttatgtaacatacccaaataaaaacgttattaaacagccacaatcgcattcagtcaacttggcactg

SEQ ID NO: 391533 - DNA, 120 bp, Artificial Sequence
  ENSG00000145012_67 (sequence is synthesized)
aatgtagcttctaaaatcagttctctaccctacgaatggaatgttctaccaagaaagagaagcatcaccatgtcatcttgtgttctacaccactatagagagttacagttgcccccaaac

SEQ ID NO: 391534 - DNA, 85 bp, Artificial Sequence
  ENSG00000145012_68 (sequence is synthesized)
tgttctacaccactatagagagttacagttgcccccaaacacgaatgctattcccaaataaaatagaatcatgctttgggaggcc

SEQ ID NO: 391535 - DNA, 90 bp, Artificial Sequence
  ENSG00000145012_69 (sequence is synthesized)
gatcatggcccttttaaagatctgaatcttctctgttattttcctgatgaatcaccatcccatatcttcttagtcctggccagtatgtag

SEQ ID NO: 391536 - DNA, 120 bp, Artificial Sequence
  ENSG00000145012_70 (sequence is synthesized)
atcaccatcccatatcttcttagtcctggccagtatgtagttgcgctcacatacgtctattctagctctgtagctccacaaaacaagtcttaagtccaaatctttgcctcttcatgtctg

SEQ ID NO: 391537 - DNA, 120 bp, Artificial Sequence
  ENSG00000145012_71 (sequence is synthesized)
atatcaccaactcattcagcttttcttcacttattgacatagtgtcatgtcctatcactctctgctgcttctttaaacagtggacacaaacatattttctaattttcagtgtactcagtg

SEQ ID NO: 391538 - DNA, 120 bp, Artificial Sequence
  ENSG00000145012_72 (sequence is synthesized)
acctcagacccagaagtgtaaaagctacagaaggatagaactcccatgtctacagacagttctgttactttttgttctgtactattttggatgttgccaaaatcaaattcatcctgaaaa

SEQ ID NO: 391539 - DNA, 120 bp, Artificial Sequence
  ENSG00000145012_73 (sequence is synthesized)
caggaagcaagctaatgcatatgccatccatgagattcccacttctgggtcagttcatattccattcaaccttttccttttatccttgtcttcttcagaataagacatttttcctccata

SEQ ID NO: 391540 - DNA, 120 bp, Artificial Sequence
  ENSG00000145012_74 (sequence is synthesized)
ttttcatattaaatattaacactttataggttctactttaatatatggacactttacaggttatacataaatatttgctggttgattgatttcgagattcattcattctgtgctcaaata

SEQ ID NO: 391541 - DNA, 120 bp, Artificial Sequence
  ENSG00000145012_75 (sequence is synthesized)
tttgtacctagagacgttacatgttagaaaaagtgagcagcttctttctctaatcatttaggagtccatatttttcttttctttttgttctcccaacatccttatctcttactcagctct

SEQ ID NO: 391542 - DNA, 120 bp, Artificial Sequence
  ENSG00000145012_76 (sequence is synthesized)
tcaatttataattaccaaataatcactgttagagaatcagcccctaagtaactttgattctggccaactgtaataagatccaaccacttaaatctgtacttactcaataggaaggaatgt

SEQ ID NO: 391543 - DNA, 120 bp, Artificial Sequence
  ENSG00000145012_77 (sequence is synthesized)
gacatcaggaagagtcattccagtgacattagtaagactttatggagtacataaaatttgataagaaatcttgagctgattctttgacttgatttagaagttgagaaaagagtatttaag

SEQ ID NO: 391544 - DNA, 120 bp, Artificial Sequence
  ENSG00000145012_78 (sequence is synthesized)
gcacaacagggaaacatgggctatactcagagaagaccctctgcattggccaaaatatcatggattctggaaattccttcttaacagaaaaaaaaggcttccaaataatcaggctgaatg

SEQ ID NO: 391545 - DNA, 120 bp, Artificial Sequence
  ENSG00000145012_79 (sequence is synthesized)
ggaagaaaaaggcatagaggaagcctgaggaagtatttacttgcttttcccatctctttataattggaagagaagatgatctgccaaaatataacccagcatgcacagtatggacaggaa

SEQ ID NO: 391546 - DNA, 120 bp, Artificial Sequence
  ENSG00000145012_80 (sequence is synthesized)
gcagccctccatgaactttattatcacagaatatgagcattcttattgatccacagctacatcttctattcttgcagcaagggtacatgtcctttgaccctccacaaaagaacaagcagg

SEQ ID NO: 391547 - DNA, 120 bp, Artificial Sequence
  ENSG00000145012_81 (sequence is synthesized)
acatctctattttcctattgagtctgagtccattattagaaaggacttcccagccatcttttctacttggtattaaaattcccttacagattcattgctaagtgccaattcttttttttt

SEQ ID NO: 391548 - DNA, 120 bp, Artificial Sequence
  ENSG00000145012_82 (sequence is synthesized)
tgccaattctgactctacttaaacatcacctgtatcagggagctcattattccttgaggtcttacatttctttcagcacattttgttccaagctacacgactttaaaacagagccagcct

SEQ ID NO: 391549 - DNA, 120 bp, Artificial Sequence
  ENSG00000145012_83 (sequence is synthesized)
ttggggcatatgttctctttggtgccacacaaaacctgtagtacatgatacagtgttgcttcccccctccttttccttccatatatatttgttttgttttgggcattgcattactttttt

SEQ ID NO: 391550 - DNA, 120 bp, Artificial Sequence
  ENSG00000145012_84 (sequence is synthesized)
gaatttttaagaatctctaaaattagtctgaaggatgttctgagggccagacattagaatttgtgagtttttttgttgctggttgtactttcctatttagaagacagaccgttctgacag

SEQ ID NO: 391551 - DNA, 120 bp, Artificial Sequence
  ENSG00000145012_85 (sequence is synthesized)
ttgttgtgtagcttcatgccttccccagtaactaacccatgaacagtacaccccttttatctgacttgttgataatgaccttaaaaatgttaggaaatgggccgggcgcggtggctcgtg

SEQ ID NO: 391552 - DNA, 120 bp, Artificial Sequence
  ENSG00000145012_86 (sequence is synthesized)
caaaaaaaaaaaaaaaaaaaaaaggttgggaaatattggtgtataatccccatgtctaacaaggaagaagtcaaaagcaaaagatagtggtattgccgaaaactcattatttctagttag

SEQ ID NO: 391553 - DNA, 120 bp, Artificial Sequence
  ENSG00000145012_87 (sequence is synthesized)
aactcattatttctagttagttcatctgtggaaaaggatatcgttcttgaggagaggggttctattatgctatagttttctatggaaatgtacaaatgctttcctcattgctctggatga

SEQ ID NO: 391554 - DNA, 120 bp, Artificial Sequence
  ENSG00000145012_88 (sequence is synthesized)
ctatttagtttaaataatatacctttgtcatggggaagaccatgattgtggcttcttctaccccaactttgaatgagagagcactgtaagcagaaactgccatcagtctcctgggcagga

SEQ ID NO: 391555 - DNA, 120 bp, Artificial Sequence
  ENSG00000145012_89 (sequence is synthesized)
cctggaggtaactttctgagctgtaaaatagtaattcctaagagagcttacaaactgcttccacacagaaaatagcgcagggaggacagttattagtacccctattctagaagagaaagc

SEQ ID NO: 391556 - DNA, 120 bp, Artificial Sequence
  ENSG00000145012_90 (sequence is synthesized)
tgaggctcaagccattaagtgacttgccaaaagctgtgacatagctgggaagtggcagatttggggatataaccaggtcttgcaagtccagtgctgtctccaagtagccacgctcacagc

SEQ ID NO: 391557 - DNA, 120 bp, Artificial Sequence
  ENSG00000145012_91 (sequence is synthesized)
tgagaacaccttagaggacaatatcgacttcttacagactaccaagcccccagtcatccagggaaattcagagaccaattgactgccaggtggcaaatccacatgtgtactgcggtcttt

SEQ ID NO: 391558 - DNA, 120 bp, Artificial Sequence
  ENSG00000145012_92 (sequence is synthesized)
agagatcatttagagcttgcacacatctgtgtcttcttgtgggaaacctctaggtattctgtctgatcagcactgtgaggaagttggtgggaaaaggccactgataagaacaaacaatgg

SEQ ID NO: 391559 - DNA, 120 bp, Artificial Sequence
  ENSG00000145012_93 (sequence is synthesized)
gcagaaggaagcacattgcaataaatttccccagagagagttcctttacattccattcaccaaaaacctctctggaactgtcaggttcagaatatcaaccaagaccatatcatttagaat

SEQ ID NO: 391560 - DNA, 120 bp, Artificial Sequence
  ENSG00000145012_94 (sequence is synthesized)
tcattggcatgtagaggtgactcgattcctaaaagaagcctctctcccatgaaccacgatgtacgttccacagaggcagaaaccgccgtaggttagcaatgcattttagtctttctctcc

SEQ ID NO: 391561 - DNA, 120 bp, Artificial Sequence
  ENSG00000145012_95 (sequence is synthesized)
attcacatttactgagagcacaccacgtgcatgttgctgcaacaggcatttccgatagagccgatccatgagctaacaatgtctgaaaacaaatgttatggaactgttggcatttctgag

SEQ ID NO: 391562 - DNA, 120 bp, Artificial Sequence
  ENSG00000145012_96 (sequence is synthesized)
atttggcctttgccatttgatagactttgcttcccaggatgctgtcattttgtgattttttataattacaaggaatttggtaccatgttgttttcaaaaaacctcctagaaagtctccat

SEQ ID NO: 391563 - DNA, 120 bp, Artificial Sequence
  ENSG00000145012_97 (sequence is synthesized)
gtatgctctagaagttgctctacgtaacagttcagcaagcaagtgttccttctcttgagctgcgtccctcaggaagctgtacctttagggtgtgctttccactttttatttcctctcatt

SEQ ID NO: 391564 - DNA, 120 bp, Artificial Sequence
  ENSG00000145012_98 (sequence is synthesized)
tcactcctttcattgtttgctatatcctaaaatatgtgaagtgagagaaaaaatatcatttcttctcattaaatctcctgcattaaatctaagaatcctttaaaataatcacacctgata

SEQ ID NO: 391565 - DNA, 120 bp, Artificial Sequence
  ENSG00000145012_99 (sequence is synthesized)
agtgttttatgcatttccctccctggagtgttatcatccatcaagccagtatcatcatccacctgcttattccttgggactaatgagagccaagttaaatagcaaatgacttctcacccc

SEQ ID NO: 391566 - DNA, 120 bp, Artificial Sequence
  ENSG00000145012_100 (sequence is synthesized)
ttcctagtcctcatgcctgaggaataagggcgacattaatgggagcgggagagtggtggctttggttgagatgcacgttcacagactagaaaagtgcctcacctccatggtgtatatgtg

SEQ ID NO: 391567 - DNA, 75 bp, Artificial Sequence
  ENSG00000145012_101 (sequence is synthesized)
ttaaaaaaaaaaaagaaaagtgcctcacctccctgtgaggcttgatgaatattgtggccagtgagtggaaaatga

SEQ ID NO: 391568 - DNA, 120 bp, Artificial Sequence
  ENSG00000145012_102 (sequence is synthesized)
tgaggcttgatgaatattgtggccagtgagtggaaaatgattcttgtcgaatagacagagtattcccaccccaggaatggattaatagaagacacaatttgagcacttctcagaattatc

SEQ ID NO: 391569 - DNA, 120 bp, Artificial Sequence
  ENSG00000145012_103 (sequence is synthesized)
tagtatgcctgagtagagactcacatgggtggaatctgtgttgtctcatcagagggaataaaaagacaatgaggtggtaaatgtgaaaaaagcagccttttagaaaaacattattttcaa

SEQ ID NO: 391570 - DNA, 120 bp, Artificial Sequence
  ENSG00000145012_104 (sequence is synthesized)
ataaatcatctaatttatcttcacataatataaagaaaaaactaataaaaattttcgtatttcactttacataatatgttctcccatatttagggatcatacaattgtattgtcttcaaa

SEQ ID NO: 391571 - DNA, 120 bp, Artificial Sequence
  ENSG00000145012_105 (sequence is synthesized)
acacacacacacacacacacaccccttccaagaaagctgatccttcagaaaataaatcttatttttaagcacttgggttttcaggccagaaaattaataaatcctaaacctgacccattt

SEQ ID NO: 391572 - DNA, 120 bp, Artificial Sequence
  ENSG00000145012_106 (sequence is synthesized)
gaaaattaataaatcctaaacctgacccatttttgtaacagctaaaaaggagaagaaaaagctagttaaattttgtgtggatccatttatctcttaaaatatgccaaagcaatttgaggt

SEQ ID NO: 391573 - DNA, 120 bp, Artificial Sequence
  ENSG00000145012_107 (sequence is synthesized)
gggggtggaaacaggtatttatctctcatgcgtgattctctctttatatttctatctgttgggaaaagggtaaagaactattcttggtcattattgatgtattgtgttgccactttgtat

SEQ ID NO: 391574 - DNA, 120 bp, Artificial Sequence
  ENSG00000145012_108 (sequence is synthesized)
ggtgcctgctgtgctttatcccgaggcatagcagtaatcgttactatcttgactctttccttcatcacaagagagtaaatatgaagtctgaatgtcgttcctcacccccaaattgtttaa

SEQ ID NO: 391575 - DNA, 120 bp, Artificial Sequence
  ENSG00000145012_109 (sequence is synthesized)
ctctgcttccaaactagtttaagaaatgcaaaatgggaagagctagcttttcttagatacatttcttccttttttattctttcttgggagacgttaagtataaaagggaaaaagtcagtt

SEQ ID NO: 391576 - DNA, 120 bp, Artificial Sequence
  ENSG00000145012_110 (sequence is synthesized)
ccttcttctctctctttctctttgggtgacagcaatgctcacttagtaattataaactggaaataggagagtagcttgagcaggttatgatatatctgcccaatgtgtttcattccttca

SEQ ID NO: 391577 - DNA, 120 bp, Artificial Sequence
  ENSG00000145012_111 (sequence is synthesized)
aacataaactttgagagtaaaagagatttttataatttaaatgccaacgacaggaatggcctcatgttttaactttcaaataataaatggggagttggtatttgggcagagtttgcattt

SEQ ID NO: 391578 - DNA, 120 bp, Artificial Sequence
  ENSG00000145012_112 (sequence is synthesized)
tactaatcctatatactttgagcttagtttttagaattgtgtcaaatacatcaacatatcaggattatagtgccaaaaatagttaaagtgccttggtcctccctctgtaggcagcaaatt

SEQ ID NO: 391579 - DNA, 120 bp, Artificial Sequence
  ENSG00000145012_113 (sequence is synthesized)
gaaactaacatgggaccatgccatccttctagcataatggagaagtctgaactgaggagtatctttgatgaaagacatttaggaccctagaaactaaatcttgtcaccaagactttatag

SEQ ID NO: 391580 - DNA, 120 bp, Artificial Sequence
  ENSG00000145012_114 (sequence is synthesized)
taaagtagtagcaaaattatttttaaaagactttcttccttttactacccatttcctctcttgggaaagctgatgagcaaattatccaagactcatttctttattaggcaaagtcagaat

SEQ ID NO: 391581 - DNA, 120 bp, Artificial Sequence
  ENSG00000145012_115 (sequence is synthesized)
atttcccctctgaaaatctgaattatgccctcattctttttcaagaaatatctcaaagagcaaatagaattaaacatgacacttgattgtctgattatttggcatgtataaaattatcat

SEQ ID NO: 391582 - DNA, 120 bp, Artificial Sequence
  ENSG00000145012_116 (sequence is synthesized)
gtggcttaatgtgccttaagtgaaaatttaaacttagacctgaaacctttacagttggatgtagcgttgagcttttgcatgttttctgtataataaaccacttttgttttgtttgttttg

SEQ ID NO: 391583 - DNA, 120 bp, Artificial Sequence
  ENSG00000145012_117 (sequence is synthesized)
tcttttaacctacacctttatcattactctaacagatttagggcttctctttctctacagctaagtaagggaatatgtgcaattatgagacatacaaaaaaggaaagggaaaggactttc

SEQ ID NO: 391584 - DNA, 120 bp, Artificial Sequence
  ENSG00000145012_118 (sequence is synthesized)
taagtagcaaatctgtgccatgaagtagatgtggcgtgaagatacagagcctgaggatagtaattttccctgagccacgcacacaggcttttatttcatgccttttctctttctgtgccg

SEQ ID NO: 391585 - DNA, 120 bp, Artificial Sequence
  ENSG00000145012_119 (sequence is synthesized)
tcacctttgagaaaaacgattgcaccttctccaagtctgcctttttaacagctacagttaagttggcaagacttccccagctctgaatatagccatttgccgactccggcctctttgcga

SEQ ID NO: 391586 - DNA, 120 bp, Artificial Sequence
  ENSG00000145012_120 (sequence is synthesized)
gactgactcaaatctgtgatcttctgttcagcatacacatcagcaaagtgagaagatgagcactaaatataggctctattaactttacttttagatttactgccttcaaaaagtgcctat

SEQ ID NO: 391587 - DNA, 120 bp, Artificial Sequence
  ENSG00000145012_121 (sequence is synthesized)
tctgagcaacataaacgttattccttacatatgtatgtacacacggtacccagagtcgtactgtgcagccttcaaaaacataccatcagaaagagtaggtgctgagataaggaaactttg

SEQ ID NO: 391588 - DNA, 120 bp, Artificial Sequence
  ENSG00000145012_122 (sequence is synthesized)
ccaaatgaaagaaagtcactcacttccaatatcccctctcaagcggctaccgtgaaacgggctgcaaacacattccctgagcatcccttgctgatacagcttctttatatttatatccta

SEQ ID NO: 391589 - DNA, 120 bp, Artificial Sequence
  ENSG00000145012_123 (sequence is synthesized)
ctggatggtagcatattgctaaggtttcctgtactctgcttcaagggaatgtaagctttatggcattgaaacatttagggaaaaaaaagatgtttaagagaattaatagagccgtagtct

SEQ ID NO: 391590 - DNA, 120 bp, Artificial Sequence
  ENSG00000145012_124 (sequence is synthesized)
gtattaggatgtgtgtcatatgtgtgttctataaactaagcatcggtgggtttagagtgttaaagtgtcagcacattccttctccttttgtctctcaggctaacatgagagaaaatagaa

SEQ ID NO: 391591 - DNA, 120 bp, Artificial Sequence
  ENSG00000145012_125 (sequence is synthesized)
aagtcttggctgtggggattggaagctcagggggccaaatgtccttgccagatccttagagcattactttgactcctaaaaatagtagtgtatgttatttgatggcttttgtttccatag

SEQ ID NO: 391592 - DNA, 120 bp, Artificial Sequence
  ENSG00000145012_126 (sequence is synthesized)
ttccatcactgacaaaactgtcaatactgttgatggagcagcagcatagcctagagtgatgcattcttacccagaggtggcaataggagagggtccatgtaaataggacgaggtagacag

SEQ ID NO: 391593 - DNA, 120 bp, Artificial Sequence
  ENSG00000145012_127 (sequence is synthesized)
tgcatgattgtaggagaagggttgaagggaggacatgattccaaaaaagatcgttctcaatgtgtcgtctgactcaaccagctggcagattacacttgccaagtcgttccctttccttct

SEQ ID NO: 391594 - DNA, 120 bp, Artificial Sequence
  ENSG00000145012_128 (sequence is synthesized)
aagtcagttggctccatattcacttgaatatgcctctgtttgggcaaagcaagatacctccacttaacctttatccaaggaagctcttggtgtcctcttggtcataaagttgtctcctac

SEQ ID NO: 391595 - DNA, 120 bp, Artificial Sequence
  ENSG00000145012_129 (sequence is synthesized)
ctaacccagttttaccaaatggaagtaaaaggggacaaactatggaagatggactccatgccattgcagtcagccaccattctcttttccatataaggagccccattacataagctacgg

SEQ ID NO: 391596 - DNA, 120 bp, Artificial Sequence
  ENSG00000145012_130 (sequence is synthesized)
gtgaggttggaacagctatgtttcataatttcaagagtgtgaccaccctgctctagtcatcatcattggatgaatccagttgactctttggcaaaagggtgatacttttcactaaaaatg

SEQ ID NO: 391597 - DNA, 120 bp, Artificial Sequence
  ENSG00000145012_131 (sequence is synthesized)
cctactcttcctgttgatgttccttttctgtttttaccttgtccaatttccacactagtcattttttttattttttagaggatcagattttagcgctggaaaatgagttcaaaaatttca

SEQ ID NO: 391598 - DNA, 120 bp, Artificial Sequence
  ENSG00000145012_132 (sequence is synthesized)
gtgtaatgtcataaggatgttgggatacagagattttttttttccttggaaacaaatggactgggaagaaacacagcatggctttgctctgagtttcaatctgatgattatgaccatgga

SEQ ID NO: 391599 - DNA, 120 bp, Artificial Sequence
  ENSG00000145012_133 (sequence is synthesized)
agatagtcttatgtaaaggttaaatggtgtttacaagtggatagataaggcggagatggtgagaagccgggttttctctatgctaaatgtgtctactaagagcagcacttcctactagct

SEQ ID NO: 391600 - DNA, 120 bp, Artificial Sequence
  ENSG00000145012_134 (sequence is synthesized)
aagcacaatcatagccccaccgtgatgagctgctagtctgaataacattccctgacttagggaaaggcacacaaaaacatataaagaatatgtctattttcatatgtgtgatactgacag

SEQ ID NO: 391601 - DNA, 120 bp, Artificial Sequence
  ENSG00000145012_135 (sequence is synthesized)
agccatggtattcctaaaatataggtttctcttttttcttgtattcttagcaaattgcatttattcactacattacaaaccatcactgatgtatccaaaatagcacacatagttcagtat

SEQ ID NO: 391602 - DNA, 120 bp, Artificial Sequence
  ENSG00000145012_136 (sequence is synthesized)
gaaaataagagaataaaatctgttataagcaagtgatttaggtattttcttttgtgtttatgcattatctgactatattaaaacctgtttttctatttaccttctatcagttttctctac

SEQ ID NO: 391603 - DNA, 120 bp, Artificial Sequence
  ENSG00000145012_137 (sequence is synthesized)
ctaccaattatgttttttcaatgctctataagaatgaatatggaaattatatttcttttttctgtaaaagagttgcaactactttattatatttagaaatccaataaacttcttattaca

SEQ ID NO: 391604 - DNA, 120 bp, Artificial Sequence
  ENSG00000145012_138 (sequence is synthesized)
aatttcagagccagaaagatccttaaaaaggcagtgtactccaacttcctctgaagcttgtgtcctacctacagaattcccaaccactctgcttgaatgtctccaaagaggaaaaaattt

SEQ ID NO: 391605 - DNA, 120 bp, Artificial Sequence
  ENSG00000145012_139 (sequence is synthesized)
ataatgccaagctgtgtttacagtccaaatttttgctgaagaccttcaactttgcactctccctgtgtggtatctcttgcccaagacagaacttcaaataaaatcacatagctgatgcaa

SEQ ID NO: 391606 - DNA, 120 bp, Artificial Sequence
  ENSG00000145012_140 (sequence is synthesized)
gttaatcctgatgcacagaactgggaataggccagatgccacattaatcaatttaagaatgctggagcttcgcagaatactgcatgaacaacgagaaccgtggccctgaaagactcaaaa

SEQ ID NO: 391607 - DNA, 120 bp, Artificial Sequence
  ENSG00000145012_141 (sequence is synthesized)
ccctacagtatatgaaactattgcaggatgtgtggatgttcaaaggaataacagacttggaagcaatgcttactgaattttgatgtattaaaggatgtcaagtccaagagagagataagg

SEQ ID NO: 391608 - DNA, 120 bp, Artificial Sequence
  ENSG00000145012_142 (sequence is synthesized)
ccgagtgagtcacttgtgtgaaaatgtcttgacacagatagaattgaggtgcccacactatatctgatcacagaaatgttaatgcagaatagcaaactggctttcatcttcatgggattg

SEQ ID NO: 391609 - DNA, 120 bp, Artificial Sequence
  ENSG00000145012_143 (sequence is synthesized)
caggctgggggataaaagggggtgcatttttaaaggtcatctctattgcttatgagaaaacaatgtatcacatcccatgcatctgtgagactgtatatcaagaatcagaaataaatacat

SEQ ID NO: 391610 - DNA, 120 bp, Artificial Sequence
  ENSG00000145012_144 (sequence is synthesized)
gaggaaggagggggaaaggcaccaaccagcagccgctccagccctgccgaagtttcactttttgtctgtgggttcgttcccgggtcccgcgcgagctttcccgggataagtagctttagc

SEQ ID NO: 391611 - DNA, 120 bp, Artificial Sequence
  ENSG00000145012_145 (sequence is synthesized)
aaactatcgcaaggacagaaaaccaaagaccgcatgttcttactcacagattccaacaatgtctcacccatcttggctgccacccaaaagcactggtgagcccctcggccatgtgcctgc

SEQ ID NO: 391612 - DNA, 120 bp, Artificial Sequence
  ENSG00000145012_146 (sequence is synthesized)
atttacacttgcaggctgttatgctttccagaaaactttttccgtaggttgcgaaagtgattaatctgctgttaaaactgacaaagaaggttctctgataagagaaagaattaaatgagg

SEQ ID NO: 391613 - DNA, 120 bp, Artificial Sequence
  ENSG00000145012_147 (sequence is synthesized)
atacttttgcttctggttctcctctggcagatcaagcaaatacaatccaagtgcgtgcagcccgttcccattcaaaatgtatccgtcataataacagcattctcgctgacgcattagact

SEQ ID NO: 391614 - DNA, 120 bp, Artificial Sequence
  ENSG00000145012_148 (sequence is synthesized)
tttgtagaaagtagttcagtggctgagaatctggcataatattttatttttatgaaatttcagtaaacattattgagcaacttgtaggtttcaggctccacgatagggatgcaagcatgt

SEQ ID NO: 391615 - DNA, 120 bp, Artificial Sequence
  ENSG00000145012_149 (sequence is synthesized)
agaatttgaagtcatttgtgcataaaagatgaatactggataaatcacagaaggcccctggcctcatgtagccatccttgtcttcggggattctcttgaagcaagagaatgagccccaac

SEQ ID NO: 391616 - DNA, 120 bp, Artificial Sequence
  ENSG00000145012_150 (sequence is synthesized)
attggggaaaaggaagttttatggggtttaattgctgctgatcatcgaggcaggattaccagcctagccatgctgcattcagcctggattttgttggagatattttacatgttcctgctc

SEQ ID NO: 391617 - DNA, 120 bp, Artificial Sequence
  ENSG00000145012_151 (sequence is synthesized)
aatgtctcagttctgttcccttcaggcttcgagaccaccgccttgctgtgtcccgtagtggactgagggcctgcaagagggagtgagggctagtggagggccagctgcctgtgggggctg

SEQ ID NO: 391618 - DNA, 120 bp, Artificial Sequence
  ENSG00000145012_152 (sequence is synthesized)
aggaattgaagagaatcctgacaagtggcatgttgggaaaggcctgaaggaagccagaccagcttgctctcagagctccttgggtcccctgcggcccccaggtgatcttcagcaagacct

SEQ ID NO: 391619 - DNA, 120 bp, Artificial Sequence
  ENSG00000145012_153 (sequence is synthesized)
gatgggtatttgctttcatttctaatgaaatttcaggcctctagggtaggatatcaaaattggtagatcatttgcaatttattttatcccaaacacctcactttacagtcagagaaactg

SEQ ID NO: 391620 - DNA, 120 bp, Artificial Sequence
  ENSG00000145012_154 (sequence is synthesized)
ccttagtaattggaactattatcagctccactggtaaagtatttgagtccagatgcatgagagttgatatacatccccgcacaactaagtaattgtaggatttgcatttgcaagactgcc

SEQ ID NO: 391621 - DNA, 120 bp, Artificial Sequence
  ENSG00000145012_155 (sequence is synthesized)
atagatgtgatgtctacttagcttatactaaaatttcagtggtccttagagtttccttagatacaaattttattgttgagacttattttttaccagtctaggcaacatggggagaccctg

SEQ ID NO: 391622 - DNA, 86 bp, Artificial Sequence
  ENSG00000145012_156 (sequence is synthesized)
attagctgagtgtggtggcatgtgcctgcagtcccagctactcagaaggctgaggctggagaatcaccgctcagtgagctgtggtt

SEQ ID NO: 391623 - DNA, 79 bp, Artificial Sequence
  ENSG00000145012_157 (sequence is synthesized)
ggacaacagagtgagacccaaaaagaagacattttttgacaacttattagcttcccattaggcagaaataggatttctg

SEQ ID NO: 391624 - DNA, 120 bp, Artificial Sequence
  ENSG00000145012_158 (sequence is synthesized)
caacttattagcttcccattaggcagaaataggatttctgtgtatgttcccatttctcactggtctaaagattcaagtaaaaaatgtggaattggatattgtctgatatccaatttccag

SEQ ID NO: 391625 - DNA, 120 bp, Artificial Sequence
  ENSG00000145012_159 (sequence is synthesized)
attgtactcttaatttttttttctatctcagttgaagaaatgatgttttctttgtagttttaattttcccctcttcaaacttgttaataactaggaatggttaatccttccaatccatga

SEQ ID NO: 391626 - DNA, 120 bp, Artificial Sequence
  ENSG00000145012_160 (sequence is synthesized)
atataatgcaaatttatgaattatatgccgattgtgaggttctgtggacgcataacctgtcctcagtgaggttaaaattgttcagaaagaggtaagacaagcatacaaataattactagt

SEQ ID NO: 391627 - DNA, 120 bp, Artificial Sequence
  ENSG00000145012_161 (sequence is synthesized)
gaaagaggtaagacaagcatacaaataattactagtctaggtagaaagtgataaaagacatgagaaggcttaggtcaattgttgcaaattttatttttattttattttattttatttatt

SEQ ID NO: 391628 - DNA, 120 bp, Artificial Sequence
  ENSG00000145012_162 (sequence is synthesized)
cgcccggccagaagttttaaaagctccatttattaggagcatccggaatactttggtaaagaattggtggcacttgaatctgagccctttaaaccagtgcctttcacattttctgtggta

SEQ ID NO: 391629 - DNA, 120 bp, Artificial Sequence
  ENSG00000145012_163 (sequence is synthesized)
gaagaccattttcctcccaatctgttggagaccagtatttttgttgagtcagttaaaattaattactagggaaataaaagacacaaaataaaatggaagatgaaattttatcattattag

SEQ ID NO: 391630 - DNA, 120 bp, Artificial Sequence
  ENSG00000145012_164 (sequence is synthesized)
tctcatccagggtgataagcatttcttagacacccatccatggaccactttttgagtggcactgctttaaggacaaatagagaaacgacatttggggaacagtattagtaaaggcacaaa

SEQ ID NO: 391631 - DNA, 120 bp, Artificial Sequence
  ENSG00000145012_165 (sequence is synthesized)
gatggggaaattgcacaggatttttgcttcttcaaatattttctattttcatgtcttttttgctcctatatgggaatatgtaatgacaggtcaactgaccacaccagtccaaaaacacac

SEQ ID NO: 391632 - DNA, 120 bp, Artificial Sequence
  ENSG00000145012_166 (sequence is synthesized)
agtagatgaagtaggaggtattaggatatgaaaaccctggcttttatttgtgttggggtggcagtttagcttagctaaaagagcaaaaagagtgggaatgaaacatctggttgtggtctc

SEQ ID NO: 391633 - DNA, 120 bp, Artificial Sequence
  ENSG00000145012_167 (sequence is synthesized)
ttctctgtccctcgctggccaagcaatactggcatgtcacccatctgcctgagccccatttcccacctcactatatcaacggttggggcaaatgttctctagcatttctttcaacagtaa

SEQ ID NO: 391634 - DNA, 120 bp, Artificial Sequence
  ENSG00000145012_168 (sequence is synthesized)
taagttcaatgtacaaacatccttaatctaaagtataacaataaagctaaacataaattgatggagattaacaacaatgcatggagaacagtaaaacaaaacatagaaaatccacgaagg

SEQ ID NO: 391635 - DNA, 120 bp, Artificial Sequence
  ENSG00000145012_169 (sequence is synthesized)
tttctagttacatcaaaatacacaaaaagtttattaatgctcttgtcattgccatgtgaggagggtttataatggggtctaaaatacattttttaaaagtgaaaaataaggtctctgtat

SEQ ID NO: 391636 - DNA, 120 bp, Artificial Sequence
  ENSG00000145012_170 (sequence is synthesized)
ttaggtcctattaaaaaggaaaagctgacttaccaagtatatatgcttcaaatatcatagcaacaaaatatattgccacaaaaaaaaaactgaacatagatgctaattgcatgaatgaat

SEQ ID NO: 391637 - DNA, 120 bp, Artificial Sequence
  ENSG00000145012_171 (sequence is synthesized)
atatattgaacactctgggaaacagatataaattattacctttcccttcaagaactgtccaagctctactacttagtagcttagaaaacttgaacaagtattattccctctaaaccttca

SEQ ID NO: 391638 - DNA, 120 bp, Artificial Sequence
  ENSG00000145012_172 (sequence is synthesized)
tttttgttttgttttatctgtaatatgggaataataactagcttatactgttgttttaagaaatggatgaaatatttatacaaagcacttagccaagttcttggcatgtagaatatgctc

SEQ ID NO: 391639 - DNA, 120 bp, Artificial Sequence
  ENSG00000145012_173 (sequence is synthesized)
aatacaatactcaaggttctcccatgctcttggggcttatagtttatttaagacataagatatgctcgttaaaaatccattaataatgctcaatttaagtttaagttcctagcaacaata

SEQ ID NO: 391640 - DNA, 120 bp, Artificial Sequence
  ENSG00000145012_174 (sequence is synthesized)
gaacgtatgtcactggtaagtaatcattgccaaatggggatgaataaccatttgagaatttggaaaaatggctaacttttattgagtgcttatgatatggcagcactatattttatttac

SEQ ID NO: 391641 - DNA, 120 bp, Artificial Sequence
  ENSG00000145012_175 (sequence is synthesized)
attataggaattaactcatttcactcttataggaaaacataaccctgtgaaatagatactattatcattttcagattttgaaattaaggcacagaaatattaatttgcctaatgtcaaca

SEQ ID NO: 391642 - DNA, 120 bp, Artificial Sequence
  ENSG00000145012_176 (sequence is synthesized)
gctaatacattgcagaactgaattagaatgcagatctgtacatttacacaccacactgtaaaagatggggaaagctagccaggctacatatttagaagagtgtttatggtggagattagc

SEQ ID NO: 391643 - DNA, 120 bp, Artificial Sequence
  ENSG00000145012_177 (sequence is synthesized)
tttggacagatgggaaataagagatgagcattctcttctaggtacacagaattaacaaaatataagttgaggccaggattatttaaagaaaatttacgttatgtagaaaacaaaaaaaaa

SEQ ID NO: 391644 - DNA, 120 bp, Artificial Sequence
  ENSG00000145012_178 (sequence is synthesized)
agtgcctatggtaatattcaggctgctctgctaggtggtggtgggggtagatgtgggtcttacctttgaagttcttatagtctaataggatatgtgtacagagttatggtgttataagca

SEQ ID NO: 391645 - DNA, 120 bp, Artificial Sequence
  ENSG00000145012_179 (sequence is synthesized)
caaggcagaaagtgacaagtgacttaatcaatgttcaccaagtgttctttgagaattcagaaaaaggaaagagaaaatcaagagagagaaatggaaaagtatttatggaatacttagcct

SEQ ID NO: 391646 - DNA, 120 bp, Artificial Sequence
  ENSG00000145012_180 (sequence is synthesized)
ttgagtaagtctttaaaattgtgctaattgagatttggaagtaggaagatagtagagaagtgaagtcatttctcatgaggggagtttttgacataacagggaataaaaccactggagtga

SEQ ID NO: 391647 - DNA, 120 bp, Artificial Sequence
  ENSG00000145012_181 (sequence is synthesized)
agtgtccacgtgagaagtagcaaatattgggaaataaggttcaagtagtaggttaggaccaatctagggaaggctgtcaatgtccggctaaaggctaagaacgttattgtctataatgag

SEQ ID NO: 391648 - DNA, 120 bp, Artificial Sequence
  ENSG00000145012_182 (sequence is synthesized)
cccttgcacattgagatcacatgccatgagaactgctctgtggatagtggttaaaaacatgcactccagagccaggatgcacttcttaccagcaagatgaaatcaagaggcaaaggacta

SEQ ID NO: 391649 - DNA, 120 bp, Artificial Sequence
  ENSG00000145012_183 (sequence is synthesized)
gtgaaaagaactgtcctttattgttccgtgctttaaacatttctcaagcaccttctctgtgcctgctactgtgctgggtgttcaggacacccaaatgcagaggctctgccctcatggggc

SEQ ID NO: 391650 - DNA, 120 bp, Artificial Sequence
  ENSG00000145012_184 (sequence is synthesized)
tcacgggttcctaggaaggacaagagagtcacagatgtcaaggattttagtgcagatattagcactgtgttgggtgtgactgagctgctatgtgagagtccataagtctgcctgaggatg

SEQ ID NO: 391651 - DNA, 120 bp, Artificial Sequence
  ENSG00000145012_185 (sequence is synthesized)
agcggaaagaatacatagcagtgtgtttgcatcagcagggcctgacccaagagcgataaagtcttctcttcctttctgtcagagttttacctttggcctattctggactgcaaatagcat

SEQ ID NO: 391652 - DNA, 120 bp, Artificial Sequence
  ENSG00000145012_186 (sequence is synthesized)
tgccaagcacttcccttaaataacttctcttttttgcaggactatcctctcagccctgccaaaaccccatcacctactctttctttactactttgcctatttaatgctggaatttttatt

SEQ ID NO: 391653 - DNA, 120 bp, Artificial Sequence
  ENSG00000145012_187 (sequence is synthesized)
taaactgtagctgatttactgaaggtaattaagtgctttcatgctgtagatctcctgctagactacaggctgtacttgggagtgagagtgaacaaaatgtaaataaatgatgtcaacaga

SEQ ID NO: 391654 - DNA, 80 bp, Artificial Sequence
  ENSG00000145014_0 (sequence is synthesized)
cggaacggaacccagagaagggcacgcggggcggcggcgctcggggcttgcccgcggcgagggaggctgcgcccaggtcc

SEQ ID NO: 391655 - DNA, 120 bp, Artificial Sequence
  ENSG00000145014_1 (sequence is synthesized)
cgcccagccccgcgcccgcgctctgggactgggactacctggaccgctgcttcgcccgccaccgcgtctgcatctccttcggcctgtggatctgcgcctcctcctgctggatcgccgccc

SEQ ID NO: 391656 - DNA, 120 bp, Artificial Sequence
  ENSG00000145014_2 (sequence is synthesized)
acgcgctgcttctctatctgagatgtgcacagaaacccagacaggaccagtcggcactgtgtgctgcgtgctgcctcctgaccagtctgtgtgacaccgtcggggctcttctggccagac

SEQ ID NO: 391657 - DNA, 120 bp, Artificial Sequence
  ENSG00000145014_3 (sequence is synthesized)
agctcacaatccaggttttcactggtgcctacctagcagctattgacttagtgaactttatgttcattctcttcccagtctgtggatccaaattcaagtctaattcagatcgggaagccc

SEQ ID NO: 391658 - DNA, 120 bp, Artificial Sequence
  ENSG00000145014_4 (sequence is synthesized)
gagagaggaagaggaggcggcagctcagggccagtgtgtttgccctggccctgccgctgagcctgggcccgtgctgggctctgtgggttgctgtcccgaaggcttcagccaccatccggg

SEQ ID NO: 391659 - DNA, 120 bp, Artificial Sequence
  ENSG00000145014_5 (sequence is synthesized)
ggccacagcggaggctgctagcgagcctgctgcaggaaaatactgagatcctcggctacctgctgggtagcgttgctgcctttggctcctgggcttctcggatcccccctctctccagaa

SEQ ID NO: 391660 - DNA, 120 bp, Artificial Sequence
  ENSG00000145014_6 (sequence is synthesized)
ctctatgcctcggccattgtggcccacgaccagcaccctgagtacctgctgcgggccacaccctggttcctgacctccctcggccgtgcggcactggacctcgctattattttcctttcg

SEQ ID NO: 391661 - DNA, 120 bp, Artificial Sequence
  ENSG00000145014_7 (sequence is synthesized)
tgtgtgatgaagagcaagatgagacaggccttaggatttgccaaggaagccagagagagccctgacacccaagcccttttgacctgtgcagagaaagaggaagaaaaccaggagaatttg

SEQ ID NO: 391662 - DNA, 120 bp, Artificial Sequence
  ENSG00000145014_8 (sequence is synthesized)
gattgggtgcctctcaccacactgtcacactgcaagtcactgaggacaatgacagcaatcagtcgctacatggagctgaccatcgagcctgtgcagcaggcaggctgcagtgccaccagg

SEQ ID NO: 391663 - DNA, 120 bp, Artificial Sequence
  ENSG00000145014_9 (sequence is synthesized)
ctgccaggtgacgggcagacgagcgccggagatgcgtccctgcaggaccccccgtcgtaccctcccgttcaggtcatccgggcccgggtgtcttccggcagctcctctgaggtctcctcc

SEQ ID NO: 391664 - DNA, 120 bp, Artificial Sequence
  ENSG00000145014_10 (sequence is synthesized)
atcaactccgacctggagaagtattgggaggccctaaactcggagcagtgggaccctgaagatgtgaacctcgaaggcagcaaagaaaatgtggagctactgggatcccaggtgcaccag

SEQ ID NO: 391665 - DNA, 120 bp, Artificial Sequence
  ENSG00000145014_11 (sequence is synthesized)
gactctgtgaggacagcacacctgagtgatgatgattaacaccttctggagccagctcatcagctcagagcccagggtcaggagttcgttcagtaacgcagcgggaatcaatctgcactg

SEQ ID NO: 391666 - DNA, 120 bp, Artificial Sequence
  ENSG00000145014_12 (sequence is synthesized)
ctaattgctgttggctcaggaaatgtggacaatacgcaggaagggacgccgtgccttacagcgaccggcagggactcggccgtccgcgagcccagccgcccgccccgctccggccaggat

SEQ ID NO: 391667 - DNA, 120 bp, Artificial Sequence
  ENSG00000145014_13 (sequence is synthesized)
tggggcggaggtgtggcgtcaccgtgggtgcatggacatgggctcagcttttcctgaagagcgttagtgtgtatgacagcaaggagggggtgtgtgtggagagtgggcagccaacccagg

SEQ ID NO: 391668 - DNA, 120 bp, Artificial Sequence
  ENSG00000145014_14 (sequence is synthesized)
gcgtcctgaggacggcgggagcctctcggggaaagcccgtgtgttcttccccatttcctatagcaaatgaaaagcaggctctgaggaagaagcccctgaggctgaacccataagagaagg

SEQ ID NO: 391669 - DNA, 120 bp, Artificial Sequence
  ENSG00000145014_15 (sequence is synthesized)
agagaaggagatttgacaccggacaggcagccaggtgtgaggttctgtgtagatcaagagtgtcttaggccgggcgcgggggctcacgcctggaatcccagcactttgcgaggccgaggc

SEQ ID NO: 391670 - DNA, 120 bp, Artificial Sequence
  ENSG00000145014_16 (sequence is synthesized)
gccgtcactgagtgtggctgggctacatcatagctcatcacggagctacgactttgggtactgcggacagacctggataggcccagcattcgttctgaagatcacagttcacagaagctt

SEQ ID NO: 391671 - DNA, 120 bp, Artificial Sequence
  ENSG00000145014_17 (sequence is synthesized)
ttgcttcgtaaagataatccaaaggatctcagacccgctcttccttttcccttcattcccttgagagtcagccatgaacggaatacctgctaggttccaggaatgagctcacctaacaga

SEQ ID NO: 391672 - DNA, 120 bp, Artificial Sequence
  ENSG00000145014_18 (sequence is synthesized)
tagcaaatgtgtctggttagatctcagcagagcccattctgcaagacctggctgagccagatgagagggtgggccctgtgctggggggccttgggtcacacacaggaaccgagacctggc

SEQ ID NO: 391673 - DNA, 120 bp, Artificial Sequence
  ENSG00000145014_19 (sequence is synthesized)
ttccaccccccagtcacccacttgggttatctgctggaagttatcgataggactgtgtggccaaccaagtgcttgtgagatcactgacactgcaaaaacaaagcaaactgctccgggtac

SEQ ID NO: 391674 - DNA, 120 bp, Artificial Sequence
  ENSG00000145014_20 (sequence is synthesized)
caggacttcctccaacctggcaagggtgtgcgctgaggcggggcttgcaggtgagggggctgtatgcttcaggaactaactaaatgcatgcagaaggtaagaggcatgatgggaggtgtt

SEQ ID NO: 391675 - DNA, 120 bp, Artificial Sequence
  ENSG00000145014_21 (sequence is synthesized)
caagcacagcaatcccatttgggagttattttgatactgcgatgagtaagggtaagggcgcatggaatggggctaaggtgggagtgaacactggggtgaataaattttaaatcaattcaa

SEQ ID NO: 391676 - DNA, 120 bp, Artificial Sequence
  ENSG00000145014_22 (sequence is synthesized)
ttacgactcaacatgagatctggcggggacaaatgtccaaaccatcccagtctccctcacgttctcccagcggacattggcgagccgctgcccagcgtcaggtgctgggcactgagatgt

SEQ ID NO: 391677 - DNA, 120 bp, Artificial Sequence
  ENSG00000145014_23 (sequence is synthesized)
cactgagatggtgaggacccctgcccagccctcaggagctctctgactgtgtaaagagctgagtcatgatcaatcaaaggtactccgctggagggatgcgttagggcccagaaaagggag

SEQ ID NO: 391678 - DNA, 120 bp, Artificial Sequence
  ENSG00000145014_24 (sequence is synthesized)
ttgcttgctcgccttagggtggagttggtaaggggaggtttcccagagttaagttgaagccaggttctgagggatgagtaggagtttgacaggcagaagaagcaactcgagcaaaagctg

SEQ ID NO: 391679 - DNA, 120 bp, Artificial Sequence
  ENSG00000145014_25 (sequence is synthesized)
taagtctaacagaagcattgccctggaggactggctgcaggcagagggcttgccccgcaacctgctgtgccactgagggccctgggtcttgtgatctgctgcttctcccgcccagcccct

SEQ ID NO: 391680 - DNA, 120 bp, Artificial Sequence
  ENSG00000145014_26 (sequence is synthesized)
cttgtgcctcagaatcatcatagacgcttggaaatgggagagatcttcttatctcgttgctgatccaataccacagcatacacatggggaaactgaggccccaaaaacgaaggcaaatta

SEQ ID NO: 391681 - DNA, 120 bp, Artificial Sequence
  ENSG00000145014_27 (sequence is synthesized)
agagacggggtataagctttataggaattctgcaaggaggctgtttctgtcattggaacaaagtctgcatagtgaagaacgcctgtgcctggagccagtgcagtcctgtgtgggtgtgcg

SEQ ID NO: 391682 - DNA, 120 bp, Artificial Sequence
  ENSG00000145014_28 (sequence is synthesized)
tgtgcatgtgggtgtgtgcacgcatgcccatgtgtgggtgtacctgtgtgggccatgagaacagtgctaaatgccagattgctctgtctgaagagggccaagtcccaggcccgtgtgttc

SEQ ID NO: 391683 - DNA, 120 bp, Artificial Sequence
  ENSG00000145014_29 (sequence is synthesized)
ctattaattctgtgcctaaggctcttgataacccaactgcttgttctctctccaaactttctggcaccagcagataagggcatattcccctggatgtctgccctttttaaagccaaatca

SEQ ID NO: 391684 - DNA, 88 bp, Artificial Sequence
  ENSG00000145014_30 (sequence is synthesized)
agtggagctgcaggagctgctagtggctcctggtgtcccttgatgcatggcagtgtcgtttacatttctgccttgcccttcatgtggc

SEQ ID NO: 391685 - DNA, 120 bp, Artificial Sequence
  ENSG00000145014_31 (sequence is synthesized)
tcctctgagtgggaccctgaagatgtgaacctcgaaggcagcaaagaaaatgtggagctactgggatcccaggtgcaccaggactctgtgaggacagcacacctgagtgatgatgattaa

SEQ ID NO: 391686 - DNA, 120 bp, Artificial Sequence
  ENSG00000145016_0 (sequence is synthesized)
ccgctgtcgccgcccgggtgtagcgcatcacccggagcccaccggccgcaggtgcctcctccggccccagggggccccgggagccctgaagggcgaagcggcagggacgcctctcttggg

SEQ ID NO: 391687 - DNA, 120 bp, Artificial Sequence
  ENSG00000145016_1 (sequence is synthesized)
gagccctgaagggcgaagcggcagggacgcctctcttgggcgaagaggcggcctcaccgccccggatgcggccggagggcgcgggaatggagctcggaggcggcgaggagcgcctgcctg

SEQ ID NO: 391688 - DNA, 120 bp, Artificial Sequence
  ENSG00000145016_2 (sequence is synthesized)
aggagagcaggagggagcactggcagttgctgggtaatttgaagacgacggtggagggtttggtatcaaccaacagccccaacgtctggtctaagtatggtggcttggagcggctttgca

SEQ ID NO: 391689 - DNA, 120 bp, Artificial Sequence
  ENSG00000145016_3 (sequence is synthesized)
gggacatgcagagcatcctctatcacgggcttatccgtgaccaggcgtgccgccgccagacggattactggcagttcgtgaaagacatccggtggctcagtccccactcagcccttcacg

SEQ ID NO: 391690 - DNA, 120 bp, Artificial Sequence
  ENSG00000145016_4 (sequence is synthesized)
tggagaagttcatcagcgtgcacgagaacgaccagagcagtgctgatggtgccagtgaacgtgctgttgccgagctgtggctgcagcacagcctgcagtaccactgcctctcagcccagc

SEQ ID NO: 391691 - DNA, 120 bp, Artificial Sequence
  ENSG00000145016_5 (sequence is synthesized)
tccggcccctgctcggggatagacagtatatcagaaaattctacacagatgctgccttcctgctaagtgacgctcatgtcacggccatgctgcagtgcctggaagcagtggaacagaaca

SEQ ID NO: 391692 - DNA, 120 bp, Artificial Sequence
  ENSG00000145016_6 (sequence is synthesized)
acccccgcctcctggctcagatcgatgcgtccatgtttgccagaaagcacgagagcccgctcctggtgacaaagagccagagcctgacagccctgcccagttccacatacacccctccaa

SEQ ID NO: 391693 - DNA, 120 bp, Artificial Sequence
  ENSG00000145016_7 (sequence is synthesized)
acagctatgctcagcattcctactttgggtccttctctagcctccaccaatccgtgcccaacaatggctcagagagaagatctacttcctttccactctctggccctccccggaaacctc

SEQ ID NO: 391694 - DNA, 120 bp, Artificial Sequence
  ENSG00000145016_8 (sequence is synthesized)
aagaaagcagagggcacgtctcaccagcagaggatcaaaccatccaagcccccccagtttcagtctctgcactagccagggattcccctttgaccccaaatgaaatgagctccagtactc

SEQ ID NO: 391695 - DNA, 120 bp, Artificial Sequence
  ENSG00000145016_9 (sequence is synthesized)
tgaccagccccatagaggcatcctgggtcagcagccagaatgattccccaggtgatgccagtgaggggcctgagtacctggccattggcaacttggacccccgaggccggactgccagct

SEQ ID NO: 391696 - DNA, 120 bp, Artificial Sequence
  ENSG00000145016_10 (sequence is synthesized)
gtcagagtcacagcagcaatgccgagagcagcagttccaatttgttctcctccagcagctcccagaagccagattctgctgcctcttccttaggggaccaggaaggaggtggggagagcc

SEQ ID NO: 391697 - DNA, 120 bp, Artificial Sequence
  ENSG00000145016_11 (sequence is synthesized)
agctgtccagtgtcctccgcaggtccagcttctcagaggggcagacactcactgtcaccagtggggcaaagaaaagccacattcgctcccattcggataccagcattgcctccaggggag

SEQ ID NO: 391698 - DNA, 120 bp, Artificial Sequence
  ENSG00000145016_12 (sequence is synthesized)
ctccagaatcctgcaatgataaggcgaagttgagaggccctttgccctactctggtcaaagcagtgaagtcagcacacccagctctctgtacatggaatatgaaggtggtcggtacctgt

SEQ ID NO: 391699 - DNA, 120 bp, Artificial Sequence
  ENSG00000145016_13 (sequence is synthesized)
gctcaggggaaggcatgttccgaagaccatcagaaggacagtccctcatcagctacctctctgagcaagacttcggcagctgtgccgacctggaaaaggagaatgcccacttcagcatct

SEQ ID NO: 391700 - DNA, 120 bp, Artificial Sequence
  ENSG00000145016_14 (sequence is synthesized)
cagagtccttaattgctgccatcgagctaatgaagtgcaacatgatgagccagtgcctagaggaggaggaagtggaagaggaagacagtgatagagagatccaggagctgaagcagaaga

SEQ ID NO: 391701 - DNA, 120 bp, Artificial Sequence
  ENSG00000145016_15 (sequence is synthesized)
tccgccttcggcgccagcaaatccgcaccaagaacctgctccccatgtaccaggaggctgagcacggaagctttcgggtcacctccagcagctcccagttcagctcacgtgattcggcac

SEQ ID NO: 391702 - DNA, 120 bp, Artificial Sequence
  ENSG00000145016_16 (sequence is synthesized)
agctctctgactctggctctgctgatgaggttgatgaatttgaaatccaagatgctgacatcagaaggaacacagcctcaagcagcaaatccttcgtttcctcccagtccttctcccact

SEQ ID NO: 391703 - DNA, 120 bp, Artificial Sequence
  ENSG00000145016_17 (sequence is synthesized)
gcttcctgcactccacgtctgctgaggcggtggccatggggctcctgaagcagtttgaggggatgcagcttccagccgcctcggagctggagtggcttgtcccggagcatgatgcccctc

SEQ ID NO: 391704 - DNA, 120 bp, Artificial Sequence
  ENSG00000145016_18 (sequence is synthesized)
agaagctcctgcccattcctgactcactgcccatctcaccggatgacgggcagcacgctgacatctacaagctgcggattcgtgttcgtggcaacttggagtgggccccgccccggcctc

SEQ ID NO: 391705 - DNA, 120 bp, Artificial Sequence
  ENSG00000145016_19 (sequence is synthesized)
agataatttttaatgttcatccagccccaacgaggaaaattgccgtggccaagcagaattaccgctgtgcaggatgtggcatccggactgaccctgattacatcaagcgactgcggtact

SEQ ID NO: 391706 - DNA, 120 bp, Artificial Sequence
  ENSG00000145016_20 (sequence is synthesized)
gtgagtacctgggcaagtacttctgccagtgctgccacgagaatgcccagatggccatccccagccgggttctgcgcaagtgggacttcagcaagtactacgtcagcaacttctccaagg

SEQ ID NO: 391707 - DNA, 120 bp, Artificial Sequence
  ENSG00000145016_21 (sequence is synthesized)
acctgctcattaagatctggaatgatcctctcttcaacgtgcaggacataaacagtgccctctataggaaggtcaagctgctcaatcaagtccggctgctgcgggtccagctgtgtcaca

SEQ ID NO: 391708 - DNA, 120 bp, Artificial Sequence
  ENSG00000145016_22 (sequence is synthesized)
tgaagaacatgttcaagacttgccgactggccaaggagcttctggattcctttgacacagtcccaggccacctgacagaggacctccacctgtactcactgaatgacctgactgcgacca

SEQ ID NO: 391709 - DNA, 120 bp, Artificial Sequence
  ENSG00000145016_23 (sequence is synthesized)
ggaagggggagctggggccccggcttgctgagctcaccagggcaggggctacccatgtggagagatgcatgctctgccaagccaaaggcttcatctgtgagttctgtcagaatgaggatg

SEQ ID NO: 391710 - DNA, 120 bp, Artificial Sequence
  ENSG00000145016_24 (sequence is synthesized)
acatcatctttccctttgagctccataagtgccggacctgtgaagagtgtaaagcgtgttaccataaagcctgcttcaagtctggaagctgtccgcgctgcgagcggctgcaggcccggc

SEQ ID NO: 391711 - DNA, 120 bp, Artificial Sequence
  ENSG00000145016_25 (sequence is synthesized)
gggaggcactggccaggcagagcctggagtcttacctgtcagactacgaggaggagcccgcggaagcgctggccctggaagccgccgtcctggaggccacctgaagaaagcacgtgcagc

SEQ ID NO: 391712 - DNA, 120 bp, Artificial Sequence
  ENSG00000145016_26 (sequence is synthesized)
cctccctccgggccgggtcacacctgttgcagaactgagccactctttgaaggactcgccccacctggggcttctttttttttttttttttttaattatcatcatctttttttttttttt

SEQ ID NO: 391713 - DNA, 120 bp, Artificial Sequence
  ENSG00000145016_27 (sequence is synthesized)
tactgacttgtctgacgtctgtgtgcagtcagccgtcggcaggttgatgggtccagagtctgtggtgacagataatttgtaaacaccaggtgtttccatcagaactgacatgcgggtcct

SEQ ID NO: 391714 - DNA, 120 bp, Artificial Sequence
  ENSG00000145016_28 (sequence is synthesized)
tcagtgaagcttctagtgcctctgtcagtggaagagacagcaagaccaagttcttccagcgtctgtggccttctcctctaggtttcacctgcatgtcaggtatcatttccaattttcctt

SEQ ID NO: 391715 - DNA, 120 bp, Artificial Sequence
  ENSG00000145016_29 (sequence is synthesized)
tgtttcagttctggagcttctgagccaggcctttctcaaccacctctcctgctgctgaaacggggatggcgttttccctctccctgtcctggactggggtcagactgtgccccgaggaga

SEQ ID NO: 391716 - DNA, 120 bp, Artificial Sequence
  ENSG00000145016_30 (sequence is synthesized)
agcagcagagaataggactacgtcatgggcatttcgtccacttatttgggtattttgggggccacagaacaatcctgactatcctagactcctcagagacctcagaggcagctgtgaatg

SEQ ID NO: 391717 - DNA, 120 bp, Artificial Sequence
  ENSG00000145016_31 (sequence is synthesized)
tccctatgttgccgggagttcctgtttgaaatatttgaagcatagaggatgccacaagctgactttcttcatctaccttggtgatcttgaagcaaagaacagaactgatgctcaggccag

SEQ ID NO: 391718 - DNA, 120 bp, Artificial Sequence
  ENSG00000145016_32 (sequence is synthesized)
gctcacctgtagccttacgccgcaagcatacgtgaggcgccagctctgtcgctgaaggagcgcttactcagaggagcggtcggccccctcttggtgttaaggtctcttagttaacctggc

SEQ ID NO: 391719 - DNA, 120 bp, Artificial Sequence
  ENSG00000145016_33 (sequence is synthesized)
tttttggtgcaggtgtgatctttgaagctcaggcaggtccctgatgccatcctaaggtgaggacaggaacctcacccaccatcttcttagcgtgtccctgatgactctgtcctctgttag

SEQ ID NO: 391720 - DNA, 120 bp, Artificial Sequence
  ENSG00000145016_34 (sequence is synthesized)
atggtcgttgtgcttctgagtaaaagtacaacccgactccgttctctccccttcctgcagcagagctgggtccttccctggtggccgagtctctcttgccttagcttctttggtcaaagt

SEQ ID NO: 391721 - DNA, 120 bp, Artificial Sequence
  ENSG00000145016_35 (sequence is synthesized)
tggagaaaagcttcctgctattagtgctgttacagaacttgacggtttgtggatgtgagtgtgaatgtccctgtgttcttgggataacaagagcctttatgccaattatgcacttaactc

SEQ ID NO: 391722 - DNA, 120 bp, Artificial Sequence
  ENSG00000145016_36 (sequence is synthesized)
tgtgtagcctggtaatgtttatctgttcatttgataatgctgattttagtgtgctgcccccctccccccgttaatgtgtgttgatggtgaagtccttttgataatgctgattttggtgtg

SEQ ID NO: 391723 - DNA, 120 bp, Artificial Sequence
  ENSG00000145016_37 (sequence is synthesized)
ctgcctcccccttcccccccgttaatgtgtgtgttgacagtgaagtccttgggtggggccatgtgtgtgtttgtgatgttccttaagttgatgcagcttctaacctctgtgaaaacactg

SEQ ID NO: 391724 - DNA, 120 bp, Artificial Sequence
  ENSG00000145016_38 (sequence is synthesized)
ccaagagctggcagctctgtgaactaaagcctgcatcatttttgttctgggattgaattctgcccatgggcatgtcttctcatagttgcttgctggtaggaaagaaatgggcgtgggtgc

SEQ ID NO: 391725 - DNA, 120 bp, Artificial Sequence
  ENSG00000145016_39 (sequence is synthesized)
tgccctggaagctgagcggaaagttgcctgtggttggtggaagctgatgagagcttgagctggcggtaagaaggagtctcccagggaagtgggagaggcattaaggtgatggccagggct

SEQ ID NO: 391726 - DNA, 120 bp, Artificial Sequence
  ENSG00000145016_40 (sequence is synthesized)
gaggctccaccagcgtgagagggaacatgtgggaactggcccctgcccttgattcctctgcctcaaagttgggatctgaaagccatgtagggctagaagaccctgaggctgttctccctt

SEQ ID NO: 391727 - DNA, 120 bp, Artificial Sequence
  ENSG00000145016_41 (sequence is synthesized)
ctgttcatagtgagactcaaaaagccaagtcccagaagttctgaagggctgtgactagaagtgcccaggtccttcagggagctttaagaatgaccccacagaactcaagtttaactaggg

SEQ ID NO: 391728 - DNA, 120 bp, Artificial Sequence
  ENSG00000145016_42 (sequence is synthesized)
gaactcaagtttaactaggggttaggtcccagattcagacccaggagtttataaaaatgagctctacttccagttttggtttaaattacacatccaggccaggcacagtggctcacacct

SEQ ID NO: 391729 - DNA, 120 bp, Artificial Sequence
  ENSG00000145016_43 (sequence is synthesized)
aacaaaaaggtgacacatccagctctttctccaggtcactgcgctggaggacagatgtgccgtcttgtcctgcctgtttcacatcagcataggatcaaaggatgacaatgctgacagctt

SEQ ID NO: 391730 - DNA, 120 bp, Artificial Sequence
  ENSG00000145016_44 (sequence is synthesized)
ctgaagccgaactcaacagtctcataggctcctcacttgtcacttatttttccctagctccctcaaccgcaccccatccctttagatcgtgcgtctgttttagtgactctgacacgatgc

SEQ ID NO: 391731 - DNA, 120 bp, Artificial Sequence
  ENSG00000145016_45 (sequence is synthesized)
cgtcctcaccttccaaatacccagttatttattcaagaggggggaagtgggtagaggatgggatgttttggaagcactttgcaagttaccactatctgaaaatcccctgctgttgcgggg

SEQ ID NO: 391732 - DNA, 120 bp, Artificial Sequence
  ENSG00000145016_46 (sequence is synthesized)
agaagctttgaatgcactgaagagaattccttctaaatgaaggcaggtgatagtgttctttctgtaagtaaagggaaagaaaaaaaacatagtttgcttaccaggtggagacaagattca

SEQ ID NO: 391733 - DNA, 120 bp, Artificial Sequence
  ENSG00000145016_47 (sequence is synthesized)
agacatagcagaagagtggaagacaaatattttccacttaaatgaggctgtttttgacgttctctgccaaggatttagagctttcgttgaactaacataaaaggagtgcgagtcttagta

SEQ ID NO: 391734 - DNA, 120 bp, Artificial Sequence
  ENSG00000145016_48 (sequence is synthesized)
gagatgttccgtgtgtgccgcccgtgctctgaactgcgtttccacctgctgtggtgcttgtgcagcctggcagttcattgtcatctttaataaactaaggaaataaaattctgtctttcg

SEQ ID NO: 391735 - DNA, 120 bp, Artificial Sequence
  ENSG00000145016_49 (sequence is synthesized)
tcagcctgccttgactgtcaagaaatggcatgtgtccactgtaaagcaggtatatctgaacattgagaaggtttctgtgttataatgtaaagcaaactggaccacacacatcaaggaaag

SEQ ID NO: 391736 - DNA, 120 bp, Artificial Sequence
  ENSG00000145016_50 (sequence is synthesized)
tgaggtggagtggctgtgtctctaacttgccatgagacctcgagcgaaccacttcacttctctgggtttctggtgcatggtgtaactgtcacttaaaatgaggtgtcttcctctccgcaa

SEQ ID NO: 391737 - DNA, 120 bp, Artificial Sequence
  ENSG00000145016_51 (sequence is synthesized)
catctgacttgccttagatgcttcagttcccacttctgtgagcagctagcatctttctcttctgctcctggcccactggagctccagctctacgctgcaactctctcaacatttcccctt

SEQ ID NO: 391738 - DNA, 120 bp, Artificial Sequence
  ENSG00000145016_52 (sequence is synthesized)
aaatgtccccttgtcatctccaaccagtgtgtctaaaaccagcataaattccgtatttccaaaaacctaaccattagtcacccaggtttgaaaattaattgtcttcaacttcctctgtaa

SEQ ID NO: 391739 - DNA, 120 bp, Artificial Sequence
  ENSG00000145016_53 (sequence is synthesized)
gtggcacactgagctcatcacgcatcgtctcattcctactccctgtcatcaagttctgtggatgttttcctctaaaataaatctctcattacttttctgccactagcacacaaattcagg

SEQ ID NO: 391740 - DNA, 120 bp, Artificial Sequence
  ENSG00000145016_54 (sequence is synthesized)
tgttcttgatcatacattattttcctccctgcgcctcagtggaacaatgattagaagcaccttgtgggatgaggagccgggcgcggtggctcacgagtgtcatccagtactttgagagac

SEQ ID NO: 391741 - DNA, 76 bp, Artificial Sequence
  ENSG00000145016_55 (sequence is synthesized)
gcgcggtggctcacgagtgtcatccagtactttgagagaccaaggcagggacaaaacctcatctctacaaaaatat

SEQ ID NO: 391742 - DNA, 120 bp, Artificial Sequence
  ENSG00000145016_56 (sequence is synthesized)
gctactcgggaggctgaatcatgagaatcacttgaacctggaaggcgagggctgcagtgagccaagcttgctccattgcactccatcctggatgaagagcgagaccctgtctcaaaaaaa

SEQ ID NO: 391743 - DNA, 120 bp, Artificial Sequence
  ENSG00000145016_57 (sequence is synthesized)
caaaacaaaacaaaaaaagcaccagcacactgtggcatgaggggcgggattgtgaccacctctacctcccctcttagtgctcaccaagtctctgcagtagtgagcgtgtcctcatctcct

SEQ ID NO: 391744 - DNA, 120 bp, Artificial Sequence
  ENSG00000145016_58 (sequence is synthesized)
gtcttctccctcagctactttgtctgcaactgctcctgttgtgtttgtccagcagtcatcatcagaggacacacatcccaaatgtccttcagtcactttattattaaactgccagctctt

SEQ ID NO: 391745 - DNA, 120 bp, Artificial Sequence
  ENSG00000145016_59 (sequence is synthesized)
tccttgccagggactaaaccaggagataagatgatatttatatgctgtaaacacaccctacatatttaaaaatcttcatatttacaaattaaactgagaggagaatgaaaaagccatgtg

SEQ ID NO: 391746 - DNA, 120 bp, Artificial Sequence
  ENSG00000145016_60 (sequence is synthesized)
aaagactgctgaagttgataaaatgttcaaatgtttttcaactagagataggaaaatagcttacagtacaaaaccttcactttgttctaaggcccttttgttcattgttacaaactggtg

SEQ ID NO: 391747 - DNA, 120 bp, Artificial Sequence
  ENSG00000145016_61 (sequence is synthesized)
tagttcacaggaagccaaagcttgatttccagtaagttcccaaacttctgttctcaacatttaacttagattttagatgatcatattccaaaattggaaagactgttgaagaggaaaaca

SEQ ID NO: 391748 - DNA, 120 bp, Artificial Sequence
  ENSG00000145016_62 (sequence is synthesized)
aggaccattgattcacaatggcagcccagcatttatttattcattcaatcatccgtcaatcccaaacatctatagatgcctccgtgttccagacaccatgccagagctgagagtacaaag

SEQ ID NO: 391749 - DNA, 120 bp, Artificial Sequence
  ENSG00000145016_63 (sequence is synthesized)
aatcacagaatattgtttaaagatgtttactgcagcataatttatgaaagtaaaaagttaatggaaaataaaaaaattgatgcaaccatcaaaatgacagttataaaaattatgatagtg

SEQ ID NO: 391750 - DNA, 120 bp, Artificial Sequence
  ENSG00000145016_64 (sequence is synthesized)
actgcactccaccctgggcaacagagtgggactctgtctcaaacaaaaaaataaattatgatagtaacatggggaaaaagtcttgtaatacaatgttatgtgagaagaagttagaaaaag

SEQ ID NO: 391751 - DNA, 120 bp, Artificial Sequence
  ENSG00000145016_65 (sequence is synthesized)
tgtatgtcaaatatatatttattagtccatacatacataaataaatgaccaaataaataaattctcacagaagaattctaaacaaaatacgtaaattctcccaggaggtggagtttaatt

SEQ ID NO: 391752 - DNA, 120 bp, Artificial Sequence
  ENSG00000145016_66 (sequence is synthesized)
ccttctcccattgagggtggactggaattagtgattcacttttttaaataaaaggatatagaaagaggaaaatagcaactttagagtagagagagctaacacgaccttaaccaagtaatc

SEQ ID NO: 391753 - DNA, 120 bp, Artificial Sequence
  ENSG00000145016_67 (sequence is synthesized)
aacgttaacatctccaaagatgtcattggatgtcatgtacctactaatacaatgaaaggggtacatcttccctgacattcattcagaaacccataacctcagtctaatcatgagaaaaac

SEQ ID NO: 391754 - DNA, 120 bp, Artificial Sequence
  ENSG00000145016_68 (sequence is synthesized)
aacaaacaacataaacacaggagcaaaattcgaggaactttctacaaaacacttgaccctactcaaaattgccaaggtctcgaaaacaaggaaagagatgccgtcacggacgagaggaga

SEQ ID NO: 391755 - DNA, 120 bp, Artificial Sequence
  ENSG00000145016_69 (sequence is synthesized)
ctaagcagatacgatgactgaatgccatgtgggatcccgggtgggatcccgaaatggagaaaggatattagtgaaaaaactggcaaaatctgaatacaatttggagtttagttaaaagta

SEQ ID NO: 391756 - DNA, 120 bp, Artificial Sequence
  ENSG00000145016_70 (sequence is synthesized)
acataccaatgttggttccttagttttgggaaatgtccagtactacagtaatgtaagatggtaacattagggagagctgaaatcgggtgagggctatgtgacgaatttgtactatctttg

SEQ ID NO: 391757 - DNA, 120 bp, Artificial Sequence
  ENSG00000145016_71 (sequence is synthesized)
caactttactgtggatctaaaattattccagattaagaagtttacctatataaaaagcatatgtacatcataattacagttatgcaaaaatatggttagaaaaaatacataaggaaaaca

SEQ ID NO: 391758 - DNA, 120 bp, Artificial Sequence
  ENSG00000145016_72 (sequence is synthesized)
tacgtaaaaattagtgtggttctgttagaatggtggcattgtggagtattttttcctcttatctgcttactgaattagctgtaaatgagtcattttccataaattaaagagttaatttta

SEQ ID NO: 391759 - DNA, 120 bp, Artificial Sequence
  ENSG00000145016_73 (sequence is synthesized)
gagcagttcgactttccgcccaaactgggggatgctagaccgcgggcacctctgaatcttatgccttcagtgatataatcctccgtgtccttcgagtccctcctgctgcagacaggtccc

SEQ ID NO: 391760 - DNA, 120 bp, Artificial Sequence
  ENSG00000145016_74 (sequence is synthesized)
ctatacttcggtacacacgagcctttcgcgcccaccgcaacgcagcctcgggaggcaggacagacccctgcgagtgtagattgcagctgcatcccagctcccccctccctggcacgctcc

SEQ ID NO: 391761 - DNA, 120 bp, Artificial Sequence
  ENSG00000145016_75 (sequence is synthesized)
tccacctacagctgcgctgagctgccgcatctgaacgcaaagcaaacgctgcagtgacggttcctgcgtcaccttaactccaaagtaaatgctaacgtttcccgtgtctgtaccttctct

SEQ ID NO: 391762 - DNA, 120 bp, Artificial Sequence
  ENSG00000145016_76 (sequence is synthesized)
tggggttcttgccacttagcttgaggaagttgaaatggccagtcagcactgggagaggaactggaaagggctgctgttccttagcctggagagcagccaaatcatcctgatctaaagaac

SEQ ID NO: 391763 - DNA, 120 bp, Artificial Sequence
  ENSG00000145016_77 (sequence is synthesized)
ctcgagtgaggggaggagctggtgctggctgtggtcctgggtagctccgggcaagaccgagtagactttcactcaagaagtgttggccaggcacggtggcttaggcctctcatcccagca

SEQ ID NO: 391764 - DNA, 120 bp, Artificial Sequence
  ENSG00000145016_78 (sequence is synthesized)
aaaaaggcagttgtcatgatgtgagaggagagctctggattggaatcgagagggagtctaccctcggccgtcatttgttgttctcagtcattatgaccaaaataaatactttgtcccctc

SEQ ID NO: 391765 - DNA, 120 bp, Artificial Sequence
  ENSG00000145016_79 (sequence is synthesized)
tttacttgaaactttctaaagggaaagtttccatttctctctgttgaggtcatatcagatcccttatattgtgacactggaaggacaagaagacctctttctgccctgtttattcctttt

SEQ ID NO: 391766 - DNA, 120 bp, Artificial Sequence
  ENSG00000145016_80 (sequence is synthesized)
ccttctctcaatcggcactctcaaaacatctggcacggtgttcactaccctaataagacctcagcttccctcgggaggggacataacaatataggaagagtgaaccacacacctatcaag

SEQ ID NO: 391767 - DNA, 120 bp, Artificial Sequence
  ENSG00000145016_81 (sequence is synthesized)
tatttggcatgtcaaggagaatatcatgtatgtccttagcataatgtgcttgattttactactctctcaccctgaagccccttcatttgtctggactgctaaaaactagagaaactggct

SEQ ID NO: 391768 - DNA, 120 bp, Artificial Sequence
  ENSG00000145016_82 (sequence is synthesized)
tgaccctgaattgagagtaagagagggcttgttatggggacttttcaggtggcagaaagagatgttctgtttctggtgatacaacatcttattttgtaatgaaagaagtttataacgaaa

SEQ ID NO: 391769 - DNA, 120 bp, Artificial Sequence
  ENSG00000145020_0 (sequence is synthesized)
agacagggcggttctgcagggggcggtctagcccctagctttgttctgggcagcccaatcagctctggattgcccgagctgccctgaagagtcagccgaaagagctggaggcttcttccc

SEQ ID NO: 391770 - DNA, 120 bp, Artificial Sequence
  ENSG00000145020_1 (sequence is synthesized)
tgtggttgcgggttcctgcattctctgctctaaatcccagcctgcccttggggctgcccacgcccccttcagatcctttgctccggagagagacctgtccgagcagaggcctggactaca

SEQ ID NO: 391771 - DNA, 120 bp, Artificial Sequence
  ENSG00000145020_2 (sequence is synthesized)
tctcccggcgtgcctggcagtgtggtggcctctgtgcgccgtctgcactcgttgcaggcgacgatgcagagggctgtaagtgtggtggcccgtctgggctttcgcctgcaggcattcccc

SEQ ID NO: 391772 - DNA, 120 bp, Artificial Sequence
  ENSG00000145020_3 (sequence is synthesized)
ccggccttgtgtcgtccacttagttgcgcacaggaggtgctccgcaggacaccgctctatgacttccacctggcccacggcgggaaaatggtggcgtttgcgggttggagtctgccagtg

SEQ ID NO: 391773 - DNA, 120 bp, Artificial Sequence
  ENSG00000145020_4 (sequence is synthesized)
cagtaccgggacagtcacactgactcgcacctgcacacacgccagcactgctcgctctttgacgtgtctcatatgctgcagaccaagatacttggtagtgaccgggtgaagctgatggag

SEQ ID NO: 391774 - DNA, 120 bp, Artificial Sequence
  ENSG00000145020_5 (sequence is synthesized)
agtctagtggttggagacattgcagagctaagaccaaaccaggggacactgtcgctgtttaccaacgaggctggaggcatcttagatgacttgattgtaaccaatacttctgagggccac

SEQ ID NO: 391775 - DNA, 120 bp, Artificial Sequence
  ENSG00000145020_6 (sequence is synthesized)
ctgtatgtggtgtccaacgctggctgctgggagaaagatttggccctcatgcaggacaaggtcagggagcttcagaaccagggcagagatgtgggcctggaggtgttggataatgccctg

SEQ ID NO: 391776 - DNA, 120 bp, Artificial Sequence
  ENSG00000145020_7 (sequence is synthesized)
ctagctctgcaaggccccactgcagcccaggtactacaggccggcgtggcagatgacctgaggaaactgcccttcatgaccagtgctgtgatggaggtgtttggcgtgtctggctgccgc

SEQ ID NO: 391777 - DNA, 120 bp, Artificial Sequence
  ENSG00000145020_8 (sequence is synthesized)
gtgacccgctgtggctacacaggagaggatggtgtggagatctcggtgccggtagcgggggcagttcacctggcaacagctattctgaaaaacccagaggtgaagctggcagggctggca

SEQ ID NO: 391778 - DNA, 120 bp, Artificial Sequence
  ENSG00000145020_9 (sequence is synthesized)
gccagggacagcctgcgcctggaggcaggcctctgcctgtatgggaatgacattgatgaacacactacacctgtggagggcagcctcagttggacactggggaagcgccgccgagctgct

SEQ ID NO: 391779 - DNA, 120 bp, Artificial Sequence
  ENSG00000145020_10 (sequence is synthesized)
atggacttccctggagccaaggtcattgttccccagctgaagggcagggtgcagcggaggcgtgtggggttgatgtgtgagggggcccccatgcgggcacacagtcccatcctgaacatg

SEQ ID NO: 391780 - DNA, 120 bp, Artificial Sequence
  ENSG00000145020_11 (sequence is synthesized)
gagggtaccaagattggtactgtgactagtggctgcccctccccctctctgaagaagaatgtggcgatgggttatgtgccctgcgagtacagtcgtccagggacaatgctgctggtagag

SEQ ID NO: 391781 - DNA, 120 bp, Artificial Sequence
  ENSG00000145020_12 (sequence is synthesized)
gtgcggcggaagcagcagatggctgtagtcagcaagatgccctttgtgcccacaaactactataccctcaagtgaagctggctcagggtggggctgtcccttccaggagttttgccccta

SEQ ID NO: 391782 - DNA, 120 bp, Artificial Sequence
  ENSG00000145020_13 (sequence is synthesized)
caaggggttagtcaagaagctgaggcagaactcactgggggtgggcagttaaggtggaggctgattctaattgtctggttgaggggccacaccacctattccccccacctaactcatgcc

SEQ ID NO: 391783 - DNA, 120 bp, Artificial Sequence
  ENSG00000145020_14 (sequence is synthesized)
attccagcttccttcaggaccctgcttctgagtgacggaccagctcacacaatgtcttgtttcagtccatgatcccactgacctactcttgcctgctggagggtaatgagaagctttggt

SEQ ID NO: 391784 - DNA, 120 bp, Artificial Sequence
  ENSG00000145020_15 (sequence is synthesized)
tctgccatctctcccactctgccaggtgctggctgtggagcaaaggctcacctttgtggagaggataaaacctgcccaacctacctcaccatggtttttcacattgcaaagggtaataac

SEQ ID NO: 391785 - DNA, 120 bp, Artificial Sequence
  ENSG00000145020_16 (sequence is synthesized)
atgggcagtgcggacttaggctaccccctccagtttgctttccgtaaatgcaaattgtccttactgcaagtcaggaatgattgctgactcacagtagggctgctatgcctgtgtgtaaac

SEQ ID NO: 391786 - DNA, 120 bp, Artificial Sequence
  ENSG00000145020_17 (sequence is synthesized)
ttggggatggctgagggaacatagactcactcttccacattcccaagttggtctagtgtgctgcccagtagcaaaccatggcagactcaccacctattctgagttccagggctgctgtag

SEQ ID NO: 391787 - DNA, 120 bp, Artificial Sequence
  ENSG00000145020_18 (sequence is synthesized)
ggcagggtgggcttcctcccagacttgccttaccctgggctgatctttgcccctggtatgcattaatggactccactgaatcctgaaaaaaaaattaaacttccttcttacttgccagtc

SEQ ID NO: 391788 - DNA, 120 bp, Artificial Sequence
  ENSG00000145020_19 (sequence is synthesized)
gatttggccctcatgcaggtataccccctctgtgttctagacaccttgtcttccttgttcatagagcagtatccttgttgtccaagacagggttggcacagacaagggacctggaaaatg

SEQ ID NO: 391789 - DNA, 120 bp, Artificial Sequence
  ENSG00000145020_20 (sequence is synthesized)
gctctttcagtgaatgaacagctatgagactcaagagcaggccctctctggagcacgccagggtttggtggtgggggattaccaggcatggggagggggtcttggcccctctggtgtgag

SEQ ID NO: 391790 - DNA, 120 bp, Artificial Sequence
  ENSG00000145020_21 (sequence is synthesized)
gtggcagaactgggcttgggtcatctctatcacttagtagctatgtgaccttgtaagatgggaaccagcctactacctttttttttcctccctcctcctcctcctctccactgtcctact

SEQ ID NO: 391791 - DNA, 120 bp, Artificial Sequence
  ENSG00000145020_22 (sequence is synthesized)
actgtccagctctgcagcgtccagcccatggtagctgctcagtaagtggccccagatgctcttgtgtttctgtcttttaggacaaggtcagggagcttcagaaccagggcagagatgtgg

SEQ ID NO: 391792 - DNA, 120 bp, Artificial Sequence
  ENSG00000145020_23 (sequence is synthesized)
gcctggaggtgttggataatgccctgctagctctgcaaggtgagagggctgggctggggttggagccaacctttgccttcctggcttcattgactgcttagcacagaggccataccaaga

SEQ ID NO: 391793 - DNA, 120 bp, Artificial Sequence
  ENSG00000145020_24 (sequence is synthesized)
agaatgtgtggaaggtgtgatatttgtgtgccataattttaagttttgtatcttgccctcctcctacctaccacaaggctccatgggctagggacaagggcatcttctcccacttgcaga

SEQ ID NO: 391794 - DNA, 120 bp, Artificial Sequence
  ENSG00000145020_25 (sequence is synthesized)
gggcccttttatttctgctctatgagttttcttagtcatgagccagcaaatgggctgagtccctacctcaggcttaggggcacagagatgagtcaaacacagcttctcagggcttgcagt

SEQ ID NO: 391795 - DNA, 120 bp, Artificial Sequence
  ENSG00000145020_26 (sequence is synthesized)
cttggacagaatccctgagtcatttccagagacacagacatttgtagggaggggaatatcccagtcttactacatcaggctaggaggccagaaaccaaggttaatatgctgctctctggc

SEQ ID NO: 391796 - DNA, 120 bp, Artificial Sequence
  ENSG00000145020_27 (sequence is synthesized)
tatgctgctctctggccatcccttctgcttaacccctctctattcaacatgtggtccctggccaggcgacgtgactcaaacacctgtaatcctggcacttggggaggccaaggcgggtgg

SEQ ID NO: 391797 - DNA, 120 bp, Artificial Sequence
  ENSG00000145020_28 (sequence is synthesized)
agctgaggttgcaccactgcactctggcctgggcaacagagtgagactcagtctaaaaagaaaaataacaacaacaaagtgtggtctctaaaccagcatctttggagcttgttaggaata

SEQ ID NO: 391798 - DNA, 120 bp, Artificial Sequence
  ENSG00000145020_29 (sequence is synthesized)
tagtctcaggcactgctgcagacctgctgaatcagaaccttcattttaacaagatccccaggtgattcatgtgaccccctcaacctcaggctttttgtccatccagtggggaggctaagg

SEQ ID NO: 391799 - DNA, 120 bp, Artificial Sequence
  ENSG00000145020_30 (sequence is synthesized)
aagttttttgggggcattgctatggagtacttaggagagcctgcgatcatcaagatgacctttgaagcttttgtcctgtgggttgccacatgggctaagtcgtcccaggtttgggtaggt

SEQ ID NO: 391800 - DNA, 120 bp, Artificial Sequence
  ENSG00000145020_31 (sequence is synthesized)
gaagcagcaggtcctaggtgtcatagattaagtgtcagatgggactctcagtacagagtggggaggggtgcagaggttgcaccagatcagggaagcaccccaaggtagggaggggatgaa

SEQ ID NO: 391801 - DNA, 120 bp, Artificial Sequence
  ENSG00000145020_32 (sequence is synthesized)
aacttacttgatgcatgaggatcaaagaccttggacttgggcccagacttgtaccttgcacaccctgagtccttcacattagggttcataaccttttggtaactaagtgggtccagggtt

SEQ ID NO: 391802 - DNA, 120 bp, Artificial Sequence
  ENSG00000145020_33 (sequence is synthesized)
ggcagtacagggcacaggatgcatgtgaggggttgggggtatgtggtacagggagcttcccatctgccctctggtgtttcatacagatctcggtgccggtagcgggggcagttcacctgg

SEQ ID NO: 391803 - DNA, 120 bp, Artificial Sequence
  ENSG00000145020_34 (sequence is synthesized)
gatgcagagggctgtaagtgtggtggcccgtctgggctttcgcctgcaggcattccccccggccttgtgtcgtccacttagttgcgcacagtggtccactccttggctttgtttgctgtg

SEQ ID NO: 391804 - DNA, 61 bp, Artificial Sequence
  ENSG00000145020_35 (sequence is synthesized)
tagccaggcgtggtggcgggtgcctgttatcccagctactcgggagactgaggcaggttag

SEQ ID NO: 391805 - DNA, 120 bp, Artificial Sequence
  ENSG00000145020_36 (sequence is synthesized)
gagtgactccatctcaaaaaaaaaaaaaagaaactgaagacgctcggcaggtgggcagcatggcctccaggggataggaggtggttggttggctgacggcagtgaagggaggaatagagc

SEQ ID NO: 391806 - DNA, 120 bp, Artificial Sequence
  ENSG00000145020_37 (sequence is synthesized)
ttggttggctgacggcagtgaagggaggaatagagcctggagtagcccaagcaaaggggccttgatgctagatagtgtgttacttgaggacctcataaggacctcctgtggccagggctt

SEQ ID NO: 391807 - DNA, 120 bp, Artificial Sequence
  ENSG00000145020_38 (sequence is synthesized)
tccaaggacagccttctcagaagagctagaggtcatgggggtgtcatggataggtcaatggccccaaggaaatgagctcagagggtctcatcatctcatccttctagcttgcccccatta

SEQ ID NO: 391808 - DNA, 120 bp, Artificial Sequence
  ENSG00000145020_39 (sequence is synthesized)
aatggtgtgccttaatgtcccgggttttccagggctgacacccactctcatgtattgggctggatgttggtttgaaaaggggttatttcaggaaggtgctaggtcctgtccagttccctg

SEQ ID NO: 391809 - DNA, 120 bp, Artificial Sequence
  ENSG00000145020_40 (sequence is synthesized)
gcagtccccccacacagagtgactgggggaggtcaggaaatcagaaggtggtcctttgccacgtgtagaaccaaaagactggttagtcactttgggtgggctggactgcactgtggatgg

SEQ ID NO: 391810 - DNA, 120 bp, Artificial Sequence
  ENSG00000145020_41 (sequence is synthesized)
ccatgactcatccaaaggttatgtagcctgaagccttcctgagcctcccttccctgaaggtgccactgtgcctttgcccattagaaactgcagatgttggccggatgcggtggctcacat

SEQ ID NO: 391811 - DNA, 120 bp, Artificial Sequence
  ENSG00000145020_42 (sequence is synthesized)
gtctgcactcgttgcaggcgacgatgcagagggctgtaagtgtggtggcccgtctgggctttcgcctgcaggcattccccccggccttgtgtcgtccacttagttgcgcacagaccaaga

SEQ ID NO: 391812 - DNA, 120 bp, Artificial Sequence
  ENSG00000145022_0 (sequence is synthesized)
tactcccggagtcactcatcccttaagcaagcagggtggggttaggtgcgcgtgcgcggttttaatactcctccccgaactgccaactcttcacgcacgcgaagtaggccccaccctggc

SEQ ID NO: 391813 - DNA, 120 bp, Artificial Sequence
  ENSG00000145022_1 (sequence is synthesized)
tgggtttacgcgtgcgcactaacgggcctggtcccggaagaccacacgcgtgcgtggtggggactacggtgacagtaccccgggtggggcgagggccagtcatggcggagtcctggtctg

SEQ ID NO: 391814 - DNA, 120 bp, Artificial Sequence
  ENSG00000145022_2 (sequence is synthesized)
ggcaggccttgcaggctctgccggccacggtgctgggcgcgctgggcagcgagttcttgcgggagtgggaggcgcaggacatgcgcgtgaccctcttcaagctgctgctgctgtggttgg

SEQ ID NO: 391815 - DNA, 120 bp, Artificial Sequence
  ENSG00000145022_3 (sequence is synthesized)
tgttaagtctcctgggcatccagctggcgtgggggttctacgggaatacagtgaccgggttgtatcaccgtccaggtctgggtggtcagaatggatccacgcctgatggctccacgcatt

SEQ ID NO: 391816 - DNA, 120 bp, Artificial Sequence
  ENSG00000145022_4 (sequence is synthesized)
tcccttcgtgggaaatggcagcaaacgaacctctcaaaacccacagagaataagggaaggcagcagagggtctccaagggcatcactgggtctgctggcttctacactgggttctgctac

SEQ ID NO: 391817 - DNA, 120 bp, Artificial Sequence
  ENSG00000145022_5 (sequence is synthesized)
tccccagacctcagggacaactgccgggggttcagggttggtagcagggagtacccagtgcctacagggctgggcctcttctgcctcttaagcctgctccctcacccaggcactgggcaa

SEQ ID NO: 391818 - DNA, 120 bp, Artificial Sequence
  ENSG00000145022_6 (sequence is synthesized)
gtgaagagtttgcctgtactcttatctgggtgccttaaggagagagattgtgttcttcctctctcaggggtgataactcaggaagcctctgggttgggaagaccatcagttcttttgtct

SEQ ID NO: 391819 - DNA, 120 bp, Artificial Sequence
  ENSG00000145022_7 (sequence is synthesized)
gttgggaagaccatcagttcttttgtcttaggtttcttttcctgtccctcttccatccccaagatgtgaccccataaaaatttttcctgagttggccaggcatggtggctcacgcctgta

SEQ ID NO: 391820 - DNA, 120 bp, Artificial Sequence
  ENSG00000145022_8 (sequence is synthesized)
aaaaaaaaatttttttcctgagaggaagcctgaggttgaccagctctggggtttgtaaggcaggtctgttttctcctaggccctgagttttctgaatctctggttttgctttgttggcaa

SEQ ID NO: 391821 - DNA, 120 bp, Artificial Sequence
  ENSG00000145022_9 (sequence is synthesized)
ggagccagggaatcctgacctgagccagaccttaagctctatggttatttagctggccattcaggtataaggcagggtggtgtacctgctggcactatccagatggaggcaccaaacacc

SEQ ID NO: 391822 - DNA, 120 bp, Artificial Sequence
  ENSG00000145022_10 (sequence is synthesized)
cacatacctggcccaaccagacttctcccgtgagccaggcaaaggaaattgtcatctgccaactgtcctactcatattcctctcagtccttcttgggggtaagctgattacctgaaggac

SEQ ID NO: 391823 - DNA, 120 bp, Artificial Sequence
  ENSG00000145022_11 (sequence is synthesized)
agctgaacccctggggtagcctcctatccaccactgcttaagtgcctatgggaatgtgggtctgcaccttgtcccctcataggatggtaccaagcatttagtgcacagtggccccatcat

SEQ ID NO: 391824 - DNA, 120 bp, Artificial Sequence
  ENSG00000145022_12 (sequence is synthesized)
agcctgcagcctcatcatttcccatctggacctggtacaaatgcacgtcacaggctcagctcctccccactagcattttctctaccttcaagaaccaggcagccctgccatgtcacaata

SEQ ID NO: 391825 - DNA, 120 bp, Artificial Sequence
  ENSG00000145022_13 (sequence is synthesized)
ggccaggggagtttccaaagatgtgggtggcaaatgcccctatagaaacaccagtacctgaaagcactgtagccctggacctgcctccttccctcggggccatacttctgtttccatctg

SEQ ID NO: 391826 - DNA, 120 bp, Artificial Sequence
  ENSG00000145022_14 (sequence is synthesized)
ctgggccaccagccactttagtgacccctgcctacttccttcctgttggatatcatacttccatctggctgcctttgcttaagccatctttgtggtagaggggccctggaattgcagctg

SEQ ID NO: 391827 - DNA, 120 bp, Artificial Sequence
  ENSG00000145022_15 (sequence is synthesized)
tactgaggatgatgttattcacagcccctggcccacccactaatactactgcacagagtcaggatctcacatttcaccccaggctcaactgaggatgtggcttattaaacacggaagtgc

SEQ ID NO: 391828 - DNA, 120 bp, Artificial Sequence
  ENSG00000145022_16 (sequence is synthesized)
acgggaatacagtgaccgggttgtatcaccgtccaggaccctcaccagacttcaccaaacaataccagtggtctctaacctgacctgggctgatgcctgctcagattcccaccccagcct

SEQ ID NO: 391829 - DNA, 120 bp, Artificial Sequence
  ENSG00000145022_17 (sequence is synthesized)
gttctcaggctttaagcccaccagcttaatggcctttgcagcaagcttcaagtctgcacgtagagctcaggcttcaagttagggtgacaccaaggtctggacagtccatcatcatgctgt

SEQ ID NO: 391830 - DNA, 120 bp, Artificial Sequence
  ENSG00000145022_18 (sequence is synthesized)
tcagcagcctgtaggataggtggtggtattgtcataatttcagagagatgaaatgacaggtttgttggattccactctgcacaatcccctcagttgggaaggcagtaatctctgtcctga

SEQ ID NO: 391831 - DNA, 120 bp, Artificial Sequence
  ENSG00000145022_19 (sequence is synthesized)
ggtgaggcttcctacgaacctccgtgggctggccgcccccgcccccaccctctcccgactgtaccattgggttccccactatcctgcaagaggctcatcagaacttaacattggttcacg

SEQ ID NO: 391832 - DNA, 120 bp, Artificial Sequence
  ENSG00000145029_0 (sequence is synthesized)
ttcttgaggctcggctgaggatgccgggaagggctggtggtcgggggcctagagcggcggttgcacttagttgcggctgctgtcaccatgtcccgcgttttggtgccttgccatgtgaaa

SEQ ID NO: 391833 - DNA, 120 bp, Artificial Sequence
  ENSG00000145029_1 (sequence is synthesized)
ggctccgtagccctccaggtgggcgacgtgcggacctcccaaggccggcctggcgtgctggtcatcgatgtcaccttccccagcgtcgctcccttcgagttgcaggaaatcacgtttaag

SEQ ID NO: 391834 - DNA, 120 bp, Artificial Sequence
  ENSG00000145029_2 (sequence is synthesized)
aattactacacagcttttttgagcatccgtgtccgtcagtacacctcagcacacacacctgccaagtgggtgacctgcctgcgggactactgcctaatgcctgacccacacagtgaggag

SEQ ID NO: 391835 - DNA, 120 bp, Artificial Sequence
  ENSG00000145029_3 (sequence is synthesized)
ggagcccaggagtatgtatcgctgttcaagcatcagatgctgtgtgacatggctagaatatcggagctacgcctgattctgcggcagccatcaccactgtggctgtctttcacagtggag

SEQ ID NO: 391836 - DNA, 120 bp, Artificial Sequence
  ENSG00000145029_4 (sequence is synthesized)
gagctgcagatctatcagcagggaccaaagagcccctccgtgacctttcccaagtggctctcccacccagtgccctgtgagcaacctgcactcctccgtgagggtctcccagaccccagc

SEQ ID NO: 391837 - DNA, 120 bp, Artificial Sequence
  ENSG00000145029_5 (sequence is synthesized)
agggtatcctccgaggtgcagcagatgtgggcactgacagagatgatccgggccagtcacacctccgcaaggatcggccgctttgatgtggatggctgttatgacctgaacttgctctcc

SEQ ID NO: 391838 - DNA, 120 bp, Artificial Sequence
  ENSG00000145029_6 (sequence is synthesized)
tacacttgaatggttgctcctagccaagatgttggcctttctgtgcccacccagacttggtttgggccaccagaggctgaagtgtatttcctgtgcattccaagtgttgcctgcatgcct

SEQ ID NO: 391839 - DNA, 120 bp, Artificial Sequence
  ENSG00000145029_7 (sequence is synthesized)
gttctgtctgggccacattcacagattcaggattctcaggggcttaccgtgttacttcagcatgagctcctggcatgggggtgctctgtcttcgcctggctgcaactcaattcttccttc

SEQ ID NO: 391840 - DNA, 120 bp, Artificial Sequence
  ENSG00000145029_8 (sequence is synthesized)
tacccaaaaacactccagtcagttgtacttactgagaatccctgagtgccctctgccccttctggcaacatgcacattcctgtcttctgcctgctccctcatgtcagtgcagttgggctg

SEQ ID NO: 391841 - DNA, 120 bp, Artificial Sequence
  ENSG00000145029_9 (sequence is synthesized)
ggctgacctactaaaacctgctccatgtatggacctggaaggccattgctgccatggcacttgggacacttgaggaagaaacagaaaccttatttcttcctgtgtgtcccctagtggttt

SEQ ID NO: 391842 - DNA, 120 bp, Artificial Sequence
  ENSG00000145029_10 (sequence is synthesized)
tctcttggtttctgagctggctcctgaatatatgttcaagtgggtgtgcccatagggcctgggcacgtgtctctagcaaaaccagggcctgagcataagaactgggacccttctaggcag

SEQ ID NO: 391843 - DNA, 120 bp, Artificial Sequence
  ENSG00000145029_11 (sequence is synthesized)
cctgggcaagaagagcgaaactccatcttaaacaaacaaacaaaaaaaaaagaactgggacccttctgccatctgacatagcccaaagcacatctctatcctttctcccagttgcccctc

SEQ ID NO: 391844 - DNA, 74 bp, Artificial Sequence
  ENSG00000145029_12 (sequence is synthesized)
ctgacatagcccaaagcacatctctatcctttctcccagttgcccctctccttttttgttgttttttttgaggt

SEQ ID NO: 391845 - DNA, 89 bp, Artificial Sequence
  ENSG00000145029_13 (sequence is synthesized)
tgcccctttccaagagatatgctcagcataatgagagatcaaccgtggtggggagtgggtccaagtaagggttctcattgttgcctttt

SEQ ID NO: 391846 - DNA, 120 bp, Artificial Sequence
  ENSG00000145029_14 (sequence is synthesized)
ggggagtgggtccaagtaagggttctcattgttgccttttaagaggcctaagtcctgcattaactcagtccaaccattaagtgatgcaggctgctcttccctcatgtgagaaaaacctgt

SEQ ID NO: 391847 - DNA, 120 bp, Artificial Sequence
  ENSG00000145029_15 (sequence is synthesized)
ttccctctggttcttcctggctttgcacctggtggctattacaaagcagtactgcagtatgtcttggacctggaaagttggacatgtgtgtggctcaacagttttctcgggggagttcag

SEQ ID NO: 391848 - DNA, 120 bp, Artificial Sequence
  ENSG00000145029_16 (sequence is synthesized)
tgaccttttggtggccaccctctgttctcacctgtgagttcttgcaggtggcgacttcatctgcaaggtcacttacatagccccactcagctgcttcggaaagcgtgacgaagcagtagt

SEQ ID NO: 391849 - DNA, 120 bp, Artificial Sequence
  ENSG00000145029_17 (sequence is synthesized)
cctcagtgtgtgtgtaagtgaagaggaccttgtggtagcagggaccatgcttcattcgtggctgtgtccccatctgagggcctggtatgcagtaagatcaataaatacttgtggaatgca

SEQ ID NO: 391850 - DNA, 120 bp, Artificial Sequence
  ENSG00000145029_18 (sequence is synthesized)
gtaaaattctggggctgggcccagggcccttgggtgttatcttcctcctgggtattctgtgggatttgaggcatctctgttgtggggctacatcaggccctaacctcatgtttcataagc

SEQ ID NO: 391851 - DNA, 120 bp, Artificial Sequence
  ENSG00000145029_19 (sequence is synthesized)
catctgagaatgttgttggtctcagctggagggcccctagcccaggttggcctctctggagcctgaagggcactgctggggagagacccatggccactgacccctccttctggagcaggg

SEQ ID NO: 391852 - DNA, 120 bp, Artificial Sequence
  ENSG00000145040_0 (sequence is synthesized)
agaccacaggacagtagtgcctggccccagccccaggcagccacagcaggctgccttaccccagaagcagctggtggcgcctgacctcacgatgaccaggtgtgctctgctgttgctgat

SEQ ID NO: 391853 - DNA, 120 bp, Artificial Sequence
  ENSG00000145040_1 (sequence is synthesized)
ggtcctgatgttgggcagagtcctggttgtcccagtgacccctatcccaaccttccagctccgccctcagaattctccccagaccactccccgacctgcggcctcagagagcccctcagc

SEQ ID NO: 391854 - DNA, 120 bp, Artificial Sequence
  ENSG00000145040_2 (sequence is synthesized)
tgctcccacatggccgtgggctgcccagagccactgcagccccacccgccaccctggctcgcgcattgtcctatcgctggatgtccccatcggcctcttgcagatcttactggagcaagc

SEQ ID NO: 391855 - DNA, 120 bp, Artificial Sequence
  ENSG00000145040_3 (sequence is synthesized)
ccgggccagggctgccagggagcaggccaccaccaacgcccgcatcctggcccgtgtcggccactgctgagcctgagagagggggtcacagtgatagggccaccctggatgggaagacct

SEQ ID NO: 391856 - DNA, 120 bp, Artificial Sequence
  ENSG00000145040_4 (sequence is synthesized)
ggagggcagccacacagctggacggatgctgccacatctgggcatacagtgtctggacgctgccacatctgggcatacagtgtctggacactgccacatggagccactgtcatgcaggtc

SEQ ID NO: 391857 - DNA, 120 bp, Artificial Sequence
  ENSG00000145040_5 (sequence is synthesized)
atatcagatctgagtgccccacagagtcacagtgtgtctggacagcctggacattggacattgctaagttgggtcactgccacatggagtcttgccatgcctgtgtgccccacagaccta

SEQ ID NO: 391858 - DNA, 120 bp, Artificial Sequence
  ENSG00000145040_6 (sequence is synthesized)
ctatgtctgggtgccccatagtcacagaacacctggacaccgccacatgcagtcatcatcatgttactttcaggagcctcaacacgagagctcaacactgcctccgaccagtccctctga

SEQ ID NO: 391859 - DNA, 120 bp, Artificial Sequence
  ENSG00000145040_7 (sequence is synthesized)
ggcccacaggtctgtcatcccataggccaccacacagagaaatgctggctgagggtcacttgcttgctctgtgccccatgaggcagcacctgccccagatggacggggctgtgaggggtg

SEQ ID NO: 391860 - DNA, 120 bp, Artificial Sequence
  ENSG00000145040_8 (sequence is synthesized)
tctccaggcacaaaggcccgaacacaggaagcctgtgaccatggcagccttgtcttatgggcgcatatgtgcgtgtgtggctgagtctctgacagctgtgagtgtgtgtgagcagggtaa

SEQ ID NO: 391861 - DNA, 120 bp, Artificial Sequence
  ENSG00000145040_9 (sequence is synthesized)
gggtacgtgaggggtctgagaggagtgggtgcttgtcccccaaacctgcatgaagcaagaacaactcctggccaggccctgtcctccccacgtacccctgcatccccagcctcgacccag

SEQ ID NO: 391862 - DNA, 120 bp, Artificial Sequence
  ENSG00000145040_10 (sequence is synthesized)
ggacatgcagggctcacaggagacagggctcaggctgccggagctccaaccaaactctgtcccacttcacgcacggactgtcctgggcaaaggtgttcacctttccgagcctcggtttcc

SEQ ID NO: 391863 - DNA, 120 bp, Artificial Sequence
  ENSG00000145040_11 (sequence is synthesized)
ttatctgtaaagcaaagcgacaccagcaagcctgtgagcattgtgtatatagcagacatggaggtcctgcagcaggaggtgctcaataaacacaaagcgactgaaggatgggaccagcaa

SEQ ID NO: 391864 - DNA, 120 bp, Artificial Sequence
  ENSG00000145041_0 (sequence is synthesized)
agccgtggtcgcgctgtgtgtgtgtgtgagtggagagtgagtgcgggacctgaggctgtgtgtgtgtgaactgtggccactggcggggtcgggggggggcagcggcggagccgcctcgga

SEQ ID NO: 391865 - DNA, 120 bp, Artificial Sequence
  ENSG00000145041_1 (sequence is synthesized)
cggcaaagccatgactacagtagtggtacatgtggactccaaagctgagctcactaccctgctggagcagtgggaaaaggaacatggcagtgggcaggacatggtacctatccttaccag

SEQ ID NO: 391866 - DNA, 120 bp, Artificial Sequence
  ENSG00000145041_2 (sequence is synthesized)
gatgtctcaattgattgaaaaagaaactgaagagtatcgtaaaggggatccagacccatttgatgatcgacatcctggtcgagctgatccagagtgtatgctgggccacttgctgagaat

SEQ ID NO: 391867 - DNA, 120 bp, Artificial Sequence
  ENSG00000145041_3 (sequence is synthesized)
actcttcaagaatgatgatttcatgaatgcactggtgaatgcatatgtgatgacaagccgagagccccctttaaacactgcagcttgcagactcctattagacatcatgccagggctgga

SEQ ID NO: 391868 - DNA, 120 bp, Artificial Sequence
  ENSG00000145041_4 (sequence is synthesized)
aactgctgtcgtctttcaagaaaaggagggaattgtcgagaatcttttcaaatgggcccgagaggccgatcaaccattgaggacatattctactggactgttaggaggtgctatggaaaa

SEQ ID NO: 391869 - DNA, 120 bp, Artificial Sequence
  ENSG00000145041_5 (sequence is synthesized)
tcaagacattgctgccaactatagagatgaaaattcacagctggtggcaatagtgcttcgaagactgagggagctacagctacaggaagtggctttgcggcaggaaaacaagcgtcccag

SEQ ID NO: 391870 - DNA, 120 bp, Artificial Sequence
  ENSG00000145041_6 (sequence is synthesized)
tccacggaagctctcttctgaaccccttttgcctctggatgaggaggctgtggatatggactatggtgacatggctgtagatgtagtggatggagaccaagaggaagcttctggagacat

SEQ ID NO: 391871 - DNA, 120 bp, Artificial Sequence
  ENSG00000145041_7 (sequence is synthesized)
ggagatctcctttcatcttgattcaggccacaagactagtagcagagtgaactcaacaaccaaacctgaggatggaggattaaagaaaaacaagtcagcaaaacagggtgacagagagaa

SEQ ID NO: 391872 - DNA, 120 bp, Artificial Sequence
  ENSG00000145041_8 (sequence is synthesized)
ctttaggaaagccaagcaaaagttgggtttctcatcttctgatccagatcgcatgtttgttgagctgtctaatagcagttggtcagaaatgtctccctgggtgattggcaccaattatac

SEQ ID NO: 391873 - DNA, 120 bp, Artificial Sequence
  ENSG00000145041_9 (sequence is synthesized)
cctttatcctatgactcctgctatcgagcagcgactcattctccaatatttgacccctctaggagaatatcaggagctacttcccatattcatgcaacttggatcacgggagctgatgat

SEQ ID NO: 391874 - DNA, 120 bp, Artificial Sequence
  ENSG00000145041_10 (sequence is synthesized)
gttctatattgacctgaagcaaactaatgatgtcctgcttacatttgaggcactaaagcacctagcatctctcctgctccataacaaatttgccacagaatttgttgcgcatggtggagt

SEQ ID NO: 391875 - DNA, 120 bp, Artificial Sequence
  ENSG00000145041_11 (sequence is synthesized)
acagaaattactggaaatacctcgtccttctatggctgcaaccggtgtgtctatgtgtttgtattacctatcctacaatcaggatgccatggaaagagtttgcatgcatccccacaatgt

SEQ ID NO: 391876 - DNA, 120 bp, Artificial Sequence
  ENSG00000145041_12 (sequence is synthesized)
tctgtctgatgtggtgaactataccctgtggttaatggagtgttctcatgcttcaggatgctgccatgctaccatgtttttttcaatttgcttctcatttcgggccgtcttggagctctt

SEQ ID NO: 391877 - DNA, 120 bp, Artificial Sequence
  ENSG00000145041_13 (sequence is synthesized)
tgaccgctatgatggtcttcgtcgtctggtgaacttgatcagtactttggagattctaaatttggaagatcagggtgcacttctgagtgatgatgaaatatttgctagccgccaaactgg

SEQ ID NO: 391878 - DNA, 120 bp, Artificial Sequence
  ENSG00000145041_14 (sequence is synthesized)
gaaacatacctgcatggccttgcgcaaatactttgaggctcacctggccattaaattggaacaagtgaagcagtcacttcagaggactgagggtggcattcttgtccacccacaaccccc

SEQ ID NO: 391879 - DNA, 120 bp, Artificial Sequence
  ENSG00000145041_15 (sequence is synthesized)
gtacaaggcatgctcatatactcatgaacagattgtggaaatgatggaatttttgatagaatatggcccagcgcagctatattgggaaccagctgaagttttcctcaaactttcttgtgt

SEQ ID NO: 391880 - DNA, 120 bp, Artificial Sequence
  ENSG00000145041_16 (sequence is synthesized)
gcaactcttgttgcagcttatttctattgcctgcaattggaagacctattatgcaaggaatgacactgtgcgctttgctttggatgtcctggctattcttactgtggtgccaaaaatcca

SEQ ID NO: 391881 - DNA, 120 bp, Artificial Sequence
  ENSG00000145041_17 (sequence is synthesized)
gctccagttggcagaatcagtggacgtgttggatgaggctggatctacagtctctactgtaggtatcagcattattttgggagtggctgagggtgagttcttcatccatgatgctgaaat

SEQ ID NO: 391882 - DNA, 120 bp, Artificial Sequence
  ENSG00000145041_18 (sequence is synthesized)
tcagaagtcagcacttcagattatcatcaattgtgtgtgtggcccagataaccgaatatccagtattggtaaatttatctctggtactcctcggagaaagctgcctcagaaccctaaaag

SEQ ID NO: 391883 - DNA, 120 bp, Artificial Sequence
  ENSG00000145041_19 (sequence is synthesized)
cagtgagcacaccctggccaagatgtggaatgtggttcagtccaacaacggcatcaaggtgctcctgtccttactgtccattaagatgcccatcacagatgcagaccaaatccgggccct

SEQ ID NO: 391884 - DNA, 120 bp, Artificial Sequence
  ENSG00000145041_20 (sequence is synthesized)
ggcctgcaaagccctagtgggcctgtctcgcagtagcactgtccggcagatcatcagtaaactgccccttttcagcagctgccagatccagcagctgatgaaggagcctgtgctgcagga

SEQ ID NO: 391885 - DNA, 120 bp, Artificial Sequence
  ENSG00000145041_21 (sequence is synthesized)
caagcgcagtgaccatgtcaagttctgcaagtatgctgctgaactcattgaacgggtgtcaggaaaaccacttctcattggcactgatgtttccctagcacgactgcagaaagcagatgt

SEQ ID NO: 391886 - DNA, 120 bp, Artificial Sequence
  ENSG00000145041_22 (sequence is synthesized)
tgttgcccagtcaaggatctccttccctgagaaagagctgcttttgttgatacgaaaccatcttatttctaaagggcttggagaaacagcaaccgtgctgacaaaagaggctgacctgcc

SEQ ID NO: 391887 - DNA, 120 bp, Artificial Sequence
  ENSG00000145041_23 (sequence is synthesized)
catgactgctgcctcccattcttctgcctttaccccagtcactgctgctgcttctcctgtctctctaccccgaacccctcgtatcgctaatggcattgcaactcgtctgggcagccatgc

SEQ ID NO: 391888 - DNA, 120 bp, Artificial Sequence
  ENSG00000145041_24 (sequence is synthesized)
gctagctctgcccggcccatcttatgcaggcaactcccctttgattggtagaatcagttttatcagagagaggccatcaccctgcaatggcaggaaaatcagagtgttgcggcagaagtc

SEQ ID NO: 391889 - DNA, 120 bp, Artificial Sequence
  ENSG00000145041_25 (sequence is synthesized)
ggaccatggtgcctacagccaaagcccagccataaaaaaacagctggacagacatcttccttccccacctacgctggacagtataatcacagagtatcttagagaacaacatgctcgctg

SEQ ID NO: 391890 - DNA, 120 bp, Artificial Sequence
  ENSG00000145041_26 (sequence is synthesized)
caagaatccagttgccacctgcccacctttctccctctttactcctcaccaatgtcctgagccaaaacagaggcggcaagcgccaataaactttacgtcaaggctaaaccgcagggcatc

SEQ ID NO: 391891 - DNA, 120 bp, Artificial Sequence
  ENSG00000145041_27 (sequence is synthesized)
atttccaaagtatggaggggtggatggcggatgctttgataggcaccttatctttagcagattccgtcctatttcagtgttccgggaagccaatgaagatgagagtggcttcacctgctg

SEQ ID NO: 391892 - DNA, 120 bp, Artificial Sequence
  ENSG00000145041_28 (sequence is synthesized)
tgcattctcagcacgggagcggttcctgatgcttggcacctgcacagggcagctgaagctctataatgtgtttagtggacaggaggaggccagctataactgtcacaactcagccatcac

SEQ ID NO: 391893 - DNA, 120 bp, Artificial Sequence
  ENSG00000145041_29 (sequence is synthesized)
acatcttgaaccttccagggatgggtccttgctgctgacatctgctacttggagccagcctttgtctgcactttggggaatgaagtcagtatttgatatgaagcattccttcacagaaga

SEQ ID NO: 391894 - DNA, 120 bp, Artificial Sequence
  ENSG00000145041_30 (sequence is synthesized)
tcactatgttgagttcagtaagcactcccaggatcgggtcatcggcacaaaaggagacattgcccacatttatgatattcagactggcaacaagctgttgactctgtttaacccagatct

SEQ ID NO: 391895 - DNA, 120 bp, Artificial Sequence
  ENSG00000145041_31 (sequence is synthesized)
tgccaacaactacaagaggaactgtgccacctttaatcctacagatgatcttgtcttaaatgatggcgtcctctgggatgtccgctctgcacaggccatccacaagtttgacaagttcaa

SEQ ID NO: 391896 - DNA, 120 bp, Artificial Sequence
  ENSG00000145041_32 (sequence is synthesized)
tatgaacatcagtggtgttttccatccaaatggactggaggtgatcattaatactgagatttgggaccttcgaacttttcatcttttgcatactgttcccgctctggatcagtgtcgcgt

SEQ ID NO: 391897 - DNA, 120 bp, Artificial Sequence
  ENSG00000145041_33 (sequence is synthesized)
ggtgttcaatcacacgggaacagtgatgtatggagctatgttgcaggcagatgatgaagatgacttaatggaagagaggatgaaaagcccctttgggtcatccttccgaacatttaatgc

SEQ ID NO: 391898 - DNA, 120 bp, Artificial Sequence
  ENSG00000145041_34 (sequence is synthesized)
aactgactacaaacctatagcaaccattgatgtgaaacggaacatctttgacctgtgtacagacaccaaagactgctatcttgctgtcattgagaatcaaggcagcatggatgccctgaa

SEQ ID NO: 391899 - DNA, 120 bp, Artificial Sequence
  ENSG00000145041_35 (sequence is synthesized)
catggacacagtatgcaggctgtatgaagtgggcaggcagcgtctggcagaggatgaggatgaagaggaggaccaggaagaggaagaacaggaggaagaagatgatgatgaagatgatga

SEQ ID NO: 391900 - DNA, 120 bp, Artificial Sequence
  ENSG00000145041_36 (sequence is synthesized)
tgacaccgatgatttagatgagcttgacactgaccagttgctggaggcggagttggaggaggacgacaataatgagaacgcaggggaagatggggacaatgacttctctccctctgatga

SEQ ID NO: 391901 - DNA, 120 bp, Artificial Sequence
  ENSG00000145041_37 (sequence is synthesized)
ggagctagcaaaccttctagaggagggagaggacggggaggatgaagactctgatgcagatgaggaggtggaactgatcctgggggacactgacagctctgacaactctgatttggaaga

SEQ ID NO: 391902 - DNA, 120 bp, Artificial Sequence
  ENSG00000145041_38 (sequence is synthesized)
tgacatcatcttatctctgaatgagtgaggagccatcactgcttggaagagattcttggcagagagaagaggggacaaatttggttgtgaagtaaacaagaaacacaagacggctaaaac

SEQ ID NO: 391903 - DNA, 120 bp, Artificial Sequence
  ENSG00000145041_39 (sequence is synthesized)
tctccaggggcaggtaaagccctgctgggctcagaagcactatagaatttgctgtacacactgaagtgggtctgtgtcacacaggtatttcttggtcctctggagagcagaggactcact

SEQ ID NO: 391904 - DNA, 120 bp, Artificial Sequence
  ENSG00000145041_40 (sequence is synthesized)
cagctctttgcttcatgcctcgctttaatggtagtaaacacttaaccagtggaatagtctgactgctggtactgatggcatcagaagaaaacaggttaacaatcaagtagtgaaagcact

SEQ ID NO: 391905 - DNA, 120 bp, Artificial Sequence
  ENSG00000145041_41 (sequence is synthesized)
atattctagtcattaactcaacggagccagtctcaactctgctgggagcacccacaggtctctgtgggggagacagggactataacagggaggcagaattcaggttggcttgacaacaca

SEQ ID NO: 391906 - DNA, 120 bp, Artificial Sequence
  ENSG00000145041_42 (sequence is synthesized)
ccttaggaacatgtgctaaggggctaaggaggcatcagctgtcttccttattctaccagggctgaaaatcggagtcacttaggaggcagcatgagaacagtggcacaccaccagtgaggc

SEQ ID NO: 391907 - DNA, 120 bp, Artificial Sequence
  ENSG00000145041_43 (sequence is synthesized)
acatgttgcctttttgtctttaagcaacaccttagacagggcctgaaccctgggtgggggcactggatgcctgaagtaagtaagttttctcagtggggcagtctcataaaatcaccagga

SEQ ID NO: 391908 - DNA, 120 bp, Artificial Sequence
  ENSG00000145041_44 (sequence is synthesized)
cattgaccacctgacctcccctaactagtgctggccaaggcctgagagttcacagaacctgctaggtcttaagagccaaaggaaggaagtggttgagggccaggaaagagaaggaatgtc

SEQ ID NO: 391909 - DNA, 120 bp, Artificial Sequence
  ENSG00000145041_45 (sequence is synthesized)
atgccagggtgttactcctcaccaaaacttggcagttctttttggggccatgggacacctttctctgaagaggggttggataaggcaaaggttgaagtgtcttctctaggcacgttttct

SEQ ID NO: 391910 - DNA, 120 bp, Artificial Sequence
  ENSG00000145041_46 (sequence is synthesized)
agcatgtttccttttacttggttctgtctcacaaagctgggaggtagatgattcttccgggtcctgagcacctgcttcatgaaggaagataggtagcccagagaagaagttttggactta

SEQ ID NO: 391911 - DNA, 120 bp, Artificial Sequence
  ENSG00000145041_47 (sequence is synthesized)
acaacataccaaggcagctctggcctgtgactcaggcgtttgttggagagctgcaggaaaaccactgcagtgtgcctgcaacaggacaagacccactcctgtttctggcggtaccagcta

SEQ ID NO: 391912 - DNA, 120 bp, Artificial Sequence
  ENSG00000145041_48 (sequence is synthesized)
ccctggaatggtggcgtgtcctgctgtacccaactgacttgcttaggtacctggcagctgtgaccacagctcaagtaaaaaaacaaaaacaggcaaataaataaacatgcttaacatgtc

SEQ ID NO: 391913 - DNA, 120 bp, Artificial Sequence
  ENSG00000145041_49 (sequence is synthesized)
ggctgtctgtcttttaaggagctgcatgccctgcattcagaagattatggcttagagagcctcattggcacccgagggtccttccagaatcaataaccaccacaaaaatgacaacaggga

SEQ ID NO: 391914 - DNA, 120 bp, Artificial Sequence
  ENSG00000145041_50 (sequence is synthesized)
ctaggccctactctgcaccccccacatccaccccccaccatttcctaggatggacatatctttcaaggggaaaaaaaaaccatgtctctggggtatttcacaatatattttctttgtata

SEQ ID NO: 391915 - DNA, 120 bp, Artificial Sequence
  ENSG00000145041_51 (sequence is synthesized)
gtgttctttacttaaagaacaagaaatagttttttataaaactttaaaaaggaaaaaaaaacaggcatttataactgagggtatgaacttatatccaccaggtctcttgtccctgcactt

SEQ ID NO: 391916 - DNA, 120 bp, Artificial Sequence
  ENSG00000145041_52 (sequence is synthesized)
cattttctttggaagaaaatgatgtctaaagaacaatatagaggcatttttacatacgtatttaaatgaaaaggaaaatcgtggtttcttaaattgataaggattaagaatattttatta

SEQ ID NO: 391917 - DNA, 120 bp, Artificial Sequence
  ENSG00000145041_53 (sequence is synthesized)
taaatataatatatgattttttaacctgttttgttgcctcatatgctgtcaggttaatttgttttccttcgtgccagaggtggggaggaaggcactctgtctgctgggtaaatgcctaaa

SEQ ID NO: 391918 - DNA, 120 bp, Artificial Sequence
  ENSG00000145041_54 (sequence is synthesized)
ttcactcaccttcatggtttgggggcagcatggtcattgtggatattggttttgtggagttgagggaacttaggatataagttcactccctctatttttctttgtgattcagtttttcaa

SEQ ID NO: 391919 - DNA, 120 bp, Artificial Sequence
  ENSG00000145041_55 (sequence is synthesized)
aaatctttttttcttccctttctccccattgtggaaattacaaatcaaaggcctttttctttaatgtaaagtgtatttatttaaaaaaaatacaaaataaactacaagtctgtctttgtt

SEQ ID NO: 391920 - DNA, 120 bp, Artificial Sequence
  ENSG00000145050_0 (sequence is synthesized)
agtcggtcggcggcggcagcggaggaggaggaggaggaggaggatgaggaggatgaggaggatgtgggccacgcaggggctggcggtggcgctggctctgagcgtgctgccgggcagccg

SEQ ID NO: 391921 - DNA, 120 bp, Artificial Sequence
  ENSG00000145050_1 (sequence is synthesized)
ggcgctgcggccgggcgactgcgaagtttgtatttcttatctgggaagattttaccaggacctcaaagacagagatgtcacattctcaccagccactattgaaaacgaacttataaagtt

SEQ ID NO: 391922 - DNA, 120 bp, Artificial Sequence
  ENSG00000145050_2 (sequence is synthesized)
ctgccgggaagcaagaggcaaagagaatcggttgtgctactatatcggggccacagatgatgcagccaccaaaatcatcaatgaggtatcaaagcctctggcccaccacatccctgtgga

SEQ ID NO: 391923 - DNA, 120 bp, Artificial Sequence
  ENSG00000145050_3 (sequence is synthesized)
cctgagcacagtggacctgaagaagctccgagttaaagagctgaagaagattctggatgactggggggagacatgcaaaggctgtgcagaaaagtctgactacatccggaagataaatga

SEQ ID NO: 391924 - DNA, 120 bp, Artificial Sequence
  ENSG00000145050_4 (sequence is synthesized)
actgatgcctaaatatgcccccaaggcagccagtgcacggaccgatttgtagtctgctcaatctctgttgcacctgagggggaaaaaacagttcaactgcttactcccaaaacagccttt

SEQ ID NO: 391925 - DNA, 120 bp, Artificial Sequence
  ENSG00000145050_5 (sequence is synthesized)
ttgtaatttattttttaagtgggctcctgacaatactgtatcagatgtgaagcctggagctttcctgatgatgctggccctacagtacccccatgaggggattcccttccttctgttgct

SEQ ID NO: 391926 - DNA, 120 bp, Artificial Sequence
  ENSG00000145050_6 (sequence is synthesized)
ggtgtactctaggacttcaaagtgtgtctgggatttttttattaaagaaaaaaaatttctagctgtccttgcagaattatagtgaataccaaaatggggttttgccccaggaggctccta

SEQ ID NO: 391927 - DNA, 120 bp, Artificial Sequence
  ENSG00000145050_7 (sequence is synthesized)
gaagaaaatggaccagcaggtgctgatttagagtggccaagaagtctctgaggaagggttatcattgaagtggggtaagaccatcccatacagggaacagcagtgtgagtgcccagaggc

SEQ ID NO: 391928 - DNA, 120 bp, Artificial Sequence
  ENSG00000145050_8 (sequence is synthesized)
ctgaaagagtgtggcatgtatgtggacaggagaaggtgacagggtgcctacaggataggcaagggccgaatccaagacaaaagccctagtgaagcaatgggttttctaacttgaatttct

SEQ ID NO: 391929 - DNA, 120 bp, Artificial Sequence
  ENSG00000145050_9 (sequence is synthesized)
ctgacagtctctggcttttctctctgttaaaggtttgaaccctggtgacacttaaattcatttggtggctgtcagcttggactgagcatgtgttaagagtccagggtttacactggctga

SEQ ID NO: 391930 - DNA, 120 bp, Artificial Sequence
  ENSG00000145050_10 (sequence is synthesized)
cgggcgctgcggccgggcgactgcgaaggtgcgggatagggggccgggggccgcgctccgtgaccgttctggcggcggcgctgaaccccacaacatcaccagacggccggggccaagagg

SEQ ID NO: 391931 - DNA, 120 bp, Artificial Sequence
  ENSG00000145050_11 (sequence is synthesized)
gcgagggcgggggcgggggcgggggcgacagcaggtccccgcggggcctgcatgaggaggctccggcgcccgccctagtaaatctttcttgggcctagaaaacattggtccgacgaagaa

SEQ ID NO: 391932 - DNA, 120 bp, Artificial Sequence
  ENSG00000145050_12 (sequence is synthesized)
aagttgagactagatcccgttgaaaacttgtcctgaaatctccatcactcctgagttattgtccccaccaccatctagaggttaccgctccccgttcggcgtcgggagctccagggctgg

SEQ ID NO: 391933 - DNA, 120 bp, Artificial Sequence
  ENSG00000145050_13 (sequence is synthesized)
ccgtgggtgctgcgccctgtctgttgggatcacgaagctgcacctctgggtccgctgttgtatttggaaattagcagcagcattttgatcatttttctcttcaccttccagtctctccat

SEQ ID NO: 391934 - DNA, 120 bp, Artificial Sequence
  ENSG00000145050_14 (sequence is synthesized)
ttatgaggtcacagtgagtcccgtctcaaggacacgtgttcaccatgggcttaaacttgatgaaaggagcagggagaagtcgtttataggtcattgggtgatgcttggtcctttgatgcc

SEQ ID NO: 391935 - DNA, 120 bp, Artificial Sequence
  ENSG00000145050_15 (sequence is synthesized)
ctgggtgtaccaggggacccccgccacttggaaccgggttctgtctacctgtagacacctgagaaaaatcggtgatggaaaagctcacctctaatgattcatctccgtgtctcctattaa

SEQ ID NO: 391936 - DNA, 120 bp, Artificial Sequence
  ENSG00000145087_0 (sequence is synthesized)
ccgcccccttcacctcccagctttgccggggaagaagcagggcggggcaagctaggggccggcccgggggcggggcctgcctcccacggcgggagggcggagcctgctctggagcctgac

SEQ ID NO: 391937 - DNA, 120 bp, Artificial Sequence
  ENSG00000145087_1 (sequence is synthesized)
tgctctggagcctgactgctcggttaggacctcggagagcgccaggcgccgcgaccagagggcccagagaagcggccggagcccgcctacctcggccccctcagcttcccgggctggcag

SEQ ID NO: 391938 - DNA, 120 bp, Artificial Sequence
  ENSG00000145087_2 (sequence is synthesized)
gcggctagaggcgtctgaggaagtgtttaaaatgaagaagtttaatttccgaaaagttttggatggcttaactgcctcctcccctggcagtggtagcagcagtggcagtaacagtggtgg

SEQ ID NO: 391939 - DNA, 120 bp, Artificial Sequence
  ENSG00000145087_3 (sequence is synthesized)
tggggctggaagtggttccgtacatccggcggggactgcaggggttctcagagaggaaattcaggaaactttgacttcggagtatttccagatttgcaagacagttcggcatggttttcc

SEQ ID NO: 391940 - DNA, 120 bp, Artificial Sequence
  ENSG00000145087_4 (sequence is synthesized)
tcatcagcccacagcattagcctttgatccagttcagaaaatcttggctattgggacgagaacaggtgctatacgaatactcgggagacctggtgttgattgctattgccaacatgaaag

SEQ ID NO: 391941 - DNA, 120 bp, Artificial Sequence
  ENSG00000145087_5 (sequence is synthesized)
tggtgcagctgtcctacagctccaatttttgatcaatgagggtgccttggtcagtgcaagttcagatgatacacttcatttgtggaaccttagacaaaaaaggccagccatactccattc

SEQ ID NO: 391942 - DNA, 120 bp, Artificial Sequence
  ENSG00000145087_6 (sequence is synthesized)
tcttaaatttaaccgggaacgaattacttactgtcatctacctttccagagtaaatggctttatgttggaacagaaagaggaaatacacatattgtaaatattgaatctttcattctttc

SEQ ID NO: 391943 - DNA, 120 bp, Artificial Sequence
  ENSG00000145087_7 (sequence is synthesized)
tggatatgttatcatgtggaacaaggcaattgaactatccactaagactcatccaggtccagttgtacatttaagcgatagcccaagagatgaaggcaaactgctaataggttatgaaaa

SEQ ID NO: 391944 - DNA, 120 bp, Artificial Sequence
  ENSG00000145087_8 (sequence is synthesized)
tggtactgtagtattctgggacttgaaatctaaaagagcagaactgagagtttattatgatgaggctattcattcaattgattggcatcatgagggcaaacagttcatgtgcagccattc

SEQ ID NO: 391945 - DNA, 120 bp, Artificial Sequence
  ENSG00000145087_9 (sequence is synthesized)
agatggtagtttgactttatggaacctgaaaagcccaagtcgccctttccagaccacaattccacatggaaaaagtcaaagagaaggaagaaaatctgaatcttgtaaaccaattcttaa

SEQ ID NO: 391946 - DNA, 120 bp, Artificial Sequence
  ENSG00000145087_10 (sequence is synthesized)
agtagaatacaagacctgcaaaaacagcgaaccattcataatattctctggtgggctgtcctatgacaaagcttgtagaagaccaagtttaaccatcatgcatggaaaagcaattacagt

SEQ ID NO: 391947 - DNA, 120 bp, Artificial Sequence
  ENSG00000145087_11 (sequence is synthesized)
acttgaaatggatcatcctattgttgaatttctaactttatgtgaaacgccctatccaaatgaatttcaagaaccctatgctgtcgtggtacttctggagaaagatctcattgtagttga

SEQ ID NO: 391948 - DNA, 120 bp, Artificial Sequence
  ENSG00000145087_12 (sequence is synthesized)
tctgacacaaagcaattttccaatctttgaaaatccatatcccatggacattcatgaatcaccagttacatgcacagcatactttgcagattgtcctccggatttgattctagtactgta

SEQ ID NO: 391949 - DNA, 120 bp, Artificial Sequence
  ENSG00000145087_13 (sequence is synthesized)
ttctataggagtcaagcataaaaaacaaggatacagtaataaggagtggccaatcagtggaggagcttggaaccttggagcacaaacatatccagaaattattattactggtcatgcaga

SEQ ID NO: 391950 - DNA, 120 bp, Artificial Sequence
  ENSG00000145087_14 (sequence is synthesized)
tggatcaataaaattttgggatgcttctgcaataactctgcagatgctgtacaagctaaaaacttcaaaagtgtttgaaaaacagaaggtaggagaaggaaaacaaacatgtgaaattgt

SEQ ID NO: 391951 - DNA, 120 bp, Artificial Sequence
  ENSG00000145087_15 (sequence is synthesized)
agaggaagacccatttgccattcagatgatttactggtgtccagagagcagaatattctgtgtatcaggagtctctgcatatgtcataatttataaattcagcagacatgaaattacaac

SEQ ID NO: 391952 - DNA, 120 bp, Artificial Sequence
  ENSG00000145087_16 (sequence is synthesized)
agaaatagtgtcattagaggtacgacttcagtatgatgttgaagatattattacccctgaaccagaaacaagtcctccgtttccagatctctcagcccagcttccttcttcaaggagtct

SEQ ID NO: 391953 - DNA, 120 bp, Artificial Sequence
  ENSG00000145087_17 (sequence is synthesized)
ttctgggagcactaacactgttgctagtgaaggagtaacaaaggacagtattccatgcctcaatgtgaagacacggccagtgcgaatgcctccaggatatcaagcagaacttgttattca

SEQ ID NO: 391954 - DNA, 120 bp, Artificial Sequence
  ENSG00000145087_18 (sequence is synthesized)
attggtgtgggtagatggtgaacctccacaacagattactagtcttgctgtaagctcagcatatggaatagttgcatttgggaactgcaatgggttggctgtggtggattttatacagaa

SEQ ID NO: 391955 - DNA, 120 bp, Artificial Sequence
  ENSG00000145087_19 (sequence is synthesized)
gacagtactgttaagcatggggaccattgacctatatagatcaagtgacttataccagcgacaaccacggtctcctcgaaaaaacaaacagttcattgcagacaacttttgcatgcgtgg

SEQ ID NO: 391956 - DNA, 120 bp, Artificial Sequence
  ENSG00000145087_20 (sequence is synthesized)
cctgtctaacttttatcctgatttaacgaaacggatccgtacttcctatcagagtttaactgaactgaatgacagtccagttcccctagaacttgagcgctgcaagtctcctacctcaga

SEQ ID NO: 391957 - DNA, 120 bp, Artificial Sequence
  ENSG00000145087_21 (sequence is synthesized)
ccatgtaaatggacactgcacaagtccaacttctcagagttgcagttctggaaaacgtctttctagtgccgatgtttcaaaagtaaatcgctggggtcctggaagaccaccatttcgaaa

SEQ ID NO: 391958 - DNA, 120 bp, Artificial Sequence
  ENSG00000145087_22 (sequence is synthesized)
ggcccagtcagcagcctgcatggagatttctttaccagttacaacagaagaaaaccgagaaaattcctataatcgttctagaagctctagtatctccagtattgacaaagattctaaaga

SEQ ID NO: 391959 - DNA, 120 bp, Artificial Sequence
  ENSG00000145087_23 (sequence is synthesized)
agcaattacagcactatacttcatggactcctttgcacggaaaaatgactctaccatctctccttgtctgttcgttggaaccagtctgggaatggtgttaatcatctccttaaacctacc

SEQ ID NO: 391960 - DNA, 120 bp, Artificial Sequence
  ENSG00000145087_24 (sequence is synthesized)
attagcagatgaacaaaggtttacagagccagtcatggtattgccaagtggtacattcctctcattgaaaggagctgtgctaacattctcctgtatggaccgaatgggtggattaatgca

SEQ ID NO: 391961 - DNA, 120 bp, Artificial Sequence
  ENSG00000145087_25 (sequence is synthesized)
accgccatatgaagtttggagggatccaaacaacatagatgaaaatgaaaaatcttggagaaggaaagtggtaatgaactcatcttctgcatcccaagaaataggagatcatcagtatac

SEQ ID NO: 391962 - DNA, 120 bp, Artificial Sequence
  ENSG00000145087_26 (sequence is synthesized)
aataatctgctcagaaaaacaagccaaagtcttctcactgccttctcagacttgcctttatgttcataacatcacggagacatcttttatactgcaagcaaatgtggtggtcatgtgtag

SEQ ID NO: 391963 - DNA, 120 bp, Artificial Sequence
  ENSG00000145087_27 (sequence is synthesized)
cagtgcctgcttggcatgcttttgtgctaacggacatatcatgataatgagcctacctagtcttcgcccaatgttggatgttaattatttgccactgacagacatgaggatagcacgaac

SEQ ID NO: 391964 - DNA, 120 bp, Artificial Sequence
  ENSG00000145087_28 (sequence is synthesized)
attttgttttaccaatgaaggacaggcattatacctcgtctctcctactgaaattcagcggttaacatacagccaagaaatgtgtgataatctacaggacatgctaggagatttgtttac

SEQ ID NO: 391965 - DNA, 120 bp, Artificial Sequence
  ENSG00000145087_29 (sequence is synthesized)
tcccatagagacaccagaagctcaaaacagaggctttctcaagggactgtttggtggaagcggacaaacatttgacagagaagagctctttggggaagcttcggcaggaaaagcatcccg

SEQ ID NO: 391966 - DNA, 120 bp, Artificial Sequence
  ENSG00000145087_30 (sequence is synthesized)
cagccttgcgcaacacattcctggaccaggtagtatagaagggatgaaaggcgctgctggaggggtgatgggagagctgacccgtgcacggattgcacttgatgaaagaggacagaggct

SEQ ID NO: 391967 - DNA, 120 bp, Artificial Sequence
  ENSG00000145087_31 (sequence is synthesized)
aggagagctggaagagaaaactgcaggcatgatgaccagtgcagaagcattttccaaacatgcacatgagttaatgctgaaatacaaggataagaaatggtaccaattctgacttctaaa

SEQ ID NO: 391968 - DNA, 120 bp, Artificial Sequence
  ENSG00000145087_32 (sequence is synthesized)
gaagctgtgactgctttgagaaaccatattcagggaaaccaaatttattcccagcatcactactcaactgctagaagccagtttcttctacaaaatgttccatttacagtcaatctgaaa

SEQ ID NO: 391969 - DNA, 120 bp, Artificial Sequence
  ENSG00000145087_33 (sequence is synthesized)
ttttcataaaagagatgtatcagagacactgtgcaacccaaaggctggagccctggttaaaatcccaaaatacggctgaatttgccttttcccatgtggaatggagctatcatcttggca

SEQ ID NO: 391970 - DNA, 120 bp, Artificial Sequence
  ENSG00000145087_34 (sequence is synthesized)
tgtcattcgataaggatttatatttagtaactacggggagtcctcttgatttgaaaattcctgtacaaacaaaagcattaatgcacttaatgaaaaaaaatctttgcatgataaattaac

SEQ ID NO: 391971 - DNA, 120 bp, Artificial Sequence
  ENSG00000145087_35 (sequence is synthesized)
atcttaaggggaaaagaaaaaaaagcatgttgtgatagaagaaaaaaagattcatggtaaactatttctatcaattgggccacactcaacaatttaaaaaatctgcatttgaagatgtca

SEQ ID NO: 391972 - DNA, 120 bp, Artificial Sequence
  ENSG00000145087_36 (sequence is synthesized)
gtgcatttcaaatatatttgccatacccaactgaaacggaaaacaaaacaaaacaagaacccagagttttctcctcatctgtaactttcattgtactagaaccttattgaattcttatgg

SEQ ID NO: 391973 - DNA, 120 bp, Artificial Sequence
  ENSG00000145087_37 (sequence is synthesized)
caagagtctgattaatgttctctctccatgttttacatcattcacagttgtgtcaaaatcaaatattgccagtatagtaaattattcccaacacaatcagtttcatttctatcaccttca

SEQ ID NO: 391974 - DNA, 120 bp, Artificial Sequence
  ENSG00000145087_38 (sequence is synthesized)
gaatgggttgctgtttttagcacaaaccatgcagggttgggtcacctcaaagcattttcttcagcctggcttgtactctataggggagttggtagtaggtgtggggaatctataggaaca

SEQ ID NO: 391975 - DNA, 120 bp, Artificial Sequence
  ENSG00000145087_39 (sequence is synthesized)
gaactgacttcacaaaaagggaaatttcacacaccccaatttcagcttctaaagtgatatattttaaaagcttcatttgtatccttgtctgccagttacacagtatattactgttcaaac

SEQ ID NO: 391976 - DNA, 120 bp, Artificial Sequence
  ENSG00000145087_40 (sequence is synthesized)
ccagtagggtctgcaatcgaaaggtgctcttgcagcctgacattcacaaaccaaactggtcattctctttagtgtgattcagtaaaatctcagttaatgttttgggaaagggattctgat

SEQ ID NO: 391977 - DNA, 120 bp, Artificial Sequence
  ENSG00000145087_41 (sequence is synthesized)
ttatgacatttctgatttacaagggctttccttagaaaatacctttcggtttgatacttaccactggaaattggttcgatacttaccactggaaatctttataaaatatagtgatctgtt

SEQ ID NO: 391978 - DNA, 120 bp, Artificial Sequence
  ENSG00000145087_42 (sequence is synthesized)
tgctatcttggtctcagtcatcattatagacaatagaaatacataaagagtttaatgatacaaaatcaatgcttttgtccctaggtcaaataatataagccactagattatgtcaataga

SEQ ID NO: 391979 - DNA, 120 bp, Artificial Sequence
  ENSG00000145087_43 (sequence is synthesized)
tgccaaacacttgtcccttattaaagactcttttaaagctggaataaagaatatccttaacatgatacaaggtatctataactcaccagaaaagcaccagagtcaaaaccaaatagagac

SEQ ID NO: 391980 - DNA, 120 bp, Artificial Sequence
  ENSG00000145087_44 (sequence is synthesized)
acctactaccatttaacatgattctggaagtcaaaagttataggaatgtatatatacacattccaggacccatcctgtaatatgttgtttcgtcaagaaaagttttaattatggttttgg

SEQ ID NO: 391981 - DNA, 120 bp, Artificial Sequence
  ENSG00000145087_45 (sequence is synthesized)
cttattgaatttttgtttatcaaggtctcattggatttacatttgtgtttcttaagacttcacaattttcctggatttcaggttattttattagccaaaaaatcgtatttttatttcctt

SEQ ID NO: 391982 - DNA, 120 bp, Artificial Sequence
  ENSG00000145087_46 (sequence is synthesized)
tttagtctaattttttgctagaagttgtactttctagcaaatgtttctagtggtacaatgttctcagtaattttgaggagaacaaagatgagtgaaagagttagataatgtacactagga

SEQ ID NO: 391983 - DNA, 120 bp, Artificial Sequence
  ENSG00000145087_47 (sequence is synthesized)
tagcatttctcagagtccttgaatcctcttgttaagaaagcctctctgaatctcccagactcctgtgaacagccttacggtaacagaatctggcttggaaacacagacattacatgactg

SEQ ID NO: 391984 - DNA, 120 bp, Artificial Sequence
  ENSG00000145087_48 (sequence is synthesized)
tataatttatagaattataaaattatatggtaaaaatattaaagaaacttaagagtaggatctagaaaatactagtggccaaattgcaatgtattctttgtaccatctgtttcaaagact

SEQ ID NO: 391985 - DNA, 120 bp, Artificial Sequence
  ENSG00000145087_49 (sequence is synthesized)
tagttttctgattttcagaacaaatactttatcgtttctgtattttaaaaaaaactaaaagagtaaaatattagtttattttagaaataatgaaattcagtccaaagtagcagtacattt

SEQ ID NO: 391986 - DNA, 120 bp, Artificial Sequence
  ENSG00000145087_50 (sequence is synthesized)
gatgagtatttctgaagccttcaataagatttaacttgttttaacttgatctacatcgagatttctcaaaagcagcactattagctgaaagtctttgttgtggggaactgtcctgtgtat

SEQ ID NO: 391987 - DNA, 120 bp, Artificial Sequence
  ENSG00000145087_51 (sequence is synthesized)
tgtaggatgttagcaacatccctggcctctgtctactagatgccagtaagaacctcctagtaatgacaatcaaaatgtctccagtcattgccaaaatttctcccagttcacagccactat

SEQ ID NO: 391988 - DNA, 120 bp, Artificial Sequence
  ENSG00000145087_52 (sequence is synthesized)
tctacatcatacaaagaggtagattgtgtgaatatgtaatatatgttgttgtataaaactgtacaataagtatacaatgtcttagcaagataaattattatacccaaaattacatgtgtg

SEQ ID NO: 391989 - DNA, 120 bp, Artificial Sequence
  ENSG00000145087_53 (sequence is synthesized)
gttcatatgcaataagatacaattttgaagaaagcttataggaatcagtgaaaaataacaactacagaatattttaaggcacacagagaaaatatcaaaaaggacattatagcatttcac

SEQ ID NO: 391990 - DNA, 120 bp, Artificial Sequence
  ENSG00000145087_54 (sequence is synthesized)
tgtagaagtgcttaaaaccttggcctcagtgaatagatcaaaagtttataattagcacaccaattggaagtaaacaggtgcttctcaaatgcttgaaaagaaaaggctctttgaagtagt

SEQ ID NO: 391991 - DNA, 120 bp, Artificial Sequence
  ENSG00000145087_55 (sequence is synthesized)
taaaacgtgtctttcaaaattgcttttataagcccttccttaacgtaagggtaacttcatctcacaaactcctggttagtggaatccaaattaatgaggttttactgtatcaaaattatt

SEQ ID NO: 391992 - DNA, 120 bp, Artificial Sequence
  ENSG00000145087_56 (sequence is synthesized)
tttataattcaaagagatgatagcaataagaagaatctaatgtggatgtgatttttctctttgaacaattctgttctgttgcactgaccttagcacgcacgcacacacacacacaccatc

SEQ ID NO: 391993 - DNA, 120 bp, Artificial Sequence
  ENSG00000145087_57 (sequence is synthesized)
gccaccactaccatcatcatcttatcctcatctttggaaaataagtactgttgatccatgtaatcctttgcatagtctcatctttactatctttcttctatttcggaacataagaaaaat

SEQ ID NO: 391994 - DNA, 120 bp, Artificial Sequence
  ENSG00000145087_58 (sequence is synthesized)
actcctaataacttggacaatgatacagaaagtgactctgagccttagttaccatcaaaattacattctatctgctaaagcgacatcagaagataaggcttgcaaaccacagtcccaaca

SEQ ID NO: 391995 - DNA, 120 bp, Artificial Sequence
  ENSG00000145087_59 (sequence is synthesized)
agttgaccttgtctccctatgatttccttggaagataaggcctttttagtgttacagtagaaaatgggccttttcatttattcatctgtgagaagctagaggtatttgtttccctgataa

SEQ ID NO: 391996 - DNA, 120 bp, Artificial Sequence
  ENSG00000145087_60 (sequence is synthesized)
taacgtgagcaatagtccctaccttgaaatcatccattagtcttggagtttggagggaggaatgattgattcctcatttgttttaatcacctacaaaagcagtactactgactttgcttc

SEQ ID NO: 391997 - DNA, 120 bp, Artificial Sequence
  ENSG00000145087_61 (sequence is synthesized)
ttacacttcactgagccccagactttagggccccaatcattgtcaagatcattgtctaactggaactctgaaaggacagtgacagaactgaatgagatgttttccagtgattcagtcaca

SEQ ID NO: 391998 - DNA, 120 bp, Artificial Sequence
  ENSG00000145087_62 (sequence is synthesized)
aagacaattttctcagatcttttgaaagtgattctcaaataaataaatcaaaatccaactcctttccctcaaagtttctagggatctgaaggaaaaggtttactgttggagtcccttttt

SEQ ID NO: 391999 - DNA, 120 bp, Artificial Sequence
  ENSG00000145087_63 (sequence is synthesized)
atgtgacccatgtaccagttttaaaggcatcatctatactttatctacatgaagggatcaccatgactttgagagaaaaaagaatcagattaggcctaacattggttgaagaagattaaa

SEQ ID NO: 392000 - DNA, 120 bp, Artificial Sequence
  ENSG00000145087_64 (sequence is synthesized)
atagattcttatattcaagcagaagggaaaaatgaagccaatctagaaaagtaagctaaaaatcctctccttggcttaggatcattgggtcaaactgggagtatatctgtgtgattacaa

SEQ ID NO: 392001 - DNA, 120 bp, Artificial Sequence
  ENSG00000145087_65 (sequence is synthesized)
cctgctgctatgagaaaaaagaattgtaacttgaccatgttggctcacacagggcaatgcaaaagaagtcaaaacattcatatcaggtcttggtatctgtgtcaggagaaacgtggtggc

SEQ ID NO: 392002 - DNA, 120 bp, Artificial Sequence
  ENSG00000145087_66 (sequence is synthesized)
tttcacagcttcttcacctctgtcctctgtcatgcaactccatttttggctaggtactatttcacatgcacactgtcctgggtgccagaaatacttgtggtgtacttggtttgagcagta

SEQ ID NO: 392003 - DNA, 120 bp, Artificial Sequence
  ENSG00000145087_67 (sequence is synthesized)
cctctagtatgcaccattccagggaacatggttgtcaacataacaagtttagtgtgtgtatttgcagacaacatagccctgaaagcatgaaatgtagaataggtaaggtctgtcttagaa

SEQ ID NO: 392004 - DNA, 120 bp, Artificial Sequence
  ENSG00000145087_68 (sequence is synthesized)
aaggaggaggaagtaccaatttggtgcaagaagatcgtggtgaggaaggacatgggagccacagtgaagtgaaagaggctttaaggaatcagatgcacagatggatgctttgatttacac

SEQ ID NO: 392005 - DNA, 120 bp, Artificial Sequence
  ENSG00000145087_69 (sequence is synthesized)
atttatctagaggagtgattctcaaccttgactgtacataagaatcacctcaggaaatttttaaattcccaattatattaaaatcatttggagtgggaaccagacaccaatatttgcgaa

SEQ ID NO: 392006 - DNA, 120 bp, Artificial Sequence
  ENSG00000145087_70 (sequence is synthesized)
agcctccaaggcggttctaatgtccagccaaagttgattatcactgctttatggccaactaaggaaaccttgtttgtctgccttggctggtgctccagccccagttctgagtggtcaggg

SEQ ID NO: 392007 - DNA, 120 bp, Artificial Sequence
  ENSG00000145087_71 (sequence is synthesized)
aaggcaagatgtaagatatagtaatggtatttattctgtatgtctcacagaacaaaagcatttgagaatttctgaccaggcagtgctccatcaactcttaataatcatctttgtgatatt

SEQ ID NO: 392008 - DNA, 120 bp, Artificial Sequence
  ENSG00000145087_72 (sequence is synthesized)
ctcctatgtgacttgtccatcaattattccaattcaaaggtctaggttttttttcaattgtcttacacatgtgacatcacaagataccagaagtagcacagtaaattcaagagcatataa

SEQ ID NO: 392009 - DNA, 120 bp, Artificial Sequence
  ENSG00000145087_73 (sequence is synthesized)
agctaagtggaaaactaattcttcatatttagacagtggaaattctcaaaacaatcatttgctaaattaggtccaaatttattattcattcttcttctggaggagacatgggtaccaggt

SEQ ID NO: 392010 - DNA, 120 bp, Artificial Sequence
  ENSG00000145087_74 (sequence is synthesized)
acctgttctgctgtaggtatatttcactggacttggtcttagcaaaaaggaagaacaaatcttcctttttgattgttatctcaatcaaaagctcccagggccacttggatttattttctt

SEQ ID NO: 392011 - DNA, 120 bp, Artificial Sequence
  ENSG00000145087_75 (sequence is synthesized)
agtctttggacatgtgtttaaaggaaaagaatacctgtaacttcctatatgacatccagtgccctgaaagggtgcttacaccttcaaaaaaggagagtccagcctatcaaaggcagtaac

SEQ ID NO: 392012 - DNA, 120 bp, Artificial Sequence
  ENSG00000145087_76 (sequence is synthesized)
acataatgagaagaaactcagagttattgcctttcatactgctttccctctgctgttggcccacccttcttgactgcaaagccagaaaataaactagatggtggttttggacaattgtac

SEQ ID NO: 392013 - DNA, 120 bp, Artificial Sequence
  ENSG00000145087_77 (sequence is synthesized)
acaggaacagaatctctaataacctataatttttagtacttaattatgtgatgttttattctaggaaataagaaacagatgacatcattgatgtatctttctttcatcttcagaattttt

SEQ ID NO: 392014 - DNA, 120 bp, Artificial Sequence
  ENSG00000145087_78 (sequence is synthesized)
gcatcttttcagaaaatgacaaattactatttttctgttgcactcagcaattgtgactatacttaacaaaattcttgtagtctgtagagatatcaataaaattgtatatgtttgtacata

SEQ ID NO: 392015 - DNA, 120 bp, Artificial Sequence
  ENSG00000145087_79 (sequence is synthesized)
ccagaccacaattccacatggtaagatgtatgctttcaaaaggaataaacactggcaattcagtgccttgacttgaagtaagagagatggtattaatgcgtttggtagaaaaaagtaata

SEQ ID NO: 392016 - DNA, 120 bp, Artificial Sequence
  ENSG00000145087_80 (sequence is synthesized)
acagatcccaacattgtaccccaaactttccatacttcccttcttcctaccaacccacatccctgttttgtaagctgtagttatgtactgtcccaaccaaaaattggataatggatggtt

SEQ ID NO: 392017 - DNA, 120 bp, Artificial Sequence
  ENSG00000145087_81 (sequence is synthesized)
gatatatctggggcagaggagataatataggaaattttgtcacttttaagggctgaggagccagtgagagaatggcactatttagatgtgactttcagagttaattcctatactacttta

SEQ ID NO: 392018 - DNA, 120 bp, Artificial Sequence
  ENSG00000145087_82 (sequence is synthesized)
tagtctgttgttttctagattctcccacttgtttccatttctgccatttgattccagtaagttatgaagactgtggttttaattttaggttttacttttcttattgccttccacattgag

SEQ ID NO: 392019 - DNA, 120 bp, Artificial Sequence
  ENSG00000145087_83 (sequence is synthesized)
aagagcattttaatcctaaatgaggattttaatcttaattgaggatttatattggatctgtatacctaatggggaagaataagcaattcaaatgtataaatatatataattcagatgact

SEQ ID NO: 392020 - DNA, 120 bp, Artificial Sequence
  ENSG00000145087_84 (sequence is synthesized)
aaattatttgataatattggtgatgatctgagttctatgtttacctcatatcattgattatttgtaataatagatatgtcagaaactaacagttgatcaaacatattctatgttacagtt

SEQ ID NO: 392021 - DNA, 120 bp, Artificial Sequence
  ENSG00000145087_85 (sequence is synthesized)
tctgagcgttcgttatcatgtcacatttggaaagtagtggtatgttttctgtaatgggtgacccatagatcacaagcattcttagaattatttcatgctgtttgtctgccatttttttgt

SEQ ID NO: 392022 - DNA, 120 bp, Artificial Sequence
  ENSG00000145087_86 (sequence is synthesized)
accatagttacatgctccatcagtaaatgatcaaattattgcaacattcttccaggatgtaaatgttttagtctttagctggtttacttagagattactttacatttagatgcttactta

SEQ ID NO: 392023 - DNA, 120 bp, Artificial Sequence
  ENSG00000145087_87 (sequence is synthesized)
gagatgctttatttagagattgccattacagaaaccttgggtagatattagctatacataccactcaggattaactatttatttctacgataggggataagttctgtccacacaccccca

SEQ ID NO: 392024 - DNA, 120 bp, Artificial Sequence
  ENSG00000145087_88 (sequence is synthesized)
gctaacccccaatactcatgccttttatatgtaaaagtataatatgagctagtcataaattttctacttacttccttatgttcttctcaaatatcagtttctattagttcttttggctag

SEQ ID NO: 392025 - DNA, 120 bp, Artificial Sequence
  ENSG00000145087_89 (sequence is synthesized)
actggacatttgatacttttattttttttaccatatccatatttatttcatcagtttggattgttttctattattctgcttttctgttgaaataaagttctgtttacaggttgttcaaca

SEQ ID NO: 392026 - DNA, 120 bp, Artificial Sequence
  ENSG00000145088_0 (sequence is synthesized)
aagtgcagctgcttcaggctgaggtggcagatagtgagcgctggtggcggagttaaagtcaaagcaggagagtaattatgaatagcgcagcgggattctcacacctagaccgtcgcgagc

SEQ ID NO: 392027 - DNA, 120 bp, Artificial Sequence
  ENSG00000145088_1 (sequence is synthesized)
gggttctcaagttaggggagagtttcgagaagcagccgcgctgcgccttccacactgtgcgctatgacttcaaacctgcttctattgacacttcttctgaaggataccttgaggttggtg

SEQ ID NO: 392028 - DNA, 120 bp, Artificial Sequence
  ENSG00000145088_2 (sequence is synthesized)
aaggtgaacaggtgaccataactctgccaaatatagaaggttcaactccaccagtaactgttttcaaaggttcaaaaaaaccttacttaaaagaatgcattttgattattaaccatgata

SEQ ID NO: 392029 - DNA, 120 bp, Artificial Sequence
  ENSG00000145088_3 (sequence is synthesized)
ctggagaatgtcggctagaaaaactcagcagcaacatcactgtaaaaaaaacaagagttgaaggaagcagtaaaattcagtatcgtaaagaacaacagcaacaacaaatgtggaattcag

SEQ ID NO: 392030 - DNA, 120 bp, Artificial Sequence
  ENSG00000145088_4 (sequence is synthesized)
gataagatgtccccagcatctccaatagatgatatcgaaagagaactgaaggcagaagctagtctaatggaccagatgagtagttgtgatagttcatcagattccaaaagttcatcatct

SEQ ID NO: 392031 - DNA, 120 bp, Artificial Sequence
  ENSG00000145088_5 (sequence is synthesized)
tcaagtagtgaggatagttctagtgactcagaagatgaagattgcaaatcctctacttctgatacagggaattgtgtctcaggacatcctaccatgacacagtacaggattcctgatata

SEQ ID NO: 392032 - DNA, 120 bp, Artificial Sequence
  ENSG00000145088_6 (sequence is synthesized)
gatgccagtcataatagatttcgagacaacagtggccttctgatgaatactttaagaaatgatttgcagctgagtgaatcaggaagtgacagtgatgactgaagaaatatttagctataa

SEQ ID NO: 392033 - DNA, 120 bp, Artificial Sequence
  ENSG00000145088_7 (sequence is synthesized)
tgatgactgaagaaatatttagctataaataaaaatttatacagcatgtataatttattttgtattaacaataaaaattcctaagactgagggaaatatgtcttaacttttgatgataaa

SEQ ID NO: 392034 - DNA, 120 bp, Artificial Sequence
  ENSG00000145088_8 (sequence is synthesized)
aagttggagtttctcaaggcttacttttgggttctttttttcttttcattctacaatttctccctaaataacttcctccatgtttctgttgcagtcaatacttatgtgtaggtaacttgc

SEQ ID NO: 392035 - DNA, 120 bp, Artificial Sequence
  ENSG00000145088_9 (sequence is synthesized)
agagtaattatgaatagcgcagcgggattctcacacctagaccgtcgcgagcgggttctcaagttaggggagagtttcgagaagcagccgcgctgcgccttccacactgtgcgctagctc

SEQ ID NO: 392036 - DNA, 120 bp, Artificial Sequence
  ENSG00000145088_10 (sequence is synthesized)
cccacgatgagatggtgctgtgctggctctgcagtttctctctcttcagtcccattttccggaagtgtgatatgcgtctttatctggtttttccatgcctttttctcaaatagtatctac

SEQ ID NO: 392037 - DNA, 120 bp, Artificial Sequence
  ENSG00000145088_11 (sequence is synthesized)
ttctcaggagcaattctgcctgtctgatataagacttcaggcaaacccggatgtgaatcctggtctccaccacctatatatataatgtgactttgggaacattctctaagctctcaacct

SEQ ID NO: 392038 - DNA, 120 bp, Artificial Sequence
  ENSG00000145088_12 (sequence is synthesized)
cagttttcttatggctaaaagataatagtaatatttacatttcatggtttgtgtaaggattaaataagatagcataaacaacctggaacaatatttgccacagggtagagaataaatagt

SEQ ID NO: 392039 - DNA, 120 bp, Artificial Sequence
  ENSG00000145088_13 (sequence is synthesized)
agtcaccattaatgttgaagagttatattcatatgtgtacgaggggtgctaatgaatgtaatttagtcagactttgaaacagcatttatcagagtttagcaataaaaactatcaaaaaga

SEQ ID NO: 392040 - DNA, 120 bp, Artificial Sequence
  ENSG00000145103_0 (sequence is synthesized)
ccgaggggttccttggagaaggtggtgcgtcctggggcggcagctgaggaagaaagacgcagtgccccgaagcccctgagctgaaaagggccagaaagggggcggcatggcatggcccaa

SEQ ID NO: 392041 - DNA, 120 bp, Artificial Sequence
  ENSG00000145103_1 (sequence is synthesized)
actgcccgcaccttggctgctgctctgcacctggctcccagcagggtgcctgtccttgcttgtgacggtccagcacacagaacgctatgtcaccctgtttgcctctatcatcctcaaatg

SEQ ID NO: 392042 - DNA, 120 bp, Artificial Sequence
  ENSG00000145103_2 (sequence is synthesized)
tgactacaccacctctgcccagctccaggacgtggtggtgacatggcgcttcaagtccttctgcaaggaccctatctttgactactactcagcgtcataccaggcagctttatccctggg

SEQ ID NO: 392043 - DNA, 120 bp, Artificial Sequence
  ENSG00000145103_3 (sequence is synthesized)
ccaggacccatccaatgactgcaacgacaaccagcgggaagttcgcatagtggcccagcggcgggggcagaatgagcccgtgctgggggtagattaccggcagcgcaagatcaccatcca

SEQ ID NO: 392044 - DNA, 120 bp, Artificial Sequence
  ENSG00000145103_4 (sequence is synthesized)
gaaccgagcagatctcgtgataaatgaagtgatgtggtgggaccatggagtgtattactgcaccattgaggctccaggggacacatcaggagaccccgataaggaagtaaagctcatcgt

SEQ ID NO: 392045 - DNA, 120 bp, Artificial Sequence
  ENSG00000145103_5 (sequence is synthesized)
cctacactggctgacagtgatcttcatcatcctgggagccctcctcctcctgctgctgattggagtgtgctggtgccagtgctgtcctcagtattgctgctgctatatccgctgtccctg

SEQ ID NO: 392046 - DNA, 120 bp, Artificial Sequence
  ENSG00000145103_6 (sequence is synthesized)
ctgtcctgcccactgctgctgtcctgaggaagatttgtccctgccgtccagcctcccgcagatgccaatgacccagaccaccaatcagcctcccatcgccaatggtgtcctggagtattt

SEQ ID NO: 392047 - DNA, 120 bp, Artificial Sequence
  ENSG00000145103_7 (sequence is synthesized)
ggagaaagaactgcggaacctcaacctggcccagcctctgccccctgacctcaaaggcagatttggccatccctgcagcatgctgtcctccctgggctctgaggtcgtggaacgcagaat

SEQ ID NO: 392048 - DNA, 120 bp, Artificial Sequence
  ENSG00000145103_8 (sequence is synthesized)
catccacctgcccccactgatcagagacctgtcatcctcaaggaggaccagtgactccctgcaccagcagtggctcaccccaattccctccaggccctgggatctgagggaggggagaag

SEQ ID NO: 392049 - DNA, 120 bp, Artificial Sequence
  ENSG00000145103_9 (sequence is synthesized)
ccaccaccattaccctgatttccaccaggagctccaggaccgggggccaaagtcttgggcattggaaagaagggagttggacccatcgtggagtggaaggcaccgtagctctaggctgaa

SEQ ID NO: 392050 - DNA, 120 bp, Artificial Sequence
  ENSG00000145103_10 (sequence is synthesized)
tgggtcacccatacactggtcagacagggacagcctaagcgatgtcccctcatccagtgaggcacgctggcggccgagccaccctcctttcaggagccgctgtcaggagaggccccgcag

SEQ ID NO: 392051 - DNA, 120 bp, Artificial Sequence
  ENSG00000145103_11 (sequence is synthesized)
actcagaggcacgggagacgacgcaggcaccgcagctactctcctcccttgccctccggcctcagttcctggagctctgaagaggacaaggagaggcagccccagagctggcgggcccac

SEQ ID NO: 392052 - DNA, 120 bp, Artificial Sequence
  ENSG00000145103_12 (sequence is synthesized)
cgccgcggctcgcactccccacactggcccgaggagaagccgcctagctaccgctcacttgatatcactccaggcaagaatagcaggaaaaaagggagtgtggagaggcgctcggagaaa

SEQ ID NO: 392053 - DNA, 120 bp, Artificial Sequence
  ENSG00000145103_13 (sequence is synthesized)
gacagctctcatagtggaaggagtgtggtcatttagtcaccaagcacagcacaacttctgtggctacttctcggctcctgtgtgtcatcagcatcacctaggtttccagctgacttggga

SEQ ID NO: 392054 - DNA, 120 bp, Artificial Sequence
  ENSG00000145103_14 (sequence is synthesized)
gggaactgcaagtctgagtctaacagtttttggcttagattctgagaatcaaatagaagaattttaaatacaagagtttgagattgggtatagtggctcacacctgtaatcacagcactt

SEQ ID NO: 392055 - DNA, 88 bp, Artificial Sequence
  ENSG00000145103_15 (sequence is synthesized)
cacctgtaatcacagcactttgggaggctaagaatcacttgagactaggagttcaagatcagcctgggataaaaattagttaggtgtg

SEQ ID NO: 392056 - DNA, 120 bp, Artificial Sequence
  ENSG00000145103_16 (sequence is synthesized)
tactcaagaggctgaggcagaaggatcccttgagcccaggagtgcaaggctgcaatgagccaggatcccatgatcacacatctgtattccagcctgggcaatagagcaagtccccattac

SEQ ID NO: 392057 - DNA, 120 bp, Artificial Sequence
  ENSG00000145103_17 (sequence is synthesized)
taaaaaacccaaaaggccaaaaaacaaaaaagttagagttcgaggaattaccaactgtagttttagccttggttcatgctctcttgcatatttatataatctctgacttgtaatggaccc

SEQ ID NO: 392058 - DNA, 120 bp, Artificial Sequence
  ENSG00000145103_18 (sequence is synthesized)
tgactggaatgtgatccctcaggaacttagtagcctgagtctttcagtagactacactgcccagaaccctggccattctcaaaatgagaacttgggaatgtttaagaagaaatcaaacat

SEQ ID NO: 392059 - DNA, 120 bp, Artificial Sequence
  ENSG00000145103_19 (sequence is synthesized)
gtttcaggaaaaggaaatctatggagtattatagggacattcccatgggaatgtatcttcctccatggcatgtcttgagggtcctttcttgttaggagtttatcctgccagcccataaat

SEQ ID NO: 392060 - DNA, 120 bp, Artificial Sequence
  ENSG00000145103_20 (sequence is synthesized)
ggactatttattgtaagtgtagaaaatcacagagaagcagttttgcaccagccttattcctgtgccttgttttcctcttgctctttttttacctgtatatctaatttatattttcatata

SEQ ID NO: 392061 - DNA, 120 bp, Artificial Sequence
  ENSG00000145103_21 (sequence is synthesized)
tattgtgtattgattgaagtcactttaaatccttcttgggaatgacacagtatataaataaggaagaaagaaaacatgccaagctgagcatgctgctccaaataaatatctgctttccta

SEQ ID NO: 392062 - DNA, 120 bp, Artificial Sequence
  ENSG00000145103_22 (sequence is synthesized)
agcaggcccaggccctaggtcctcagatgatgggaaaacccctgtactggggggcggacaggagctcccaggtttcatcttatccaatgcacccgctgctgcagcgagatttgtccctgc

SEQ ID NO: 392063 - DNA, 120 bp, Artificial Sequence
  ENSG00000145103_23 (sequence is synthesized)
taagaacccagactctgtctgtgagctcctagccaggtcaggcaggatggcaggcaatatcttttgcccatttgcattgtttttcttacccatgagcagagtaggtcaccttcagcattt

SEQ ID NO: 392064 - DNA, 120 bp, Artificial Sequence
  ENSG00000145107_0 (sequence is synthesized)
aaagagtcctggaaagacaaccttcaggtccagccctggagctggaggagtggagccccactctgaagacgcagcctttctccaggttctgtctctcccattctgattcttgacaccaga

SEQ ID NO: 392065 - DNA, 120 bp, Artificial Sequence
  ENSG00000145107_1 (sequence is synthesized)
tgcaggatggtgtcctctccctgcacgcaggcaagctcacggacttgctcccgtatcctgggactgagccttgggactgcagccctgtttgctgctggggccaacgtggcactcctcctt

SEQ ID NO: 392066 - DNA, 120 bp, Artificial Sequence
  ENSG00000145107_2 (sequence is synthesized)
cctaactgggatgtcacctacctgttgaggggcctccttggcaggcatgccatgctgggaactgggctctggggaggaggcctcatggtactcactgcagctatcctcatctccttgatg

SEQ ID NO: 392067 - DNA, 120 bp, Artificial Sequence
  ENSG00000145107_3 (sequence is synthesized)
ggctggagatacggctgcttcagtaagagtgggctctgtcgaagcgtgcttactgctctgttgtcaggtggcctggctttacttggagccctgatttgctttgtcacttctggagttgct

SEQ ID NO: 392068 - DNA, 120 bp, Artificial Sequence
  ENSG00000145107_4 (sequence is synthesized)
atatggttacccattcaaagacctgcatagtaggaattatctgtatgaccgttcgctctggaactccgtctgcctggagccctctgcagctgttgtctggcacgtgtccctcttctccgc

SEQ ID NO: 392069 - DNA, 120 bp, Artificial Sequence
  ENSG00000145107_5 (sequence is synthesized)
ccttctgtgcatcagcctgctccagcttctcctggtggtcgttcatgtcatcaacagcctcctgggccttttctgcagcctctgcgagaagtgacaggcagaaccttcacttgcaagcat

SEQ ID NO: 392070 - DNA, 120 bp, Artificial Sequence
  ENSG00000145107_6 (sequence is synthesized)
gggtgttttcatcatcggctgtcttgaatcctttctacaaggagtgggtacgaattataaacaaacttcccctttaggtatccctggagtaataatgacaacaaaattcactgcaggtcg

SEQ ID NO: 392071 - DNA, 120 bp, Artificial Sequence
  ENSG00000145107_7 (sequence is synthesized)
gtggaatgatagaatgcattttaaatcacattgtaaacttccaggtgatccatggataggataaataactaagttattataattgtttaggaatttatagtccataaaatatcctccagc

SEQ ID NO: 392072 - DNA, 75 bp, Artificial Sequence
  ENSG00000145107_8 (sequence is synthesized)
cgagtcaccgtgcctggccaactaatgaaaagtttaaagaatttatatctagttttggatgttaggcatgcacac

SEQ ID NO: 392073 - DNA, 120 bp, Artificial Sequence
  ENSG00000145107_9 (sequence is synthesized)
aaagaatttatatctagttttggatgttaggcatgcacacacaagtgcatgcacactcatacacatcatctccacaagccccatcctggctcagccctattctgatgggtcagcaggacc

SEQ ID NO: 392074 - DNA, 120 bp, Artificial Sequence
  ENSG00000145107_10 (sequence is synthesized)
ccaaggagagaagggtgggtccttggcactaagacagttcacagtggttagctgactccttcttgcctccattctttcaggaactgcatatagtacagaacatgacagcgattcgaaaaa

SEQ ID NO: 392075 - DNA, 120 bp, Artificial Sequence
  ENSG00000145107_11 (sequence is synthesized)
caatatcccagctggctgtgatggctcatgcctgtagtcccagcacttcggaaggctgaggtgggataatcacttgagcccaagagttcaatagtagcctgggcagcatagccagatcct

SEQ ID NO: 392076 - DNA, 120 bp, Artificial Sequence
  ENSG00000145107_12 (sequence is synthesized)
atctctacaaaaattaaaaagattagccacgcgcggtggcattcgcctgtagttccaggtactccagaggctgaggtgggaggactgcttgagtccaagaggtcgaggctgaagtgagcg

SEQ ID NO: 392077 - DNA, 120 bp, Artificial Sequence
  ENSG00000145113_0 (sequence is synthesized)
ggagcttccccagggagccagggggacttttgccgcagccatgaagggggcacgctggaggagggtcccctgggtgtccctgagctgcctgtgtctctgcctccttccgcatgtggtccc

SEQ ID NO: 392078 - DNA, 120 bp, Artificial Sequence
  ENSG00000145113_1 (sequence is synthesized)
aggaatgacaacaccgtcactgaagacagacggtgggagacgcacagccacatcaccaccccccacaacctcccagaccatcatttccaccattcccagcactgccatgcacacccgctc

SEQ ID NO: 392079 - DNA, 120 bp, Artificial Sequence
  ENSG00000145113_2 (sequence is synthesized)
cacagctgcccccatccccatcctgcctgagagaggagtttccctcttcccctatggggcaggcgccggggacctggagttcgtcaggaggaccgtggacttcacctccccactcttcaa

SEQ ID NO: 392080 - DNA, 120 bp, Artificial Sequence
  ENSG00000145113_3 (sequence is synthesized)
gccggcgactggcttcccccttggctcctctctccgtgattccctctacttcacagacaatggccagatcatcttcccagagtcagactaccagattttctcctaccccaacccactccc

SEQ ID NO: 392081 - DNA, 120 bp, Artificial Sequence
  ENSG00000145113_4 (sequence is synthesized)
aacaggcttcacaggccgggaccctgtggccctggtggctccgttctgggacgatgctgacttctccactggtcgggggaccacattttatcaggaatacgagacgttctatggtgaaca

SEQ ID NO: 392082 - DNA, 120 bp, Artificial Sequence
  ENSG00000145113_5 (sequence is synthesized)
cagcctgctagtccagcaggccgagtcttggattagaaagatgacaaacaacgggggctacaaggccaggtgggccctaaaggtcacgtgggtcaatgcccacgcctatcctgcccagtg

SEQ ID NO: 392083 - DNA, 120 bp, Artificial Sequence
  ENSG00000145113_6 (sequence is synthesized)
gaccctcgggagcaacacctaccaagccatcctctccacggacgggagcaggtcctatgccctgtttctctaccagagcggtgggatgcagtgggacgtggcccagcgctcaggcaaccc

SEQ ID NO: 392084 - DNA, 120 bp, Artificial Sequence
  ENSG00000145113_7 (sequence is synthesized)
ggtgctcatgggcttctctagtggagatggctatttcgaaaacagcccactgatgtcccagccagtgtgggagaggtatcgccctgatagattcctgaattccaactcaggcctccaagg

SEQ ID NO: 392085 - DNA, 120 bp, Artificial Sequence
  ENSG00000145113_8 (sequence is synthesized)
gctgcagttctacaggctacaccgggaagaaaggcccaactaccgtctcgagtgcctgcagtggctgaagagccagcctcggtggcccagctggggctggaaccaggtctcctgcccttg

SEQ ID NO: 392086 - DNA, 120 bp, Artificial Sequence
  ENSG00000145113_9 (sequence is synthesized)
ttcctggcagcagggacgacgggacttacgattccaacccgtcagcataggtcgctggggcctcggcagtaggcagctgtgcagcttcacctcttggcgaggaggcgtgtgctgcagcta

SEQ ID NO: 392087 - DNA, 120 bp, Artificial Sequence
  ENSG00000145113_10 (sequence is synthesized)
cgggccctggggagagtttcgtgaaggctggcacgtgcagcgtccttggcagttggcccaggaactggagccacagagctggtgctgccgctggaatgacaagccctacctctgtgccct

SEQ ID NO: 392088 - DNA, 120 bp, Artificial Sequence
  ENSG00000145113_11 (sequence is synthesized)
gtaccagcagaggcggccccacgtgggctgtgctacatacaggcccccacagcccgcctggatgttcggggacccccacatcaccaccttggatggtgtcagttacaccttcaatgggct

SEQ ID NO: 392089 - DNA, 120 bp, Artificial Sequence
  ENSG00000145113_12 (sequence is synthesized)
gggggacttcctgctggtcggggcccaagacgggaactcctccttcctgcttcagggccgcaccgcccagactggctcagcccaggccaccaacttcatcgcctttgcggctcagtaccg

SEQ ID NO: 392090 - DNA, 120 bp, Artificial Sequence
  ENSG00000145113_13 (sequence is synthesized)
ctccagcagcctgggccccgtcacggtccaatggctccttgagcctcacgacgcaatccgtgtcctgctggataaccagactgtgacatttcagcctgaccatgaagacggcggaggcca

SEQ ID NO: 392091 - DNA, 120 bp, Artificial Sequence
  ENSG00000145113_14 (sequence is synthesized)
ggagacgttcaacgccaccggagtcctcctgagccgcaacggctctgaggtctcggccagcttcgacggctgggccaccgtctcggtgatcgcgctctccaacatcctccacgcctccgc

SEQ ID NO: 392092 - DNA, 120 bp, Artificial Sequence
  ENSG00000145113_15 (sequence is synthesized)
cagcctcccgcccgagtaccagaaccgcacggaggggctcctgggggtctggaataacaatccagaggacgacttcaggatgcccaatggctccaccattcccccagggagccctgagga

SEQ ID NO: 392093 - DNA, 120 bp, Artificial Sequence
  ENSG00000145113_16 (sequence is synthesized)
acctggcagatcaacgggacaggcctccttggcaagaggaatgaccagctgccttccaacttcacccctgttttctactcacaactgcaaaaaaacagctcctgggctgaacatttgatc

SEQ ID NO: 392094 - DNA, 120 bp, Artificial Sequence
  ENSG00000145113_17 (sequence is synthesized)
tccaactgtgacggagatagctcatgcatctatgacaccctggccctgcgcaacgcaagcatcggacttcacacgagggaagtcagtaaaaactacgagcaggcgaacgccaccctcaat

SEQ ID NO: 392095 - DNA, 120 bp, Artificial Sequence
  ENSG00000145113_18 (sequence is synthesized)
cagtacccgccctccatcaatggtggtcgtgtgattgaagcctacaaggggcagaccacgctgattcagtacaccagcaatgctgaggatgccaacttcacgctcagagacagctgcacc

SEQ ID NO: 392096 - DNA, 120 bp, Artificial Sequence
  ENSG00000145113_19 (sequence is synthesized)
gacttggagctctttgagaatgggacgttgctgtggacacccaagtcgctggagccattcactctggagattctagcaagaagtgccaagattggcttggcatctgcactccagcccagg

SEQ ID NO: 392097 - DNA, 120 bp, Artificial Sequence
  ENSG00000145113_20 (sequence is synthesized)
actgtggtctgccattgcaatgcagagagccagtgtttgtacaatcagaccagcagggtgggcaactcctccctggaggtggctggctgcaagtgtgacgggggcaccttcggccgctac

SEQ ID NO: 392098 - DNA, 120 bp, Artificial Sequence
  ENSG00000145113_21 (sequence is synthesized)
tgcgagggctccgaggatgcctgtgaggagccgtgcttcccgagtgtccactgcgttcctgggaagggctgcgaggcctgccctccaaacctgactggggatgggcggcactgtgcggct

SEQ ID NO: 392099 - DNA, 120 bp, Artificial Sequence
  ENSG00000145113_22 (sequence is synthesized)
ctggggagctctttcctgtgtcagaaccagtcctgccctgtgaattactgctacaatcaaggccactgctacatctcccagactctgggctgtcagcccatgtgcacctgccccccagcc

SEQ ID NO: 392100 - DNA, 120 bp, Artificial Sequence
  ENSG00000145113_23 (sequence is synthesized)
ttcactgacagccgctgcttcctggctgggaacaacttcagtccaactgtcaacctagaacttcccttaagagtcatccagctcttgctcagtgaagaggaaaatgcctccatggcagaa

SEQ ID NO: 392101 - DNA, 120 bp, Artificial Sequence
  ENSG00000145113_24 (sequence is synthesized)
gtcaacgcctcggtggcatacagactggggaccctggacatgcgggcctttctccgcaacagccaagtggaacgaatcgattctgcagcaccggcctcgggaagccccatccaacactgg

SEQ ID NO: 392102 - DNA, 120 bp, Artificial Sequence
  ENSG00000145113_25 (sequence is synthesized)
atggtcatctcggagttccagtaccgccctcggggcccggtcattgacttcctgaacaaccagctgctggccgcggtggtggaggcgttcttataccacgttccacggaggagtgaggag

SEQ ID NO: 392103 - DNA, 120 bp, Artificial Sequence
  ENSG00000145113_26 (sequence is synthesized)
cccaggaacgacgtggtcttccagcccatctccggggaagacgtgcgcgatgtgacagccctgaacgtgagcacgctgaaggcttacttcagatgcgatggctacaagggctacgacctg

SEQ ID NO: 392104 - DNA, 120 bp, Artificial Sequence
  ENSG00000145113_27 (sequence is synthesized)
gtctacagcccccagagcggcttcacctgcgtgtccccgtgcagtaggggctactgtgaccatggaggccagtgccagcacctgcccagtgggccccgctgcagctgtgtgtccttctcc

SEQ ID NO: 392105 - DNA, 120 bp, Artificial Sequence
  ENSG00000145113_28 (sequence is synthesized)
atctacacggcctggggcgagcactgtgagcacctgagcatgaaactcgacgcgttcttcggcatcttctttggggccctgggcggcctcttgctgctgggggtcgggacgttcgtggtc

SEQ ID NO: 392106 - DNA, 120 bp, Artificial Sequence
  ENSG00000145113_29 (sequence is synthesized)
ctgcgcttctggggttgctccggggccaggttctcctatttcctgaactcagctgaggccttgccttgaaggggcagctgtggcctaggctacctcaagactcacctcatccttaccgca

SEQ ID NO: 392107 - DNA, 120 bp, Artificial Sequence
  ENSG00000145113_30 (sequence is synthesized)
catttaaggcgccattgcttttgggagactggaaaagggaaggtgactgaaggctgtcaggattcttcaaggagaatgaatactgggaatcaagacaagactataccttatccataggcg

SEQ ID NO: 392108 - DNA, 120 bp, Artificial Sequence
  ENSG00000145113_31 (sequence is synthesized)
ggcgcaggtgcacagggggaggccataaagatcaaacatgcatggatgggtcctcacgcagacacacccacagaaggacactagcctgtgcacgcgcgcgtgcacacacacacacacaca

SEQ ID NO: 392109 - DNA, 120 bp, Artificial Sequence
  ENSG00000145113_32 (sequence is synthesized)
agttcataatgtggtgatggccctaagttaagcaaaatgcttctgcacacaaaactctctggtttacttcaaattaactctatttaaataaagtctctctgactttttgtgtctccaaaa

SEQ ID NO: 392110 - DNA, 120 bp, Artificial Sequence
  ENSG00000145113_33 (sequence is synthesized)
agtcacctcaacaggctcaacaacagcgacactagagggacaatcaactgcagcttcttcaaggacctctaatcaggacatatcagcttcatctcagaaccaccagactaagagcacgga

SEQ ID NO: 392111 - DNA, 120 bp, Artificial Sequence
  ENSG00000145113_34 (sequence is synthesized)
gaccaccagcaaagctcaaaccgacaccctcacgcagatgatgacatcaactcttttttcttccccaagtgtacacaatgtgatggagacagctcctccagatgaaatgaccacatcatt

SEQ ID NO: 392112 - DNA, 120 bp, Artificial Sequence
  ENSG00000145113_35 (sequence is synthesized)
tccctccagtgtcaccaacacactcatgatgacatcaaagactataacaatgacaacctccacagactccactcttggaaacacagaagagacatcaacagcaggaactgaaagttctac

SEQ ID NO: 392113 - DNA, 120 bp, Artificial Sequence
  ENSG00000145113_36 (sequence is synthesized)
cccagtgacctcagcagtctcaataacagctggacaggaaggacaatcacgaacaacttcctggaggacctctatccaagacacatcagcttcttctcagaaccactggactcggagcac

SEQ ID NO: 392114 - DNA, 120 bp, Artificial Sequence
  ENSG00000145113_37 (sequence is synthesized)
gcagaccaccagggaatctcaaaccagcaccctaacacacagaaccacttcaactccttctttctctccaagtgtacacaatgtgacagggactgtttctcagaagacatctccttcagg

SEQ ID NO: 392115 - DNA, 120 bp, Artificial Sequence
  ENSG00000145113_38 (sequence is synthesized)
tgaaacagctacctcatccctctgtagtgtcacaaacacatccatgatgacatcagagaagataacagtgacaacctccacaggctccactcttggaaacccaggggagacatcatcagt

SEQ ID NO: 392116 - DNA, 120 bp, Artificial Sequence
  ENSG00000145113_39 (sequence is synthesized)
acctgttactggaagtcttatgccagtcacctcagcagccttagtaacatttgatccagaaggacaatcaccagcaactttctcaaggacttctactcaggacacaacagctttttctaa

SEQ ID NO: 392117 - DNA, 120 bp, Artificial Sequence
  ENSG00000145113_40 (sequence is synthesized)
gaaccaccagactcagagcgtggagaccaccagagtatctcaaatcaacaccctcaacaccctcacaccggttacaacatcaactgttttatcctcaccaagtggattcaacccaagtgg

SEQ ID NO: 392118 - DNA, 120 bp, Artificial Sequence
  ENSG00000145113_41 (sequence is synthesized)
aacagtttctcaggagacattcccttctggtgaaacaaccacctcatccccttccagtgtcagcaatacattcctggtaacatcaaaggtgttcagaatgccaacctccagagactctac

SEQ ID NO: 392119 - DNA, 120 bp, Artificial Sequence
  ENSG00000145113_42 (sequence is synthesized)
tcttggaaacacagaggagacatcactatctgtaagtggaaccatttctgcaatcacttccaaagtttcaaccatatggtggtcagacactctgtcaacagcactctcccccagttctct

SEQ ID NO: 392120 - DNA, 120 bp, Artificial Sequence
  ENSG00000145113_43 (sequence is synthesized)
acctccaaaaatatccacagctttccacacccagcagagtgaaggtgcagagaccacaggacggcctcatgagaggagctcattctctccaggtgtgtctcaagaaatatttactctaca

SEQ ID NO: 392121 - DNA, 120 bp, Artificial Sequence
  ENSG00000145113_44 (sequence is synthesized)
tgaaacaacaacatggccttcctcattctccagcaaaggccacacaacttggtcacaaacagaactgccctcaacatcaacaggtgctgccactaggcttgtcacaggaaatccatctac

SEQ ID NO: 392122 - DNA, 120 bp, Artificial Sequence
  ENSG00000145113_45 (sequence is synthesized)
agggacagctggcactattccaagggtcccctctaaggtctcagcaataggggaaccaggagagcccaccacatactcctcccacagcacaactctcccaaaaacaacaggggcaggcgc

SEQ ID NO: 392123 - DNA, 120 bp, Artificial Sequence
  ENSG00000145113_46 (sequence is synthesized)
ccagacacaatggacacaagaaacggggaccactggagaggctcttctcagcagcccaagctacagtgtgactcagatgataaaaacggccacatccccatcttcttcacctatgctgga

SEQ ID NO: 392124 - DNA, 120 bp, Artificial Sequence
  ENSG00000145113_47 (sequence is synthesized)
tagacacacatcccaacaaattacaacggcaccatcaacaaatcattcaacaatacattccacaagcacctctcctcaggaatcaccagctgtttcccaaaggggtcacactcaagcccc

SEQ ID NO: 392125 - DNA, 120 bp, Artificial Sequence
  ENSG00000145113_48 (sequence is synthesized)
gcagaccacacaagaatcacaaaccacgaggtccgtctcccccatgactgacaccaagacagtcaccaccccaggttcttccttcacagccagtgggcactcgccctcagaaattgttcc

SEQ ID NO: 392126 - DNA, 120 bp, Artificial Sequence
  ENSG00000145113_49 (sequence is synthesized)
tcaggacgcacccaccataagtgcagcaacaacctttgccccagctcccaccggggatggtcacacaacccaggccccgaccacagcactgcaggcagcacccagcagccatgatgccac

SEQ ID NO: 392127 - DNA, 120 bp, Artificial Sequence
  ENSG00000145113_50 (sequence is synthesized)
cctggggccctcaggaggcacgtcactttccaaaacaggtgcccttactctggccaactctgtagtgtcaacaccagggggcccagaaggacaatggacatcagcctctgccagcacctc

SEQ ID NO: 392128 - DNA, 120 bp, Artificial Sequence
  ENSG00000145113_51 (sequence is synthesized)
acctgacacagcagcagccatgacccatacccaccaggctgagagcacagaggcctctggacaaacacagaccagcgaaccggcctcctcagggtcacgaaccacctcagcgggcacagc

SEQ ID NO: 392129 - DNA, 120 bp, Artificial Sequence
  ENSG00000145113_52 (sequence is synthesized)
taccccttcctcatccggggcgagtggcacaacaccttcaggaagcgaaggaatatccacctcaggagagacgacaaggttttcatcaaacccctccagggacagtcacacaacccagtc

SEQ ID NO: 392130 - DNA, 120 bp, Artificial Sequence
  ENSG00000145113_53 (sequence is synthesized)
aacaaccgaattgctgtccgcctcagccagtcatggtgccatcccagtaagcacaggaatggcgtcttcgatcgtccccggcacctttcatcccaccctctctgaggcctccactgcagg

SEQ ID NO: 392131 - DNA, 120 bp, Artificial Sequence
  ENSG00000145113_54 (sequence is synthesized)
gagaccgacaggacagtcaagcccaacttctcccagtgcctctcctcaggagacagccgccatttcccggatggcccagactcagaggacaagaaccagcagagggtctgacactatcag

SEQ ID NO: 392132 - DNA, 120 bp, Artificial Sequence
  ENSG00000145113_55 (sequence is synthesized)
cctggcgtcccaggcaaccgacaccttctcaacagtcccacccacacctccatcgatcacatccactgggcttacatctccacaaaccgagacccacactctgtcaccttcagggtctgg

SEQ ID NO: 392133 - DNA, 120 bp, Artificial Sequence
  ENSG00000145113_56 (sequence is synthesized)
taaaaccttcaccacggccctcatcagcaacgccacccctcttcctgtcacctacgcttcctcggcatccacaggtcacaccacccctcttcatgtcaccgatgcttcctcagtatccac

SEQ ID NO: 392134 - DNA, 71 bp, Artificial Sequence
  ENSG00000145113_57 (sequence is synthesized)
aatccacaggtcacgtcacccctcttcctgtcaccagcttttcctcagcatccacaggtgacagcacccct

SEQ ID NO: 392135 - DNA, 82 bp, Artificial Sequence
  ENSG00000145113_58 (sequence is synthesized)
cttcctcagaatccacaggtcacgtcacccctcttcctgtcaccagcttttcctcagcatccacaggtgacagcaggtcacg

SEQ ID NO: 392136 - DNA, 65 bp, Artificial Sequence
  ENSG00000145113_59 (sequence is synthesized)
cagatcacgccacctctcttcctgtaaccatcccttccgcagcatccacaggtcacaccacccct

SEQ ID NO: 392137 - DNA, 63 bp, Artificial Sequence
  ENSG00000145113_60 (sequence is synthesized)
cttcctcagcatccacaggtcaggccacctctcttctcacttcctcagcatccacaggtcacg

SEQ ID NO: 392138 - DNA, 61 bp, Artificial Sequence
  ENSG00000145113_61 (sequence is synthesized)
gacaccacgcctcttcctgtcactagcacttcctcagcatccacaggtcacgtcactcctc

SEQ ID NO: 392139 - DNA, 65 bp, Artificial Sequence; identical to SEQ ID NO: 392136
  ENSG00000145113_62 (sequence is synthesized)

SEQ ID NO: 392140 - DNA, 63 bp, Artificial Sequence
  ENSG00000145113_63 (sequence is synthesized)
tcacttcctcagcatccacaggtcacgtcactcctcttcatgtcaccagcccttcctcagcat

SEQ ID NO: 392141 - DNA, 120 bp, Artificial Sequence
  ENSG00000145113_64 (sequence is synthesized)
ccaccggtcacgccacccctcttcctgtcaccggcctttcctcagctaccacagatgacaccacccgtcttcctgtcaccgacgtttcctcggcatccacaggtcaggccacccctcttc

SEQ ID NO: 392142 - DNA, 120 bp, Artificial Sequence
  ENSG00000145113_65 (sequence is synthesized)
caccgacacttcctcagtatccacagctcacgccaccccacttcctgtcaccggcctttcttcagcttccacagatgacaccacccgtcttcctgtcaccgacgtttcctcggcatccac

SEQ ID NO: 392143 - DNA, 66 bp, Artificial Sequence
  ENSG00000145113_66 (sequence is synthesized)
aggtgacaccacctctcttcctgtcaccatcccttcctcagcatcttcaggtcacaccacctttgt

SEQ ID NO: 392144 - DNA, 120 bp, Artificial Sequence
  ENSG00000145113_67 (sequence is synthesized)
ccctcttcctgtcaccagcctttcctcagcatccactggtgacaccacgccgcttcctgtcaccgatacttcctcagcatccacaggtcaggacacccctcttcctgtcaccagcctttc

SEQ ID NO: 392145 - DNA, 80 bp, Artificial Sequence
  ENSG00000145113_68 (sequence is synthesized)
ccacctctcttctgctcttcatgacaccgatgcttcctcattatccacaggggacaccacccctcttcctgtcaccagcc

SEQ ID NO: 392146 - DNA, 88 bp, Artificial Sequence
  ENSG00000145113_69 (sequence is synthesized)
ccatcttcctgtcaccggcctttcctcagctcaacgtttcctcggcatccacaggtcatgccacccctcttcctgtcaccagcacttc

SEQ ID NO: 392147 - DNA, 77 bp, Artificial Sequence
  ENSG00000145113_70 (sequence is synthesized)
cttcctgtcaccagcccttcctcagcatctacaggtcacaccacccctctacctgtcaccgacactatgcttcctca

SEQ ID NO: 392148 - DNA, 77 bp, Artificial Sequence
  ENSG00000145113_71 (sequence is synthesized)
ctgtcaccgacactatgcttcctcattatccacacgtcacgccacctctcttcatgtcaccagcccttcctcagcat

SEQ ID NO: 392149 - DNA, 65 bp, Artificial Sequence
  ENSG00000145113_72 (sequence is synthesized)
ctgtcaccgacgcttcgtcacaggtcatgccacctctcttcctgtcaccatcccttcctcagcat

SEQ ID NO: 392150 - DNA, 79 bp, Artificial Sequence
  ENSG00000145113_73 (sequence is synthesized)
cttcctgtcaccgacgcttcctcagtgttcacaggtcatgccacctctcttcctgtcaccatcccttcctcagcatcct

SEQ ID NO: 392151 - DNA, 62 bp, Artificial Sequence
  ENSG00000145113_74 (sequence is synthesized)
aggtgacaccacccctgtggcctttcctcagcttccacaggtgacaccacccgtcttcctgt

SEQ ID NO: 392152 - DNA, 120 bp, Artificial Sequence
  ENSG00000145113_75 (sequence is synthesized)
cttcctgtcaccagcccttcctcagcatctacaggtcacaccacccctcttcatgtcaccatcccttcctcagcatccacaggtgacaccagcactcttcctgtcaccggcgcttcctca

SEQ ID NO: 392153 - DNA, 70 bp, Artificial Sequence
  ENSG00000145113_76 (sequence is synthesized)
gacaccacccgtcttcctgtcacgcccttcctcatcatcctcaggtcacaccacccctcttcctgtcacc

SEQ ID NO: 392154 - DNA, 81 bp, Artificial Sequence
  ENSG00000145113_77 (sequence is synthesized)
ccctcttcctgtcaccagcacttcctcagtatctacaggtcacgtcacccctctcacccctcttcctgtcaccagcacttc

SEQ ID NO: 392155 - DNA, 90 bp, Artificial Sequence
  ENSG00000145113_78 (sequence is synthesized)
ttccacagatgacaccacccgtcttcctgtcaccgacgtttcctcggcatccacaggacatgccacccctcttcctgtcaccagcacttc

SEQ ID NO: 392156 - DNA, 60 bp, Artificial Sequence
  ENSG00000145113_79 (sequence is synthesized)
ccacaggtcacgccacccctgatgcttcctcattatccacaggtcacgccacccctcttc

SEQ ID NO: 392157 - DNA, 82 bp, Artificial Sequence
  ENSG00000145113_80 (sequence is synthesized)
atgtcaccagcccttcctcagcatccagaggtgacaccagcactcttcctgtcaccgatgctcaccagcctttcctcagtat

SEQ ID NO: 392158 - DNA, 78 bp, Artificial Sequence
  ENSG00000145113_81 (sequence is synthesized)
aggtgacaccacgcctcttcctgtcaccatcccttcctcagcatcctcaggtcacaccacctgcacccctcttcctgt

SEQ ID NO: 392159 - DNA, 62 bp, Artificial Sequence
  ENSG00000145113_82 (sequence is synthesized)
cacgccacccctcttcatcttcctcagcatcctcaggtcacaccacccctcttcctgtcacc

SEQ ID NO: 392160 - DNA, 70 bp, Artificial Sequence
  ENSG00000145113_83 (sequence is synthesized)
accgacgcttcctcagtgtccacaggtcattacccctcttcctctcaccagcctttcctcagtatccaca

SEQ ID NO: 392161 - DNA, 60 bp, Artificial Sequence
  ENSG00000145113_84 (sequence is synthesized)
cacaggtgacaccattaccggcctttcctcagcttccacaggtgacaccacccctcttcc

SEQ ID NO: 392162 - DNA, 120 bp, Artificial Sequence
  ENSG00000145113_85 (sequence is synthesized)
ttatcaggctgtagggggtctatcctaacaagagtgagtcaagagggcccgtcctgtgctcctggactgggtgaataactccaatcagaggaaatgtgatgaaagctactgcaggaagtg

SEQ ID NO: 392163 - DNA, 120 bp, Artificial Sequence
  ENSG00000145113_86 (sequence is synthesized)
tggaccgtgcccctgccacggacagggcagtgtggaggctccaagaggaagagactcacgcctgttctcaagaagctgcagattaggcatggggaggaatacgagacgttctatggtgaa

SEQ ID NO: 392164 - DNA, 120 bp, Artificial Sequence
  ENSG00000145113_87 (sequence is synthesized)
ggctaagaacagtcgccgagggaaaatatttcttgggcgcatatttgaggagcttcctgggagtgagtcagaaggcgagtgccgtttaaaggctgcaagagaagccatgctggtgaagcg

SEQ ID NO: 392165 - DNA, 120 bp, Artificial Sequence
  ENSG00000145113_88 (sequence is synthesized)
acccccaccccaccctggccacacaaccccgctccagtgctcatcccaccgtgaggacgtggaggccggaaggagccgccacacggccctgccctgcagatgtggttgaaggagtctcca

SEQ ID NO: 392166 - DNA, 120 bp, Artificial Sequence
  ENSG00000145113_89 (sequence is synthesized)
cgggaatcatgactcccagagcgaggctggggcttggggcgccggggaggcagcttggatttaggagccccagggccaagtctttgccgtgaactgttctggcccctgtgaccaggccct

SEQ ID NO: 392167 - DNA, 120 bp, Artificial Sequence
  ENSG00000145113_90 (sequence is synthesized)
gccccgtgtctccccagggccccggtcccctgtgtaaaaagcagtggtgaacggttggacctcctgacgcccaagttcttgagtttccaaatctgtgatttaaagctgagcccaaatgtg

SEQ ID NO: 392168 - DNA, 120 bp, Artificial Sequence
  ENSG00000145113_91 (sequence is synthesized)
ctgggtaccagctggacactcagctccatgtggagccaggaagtggggtctgtggagaggagcgcagaggggcaagacctggggtgggcgtggaaaagcacgggggcgtgacccggagaa

SEQ ID NO: 392169 - DNA, 87 bp, Artificial Sequence
  ENSG00000145113_92 (sequence is synthesized)
gctgtcagcagtgctacctcagcttccacagtatcctcggactcccctctgaagatggaaacaccaggaatgacaacaccgtcactg

SEQ ID NO: 392170 - DNA, 120 bp, Artificial Sequence
  ENSG00000145113_93 (sequence is synthesized)
ctggcccgacagactttttgggtaagtctgggtaaaccgtggggtgatgatacatttgcttctcccatctccagaacttcccttaagagtcatccagctcttgctcagtgaagaggaaaa

SEQ ID NO: 392171 - DNA, 120 bp, Artificial Sequence
  ENSG00000145113_94 (sequence is synthesized)
tgcctccatggcagaagtcaacgcctcggtcagtgctgcaggccgcgctctgggtgggagggggcgcttggcgggttcaggccagggcggaaccatcgctgtgcggccttcatcttgtca

SEQ ID NO: 392172 - DNA, 120 bp, Artificial Sequence
  ENSG00000145113_95 (sequence is synthesized)
tccatctggattcaactgccagaggaggccggagcctcttgccccatgggaggtgcagggcattaggaagtgaggaaggcccaagacagaaacctcgactcatcataagcagaggccagg

SEQ ID NO: 392173 - DNA, 120 bp, Artificial Sequence
  ENSG00000145113_96 (sequence is synthesized)
gtgccaagtcaccccagccgagacctctaagcatcttggttatgatctgaaagaaactaaaggacatttcacctcccgggagtcttccctgacttcccagagggaacgggcggctccctc

SEQ ID NO: 392174 - DNA, 120 bp, Artificial Sequence
  ENSG00000145113_97 (sequence is synthesized)
ttcttggctgccatgccatacctcagtcacaggcaaagtggcacaactgctgagtggttggggctgtagaatcctgcacacccagaatcagaatccctgctctgcccctcactagagcag

SEQ ID NO: 392175 - DNA, 120 bp, Artificial Sequence
  ENSG00000145113_98 (sequence is synthesized)
gtgtgctaactagacacatcatataacaggtcatctgtaaacacagggacaatcatagcacctgagtcaacaggccgtatcaccgtttaaatgataacgcgtgtcaagcatttagtccag

SEQ ID NO: 392176 - DNA, 120 bp, Artificial Sequence
  ENSG00000145113_99 (sequence is synthesized)
tgcctgacacacaagtattcaaacatgatgactgctattatcactactgcaagcctagcactccccactccacactccacacggtaaaatctgttgacatttgtcacctgcgccagacaa

SEQ ID NO: 392177 - DNA, 120 bp, Artificial Sequence
  ENSG00000145113_100 (sequence is synthesized)
tgcactctttgagtttagactccacctaagtcaccttgacacccccagccccgaccatctcctaggtctaaacaacccatgttcaatatactggggaggaggtcatgagtcatgtgtcag

SEQ ID NO: 392178 - DNA, 120 bp, Artificial Sequence
  ENSG00000145113_101 (sequence is synthesized)
aggcaaggtaggggccattcatgtcagattctctgctcgtcatatgaggctgagggggggacagaatggaaaacccttcactctcaacaaacattattaagcaaggacccatgacactca

SEQ ID NO: 392179 - DNA, 120 bp, Artificial Sequence
  ENSG00000145113_102 (sequence is synthesized)
ctgagctaggctagagtgcaagggtgcagagacaggtgaggaaggtgctggggtcctggggctcccgttccaggaggaaacagggatgaatacacccatcaaggtgggagggcgtctccc

SEQ ID NO: 392180 - DNA, 120 bp, Artificial Sequence
  ENSG00000145113_103 (sequence is synthesized)
ggtcttccagcccatctccggggaagacgtgcgcgatgtgacagcccgtgagtccgtccattccggggacactatgggggtcactgcggggggcgggcaaacagaggtgcttcagcccac

SEQ ID NO: 392181 - DNA, 120 bp, Artificial Sequence
  ENSG00000145113_104 (sequence is synthesized)
acaaacaagctaattgagtttttctgtttgtttggttttgagcgaaaacgtgaacattttgtccagctgctttttagattcgagagcaggagcagccagcactgctgaggcagtcacacg

SEQ ID NO: 392182 - DNA, 120 bp, Artificial Sequence
  ENSG00000145113_105 (sequence is synthesized)
tatacagcttcacggagcaagcacccagccagggccttgctgactgtggctgctaataaaacagcagcaatttagtttcataaaattgctaatagttttcttaaaatgccattgcactta

SEQ ID NO: 392183 - DNA, 120 bp, Artificial Sequence
  ENSG00000145113_106 (sequence is synthesized)
agcatacacagggacacccccatcgtctctgctctccagcgggaggatatgaagctggagactggagactggccagggacagaggcaactactccctgaaatggtgtcaccctgtgcaag

SEQ ID NO: 392184 - DNA, 120 bp, Artificial Sequence
  ENSG00000145113_107 (sequence is synthesized)
caccttccccaggccaggccaggcctcaacaccccccagcaccttccccaggccaggccaggcctcaacaccccccagcaccttccccaggccaggcctcaacaccccccagcacctccc

SEQ ID NO: 392185 - DNA, 120 bp, Artificial Sequence
  ENSG00000145113_108 (sequence is synthesized)
cgaggccaggcctcaacactccccaagcaccttccccaggccaggcctcagcacccccatctgaaaatgagatgggatttctgagccccctttcagtgctgacagcccccggttttcctg

SEQ ID NO: 392186 - DNA, 120 bp, Artificial Sequence
  ENSG00000145113_109 (sequence is synthesized)
gaacaggaataagttggcaagcttgtcagagaaacaaaggaataacacgtcctattttctgtatagggcagagaacagggcaggggccgccccaaacacaacaggaactgctgttttact

SEQ ID NO: 392187 - DNA, 120 bp, Artificial Sequence
  ENSG00000145113_110 (sequence is synthesized)
tgggtctgggaccaagcaagagcttctcccagaatccaggctaagcccgctctctcccggagcagggggtgaaatccctcagaactactgtatgttggggagttggggtaggaggcgcag

SEQ ID NO: 392188 - DNA, 120 bp, Artificial Sequence
  ENSG00000145113_111 (sequence is synthesized)
ggaggcaagccctgactatgcaattaaggaaaacctataatttttattatacaagcatcgtatgtttattgcagaaactttaggaaacacaaacttaacaaaaagaaaagaggaaaaaaa

SEQ ID NO: 392189 - DNA, 120 bp, Artificial Sequence
  ENSG00000145113_112 (sequence is synthesized)
gctgaaggagaagaggttgtacaggcataggggaggggacggggctgggcatccctgaggcattgatggggggagccccgggcgaaagactgaagatggtttggggaggagacttcagca

SEQ ID NO: 392190 - DNA, 120 bp, Artificial Sequence
  ENSG00000145113_113 (sequence is synthesized)
gccgccagagaaccgggcaagctgggtcctcgggatccctggggatcttcagagacacgaggctcaggatctctgcatctcacgagtcaggacgtttggaggggctggcgtggggatccg

SEQ ID NO: 392191 - DNA, 120 bp, Artificial Sequence
  ENSG00000145113_114 (sequence is synthesized)
gcagcaaaggtgcctgattttccctttgagtcctcccagccatctgttcctcccgctctgagtcaccagagtctgatgagggagatcacagcgaggcctttaccaagccccctaaggcac

SEQ ID NO: 392192 - DNA, 120 bp, Artificial Sequence
  ENSG00000145113_115 (sequence is synthesized)
ccaaataaaatctacagatcactgtgccttcagagccgaggccagagtgggtagaaccgcagcttttataaaggcagaaaaggagatggacgtgagaggggagggcgtgaggaaagccag

SEQ ID NO: 392193 - DNA, 120 bp, Artificial Sequence
  ENSG00000145113_116 (sequence is synthesized)
ctgggggcccctcctctgccagccttcggggtcctttctgaagcagagggtctgagaaacactccagtccctccacaaaagtggaagaatacctgtctggccggggaaaggggttgccct

SEQ ID NO: 392194 - DNA, 120 bp, Artificial Sequence
  ENSG00000145113_117 (sequence is synthesized)
gcagagaaacgcctggaaaaggggggaaggatggtttggggttccgagtggcccgaagtggaacactgggggaaagcaagcctgtcccggagcgggtttccacgggctgggccgtccctc

SEQ ID NO: 392195 - DNA, 120 bp, Artificial Sequence
  ENSG00000145113_118 (sequence is synthesized)
gtagtcaccaagttcttccttatgcctggtctaaagtcactcatttcttcattcactcgacaaaagttcactggtcacctactgtggacaacgtgtgcgccttcagtgaaccccagtgtc

SEQ ID NO: 392196 - DNA, 120 bp, Artificial Sequence
  ENSG00000145113_119 (sequence is synthesized)
atccatgctgtttagatggaggagacaatttgggcaatgtccttaaatatccgcgcgggagctaatgaagcctcctctctagctctctggtatcttggctgatctcaggttctggtagct

SEQ ID NO: 392197 - DNA, 120 bp, Artificial Sequence
  ENSG00000145147_0 (sequence is synthesized)
acttggtgttatttatttgggaagcgcccggacggcggagcttggcggcggcggtggtggtggctgccgcagactgtggttaaaaaaaagaaggcggcggcggcggcggcggcggaggcg

SEQ ID NO: 392198 - DNA, 120 bp, Artificial Sequence
  ENSG00000145147_1 (sequence is synthesized)
gaggcagctgcgaggcatgggagcgccgaagcgcccaggcgcaggccgaagctgccgcgctttctgggcacggcgggagtgctgagcagaaaggggagcgccgggggcccgcagccggct

SEQ ID NO: 392199 - DNA, 120 bp, Artificial Sequence
  ENSG00000145147_2 (sequence is synthesized)
ccggaggcgcgggccgggtttttgtttggctacgctgagcgccagtcagccccagcgaacaactccagttacgacaacaacccaccttccttccagacaagcgagacttgggctgctgcg

SEQ ID NO: 392200 - DNA, 120 bp, Artificial Sequence
  ENSG00000145147_3 (sequence is synthesized)
tccgtcctattgtttagacacttgccaggggctccggagtcggcagagccaccgagtccccgctctgagtcgtcgccctccctctccccgacctcgctccctggagcgggaggccaggaa

SEQ ID NO: 392201 - DNA, 120 bp, Artificial Sequence
  ENSG00000145147_4 (sequence is synthesized)
agcagcgggagaggggaaggggctagaaggagaaggactacccgggactgcggccgccgcgtcaggtgcagcgccaggagccgggcggcgtcgccacgccggcaggggtaccgccactgt

SEQ ID NO: 392202 - DNA, 120 bp, Artificial Sequence
  ENSG00000145147_5 (sequence is synthesized)
ggccttgggggacggaattcaaagcctgggaaaagttgctgcactttgagaaggacgaaccactagtgggagaccgccgggggccggccgtggctctgcgccctccggaacccggctctt

SEQ ID NO: 392203 - DNA, 120 bp, Artificial Sequence
  ENSG00000145147_6 (sequence is synthesized)
gtttcttctacctttgccatcaggtgtctgccgcggagctgcggcttatctgggagacgagcggggttgacacgcgcgcacacactactgccattcagctgccgcctggctctgcctgga

SEQ ID NO: 392204 - DNA, 120 bp, Artificial Sequence
  ENSG00000145147_7 (sequence is synthesized)
gtagtggatcccacccgcccacctgccaccgagccattctccagtacgccccagcaggacgctgacacctccaaccttggcctttgcctttccactccttccggtctgcctggtttttaa

SEQ ID NO: 392205 - DNA, 120 bp, Artificial Sequence
  ENSG00000145147_8 (sequence is synthesized)
gtccgcccccagtcagtccccactcagtcttcgcagcagctctcatcctccacttggcctcttggagttcctcgccggagtgctgactagtggatatttctgcccggctgcggcggcccg

SEQ ID NO: 392206 - DNA, 120 bp, Artificial Sequence
  ENSG00000145147_9 (sequence is synthesized)
actgcccttttgtcttttctgcgtgacctcggggcaggtcctggtgcagagcgtcgccaaggacgccgagcgggaggcgggattgcccagacatccttcagcgaagtgcatgtgtgtttg

SEQ ID NO: 392207 - DNA, 120 bp, Artificial Sequence
  ENSG00000145147_10 (sequence is synthesized)
taaaccatcgttggctgtcgggagaccgcgaggaccggtccaggctgcggcggagtcgagggcgagggagaggccgcgtgagtgagcagagtccagagccgtgcgcccccagaactgcgc

SEQ ID NO: 392208 - DNA, 120 bp, Artificial Sequence
  ENSG00000145147_11 (sequence is synthesized)
gtccgccccgtgcacccccgcgcgccatgcccagttgccccgcgcgctctgctacgggcccgctgggcttccgcgccttctagcttccggagcccactttgatcggggccataataccta

SEQ ID NO: 392209 - DNA, 120 bp, Artificial Sequence
  ENSG00000145147_12 (sequence is synthesized)
ttgagatcccctcttctgtcttgtaccttcgccactggcatcggatttgcagaagcgtgcgtgggatcagaggaccgccctccccacaacaaccggcccctgcatcttagcagccgttgg

SEQ ID NO: 392210 - DNA, 120 bp, Artificial Sequence
  ENSG00000145147_13 (sequence is synthesized)
aagccccagctcttttaccgccaagttcatccttgggagacagaagacgcgtgatctcctctccgctgctcttggggtctccttgcagccctggccaggcggattcatcctcaggaccta

SEQ ID NO: 392211 - DNA, 120 bp, Artificial Sequence
  ENSG00000145147_14 (sequence is synthesized)
aagttgcccaaggagctcctgctctgccagaggagggtggagagggcggtgggaggcgtgtgcctgagtgggctctactgccttgttccatattatttggtgcacattttccctggcact

SEQ ID NO: 392212 - DNA, 120 bp, Artificial Sequence
  ENSG00000145147_15 (sequence is synthesized)
ctgggttgctagccccgccgggcactgggcctcagacactgcgcggttccctcggagcagcaagctaaagaaagcccccagtgccggcgaggaaggaggcggcggggaaagatgcgcggc

SEQ ID NO: 392213 - DNA, 120 bp, Artificial Sequence
  ENSG00000145147_16 (sequence is synthesized)
gttggctggcagatgctgtccctgtcgctggggttagtgctggcgatcctgaacaaggtggcaccgcaggcgtgcccggcgcagtgctcttgctcgggcagcacagtggactgtcacggg

SEQ ID NO: 392214 - DNA, 120 bp, Artificial Sequence
  ENSG00000145147_17 (sequence is synthesized)
ctggcgctgcgcagcgtgcccaggaatatcccccgcaacaccgagagactggatttaaatggaaataacatcacaagaattacgaagacagattttgctggtcttagacatctaagagtt

SEQ ID NO: 392215 - DNA, 120 bp, Artificial Sequence
  ENSG00000145147_18 (sequence is synthesized)
cttcagcttatggagaataagattagcaccattgaaagaggagcattccaggatcttaaagaactagagagactgcgtttaaacagaaatcaccttcagctgtttcctgagttgctgttt

SEQ ID NO: 392216 - DNA, 120 bp, Artificial Sequence
  ENSG00000145147_19 (sequence is synthesized)
cttgggactgcgaagctatacaggcttgatctcagtgaaaaccaaattcaggcaatcccaaggaaagctttccgtggggcagttgacataaaaaatttgcaactggattacaaccagatc

SEQ ID NO: 392217 - DNA, 120 bp, Artificial Sequence
  ENSG00000145147_20 (sequence is synthesized)
agctgtattgaagatggggcattcagggctctccgggacctggaagtgctcactctcaacaataacaacattactagactttctgtggcaagtttcaaccatatgcctaaacttaggact

SEQ ID NO: 392218 - DNA, 120 bp, Artificial Sequence
  ENSG00000145147_21 (sequence is synthesized)
tttcgactgcattcaaacaacctgtattgtgactgccacctggcctggctctccgactggcttcgccaaaggcctcgggttggtctgtacactcagtgtatgggcccctcccacctgaga

SEQ ID NO: 392219 - DNA, 120 bp, Artificial Sequence
  ENSG00000145147_22 (sequence is synthesized)
ggccataatgtagccgaggttcaaaaacgagaatttgtctgcagtggtcaccagtcatttatggctccttcttgtagtgttttgcactgccctgccgcctgtacctgtagcaacaatatc

SEQ ID NO: 392220 - DNA, 120 bp, Artificial Sequence
  ENSG00000145147_23 (sequence is synthesized)
gtagactgtcgtgggaaaggtctcactgagatccccacaaatcttccagagaccatcacagaaatacgtttggaacagaacacaatcaaagtcatccctcctggagctttctcaccatat

SEQ ID NO: 392221 - DNA, 120 bp, Artificial Sequence
  ENSG00000145147_24 (sequence is synthesized)
aaaaagcttagacgaattgacctgagcaataatcagatctctgaacttgcaccagatgctttccaaggactacgctctctgaattcacttgtcctctatggaaataaaatcacagaactc

SEQ ID NO: 392222 - DNA, 120 bp, Artificial Sequence
  ENSG00000145147_25 (sequence is synthesized)
cccaaaagtttatttgaaggactgttttccttacagctcctattattgaatgccaacaagataaactgccttcgggtagatgcttttcaggatctccacaacttgaaccttctctcccta

SEQ ID NO: 392223 - DNA, 120 bp, Artificial Sequence
  ENSG00000145147_26 (sequence is synthesized)
tatgacaacaagcttcagaccatcgccaaggggaccttttcacctcttcgggccattcaaactatgcatttggcccagaacccctttatttgtgactgccatctcaagtggctagcggat

SEQ ID NO: 392224 - DNA, 120 bp, Artificial Sequence
  ENSG00000145147_27 (sequence is synthesized)
tatctccataccaacccgattgagaccagtggtgcccgttgcaccagcccccgccgcctggcaaacaaaagaattggacagatcaaaagcaagaaattccgttgttcagctaaagaacag

SEQ ID NO: 392225 - DNA, 120 bp, Artificial Sequence
  ENSG00000145147_28 (sequence is synthesized)
tatttcattccaggtacagaagattatcgatcaaaattaagtggagactgctttgcggatctggcttgccctgaaaagtgtcgctgtgaaggaaccacagtagattgctctaatcaaaag

SEQ ID NO: 392226 - DNA, 120 bp, Artificial Sequence
  ENSG00000145147_29 (sequence is synthesized)
ctcaacaaaatcccggagcacattccccagtacactgcagagttgcgtctcaataataatgaatttaccgtgttggaagccacaggaatctttaagaaacttcctcaattacgtaaaata

SEQ ID NO: 392227 - DNA, 120 bp, Artificial Sequence
  ENSG00000145147_30 (sequence is synthesized)
aactttagcaacaataagatcacagatattgaggagggagcatttgaaggagcatctggtgtaaatgaaatacttcttacgagtaatcgtttggaaaatgtgcagcataagatgttcaag

SEQ ID NO: 392228 - DNA, 120 bp, Artificial Sequence
  ENSG00000145147_31 (sequence is synthesized)
ggattggaaagcctcaaaactttgatgttgagaagcaatcgaataacctgtgtggggaatgacagtttcataggactcagttctgtgcgtttgctttctttgtatgataatcaaattact

SEQ ID NO: 392229 - DNA, 120 bp, Artificial Sequence
  ENSG00000145147_32 (sequence is synthesized)
acagttgcaccaggggcatttgatactctccattctttatctactctaaacctcttggccaatccttttaactgtaactgctacctggcttggttgggagagtggctgagaaagaagaga

SEQ ID NO: 392230 - DNA, 120 bp, Artificial Sequence
  ENSG00000145147_33 (sequence is synthesized)
atcctagatgtcaaaaaccatacttcctgaaagaaatacccatccaggatgtggccattcaggacttcacttgtgatgacggaaatgatgacaatagttgctccccactttctcgctgtc

SEQ ID NO: 392231 - DNA, 120 bp, Artificial Sequence
  ENSG00000145147_34 (sequence is synthesized)
ctactgaatgtacttgcttggatacagtcgtccgatgtagcaacaagggtttgaaggtcttgccgaaaggtattccaagagatgtcacagagttgtatctggatggaaaccaatttacac

SEQ ID NO: 392232 - DNA, 120 bp, Artificial Sequence
  ENSG00000145147_35 (sequence is synthesized)
tggttcccaaggaactctccaactacaaacatttaacacttatagacttaagtaacaacagaataagcacgctttctaatcagagcttcagcaacatgacccagctcctcaccttaattc

SEQ ID NO: 392233 - DNA, 120 bp, Artificial Sequence
  ENSG00000145147_36 (sequence is synthesized)
ttagttacaaccgtctgagatgtattcctcctcgcacctttgatggattaaagtctcttcgattactttctctacatggaaatgacatttctgttgtgcctgaaggtgctttcaatgatc

SEQ ID NO: 392234 - DNA, 120 bp, Artificial Sequence
  ENSG00000145147_37 (sequence is synthesized)
tttctgcattatcacatctagcaattggagccaaccctctttactgtgattgtaacatgcagtggttatccgactgggtgaagtcggaatataaggagcctggaattgctcgttgtgctg

SEQ ID NO: 392235 - DNA, 120 bp, Artificial Sequence
  ENSG00000145147_38 (sequence is synthesized)
gtcctggagaaatggcagataaacttttactcacaactccctccaaaaaatttacctgtcaaggtcctgtggatgtcaatattctagctaagtgtaacccctgcctatcaaatccgtgta

SEQ ID NO: 392236 - DNA, 120 bp, Artificial Sequence
  ENSG00000145147_39 (sequence is synthesized)
aaaatgatggcacatgtaatagtgatccagttgacttttaccgatgcacctgtccatatggtttcaaggggcaggactgtgatgtcccaattcatgcctgcatcagtaacccatgtaaac

SEQ ID NO: 392237 - DNA, 120 bp, Artificial Sequence
  ENSG00000145147_40 (sequence is synthesized)
atggaggaacttgccacttaaaggaaggagaagaagatggattctggtgtatttgtgctgatggatttgaaggagaaaattgtgaagtcaacgttgatgattgtgaagataatgactgtg

SEQ ID NO: 392238 - DNA, 120 bp, Artificial Sequence
  ENSG00000145147_41 (sequence is synthesized)
aaaataattctacatgtgtcgatggcattaataactacacatgcctttgcccacctgagtatacaggtgagttgtgtgaggagaagctggacttctgtgcccaggacctgaacccctgcc

SEQ ID NO: 392239 - DNA, 120 bp, Artificial Sequence
  ENSG00000145147_42 (sequence is synthesized)
agcacgattcaaagtgcatcctaactccaaagggattcaaatgtgactgcacaccagggtacgtaggtgaacactgcgacatcgattttgacgactgccaagacaacaagtgtaaaaacg

SEQ ID NO: 392240 - DNA, 120 bp, Artificial Sequence
  ENSG00000145147_43 (sequence is synthesized)
gagcccactgcacagatgcagtgaacggctatacgtgcatatgccccgaaggttacagtggcttgttctgtgagttttctccacccatggtcctccctcgtaccagcccctgtgataatt

SEQ ID NO: 392241 - DNA, 120 bp, Artificial Sequence
  ENSG00000145147_44 (sequence is synthesized)
ttgattgtcagaatggagctcagtgtatcgtcagaataaatgagccaatatgtcagtgtttgcctggctatcagggagaaaagtgtgaaaaattggttagtgtgaattttataaacaaag

SEQ ID NO: 392242 - DNA, 120 bp, Artificial Sequence
  ENSG00000145147_45 (sequence is synthesized)
agtcttatcttcagattccttcagccaaggttcggcctcagacgaacataacacttcagattgccacagatgaagacagcggaatcctcctgtataagggtgacaaagaccatatcgcgg

SEQ ID NO: 392243 - DNA, 120 bp, Artificial Sequence
  ENSG00000145147_46 (sequence is synthesized)
tagaactctatcgggggcgtgttcgtgccagctatgacaccggctctcatccagcttctgccatttacagtgtggagacaatcaatgatggaaacttccacattgtggaactacttgcct

SEQ ID NO: 392244 - DNA, 120 bp, Artificial Sequence
  ENSG00000145147_47 (sequence is synthesized)
tggatcagagtctctctttgtccgtggatggtgggaaccccaaaatcatcactaacttgtcaaagcagtccactctgaattttgactctccactctatgtaggaggcatgccagggaaga

SEQ ID NO: 392245 - DNA, 120 bp, Artificial Sequence
  ENSG00000145147_48 (sequence is synthesized)
gtaacgtggcatctctgcgccaggcccctgggcagaacggaaccagcttccacggctgcatccggaacctttacatcaacagtgagctgcaggacttccagaaggtgccgatgcaaacag

SEQ ID NO: 392246 - DNA, 120 bp, Artificial Sequence
  ENSG00000145147_49 (sequence is synthesized)
gcattttgcctggctgtgagccatgccacaagaaggtgtgtgcccatggcacatgccagcccagcagccaggcaggcttcacctgcgagtgccaggaaggatggatggggcccctctgtg

SEQ ID NO: 392247 - DNA, 120 bp, Artificial Sequence
  ENSG00000145147_50 (sequence is synthesized)
accaacggaccaatgacccttgccttggaaataaatgcgtacatggcacctgcttgcccatcaatgcgttctcctacagctgtaagtgcttggagggccatggaggtgtcctctgtgatg

SEQ ID NO: 392248 - DNA, 120 bp, Artificial Sequence
  ENSG00000145147_51 (sequence is synthesized)
aagaggaggatctgtttaacccatgccaggcgatcaagtgcaagcatgggaagtgcaggctttcaggtctggggcagccctactgtgaatgcagcagtggatacacgggggacagctgtg

SEQ ID NO: 392249 - DNA, 120 bp, Artificial Sequence
  ENSG00000145147_52 (sequence is synthesized)
atcgagaaatctcttgtcgaggggaaaggataagagattattaccaaaagcagcagggctatgctgcttgccaaacaaccaagaaggtgtcccgattagagtgcagaggtgggtgtgcag

SEQ ID NO: 392250 - DNA, 120 bp, Artificial Sequence
  ENSG00000145147_53 (sequence is synthesized)
gagggcagtgctgtggaccgctgaggagcaagcggcggaaatactctttcgaatgcactgacggctcctcctttgtggacgaggttgagaaagtggtgaagtgcggctgtacgaggtgtg

SEQ ID NO: 392251 - DNA, 120 bp, Artificial Sequence
  ENSG00000145147_54 (sequence is synthesized)
tgtcctaaacacactcccggcagctctgtctttggaaaaggttgtatacttcttgaccgtgtgggactaatgaatgcttcatagtggaaatatttgaaatatattgtaaaatacagaaca

SEQ ID NO: 392252 - DNA, 120 bp, Artificial Sequence
  ENSG00000145147_55 (sequence is synthesized)
gacttatttttattatgagaataaagactttttttctgcatttggaaaaaaaaaaaaagaaatgcttgaactaaagcttcccctatgctggagaagtatgaagaaagatatacctggaga

SEQ ID NO: 392253 - DNA, 120 bp, Artificial Sequence
  ENSG00000145147_56 (sequence is synthesized)
cattagaacagcgatgggaaccattgcaactcgggtccatctttgtaacatgctgaagacaagcagaagcacatgcacgagggacagaggagctactgtgcactgctgtgaaattgccca

SEQ ID NO: 392254 - DNA, 120 bp, Artificial Sequence
  ENSG00000145147_57 (sequence is synthesized)
gagcataaaacctgtgtaccctccttcacatcaaccaagttcactaggacataccaagcacatgcgtgtgaatgaggatgcaaggcaagagaatggaactccagaattcacagatagaac

SEQ ID NO: 392255 - DNA, 120 bp, Artificial Sequence
  ENSG00000145147_58 (sequence is synthesized)
aaatggatgagaaatatttcatgcaaaatataaagtgtcctgaggatctgggttccatttacgagaggaaatgaaagtgctaaaataaattttatcttccttttaaatgtcagcatgtca

SEQ ID NO: 392256 - DNA, 120 bp, Artificial Sequence
  ENSG00000145147_59 (sequence is synthesized)
gcagaagcagcacacaaaagtctttaccattttccagtattaatttttttgtaatataaatgataaaggagatgataaagaaccaatagattattgataaataaattagtaataatatga

SEQ ID NO: 392257 - DNA, 120 bp, Artificial Sequence
  ENSG00000145147_60 (sequence is synthesized)
ttttttgtttctatgagttctaaacagccctatacagtattcagtttccatgagaaatatttattgtatcaaagtacattgtacttaacattttaggccatccttttactgttccttgat

SEQ ID NO: 392258 - DNA, 120 bp, Artificial Sequence
  ENSG00000145147_61 (sequence is synthesized)
tccttgatgctttaatatatattaatttataattatcctgatatttttgtacatttttcaaacttaaaaatcaggatttttttttttttttttttggcaatagtactaacatagggtttt

SEQ ID NO: 392259 - DNA, 120 bp, Artificial Sequence
  ENSG00000145147_62 (sequence is synthesized)
atacatatgtattggtctgtttgttgaccttgacatctgatcactgatgtcaatgacctactggcctcattcaggacacctgcagagagtatgcaaagtccgagagaggaaaacagaaat

SEQ ID NO: 392260 - DNA, 120 bp, Artificial Sequence
  ENSG00000145147_63 (sequence is synthesized)
ctgtatgtgagatggtcattgtacagaaagaagtggcccctctgcaacatgtcctcacagaaacgaaatggtgtgtagcaatcaacactagaaagtagaccttttgcaaattaatatgtc

SEQ ID NO: 392261 - DNA, 120 bp, Artificial Sequence
  ENSG00000145147_64 (sequence is synthesized)
cttgaccttttttgcccttttgtgggggtgaggtggggataaaaagactgtcatatcaagaactgtgacttttctttccctcaaacaataaaactcctttattatcttaatgctcccatg

SEQ ID NO: 392262 - DNA, 120 bp, Artificial Sequence
  ENSG00000145147_65 (sequence is synthesized)
ttaacatgtttgctgctaaattacaatgtagaattgataatggtttatagtgaactgtgctcttccctcattaaaatcccagggtgccctgtaaagatgcagatgtttcttcctgaaaac

SEQ ID NO: 392263 - DNA, 120 bp, Artificial Sequence
  ENSG00000145147_66 (sequence is synthesized)
ttctttttttacaaagaaaattagatgtacatgtataattcagtgtgctttgtctttctccagattaatatcggttacactgctgatgtttgtaaattaaacagatatttacttcattaa

SEQ ID NO: 392264 - DNA, 120 bp, Artificial Sequence
  ENSG00000145147_67 (sequence is synthesized)
ggcagataaacttttactcacaactccctccaaaaaatttacctgtcaagggctgccagggccctgtggcttcctcataccaggtcctgtggatgtcaatattctagctaagtgtaaccc

SEQ ID NO: 392265 - DNA, 120 bp, Artificial Sequence
  ENSG00000145147_68 (sequence is synthesized)
ctgattttatgatagcctattgaaactcaaatatacgtatgatgtctaaacattttcatttacaaattactctagtcaaagctgggctttttctaattgttagctttggaacaaaaagga

SEQ ID NO: 392266 - DNA, 120 bp, Artificial Sequence
  ENSG00000145147_69 (sequence is synthesized)
acagatttactaattgtttctctgtgctgtggaactttgccaatctgtatttattcttgacatgtgcacatatgtgtgttgtgcctatatcaaaatgagctattaaaaatagttttggaa

SEQ ID NO: 392267 - DNA, 120 bp, Artificial Sequence
  ENSG00000145147_70 (sequence is synthesized)
gaagttcatttttaaccactgaaaaaaggaccataaatatgtggtcattaaagtccttatgatggatggatatggttaaattagaaaaacttaccccagggcaaggaattttctgtcacc

SEQ ID NO: 392268 - DNA, 120 bp, Artificial Sequence
  ENSG00000145147_71 (sequence is synthesized)
agtcctttcctggaaatggtaagtttcatccttttgaccctgctctagaaagcaacccacagcgagatggacatagactaaaggcctgtactcacagaacttcacagccaagagacttca

SEQ ID NO: 392269 - DNA, 120 bp, Artificial Sequence
  ENSG00000145147_72 (sequence is synthesized)
ttcaatacctgtcagagtgtaaccatggactacccaaatcacctgagctgcatgtagatatttagatttctgcacctctcctgttcctacaggatcagaacctcagaaggaggggagaga

SEQ ID NO: 392270 - DNA, 120 bp, Artificial Sequence
  ENSG00000145147_73 (sequence is synthesized)
ggagcctgtaaagctgcctttgagcatgcactgctgttggttcttatgtatgacaaacttaggacaacttctctggtccatatgctcatggtgtatagatgacaatactaagccccagag

SEQ ID NO: 392271 - DNA, 120 bp, Artificial Sequence
  ENSG00000145147_74 (sequence is synthesized)
agaagaaataactgctccaagtgcacgcagaaccagaaatccttaccgtataacctagtggtttcgtacacctagctgtctgactgatgcctgctttgaatgccaatggatgagtcattt

SEQ ID NO: 392272 - DNA, 120 bp, Artificial Sequence
  ENSG00000145147_75 (sequence is synthesized)
cctatgaatgggaaaggagaaggtggcataagttcagacccagagtgtgctacagttcttggtctttagaaccaacagaccccctgaagagtgagaaactgggtcttcctcagcctagaa

SEQ ID NO: 392273 - DNA, 120 bp, Artificial Sequence
  ENSG00000145147_76 (sequence is synthesized)
cttccagccagtagtccagagtttaggcacagctaaagcataattacggggttgtggggatgtggtggtatagccagcactctgaaagcttccagcaccctccccccttccctggatggg

SEQ ID NO: 392274 - DNA, 120 bp, Artificial Sequence
  ENSG00000145147_77 (sequence is synthesized)
tgccttctgcaggatgccttccacggactaagggtctggcttaggccatggaaagattcttccgttttgccaaaatgagtgttaccagataactgtcactagtggaatgtatatatacaa

SEQ ID NO: 392275 - DNA, 120 bp, Artificial Sequence
  ENSG00000145147_78 (sequence is synthesized)
agattgcaaatactctgtttttgaagggatttcatttttatttctgatttcttggactatgaagtcttcactcttaattagcaagaaagaaaaaatgatgtgaatgaggtgctgtcctga

SEQ ID NO: 392276 - DNA, 120 bp, Artificial Sequence
  ENSG00000145147_79 (sequence is synthesized)
aaagaatcaggagtgagtttttaggcattgacatcattgaccaagcttagggacgttgccaggagtgagctgaattagttgctaacttcgaatgtgggagggctggggtgaatggtcact

SEQ ID NO: 392277 - DNA, 120 bp, Artificial Sequence
  ENSG00000145147_80 (sequence is synthesized)
ttctcatcagcctaactctaacctgaactcactgggtcaccttgagcatgtcaccagggctttctgagccctagccccttgtctttaagataaggggtagaattagagcaccataaactg

SEQ ID NO: 392278 - DNA, 120 bp, Artificial Sequence
  ENSG00000145147_81 (sequence is synthesized)
agctttatggagctccagacttccaggagtgtgtgcctggaggtggagggtggaggacaaacagagagggaacattcccttcccccagtcttgcctttaaggacagtagctctgcctcta

SEQ ID NO: 392279 - DNA, 120 bp, Artificial Sequence
  ENSG00000145147_82 (sequence is synthesized)
ggttttatatatttgtgtacatgtaaagttttctttgaagcaaattttaaagattaaccaccaatcaactaggtattttattctagttgtggattagaatttcctggagcatcttccaat

SEQ ID NO: 392280 - DNA, 120 bp, Artificial Sequence
  ENSG00000145147_83 (sequence is synthesized)
acagaacaaaacaaaaacacacatctctacatctcttctccacttcacttccctaccaccctgcccaaatatcctgccataataggttggcagtgaggtcccaagcatcagtatttctga

SEQ ID NO: 392281 - DNA, 120 bp, Artificial Sequence
  ENSG00000145147_84 (sequence is synthesized)
attgtccctttgtcttgatggtgtaaggaagtggaatcttttcagagccctggcagtgctgggcagtgaaaagttggaaaacttggatcattagaagaaaattatcaactatgtttcaat

SEQ ID NO: 392282 - DNA, 120 bp, Artificial Sequence
  ENSG00000145147_85 (sequence is synthesized)
tttgcgagtctctaatgaagaagtaaatgcagacccggtgttgacggcccacgcgctcctgatgaggcgcttccagagttcagcgaagtggagcatggaggccgttctctttgtgaacgc

SEQ ID NO: 392283 - DNA, 120 bp, Artificial Sequence
  ENSG00000145147_86 (sequence is synthesized)
tttgccttccatcagtatatctgtttgaaagcatcattggaactatgttatatatgtttagtaaatctttttttatttgataaatggtaggtgtcttgaaaatcagatgtaatgtaaata

SEQ ID NO: 392284 - DNA, 120 bp, Artificial Sequence
  ENSG00000145147_87 (sequence is synthesized)
acataaggacttaaagatagtttcagctaaccaaataaaagacccaggaatctctgttcaaacatacgcatctattataaagccatgctatccagtaataaaagaagctattttgctaaa

SEQ ID NO: 392285 - DNA, 120 bp, Artificial Sequence
  ENSG00000145147_88 (sequence is synthesized)
cctagatcataaagagctctgctttttcacttttcccacttcctcccctgtcacatcaaggacttaaatgttgatagagatgagatcaaatgactaaaaaacatcattttgctcattttt

SEQ ID NO: 392286 - DNA, 120 bp, Artificial Sequence
  ENSG00000145147_89 (sequence is synthesized)
aatttggaagggtttgaatctgacatacatatgcaggtaacattcactacattctgattcttaaacggggcattaaaacttccacagtatcgagtattatgattctacacatatatttca

SEQ ID NO: 392287 - DNA, 120 bp, Artificial Sequence
  ENSG00000145191_0 (sequence is synthesized)
gcggaagtggtgaccgtgagagaagaagatggcggcccctgtagtggcgccgcctggtgtggtggttagtcgggctaacaagcgcagcggcgcggggccgggaggcagcggtggcggggg

SEQ ID NO: 392288 - DNA, 120 bp, Artificial Sequence
  ENSG00000145191_1 (sequence is synthesized)
agccagaggggcggaggaggaaccgccgccgcccctacaagcagttctggtggccgatagcttcgatcgccgcttcttccccatctccaaggaccagcctcgggtcctcttgcccctggc

SEQ ID NO: 392289 - DNA, 120 bp, Artificial Sequence
  ENSG00000145191_2 (sequence is synthesized)
caatgtggcattaattgactacactctggaattcctgactgccacaggtgtacaggaaacatttgtcttttgttgctggaaagctgctcaaatcaaagaacatttactgaagtcaaagtg

SEQ ID NO: 392290 - DNA, 120 bp, Artificial Sequence
  ENSG00000145191_3 (sequence is synthesized)
gtgccgccctacatctctcaatgtggttcgaataattacatcagagctctatcgatcactgggagatgtcctccgtgatgttgatgccaaggctttggtgcgctctgactttcttctggt

SEQ ID NO: 392291 - DNA, 120 bp, Artificial Sequence
  ENSG00000145191_4 (sequence is synthesized)
gtatggggatgtcatctcaaacatcaatatcaccagagcccttgaggaacacaggttgagacggaagctagaaaaaaatgtttctgtgatgacgatgatcttcaaggagtcatcccccag

SEQ ID NO: 392292 - DNA, 120 bp, Artificial Sequence
  ENSG00000145191_5 (sequence is synthesized)
ccacccaactcgttgccacgaagacaatgtggtagtggctgtggatagtaccacaaacagggttctccattttcagaagacccagggtctccggcgttttgcatttcctctgagcctgtt

SEQ ID NO: 392293 - DNA, 120 bp, Artificial Sequence
  ENSG00000145191_6 (sequence is synthesized)
tcagggcagtagtgatggagtggaggttcgatatgatttactggattgtcatatcagcatctgttctcctcaggtggcacaactctttacagacaactttgactaccaaactcgagatga

SEQ ID NO: 392294 - DNA, 120 bp, Artificial Sequence
  ENSG00000145191_7 (sequence is synthesized)
ctttgtgcgaggtctcttagtgaatgaggagatcctagggaaccagatccacatgcacgtaacagctaaggaatatggtgcccgtgtctccaacctacacatgtactcagctgtctgtgc

SEQ ID NO: 392295 - DNA, 120 bp, Artificial Sequence
  ENSG00000145191_8 (sequence is synthesized)
tgacgtcatccgccgatgggtctaccctctcaccccagaggcgaacttcactgacagcaccacccagagctgcactcattcccggcacaacatctaccgagggcctgaggtcagcctggg

SEQ ID NO: 392296 - DNA, 120 bp, Artificial Sequence
  ENSG00000145191_9 (sequence is synthesized)
ccatggcagcatcctagaggaaaatgtgctcctgggctctggcactgtcattggcagcaattgctttatcaccaacagtgtcattggccccggctgccacattggtgataacgtggtgct

SEQ ID NO: 392297 - DNA, 120 bp, Artificial Sequence
  ENSG00000145191_10 (sequence is synthesized)
agcacagatccatcagtctctgctttgtgacaatgctgaggtcaaggaacgagtgacactgaaaccacgctctgtcctcacttcccaggtggtcgtgggcccaaatatcacgctgcctga

SEQ ID NO: 392298 - DNA, 120 bp, Artificial Sequence
  ENSG00000145191_11 (sequence is synthesized)
gggctcggtgatctctttgcaccctccagatgcagaggaagatgaagatgatggcgagttcagtgatgattctggggctgaccaagaaaaggacaaagtgaagatgaaaggttacaatcc

SEQ ID NO: 392299 - DNA, 120 bp, Artificial Sequence
  ENSG00000145191_12 (sequence is synthesized)
agcagaagtaggagctgctggcaagggctacctctggaaagctgcaggcatgaacatggaggaagaggaggaactgcagcagaatctgtggggactcaagatcaacatggaagaagagag

SEQ ID NO: 392300 - DNA, 120 bp, Artificial Sequence
  ENSG00000145191_13 (sequence is synthesized)
tgaaagtgaaagtgagcaaagtatggattctgaggagccggacagccggggaggctcccctcagatggatgacatcaaagtgttccagaatgaagttttaggaacactacagcggggcaa

SEQ ID NO: 392301 - DNA, 120 bp, Artificial Sequence
  ENSG00000145191_14 (sequence is synthesized)
agaggagaacatttcttgtgacaatctcgtcctggaaatcaactctctcaagtatgcctataacataagtctaaaggaggtgatgcaggtactgagccacgtggtcctggagttccccct

SEQ ID NO: 392302 - DNA, 120 bp, Artificial Sequence
  ENSG00000145191_15 (sequence is synthesized)
gcaacagatggattccccgcttgactcaagccgctactgtgccctgctgcttcctctgctaaaggcctggagccctgtttttaggaactacataaagcgcgcagccgaccatttggaagc

SEQ ID NO: 392303 - DNA, 120 bp, Artificial Sequence
  ENSG00000145191_16 (sequence is synthesized)
gttagcagccattgaggacttcttcctagagcatgaagctcttggtatttccatggccaaggtactgatggctttctaccagctggagatcctggctgaggaaacaattctgagctggtt

SEQ ID NO: 392304 - DNA, 120 bp, Artificial Sequence
  ENSG00000145191_17 (sequence is synthesized)
cagccaaagagatacaactgacaagggccagcagttgcgcaagaatcaacagctgcagaggttcatccagtggctaaaagaggcagaagaggagtcatctgaagatgactgaagtcacac

SEQ ID NO: 392305 - DNA, 120 bp, Artificial Sequence
  ENSG00000145191_18 (sequence is synthesized)
tgcctgctcctttgggtgtgattgagtgccctcctggctcctgggctgggacaagtgaggaactagctgcagagggatgagtgaccaccatccaggctgagactgaaaggagcagaggct

SEQ ID NO: 392306 - DNA, 120 bp, Artificial Sequence
  ENSG00000145191_19 (sequence is synthesized)
ggaactacagtattctttcccctgctagcaaccatgtgcctcccatcctgactgtggagttgggatgtggaagtggggctggaacaaagcttctgcctagggaggagctaagcaggcccg

SEQ ID NO: 392307 - DNA, 120 bp, Artificial Sequence
  ENSG00000145191_20 (sequence is synthesized)
gcagttggaggaaggccagaggaacagctttgtgctccggctttccctcagggaacagcagagagcagttggctctttctgctgcttgtatatgttaatattaaaagagagagtggtgta

SEQ ID NO: 392308 - DNA, 120 bp, Artificial Sequence
  ENSG00000145191_21 (sequence is synthesized)
caatctcgtcctggaaatcaactctctcaagtaagagcagcccctccctgttctcctcggggtgatcccgggaaggtagaggctttctcgtaagtgttttgtctccaaataggaacctat

SEQ ID NO: 392309 - DNA, 120 bp, Artificial Sequence
  ENSG00000145191_22 (sequence is synthesized)
tccttcgacatcccaaatggaaagaccagtagtatttggagcaaggagagcattattaagttctagcctcagcatagactttctccttcctaaaccctccccttccatattgttccatcc

SEQ ID NO: 392310 - DNA, 120 bp, Artificial Sequence
  ENSG00000145191_23 (sequence is synthesized)
agattcctctccaatgtctatcaaagtcatagttctaagcctgctgaaaggccagtgaaggccctggtgtcaccccagtctccccacaggtatgcctataacataagtctaaaggaggtg

SEQ ID NO: 392311 - DNA, 120 bp, Artificial Sequence
  ENSG00000145191_24 (sequence is synthesized)
gaggaaccgccgccgcccctacaagcagttctggtggccgatagcttcgatcgccgcttcttccccatctccaaggaccagcctcggcatgcccttgaaggacctgcgtctatgctgtta

SEQ ID NO: 392312 - DNA, 120 bp, Artificial Sequence
  ENSG00000145191_25 (sequence is synthesized)
tcctaaaaccggatgcagagggactgtctaaaccctgatgactgctgaccaagttagtggccggcagatttgggcattcgtaatgctgtccacctcgggtttgaaaggaatgaagagagc

SEQ ID NO: 392313 - DNA, 120 bp, Artificial Sequence
  ENSG00000145191_26 (sequence is synthesized)
tcgatatgatttactggattgtcatatcagcatctgttctcctcagagacggggttttgccatgttgtccggcctggtcacgaactcctgagctcaagcaatctgaccacctcagccttc

SEQ ID NO: 392314 - DNA, 120 bp, Artificial Sequence
  ENSG00000145191_27 (sequence is synthesized)
ctgtgagcaaagattggagctgagtacaagggattgggtacaggcaaaggaaatcaggagtagactgtcttgttatattgggtgtatgtcacttctggttcctttttccttgcctctgga

SEQ ID NO: 392315 - DNA, 120 bp, Artificial Sequence
  ENSG00000145191_28 (sequence is synthesized)
agctggttgggctctagagcagccttggctggttcagaggggtcagattgagttcaatactgactggcctttgagactccaggatttcataccatcctaggcccacaaaggtatattcag

SEQ ID NO: 392316 - DNA, 120 bp, Artificial Sequence
  ENSG00000145191_29 (sequence is synthesized)
aatggacctggacattcagactctatggcagcaatttgacccaacacaagatcagcctctggggtgggaataggtattttgaggcagcctatagcatctgatcccctttcaccttcccta

SEQ ID NO: 392317 - DNA, 120 bp, Artificial Sequence
  ENSG00000145191_30 (sequence is synthesized)
aggaatctctttttcccaaaccctgtcaacaactcccaagtccctctgacataattccacagaacctgtatcatctcccttttgtccacccatgtcatcagtatggatttgcttggatgt

SEQ ID NO: 392318 - DNA, 120 bp, Artificial Sequence
  ENSG00000145191_31 (sequence is synthesized)
aggccctgcaacttttctttccatgtttcgccatctttttccagttttttcaggatgaatgtaactaaggggaaatgtgagaggggaaaaatgtgtctacttagatgtcattgtaagttc

SEQ ID NO: 392319 - DNA, 120 bp, Artificial Sequence
  ENSG00000145191_32 (sequence is synthesized)
taagggtattttctacacttatcaggaggtgagcagctgaaactttgtatctgtctgtcttgggttttctgtgacaaagattaaagaataaacttgggttttttctgaatctcattataa

SEQ ID NO: 392320 - DNA, 120 bp, Artificial Sequence
  ENSG00000145191_33 (sequence is synthesized)
ctttgtgcgaggtctcttagtgaatgaggaggtgagaaaagtcttccaatgcctctttaggagagaggagaaggctatgattgtatctcatgctgatcctagggaaccagatccacatgc

SEQ ID NO: 392321 - DNA, 120 bp, Artificial Sequence
  ENSG00000145191_34 (sequence is synthesized)
gcatggcagtcacactgagccagaaggggcattatttccacccataatcctgtctaaaaaagttgctctcattatcaggatgcacttttcctccacaccctaatggttctgtgttttttt

SEQ ID NO: 392322 - DNA, 120 bp, Artificial Sequence
  ENSG00000145191_35 (sequence is synthesized)
ggccccttcgtggcgaccacaagtcctatcacgccacaagaatctcggcttgttcacctacaaatgaaggccgacgatacttgcagaccgagtctgacatctatgggaccccactcctac

SEQ ID NO: 392323 - DNA, 120 bp, Artificial Sequence
  ENSG00000145191_36 (sequence is synthesized)
cctgcgcctcaggggccgggacaaccgtgacccgtaccgactcctcgcgcctccgggatcaacctcagacccctgtgggctcccggggaagacgcatgcgcactgctccctcctcgtctc

SEQ ID NO: 392324 - DNA, 120 bp, Artificial Sequence
  ENSG00000145191_37 (sequence is synthesized)
cttgaggaacacaggtcaggatgggaaaatgacaggaacaagggttaaagaccagcagagccctgagactgcttttttgcagttctgtccctcctgtcctttataggttgagacggaagc

SEQ ID NO: 392325 - DNA, 120 bp, Artificial Sequence
  ENSG00000145191_38 (sequence is synthesized)
caacagatggattccccgcttgactcaagccgctactgtgccctgctgcttcctctcccttctttcttccatagctgctaaaggcctggagccctgtttttaggaactacataaagcgcg

SEQ ID NO: 392326 - DNA, 120 bp, Artificial Sequence
  ENSG00000145191_39 (sequence is synthesized)
cgtctccagaaacacaagggatggctacacaagggacagtccctgggaataaggaactatagagcggctacctcaggaaaggaggaaacagggatttgaaaacagcgataccttaatttg

SEQ ID NO: 392327 - DNA, 120 bp, Artificial Sequence
  ENSG00000145191_40 (sequence is synthesized)
acaatgataacatctttgttttcccactgagtttctaaatcttgtttgttctcaccttcaaggatataaatgagctccttgtcatctttgtattcccactgcctagctcagtcccaagca

SEQ ID NO: 392328 - DNA, 120 bp, Artificial Sequence
  ENSG00000145191_41 (sequence is synthesized)
tatagtgagcacttacatgtttgttgaaatcttgaaaactagggaatcgcattgcttatggaagtccaggatgtaaagactaggacattagcatggtctccatcagacagttcctaaatg

SEQ ID NO: 392329 - DNA, 120 bp, Artificial Sequence
  ENSG00000145191_42 (sequence is synthesized)
ttatatggattgcagaaggggaaagctgacgtgaagcgtgttcccaggctactttgtgtaccctaggcttcagcaggattttgagttcaaattgatgtttagggacaaggggtcaaggta

SEQ ID NO: 392330 - DNA, 120 bp, Artificial Sequence
  ENSG00000145191_43 (sequence is synthesized)
tggagaggaaataaccatgtttcctaacccataaaacaagactggtgacacaggatgctgaaagcattcattatagttcataatactctttgaagttgaagacgctggcaagaacccaaa

SEQ ID NO: 392331 - DNA, 120 bp, Artificial Sequence
  ENSG00000145191_44 (sequence is synthesized)
aaagccatcgagaaggactgtgagtgctgaaagggggtgaaaaatggggaaggctcaaatgatctttatgcttgatacactcattcccctcaccctcccttcctttaggaagtcaaagtg

SEQ ID NO: 392332 - DNA, 120 bp, Artificial Sequence
  ENSG00000145191_45 (sequence is synthesized)
tacacaaagaagaatctttgtggcagtgagaggcagaggggaacttaaaaggattagaaaagttgtacttgggggcattcttcctgtctttcttgcttaggtgacctccctttccttctc

SEQ ID NO: 392333 - DNA, 120 bp, Artificial Sequence
  ENSG00000145191_46 (sequence is synthesized)
ggtgtgccagccactaggtggtactgtggtaccttgctaattaacctttcccatggctcatgggtagtggagggcggaggttcttttccagcctctgtggaccaacttgtgatcctgggg

SEQ ID NO: 392334 - DNA, 120 bp, Artificial Sequence
  ENSG00000145191_47 (sequence is synthesized)
tggtgtgcctaagcccgtttccatagagtcccattttgaacacttttctgccagaggattatgttgccaaccatatgtaaagcccattagacatgccagttcctttcacatgccttttcc

SEQ ID NO: 392335 - DNA, 120 bp, Artificial Sequence
  ENSG00000145191_48 (sequence is synthesized)
agttgatctggtactcgttctgtcaggaagctgggccacgcttcatcagaaataaggaaatcagctcaaggtcacatgactcttgaggggtaaagctaaggacttgaccctcagaatcca

SEQ ID NO: 392336 - DNA, 120 bp, Artificial Sequence
  ENSG00000145191_49 (sequence is synthesized)
gaactctgtccttcagcgtattgtgtttcagtgaagggaaaattggccccacagacaaatataacccagagccagtaatggaggtcccaagaacacaggaaggccatgtgaagggtgctt

SEQ ID NO: 392337 - DNA, 120 bp, Artificial Sequence
  ENSG00000145191_50 (sequence is synthesized)
tcccttgagagtgtttactatgtgacaggcaagcagttttcacatattgtttcatttaatcctcacatgagccccatgaagtcttatccccattttcagataaggtgcctgaagctcaca

SEQ ID NO: 392338 - DNA, 120 bp, Artificial Sequence
  ENSG00000145191_51 (sequence is synthesized)
gagcttccctagctagtaactgacagagccaggtgtgatattggactcttgacctggagcttgttactttgctgtattgctttaaccttaaccaaaagagacatgcctttctgtcttttc

SEQ ID NO: 392339 - DNA, 120 bp, Artificial Sequence
  ENSG00000145191_52 (sequence is synthesized)
cgcaagaatcaacaggtgcgtcaggctgtcctcctctcgccaagatggttatctcattcccaggtcctggcccctagactctagggtggttggtttctggggctctggttgttagagctg

SEQ ID NO: 392340 - DNA, 120 bp, Artificial Sequence
  ENSG00000145191_53 (sequence is synthesized)
gggagacataaaatagaagctaatgtgaatccagtatggaccatccactcccaatatgcttattgctagaatagtacagcttggagccggactaataaggtagccatctggggggtggtc

SEQ ID NO: 392341 - DNA, 120 bp, Artificial Sequence
  ENSG00000145191_54 (sequence is synthesized)
tggaaatgtgcaaagctctccccagcaatagttccagaagttagacctgccccaggagcagagcgaacagctcactcttgtccgttttggaggaggctactcagtgcatagagggatctg

SEQ ID NO: 392342 - DNA, 120 bp, Artificial Sequence
  ENSG00000145191_55 (sequence is synthesized)
agggcctggtagagtatcctgctggactttccaaggcccctgaggtcccctttattggccttttgcaggtactgatggctttctaccagctggagatcctggctgaggaaacaattctga

SEQ ID NO: 392343 - DNA, 120 bp, Artificial Sequence
  ENSG00000145192_0 (sequence is synthesized)
ctacctttcccagcagagcacctgggttggtcccgaagcctccaaccacctgcacgcctgccagggcctctctggggcagccatgaagtccctcgtcctgctcctttgtcttgctcagct

SEQ ID NO: 392344 - DNA, 120 bp, Artificial Sequence
  ENSG00000145192_1 (sequence is synthesized)
ctggggctgccactcagccccacatggcccagggctgatttatagacaaccgaactgcgatgatccagaaactgaggaagcagctctggtggctatagactacatcaatcaaaaccttcc

SEQ ID NO: 392345 - DNA, 120 bp, Artificial Sequence
  ENSG00000145192_2 (sequence is synthesized)
ttggggatacaaacacaccttgaaccagattgatgaagtaaaggtgtggcctcagcagccctccggagagctgtttgagattgaaatagacaccctggaaaccacctgccatgtgctgga

SEQ ID NO: 392346 - DNA, 120 bp, Artificial Sequence
  ENSG00000145192_3 (sequence is synthesized)
ccccacccctgtggcaagatgcagcgtgaggcagctgaaggagcatgctgtcgaaggagactgtgatttccagctgttgaaactagatggcaagttttccgtggtatacgcaaaatgtga

SEQ ID NO: 392347 - DNA, 120 bp, Artificial Sequence
  ENSG00000145192_4 (sequence is synthesized)
ttccagtccagactcagccgaggacgtgcgcaaggtgtgccaagactgccccctgctggccccgctgaacgacaccagggtggtgcacgccgcgaaagctgccctggccgccttcaacgc

SEQ ID NO: 392348 - DNA, 120 bp, Artificial Sequence
  ENSG00000145192_5 (sequence is synthesized)
tcagaacaacggctccaattttcagctggaggaaatttcccgggctcagcttgtgcccctcccaccttctacctatgtggagtttacagtgtctggcactgactgtgttgctaaagaggc

SEQ ID NO: 392349 - DNA, 120 bp, Artificial Sequence
  ENSG00000145192_6 (sequence is synthesized)
agtgtaacctgctggcagaaaagcaatatggcttttgtaaggcaacactcagtgagaagcttggtggggcagaggttgcagtgacctgcatggtgttccaaacacagcccgtgagctcac

SEQ ID NO: 392350 - DNA, 120 bp, Artificial Sequence
  ENSG00000145192_7 (sequence is synthesized)
agccccaaccagaaggtgccaatgaagcagtccccacacccgtggtggacccagatgcacctccgtcccctccacttggcgcacctggactccctccagctggctcacccccagactccc

SEQ ID NO: 392351 - DNA, 120 bp, Artificial Sequence
  ENSG00000145192_8 (sequence is synthesized)
atgtgttactggcagctcctccaggacaccagttgcaccgggcgcactacgacctgcgccacaccttcatgggtgtggtctcattggggtcaccctcaggagaagtgtcgcacccccgga

SEQ ID NO: 392352 - DNA, 120 bp, Artificial Sequence
  ENSG00000145192_9 (sequence is synthesized)
aaacacgcacagtggtgcagcctagtgttggtgctgctgctgggccagtggttcctccatgtccggggaggatcagacacttcaaggtctaggctagacatggcagagatgaggaggttt

SEQ ID NO: 392353 - DNA, 120 bp, Artificial Sequence
  ENSG00000145192_10 (sequence is synthesized)
ggcacagaaaacatagccaccattttgtccaagcctgggcatgggtggggggccttgtctgctggccacgcaagtgtcacatgcgatctacattaatatcaagtcttgactccctacttc

SEQ ID NO: 392354 - DNA, 120 bp, Artificial Sequence
  ENSG00000145192_11 (sequence is synthesized)
ccgtcattcctcacaggacagaagcagagtgggtggtggttatgtttgacagaaggcattaggttgacaacttgtcatgattttgacggtaagccaccatgattgtgttctctgcctctg

SEQ ID NO: 392355 - DNA, 120 bp, Artificial Sequence
  ENSG00000145192_12 (sequence is synthesized)
gttgaccttacaaaaaccattggaactgtgactttgaaaggtgctcttgctaagcttatatgtgcctgttaatgaaagtgcctgaaagaccttccttaataaagaaggttctaagctgaa

SEQ ID NO: 392356 - DNA, 120 bp, Artificial Sequence
  ENSG00000145192_13 (sequence is synthesized)
tggcacttcgggaatgtactgtacgtggtggagcgggaggcagggaagaacaggcgcaggggcagcgatgagaaagcaaggagagggttgtttggaaagggaagaaagcatcctaagggg

SEQ ID NO: 392357 - DNA, 120 bp, Artificial Sequence
  ENSG00000145192_14 (sequence is synthesized)
gtatgaggctcctgagtgtcatgaggaccccaacaccctcagcgcctcccccatgctgagccactgtaacgtccagcagccacagctgccggcaggtacatccccactccctccgttcca

SEQ ID NO: 392358 - DNA, 120 bp, Artificial Sequence
  ENSG00000145192_15 (sequence is synthesized)
gctaaaaccaaagctcagtgtcagctggtagagttgcccacgtcggccagaagcactcactgtaaatttgctgggctccagtaccacccatctccgctgaacatctgccacagactcgta

SEQ ID NO: 392359 - DNA, 120 bp, Artificial Sequence
  ENSG00000145192_16 (sequence is synthesized)
attaatactcacttgtgctgacaagcttataatggcaagatcttaaaatgcctttcgagtcactggagaaaacatctcattgtactgtgggtggtttagcacattggaattcaacagaat

SEQ ID NO: 392360 - DNA, 120 bp, Artificial Sequence
  ENSG00000145192_17 (sequence is synthesized)
tcaaatgtttaagaaaatgtattctggatatcagccatggccatacttggaaatacgctagtatagacggcaattctattaatcagaatatgtgattctcagaacatccccaccccagac

SEQ ID NO: 392361 - DNA, 120 bp, Artificial Sequence
  ENSG00000145194_0 (sequence is synthesized)
cgtgatggctggtgacggcggggccgggcaggggaccggggccgcggcccgggagcgggccagctgccgggagccctgaatcaccgcctggcccgactccaccatgaacgtcgcgctgca

SEQ ID NO: 392362 - DNA, 120 bp, Artificial Sequence
  ENSG00000145194_1 (sequence is synthesized)
tcaccgcctggcccgactccaccatgaacgtcgcgctgcaggagctgggagctggcagcaacgtgggattccagaaggggacaagacagctgttaggctcacgcacgcagctggagctgg

SEQ ID NO: 392363 - DNA, 120 bp, Artificial Sequence
  ENSG00000145194_2 (sequence is synthesized)
tcttagcaggtgcctctctactgctggctgcactgcttctgggctgccttgtggccctaggggtccagtaccacagagacccatcccacagcacctgccttacagaggcctgcattcgag

SEQ ID NO: 392364 - DNA, 120 bp, Artificial Sequence
  ENSG00000145194_3 (sequence is synthesized)
tggctggaaaaatcctggagtccctggaccgaggggtgagcccctgtgaggacttttaccagttctcctgtgggggctggattcggaggaaccccctgcccgatgggcgttctcgctgga

SEQ ID NO: 392365 - DNA, 120 bp, Artificial Sequence
  ENSG00000145194_4 (sequence is synthesized)
acaccttcaacagcctctgggaccaaaaccaggccatactgaagcacctgcttgaaaacaccaccttcaactccagcagtgaagctgagcagaagacacagcgcttctacctatcttgcc

SEQ ID NO: 392366 - DNA, 120 bp, Artificial Sequence
  ENSG00000145194_5 (sequence is synthesized)
tacaggtggagcgcattgaggagctgggagcccagccactgagagacctcattgagaagattggtggttggaacattacggggccctgggaccaggacaactttatggaggtgttgaagg

SEQ ID NO: 392367 - DNA, 120 bp, Artificial Sequence
  ENSG00000145194_6 (sequence is synthesized)
cagtagcagggacctacagggccaccccattcttcaccgtctacatcagtgccgactctaagagttccaacagcaatgttatccaggtggaccagtctgggctctttctgccctctcggg

SEQ ID NO: 392368 - DNA, 120 bp, Artificial Sequence
  ENSG00000145194_7 (sequence is synthesized)
attactacttaaacagaactgccaatgagaaagtgctcactgcctatctggattacatggaggaactggggatgctgctgggtgggcggcccacctccacgagggagcagatgcagcagg

SEQ ID NO: 392369 - DNA, 120 bp, Artificial Sequence
  ENSG00000145194_8 (sequence is synthesized)
tgctggagttggagatacagctggccaacatcacagtgccccaggaccagcggcgcgacgaggagaagatctaccacaagatgagcatttcggagctgcaggctctggcgccctccatgg

SEQ ID NO: 392370 - DNA, 120 bp, Artificial Sequence
  ENSG00000145194_9 (sequence is synthesized)
actggcttgagttcctgtctttcttgctgtcaccattggagttgagtgactctgagcctgtggtggtgtatgggatggattatttgcagcaggtgtcagagctcatcaaccgcacggaac

SEQ ID NO: 392371 - DNA, 120 bp, Artificial Sequence
  ENSG00000145194_10 (sequence is synthesized)
caagcatcctgaacaattacctgatctggaacctggtgcaaaagacaacctcaagcctggaccgacgctttgagtctgcacaagagaagctgctggagaccctctatggcactaagaagt

SEQ ID NO: 392372 - DNA, 120 bp, Artificial Sequence
  ENSG00000145194_11 (sequence is synthesized)
cctgtgtgccgaggtggcagacctgcatctccaacacggatgacgcccttggctttgctttggggtccctcttcgtgaaggccacgtttgaccggcaaagcaaagaaattgcagagggga

SEQ ID NO: 392373 - DNA, 120 bp, Artificial Sequence
  ENSG00000145194_12 (sequence is synthesized)
tgatcagcgaaatccggaccgcatttgaggaggccctgggacagctggtttggatggatgagaagacccgccaggcagccaaggagaaagcagatgccatctatgatatgattggtttcc

SEQ ID NO: 392374 - DNA, 120 bp, Artificial Sequence
  ENSG00000145194_13 (sequence is synthesized)
tggatgatgtttatgacgggtacgaaatttctgaagattctttcttccaaaacatgttgaatttgtacaacttctctgccaaggttatggctgaccagctccgcaagcctcccagccgag

SEQ ID NO: 392375 - DNA, 120 bp, Artificial Sequence
  ENSG00000145194_14 (sequence is synthesized)
accagtggagcatgaccccccagacagtgaatgcctactaccttccaactaagaatgagatcgtcttccccgctggcatcctgcaggcccccttctatgcccgcaaccaccccaaggccc

SEQ ID NO: 392376 - DNA, 120 bp, Artificial Sequence
  ENSG00000145194_15 (sequence is synthesized)
tgaacttcggtggcatcggtgtggtcatgggccatgagttgacgcatgcctttgatgaccaagggcgcgagtatgacaaagaagggaacctgcggccctggtggcagaatgagtccctgg

SEQ ID NO: 392377 - DNA, 120 bp, Artificial Sequence
  ENSG00000145194_16 (sequence is synthesized)
cagccttccggaaccacacggcctgcatggaggaacagtacaatcaataccaggtcaatggggagaggctcaacggccgccagacgctgggggagaacattgctgacaacggggggctga

SEQ ID NO: 392378 - DNA, 120 bp, Artificial Sequence
  ENSG00000145194_17 (sequence is synthesized)
aggctgcctacaatgcttacaaagcatggctgagaaagcatggggaggagcagcaactgccagccgtggggctcaccaaccaccagctcttcttcgtgggatttgcccaggtgtggtgct

SEQ ID NO: 392379 - DNA, 120 bp, Artificial Sequence
  ENSG00000145194_18 (sequence is synthesized)
cggtccgcacaccagagagctctcacgaggggctggtgaccgacccccacagccctgcccgcttccgcgtgctgggcactctctccaactcccgtgacttcctgcggcacttcggctgcc

SEQ ID NO: 392380 - DNA, 120 bp, Artificial Sequence
  ENSG00000145194_19 (sequence is synthesized)
ctgtcggctcccccatgaacccagggcagctgtgtgaggtgtggtagacctggatcaggggagaaatggccagctgtcaccagacctggggcagctctcctgacaaagctgtttgctctt

SEQ ID NO: 392381 - DNA, 120 bp, Artificial Sequence
  ENSG00000145194_20 (sequence is synthesized)
gggttgggaggaagcaaatgcaagctgggctgggtctagtccctcccccccacaggtgacatgagtacagaccctcctcaatcaccacattgtgcctctgctttgggggtgcccctgcct

SEQ ID NO: 392382 - DNA, 120 bp, Artificial Sequence
  ENSG00000145194_21 (sequence is synthesized)
ccagcagagcccccaccattcactgtgacatctttccgtgtcaccctgcctggaagaggtctgggtggggaggccagttcccataggaaggagtctgcctcttctgtccccaggctcact

SEQ ID NO: 392383 - DNA, 120 bp, Artificial Sequence
  ENSG00000145194_22 (sequence is synthesized)
cagcctggcggccatggggcctgccgtgcctgccccactgtgacccacaggcctgggtggtgtacctcctggacttctccccaggctcactcagtgcgcacttaggggtggactcagctc

SEQ ID NO: 392384 - DNA, 120 bp, Artificial Sequence
  ENSG00000145194_23 (sequence is synthesized)
tgtctggctcaccctcacgggctacccccacctcaccctgtgctccttgtgccactgctcccagtgctgctgctgaccttcactgacagctcctagtggaagcccaagggcctctgaaag

SEQ ID NO: 392385 - DNA, 120 bp, Artificial Sequence
  ENSG00000145194_24 (sequence is synthesized)
cctcctgctgcccactgtttccctgggctgagaggggaagtgcatatgtgtagcgggtactggttcctgtgtcttagggcacaagccttagcaaatgattgattctccctggacaaagca

SEQ ID NO: 392386 - DNA, 120 bp, Artificial Sequence
  ENSG00000145194_25 (sequence is synthesized)
ggaaagcagatagagcagggaaaaggaagaacagagtttatttttacagaaaagagggtgggagggtgtggtcttggcccttataggaccctgtgccaataaacagacatgcatccgtca

SEQ ID NO: 392387 - DNA, 120 bp, Artificial Sequence
  ENSG00000145194_26 (sequence is synthesized)
gcctggcccgactccaccatgaacgtcgcgctgcaggagctgggagctggcagcaacatggtggagtacaaacgggccacgcttcgggatgaagacgcacccgagacccccgtagagggc

SEQ ID NO: 392388 - DNA, 120 bp, Artificial Sequence
  ENSG00000145194_27 (sequence is synthesized)
aaggtaggggcccatggagtcgtcccctctagcctagaattcccagtggctcctgcaaggccttgggacattgatgtagccccaagggccctgaagtctgtggaccagggctggtggggg

SEQ ID NO: 392389 - DNA, 120 bp, Artificial Sequence
  ENSG00000145194_28 (sequence is synthesized)
gcccactgttctgtccccaggcttacaaagcatggctgagaaagcatggggaggagcagcaactgccagccgtggggctcaccaaccaccagctcttcttcgtgggatttgcccaggtgt

SEQ ID NO: 392390 - DNA, 120 bp, Artificial Sequence
  ENSG00000145194_29 (sequence is synthesized)
agccctggcatgacgcctggcacacccaggagctctgggctgttctggagggtcacctgcccccacctccgctccatctctggcctctgctctaggactatggtgggattccagaagggg

SEQ ID NO: 392391 - DNA, 120 bp, Artificial Sequence
  ENSG00000145194_30 (sequence is synthesized)
tcggaaggcctggggtctgcccctttgtcctgctccctcctgagtatgtcattaggagaactctggggcacgtgtcaaacgggctggtgaatggggctgaggctggggcatgaaaggtgg

SEQ ID NO: 392392 - DNA, 120 bp, Artificial Sequence
  ENSG00000145194_31 (sequence is synthesized)
gctgggaaggcccatgcccagagcctccggccagccagggcccacaaaggcagcctgaagaggcctgagcgggagaatgccttggtaggatttcgcatagttcaaagggcaaggttgtcg

SEQ ID NO: 392393 - DNA, 120 bp, Artificial Sequence
  ENSG00000145194_32 (sequence is synthesized)
tgcttgcggggcacagggtggcgaagggggcaaacgttcatcctcacgctgttcctgtgagggagacatgcaggaaacgaaagctcgggacgcagagtggcctgtccagggctgcccagg

SEQ ID NO: 392394 - DNA, 120 bp, Artificial Sequence
  ENSG00000145194_33 (sequence is synthesized)
aatagagtaagtggcagagcaaggacccaggcagagcctccgctgggcagccacagcaggcagcttctggggctccgctttttcccctcgtcatgtccatgctgggcaacccgatgtcca

SEQ ID NO: 392395 - DNA, 120 bp, Artificial Sequence
  ENSG00000145194_34 (sequence is synthesized)
tgtgggaaccaagccttccctgcagaaaagcccccggctttgctttctcttcccaaccttcctgctgtcatggcccttgcagagtttgcctcttccagacagacagactgacagtctcct

SEQ ID NO: 392396 - DNA, 120 bp, Artificial Sequence
  ENSG00000145194_35 (sequence is synthesized)
acctagtgaacaaactgcccctcctttctttcttcttttcttcctccctccctccctttcttccccttttccttccttccttcctcttattcttctagtaggtttcatagacacctactg

SEQ ID NO: 392397 - DNA, 120 bp, Artificial Sequence
  ENSG00000145194_36 (sequence is synthesized)
tgtgccaggtccagtgggggaattctgagatataagtttccgagccattgccacaggaagcgttcagtgtcgatgggttcatggacctagatagctgagaacaaagctcacaagagggtc

SEQ ID NO: 392398 - DNA, 120 bp, Artificial Sequence
  ENSG00000145198_0 (sequence is synthesized)
gtgagactctcgcgctggcctctggagcgcggggtgggcgtcccgtcaccctgcgcccagcttccccggcccgttcccgcagggccggcctcccggcgccatgcccggcctgtactgccc

SEQ ID NO: 392399 - DNA, 120 bp, Artificial Sequence
  ENSG00000145198_1 (sequence is synthesized)
ctccagctggacgccgctgccgctcacggactcctgggtccgggcctgcgccaacggcccctgcctcagcgtgcgggcccggctcacctaccgcaacccgcagccgcagccggtggacgg

SEQ ID NO: 392400 - DNA, 120 bp, Artificial Sequence
  ENSG00000145198_2 (sequence is synthesized)
cgtgttcgtgtacccgctggccgaggccgaggtggtgtccggcttcgaggccgaggccgccggacggcgcgtctccttccagctgcagagccggcgccgctcgcaggccgcctgctgccg

SEQ ID NO: 392401 - DNA, 120 bp, Artificial Sequence
  ENSG00000145198_3 (sequence is synthesized)
cgctctgggcccggggctggggaccccgacgccccgccgctgcgcgcagggtcatcttgtcttggatctggcccaggcccggtccacgttggtgctgcccacaggcattatcgccgcggc

SEQ ID NO: 392402 - DNA, 120 bp, Artificial Sequence
  ENSG00000145198_4 (sequence is synthesized)
tggcaccatgacggtgaccctgcacagcagccgggagctgccctcaaggcctgacggggtgctgcatgtggccctgcccactgtgctcaccccgctggccccgccaggcccgccggggcc

SEQ ID NO: 392403 - DNA, 120 bp, Artificial Sequence
  ENSG00000145198_5 (sequence is synthesized)
ccccaggcctccggggctctgtgacgacagccccaccagctgcttcggggtgggcagccttcaggaggaagggctggcctgggaggagctggctgcccctcgggacgtgttctcaggccc

SEQ ID NO: 392404 - DNA, 120 bp, Artificial Sequence
  ENSG00000145198_6 (sequence is synthesized)
tgcccgctgccctgccccatataccttctccttcgagatgctggtgactgggccatgcctgcttgcaggcctggagagcccctctcatgctctgcgggcagatgccccccctcatgccag

SEQ ID NO: 392405 - DNA, 120 bp, Artificial Sequence
  ENSG00000145198_7 (sequence is synthesized)
ctctgcagccaccatctgtgtcacactggcagagggccaccactgtgaccgggccttggagatcctgctgcaccccagtgagccccatcagccacacctgatgctggagggcggcagcct

SEQ ID NO: 392406 - DNA, 120 bp, Artificial Sequence
  ENSG00000145198_8 (sequence is synthesized)
gagctcagcagaatatgaggcccgggtgagggcccgccgagattttcagaggctacagcgaagggacagtgatggggaccggcaggtgtggttcctgcagcgacgcttccacaaggacat

SEQ ID NO: 392407 - DNA, 120 bp, Artificial Sequence
  ENSG00000145198_9 (sequence is synthesized)
cctgctgaaccccgtgctggcgctgagcttctgcccagacctgagctccaagcccggacacctggggacagctactcgggagctactcttccttttggatagcagcagcgtggcacacaa

SEQ ID NO: 392408 - DNA, 120 bp, Artificial Sequence
  ENSG00000145198_10 (sequence is synthesized)
ggatgccattgttttggctgtgaagtccctcccgccccagacgcttatcaacctggccgtgtttgggacgttggtgcagccactcttcccagagagccggccttgcagtgatgatgctgt

SEQ ID NO: 392409 - DNA, 120 bp, Artificial Sequence
  ENSG00000145198_11 (sequence is synthesized)
gcagctgatctgcgagagcattgagaccctgcaggttccgagtgggcccccagacgtgctggctgctctggactgggccgtggggcagccccagcacagggcctaccctcggcagctgtt

SEQ ID NO: 392410 - DNA, 120 bp, Artificial Sequence
  ENSG00000145198_12 (sequence is synthesized)
cctgctcactgctgcctcacccatggccgccactacccaccgaaccctggagctcatgaggtggcacagggggacagccagatgcttctcctttgggctggggcccacctgccaccagct

SEQ ID NO: 392411 - DNA, 120 bp, Artificial Sequence
  ENSG00000145198_13 (sequence is synthesized)
gctccagggtttatctgccctcagcagaggccaggcctacttcctgaggcctgggcagaggctgcagcccatgctggtacaggctctgcggaaggcactggagcctgctttgagtgacat

SEQ ID NO: 392412 - DNA, 120 bp, Artificial Sequence
  ENSG00000145198_14 (sequence is synthesized)
ctctgtggactggtttgtgcccgacactgtggaggcactgctgaccccccgggagatcccagcactctaccctggggaccagctgctcggttactgctcactcttcagggtggatggctt

SEQ ID NO: 392413 - DNA, 120 bp, Artificial Sequence
  ENSG00000145198_15 (sequence is synthesized)
ccggtcccgcccaccagggggccaagagcctggctggcagagctcgggtgggtccgtgtttccatccccagaagaggccccgtctgctgccagccctggcactgagcccactggcacctc

SEQ ID NO: 392414 - DNA, 120 bp, Artificial Sequence
  ENSG00000145198_16 (sequence is synthesized)
agagccactgggaacaggcactgtctcagcagaactgtccagcccatgggctgccagggactcggagcagagtactgatgctctgacagacccagtcacggatcctggacccaacccctc

SEQ ID NO: 392415 - DNA, 120 bp, Artificial Sequence
  ENSG00000145198_17 (sequence is synthesized)
attcgggagcagtatgtgctcacccactgctctgccagccccgagccaggcccaggctccacaggcagcagtgagtccccaggctcacagggccctggctcccccgaaggtagtgctccc

SEQ ID NO: 392416 - DNA, 120 bp, Artificial Sequence
  ENSG00000145198_18 (sequence is synthesized)
ttggagcccccttctcagcagggctgccgcagtctggcctggggagaacctgcaggctcccgctcctgtcccctgcctgcacccacaccagctccattcaaggtgggggccttgagtact

SEQ ID NO: 392417 - DNA, 120 bp, Artificial Sequence
  ENSG00000145198_19 (sequence is synthesized)
gaggtgctgggccgtcagcacagagcggctctggctggccgaagcctctcatcccctccaggccgggcaaaccaagtccccggccgaccccggaaaccctctttgggtgcaatactagat

SEQ ID NO: 392418 - DNA, 120 bp, Artificial Sequence
  ENSG00000145198_20 (sequence is synthesized)
ggcccaagtcctgagccaggccaacagttgggacaaggcctggatgactcaggaaacctgctctccccagcccctatggactgggacatgctgatggaaccacccttcttattcacggct

SEQ ID NO: 392419 - DNA, 120 bp, Artificial Sequence
  ENSG00000145198_21 (sequence is synthesized)
gtgcctcctagtggggagttggcccctccagcagtgcctccccaggctccacgctgccatgtggtgatccggggcctgtgtggggagcagcccatgtgctgggaggtgggtgttgggctg

SEQ ID NO: 392420 - DNA, 120 bp, Artificial Sequence
  ENSG00000145198_22 (sequence is synthesized)
gagacactgtggggacctggagatggctcacagcctccctcacctcctgtaagagaagctgcttgggaccaagcactccatcggctgacagcagcctctgtggtccgggacaatgagcag

SEQ ID NO: 392421 - DNA, 120 bp, Artificial Sequence
  ENSG00000145198_23 (sequence is synthesized)
ctggccctccgaggaggggcagagaccacagctgaccggggccatgcccggaggtgctggcttcgagcccttcagacaagtaaggtcagctctgccccctcctgcttcacttgccctgta

SEQ ID NO: 392422 - DNA, 120 bp, Artificial Sequence
  ENSG00000145198_24 (sequence is synthesized)
gctgtggatgctactactagggaggtcctgcctggggccctgcaggtgtgcagctcagagcccgctgagcccccaggaacccctcctgcctctcacagccatctagatgcagctcctctg

SEQ ID NO: 392423 - DNA, 120 bp, Artificial Sequence
  ENSG00000145198_25 (sequence is synthesized)
cccactgttgtctactctaaaggacttcagagaggctctccagcaggcgcctgggactcggaccaaaatggcaactccaagcgtgctttgggggaccctgccactcccacggaaggtcct

SEQ ID NO: 392424 - DNA, 120 bp, Artificial Sequence
  ENSG00000145198_26 (sequence is synthesized)
cgccgcccacctccccgtcctccctgtcggctcagcatgggccgccgtcacaaactctgtagccctgacccgggccaggccaacaacagtgaaggcagcgaccatgactacctgcccttg

SEQ ID NO: 392425 - DNA, 120 bp, Artificial Sequence
  ENSG00000145198_27 (sequence is synthesized)
gtgcggctgcaggaggcaccaggctccttccgcctggacgcgcccttctgcgccgctgtgcgcatctcgcaggagcgcctctgccgtgcctcgccctttgccgtgcaccgcgccagcctc

SEQ ID NO: 392426 - DNA, 120 bp, Artificial Sequence
  ENSG00000145198_28 (sequence is synthesized)
agccccacctcggcctcattgccctgggcacttctgggccctggtgttggccagggtgacagtgccacggcctcctgcagcccgtcccccagctcgggctctgaggggccaggccaggtg

SEQ ID NO: 392427 - DNA, 120 bp, Artificial Sequence
  ENSG00000145198_29 (sequence is synthesized)
gacagtgggcggggctcagacaccgaggcctccgagggggcggaagggctgggcggcaccgacctgcggggccggacctgggccactgccgtagcactcgcctggctggagcaccgatgc

SEQ ID NO: 392428 - DNA, 120 bp, Artificial Sequence
  ENSG00000145198_30 (sequence is synthesized)
gccgctgccttcgacgagtgggaactgacagcggccaaggctgattgctggctgcgggcccagcacttgcctgacggccttgacctggccgccctcaaggccgcagcccgagggctcttc

SEQ ID NO: 392429 - DNA, 120 bp, Artificial Sequence
  ENSG00000145198_31 (sequence is synthesized)
ctgctactgcgccactgggaccaaaacctgcagctacacctgctgtgctacagcccagcgaacgtgtgaaggctgccccctgctgcttgggctggcgccccacccaacacactcaagtca

SEQ ID NO: 392430 - DNA, 120 bp, Artificial Sequence
  ENSG00000145198_32 (sequence is synthesized)
ctgccgcccagggctggcctcttggtgctgggaaagtgtaggctggtgccagcctgtcccccactgcttcttactccctccctagagccctcttgcccccacaaaaagtgcctgcctgtg

SEQ ID NO: 392431 - DNA, 120 bp, Artificial Sequence
  ENSG00000145198_33 (sequence is synthesized)
ctctctccctctcctcccaccccactcacactcccctccatcctctgagctccctgcaacacagtggaagggtagagagccacagtccccaaatcctatgcaataaagtgcctcttagga

SEQ ID NO: 392432 - DNA, 120 bp, Artificial Sequence
  ENSG00000145198_34 (sequence is synthesized)
attcgaattactacaaaaagatgtcccctctgggtggatcagacagaaaaaggccccagagccagtcccactgcccaccctcaacaaagtagcactaagccttgcccaggctgacttggg

SEQ ID NO: 392433 - DNA, 120 bp, Artificial Sequence
  ENSG00000145198_35 (sequence is synthesized)
cagtccccaaacaaacctaggagctaaataaaacagtgtgtgcagtgtgcaaatggagctttatgtcctccagcctgcttcctgcttctctattcctcctgcccgggaggagtagagaat

SEQ ID NO: 392434 - DNA, 120 bp, Artificial Sequence
  ENSG00000145198_36 (sequence is synthesized)
tctggagccaccttagtgggcaatgggggagctcctgatggttcaggagcaggaaatttatgagcagagtggggtcccaggccacagggagatgtctatccacaagggatggtggccaag

SEQ ID NO: 392435 - DNA, 120 bp, Artificial Sequence
  ENSG00000145198_37 (sequence is synthesized)
ggttgaatggaaagaggcaggcagggggagaggggcagagggtgtgggtattcccagggccttgagagtggacatggccccttctcctcagccttccattagcaaggatgtcactgctgc

SEQ ID NO: 392436 - DNA, 120 bp, Artificial Sequence
  ENSG00000145198_38 (sequence is synthesized)
tcttgcctgatgacagccagatctgttcacagttagtctgcctctcctgccatcattcatctcatgcctccatcctgcgtcaccaatgcattagcctagtgccaacacgcaaagtccccc

SEQ ID NO: 392437 - DNA, 120 bp, Artificial Sequence
  ENSG00000145198_39 (sequence is synthesized)
ttgcccaggctccctgacccaatgcctgcttccacatctagcttcctccctctcctctgcttccagcatgctctgaccccatttctcacccatcataggtcatcttgtcttggatctggc

SEQ ID NO: 392438 - DNA, 120 bp, Artificial Sequence
  ENSG00000145198_40 (sequence is synthesized)
gacaggttgggcctatggtgattctcttcgtccctccctcggcttctctgggtctagtgcgggtgagggggcactggcagggtacccagggatgggaagggtgaggaagggctggggcca

SEQ ID NO: 392439 - DNA, 120 bp, Artificial Sequence
  ENSG00000145198_41 (sequence is synthesized)
accgccataggagcctggcctggcccctggccttggctgcatttgtgcacaaggagcaggcaagcaggcttacattggaatgggtgcggggaggcctcttttctcggtaagatctctcca

SEQ ID NO: 392440 - DNA, 120 bp, Artificial Sequence
  ENSG00000145198_42 (sequence is synthesized)
cagctgccaccaaccatcacagaggacagatgagtattgtcattggagggccgatgtgaatctctctggggtgtgtctcagaggatggaggctaggtctgatataaacagaagacagcca

SEQ ID NO: 392441 - DNA, 120 bp, Artificial Sequence
  ENSG00000145198_43 (sequence is synthesized)
gcctgtggtgcaggaaggctggacctgcaggctcctcctggacagtgaaactgggcacttggggtccagaggcagggccttccttgacagaattgtgtcctctcctctcagagccccatc

SEQ ID NO: 392442 - DNA, 120 bp, Artificial Sequence
  ENSG00000145198_44 (sequence is synthesized)
ctcaatagtcaaatgtgactagtggctaccacattggatcatgaagagagagaacatttccaagttttattagtgcagaagcaggtggaggaaaatgtgccagctaatgcttcctctggg

SEQ ID NO: 392443 - DNA, 120 bp, Artificial Sequence
  ENSG00000145198_45 (sequence is synthesized)
tgttgtccagagtgctgaatttctgggcagccagggggctcttgctctgctatgggttgaagattcagcctgatcacttcttgtcaaagttggggagtctgagctggttctgggcctagc

SEQ ID NO: 392444 - DNA, 120 bp, Artificial Sequence
  ENSG00000145198_46 (sequence is synthesized)
aaggcaatctactctgttaaagtcgatagagggagaagctggggagaacactgcaattttttctatgagccctctgtagagggtgggtggtgggggctccacagactgctccttggttcc

SEQ ID NO: 392445 - DNA, 80 bp, Artificial Sequence
  ENSG00000145214_0 (sequence is synthesized)
agtcggaagcagtgtaccgggccgtggagcggcggctcctgtacccccggcgcggacctaaaggggctcgggccgctcgg

SEQ ID NO: 392446 - DNA, 120 bp, Artificial Sequence
  ENSG00000145214_1 (sequence is synthesized)
gccccgggccccgctgccgcgccgggacacagcttccggaaggtgacgctcaccaagcccaccttctgccacctctgctccgacttcatctgggggctggccggcttcctgtgcgacgtc

SEQ ID NO: 392447 - DNA, 120 bp, Artificial Sequence
  ENSG00000145214_2 (sequence is synthesized)
tgcaatttcatgtctcatgagaagtgcctgaagcacgtgaggatcccgtgcacgagtgtggcacccagcctggtccgggttcctgtagcccactgcttcggcccccgggggctccacaag

SEQ ID NO: 392448 - DNA, 120 bp, Artificial Sequence
  ENSG00000145214_3 (sequence is synthesized)
cgcaagttctgtgctgtctgccgcaaggtcctggaggcaccggcgctccactgcgaagtgtgtgagctgcacctccacccagactgtgtgcccttcgcctgcagtgactgccgccagtgc

SEQ ID NO: 392449 - DNA, 120 bp, Artificial Sequence
  ENSG00000145214_4 (sequence is synthesized)
caccaggatgggcaccaggatcacgacacccatcaccaccactggcgggaggggaacctgccctcgggagcgcgctgcgaggtctgcaggaagacgtgcggctcctctgacgtgctggcc

SEQ ID NO: 392450 - DNA, 120 bp, Artificial Sequence
  ENSG00000145214_5 (sequence is synthesized)
ggcgtgcgctgcgagtggtgcggggtccaggcgcactccctctgctccgcggcgctggctcccgagtgtggcttcgggcgtctgcgctccctggtcctgcctcccgcgtgcgtgcgcctt

SEQ ID NO: 392451 - DNA, 120 bp, Artificial Sequence
  ENSG00000145214_6 (sequence is synthesized)
ctgcccggcggcttcagcaagacgcagagcttccgcatcgtggaggccgcggagccgggcgaggggggcgacggcgccgacgggagcgctgccgtgggtccaggcagagagacacaggca

SEQ ID NO: 392452 - DNA, 120 bp, Artificial Sequence
  ENSG00000145214_7 (sequence is synthesized)
actccggagtccgggaagcaaacgctgaagatctttgatggcgacgacgcggtgagaagaagccagttccgcctcgtcacggtgtcccgcctggccggtgccgaggaggtgctggaggcc

SEQ ID NO: 392453 - DNA, 120 bp, Artificial Sequence
  ENSG00000145214_8 (sequence is synthesized)
gcactgcgggcccaccacatccccgaggaccctggccacctggagctgtgccggctgcccccttcctctcaggcctgtgacgcctgggctgggggcaaggctgggagtgctgtgatctcg

SEQ ID NO: 392454 - DNA, 120 bp, Artificial Sequence
  ENSG00000145214_9 (sequence is synthesized)
gaggagggcagaagccccgggtccggcgaggccacgccagaggcctgggtcatccgggctctgccgcgggcccaggaggtcctgaagatctaccctggctggctcaaggtgggcgtggcc

SEQ ID NO: 392455 - DNA, 120 bp, Artificial Sequence
  ENSG00000145214_10 (sequence is synthesized)
tacgtgtccgtgcgagtgaccccgaagagcacggcccgctctgtggtgctggaggtcctgccgctgctcggccgccaggccgagagtcccgagagcttccagctggtggaggtggcgatg

SEQ ID NO: 392456 - DNA, 120 bp, Artificial Sequence
  ENSG00000145214_11 (sequence is synthesized)
ggctgcaggcacgtccagcggacgatgctgatggacgaacagcccctgctggaccggctacaggacatccggcagatgtctgtgcggcaggtgagccagacgcggttctacgtggcagag

SEQ ID NO: 392457 - DNA, 120 bp, Artificial Sequence
  ENSG00000145214_12 (sequence is synthesized)
agcagggatgtagccccgcacgtctccctgtttgttggcggcctgcctcccggcctgtctcccgaggagtacagcagcctgctgcatgaggccggggctaccaaagccaccgtggtgtcc

SEQ ID NO: 392458 - DNA, 120 bp, Artificial Sequence
  ENSG00000145214_13 (sequence is synthesized)
gtgagtcacatctactcctcccaaggcgcggtagtgttggacgttgcctgctttgcggaggccgagcggctgtacatgctgctgaaggacatggctgtgcggggccggctgctcactgcc

SEQ ID NO: 392459 - DNA, 120 bp, Artificial Sequence
  ENSG00000145214_14 (sequence is synthesized)
ctggtgctccccgacctgctgcacgcgaagctgcccccagacagctgtcccctccttgtgttcgtgaaccccaagagtggaggcctcaagggccgagacctgctctgcagcttccggaag

SEQ ID NO: 392460 - DNA, 120 bp, Artificial Sequence
  ENSG00000145214_15 (sequence is synthesized)
ctactgaaccctcatcaggtcttcgacctgaccaacggaggtcctcttcccgggctccacctgttctcccaggtgccctgcttccgggtgctggtgtgtggtggcgatggcactgtgggc

SEQ ID NO: 392461 - DNA, 120 bp, Artificial Sequence
  ENSG00000145214_16 (sequence is synthesized)
tgggtgcttggcgccctggaggagacacggtaccgactggcctgcccggagccttctgtggccatcctgcccctgggcacagggaatgaccttggtcgagtcctccgctggggggcgggc

SEQ ID NO: 392462 - DNA, 120 bp, Artificial Sequence
  ENSG00000145214_17 (sequence is synthesized)
tacagcggcgaggacccgttctccgtactgctgtctgtggacgaggccgacgccgtgctcatggaccgctggaccatcctgctggatgcccacgaggctggcagtgcagagaacgacacg

SEQ ID NO: 392463 - DNA, 120 bp, Artificial Sequence
  ENSG00000145214_18 (sequence is synthesized)
acgggaagaggagcctggcaagttcacaagcaggctgcacaacaagggtgtgtacgtgcgggtggggctgcagaagatcagtcactctcggagcctgcacaagcagatccggctgcaggt

SEQ ID NO: 392464 - DNA, 120 bp, Artificial Sequence
  ENSG00000145214_19 (sequence is synthesized)
ggagcggcaggaggtggagctgcccagtattgaaggcctcatcttcatcaacatccccagctggggctcgggggccgacctgtggggctccgacagcgacaccaggtttgagaagccacg

SEQ ID NO: 392465 - DNA, 120 bp, Artificial Sequence
  ENSG00000145214_20 (sequence is synthesized)
catggacgacgggctgctggaggttgtgggcgtgacgggcgtcgtgcacatgggccaggtccagggtgggctgcgctccggaatccggattgcccagggttcctacttccgagtcacgct

SEQ ID NO: 392466 - DNA, 120 bp, Artificial Sequence
  ENSG00000145214_21 (sequence is synthesized)
cctcaaggccaccccggtgcaggtggacggggagccctgggtccaggccccggggcacatgatcatctcagctgctggccctaaggtgcacatgctgaggaaggccaagcagaagccgag

SEQ ID NO: 392467 - DNA, 120 bp, Artificial Sequence
  ENSG00000145214_22 (sequence is synthesized)
gagggccgggaccaccagggatgcccgggcggatgctgcgcctgcccctgagagcgatcctaggtaggggtggctggggcagcccaagggctcgagccatctctgctcccgccagccttg

SEQ ID NO: 392468 - DNA, 120 bp, Artificial Sequence
  ENSG00000145214_23 (sequence is synthesized)
ttttcaggtggtctggaggcagctccacgtccacacagtggccggccctgtggtcggacctggctacagccctgaccacagcatcttcccagtgacggagcgggacccgccctcatccca

SEQ ID NO: 392469 - DNA, 120 bp, Artificial Sequence
  ENSG00000145214_24 (sequence is synthesized)
ttggtgacacatgttggtgtcacagccctcatcccactggagactggtgtgcgggtggcagtgttaccccgtgtcccgggtgggcgcagggctctggatggtgagccctctgccctgtgg

SEQ ID NO: 392470 - DNA, 120 bp, Artificial Sequence
  ENSG00000145214_25 (sequence is synthesized)
gggcctggtcctctcctcaggggtgggcacccatccctctccccactgagccccttgagctggacagtgctggatgcaggccgtccaggtgggtctgatctcactttgtgcccctcgggc

SEQ ID NO: 392471 - DNA, 120 bp, Artificial Sequence
  ENSG00000145214_26 (sequence is synthesized)
cgtccccctggccagtccttaagagcagcaggctccctggtgtgtccctgccccagcagacacaggctgccagtccctccagcctcacctccccgccctgggcagcaggtgtgggcagcg

SEQ ID NO: 392472 - DNA, 120 bp, Artificial Sequence
  ENSG00000145214_27 (sequence is synthesized)
tgtgaggctgccgggtggtggtgactggtgacttccttgtgttcagggaagggagaaggtgccttcccttgttttctggccttgttatatacagatggcagcttggatctcaggtacagc

SEQ ID NO: 392473 - DNA, 120 bp, Artificial Sequence
  ENSG00000145214_28 (sequence is synthesized)
tccaggggcaggcagtgcccagctggacctggtggccctttcctagtgcctctgcttggggaggagaacctctgtccacgtggaggctaggaggtctcaggtgctgccctggcagcacca

SEQ ID NO: 392474 - DNA, 120 bp, Artificial Sequence
  ENSG00000145214_29 (sequence is synthesized)
gagtgtgggccgggcccgagtgtctgcccctcggccctcagggtggggcacttagcacccagaagggaccaaaagcagggcatggcggtgcagaggagtttgggaggtgtaaacagccca

SEQ ID NO: 392475 - DNA, 120 bp, Artificial Sequence
  ENSG00000145214_30 (sequence is synthesized)
tgcacgtggaggaggagctggctttcagccccagaccccacgctagcactttccacgctgcttgcccgctgttgatgtgcagttcccagtgcctgtgtgagccgacatctgctcagtcct

SEQ ID NO: 392476 - DNA, 120 bp, Artificial Sequence
  ENSG00000145214_31 (sequence is synthesized)
atccctcgtcagcgtgtggagacccagctcctgcagccctcctgctcccacgcccccagacagcttggtggagggtcctgcatctgggccaggctggggtgcacccagccaaagacaaag

SEQ ID NO: 392477 - DNA, 120 bp, Artificial Sequence
  ENSG00000145214_32 (sequence is synthesized)
ctgcctccacgtgcccaaggattcagatggtgcactggccccgggaggagtctgaccaaaaatggagcccgctctgtggggaagccccgactcccccacgagaaacggtcccacggtgcg

SEQ ID NO: 392478 - DNA, 120 bp, Artificial Sequence
  ENSG00000145214_33 (sequence is synthesized)
gatctcccccttcccttgtggggcacagctggcctgggcctccaatcctgcggagctttcctgggtgtggctttgacctcagaagtggctctggtttggcctcaggagtgtggcctggcc

SEQ ID NO: 392479 - DNA, 120 bp, Artificial Sequence
  ENSG00000145214_34 (sequence is synthesized)
cagcctgctgcagcctcctggggggcccttgatgccactaatcccccgaccccccgcatctgccaaactgcacagacacacgcattgtaaggccgcttgtggcctccagcgtgcactctt

SEQ ID NO: 392480 - DNA, 120 bp, Artificial Sequence
  ENSG00000145214_35 (sequence is synthesized)
gtttacgtcattgtcatcttcaagaccagtcctttgtgattagttttgcttcgcgagccctggtgtggactgtggtctgtatgaatcgtgtgtaactgtggtgaggggcttgtcctgtat

SEQ ID NO: 392481 - DNA, 120 bp, Artificial Sequence
  ENSG00000145214_36 (sequence is synthesized)
gtgagtctgtacccaggtggggtctgtgccctgcacaccgggcccctctgtatttatcgctgcctgaatgcaacagtaatttatatccaggacaaatacagtctgggcgtcactatccta

SEQ ID NO: 392482 - DNA, 120 bp, Artificial Sequence
  ENSG00000145214_37 (sequence is synthesized)
caggacatccggcagggaggcctcgagctgcagatctccccgaggtcctcgaggggaacggacaggggttgtccacagcaaggaagcctctgtggcccctttcctcgttttcctgttgac

SEQ ID NO: 392483 - DNA, 120 bp, Artificial Sequence
  ENSG00000145214_38 (sequence is synthesized)
cccaagatcgtgcagatgagtaactactgtggcattggcatcgacgcggagctgagcctggacttccaccaggcacgggaagaggagcctggcaagttcacaagcagctggggctcgggg

SEQ ID NO: 392484 - DNA, 120 bp, Artificial Sequence
  ENSG00000145216_0 (sequence is synthesized)
gcgcatgcgcagacggacctgcgctggaggcttcatctttgccgccgctgccgtcgccttcctgggattggagtctcgagctttcttcgttcgttcgtcggcgggttcgcgcccttctcg

SEQ ID NO: 392485 - DNA, 120 bp, Artificial Sequence
  ENSG00000145216_1 (sequence is synthesized)
cgcctcggggctgcgaggctggggaaggggttggagggggctgttgatcgccgcgtttaagttgcgctcggggcggccatgtcggccggcgaggtcgagcgcctagtgtcggagctgagc

SEQ ID NO: 392486 - DNA, 120 bp, Artificial Sequence
  ENSG00000145216_2 (sequence is synthesized)
ggcgggaccggaggggatgaggaggaagagtggctctatggcggcccatgggacgtgcatgtgcacagtgatttggcaaaggacctagatgaaaatgaagttgaaaggccagaagaagaa

SEQ ID NO: 392487 - DNA, 120 bp, Artificial Sequence
  ENSG00000145216_3 (sequence is synthesized)
aatgccagtgctaatcctccatctggaattgaagatgaaactgctgaaaatggtgtaccaaaaccgaaagtgactgagaccgaagatgatagtgatagtgacagcgatgatgatgaagat

SEQ ID NO: 392488 - DNA, 120 bp, Artificial Sequence
  ENSG00000145216_4 (sequence is synthesized)
gatgttcatgtcactataggagacattaaaacgggagcaccacagtatgggagttatggtacagcacctgtaaatcttaacatcaagacagggggaagagtttatggaactacagggaca

SEQ ID NO: 392489 - DNA, 120 bp, Artificial Sequence
  ENSG00000145216_5 (sequence is synthesized)
aaagtcaaaggagtagaccttgatgcacctggaagcattaatggagttccactcttagaggtagatttggattcttttgaagataaaccatggcgtaaacctggtgctgatctttctgat

SEQ ID NO: 392490 - DNA, 120 bp, Artificial Sequence
  ENSG00000145216_6 (sequence is synthesized)
tattttaattatgggtttaatgaagatacctggaaagcttactgtgaaaaacaaaagaggatacgaatgggacttgaagttataccagtaacctctactacaaataaaattacggccgaa

SEQ ID NO: 392491 - DNA, 120 bp, Artificial Sequence
  ENSG00000145216_7 (sequence is synthesized)
gactgtactatggaagttacaccaggtgcagagatccaagatggcagattcaatctttttaaggtacagcagggaagaactggaaactcagagaaagaaactgcccttccatctacaaaa

SEQ ID NO: 392492 - DNA, 120 bp, Artificial Sequence
  ENSG00000145216_8 (sequence is synthesized)
gctgagtttacttctcctccttctttgttcaagactgggcttccaccgagcagaaacagcacttcttctcagtctcagacaagtactgcctccagaaaagccaattcaagcgttgggaag

SEQ ID NO: 392493 - DNA, 120 bp, Artificial Sequence
  ENSG00000145216_9 (sequence is synthesized)
tggcaggatcgatatgggagggccgaatcacctgatctaaggagattacctggggcaattgatgttatcggtcagactataactatcagccgagtagaaggcaggcgacgggcaaatgag

SEQ ID NO: 392494 - DNA, 120 bp, Artificial Sequence
  ENSG00000145216_10 (sequence is synthesized)
aacagcaacatacaggtcctttctgaaagatctgctactgaagtagacaacaattttagcaaaccacctccgtttttccctccaggagctcctcccactcaccttccacctcctccattt

SEQ ID NO: 392495 - DNA, 120 bp, Artificial Sequence
  ENSG00000145216_11 (sequence is synthesized)
cttccacctcctccgactgtcagcactgctccacctctgattccaccaccgggttttcctcctccaccaggcgctccacctccatctcttataccaacaatagaaagtggacattcctct

SEQ ID NO: 392496 - DNA, 120 bp, Artificial Sequence
  ENSG00000145216_12 (sequence is synthesized)
ggttatgatagtcgttctgcacgtgcatttccatatggcaatgttgcctttccccatcttcctggttctgctccttcgtggcctagtcttgtggacaccagcaagcagtgggactattat

SEQ ID NO: 392497 - DNA, 120 bp, Artificial Sequence
  ENSG00000145216_13 (sequence is synthesized)
gccagaagagagaaagaccgagatagagagagagacagagacagagagcgagaccgtgatcgggacagagaaagagaacgcaccagagagagagagagggagcgtgatcacagtcctaca

SEQ ID NO: 392498 - DNA, 120 bp, Artificial Sequence
  ENSG00000145216_14 (sequence is synthesized)
tacagggaatatgcagaaagaggttatgagcgtcacagagcaagtcgagaaaaagaagaacgacatagagaaagacgacacagggagaaagaggaaaccagacataagtcttctcgaagt

SEQ ID NO: 392499 - DNA, 120 bp, Artificial Sequence
  ENSG00000145216_15 (sequence is synthesized)
aatagtagacgtcgccatgaaagtgaagaaggagatagtcacaggagacacaaacacaaaaaatctaaaagaagcaaagaaggaaaagaagcgggcagtgagcctgcccctgaacaggag

SEQ ID NO: 392500 - DNA, 120 bp, Artificial Sequence
  ENSG00000145216_16 (sequence is synthesized)
agcaccgaagctacacctgcagaataggcatggttttggccttttgtgtatattagtaccagaagtagatactataaatcttgttatttttctggataatgtttaagaaatttaccttaa

SEQ ID NO: 392501 - DNA, 120 bp, Artificial Sequence
  ENSG00000145216_17 (sequence is synthesized)
atcttgttctgtttgttagtatgaaaagttaactttttttccaaaataaaagagtgaatttttcatgttaagttaaaaatctttgtcttgtactatttcaaaaataaaaagacagcaatg

SEQ ID NO: 392502 - DNA, 120 bp, Artificial Sequence
  ENSG00000145216_18 (sequence is synthesized)
actttatatccaagaaaggaatgtgaatgagtcacttaacagggaatctaaagagctgtgttagctgtgtacatacacagattatctgagaaaaggtcaagggttccacttgggccacag

SEQ ID NO: 392503 - DNA, 120 bp, Artificial Sequence
  ENSG00000145216_19 (sequence is synthesized)
tttttttgttaatcaaacaccactctcttaagaggctgcatcacaaaaggcaacaaagggcccctctaaggcttgagattaaaactagtctttatcattactgctgtgacactcttgctt

SEQ ID NO: 392504 - DNA, 120 bp, Artificial Sequence
  ENSG00000145216_20 (sequence is synthesized)
agtatattaagagactcatacatttttgatatcacaactttttgatggcttttcaatattctaaatttgggttcctggtgaaaccaaatggggtacactttcatatccaaattaataaaa

SEQ ID NO: 392505 - DNA, 120 bp, Artificial Sequence
  ENSG00000145216_21 (sequence is synthesized)
cctataaggcatctgggtggcctctatgaaataaattaattaattacccatagtgtagtttctaggaggcatgtgtacacacactcttcattgtggcacaaatttaaatcgcctcatgac

SEQ ID NO: 392506 - DNA, 120 bp, Artificial Sequence
  ENSG00000145216_22 (sequence is synthesized)
catgtctgtgagccagggtcaagctggtttggccttcttgatgcattttccaaggcccactggtggagcagcatgagtttttatacagttactaacgattgtggaaaaaaagagctttag

SEQ ID NO: 392507 - DNA, 120 bp, Artificial Sequence
  ENSG00000145216_23 (sequence is synthesized)
ccatttcttactaaaaacaaaacaagtttataattaattctctgagcgagcatttttagggataagcctaggaggtattcatcggtgatggtaacaaataacatggtatttgaaagaata

SEQ ID NO: 392508 - DNA, 120 bp, Artificial Sequence
  ENSG00000145216_24 (sequence is synthesized)
aattactaggatcttttaaatagtgataatacaaaagtaatcttaattagtatcacatactaaaagacaactataacttctgaaaaatatttattcttgtttgatgaaagcaacgtttct

SEQ ID NO: 392509 - DNA, 120 bp, Artificial Sequence
  ENSG00000145216_25 (sequence is synthesized)
cagcaatgcattttaaaaaatattttagctgtaaattaaaaatggccataatgtacccttggcagacttcagcatataccaaattttaaatttaaatcagcttgaattcagtggggtata

SEQ ID NO: 392510 - DNA, 120 bp, Artificial Sequence
  ENSG00000145216_26 (sequence is synthesized)
caaatcattttagttgttttagggctttttattgaatagaaaaaatataaacaatgttgtagagtaatgagaaatcctccacactgaaaaaaaactagtagttttaatttttttggaatc

SEQ ID NO: 392511 - DNA, 120 bp, Artificial Sequence
  ENSG00000145216_27 (sequence is synthesized)
atattttctgaggtgtaactggctttcattagatgatcatacttttcctgacatttttacaatgtattctttctttaaatataaaaactgacaagataaatatagtgtttcaacttctta

SEQ ID NO: 392512 - DNA, 120 bp, Artificial Sequence
  ENSG00000145216_28 (sequence is synthesized)
tgttttctccatcattgttaataaacatgaaatttcaagcttatagttacaggagagacggtgttgatgcggttagaatatggaataggctatggggatttcaaggtcctattttcagct

SEQ ID NO: 392513 - DNA, 120 bp, Artificial Sequence
  ENSG00000145216_29 (sequence is synthesized)
ctgcctttgcttcattccagttttgattaagatatttagttttcttatacctgtcttacccgtttctgtagaaatagagattctgagaaaattcttacctattcaatttgtgaagaaaac

SEQ ID NO: 392514 - DNA, 120 bp, Artificial Sequence
  ENSG00000145216_30 (sequence is synthesized)
tgtgaagaaaacagtataggatataaaataaaagttttcttaaaaatgtctttacagaccaatgaattttttatgtaatatagtgactataagagaagagaaagataatttattttgtct

SEQ ID NO: 392515 - DNA, 120 bp, Artificial Sequence
  ENSG00000145216_31 (sequence is synthesized)
aggattttggatttggactgcagatcacatctcttttacagtttgaatccattcagaattaatggtccagttgtcaagaaaacatttctatttcaatttcagcgatgaagaacgatacag

SEQ ID NO: 392516 - DNA, 120 bp, Artificial Sequence
  ENSG00000145216_32 (sequence is synthesized)
tcgaaatattttttgaaagaggtaattgctatatatctgctttccttctaaaatatttcaaatatatctggtggctactgttttatgtatggagaaggtaaggcattgagattaactttc

SEQ ID NO: 392517 - DNA, 120 bp, Artificial Sequence
  ENSG00000145216_33 (sequence is synthesized)
tcatacttacaaaatgggctgtgtgtggtgctgaaaataagaccggtgtcctgactcccagtttgttttctgtgtattagaccagactgcttacttaaagttttattgcgctaaaaatct

SEQ ID NO: 392518 - DNA, 120 bp, Artificial Sequence
  ENSG00000145216_34 (sequence is synthesized)
gttcataagtttgagctccatttttttctgtccattattacaacatagagaagcacattcatatccccagagaaatttagtgatatgcagcaactttgtttcactcttgacattaagtgt

SEQ ID NO: 392519 - DNA, 120 bp, Artificial Sequence
  ENSG00000145216_35 (sequence is synthesized)
cctagctgctgcgctctttacccttgtttttttctgtcgattctgaggtggtggtttttggtgtctgtttttgccctgtggccttagggtgcccttcctgtcccttctttcagaaacagt

SEQ ID NO: 392520 - DNA, 120 bp, Artificial Sequence
  ENSG00000145216_36 (sequence is synthesized)
cattctgtaataatagctaaataaagttaatgctgtacaactaacgtcttgtttcttgatggtcagtttgtatggaatgcacctgcaagggtacctccttgtctgaaagtcgtgctttaa

SEQ ID NO: 392521 - DNA, 120 bp, Artificial Sequence
  ENSG00000145216_37 (sequence is synthesized)
ggtacgaaacttcctgtctctgtctctcgggttctctcaggcctcccctcttggccctcaaacggccggcgtccctggcctctcgcgccgccgcttcgggcctctggttgggagtcctgt

SEQ ID NO: 392522 - DNA, 120 bp, Artificial Sequence
  ENSG00000145216_38 (sequence is synthesized)
tggttgggagtcctgtccggcctgacttaggccgagcgcggcgtgcgcgtgcccccagtccccgcggcggtctcccgcctggcccacgcccaccatgcgcatccacccctgtggcggccg

SEQ ID NO: 392523 - DNA, 120 bp, Artificial Sequence
  ENSG00000145216_39 (sequence is synthesized)
attaaggtgaagttattcttttttaagagactaccgtttaacctacatcatggaggtatctcatgacccttcggcttatagttttcagtgtcatctcatgtatttgtttttctcaaaata

SEQ ID NO: 392524 - DNA, 120 bp, Artificial Sequence
  ENSG00000145216_40 (sequence is synthesized)
aatttaatgcatcatgtacttctctctagaagggtacttgtttgacatctggtttttaactttaagtcacaatcccttcttgcttgttaacaccagatttgaaagttaatgtttgttcct

SEQ ID NO: 392525 - DNA, 120 bp, Artificial Sequence
  ENSG00000145216_41 (sequence is synthesized)
tgcctaaaacatatattcttgattgtctttagaatagaatagtaaaagtgcactttgggcaccatgcaggtccttgatgatgtgactttgataaacttgtaaaaaaaaatcgtttggtgg

SEQ ID NO: 392526 - DNA, 120 bp, Artificial Sequence
  ENSG00000145216_42 (sequence is synthesized)
caagatttagcattagttactactctttgaaatgtgaatgtgtaggatttcttttacaaagatctggaaatcttcattacctcttaaatttaagcttatttttatagcagtaaagtctga

SEQ ID NO: 392527 - DNA, 120 bp, Artificial Sequence
  ENSG00000145216_43 (sequence is synthesized)
tttttttttccataaaataagtatcttgttaagtaattataaggtgatctaactttggatgtgcttataggcccatgggacgtgcatgtgcacagtgatttggcaaaggacctaggttag

SEQ ID NO: 392528 - DNA, 120 bp, Artificial Sequence
  ENSG00000145216_44 (sequence is synthesized)
tgcttgtgatgatcacttcagattttcataatactagtttctttaagagtggtttctttattttgtttgcttatttatttatttgtttattttacttggtagatgaaaatgaagttgaaa

SEQ ID NO: 392529 - DNA, 120 bp, Artificial Sequence
  ENSG00000145217_0 (sequence is synthesized)
accactgcctgcaggttggcgccaccacccccactctccccgctgctcgcgggagccagagggccctgcggtcctcggtggtcttgccagcccctcgtcatcccagggccctccgcgcct

SEQ ID NO: 392530 - DNA, 120 bp, Artificial Sequence
  ENSG00000145217_1 (sequence is synthesized)
gtgaggactccctcagcgtgcaaacagcaggctcagcccaggctccagggtgtcctgggcacctggtgtcctgggagcaaagtctttgcctaacgtcgctgagaagaatgtttaaagtga

SEQ ID NO: 392531 - DNA, 120 bp, Artificial Sequence
  ENSG00000145217_2 (sequence is synthesized)
aagtacattggagtctgcaaacaggacagacccgaggcctcacgtgggaccagtcaggcctctaagcaccgcctccctaacgccacggtgttttccgagatcaagggaaaggtcggccac

SEQ ID NO: 392532 - DNA, 120 bp, Artificial Sequence
  ENSG00000145217_3 (sequence is synthesized)
gggacctgacgcaacaggatggacgagtcccctgagcctctgcagcagggcagagggccggtgccggtccgacggcagcgcccagcaccccggggtctgcgtgagatgctgaaggccagg

SEQ ID NO: 392533 - DNA, 120 bp, Artificial Sequence
  ENSG00000145217_4 (sequence is synthesized)
ctgtggtgcagctgctcgtgcagtgtgctgtgcgtccgggcgctggtgcaggacctgctccccgccacgcgctggctgcgtcagtaccgcccgcgggagtacctggcaggcgacgtcatg

SEQ ID NO: 392534 - DNA, 120 bp, Artificial Sequence
  ENSG00000145217_5 (sequence is synthesized)
tctgggctggtcatcggcatcatcctggtgccgcaggccatcgcctactcattgctggccgggctgcagcccatctacagcctctatacgtccttcttcgccaacctcatctacttcctc

SEQ ID NO: 392535 - DNA, 120 bp, Artificial Sequence
  ENSG00000145217_6 (sequence is synthesized)
atgggcacctcacggcatgtctccgtgggcatcttcagcctgctttgcctcatggtggggcaggtggtggaccgggagctccagctggccggctttgacccctcccaggacggcctgcag

SEQ ID NO: 392536 - DNA, 120 bp, Artificial Sequence
  ENSG00000145217_7 (sequence is synthesized)
cccggagccaacagcagcaccctcaacggctcggctgccatgctggactgcgggcgtgactgctacgccatccgtgtcgccaccgccctcacgctgatgaccgggctttaccaggtcctc

SEQ ID NO: 392537 - DNA, 120 bp, Artificial Sequence
  ENSG00000145217_8 (sequence is synthesized)
atgggcgtcctccggctgggcttcgtgtccgcctacctctcacagccactgctcgatggctttgccatgggggcctccgtgaccatcctgacctcgcagctcaaacacctgctgggcgtg

SEQ ID NO: 392538 - DNA, 120 bp, Artificial Sequence
  ENSG00000145217_9 (sequence is synthesized)
cggatcccgcggcaccaggggcccggcatggtggtcctcacatggctgagcctgctgcgcggcgccgggcaggccaacgtgtgcgacgtggtcaccagcacggtgtgcctggcggtgctg

SEQ ID NO: 392539 - DNA, 120 bp, Artificial Sequence
  ENSG00000145217_10 (sequence is synthesized)
ctagccgcgaaggagctctcagaccgctaccgacaccgcctgagggtgccgctgcccacggagctgctggtcatcgtggtggccacactcgtgtcgcacttcgggcagctccacaagcgc

SEQ ID NO: 392540 - DNA, 120 bp, Artificial Sequence
  ENSG00000145217_11 (sequence is synthesized)
tttggctcgagcgtggctggcgacatccccacgggtttcatgccccctcaggtcccagagcccaggctgatgcagcgtgtggctttggatgccgtggccctggccctcgtggctgccgcc

SEQ ID NO: 392541 - DNA, 120 bp, Artificial Sequence
  ENSG00000145217_12 (sequence is synthesized)
ttctccatctcgctggcggagatgttcgcccgcagtcacggctactctgtgcgtgccaaccaggagctgctggctgtgggctgctgcaacgtgctacccgccttcctccactgcttcgcc

SEQ ID NO: 392542 - DNA, 120 bp, Artificial Sequence
  ENSG00000145217_13 (sequence is synthesized)
accagcgccgccctggccaagagcctggtgaagacagccactggctgccggacacagctgtccagcgtggtcagcgccaccgtggtgctgctggtgctgctggcgctggcaccgctgttc

SEQ ID NO: 392543 - DNA, 120 bp, Artificial Sequence
  ENSG00000145217_14 (sequence is synthesized)
cacgacctacagcgaagcgtgctggcctgcgtcatcgtggtcagcctgcggggggccctgcgcaaggtgtgggacctcccgcggctgtggcggatgagcccggctgacgcgctggtctgg

SEQ ID NO: 392544 - DNA, 120 bp, Artificial Sequence
  ENSG00000145217_15 (sequence is synthesized)
atcctctcgctgctcagcctggccggccgcacccaacgcccacgcaccgccctgctggcccgcatcggggacacggccttctacgaggatgccacagagttcgagggcctcgtccctgag

SEQ ID NO: 392545 - DNA, 120 bp, Artificial Sequence
  ENSG00000145217_16 (sequence is synthesized)
cccggcgtgcgggtgttccgctttggggggccgctgtactatgccaacaaggacttcttcctgcagtcactctacagcctcacggggctggacgcagggtgcatggctgccaggaggaag

SEQ ID NO: 392546 - DNA, 120 bp, Artificial Sequence
  ENSG00000145217_17 (sequence is synthesized)
gaggggggctcagagacgggggtcggtgagggaggccctgcccagggcgaggacctgggcccggttagcaccagggctgcgctggtgcccgcagcggccggcttccacacagtggtcatc

SEQ ID NO: 392547 - DNA, 120 bp, Artificial Sequence
  ENSG00000145217_18 (sequence is synthesized)
gactgcgccccgctgctgttcctagacgcagccggtgtgagcacgctgcaggacctgcgccgagactacggggccctgggcatcagcctgctgctagcctgctgcagcccgcctgtgaga

SEQ ID NO: 392548 - DNA, 120 bp, Artificial Sequence
  ENSG00000145217_19 (sequence is synthesized)
gacattctgagcagaggaggcttcctcggggagggccccggggacacggctgaggaggagcagctgttcctcagtgtgcacgatgccgtgcagacagcacgagcccgccacagggagctg

SEQ ID NO: 392549 - DNA, 120 bp, Artificial Sequence
  ENSG00000145217_20 (sequence is synthesized)
gaggccaccgatgcccatctgtagcagggccaggcctgcccagcagcctctgctccctcctggggacccacagcagacgtctgcaagccactgctgagacccttcccagggaggagccac

SEQ ID NO: 392550 - DNA, 120 bp, Artificial Sequence
  ENSG00000145217_21 (sequence is synthesized)
ccaagagctgcactcttgtgccacagctgccctggggaaaccggggaaccccaactgggaaaggaggccctctgatcacacgcaggacccaaacactcagaaatcaagaacctctgcctc

SEQ ID NO: 392551 - DNA, 120 bp, Artificial Sequence
  ENSG00000145217_22 (sequence is synthesized)
cgagacaggctggcccacagtgctggctgggccccaatgcaccgtccctcagctcaggagggatgggcctgacctgacgctcagggttgacatcttatttgaacaagggtcccccgccat

SEQ ID NO: 392552 - DNA, 120 bp, Artificial Sequence
  ENSG00000145217_23 (sequence is synthesized)
catgcagcctccaaggtgccaagaggactccctatgcccaggcctgcccggtgcccaccctgctggtaggagccagcggctctggccaagtgcacgagggtctctgtgtttccagaaggc

SEQ ID NO: 392553 - DNA, 120 bp, Artificial Sequence
  ENSG00000145217_24 (sequence is synthesized)
cccacacacccaagtgcccctcacacctcgtgcctccccctcacagggtggccacctgcaccagcgtcagggcccagggtgctgtgaccgatgagacctcagctcagccctcaggtgcag

SEQ ID NO: 392554 - DNA, 120 bp, Artificial Sequence
  ENSG00000145217_25 (sequence is synthesized)
tggccctacccagcctggccagcagacacacacagggatgctcacgggtgcaccaggagccaggtgcggcgcagccaaccctgagcctgcagggagacctgcaggaagcccaccgtgccc

SEQ ID NO: 392555 - DNA, 120 bp, Artificial Sequence
  ENSG00000145217_26 (sequence is synthesized)
catgcaggggctccctccagcacacagccctcaccccagcacagccagcaaggacacgctctccccaacagggtgcttcggcgggaggtgggggaacaaggggtcttccgagcagccccc

SEQ ID NO: 392556 - DNA, 120 bp, Artificial Sequence
  ENSG00000145217_27 (sequence is synthesized)
agccctcccctcccatctgtgcctctgtaaggggctctgggacgcccagaccctgcccgccgcccacctggtggtgacaagctccagcagccagtgggtccggacctgcttgatgccgcg

SEQ ID NO: 392557 - DNA, 120 bp, Artificial Sequence
  ENSG00000145217_28 (sequence is synthesized)
gtgagggacggcgcccacataggcgaggttgagctgctggtcccagctgaggacgtactggtcagcctggctgtgtggcagcggggggctggggacaacaaaggggcggctcagtcccga

SEQ ID NO: 392558 - DNA, 120 bp, Artificial Sequence
  ENSG00000145217_29 (sequence is synthesized)
gcctcagcatggctggcagcgcggctgacacacacgttcaagcccaggactgcccgggcgcaggatccaggcgctgcccgtgcgttcagtgactaataaaatgacccttagggccaggaa

SEQ ID NO: 392559 - DNA, 120 bp, Artificial Sequence
  ENSG00000145217_30 (sequence is synthesized)
actgcgggcgtgactgctacgccatccgtgtcgccaccgccctcacgctgatgaccgggctttaccaggccttctgtcctaggtggagtgggggatggcctccccacccccgaaggtctc

SEQ ID NO: 392560 - DNA, 120 bp, Artificial Sequence
  ENSG00000145217_31 (sequence is synthesized)
cccgttggctccacatctgcatggggggcagtgggcaccatgtgtaggaagcagcaggaaggggttgccttctgataccagaggtcttaattctgaaataaaacgggctgctgcacgtga

SEQ ID NO: 392561 - DNA, 120 bp, Artificial Sequence
  ENSG00000145217_32 (sequence is synthesized)
ctggaagaggaggaaagatcttgctgatttaacaggaaatgccgacatcaacgacatcgagaatgcgggaccctcacaccagcctcacgagaagccggtggatacagcttattccagagg

SEQ ID NO: 392562 - DNA, 120 bp, Artificial Sequence
  ENSG00000145217_33 (sequence is synthesized)
gaggcttggatcagcacctggggaaaaaaggcagcccctcaacctggccagcctgcagaggagagaagcctgagcaagcgtcctccaaatttcacaacaggctttaccatgtggatgatg

SEQ ID NO: 392563 - DNA, 120 bp, Artificial Sequence
  ENSG00000145217_34 (sequence is synthesized)
taaccagtcatcagtacatttctgtaaagcaaagcacacttttaaaaaccagccatgctagtgggcctgaggattacctttcgtcttcctctttcctctgtggaagatgatattgcaaaa

SEQ ID NO: 392564 - DNA, 120 bp, Artificial Sequence
  ENSG00000145220_0 (sequence is synthesized)
agaagcgaattctgcaccgcgaagcctgagaggcaggtagctgcggcgctgggctggcggcggcgagtccacgtgctccccgcggccggttgaaaccgttggcgggcgctggctgagagg

SEQ ID NO: 392565 - DNA, 120 bp, Artificial Sequence
  ENSG00000145220_1 (sequence is synthesized)
caatgtttgctgtcttccattggagtgactgaatttctacatgacggctttttgacaagacttaaaacctgtcttggatagagaatatttagccatttacctaaaaatggtattttttac

SEQ ID NO: 392566 - DNA, 120 bp, Artificial Sequence
  ENSG00000145220_2 (sequence is synthesized)
atgcaatgcatgtggtgaatcagtgaagaaaatacaagtggaaaagcatgtgtctgtttgcagaaactgtgaatgcctttcttgcattgactgcggtaaagatttctggggcgatgacta

SEQ ID NO: 392567 - DNA, 120 bp, Artificial Sequence
  ENSG00000145220_3 (sequence is synthesized)
taaaaaccacgtgaaatgcataagtgaagatcagaagtatggtggcaaaggctatgaaggtaaaacccacaaaggcgacatcaaacagcaggcgtggattcagaaaattagtgaattaat

SEQ ID NO: 392568 - DNA, 120 bp, Artificial Sequence
  ENSG00000145220_4 (sequence is synthesized)
aaagagacccaatgtcagccccaaagtgagagaacttttagagcaaattagtgcttttgacaacgttcccaggaaaaaggcaaaatttcagaattggatgaagaacagtttaaaagttca

SEQ ID NO: 392569 - DNA, 120 bp, Artificial Sequence
  ENSG00000145220_5 (sequence is synthesized)
taatgaatccattctggaccaggtgtggaatatcttttctgaagcttccaacagcgaaccagtcaataaggaacaggatcaacggccactccacccagtggcaaatccacatgcagaaat

SEQ ID NO: 392570 - DNA, 120 bp, Artificial Sequence
  ENSG00000145220_6 (sequence is synthesized)
gaaagaactaaagttagaaaaccaccaggaaaactcaaggaatcagaagcctaagaagcgcaaaaagggacaggaggctgaccttgaggctggtggggaggaagtccctgaggccaatgg

SEQ ID NO: 392571 - DNA, 120 bp, Artificial Sequence
  ENSG00000145220_7 (sequence is synthesized)
ctctgcagggaagaggagcaagaagaagaagcagcgcaaggacagcgccagtgaggaagaggcacgcgtgggcgcagggaagaggaagcggaggcactcggaagttgaaacagattctaa

SEQ ID NO: 392572 - DNA, 120 bp, Artificial Sequence
  ENSG00000145220_8 (sequence is synthesized)
gaagaaaaagatgaagctcccagagcatcctgagggcggagaaccagaagacgatgaggctcctgcaaaaggtaaattcaactggaagggaactattaaagcaattctgaaacaggcccc

SEQ ID NO: 392573 - DNA, 120 bp, Artificial Sequence
  ENSG00000145220_9 (sequence is synthesized)
agacaatgaaataaccatcaaaaagctaaggaaaaaggttttagctcagtactacacagtgacagatgagcatcacagatccgaagaggaactcctggtcatctttaacaagaaaatcag

SEQ ID NO: 392574 - DNA, 120 bp, Artificial Sequence
  ENSG00000145220_10 (sequence is synthesized)
caagaaccctacctttaagttattaaaggacaaagtcaagcttgtgaaatgaacatttgtgtatttaaaaattgaatccattctgctgacttcttcctttcactgctgtttataaaatgt

SEQ ID NO: 392575 - DNA, 120 bp, Artificial Sequence
  ENSG00000145220_11 (sequence is synthesized)
gtaatgaattctaacaactcaaattttgctttttgaagctgtatttttaagttaagaaaatatatttttggtataacttttatgagaaaaataaaatatattctggtccaaacttctaaa

SEQ ID NO: 392576 - DNA, 120 bp, Artificial Sequence
  ENSG00000145220_12 (sequence is synthesized)
actgtgcatggacagccccatgatcttagtggatgcttaggaaatctgtgttgagttcattacatacaactctatctaggagtttgtcatgccaatagcacatgggcacctgctcactct

SEQ ID NO: 392577 - DNA, 120 bp, Artificial Sequence
  ENSG00000145220_13 (sequence is synthesized)
taagagccagtcctttgaagggtagtgagtgcttctaggacattggaattgaacagatgcttggtgctatggagtctggttcattagagggttagctcatttcctgggaagcaaataggt

SEQ ID NO: 392578 - DNA, 120 bp, Artificial Sequence
  ENSG00000145220_14 (sequence is synthesized)
gttgcagaagttgtttctttacccttctcgtagtacaacaaaacgaaatgtcttaaatattattatttatattgtaggtaaattcaactggaagggaactattaaagcaattctgaaaca

SEQ ID NO: 392579 - DNA, 120 bp, Artificial Sequence
  ENSG00000145220_15 (sequence is synthesized)
gaggtgaggggtggtggcccagaggtccgacctgggaggctggggctcagagagtgagtaggggagggacgggatttccaccgtcagcccctctgggttacgcatggaggaaggagttcc

SEQ ID NO: 392580 - DNA, 120 bp, Artificial Sequence
  ENSG00000145220_16 (sequence is synthesized)
attcagatctcactcctgctctggggaagtggcaggagtcctggacttagggtgaccaactcgttttagttttaaaacttaaggtccggcgtcctgggaactccctcgggcctggccaaa

SEQ ID NO: 392581 - DNA, 120 bp, Artificial Sequence
  ENSG00000145220_17 (sequence is synthesized)
ccaggacgattggtcaccgcccgactgggcttcaggcttgctgcatgttggagacagggctcttctctgagccttgggagatcagtccctaaagaggaggccttaggatgtagcggtcca

SEQ ID NO: 392582 - DNA, 120 bp, Artificial Sequence
  ENSG00000145241_0 (sequence is synthesized)
agctctcgcggcagtcgcctgagacttaaggttattgcttggccgcggcctggtattccggcgattcgtttcttgctcggcttcctggagctgtggtccgtgtgggcttccacctcagac

SEQ ID NO: 392583 - DNA, 120 bp, Artificial Sequence
  ENSG00000145241_1 (sequence is synthesized)
agttgcgctggctcagcggggccggaacatggctgcgtccggtctggatcatctcaaaaatggctacagaagaagattttgtcgaccttccagggcacgtgacattaacacagagcaagg

SEQ ID NO: 392584 - DNA, 120 bp, Artificial Sequence
  ENSG00000145241_2 (sequence is synthesized)
ccagaatgttctggaaatcttacaagactgttttgaagaaaaaagtcttgccaatgattttagtacaaattctacaaaatcagtgcctaattcaacacgcaaaataaaagacacttgtat

SEQ ID NO: 392585 - DNA, 120 bp, Artificial Sequence
  ENSG00000145241_3 (sequence is synthesized)
tcagtcaccaagcaaagagtgccagaaatcacatccaaagtcagttccagtttcttcaaagaagaaagaagcctctctacagtttgttgtagaaccaagtgaagccacaaacagatcagt

SEQ ID NO: 392586 - DNA, 120 bp, Artificial Sequence
  ENSG00000145241_4 (sequence is synthesized)
tcaggcccatgaagttcatcagaaaattctggcaactgatgttagttccaaaaatacacctgactcgaaaaaaatatcaagtagaaacataaatgatcatcacagtgaagctgatgaaga

SEQ ID NO: 392587 - DNA, 120 bp, Artificial Sequence
  ENSG00000145241_5 (sequence is synthesized)
attttacttatccgttggctcaccttctgttcttttggatgcaaaaacatctgtatcacaaaatgttattccatctagtgcccaaaagagagagacttacacttttgaaaattcagtaaa

SEQ ID NO: 392588 - DNA, 120 bp, Artificial Sequence
  ENSG00000145241_6 (sequence is synthesized)
tatgctgccttcaagtacagaggtttcagttaaaaccaaaaaaaggttaaactttgatgataaagttatgttaaagaaaatagaaatagataataaagtatcagatgaagaggataaaac

SEQ ID NO: 392589 - DNA, 120 bp, Artificial Sequence
  ENSG00000145241_7 (sequence is synthesized)
atcggaaggacaagaaagaaaaccatcaggatcatctcagaatagaatacgagattcagaatatgaaattcaacgacaagctaaaaaaagtttttcaacattgtttttagaaacagtaaa

SEQ ID NO: 392590 - DNA, 120 bp, Artificial Sequence
  ENSG00000145241_8 (sequence is synthesized)
acgaaaaagtgaatccagtcccattgttaggcatgcggcaactgctccacctcattcgtgtcctcccgatgatacgaagttgatagaggatgaatttataattgatgagtcggatcaaag

SEQ ID NO: 392591 - DNA, 120 bp, Artificial Sequence
  ENSG00000145241_9 (sequence is synthesized)
ttttgccagtagatcttggattacaataccaagaaaggcagggtctctgaaacaacgcacaatatccccggctgagagcactgcactccttcaaggtagaaagtcaagagaaaagcatca

SEQ ID NO: 392592 - DNA, 120 bp, Artificial Sequence
  ENSG00000145241_10 (sequence is synthesized)
taatatattacctaagactttggcaaatgacaaacattcccataaacctcacccagtagagacatctcagccctctgataaaacagtactggatacaagttatgctttgataggtgaaac

SEQ ID NO: 392593 - DNA, 120 bp, Artificial Sequence
  ENSG00000145241_11 (sequence is synthesized)
agtaaataattatagatctacaaaatatgaaatgtattccaagaatgcagaaaaaccatctagaagcaaaaggactataaaacaaaaacagagaagaaaattcatggctaaaccagctga

SEQ ID NO: 392594 - DNA, 120 bp, Artificial Sequence
  ENSG00000145241_12 (sequence is synthesized)
agaacagcttgatgtgggacagtctaaagatgaaaacatacatacatcacatattacccaagacgaatttcaaagaaattcagacagaaatatggaagagcatgaagagatgggaaatga

SEQ ID NO: 392595 - DNA, 120 bp, Artificial Sequence
  ENSG00000145241_13 (sequence is synthesized)
ttgtgtttccaaaaaacagatgccacctgtgggaagcaagaaaagtagcactagaaaagataaggaagaatctaaaaagaagcgcttttccagtgagtccaagaacaaacttgtacctga

SEQ ID NO: 392596 - DNA, 120 bp, Artificial Sequence
  ENSG00000145241_14 (sequence is synthesized)
agaagtgacttcaactgtcacgaaaagtcgaagaatttccaggcgtccatctgattggtgggtggtaaaatcagaggagagtcctgtttatagcaattcttcagtaagaaatgaattacc

SEQ ID NO: 392597 - DNA, 120 bp, Artificial Sequence
  ENSG00000145241_15 (sequence is synthesized)
aatgcatcacaatagtagccgaaaatctactaagaaaacaaatcagtcatctaagaatattaggaaaaaaactattccacttaaaaggcagaagacagcaactaaaggcaaccaaagagt

SEQ ID NO: 392598 - DNA, 120 bp, Artificial Sequence
  ENSG00000145241_16 (sequence is synthesized)
acagaagtttttaaatgctgaaggttctggaggtatcgttggtcatgatgaaatttccagatgttcgctgagtgagccattggaaagtgatgaggcagacttggctaagaagaaaaatct

SEQ ID NO: 392599 - DNA, 120 bp, Artificial Sequence
  ENSG00000145241_17 (sequence is synthesized)
tgattgttctagatctacaagaagctcaaagaatgaagataacattatgactgcacagaatgttcccctaaagcctcagaccagtggatatacatgtaatataccaacagagtcaaactt

SEQ ID NO: 392600 - DNA, 120 bp, Artificial Sequence
  ENSG00000145241_18 (sequence is synthesized)
ggattctggagagcataagacttcagttttagaggaaagtggaccttccaggctcaataataattatttaatgtctggaaagaatgatgtggatgatgaggaagttcatggaagttcaga

SEQ ID NO: 392601 - DNA, 120 bp, Artificial Sequence
  ENSG00000145241_19 (sequence is synthesized)
tgactcaaaacaatctaaagtgataccaaagaacagaatccatcacaaactagtattgccctccaacacaccaaatgttcgcaggaccaagagaacacgtttgaaacctttggagtactg

SEQ ID NO: 392602 - DNA, 120 bp, Artificial Sequence
  ENSG00000145241_20 (sequence is synthesized)
gcgaggagagcgaatagattatcaaggaaggccatcaggaggattcgtgattagtggagtactatctccagacacaatatcgtctaaaaggaaggcaaaagaaaatattggaaaagtcaa

SEQ ID NO: 392603 - DNA, 120 bp, Artificial Sequence
  ENSG00000145241_21 (sequence is synthesized)
caaaaaatctaataagaaaaggatctgtcttgataacgatgaaagaaagactaacttaatggtaaatctaggtatacctcttggagatcctttgcagccaacgagggtaaaggacccaga

SEQ ID NO: 392604 - DNA, 120 bp, Artificial Sequence
  ENSG00000145241_22 (sequence is synthesized)
aacaagagagattattctcatggatcttgtaaggccacaagatacatatcaattttttgttaagcatggtgagttgaaggtatacaagacattggatacaccctttttttctactgggaa

SEQ ID NO: 392605 - DNA, 120 bp, Artificial Sequence
  ENSG00000145241_23 (sequence is synthesized)
attgatattaggaccacaagaagaaaagggaaagcagcatgttggccaggatatattggttttttatgttaactttggtgaccttttgtgtactttacatgaaacaccttatatattaag

SEQ ID NO: 392606 - DNA, 120 bp, Artificial Sequence
  ENSG00000145241_24 (sequence is synthesized)
tactggggattcgttctatgttccttcaggtaactattataacatcaaaaatctccggaatgaggaaagtgttcttctttttactcagataaaaagatgaaagatcaaccaaccttaaat

SEQ ID NO: 392607 - DNA, 120 bp, Artificial Sequence
  ENSG00000145241_25 (sequence is synthesized)
atatgtatatgtgaaaaacagtttgtatagttggaatatttgtctttgtaattacttgtgatgttttaaaataaaaattttattcagttttctgtagacttgtatttgataaacatttct

SEQ ID NO: 392608 - DNA, 120 bp, Artificial Sequence
  ENSG00000145241_26 (sequence is synthesized)
ataaacatttctaactcacatgttttttctgatttttcagtgactgtacataatagcttgtagcgatgtccatatttatgatattatttttataatttgacaagaatatgaaaatgaaat

SEQ ID NO: 392609 - DNA, 120 bp, Artificial Sequence
  ENSG00000145241_27 (sequence is synthesized)
atagaacatttctgtgtcaaaagagacctgattaatatgtctactcattaaaaaacatcttttccaaatactaattttaaatcatttattattaaataatccaatgggagagaactgtgg

SEQ ID NO: 392610 - DNA, 120 bp, Artificial Sequence
  ENSG00000145241_28 (sequence is synthesized)
gaagtctgaaatcaaggtgttgtcaaggccgtgatgtctttgaaaacctgtaagggagagaatccttccttattcctaacttctggtggtttactggcaatttctggcattccttggctt

SEQ ID NO: 392611 - DNA, 120 bp, Artificial Sequence
  ENSG00000145241_29 (sequence is synthesized)
gcaccggtagcatttcaatctacttgcattatcacatggtattctcaccttgtgtgtctgtgttggcatgacatctatttagtatattacatgtaaatgtttttccattatgctttttgg

SEQ ID NO: 392612 - DNA, 120 bp, Artificial Sequence
  ENSG00000145241_30 (sequence is synthesized)
ttcatattttctgttggaggcagtgtccttcgccattgctttctgtatgtggcctcaactttccctttttaatatcaatcaatacatctaagctaaaaattctaatcaaggtttttggta

SEQ ID NO: 392613 - DNA, 120 bp, Artificial Sequence
  ENSG00000145241_31 (sequence is synthesized)
tggttagcatataattctcattaactctgaagaaattgatgttttacggtaaaaatatttttaggccaactcccttttcaggtcttatttaaccattaaatacacacatttaaagcaact

SEQ ID NO: 392614 - DNA, 120 bp, Artificial Sequence
  ENSG00000145241_32 (sequence is synthesized)
ctggtgtaggacttaggaagaatgaagtgtgatggctctttttttatactttataattttctattgtgatttctcttttattgagtcatttttaattttttttttacttttatttctttg

SEQ ID NO: 392615 - DNA, 120 bp, Artificial Sequence
  ENSG00000145241_33 (sequence is synthesized)
aatatatttgttatgaagtcttattgaaggcttgactaatcaagtatctgggcccatacagatttagttttcactgaatgctttttttcctttagtatatttcactttcatatgttttta

SEQ ID NO: 392616 - DNA, 120 bp, Artificial Sequence
  ENSG00000145241_34 (sequence is synthesized)
catgtctaataatttttggttgacagctggacattttaggtagcatattgtagcaactcaattttgttttatatctaagggatttgtattgttttaaatttagcattttgactggactca

SEQ ID NO: 392617 - DNA, 120 bp, Artificial Sequence
  ENSG00000145241_35 (sequence is synthesized)
aattgtggaatctatcttatatatgatgtgaagttattgctgtctgtgctcagtttttaagttctttatttcaatatttattcttgcttgctaggggtagttcctgtgtctgcatagctt

SEQ ID NO: 392618 - DNA, 120 bp, Artificial Sequence
  ENSG00000145241_36 (sequence is synthesized)
agcagtcagccaatcatttggacaaaggttaagatcaaacacttgagtctataagccttccacccactgttggttgttctgtgtgggatgggggatgcattcattgtaggaggcagttcc

SEQ ID NO: 392619 - DNA, 120 bp, Artificial Sequence
  ENSG00000145241_37 (sequence is synthesized)
caaattccccttggtttttacatttgccatgctctcttgagtctcccctgtgcatgcatcatttcagtttgccaaagatgtttggagagctcatgttacccttttctgcccttctgtttc

SEQ ID NO: 392620 - DNA, 120 bp, Artificial Sequence
  ENSG00000145241_38 (sequence is synthesized)
caggaccttgttaaatgtctggctgctctgttgctcttcaagaactaggactgtaacctttggttagcaactacagatactccttgtccattcctaagtgatttttttacttttgactta

SEQ ID NO: 392621 - DNA, 120 bp, Artificial Sequence
  ENSG00000145241_39 (sequence is synthesized)
caaagttgtaggtttatacctctgctgtaaatcaagactcctcttacggcaaagttgctagtttttcagttagctacagccagacaaaactgtagtttttaccaatcaacctaggggtgg

SEQ ID NO: 392622 - DNA, 120 bp, Artificial Sequence
  ENSG00000145241_40 (sequence is synthesized)
actgtagtttttaccaatcaacctaggggtgggtgagacctcactcaaggaggccacagattccaacagttcttttccaaagctttagcaatattttttctttattttcttttttctttt

SEQ ID NO: 392623 - DNA, 120 bp, Artificial Sequence
  ENSG00000145241_41 (sequence is synthesized)
tgcttgccaccacgcctggctagtttttgtgtttttagtagagacagattttcaccatgttggccagggctgtctcgaattcctgacctcagggtgatccacccacctcagcctcccaaa

SEQ ID NO: 392624 - DNA, 120 bp, Artificial Sequence
  ENSG00000145241_42 (sequence is synthesized)
caggtgtgagccactgtgcccagcttaagtgtagcctttctttgtctaaactgaaagcccatatggttcagcaaaggctctccattctgcttggtcagagccacgtctgatttttgccac

SEQ ID NO: 392625 - DNA, 120 bp, Artificial Sequence
  ENSG00000145241_43 (sequence is synthesized)
tttgccacctctgtactctgttcagctcataggcttctgtcatgtctcagaattttgctctgcacatttgcagcctactgttcagccaactgttcagccaacttctagggctataatggc

SEQ ID NO: 392626 - DNA, 120 bp, Artificial Sequence
  ENSG00000145241_44 (sequence is synthesized)
tgatacagtagtcacaagttgtagctatttaaaattaatttaaaatattgtttcttacttgcatttgccacatttcaagtgcttagtagcacatggtactggtggctaccacattagatg

SEQ ID NO: 392627 - DNA, 120 bp, Artificial Sequence
  ENSG00000145241_45 (sequence is synthesized)
tcacagatacaagttgcagaaagttctgttcttgggcacctcgtgcagatttctggagctctttttcagtggagtttccacttctgtaccctgcatcacaattcagttttctcaacagcc

SEQ ID NO: 392628 - DNA, 120 bp, Artificial Sequence
  ENSG00000145241_46 (sequence is synthesized)
ctaaattgtgatctttctgtgcccattaagaccactgttctttttgagcttaactctctgtgtccagttttggagagtgcccccaggcataaaactgggtgactatggagttaatttcat

SEQ ID NO: 392629 - DNA, 120 bp, Artificial Sequence
  ENSG00000145241_47 (sequence is synthesized)
agttaatttcatgtctttaaagaatcacagtcctgcctactttgtcaggcagccctcatgctcatgaagggtcttaaagaaagagacttctacccgggcatggtggctcatgcctgtaat

SEQ ID NO: 392630 - DNA, 120 bp, Artificial Sequence
  ENSG00000145241_48 (sequence is synthesized)
ggagaattgcttgaacctgggagatgatggttgcagtgagccaagatcacgcaactgcactccaggctgggcagccgagcaagactctgactcaaaaaaagaaaacaaaagaatcaccgt

SEQ ID NO: 392631 - DNA, 120 bp, Artificial Sequence
  ENSG00000145241_49 (sequence is synthesized)
aaaagaaaacaaaagaatcaccgtccttcacttttgtccaatgtctgcatagagttaccttttatctttttctattttaaagtttgttggaggagggcaaatttgatacccattaatcca

SEQ ID NO: 392632 - DNA, 120 bp, Artificial Sequence
  ENSG00000145241_50 (sequence is synthesized)
tcgtgggcatcacccatgagagtttttttaatgatttttctaatttttattgttggataggattccacagtttgttgtccatttacttaccacatggatgcatgtgtctttaatttcttc

SEQ ID NO: 392633 - DNA, 120 bp, Artificial Sequence
  ENSG00000145241_51 (sequence is synthesized)
caatggttacttacatctatgtaactacaatgcagaaaacaggaatttggcaaggatacaatgcatgtgtatagttctatttcatcatatgtgtgaatttgtgtaactactgcaatcaac

SEQ ID NO: 392634 - DNA, 120 bp, Artificial Sequence
  ENSG00000145241_52 (sequence is synthesized)
atagaactgtttcatcatcactaatttgttcttcatctctgtaatattgtcacttatatattgttgtagcaatggaataatatagtgtatgacctttggtttttctcactcagcataaag

SEQ ID NO: 392635 - DNA, 120 bp, Artificial Sequence
  ENSG00000145241_53 (sequence is synthesized)
cccttaagatcatccaagcagttatacctatcaatagctcatttcttttttattgctaagtggtattctctagtatggatgactgtaccacaaataaagatgaagtgaacacttcctaca

SEQ ID NO: 392636 - DNA, 120 bp, Artificial Sequence
  ENSG00000145241_54 (sequence is synthesized)
aggagtgctatgttttgtttacattgtcactgatggcgagtgtatattgagtacctacctcttaagacccttagttagagattaataagaccctgtacctaagtgagacagaaagaaaat

SEQ ID NO: 392637 - DNA, 120 bp, Artificial Sequence
  ENSG00000145241_55 (sequence is synthesized)
aataagaaaaggatctgtcttgataacgatgaaagaagtatgaacttatttctgaaagtaacttttagattttattttaaataggagtactttgagaagaagctctttgcaaaatatgaa

SEQ ID NO: 392638 - DNA, 120 bp, Artificial Sequence
  ENSG00000145241_56 (sequence is synthesized)
caaaatgaagtgtgatatgactgatggatgtcagaacagtttggtacatattttcctttcatttgatcattaggtaagtgtattagcattttgtggtggtttttttttgtttttgagaca

SEQ ID NO: 392639 - DNA, 120 bp, Artificial Sequence
  ENSG00000145241_57 (sequence is synthesized)
ggtaaaacttatttatgttataatatctgtcaataaaaaatttgtttactatgtgccagacactgcactacatgtttatatacattaccttacttaatcatcacccccccaaattttgat

SEQ ID NO: 392640 - DNA, 120 bp, Artificial Sequence
  ENSG00000145241_58 (sequence is synthesized)
aataggatttaaattcatttttgtctgattaatgtagagatgctgatattttctctttggtagctgaatgttgttattcctgtatcatctgacaagatttccaattgcataatataaagc

SEQ ID NO: 392641 - DNA, 120 bp, Artificial Sequence
  ENSG00000145241_59 (sequence is synthesized)
gttagattagaacgtgagaaaattgtaactggtaaaggtaaagtagttttcattatttttcctattaaccattttccattttctcatagttttctacaaagtagtgtagggtgggcaaga

SEQ ID NO: 392642 - DNA, 120 bp, Artificial Sequence
  ENSG00000145241_60 (sequence is synthesized)
aagtgtagtgttaatcgtagagttattttctttcttatttttgtagagatgaggccttgctatgttgtccaggctggtctcatcttatgggctcaagcagtcctcccgctttggcatctc

SEQ ID NO: 392643 - DNA, 120 bp, Artificial Sequence
  ENSG00000145241_61 (sequence is synthesized)
agtactatgtggcagatgaatacataaacagatgggtaaataaattcttacagaacttggataaatgtgctagatctctgaaactatcaaaaaacacttatttaagagtcctgaaataga

SEQ ID NO: 392644 - DNA, 120 bp, Artificial Sequence
  ENSG00000145241_62 (sequence is synthesized)
tgttggatttttgatcaagctgggagtcgaaaaagtggaggaatctttatatatcatatagtctaaactctcatctgatggaagaagaaactgaagtctgaagttaagaagaacaacttg

SEQ ID NO: 392645 - DNA, 120 bp, Artificial Sequence
  ENSG00000145241_63 (sequence is synthesized)
acctgcccccagcctgcctgtcgtacgtgtgacactgttgcccttccatatatatgaagaaatgtatatggagtacttgccatggggcaggaatgaggtcctgtttatagcaattcttca

SEQ ID NO: 392646 - DNA, 120 bp, Artificial Sequence
  ENSG00000145241_64 (sequence is synthesized)
agaggagagtaagtatttttatttaaattgtgtttgttcatagacaaaatcattctgtaaggggcattatgtttgattttatatttctatatagagaatatcatgaggaccaagttaaat

SEQ ID NO: 392647 - DNA, 120 bp, Artificial Sequence
  ENSG00000145241_65 (sequence is synthesized)
tgggtcatcaaaaggaatattaaatcaatggtaaagatattccttgaagcgttaatatatacagtattttaggaatagggataatagctgtgggaaaacaaaaccccaaaccagaaatcc

SEQ ID NO: 392648 - DNA, 120 bp, Artificial Sequence
  ENSG00000145241_66 (sequence is synthesized)
ctgctttcatggagcttgcattctagttgggaaaggcaatataaataatccagctattttaatgtcctggctgtgagggatacaaagattgataatatgaggttctgccaccaaggagtt

SEQ ID NO: 392649 - DNA, 120 bp, Artificial Sequence
  ENSG00000145242_0 (sequence is synthesized)
tccctcccctcttcagcactcagcccgcagctatttccttctgccagtctctttgaactctggatctttgcttttgctcgctgctctcctgtttttcattctccacattttctcaagtcc

SEQ ID NO: 392650 - DNA, 120 bp, Artificial Sequence
  ENSG00000145242_1 (sequence is synthesized)
tctttctttatccttagccaccctgcttttttcctccttttttaaaaaatcggagatttcgtcttaaaatgatttgccttccttaccttcgtccatttcaacactgaaggctgcaaagaa

SEQ ID NO: 392651 - DNA, 120 bp, Artificial Sequence
  ENSG00000145242_2 (sequence is synthesized)
ccttcacctttcccctagtggtatttaaaaattctcaatccgtaaaaagtctttttgaaaggcaaaggaacaggacccaggaccctctcgacacccttgatccgagtccagatctgcact

SEQ ID NO: 392652 - DNA, 120 bp, Artificial Sequence
  ENSG00000145242_3 (sequence is synthesized)
agcaaccagaactaatatttcatttaaccccaccaaagggggaggcgagaggagccagaagcaaacttcagctgtctcagccggatccgtggttcctacatttggaggagccgcgtgcca

SEQ ID NO: 392653 - DNA, 120 bp, Artificial Sequence
  ENSG00000145242_4 (sequence is synthesized)
gaaggcgtaggaccccaaggggggacaaggaggactcccgagtctcccttcgccgctctgcgaggccgaagcggtggactgagccgctcgggacagcggcaccggaggaggctcggagaa

SEQ ID NO: 392654 - DNA, 120 bp, Artificial Sequence
  ENSG00000145242_5 (sequence is synthesized)
gaggaggctcggagaagatgcggggctcggggccccggggtgcgggacgccggcggcccccaagcggcggcggcgacacccccatcaccccagcgtccctggccggctgctactctgcac

SEQ ID NO: 392655 - DNA, 120 bp, Artificial Sequence
  ENSG00000145242_6 (sequence is synthesized)
ctggacgtgccttctcctgtgcgccgcactccggaccctcctggccagccccagcaacgaagtgaatttattggattcacgcactgtcatgggggacctgggatggattgcttttccaaa

SEQ ID NO: 392656 - DNA, 120 bp, Artificial Sequence
  ENSG00000145242_7 (sequence is synthesized)
aaatgggtgggaagagattggtgaagtggatgaaaattatgcccctatccacacataccaagtatgcaaagtgatggaacagaatcagaataactggcttttgaccagttggatctccaa

SEQ ID NO: 392657 - DNA, 120 bp, Artificial Sequence
  ENSG00000145242_8 (sequence is synthesized)
tgaaggtgcttccagaatcttcatagaactcaaatttaccctgcgggactgcaacagccttcctggaggactggggacctgtaaggaaacctttaatatgtattactttgagtcagatga

SEQ ID NO: 392658 - DNA, 120 bp, Artificial Sequence
  ENSG00000145242_9 (sequence is synthesized)
tcagaatgggagaaacatcaaggaaaaccaatacatcaaaattgataccattgctgccgatgaaagctttacagaacttgatcttggtgaccgtgttatgaaactgaatacagaggtcag

SEQ ID NO: 392659 - DNA, 120 bp, Artificial Sequence
  ENSG00000145242_10 (sequence is synthesized)
agatgtaggacctctaagcaaaaagggattttatcttgcttttcaagatgttggtgcttgcattgctctggtttctgtgcgtgtatactataaaaaatgcccttctgtggtacgacactt

SEQ ID NO: 392660 - DNA, 120 bp, Artificial Sequence
  ENSG00000145242_11 (sequence is synthesized)
ggctgtcttccctgacaccatcactggagctgattcttcccaattgctcgaagtgtcaggctcctgtgtcaaccattctgtgaccgatgaacctcccaaaatgcactgcagcgccgaagg

SEQ ID NO: 392661 - DNA, 120 bp, Artificial Sequence
  ENSG00000145242_12 (sequence is synthesized)
ggagtggctggtgcccatcgggaaatgcatgtgcaaggcaggatatgaagagaaaaatggcacctgtcaagtgtgcagacctgggttcttcaaagcctcacctcacatccagagctgcgg

SEQ ID NO: 392662 - DNA, 120 bp, Artificial Sequence
  ENSG00000145242_13 (sequence is synthesized)
caaatgtccacctcacagttatacccatgaggaagcttcaacctcttgtgtctgtgaaaaggattatttcaggagagagtctgatccacccacaatggcatgcacaagacccccctctgc

SEQ ID NO: 392663 - DNA, 120 bp, Artificial Sequence
  ENSG00000145242_14 (sequence is synthesized)
tcctcggaatgccatctcaaatgttaatgaaactagtgtctttctggaatggattccgcctgctgacactggtggaaggaaagacgtgtcatattatattgcatgcaagaagtgcaactc

SEQ ID NO: 392664 - DNA, 120 bp, Artificial Sequence
  ENSG00000145242_15 (sequence is synthesized)
ccatgcaggtgtgtgtgaggagtgtggcggtcatgtcaggtaccttccccggcaaagcggcctgaaaaacacctctgtcatgatggtggatctactcgctcacacaaactatacctttga

SEQ ID NO: 392665 - DNA, 120 bp, Artificial Sequence
  ENSG00000145242_16 (sequence is synthesized)
gattgaggcagtgaatggagtgtccgacttgagcccaggagcccggcagtatgtgtctgtaaatgtaaccacaaatcaagcagctccatctccagtcaccaatgtgaaaaaagggaaaat

SEQ ID NO: 392666 - DNA, 120 bp, Artificial Sequence
  ENSG00000145242_17 (sequence is synthesized)
tgcaaaaaacagcatctctttgtcttggcaagaaccagatcgtcccaatggaatcatcctagagtatgaaatcaagtattttgaaaaggaccaagagaccagctacacgattatcaaatc

SEQ ID NO: 392667 - DNA, 120 bp, Artificial Sequence
  ENSG00000145242_18 (sequence is synthesized)
taaagagacaactattactgcagagggcttgaaaccagcttcagtttatgtcttccaaattcgagcacgtacagcagcaggctatggtgtcttcagtcgaagatttgagtttgaaaccac

SEQ ID NO: 392668 - DNA, 120 bp, Artificial Sequence
  ENSG00000145242_19 (sequence is synthesized)
cccagtgtttgcagcatccagcgatcaaagccagattcctgtaattgctgtgtctgtgacagtgggagtcattttgttggcagtggttatcggcgtcctcctcagtggaagttgctgcga

SEQ ID NO: 392669 - DNA, 120 bp, Artificial Sequence
  ENSG00000145242_20 (sequence is synthesized)
atgtggctgtgggagggcttcttccctgtgcgctgttgcccatccaagcctaatatggcggtgtggctacagcaaagcaaaacaagatccagaagaggaaaagatgcattttcataatgg

SEQ ID NO: 392670 - DNA, 120 bp, Artificial Sequence
  ENSG00000145242_21 (sequence is synthesized)
gcacattaaactgccaggagtaagaacttacattgatccacatacctatgaggatcccaatcaagctgtccacgaatttgctaaggagatagaagcatcatgtatcaccattgagagagt

SEQ ID NO: 392671 - DNA, 120 bp, Artificial Sequence
  ENSG00000145242_22 (sequence is synthesized)
tattggagcaggtgaatttggtgaagtttgtagtggacgtttgaaactaccaggaaaaagagaattacctgtggctatcaaaacccttaaagtaggctatactgaaaagcaacgcagaga

SEQ ID NO: 392672 - DNA, 120 bp, Artificial Sequence
  ENSG00000145242_23 (sequence is synthesized)
tttcctaggtgaagcaagtatcatgggacagtttgatcatcctaacatcatccatttagaaggtgtggtgaccaaaagtaaaccagtgatgatcgtgacagagtatatggagaatggctc

SEQ ID NO: 392673 - DNA, 120 bp, Artificial Sequence
  ENSG00000145242_24 (sequence is synthesized)
tttagatacatttttgaagaaaaacgatgggcagttcactgtgattcagcttgttggcatgctgagaggtatctctgcaggaatgaagtacctttctgacatgggctatgtgcatagaga

SEQ ID NO: 392674 - DNA, 120 bp, Artificial Sequence
  ENSG00000145242_25 (sequence is synthesized)
tcttgctgccagaaacatcttaatcaacagtaaccttgtgtgcaaagtgtctgactttggactttcccgggtactggaagatgatcccgaggcagcctacaccacaaggggaggaaaaat

SEQ ID NO: 392675 - DNA, 120 bp, Artificial Sequence
  ENSG00000145242_26 (sequence is synthesized)
tccaatcagatggactgccccagaagcaatagctttccgaaagtttacttctgccagtgatgtctggagttatggaatagtaatgtgggaagttgtgtcttatggagagagaccctactg

SEQ ID NO: 392676 - DNA, 120 bp, Artificial Sequence
  ENSG00000145242_27 (sequence is synthesized)
ggagatgaccaatcaagatgtgattaaagcggtagaggaaggctatcgtctgccaagccccatggattgtcctgctgctctctatcagttaatgctggattgctggcagaaagagcgaaa

SEQ ID NO: 392677 - DNA, 120 bp, Artificial Sequence
  ENSG00000145242_28 (sequence is synthesized)
tagcaggcccaagtttgatgaaatagtcaacatgttggacaagctgatacgtaacccaagtagtctgaagacgctggttaatgcatcctgcagagtatctaatttattggcagaacatag

SEQ ID NO: 392678 - DNA, 120 bp, Artificial Sequence
  ENSG00000145242_29 (sequence is synthesized)
cccactaggatctggggcctacagatcagtaggtgaatggctagaggcaatcaagatgggccggtatacagagattttcatggaaaatggatacagttcaatggacgctgtggctcaggt

SEQ ID NO: 392679 - DNA, 120 bp, Artificial Sequence
  ENSG00000145242_30 (sequence is synthesized)
gaccttggaggatttgagacggcttggagtgactcttgtcggtcaccagaagaagatcatgaacagccttcaagaaatgaaggtgcagctggtaaacggaatggtgccattgtaacttca

SEQ ID NO: 392680 - DNA, 120 bp, Artificial Sequence
  ENSG00000145242_31 (sequence is synthesized)
tgtaaatgtcgcttcttcaagtgaatgattctgcactttgtaaacagcactgagatttattttaacaaaaaaagggggaaaagggaaaacagtgatttctaaaccttagaaaacatttgc

SEQ ID NO: 392681 - DNA, 120 bp, Artificial Sequence
  ENSG00000145242_32 (sequence is synthesized)
ctcagccacagaatttgtaatcatggttttactgaagtatccagttcttagtccttagtcttcatttttcatgaagcaaacatatcttgcattaaaagggacatgaagttagacatcatc

SEQ ID NO: 392682 - DNA, 120 bp, Artificial Sequence
  ENSG00000145242_33 (sequence is synthesized)
ttaagttacaacaacagaatccttcccactacttctacaaaattttgtacatgaaatatataattatatagcacttttatagactgaattaaggcaacccctttcaaaacttccagggat

SEQ ID NO: 392683 - DNA, 120 bp, Artificial Sequence
  ENSG00000145242_34 (sequence is synthesized)
atatgattagattatttcttaatagatatcttcttttgtaattttaaaatgctgttacacagcgttaagttatagaaactagtgtgtaaacatgttgcttgatcaagaaaaagtacaata

SEQ ID NO: 392684 - DNA, 120 bp, Artificial Sequence
  ENSG00000145242_35 (sequence is synthesized)
cagggtgtatatttattttttgtgttataaagtttacttttagttgctcttctagagattattaggtaataaatgtgtatatactgtataatttgcaatatacccaggaactgatttaag

SEQ ID NO: 392685 - DNA, 120 bp, Artificial Sequence
  ENSG00000145242_36 (sequence is synthesized)
atggaattgtgtgtgtgtttgcttgcacatgtgtgtgttaccattctgcttgcatttctaatagtgtttcaattttagcaacatataggagcaagtgttccagaatgtaatatgaatagg

SEQ ID NO: 392686 - DNA, 120 bp, Artificial Sequence
  ENSG00000145242_37 (sequence is synthesized)
agaaatagggaagcagtaaaacaaaatttaacacaagcttgtgtctcttttcctctcatgtgtccaaaagctaatctctttattcactaaaaggaaatgtgtataagactaaatcccctt

SEQ ID NO: 392687 - DNA, 120 bp, Artificial Sequence
  ENSG00000145242_38 (sequence is synthesized)
tggctttttaaaaacattttgtgatatcagtgacaatgcagttcttctagccattaatcttgtacccctgtaagaaatttcacctttctgagtcctgaaaagtatcttgtcaagcaaagt

SEQ ID NO: 392688 - DNA, 120 bp, Artificial Sequence
  ENSG00000145242_39 (sequence is synthesized)
tgacaccgaagggcacattttcagcaggatgtagaaggatttaactgtgcaggcttctgttaatgttgttaaatccaggcacatagcacgaagcatcacccttaagtgttaatccgttgt

SEQ ID NO: 392689 - DNA, 120 bp, Artificial Sequence
  ENSG00000145242_40 (sequence is synthesized)
aaccattcccattttgactcagttctagaaattttgactctaaggcagcaatggaattatgacaaatatatatatatacacatacacacacacaaatatatatatatgcttatttccctt

SEQ ID NO: 392690 - DNA, 120 bp, Artificial Sequence
  ENSG00000145242_41 (sequence is synthesized)
cagaattttatttcaataattgataagttttatttttaatggatgtttattcatttgttaatttcagtttgtattcagttacatggctttgagtttattttattgaaccaatccaaggta

SEQ ID NO: 392691 - DNA, 120 bp, Artificial Sequence
  ENSG00000145242_42 (sequence is synthesized)
ttatgtaattaggcttattaaggaatataacatatcttctatgtatgctctatataccacacatgatgaagacttatatttgtgatacaaattatgcagtgtattagaaattgtccaaaa

SEQ ID NO: 392692 - DNA, 120 bp, Artificial Sequence
  ENSG00000145242_43 (sequence is synthesized)
ctgagctcctgagataaccaacatttttgtattattacactttataaaaattatggaatgtcatgtgattagtcaaaatcagagcatttaaataaaatacagcctactcatgattatcaa

SEQ ID NO: 392693 - DNA, 120 bp, Artificial Sequence
  ENSG00000145242_44 (sequence is synthesized)
tgttaatagtacagtagatcagagaagcctggattaatgaaatttatcagaaatatagccacgttatattaatggtattcttttttccaagcacttgttttatttgaatattagcacata

SEQ ID NO: 392694 - DNA, 120 bp, Artificial Sequence
  ENSG00000145242_45 (sequence is synthesized)
taagaataaacttttgggaaataactacttcctattctgcccaccctttacttaagcagtaaagtacctcttttctaaagaaccaggaaacatcaaaataaccacaacaaaaatctaaac

SEQ ID NO: 392695 - DNA, 120 bp, Artificial Sequence
  ENSG00000145242_46 (sequence is synthesized)
agttttcaaataatacattcagttctcataataataagggctatataccatgggtccacacaaactgtgctgcaaacatataatctattagtttagtaaaatttccagagatgtgaattt

SEQ ID NO: 392696 - DNA, 120 bp, Artificial Sequence
  ENSG00000145242_47 (sequence is synthesized)
aatattttcttgataaaatcataaaaaagcatcaccattattaaagatgcatttgttcatttcaataaacagaaattaatgaaacaaattacttttgtacaaaataaatgatgattatgt

SEQ ID NO: 392697 - DNA, 120 bp, Artificial Sequence
  ENSG00000145242_48 (sequence is synthesized)
ggcactttattgaattttatagaaatattccaatctaagtgataaagtaacaactgagaaacttcagaatgaaagccttattgattcaaaaggaaaattaccatatgctttagggctgat

SEQ ID NO: 392698 - DNA, 120 bp, Artificial Sequence
  ENSG00000145242_49 (sequence is synthesized)
gaacttgccacaattgcttagacataacaaagatattttctacattgttttccaactttatatgctgaaagataattaggaggtccgggtggagtgtatctaaatgactagaactttaag

SEQ ID NO: 392699 - DNA, 120 bp, Artificial Sequence
  ENSG00000145242_50 (sequence is synthesized)
ttgcaatatagattttctctttttaacaaaggaagaatataaattaatttggatcaaatttatttgccttctttgcaatcttggtgatcattttggaaagtaaattgaaaggaaagttaa

SEQ ID NO: 392700 - DNA, 120 bp, Artificial Sequence
  ENSG00000145242_51 (sequence is synthesized)
atagccacatagttttcttttgcatctcaatttggttgagaatttctaaggaaggttaatatgactttagaatgaataaagagactgtcaaacaacaagtactctccctaaaaaagagga

SEQ ID NO: 392701 - DNA, 120 bp, Artificial Sequence
  ENSG00000145242_52 (sequence is synthesized)
aagaatgccttcctaaaatatttgtttcctattgtatatgtcaccaattggaaaatgccaatctcatctgcaagtgtgagaaatggaacaaggagaggagccaactctagtaaaatgtag

SEQ ID NO: 392702 - DNA, 120 bp, Artificial Sequence
  ENSG00000145242_53 (sequence is synthesized)
tgaggccataatccaaggcaaagtttaacaaatcttgattgtgtaatttcttattctgttgattcattttgtcacccaccagactaccaaaaataaagcacagacatgacaattttagta

SEQ ID NO: 392703 - DNA, 120 bp, Artificial Sequence
  ENSG00000145242_54 (sequence is synthesized)
tatacaacagatttggcaaataatacataatcttattgtaattgccagtagcaatatcttaaggggcatgagtctttcacagtattggactttgaaaaattggtacagggagtaattttc

SEQ ID NO: 392704 - DNA, 120 bp, Artificial Sequence
  ENSG00000145242_55 (sequence is synthesized)
aacagactgatacttgaagtcactcaattactactttgacctatcataatttgtttctaatcttgtcatttgctcatatatactattaatataaccagttgctcttttcataatgtacta

SEQ ID NO: 392705 - DNA, 120 bp, Artificial Sequence
  ENSG00000145242_56 (sequence is synthesized)
tttctatgtaaagatgtaaagattttgattttcctatgttttaaaattgtaatgtgcatgatcttttatttcttgtgtttcaattaccaagtcagtattctaaggttgtaagattactgt

SEQ ID NO: 392706 - DNA, 120 bp, Artificial Sequence
  ENSG00000145242_57 (sequence is synthesized)
aaaaattatattccaatattttatctaaacttaagtgtggccagcattattggtttcagagttgcctaaacaacacagaatatccttaattcagtttgtaaaagagttttgaccagtgta

SEQ ID NO: 392707 - DNA, 120 bp, Artificial Sequence
  ENSG00000145242_58 (sequence is synthesized)
aaaaagtgaagacacagtttcatgtttcaagtttaaaatggaaagttaatatcatttgagcacttatgtgttttcatgtcttctacttaatctgtatgtgaaagtaaaatatttttaaca

SEQ ID NO: 392708 - DNA, 120 bp, Artificial Sequence
  ENSG00000145242_59 (sequence is synthesized)
ccattatttatgccatgtaaagtgggttctcagaagcacaagcacagatatttaccttctgaagacatttttggctataaaagtgcattggatggcaaacactatttgagtcaggtgtta

SEQ ID NO: 392709 - DNA, 120 bp, Artificial Sequence
  ENSG00000145242_60 (sequence is synthesized)
gaaatttattagatgtattatattacatagtagaataaggtccctttctcattttgtttttcctaaaaataagaaaaaaaagaagtgtgatagtaaactgtctttgctaatgtcctgcca

SEQ ID NO: 392710 - DNA, 120 bp, Artificial Sequence
  ENSG00000145242_61 (sequence is synthesized)
gatgtttaacttcaaattaagcaaaaagtaggtacaatatgatgatgatcctgatgatgatgatgatgatgatgatgaagaataaatggaatcaaaatgctagctttatttgacattaat

SEQ ID NO: 392711 - DNA, 120 bp, Artificial Sequence
  ENSG00000145242_62 (sequence is synthesized)
aagtaaaataagtcatcattttttcaactctgtagcacagctgtttacattgaataattttctctattgtgctgttaattatatagtaatgtatcaaaatagaaataggaactttctttt

SEQ ID NO: 392712 - DNA, 120 bp, Artificial Sequence
  ENSG00000145242_63 (sequence is synthesized)
catttcttattcatttatgaagaaatcttttcacacataaatgattgaatgttcttgttcagaatgaccacataatcattgcttagaagaagataccaattcttttaaaagaaaaaaagt

SEQ ID NO: 392713 - DNA, 120 bp, Artificial Sequence
  ENSG00000145242_64 (sequence is synthesized)
ctgtttataataatcagaatcaaatgttgtttgtttcttctaaacgttaatggagaaaattgaaggtggtaaaatgtcatgtttattcaggctgggaactgtattcacagtagaagtttc

SEQ ID NO: 392714 - DNA, 120 bp, Artificial Sequence
  ENSG00000145242_65 (sequence is synthesized)
agtggtcaacatatctatgactctttaggctgctgtagttttacagtcaattatttaaaagtgagtagttacatttataagagcctgagaatacttagactcagtcatttgttagtattt

SEQ ID NO: 392715 - DNA, 120 bp, Artificial Sequence
  ENSG00000145242_66 (sequence is synthesized)
ttaccaaaatctcttagtttcagacatgtcagaagcagctatatagcatatcttattctatgatatacatcaggctatctcaagttcctgtctcacagttaattcaaagaaggattagga

SEQ ID NO: 392716 - DNA, 120 bp, Artificial Sequence
  ENSG00000145242_67 (sequence is synthesized)
tttctgtattttttctcatttgaatctttatgtgcatttggtttgtgtacatgctttttgtagtgtaagatatgaaattttatattttttcagaaaataaaaaccctttgaatacagtta

SEQ ID NO: 392717 - DNA, 120 bp, Artificial Sequence
  ENSG00000145242_68 (sequence is synthesized)
ccagacacagcaggagcgcgccttggcggtgcagtttcaacctcgacttcgcagccgcgcacacaccgcctgctccccgagcagcgggaaccgcagcagctcctgggccgccgcagcgca

SEQ ID NO: 392718 - DNA, 120 bp, Artificial Sequence
  ENSG00000145242_69 (sequence is synthesized)
cctttgcggatgtgtggcagctctcaaagaagcctcatcatctttagcctgtattgttaacaactgcatggttaatgctacatgtggccagtatctttgcttctttgcttcaaacaaata

SEQ ID NO: 392719 - DNA, 120 bp, Artificial Sequence
  ENSG00000145242_70 (sequence is synthesized)
acattggcatacttgaataattggaataacagctccttggcaaaatactggtgttttgtgttgtggaaaagatgttttcttgacaagtttttttatactggtatctatgttatatgaatg

SEQ ID NO: 392720 - DNA, 120 bp, Artificial Sequence
  ENSG00000145242_71 (sequence is synthesized)
taaatacaaaacaaaataaactgtaagcacaattggtgtggctagtcctacataaggaccaaacatatttgtacattttggctctctacgatgaatatcaaggtaacagtagcttaaaca

SEQ ID NO: 392721 - DNA, 120 bp, Artificial Sequence
  ENSG00000145242_72 (sequence is synthesized)
aagcttccctggcaggatctcatttaatttctaaatggtgcaccttacattctttcaatctaaggatgtatcagatcccgcctctgatttgttatttggtacaatctcagtggaaccaat

SEQ ID NO: 392722 - DNA, 120 bp, Artificial Sequence
  ENSG00000145242_73 (sequence is synthesized)
tgtgcccttttctgtttgcacgtttaagataaaatttatcaaaccttattaaataaaaatcactagagttaaatattaagttctttaaggttgtaagttgtttgtattttattatatact

SEQ ID NO: 392723 - DNA, 120 bp, Artificial Sequence
  ENSG00000145242_74 (sequence is synthesized)
ctgtacatgtggttgttttagcctaattgttatttgtgaaaattaactgtctttatggtggttccatctagattacattaacattaatgttttaacctgtgaatataatgataacttact

SEQ ID NO: 392724 - DNA, 120 bp, Artificial Sequence
  ENSG00000145242_75 (sequence is synthesized)
tcaaattacctgccaattcaaaggttaaaatattgtaaggtttagaaaatggtagaatattctgaagcactaaaccatagttgttattttatttgtacacatgatatgaacattgagcag

SEQ ID NO: 392725 - DNA, 120 bp, Artificial Sequence
  ENSG00000145242_76 (sequence is synthesized)
ttcttgctcacccatctctattattctgacattctttgattcattgaattcattgttcctccccacagaaggtaacagggtaccaccatttatcaccaattaatgtcacattctcagcat

SEQ ID NO: 392726 - DNA, 120 bp, Artificial Sequence
  ENSG00000145242_77 (sequence is synthesized)
tctcttccttcataccgataactaaaaggacctgaaaccaaccactcagcttgctttctaaatttactgaatctcattctcacggtccaccagatcatatctacttgataacacatatgc

SEQ ID NO: 392727 - DNA, 120 bp, Artificial Sequence
  ENSG00000145242_78 (sequence is synthesized)
tttgtccattatttctttggacactcaaggaacccatttgtgctatatttaaactggtatactgaaaaatttactgataatttaaaactatttttacatgattgctatttaatttttcag

SEQ ID NO: 392728 - DNA, 120 bp, Artificial Sequence
  ENSG00000145242_79 (sequence is synthesized)
catgattgctatttaatttttcagtaaaaatggtcattttaatttattaaagtcatttgtcattttatattaaaatgatattgtaggtatttcttctacccaatgtcagattacttgtaa

SEQ ID NO: 392729 - DNA, 120 bp, Artificial Sequence
  ENSG00000145244_0 (sequence is synthesized)
agtttgtctctcttgagcttggagaaaatcatccgtagtgcctccccgggggacacgtagaggagagaaaagcgaccaagataaaagtggacagaagaataagcgagactttttatccat

SEQ ID NO: 392730 - DNA, 120 bp, Artificial Sequence
  ENSG00000145244_1 (sequence is synthesized)
gaaacagtctcctgccctcgctccggaagagcgctgccgcagagccgggtccccaaagccggtcttgagagctgatgacaataacatgggcaatggctgctctcagaagctggcgactgc

SEQ ID NO: 392731 - DNA, 120 bp, Artificial Sequence
  ENSG00000145244_2 (sequence is synthesized)
taacctcctccggttcctattgctggtcctgattccatgtatctgtgctctcgttctcttgctggtgatcctgctttcctatgttggaacattacaaaaggtctattttaaatcaaatgg

SEQ ID NO: 392732 - DNA, 120 bp, Artificial Sequence
  ENSG00000145244_3 (sequence is synthesized)
gagtgaacctttggtcactgatggtgaaatccaagggtccgatgttattcttacaaatacaatttataaccagagcactgtggtgtctactgcacatcccgaccaacacgttccagcctg

SEQ ID NO: 392733 - DNA, 120 bp, Artificial Sequence
  ENSG00000145244_4 (sequence is synthesized)
gactacggatgcttctctcccaggggaccaaagtcacaggaatacaagtgcctgtatgaacatcacccacagccagtgtcagatgctgccctaccacgccacgctgacacctctcctctc

SEQ ID NO: 392734 - DNA, 120 bp, Artificial Sequence
  ENSG00000145244_5 (sequence is synthesized)
agttgtcagaaacatggaaatggaaaagttcctcaagtttttcacatatctccatcgcctcagttgctatcaacatatcatgctgtttggctgtaccctcgccttccctgagtgcatcat

SEQ ID NO: 392735 - DNA, 120 bp, Artificial Sequence
  ENSG00000145244_6 (sequence is synthesized)
tgatggcgatgacagtcatggactcctgccctgtaggtccttctgtgaggctgcaaaagaaggctgtgaatcagtcctggggatggtgaattactcctggccggatttcctcagatgctc

SEQ ID NO: 392736 - DNA, 120 bp, Artificial Sequence
  ENSG00000145244_7 (sequence is synthesized)
ccagtttagaaaccaaactgaaagcagcaatgtcagcagaatttgcttctcacctcagcaggaaaacggaaagcaattgctctgtggaaggggtgagaactttctgtgtgccagtggaat

SEQ ID NO: 392737 - DNA, 120 bp, Artificial Sequence
  ENSG00000145244_8 (sequence is synthesized)
ctgcatccccgggaaactgcaatgtaatggctacaacgactgtgacgactggagtgacgaggctcattgcaactgcagcgagaatctgtttcactgtcacacaggcaagtgccttaatta

SEQ ID NO: 392738 - DNA, 120 bp, Artificial Sequence
  ENSG00000145244_9 (sequence is synthesized)
cagccttgtgtgtgatggatatgatgactgtggggatttgagtgatgagcaaaactgtgattgcaatcccacaacagagcatcgctgcggggacgggcgctgcatcgccatggagtgggt

SEQ ID NO: 392739 - DNA, 120 bp, Artificial Sequence
  ENSG00000145244_10 (sequence is synthesized)
gtgtgatggtgaccacgactgtgtggataagtctgacgaggtcaactgctcctgtcacagccagggtctggtggaatgcagaaatggacaatgtatccccagcacgtttcaatgtgatgg

SEQ ID NO: 392740 - DNA, 120 bp, Artificial Sequence
  ENSG00000145244_11 (sequence is synthesized)
tgacgaggactgcaaggatgggagtgatgaggagaactgcagcgtcattcagacttcatgtcaagaaggagaccaaagatgcctctacaatccctgccttgattcatgtggtggtagctc

SEQ ID NO: 392741 - DNA, 120 bp, Artificial Sequence
  ENSG00000145244_12 (sequence is synthesized)
tctctgtgacccgaacaacagtctgaataactgtagtcaatgtgaaccaattacattggaactctgcatgaatttgccctacaacagtacaagttatccaaattattttggccacaggac

SEQ ID NO: 392742 - DNA, 120 bp, Artificial Sequence
  ENSG00000145244_13 (sequence is synthesized)
tcaaaaggaagcatccatcagctgggagtcttctcttttccctgcacttgttcaaaccaactgttataaatacctcatgttcttttcttgcaccattttggtaccaaaatgtgatgtgaa

SEQ ID NO: 392743 - DNA, 120 bp, Artificial Sequence
  ENSG00000145244_14 (sequence is synthesized)
tacaggcgagcatatccctccttgcagggcattgtgtgaacactctaaagaacgctgtgagtctgttcttgggattgtgggcctacagtggcctgaagacacagattgcagtcaatttcc

SEQ ID NO: 392744 - DNA, 120 bp, Artificial Sequence
  ENSG00000145244_15 (sequence is synthesized)
agaggaaaattcagacaatcaaacctgcctgatgcctgatgaatatgtggaagaatgctcacctagtcatttcaagtgccgctcaggacagtgtgttctggcttccagaagatgtgatgg

SEQ ID NO: 392745 - DNA, 120 bp, Artificial Sequence
  ENSG00000145244_16 (sequence is synthesized)
ccaggccgactgtgacgatgacagtgatgaggaaaactgtggttgtaaagagagagatctttgggaatgtccatccaataaacaatgtttgaagcacacagtgatctgcgatgggttccc

SEQ ID NO: 392746 - DNA, 120 bp, Artificial Sequence
  ENSG00000145244_17 (sequence is synthesized)
agactgccctgattacatggacgagaaaaactgctcattttgccaagatgatgagctggaatgtgcaaaccatgcgtgtgtgtcacgtgacctgtggtgtgatggtgaagccgactgctc

SEQ ID NO: 392747 - DNA, 120 bp, Artificial Sequence
  ENSG00000145244_18 (sequence is synthesized)
agacagttcagatgaatgggactgtgtgaccctctctataaatgtgaactcctcttcctttctgatggttcacagagctgccacagaacaccatgtgtgtgcagatggctggcaggagat

SEQ ID NO: 392748 - DNA, 120 bp, Artificial Sequence
  ENSG00000145244_19 (sequence is synthesized)
attgagtcagctggcctgcaagcagatgggtttaggagaaccatctgtgaccaaattgatacaggaacaggagaaagagccgcggtggctgacattacactccaactgggagagcctcaa

SEQ ID NO: 392749 - DNA, 120 bp, Artificial Sequence
  ENSG00000145244_20 (sequence is synthesized)
gcagaagtaaaatttctcttctgtgtactaaacaagactgtgggcgccgccctgctgcccgaatgaacaaaaggatccttggaggtcggacgagtcgccctggaaggtggccatggcagt

SEQ ID NO: 392750 - DNA, 120 bp, Artificial Sequence
  ENSG00000145244_21 (sequence is synthesized)
gttctctgcagagtgaacccagtggacatatctgtggctgtgtcctcattgccaagaagtgggttctgacagttgcccactgcttcgaggggagagagaatgctgcagtttggaaagtgg

SEQ ID NO: 392751 - DNA, 120 bp, Artificial Sequence
  ENSG00000145244_22 (sequence is synthesized)
tgcttggcatcaacaatctagaccatccatcagtgttcatgcagacacgctttgtgaagaccatcatcctgcatccccgctacagtcgagcagtggtggactatgacatcagcatcgttg

SEQ ID NO: 392752 - DNA, 120 bp, Artificial Sequence
  ENSG00000145244_23 (sequence is synthesized)
agctgagtgaagacatcagtgagactggctacgtccggcctgtctgcttgcccaacccggagcagtggctagagcctgacacgtactgctatatcacaggctggggccacatgggcaata

SEQ ID NO: 392753 - DNA, 120 bp, Artificial Sequence
  ENSG00000145244_24 (sequence is synthesized)
aaatgccatttaagctgcaagagggagaggtccgcattatttctctggaacattgtcagtcctactttgacatgaagaccatcaccactcggatgatatgtgctggctatgagtctggca

SEQ ID NO: 392754 - DNA, 120 bp, Artificial Sequence
  ENSG00000145244_25 (sequence is synthesized)
cagttgattcatgcatgggtgacagcggtgggcctcttgtttgtgagaagcctggaggacggtggacattatttggattaacttcatggggctccgtctgcttttccaaagtcctggggc

SEQ ID NO: 392755 - DNA, 120 bp, Artificial Sequence
  ENSG00000145244_26 (sequence is synthesized)
ctggcgtttatagtaatgtgtcatatttcgtcgaatggattaaaagacagatttacatccagacctttctcctaaactaattataaggatgatcagagacttttgccagctacactaaaa

SEQ ID NO: 392756 - DNA, 120 bp, Artificial Sequence
  ENSG00000145244_27 (sequence is synthesized)
gaaaatggccttcttgactgtgaagagctgcctgcagagagctgtacagaagcacttttcatggacagaaatgctcaatcgtgcactgcaaatttgcatgtttgttttggactaattttt

SEQ ID NO: 392757 - DNA, 120 bp, Artificial Sequence
  ENSG00000145244_28 (sequence is synthesized)
ttcaatttattttttcaccttcatttttctcttatttcaagttcaatgaaagactttacaaaagcaaacaaagcagactttgtccttttgccaggcctaaccatgactgcagcacaaaat

SEQ ID NO: 392758 - DNA, 120 bp, Artificial Sequence
  ENSG00000145244_29 (sequence is synthesized)
tatcgactctggcgagatttaaaatcaggtgctacagtaacaggttatggaatggtctcttttatcctatcacaaaaaaagacatagatatttaggctgattaattatctctaccagttt

SEQ ID NO: 392759 - DNA, 120 bp, Artificial Sequence
  ENSG00000145244_30 (sequence is synthesized)
ttgtttctcaagctcagtgcatagtggtaaatttcagtgttaacattggagacttgcttttctttttctttttttataccccacaattcttttttattacacttcgaattttagggtaca

SEQ ID NO: 392760 - DNA, 83 bp, Artificial Sequence
  ENSG00000145244_31 (sequence is synthesized)
atttattaaaagccaagataatttacatgtttaaagtatttactattacccccttctaatgtttgcataattctgagaactga

SEQ ID NO: 392761 - DNA, 120 bp, Artificial Sequence
  ENSG00000145244_32 (sequence is synthesized)
tattacccccttctaatgtttgcataattctgagaactgataaaagacagcaataaaagaccagtgtcatccatttaggtagcaagacatattgaatgcaaagttctttagatatcaata

SEQ ID NO: 392762 - DNA, 120 bp, Artificial Sequence
  ENSG00000145244_33 (sequence is synthesized)
ttaacacttgacattattggaccccccattctggatgtatatcaagatcataattttatagaagagtctctatagaactgtcctcatagctgggtttgttcaggatatatgagttggctg

SEQ ID NO: 392763 - DNA, 120 bp, Artificial Sequence
  ENSG00000145244_34 (sequence is synthesized)
attgagactgcaacaactacatctatatttatgggcaatattttgttttacttatgtggcaaagaactggatattaaactttgcaaaagagaatttagatgagagatgcaattttttaaa

SEQ ID NO: 392764 - DNA, 120 bp, Artificial Sequence
  ENSG00000145244_35 (sequence is synthesized)
aagaaaattaatttgcatccctcgtttaattaaatttatttttcagttttcttgcgttcatccataccaacaaagtcataaagagcatattttagagcacagtaagactttgcatggagt

SEQ ID NO: 392765 - DNA, 120 bp, Artificial Sequence
  ENSG00000145244_36 (sequence is synthesized)
aaaacattttgtaattttcctcaaaagatgtttaatatctggtttcttctcattggtaattaaaattttagaaatgatttttagctctaggccactttacgcaactcaatttctgaagca

SEQ ID NO: 392766 - DNA, 120 bp, Artificial Sequence
  ENSG00000145244_37 (sequence is synthesized)
attagtggtaaaaagtatttttccccactaaaaaactttaaaacacaaatcttcatatatacttaatttaattagtcaggcatccattttgccttttaaacaactaggattccctactaa

SEQ ID NO: 392767 - DNA, 120 bp, Artificial Sequence
  ENSG00000145244_38 (sequence is synthesized)
cctccaccagcaacctggactgcctcagcattccaaatagatactacctgcaattttatacatgtatttttgtatcttttctgtgtgtaaacatagttgaaattcaaaaagttgtagcaa

SEQ ID NO: 392768 - DNA, 120 bp, Artificial Sequence
  ENSG00000145244_39 (sequence is synthesized)
tttctatactattcatctcctgtccttcagtttgtataaacctaaggagagtgtgaaatccagcaactgaattgtggtcacgattgtatgaaagttcaagaacatatgtcagttttgtta

SEQ ID NO: 392769 - DNA, 120 bp, Artificial Sequence
  ENSG00000145244_40 (sequence is synthesized)
cagttgtagctacatactcaatgtatcaacttttagcctgctcaacttaggctcagtgaaatatatatattatacttattttaaataattcttaatacaaataaaatggtaatggtctaa

SEQ ID NO: 392770 - DNA, 120 bp, Artificial Sequence
  ENSG00000145244_41 (sequence is synthesized)
ggatcctaaattacttcctggattttactgaccaagttcatctattttgttttactgttataaaagctgatagtgctgatctatgtgtgttatttccaactcacagaaaatttccccacg

SEQ ID NO: 392771 - DNA, 120 bp, Artificial Sequence
  ENSG00000145244_42 (sequence is synthesized)
aagctacttctctatttgaaatatctatattgtatggaaaaacgtttgggttcaaaatgttgtaatcatataattgctgggagaggatttaaaaactcttcattaaaacccaacttcaat

SEQ ID NO: 392772 - DNA, 120 bp, Artificial Sequence
  ENSG00000145244_43 (sequence is synthesized)
aggttttaatttaaaatcatagaaatttataaccaaaaacttacagttcattatgtgttaatatgattagcagtttaaattacaaaatgattggtttcttgttttttagaaggaggaagt

SEQ ID NO: 392773 - DNA, 120 bp, Artificial Sequence
  ENSG00000145244_44 (sequence is synthesized)
ttgttcagtcactgtcctcagtaatgtcttatgtgtaaatgtaatacctaaaaaatcatattaagaaaatgtttaagaagtgggatgggaagactggtaaaggttgttaatgcattaata

SEQ ID NO: 392774 - DNA, 120 bp, Artificial Sequence
  ENSG00000145244_45 (sequence is synthesized)
gttttttttcctctcctcaaatgtgttctgtttctcctctggttagagccagtggcttacgttagatttgggcttttgagcaaactttgagggcagatatattgtctgtgcctgattccc

SEQ ID NO: 392775 - DNA, 120 bp, Artificial Sequence
  ENSG00000145244_46 (sequence is synthesized)
ttggtacatgtgactgaagtcccctcctttatttaatcctcaaatagtacagggaccacctgttcagcagctacacccagggttaggatgatgcatttgttttgtgtacacatggtgatc

SEQ ID NO: 392776 - DNA, 120 bp, Artificial Sequence
  ENSG00000145244_47 (sequence is synthesized)
ttatcttttaaagaataaccccactttttaaagagtcatgtccaattctgaatgccatctcatgaattaaaatcagcaaaattcctcttgctcatttacttttttggctttgtgactagc

SEQ ID NO: 392777 - DNA, 120 bp, Artificial Sequence
  ENSG00000145244_48 (sequence is synthesized)
ttcagaatttttaggtagcatattattgagtgacgtaggaactttgcaacatgaacaaaagggcaaactgggatgaggatacaccctggacaaatgatatcagacaatgtcctgcattag

SEQ ID NO: 392778 - DNA, 120 bp, Artificial Sequence
  ENSG00000145244_49 (sequence is synthesized)
ataacatcaaaatgaatgtttgggaaggatcagcggtatggtcagaggaaggcattggaatcatgaatgttaggaataaccccatgctgggaaacctggtggtttctaggagcgctgtct

SEQ ID NO: 392779 - DNA, 120 bp, Artificial Sequence
  ENSG00000145244_50 (sequence is synthesized)
agctgccacttgctgtatctgtaaaaatattttaaaatgtatgtgtacaaaccattcctgtgtgactagatagaggtgggttattgcttttttctgataatagtttatttttattttatt

SEQ ID NO: 392780 - DNA, 120 bp, Artificial Sequence
  ENSG00000145244_51 (sequence is synthesized)
ttgactaataatagttgtacatatttattgaatacagcatgatattttaatacatgtatacaatatgtaatgatcaaatcagggtaattagtgtatccatcacctcaaacatttatcatt

SEQ ID NO: 392781 - DNA, 120 bp, Artificial Sequence
  ENSG00000145244_52 (sequence is synthesized)
tctttgtattaggaacattcagaatcttctcatttagttatttgaaaatatgcaataaattatcattaactatagtcaccatccagtgctataaaaacctacaacttgttcctcctatct

SEQ ID NO: 392782 - DNA, 72 bp, Artificial Sequence
  ENSG00000145244_53 (sequence is synthesized)
atccagtgctataaaaacctacaacttgttcctcctatctagctgtaattttgtatcagttaaacaatctct

SEQ ID NO: 392783 - DNA, 64 bp, Artificial Sequence
  ENSG00000145244_54 (sequence is synthesized)
acccaggctggagtgcagtggcgctatcccggctcactgcaactacaggtgtgtgccaccacgc

SEQ ID NO: 392784 - DNA, 120 bp, Artificial Sequence
  ENSG00000145244_55 (sequence is synthesized)
cacctggcagcaatctctctttgtccctcctcctccatacccttctggcctctagtaaccactgttctactctctatttccatgagatcaactctgcatatgagtgagggcatgtggtat

SEQ ID NO: 392785 - DNA, 120 bp, Artificial Sequence
  ENSG00000145244_56 (sequence is synthesized)
ttctgtttctatgcctggcttatttcactaaacagaatgtcctccaggctcatccatgttgctacaaataacaggattttattcttttggcgtggctgaatagtattccattgtgtagat

SEQ ID NO: 392786 - DNA, 120 bp, Artificial Sequence
  ENSG00000145244_57 (sequence is synthesized)
gtaccatattttcttctccactcattttttgatggcataaattgattccatatcatggttattgtgagtagtgctgcagtgaatgtgggggtgcagatgtctgtttgatatactgatttc

SEQ ID NO: 392787 - DNA, 120 bp, Artificial Sequence
  ENSG00000145244_58 (sequence is synthesized)
ctttcctttgggtatatgcccagtagtgggattgctgggttatatggaagttctatttgtagttttctcaagaacctccatattgttttccataatgactatactaatttacatttagat

SEQ ID NO: 392788 - DNA, 120 bp, Artificial Sequence
  ENSG00000145244_59 (sequence is synthesized)
gtgggttatatcctgggactgactagtcttgagaaaaaggatgagaggaaattgtaattatatagatcacagaaattatagttgcaggaggccttggagatcatcagattcaacccttcc

SEQ ID NO: 392789 - DNA, 120 bp, Artificial Sequence
  ENSG00000145244_60 (sequence is synthesized)
ctttaccagtgagataattaggaaatgcaggggattgaaaatgagtgagtgtcgtttggtagttggataggttagtggagagggccagcatgcaggtagcatgtgagaaaaaatggtctt

SEQ ID NO: 392790 - DNA, 120 bp, Artificial Sequence
  ENSG00000145244_61 (sequence is synthesized)
aacaggcaacagaattcctctgaagatagcaggctatcatgaagtttgtgtgtctggatgccagttgtctccatctaatagcaataattatcactttccttcagaccagcctctgccctg

SEQ ID NO: 392791 - DNA, 120 bp, Artificial Sequence
  ENSG00000145244_62 (sequence is synthesized)
gctccctgtgctcttctggttcctgcccaagcacttcttatgcttttcttcttttctcaaacctatgtcctccctatactttcctctgttgatccaaaatatgctttaagatccatggtc

SEQ ID NO: 392792 - DNA, 120 bp, Artificial Sequence
  ENSG00000145244_63 (sequence is synthesized)
actccggaagtctgtctatgaccatggcactgttactagactcatcatactttctcatggaatctattattcatgaatccacatacatcttctaaaacactgcttatattcagggtatac

SEQ ID NO: 392793 - DNA, 120 bp, Artificial Sequence
  ENSG00000145244_64 (sequence is synthesized)
cacctctcatggcaaagcatcctatggattctgccctttgtgagagcgaacttatcacttagttctttttcactaatatataaattgggacaaagttgaagtccaggctaaaaagaatca

SEQ ID NO: 392794 - DNA, 120 bp, Artificial Sequence
  ENSG00000145244_65 (sequence is synthesized)
tgaatataacataaatattttgcatggcttacctagcagttcttttggatataaggccaggcatgctggcatattccttgtagtcccaactacttggaggctggggtgggaggatcacct

SEQ ID NO: 392795 - DNA, 120 bp, Artificial Sequence
  ENSG00000145244_66 (sequence is synthesized)
acaccactgcactccagcctgggagaaagagagagaccttgtctcaaaaaaaagataatcaattaaaaacttaagcttagcatcaggagagatgacaaggagatacgtgccttcccaatt

SEQ ID NO: 392796 - DNA, 120 bp, Artificial Sequence
  ENSG00000145244_67 (sequence is synthesized)
aggagagatgacaaggagatacgtgccttcccaatttgccagacaggtaagttataattcctagaaacgtgagagagctgttacagatacatcaaatccgctagccgcattgtgaaacac

SEQ ID NO: 392797 - DNA, 120 bp, Artificial Sequence
  ENSG00000145244_68 (sequence is synthesized)
aaatcacagttctgttttttgaaccagggtagaaatcataaatttttcataaggaaagaaaatgacaactaaagaaaacaaaagccaacaacaataagaacaaactacgggtcctggggc

SEQ ID NO: 392798 - DNA, 120 bp, Artificial Sequence
  ENSG00000145244_69 (sequence is synthesized)
agctagagtagttacttatctgaaaaacagacccatcttaccccacagtgatggtggtcagtggggcacatgagtggggagggcgtggcattttaattgggccagacctattgtagaaat

SEQ ID NO: 392799 - DNA, 120 bp, Artificial Sequence
  ENSG00000145244_70 (sequence is synthesized)
gttattgaaggtattggagccattggaacagactctcttcgatgggaactgggagccatagaatcctgcctgttagtcatgctggttctctgcatcctcgtgagttttcatttctccaga

SEQ ID NO: 392800 - DNA, 120 bp, Artificial Sequence
  ENSG00000145244_71 (sequence is synthesized)
ttgcaatcccacaacagagcatcgctgcggggacgggcgctgcatcgccatggagtgggtgtgtgatggtgaccacgactgtgtggataagtctgacgaggtcaactgctgtgagtgctc

SEQ ID NO: 392801 - DNA, 120 bp, Artificial Sequence
  ENSG00000145244_72 (sequence is synthesized)
tgaggacgtttgttttgcttatttttccatttctggttctttaggctgtactcaaggttgaggactgtacttaagactcactatatacacagcattccaagggaaagattcttatgcttt

SEQ ID NO: 392802 - DNA, 120 bp, Artificial Sequence
  ENSG00000145244_73 (sequence is synthesized)
ggttctagcctgtaaagatcactgagtcatgggatgacaatagcaatggagtgtatctgacttccacacctctccctgcaaaactccaagcttcatttggctgatctagccaagtgggtg

SEQ ID NO: 392803 - DNA, 120 bp, Artificial Sequence
  ENSG00000145244_74 (sequence is synthesized)
tctgttttctctctcgttgctccatatgtctcttttatgcttctgtgactttgtcaaaggtgatgctctgcccacagaatggggaacctttcttctgcaaacaatacatgagtagttaag

SEQ ID NO: 392804 - DNA, 120 bp, Artificial Sequence
  ENSG00000145244_75 (sequence is synthesized)
cttccctgcaggagtgccctaacatgttttcaggggccatttgtggaagaacatggaaagaatcgtcagagagaagagagcctttaatgttcatatgatgatacaaagagagcataatag

SEQ ID NO: 392805 - DNA, 68 bp, Artificial Sequence
  ENSG00000145244_76 (sequence is synthesized)
cctttaatgttcatatgatgatacaaagagagcataatatgggtagatgacctgaggtcaggagtttg

SEQ ID NO: 392806 - DNA, 120 bp, Artificial Sequence
  ENSG00000145244_77 (sequence is synthesized)
acactggcggcaggggaggctgcaggtggagctgtcggagccagcccctcggggatctacagcttcctgtctgcgccggcgtctcgggcgccgggtggctggagggactgtgcagcagtc

SEQ ID NO: 392807 - DNA, 120 bp, Artificial Sequence
  ENSG00000145244_78 (sequence is synthesized)
aacagggagaatatgacaagattcaagaagagatttttgaaatcagatacaaaatgtttagtataaatgtttcaagtttggaacaggatatttagaattgcaaaaaatttatcttatcca

SEQ ID NO: 392808 - DNA, 120 bp, Artificial Sequence
  ENSG00000145244_79 (sequence is synthesized)
ctgtgaaaggcatttatatgtcaagatgaactgtcaaggactgaggctggatgcttagattattttcccccatcaatagatggaagaggacaaaccttatccttcaactgaagtgtgtta

SEQ ID NO: 392809 - DNA, 120 bp, Artificial Sequence
  ENSG00000145244_80 (sequence is synthesized)
tgatgaatatgtggaaggttaattttaaaattaattacagcagggtatctaacatggatgaacatgttagctaccttttgaatttcttctatttatggcttcttgtttgtttgttttcta

SEQ ID NO: 392810 - DNA, 120 bp, Artificial Sequence
  ENSG00000145244_81 (sequence is synthesized)
tttagtttccaatcaggctgcttaggtgagtgaatttgtgaacttgattgcattgaagaatttggcactcatctgttagatattgcattcattttaaaaataaagaagtcattttctatt

SEQ ID NO: 392811 - DNA, 120 bp, Artificial Sequence
  ENSG00000145246_0 (sequence is synthesized)
gcagcctggcggagacgggaggaggagcggagggagaagtaggttgcgagctcagcacaggctccggcgctggctcccgcagctgagtttgggagatgtctaagtgattttttttttttc

SEQ ID NO: 392812 - DNA, 120 bp, Artificial Sequence
  ENSG00000145246_1 (sequence is synthesized)
ccggaaggcaaatggctggcgtggaagcacaacccgctttcactcttcgaatttgtgcttagctcttttcttgtaccttgcgactcgtgaccaacatgctgtgatgtgtgccgagggagg

SEQ ID NO: 392813 - DNA, 120 bp, Artificial Sequence
  ENSG00000145246_2 (sequence is synthesized)
aattggtcagctacacaacctggatcttaccacagtttggatatgactgaggctctccaatgggccagatatcactggcgacggctgatcagaggtgcaaccagggatgatgattcaggg

SEQ ID NO: 392814 - DNA, 120 bp, Artificial Sequence
  ENSG00000145246_3 (sequence is synthesized)
ccatacaactattcctcgttgctcgcctgtgggcgcaagtcctctcagacccctaaactgtcaggaaggcaccggattgttgttccccacatccagcccttcaaggatgagtatgagaag

SEQ ID NO: 392815 - DNA, 120 bp, Artificial Sequence
  ENSG00000145246_4 (sequence is synthesized)
ttctccggagcctatgtgaacaatcgaatacgaacaacaaagtacacacttctgaattttgtgccaagaaatttatttgaacaatttcacagagctgccaatttatatttcctgttccta

SEQ ID NO: 392816 - DNA, 120 bp, Artificial Sequence
  ENSG00000145246_5 (sequence is synthesized)
gttgtcctgaactgggtacctttggtagaagccttccaaaaggaaatcaccatgttgcctctggtggtggtccttacaattatcgcaattaaagatggcctggaagattatcggaaatac

SEQ ID NO: 392817 - DNA, 120 bp, Artificial Sequence
  ENSG00000145246_6 (sequence is synthesized)
aaaattgacaaacagatcaataatttaataactaaagtttatagtaggaaagagaaaaaatacattgaccgatgctggaaagacgttactgttggggactttattcgcctctcctgcaac

SEQ ID NO: 392818 - DNA, 120 bp, Artificial Sequence
  ENSG00000145246_7 (sequence is synthesized)
gaggtcatccctgcagacatggtactactcttttccactgatccagatggaatctgtcacattgagacttctggtcttgatggagagagcaatttaaaacagaggcaggtggttcgggga

SEQ ID NO: 392819 - DNA, 120 bp, Artificial Sequence
  ENSG00000145246_8 (sequence is synthesized)
tatgcagaacaggactctgaagttgatcctgagaagttttccagtaggatagaatgtgaaagcccaaacaatgacctcagcagattccgaggcttcctagaacattccaacaaagaacgc

SEQ ID NO: 392820 - DNA, 120 bp, Artificial Sequence
  ENSG00000145246_9 (sequence is synthesized)
gtgggtctcagtaaagaaaatttgttgcttagaggatgcaccattagaaacacagaggctgttgtgggcattgtggtttatgcaggccatgaaaccaaagcaatgctgaacaacagtggg

SEQ ID NO: 392821 - DNA, 120 bp, Artificial Sequence
  ENSG00000145246_10 (sequence is synthesized)
ccacggtataagcgcagcaaattagaaagaagagcaaacacagatgtcctctggtgtgtcatgcttctggtcataatgtgcttaactggcgcagtaggtcatggaatctggctgagcagg

SEQ ID NO: 392822 - DNA, 120 bp, Artificial Sequence
  ENSG00000145246_11 (sequence is synthesized)
tatgaaaagatgcattttttcaatgttcccgagcctgatggacatatcatatcaccactgttggcaggattttatatgttttggaccatgatcattttgttacaggtcttgattcctatt

SEQ ID NO: 392823 - DNA, 120 bp, Artificial Sequence
  ENSG00000145246_12 (sequence is synthesized)
tctctctatgtttccatcgaaattgtgaagcttggacaaatatatttcattcaaagtgatgtggatttctacaatgaaaaaatggattctattgttcagtgccgagccctgaacatcgcc

SEQ ID NO: 392824 - DNA, 120 bp, Artificial Sequence
  ENSG00000145246_13 (sequence is synthesized)
gaggatctgggacagattcagtacctcttttccgataagacaggaaccctcactgagaataagatggtttttcgaagatgtagtgtggcaggatttgattactgccatgaagaaaatgcc

SEQ ID NO: 392825 - DNA, 120 bp, Artificial Sequence
  ENSG00000145246_14 (sequence is synthesized)
aggaggttggagtcctatcaggaagctgtctctgaagatgaagattttatagacacagtcagtggttccctcagcaatatggcaaaaccgagagcccccagctgcaggacagttcataat

SEQ ID NO: 392826 - DNA, 120 bp, Artificial Sequence
  ENSG00000145246_15 (sequence is synthesized)
gggcctttgggaaataagccctcaaatcatcttgctgggagctcttttactctaggaagtggagaaggagccagtgaagtgcctcattccagacaggctgctttcagtagccccattgaa

SEQ ID NO: 392827 - DNA, 120 bp, Artificial Sequence
  ENSG00000145246_16 (sequence is synthesized)
acagacgtggtaccagacaccaggcttttagacaaatttagtcagattacacctcggctctttatgccactagatgagaccatccaaaatccaccaatggaaactttgtacattatcgac

SEQ ID NO: 392828 - DNA, 120 bp, Artificial Sequence
  ENSG00000145246_17 (sequence is synthesized)
tttttcattgcattggcaatttgcaacacagtagtggtttctgctcctaaccaaccccgacaaaagatcagacacccttcactgggggggttgcccattaagtctttggaagagattaaa

SEQ ID NO: 392829 - DNA, 120 bp, Artificial Sequence
  ENSG00000145246_18 (sequence is synthesized)
agtcttttccagagatggtctgtccgaagatcaagttctccatcgcttaacagtgggaaagagccatcttctggagttccaaacgcctttgtgagcagactccctctctttagtcgaatg

SEQ ID NO: 392830 - DNA, 120 bp, Artificial Sequence
  ENSG00000145246_19 (sequence is synthesized)
aaaccagcttcacctgtggaggaagaggtctcccaggtgtgtgagagcccccagtgctccagtagctcagcttgctgcacagaaacagagaaacaacacggtgatgcaggcctcctgaat

SEQ ID NO: 392831 - DNA, 120 bp, Artificial Sequence
  ENSG00000145246_20 (sequence is synthesized)
ggcaaggcagagtccctccctggacagccattggcctgcaacctgtgttatgaggccgagagcccagacgaagcggccttagtgtatgccgccagggcttaccaatgcactttacggtct

SEQ ID NO: 392832 - DNA, 120 bp, Artificial Sequence
  ENSG00000145246_21 (sequence is synthesized)
cggacaccagagcaggtcatggtggactttgctgctttgggaccattaacatttcaactcctacacatcctgccctttgactcagtaagaaaaagaatgtctgttgtggtccgacaccct

SEQ ID NO: 392833 - DNA, 120 bp, Artificial Sequence
  ENSG00000145246_22 (sequence is synthesized)
ctttccaatcaagttgtggtgtatacgaaaggcgctgattctgtgatcatggagttactgtcggtggcttccccagatggagcaagtctggagaaacaacagatgatagtaagggagaaa

SEQ ID NO: 392834 - DNA, 120 bp, Artificial Sequence
  ENSG00000145246_23 (sequence is synthesized)
acccagaagcacttggatgactatgccaaacaaggccttcgtactttatgtatagcaaagaaggtcatgagtgacactgaatatgcagagtggctgaggaatcattttttagctgaaacc

SEQ ID NO: 392835 - DNA, 120 bp, Artificial Sequence
  ENSG00000145246_24 (sequence is synthesized)
agcattgacaacagggaagaattactacttgaatctgccatgaggttggagaacaaacttacattacttggtgctactggcattgaagaccgtctgcaggagggagtccctgaatctata

SEQ ID NO: 392836 - DNA, 120 bp, Artificial Sequence
  ENSG00000145246_25 (sequence is synthesized)
gaagctcttcacaaagcgggcatcaagatctggatgctgacaggggacaagcaggagacagctgtcaacatagcttatgcatgcaaactactggagccagatgacaagctttttatcctc

SEQ ID NO: 392837 - DNA, 120 bp, Artificial Sequence
  ENSG00000145246_26 (sequence is synthesized)
aatacccaaagtaaagatgcctgtgggatgctgatgagcacaattttgaaagaacttcagaagaaaactcaagccctgccagagcaagtgtcattaagtgaagatttacttcagcctcct

SEQ ID NO: 392838 - DNA, 120 bp, Artificial Sequence
  ENSG00000145246_27 (sequence is synthesized)
agaaagtctgcaaaagcagttcctggaactgacatcttggtgtcaagctgtggtctgctgccgagccacaccgctgcagaaaagtgaagtggtgaaattggtccgcagccatctccaggt

SEQ ID NO: 392839 - DNA, 120 bp, Artificial Sequence
  ENSG00000145246_28 (sequence is synthesized)
gatgacccttgctattggtgatggtgccaatgatgttagcatgatacaagtggcagacattgggataggggtctcaggtcaagaaggcatgcaggctgtgatggccagtgactttgccgt

SEQ ID NO: 392840 - DNA, 120 bp, Artificial Sequence
  ENSG00000145246_29 (sequence is synthesized)
ttctcagttcaaacatctcagcaagctccttcttgtccatggacactggtgttatacacggctttccaacatgattctctattttttctataagaatgtggcctatgtgaacctcctttt

SEQ ID NO: 392841 - DNA, 120 bp, Artificial Sequence
  ENSG00000145246_30 (sequence is synthesized)
ctggtaccagttcttttgtggattttcaggaacatccatgactgattactgggttttgatcttcttcaacctcctcttcacatctgcccctcctgtcatttatggtgttttggagaaaga

SEQ ID NO: 392842 - DNA, 120 bp, Artificial Sequence
  ENSG00000145246_31 (sequence is synthesized)
tgtgtctgcagagaccctcatgcaactgcctgaactttacagaagtggtcagaaatcagaggcatacttaccccataccttctggatcaccttattggatgctttttatcaaagcctggt

SEQ ID NO: 392843 - DNA, 120 bp, Artificial Sequence
  ENSG00000145246_32 (sequence is synthesized)
ctgcttctttgtgccttattttacctaccagggctcagatactgacatctttgcatttggaaaccccctgaacacagccgctctgttcatcgttctcctccatctggtcattgaaagcaa

SEQ ID NO: 392844 - DNA, 120 bp, Artificial Sequence
  ENSG00000145246_33 (sequence is synthesized)
gagtttgacttggattcacttgctggtcatcattggtagcatcttgtcttattttttatttgccatagtttttggagccatgtgtgtaacttgcaacccaccatccaacccttactggat

SEQ ID NO: 392845 - DNA, 120 bp, Artificial Sequence
  ENSG00000145246_34 (sequence is synthesized)
tatgcaggagcacatgctggatccagtattctacttagtttgtatcctcacgacgtccattgctcttctgcccaggtttgtatacagagttcttcagggatccctgtttccatctccaat

SEQ ID NO: 392846 - DNA, 120 bp, Artificial Sequence
  ENSG00000145246_35 (sequence is synthesized)
tctgagagctaagcactttgacagactaactccagaggagaggactaaagctctcaagaagtggagaggggctggaaagatgaatcaagtgacatcaaagtatgctaaccaatcagctgg

SEQ ID NO: 392847 - DNA, 120 bp, Artificial Sequence
  ENSG00000145246_36 (sequence is synthesized)
caagtcaggaagaagacccatgcctggcccttctgctgtatttgcaatgaagtcagcaagttcctgtgctattgagcaaggaaacttatctctgtgtgaaactgctttagatcaaggcta

SEQ ID NO: 392848 - DNA, 120 bp, Artificial Sequence
  ENSG00000145246_37 (sequence is synthesized)
ctctgaaactaaggcctttgagatggctggaccctccaaaggtaaagaaagctagataccctccttggagttgcaagtattctttcaaggttggaagagggattttgaagaggtatctct

SEQ ID NO: 392849 - DNA, 120 bp, Artificial Sequence
  ENSG00000145246_38 (sequence is synthesized)
ccaagcaagaatgacttgtttttccataagggacatgagcattttactaggcttggaagagctgacatgatgagcattattgtatgtttgtatatacatttgtgatagagggctagagtt

SEQ ID NO: 392850 - DNA, 120 bp, Artificial Sequence
  ENSG00000145246_39 (sequence is synthesized)
tgacctagagagagtttaaggaagtgaaatatttaattcagaaccaaatgcttttgtaaaactttttggattttgtaaaagcattttcattctcttagaaattcaagtattttcaagggg

SEQ ID NO: 392851 - DNA, 120 bp, Artificial Sequence
  ENSG00000145246_40 (sequence is synthesized)
agtcatttgagatatatttattttactaggagatcttatattctagggaaatgctttaaatggtcaggctccagtcggaatttttttaagaaaaaagtagtttttaatacattggttagg

SEQ ID NO: 392852 - DNA, 120 bp, Artificial Sequence
  ENSG00000145246_41 (sequence is synthesized)
actcagaggaaatacggaaaaaacattgtagatggttaatttacagataaaatcccaagagccttttaaacaacaaggtacctaaaatagggtataattatactgcttaaaatacagtta

SEQ ID NO: 392853 - DNA, 120 bp, Artificial Sequence
  ENSG00000145246_42 (sequence is synthesized)
gtgcctattaatagctttttatttcctatgggaagatgcttttggtcttctggctgaagatgtaggcatacctctcactcatttcaatgttttcctgaggtggagccttcattggaaagg

SEQ ID NO: 392854 - DNA, 120 bp, Artificial Sequence
  ENSG00000145246_43 (sequence is synthesized)
ggaaagagggattctagggtttcatcagggaccaggaatgcattcctctgtcaggttccaatcaagagaagaccttttatgagatctgcctctgtatagatgttgtcagttaggaaactg

SEQ ID NO: 392855 - DNA, 120 bp, Artificial Sequence
  ENSG00000145246_44 (sequence is synthesized)
aagccataggtcaggcagacatcagctcagcctgtggcccattgggtgatttcctgtattttaaaactgacagtagcctgatcaaagtgatacaatcaatttcaaaacaatcttccagag

SEQ ID NO: 392856 - DNA, 120 bp, Artificial Sequence
  ENSG00000145246_45 (sequence is synthesized)
accacttgaaggttcatagtttttacaataccctgagacttttcaggtgttggagcctctaaaatatgagatataaacagaaactaatacaagttgttctctggaggtttctatgaggtt

SEQ ID NO: 392857 - DNA, 120 bp, Artificial Sequence
  ENSG00000145246_46 (sequence is synthesized)
cttagaaaaatttggttttaaaatcatttgaggacaggaatgtctatagcaagtttactcctattgcgaatcatgtatgctggctttagttgtaacaaacgattttattctaagtaaggc

SEQ ID NO: 392858 - DNA, 120 bp, Artificial Sequence
  ENSG00000145246_47 (sequence is synthesized)
caggtgctactataaaatcatatattcctgttgaagttcttttgaagtcctatctctatttattatatttgaaagttgtcagccaccagtcatccagaatttccttcctgaatctccatg

SEQ ID NO: 392859 - DNA, 120 bp, Artificial Sequence
  ENSG00000145246_48 (sequence is synthesized)
ctcatatgcaatgtctacatcaaggtcttcttaatgactattattctcagggtttagttttctaccttctgcctactattttggtctgacatttttgtagccttctgttattattggaaa

SEQ ID NO: 392860 - DNA, 120 bp, Artificial Sequence
  ENSG00000145246_49 (sequence is synthesized)
tagtctcttacataagctgatttcgagaactttcaaaatctcacatagctaatggaagttgctttctgctttcttatgactgtttttataaataaactgtttcataaataatgtatactg

SEQ ID NO: 392861 - DNA, 120 bp, Artificial Sequence
  ENSG00000145246_50 (sequence is synthesized)
gaaaattgtcatcactcttgtaaacatttgccaaatccaactgtaattagtaccagaacttagaaggaaagtcacaaagcatgccttttaccagaatattgctttgccttttcttatatg

SEQ ID NO: 392862 - DNA, 120 bp, Artificial Sequence
  ENSG00000145246_51 (sequence is synthesized)
gaaaatcactgatgtcatatcatttattatcctcacagcagctggcattcattccctgaaatcgtcgtctcctgataaacaataatttagagatatgttcacttgtaaataaaaaggtta

SEQ ID NO: 392863 - DNA, 120 bp, Artificial Sequence
  ENSG00000145246_52 (sequence is synthesized)
gaatctaaggacaaagaatgatccaaaaatactaaggaaaaagaacaattttcaattttcagaaatgaattatctgtacatatgaatagaggaaaatactgagtgctaatgttacagggc

SEQ ID NO: 392864 - DNA, 120 bp, Artificial Sequence
  ENSG00000145246_53 (sequence is synthesized)
cacaatctcatatccacaattccaaaatctccaaacctctgaaaactgaaatatttttcataaattaggcgtaaattctatgccctgaacaaatgtaaagctatttatgtactttgctta

SEQ ID NO: 392865 - DNA, 120 bp, Artificial Sequence
  ENSG00000145246_54 (sequence is synthesized)
atgtaatcattcatatactttgctacaaaaatattaatatatttcattactgaatgctaaactgtatttctttttaaaatttggaaaatttttaattctgaaacacaatctagaccttag

SEQ ID NO: 392866 - DNA, 120 bp, Artificial Sequence
  ENSG00000145246_55 (sequence is synthesized)
ctctcctctaaagatgagtctggaagtctgcagtcagaagcttcccttccacgaagcctcacccccatctctcatcacccacaatcttcttttttggctttggcttcatgtccagacttt

SEQ ID NO: 392867 - DNA, 120 bp, Artificial Sequence
  ENSG00000145246_56 (sequence is synthesized)
tagtgagaccctgtctctaaaaaaaataacaaaactaactgtgtgtcatggcacctgccagcagtcttggccacttgggagactgaggaggaggctcacttgagcccaacagttggaggc

SEQ ID NO: 392868 - DNA, 120 bp, Artificial Sequence
  ENSG00000145246_57 (sequence is synthesized)
gctatgatcatgccactgcactccagcttgggaaacagagagaaaccttgtctctaaaaacaaaaaagtgtgattatcttattcatgtttatcttccgcattagcctatgctctctgcga

SEQ ID NO: 392869 - DNA, 120 bp, Artificial Sequence
  ENSG00000145246_58 (sequence is synthesized)
tgctctctgcgagggtagggttcatgcctattttgttcaccactgtataccagtgttaaaggacaagactgacacacagcaggtgctcaaaaaatatttgaatggataaataaatgatga

SEQ ID NO: 392870 - DNA, 120 bp, Artificial Sequence
  ENSG00000145246_59 (sequence is synthesized)
tagaagagactacatgattgcagctcagcaagatcaccacacataattagaagtataaacaaacaatatcacactagtctacttttaaaaaataactcaatgttgagaggtagtatacca

SEQ ID NO: 392871 - DNA, 120 bp, Artificial Sequence
  ENSG00000145246_60 (sequence is synthesized)
tttctgaaaaaaaaaaaggagaatatttctggccagggctgattatgtgtgagcctgaagaaggctgccttggtttaagaatcatggctcactcttagaaccagcaaagcttaccagagt

SEQ ID NO: 392872 - DNA, 120 bp, Artificial Sequence
  ENSG00000145246_61 (sequence is synthesized)
tatctcgtagtcagataagcaagtgtaatttatagggacattcataggccatgtggtacattgaaggcctttttattgctctgtaatctcccaaatcccaccaaacttgtggtttttccc

SEQ ID NO: 392873 - DNA, 120 bp, Artificial Sequence
  ENSG00000145246_62 (sequence is synthesized)
tattcctggctccagaaggtcattttctaatatatcaatttcagagctcaacagaatgtgttcatgagttccagtgggaagtgtcaggaactgtctagtcacatccattaacaaatccat

SEQ ID NO: 392874 - DNA, 120 bp, Artificial Sequence
  ENSG00000145246_63 (sequence is synthesized)
tttactccagaaaaactagaggaccatgtagatgatggggaaaagagggaaaggtgctgtgtgaaaaaaattagaaatttttgctgtatttaaaattacctgtataaaagttcaatttcc

SEQ ID NO: 392875 - DNA, 120 bp, Artificial Sequence
  ENSG00000145247_0 (sequence is synthesized)
gagacaggtggggtactcgggaagctggagcgggccggcggtgcagtcacgggggagcgaggcctgctgggcttggcaacgagggactcggcctcggaggcgacccagaccacacagaca

SEQ ID NO: 392876 - DNA, 120 bp, Artificial Sequence
  ENSG00000145247_1 (sequence is synthesized)
ctgggtcaaggagtaagcagaggataaacaactggaaggagagcaagcacaaagtcatcatggcttcagcgtctgctcgtggaaaccaagataaagatgcccattttccaccaccaagca

SEQ ID NO: 392877 - DNA, 120 bp, Artificial Sequence
  ENSG00000145247_2 (sequence is synthesized)
agcagagcctgttgttttgtccaaaatcaaaactgcacatccacagagcagagatctcaaagattatgcgagaatgtcaggaagaaagtttctggaagagagctctgcctttttctcttg

SEQ ID NO: 392878 - DNA, 120 bp, Artificial Sequence
  ENSG00000145247_3 (sequence is synthesized)
taagcatgcttgtcacccagggactagtctaccaaggttatttggcagctaattctagatttggatcattgcccaaagttgcacttgctggtctcttgggatttggccttggaaaggtat

SEQ ID NO: 392879 - DNA, 120 bp, Artificial Sequence
  ENSG00000145247_4 (sequence is synthesized)
catttttttgaagatcagctccgtggggctggttttggtccacagcataacaggcactgcctccttacctgtgaggaatgcaaaataaagcatggattaagtgagaagggagactctcag

SEQ ID NO: 392880 - DNA, 120 bp, Artificial Sequence
  ENSG00000145247_5 (sequence is synthesized)
ccttcagcttcctaaattctgtgtctgtgactttcgaagttttttaaacctctgaatttgtacacatttaaaatttcaagtgtactttaaaataaaatacttctaatggaacaaaaacat

SEQ ID NO: 392881 - DNA, 120 bp, Artificial Sequence
  ENSG00000145247_6 (sequence is synthesized)
tgtgtctgtcactcactgaaatgtattccgtggaaggctttcaagtgaactaagcgttacatgtttttctgctctttaagaacatgtcggggcatggcgcagtggctcatgcctgtaatc

SEQ ID NO: 392882 - DNA, 61 bp, Artificial Sequence
  ENSG00000145247_7 (sequence is synthesized)
agatttggatcattgcccaaagttgcacgtaagtcatagaaataaaaaagcaagccattga

SEQ ID NO: 392883 - DNA, 120 bp, Artificial Sequence
  ENSG00000145247_8 (sequence is synthesized)
cttgtatctatttttttaaaaagtaataaataaataaaaactttgaaaaaaagacattactagcaactggagatacgaatgtccagcctaactaaactgcctgtattgacttttggaaaa

SEQ ID NO: 392884 - DNA, 120 bp, Artificial Sequence
  ENSG00000145247_9 (sequence is synthesized)
atcagcccctattttctgccactctgcatttcttagttcactcaacactttctgatatacagcttagcagttgggacttcttcttagaccatccttaaagcatggactaagagggactgg

SEQ ID NO: 392885 - DNA, 120 bp, Artificial Sequence
  ENSG00000145247_10 (sequence is synthesized)
gtcttttcaaaatgttttctacgatggatataaaaaatgagtaatttttaagaatcaggggatttctaataatagagtaaccacaaacttggggtttcatcttccttcacctggtatcaa

SEQ ID NO: 392886 - DNA, 120 bp, Artificial Sequence
  ENSG00000145247_11 (sequence is synthesized)
tagatcttttatgtacaaaaaggacacattttagttgatagtctgaaaccacattcattcctagcaggaggaacagattcgagatctcttccataggagggtccctctcctttgtgacct

SEQ ID NO: 392887 - DNA, 120 bp, Artificial Sequence
  ENSG00000145247_12 (sequence is synthesized)
ctctcctataggcaagatggactgaagctctccactactccaaggccataaggaagattaggggcatttctacccagtgatttggaagctacctatagccacaacccagccaccttcccc

SEQ ID NO: 392888 - DNA, 120 bp, Artificial Sequence
  ENSG00000145247_13 (sequence is synthesized)
tgcccccgtggcctcaaccgtttgcttgacaggtgggccctctctggccatctgtctccaggacagcactgtggcttgctctgtcctggcccttccaccaccagtgcaaagttgagatgg

SEQ ID NO: 392889 - DNA, 120 bp, Artificial Sequence
  ENSG00000145247_14 (sequence is synthesized)
ggaagtctccagttcccaatcctgttctttttaaatagagacttcattctcagagtcttcattcattgatttagcgtggtccttttaattttaaaattaccagcgttgatttttaaagct

SEQ ID NO: 392890 - DNA, 120 bp, Artificial Sequence
  ENSG00000145247_15 (sequence is synthesized)
ctagaaaataactaatggagaagattctcaactaatctctcccaacctgcttttacagttgctggtctcttgggatttggccttggaaaggtatcatacataggagtatgccagagtaaa

SEQ ID NO: 392891 - DNA, 120 bp, Artificial Sequence
  ENSG00000145247_16 (sequence is synthesized)
gggcaggggttccggcaagagctgggttccagcctgggttgccaccaacagcgaaagtgactgccaggtggcagtagggtgacttcaccagcttaagtgcttagcgggcaggcgaggggg

SEQ ID NO: 392892 - DNA, 80 bp, Artificial Sequence
  ENSG00000145248_0 (sequence is synthesized)
ggctgcagacctgggagcggagaccggcccgccgcccccgacgccgccgagcacgtcagcggcgcgcagccggggctcgg

SEQ ID NO: 392893 - DNA, 120 bp, Artificial Sequence
  ENSG00000145248_1 (sequence is synthesized)
agaccgacgggcagaacgacgggcggcgactgcggcgaccgcgggacggcgagaggcacgcggcgggaggggaccggaatccgcagctccggccgcgccatggacggcaacgacaacgtg

SEQ ID NO: 392894 - DNA, 120 bp, Artificial Sequence
  ENSG00000145248_2 (sequence is synthesized)
accctgctcttcgcccctctgctgcgggacaactacaccctggcgcccaatgccagcagcctgggccccggcacggacctcgccctcgcccctgcctccagcgccggccccggccctggg

SEQ ID NO: 392895 - DNA, 80 bp, Artificial Sequence
  ENSG00000145248_3 (sequence is synthesized)
ctcagcctcgggccgggtccgagcttcggcttcagccccggccccactccgaccccggagcccacgaccagcggcctcgc

SEQ ID NO: 392896 - DNA, 120 bp, Artificial Sequence
  ENSG00000145248_4 (sequence is synthesized)
ccctgggcgccccacgcgctcccgttctgggacacgccgctgaaccacgggctgaacgtgttcgtgggcgccgccctgtgcatcaccatgctgggcctgggctgcacggtggacgtgaac

SEQ ID NO: 392897 - DNA, 120 bp, Artificial Sequence
  ENSG00000145248_5 (sequence is synthesized)
cacttcggggcgcacgtccgtcggcccgtgggcgcgctgctggcagcgctctgccagttcggcctcctgccgctgctggccttcctgctggccctcgccttcaagctggacgaggtggcc

SEQ ID NO: 392898 - DNA, 120 bp, Artificial Sequence
  ENSG00000145248_6 (sequence is synthesized)
gccgtggcggtgctcctgtgtggctgctgtcccggcggcaatctctccaatcttatgtccctgctggttgacggcgacatgaacctcagcatcatcatgaccatctcctccacgcttctg

SEQ ID NO: 392899 - DNA, 120 bp, Artificial Sequence
  ENSG00000145248_7 (sequence is synthesized)
gccctcgtcttgatgcccctgtgcctgtggatctacagctgggcttggatcaacacccctatcgtgcagttactacccctagggaccgtgaccctgactctctgcagcactctcatacct

SEQ ID NO: 392900 - DNA, 120 bp, Artificial Sequence
  ENSG00000145248_8 (sequence is synthesized)
agtgactctggtggtccttttcataatgaccggcactatgttaggacctgaactgctggcaagtatccctgcagctgtttatgtgatagcaatttttatgcctttggcaggctacgcttc

SEQ ID NO: 392901 - DNA, 120 bp, Artificial Sequence
  ENSG00000145248_9 (sequence is synthesized)
aggttatggtttagctactctcttccatcttccacccaactgcaagaggactgtatgtctggaaacaggtagtcagaatgtgcagctctgtacagccattctaaaactggcctttccacc

SEQ ID NO: 392902 - DNA, 120 bp, Artificial Sequence
  ENSG00000145248_10 (sequence is synthesized)
gcaattcataggaagcatgtacatgtttcctttgctgtatgcacttttccagtctgcagaagcggggatttttgttttaatctataaaatgtatggaagtgaaatgttgcacaagcgaga

SEQ ID NO: 392903 - DNA, 120 bp, Artificial Sequence
  ENSG00000145248_11 (sequence is synthesized)
tcctctagatgaagatgaagatacagatatttcttataaaaaactaaaagaagaggaaatggcagacacttcctatggcacagtgaaagcagaaaatataataatgatggaaaccgctca

SEQ ID NO: 392904 - DNA, 120 bp, Artificial Sequence
  ENSG00000145248_12 (sequence is synthesized)
gacttctctctaaatgtggagatacacaggagcttctatcttgctgaaatattgcttcatatttatagcctgtggtagtgcacatggttaacataaaagataacactggttcacatcata

SEQ ID NO: 392905 - DNA, 120 bp, Artificial Sequence
  ENSG00000145248_13 (sequence is synthesized)
catgtaacaattctgatctttttaaggttcactggtgtattaaccaaacgttgtcacaaattacaaatcaatgctgtaatataatttgcacctggaatggctaacgtgaagcctgaatta

SEQ ID NO: 392906 - DNA, 120 bp, Artificial Sequence
  ENSG00000145248_14 (sequence is synthesized)
aatgtggtttttagtttttaccatcaccaatttctatgactgttgcaaatacagaatctattagaaaacagggtcttggaaatgtagaattttggcgcactatgaggaaaaacaagctat

SEQ ID NO: 392907 - DNA, 120 bp, Artificial Sequence
  ENSG00000145248_15 (sequence is synthesized)
ctttgtaaagcataattgagtttaatgtaattgttgtaaaaaaaaaagtgtgcttgctctacttaaaattcctcacaatgttgaattttgacctgtattcagaagaattccaaaacaggt

SEQ ID NO: 392908 - DNA, 120 bp, Artificial Sequence
  ENSG00000145248_16 (sequence is synthesized)
cagttaaataaggaaatatagtatttgtcaaaccagtatcagagaaaagttacattaatgtatttgattacttgatctggtatctacttattaatgaataatcaacatttttctagtgga

SEQ ID NO: 392909 - DNA, 120 bp, Artificial Sequence
  ENSG00000145248_17 (sequence is synthesized)
tcgccggcaacgtaaaagtaaaatagggctactggcccgtcagagaaagtaatctcacatagagtgcaggattgttgagtccgaccaacaagtagcagtcagcagctttaccatggctta

SEQ ID NO: 392910 - DNA, 120 bp, Artificial Sequence
  ENSG00000145248_18 (sequence is synthesized)
ccttgcagggggcttgcaaggaagaacgttccttcccctcagaatcatccaggctcaatagactttataatgtcgagggcagcagtaccgagacagggggcttgtttttcctccctgcct

SEQ ID NO: 392911 - DNA, 120 bp, Artificial Sequence
  ENSG00000145248_19 (sequence is synthesized)
tgggttcataattccatcggtgttagacgtgctgctctcttggcactctcctcggatgtaggttctgcccagacttcaaccccgggacttgcagtctccccgttccacctctactcaaca

SEQ ID NO: 392912 - DNA, 120 bp, Artificial Sequence
  ENSG00000145283_0 (sequence is synthesized)
acatacatattcagtggtgagtaagaacagaagtggaaagccttacttaccacagtttattatatgtttcatgcctgtgataattacttttataatgccacttgtgaaaaaattgatcag

SEQ ID NO: 392913 - DNA, 120 bp, Artificial Sequence
  ENSG00000145283_1 (sequence is synthesized)
attaggatgaatcaccttgctggccaacagttattggaatgattctccatgtgtgacttcgttgcactattacaaaatgtggcaggatagacctgcccagccattgttgccgatgttcat

SEQ ID NO: 392914 - DNA, 120 bp, Artificial Sequence
  ENSG00000145283_2 (sequence is synthesized)
ttgtaatgctgccttaaggagatgaggagatgagagccaattgttccagcagctcagcctgccctgccaacagttcagaggaggagctgccagtgggactggaggtgcatggaaacctgg

SEQ ID NO: 392915 - DNA, 120 bp, Artificial Sequence
  ENSG00000145283_3 (sequence is synthesized)
agctcgttttcacagtggtgtccactgtgatgatggggctgctcatgttctctttgggatgttccgtggagatccggaagctgtggtcgcacatcaggagaccctggggcattgctgtgg

SEQ ID NO: 392916 - DNA, 120 bp, Artificial Sequence
  ENSG00000145283_4 (sequence is synthesized)
gactgctctgccagtttgggctcatgccttttacagcttatctcctggccattagcttttctctgaagccagtccaagctattgctgttctcatcatgggctgctgcccggggggcacca

SEQ ID NO: 392917 - DNA, 120 bp, Artificial Sequence
  ENSG00000145283_5 (sequence is synthesized)
tctctaacattttcaccttctgggttgatggagatatggatctcagcatcagtatgacaacctgttccaccgtggccgccctgggaatgatgccactctgcatttatctctacacctggt

SEQ ID NO: 392918 - DNA, 120 bp, Artificial Sequence
  ENSG00000145283_6 (sequence is synthesized)
tgaccattcctgtggcctttggtgtctatgtgaattacagatggccaaaacaatccaaaatcattctcaagattggggccgttgttggtggggtcctccttctggtggtcgcagttgctg

SEQ ID NO: 392919 - DNA, 120 bp, Artificial Sequence
  ENSG00000145283_7 (sequence is synthesized)
gtgtggtcctggcgaaaggatcttggaattcagacatcacccttctgaccatcagtttcatctttcctttgattggccatgtcacgggttttctgctggcactttttacccaccagtctt

SEQ ID NO: 392920 - DNA, 120 bp, Artificial Sequence
  ENSG00000145283_8 (sequence is synthesized)
ggcaaaggtgcaggacaatttccttagaaactggagctcagaatattcagatgtgcatcaccatgctccagttatctttcactgctgagcacttggtccagatgttgagtttcccactgg

SEQ ID NO: 392921 - DNA, 120 bp, Artificial Sequence
  ENSG00000145283_9 (sequence is synthesized)
cctatggactcttccagctgatagatggatttcttattgttgcagcatatcagacgtacaagaggagattgaagaacaaacatggaaaaaagaactcaggttgcacagaagtctgccata

SEQ ID NO: 392922 - DNA, 120 bp, Artificial Sequence
  ENSG00000145283_10 (sequence is synthesized)
cgaggaaatcgacttcttccagagagaccaatgccttcttggaggtgaatgaagaaggtgccatcactcctgggccaccagggccaatggattgccacagggctctcgagccagttggcc

SEQ ID NO: 392923 - DNA, 120 bp, Artificial Sequence
  ENSG00000145283_11 (sequence is synthesized)
acatcacttcatgtgaatagcagggactagctggctggactggcccccttctttttcagtggccagtaaagacagtgtgcagctgacacatgaatcttgttggtagggccagtgtgaata

SEQ ID NO: 392924 - DNA, 120 bp, Artificial Sequence
  ENSG00000145283_12 (sequence is synthesized)
tttaagtgttcaatgttagaatatttatattttcatgtggattgtgaattgtgatgggatcacttttggagattcccatttcagggagtttcttctgggggttaacataacgtatcaatg

SEQ ID NO: 392925 - DNA, 120 bp, Artificial Sequence
  ENSG00000145284_0 (sequence is synthesized)
ctcgcggccgagttcagcccgggcagccatatgggggatacgccagcaacagacgccggccgccaagatctgcatccctaggccacgctaagaccctggggaagagcgcaggagcccggg

SEQ ID NO: 392926 - DNA, 120 bp, Artificial Sequence
  ENSG00000145284_1 (sequence is synthesized)
agaagggctggaaggaggggactggacgtgcggagaattcccccctaaaaggcagaagcccccgcccccaccctcgagctccgctcgggcagagcgcctgcctgcctgccgctgctgcgg

SEQ ID NO: 392927 - DNA, 120 bp, Artificial Sequence
  ENSG00000145284_2 (sequence is synthesized)
gcgcccacctcgcccagccatgccaggcccggccaccgacgcggggaagatccctttctgcgacgccaaggaagaaatccgtgccgggctcgaaagctctgagggcggcggcggcccgga

SEQ ID NO: 392928 - DNA, 120 bp, Artificial Sequence
  ENSG00000145284_3 (sequence is synthesized)
gaggccaggcgcgcgcgggcagcggcagaacatcgtctggaggaatgtcgtcctgatgagcttgctccacttgggggccgtgtactccctggtgctcatccccaaagccaagccactcac

SEQ ID NO: 392929 - DNA, 120 bp, Artificial Sequence
  ENSG00000145284_4 (sequence is synthesized)
tctgctctgggcctacttctgcttcctcctggccgctctgggtgtgacagctggtgcccatcgcttgtggagccacaggtcctaccgggccaagctgcctctgaggatatttctggctgt

SEQ ID NO: 392930 - DNA, 120 bp, Artificial Sequence
  ENSG00000145284_5 (sequence is synthesized)
cgccaactccatggctttccagaatgacatcttcgagtggtccagggaccaccgagcccaccacaagtactcagagacggatgctgacccccacaatgcccgccggggcttcttcttctc

SEQ ID NO: 392931 - DNA, 120 bp, Artificial Sequence
  ENSG00000145284_6 (sequence is synthesized)
ccatattgggtggctgtttgttcgcaagcatcgagatgttattgagaaggggagaaagcttgacgtcactgacctgcttgctgatcctgtggtccggatccagagaaagtactataagat

SEQ ID NO: 392932 - DNA, 120 bp, Artificial Sequence
  ENSG00000145284_7 (sequence is synthesized)
ctccgtggtgctcatgtgctttgtggtccccacgctggtgccctggtacatctggggagagagtctgtggaattcctacttcttggcctctattctccgctataccatctcactcaacat

SEQ ID NO: 392933 - DNA, 120 bp, Artificial Sequence
  ENSG00000145284_8 (sequence is synthesized)
cagctggctggtcaacagcgccgcccacatgtatggaaaccggccctatgacaagcacatcagccctcggcagaacccactcgtcgctctgggtgccattggtgaaggcttccataatta

SEQ ID NO: 392934 - DNA, 120 bp, Artificial Sequence
  ENSG00000145284_9 (sequence is synthesized)
ccatcacacctttccctttgactactctgcgagtgaatttggcttaaattttaacccaaccacctggttcattgatttcatgtgctggctggggctggccactgaccgcaaacgggcaac

SEQ ID NO: 392935 - DNA, 120 bp, Artificial Sequence
  ENSG00000145284_10 (sequence is synthesized)
caagccgatgatcgaggcccggaaggccaggactggagacagcagtgcttgaacttggaacagccatcccacatgtctgccgttgcaacctcggttcatggctttggttacaatagctct

SEQ ID NO: 392936 - DNA, 120 bp, Artificial Sequence
  ENSG00000145284_11 (sequence is synthesized)
cttgtacattggatcgtgggagggggcagagggtggggaaggaacgagtcaatgtggtttgggaatgtttttgtttatctcaaaataatgttgaaatacaattatcaatgaaaaaacttt

SEQ ID NO: 392937 - DNA, 120 bp, Artificial Sequence
  ENSG00000145284_12 (sequence is synthesized)
cctgcctcagcctcccgagtagctgggagccagcgcgcccagcctaaaaaacttttcaagtcaatattactacgatttaacattagagtgtggacatgtgatttaatcgctatagctaaa

SEQ ID NO: 392938 - DNA, 120 bp, Artificial Sequence
  ENSG00000145284_13 (sequence is synthesized)
tgtgatttaatcgctatagctaaaatacgtcaaatatacgttgtcatgtgcttgaacatgatgctaaccctgacaggatgaaggaaagtaatattctttcagtgtagttcaggagagcat

SEQ ID NO: 392939 - DNA, 120 bp, Artificial Sequence
  ENSG00000145284_14 (sequence is synthesized)
ttgttttcttttctaccaattaacccatcattgcttttaaacaaccatctgaaggagcagagaggcagggtagaagacagaagggggatctatgtggtaactaaagaatgtttctgtttt

SEQ ID NO: 392940 - DNA, 120 bp, Artificial Sequence
  ENSG00000145284_15 (sequence is synthesized)
gttaattattgtgtgtgtgtggttttattgtttgcttaagagaatcaaaaactgaaaaaaatgagaatacaggaaatggctcttgtttatttttttgctgtgtttacagcttgttaatgc

SEQ ID NO: 392941 - DNA, 120 bp, Artificial Sequence
  ENSG00000145284_16 (sequence is synthesized)
tctactgtctttgtttcaagagagatttgttcactgcccagctcgttttgtgtcctgagccctatggccagcccaccttataaatcatgcctgtttagatgtttgattttgttctgtttg

SEQ ID NO: 392942 - DNA, 120 bp, Artificial Sequence
  ENSG00000145284_17 (sequence is synthesized)
ctattgttatcttaaaggtgtataactctgacatgccagacatcaaattaagctcaaattaagctctcgtttaaatgtttaagcacctaatttatattctaattgatcccagccactgat

SEQ ID NO: 392943 - DNA, 120 bp, Artificial Sequence
  ENSG00000145284_18 (sequence is synthesized)
gcatgtactttagctacttctgctaaataagcatattaattttccacatcagaccatcagatcttgagaaccaacagttatctagaattccgtgtctactaatgtttcacctgcatgcag

SEQ ID NO: 392944 - DNA, 120 bp, Artificial Sequence
  ENSG00000145284_19 (sequence is synthesized)
ccttcattaattttgtagcaaaatataaagtgatcattatgtagcttctggattaaaaaaatttgtgtgtgaagttgctttgtaaagtgcatgtggaattaatgggacagtgtgcccttt

SEQ ID NO: 392945 - DNA, 120 bp, Artificial Sequence
  ENSG00000145284_20 (sequence is synthesized)
gtgttagatgttagagcaaaagaaagggcttatagtgttagtattggagcactttgaagatagatattttcagaaaagatgtaggatttaaaagttaaattttaaattttagaaaaagat

SEQ ID NO: 392946 - DNA, 120 bp, Artificial Sequence
  ENSG00000145284_21 (sequence is synthesized)
atgatggcaattggaaatagtcacaatgaagttcttcatccagtaggtgtttaacagtgttattttgccactggtaatgtgtaaactgtgagtgatttacaataaatgattatgaattca

SEQ ID NO: 392947 - DNA, 120 bp, Artificial Sequence
  ENSG00000145284_22 (sequence is synthesized)
tcaagaggcagcgtgtgagatgcttcgtgaatggcatcaagggcatatattgaaagtcacccttcccggattacacattttagctttgttacatactcattgtaaccactccgaaaagtg

SEQ ID NO: 392948 - DNA, 120 bp, Artificial Sequence
  ENSG00000145284_23 (sequence is synthesized)
gcttggtgataacgtatagaataacagacggggactccacacccaggccttttttaacggtgtgaagcatagacagagctgcagtctgtgctaacattaggttatttattgattcaatca

SEQ ID NO: 392949 - DNA, 120 bp, Artificial Sequence
  ENSG00000145284_24 (sequence is synthesized)
gttgacacaaggaggcagctacggggaggtaaaatatggtcctaaaatcaaaaagatttcagttttgtcattctgtctctgagattctatttccacatctagagcagggtaataatgata

SEQ ID NO: 392950 - DNA, 120 bp, Artificial Sequence
  ENSG00000145284_25 (sequence is synthesized)
cctaccttacaaaattattgggagaatacattagttaatatatgtgaaagtatggaggagatgtgcaataaatatttgtgttattaactacacatacagcactctataggagatattcca

SEQ ID NO: 392951 - DNA, 120 bp, Artificial Sequence
  ENSG00000145284_26 (sequence is synthesized)
tttataaaaactttaggttctaaaaacctgtacacgttgattatttttgtaagtcaaaagtgattaagaggagtttaagctatcatttccagatgtatttctataaataaaaacataagt

SEQ ID NO: 392952 - DNA, 80 bp, Artificial Sequence
  ENSG00000145284_27 (sequence is synthesized)
tatcatttccagatgtatttctataaataaaaacataagtatattcagttgatttggggtggagagttccatagatgtct

SEQ ID NO: 392953 - DNA, 120 bp, Artificial Sequence
  ENSG00000145284_28 (sequence is synthesized)
tatttttttttttttttttgcttgataaatattcctgtatccctttattttgagcctatatgtgtctttgcacgtgaggtgggtctcctgaatacagcacaccgatgggttttgactcta

SEQ ID NO: 392954 - DNA, 120 bp, Artificial Sequence
  ENSG00000145287_0 (sequence is synthesized)
gcgtctgaaactgttctatgtactatgccctgcgatagaaacacagttacctctcccctttcacgtagttttcatttgtggtgagattctctcccaggccacaagacatttcctgctcgg

SEQ ID NO: 392955 - DNA, 120 bp, Artificial Sequence
  ENSG00000145287_1 (sequence is synthesized)
aaccttgtttactaatttccactgcttttaaggccctgcactgaaaatgcaagctcaggcgccggtggtcgttgtgacccaacctggagtcggtcccggtccggccccccagaactccaa

SEQ ID NO: 392956 - DNA, 120 bp, Artificial Sequence
  ENSG00000145287_2 (sequence is synthesized)
ctggcagacaggcatgtgtgactgtttcagcgactgcggagtctgtctctgtggcacattttgtttcccgtgccttgggtgtcaagttgcagctgatatgaatgaatgctgtctgtgtgg

SEQ ID NO: 392957 - DNA, 120 bp, Artificial Sequence
  ENSG00000145287_3 (sequence is synthesized)
aacaagcgtcgcaatgaggactctctacaggacccgatatggcatccctggatctatttgtgatgactatatggcaactctttgctgtcctcattgtactctttgccaaatcaagagaga

SEQ ID NO: 392958 - DNA, 120 bp, Artificial Sequence
  ENSG00000145287_4 (sequence is synthesized)
tatcaacagaaggagagccatgcgtactttctaaaaactgatggtgaaaagctcttaccgaagcaacaaaattcagcagacacctcttcagcttgagttcttcaccatcttttgcaactg

SEQ ID NO: 392959 - DNA, 120 bp, Artificial Sequence
  ENSG00000145287_5 (sequence is synthesized)
aaatatgatggatatgcttaagtacaactgatggcatgaaaaaaatcaaatttttgatttattataaatgaatgttgtccctgaacttagctaaatggtgcaacttagtttctccttgct

SEQ ID NO: 392960 - DNA, 120 bp, Artificial Sequence
  ENSG00000145287_6 (sequence is synthesized)
tatcgaattcgaatttcctggcttataaactttttaaattacatttgaaatataaaccaaatgaaatattttactgataagattcttcatgcttctttgctctccttaaaatgtcttttt

SEQ ID NO: 392961 - DNA, 89 bp, Artificial Sequence
  ENSG00000145287_7 (sequence is synthesized)
gattcttcatgcttctttgctctccttaaaatgtctttttcactagttagttccaagggtcagtctcataattttgttcttatacaata

SEQ ID NO: 392962 - DNA, 90 bp, Artificial Sequence
  ENSG00000145287_8 (sequence is synthesized)
ccgcgtccagcctagagttgggggtcttgggcctctagcaagcctctcatctcagcctcccaaggtgctggaattacaggtgtgagccac

SEQ ID NO: 392963 - DNA, 88 bp, Artificial Sequence
  ENSG00000145287_9 (sequence is synthesized)
agatactttggtttcttagcaggagattttggttcacagtaacccagctctctttcatctaagaactttagatgagaaaaaaaaaaaa

SEQ ID NO: 392964 - DNA, 120 bp, Artificial Sequence
  ENSG00000145287_10 (sequence is synthesized)
gggtcccagagctgggctggcgggaggcgtaatccggcggggtgagggttgatcgaagagccccgcgcgcagctgccgctcacagccccttcccgagtgcagagcgggcagagaagtcca

SEQ ID NO: 392965 - DNA, 120 bp, Artificial Sequence
  ENSG00000145287_11 (sequence is synthesized)
aaatatcactaaagactttgtcaattatttgttgttttgaataattcagcaataactatttcttaagtctcctgaagtgctatcataatatcaagattggctttaattttcttcttatga

SEQ ID NO: 392966 - DNA, 120 bp, Artificial Sequence
  ENSG00000145287_12 (sequence is synthesized)
agaagatagctctatactttgaaaccatattttagtaaataaaggaatggtgaattttctaaacttctcagaattctggtgatctattaaggaagcacttaccacttgtaaaataccaga

SEQ ID NO: 392967 - DNA, 120 bp, Artificial Sequence
  ENSG00000145287_13 (sequence is synthesized)
gtatggtgagatacaaaagaattagaaaacatgttccctgctaagacaaacaagttgacaaaaggaattcgtaaataattataaaatagaagagtaaagaaaataacattctgtatgata

SEQ ID NO: 392968 - DNA, 120 bp, Artificial Sequence
  ENSG00000145287_14 (sequence is synthesized)
tttggattgattgtggcataaagcatctatcatagcaaggtgaggttaaatagaaaactcctgttggagaagctgaactttgaaagaggtgaacatagaatttagaatgtttggaaatgt

SEQ ID NO: 392969 - DNA, 120 bp, Artificial Sequence
  ENSG00000145287_15 (sequence is synthesized)
tatatagaattaaccatctgaaattcaatcaagtcattttcaactaatttttctcaggactatctattgaggatgtagttaagtagaaatcaacatgacttactccatcccctgtagaat

SEQ ID NO: 392970 - DNA, 120 bp, Artificial Sequence
  ENSG00000145287_16 (sequence is synthesized)
aataactcttgggagatacgtaaaaaaatgttcatttacttagcaagtaatgtattaaggatctaggatcaagtatatattatcttagcaactaatgtatcaatgtatcaatatctaaga

SEQ ID NO: 392971 - DNA, 120 bp, Artificial Sequence
  ENSG00000145287_17 (sequence is synthesized)
ctaggtaagatactgttaggtattgtagtagggttggggagcaagataaataagctagtccctctgtcattatagaatttatacgaaaaagggggattagacaaacccctaactaaaatg

SEQ ID NO: 392972 - DNA, 120 bp, Artificial Sequence
  ENSG00000145287_18 (sequence is synthesized)
cagaattcaattaatgcctatagacaaagcggtattttatgttcagaggaggaaaagatcacatcttgtaagatgtataggtgaaagtttcttgaaagcagtgatttttaattctaaagg

SEQ ID NO: 392973 - DNA, 120 bp, Artificial Sequence
  ENSG00000145287_19 (sequence is synthesized)
ggaagtgcgtattagttctcaacaagaaacagatggcactcaaactgtgatagttcaaagatttaatgaagactaattataaaggtgtgggtggggcattgtagggagatgacaagggat

SEQ ID NO: 392974 - DNA, 120 bp, Artificial Sequence
  ENSG00000145287_20 (sequence is synthesized)
ggcataataacctgcctggcaacagccccagggaggagaagagggagcagtgacctgaatccttaaggagagagctgtgtgaagaggcctgccctgaaagaaacagtatcctctcaagag

SEQ ID NO: 392975 - DNA, 120 bp, Artificial Sequence
  ENSG00000145287_21 (sequence is synthesized)
agggttgtgagcagcccgaggcaacccatagaactgaaaaagtaccctgacctcactttcggatgtccttctggttttcccattggctgaacccaccagaaaggcagagggcagcaaagt

SEQ ID NO: 392976 - DNA, 120 bp, Artificial Sequence
  ENSG00000145287_22 (sequence is synthesized)
gtcacggtagtccgcaggtcgcttcccagggcacacagcaggatggtcaagggagtaagtaaatcagataggggcaaacagaggatcactgactcaagatgtggttttaattaatagaaa

SEQ ID NO: 392977 - DNA, 65 bp, Artificial Sequence
  ENSG00000145287_23 (sequence is synthesized)
gaggatcactgactcaagatgtggttttaattaatagaaatggaggctgctgcttgaacccagga

SEQ ID NO: 392978 - DNA, 120 bp, Artificial Sequence
  ENSG00000145287_24 (sequence is synthesized)
atttacttctgtctgtatcaggaaacagaggcctgggtctagagacagggtcttggtgagggaaggactcaaaaccatgggatacagcatgaccgggcagcaccacagctgtggaaggag

SEQ ID NO: 392979 - DNA, 73 bp, Artificial Sequence
  ENSG00000145287_25 (sequence is synthesized)
gatacagcatgaccgggcagcaccacagctgtggaaggagtttccctgcacaagttctcttctgttgtctgcc

SEQ ID NO: 392980 - DNA, 120 bp, Artificial Sequence
  ENSG00000145287_26 (sequence is synthesized)
caaggtccctacgggcacagaatttaagaaggcactcactcttgatgaaactggaggaccaaaattttaaactatgggatcagaaattcaaagactatgaataaaaatttcaaaagaaag

SEQ ID NO: 392981 - DNA, 120 bp, Artificial Sequence
  ENSG00000145287_27 (sequence is synthesized)
aaatagtaataccaccaataagaagaataattaaaaaggtacaaagaaattggatgcaacattgtaaaaagagccatagtttggagctgagctgacatgagctaaaatcctagtccactg

SEQ ID NO: 392982 - DNA, 120 bp, Artificial Sequence
  ENSG00000145293_0 (sequence is synthesized)
gtctcgggctcctgccccgtcctgctcacgagttcagggctcctgggcggccgccttttccagttccaggtgtgcagaagtgtcctctccccacgcgcggcgggctgcacttggtcgctg

SEQ ID NO: 392983 - DNA, 120 bp, Artificial Sequence
  ENSG00000145293_1 (sequence is synthesized)
gctccgagatcgcgcggggccgccggaagcccaagacggtaccgggggccgcagccgcagccggcgccgccctccgccctccccaacagcaggccgagtcccgtagcatccggtagggaa

SEQ ID NO: 392984 - DNA, 120 bp, Artificial Sequence
  ENSG00000145293_2 (sequence is synthesized)
atggtcgtgctttcggtccccgccgaagtcaccgtgatcctgttagatatcgaaggtaccacaaccccgattgctttcgtgaaggacattttatttccttacatcgaagaaaatgttaaa

SEQ ID NO: 392985 - DNA, 120 bp, Artificial Sequence
  ENSG00000145293_3 (sequence is synthesized)
gagtatctgcagacacattgggaagaagaggagtgccagcaggatgtcagtcttttgaggaaacaggctgaagaggacgcccacctggatggggctgttcctatccctgcagcatctggg

SEQ ID NO: 392986 - DNA, 120 bp, Artificial Sequence
  ENSG00000145293_4 (sequence is synthesized)
aatggagtggatgatctgcaacagatgatccaggccgtggtagataatgtgtgctggcagatgtccctggatcgaaagaccactgcactcaaacagctgcagggccacatgtggagggcg

SEQ ID NO: 392987 - DNA, 120 bp, Artificial Sequence
  ENSG00000145293_5 (sequence is synthesized)
gcattcacagctgggcgcatgaaagcagagttctttgcagatgtagttccagcagtcaggaagtggagagaggccggaatgaaggtgtacatctattcctcagggagtgtggaggcacag

SEQ ID NO: 392988 - DNA, 120 bp, Artificial Sequence
  ENSG00000145293_6 (sequence is synthesized)
aaactgttattcgggcattctacggagggagatattcttgagcttgttgatggtcactttgataccaagattggacacaaagtagagagtgaaagttaccgaaagattgcagacagcatt

SEQ ID NO: 392989 - DNA, 120 bp, Artificial Sequence
  ENSG00000145293_7 (sequence is synthesized)
gggtgctcaaccaacaacattttgtttctgacagatgttactcgagaggccagtgctgctgaggaagcagatgtgcacgtagctgtggtggtgagaccaggcaacgcaggattaacagat

SEQ ID NO: 392990 - DNA, 120 bp, Artificial Sequence
  ENSG00000145293_8 (sequence is synthesized)
tatacctgccttcctcaacctagagaagggttgttaaggcagaccgccctgttccccagagttgtccctgtagtgtctaggtttattctaatggtaaaagtaacttacttaaaaaacata

SEQ ID NO: 392991 - DNA, 120 bp, Artificial Sequence
  ENSG00000145293_9 (sequence is synthesized)
tgtacacatatgtatgcaagtatgtatatatgtgtatgctcagattaacttccataggtacataagtgaaagaagtctcagttcagtgaacacaaaacttatttaaagatgctttatatg

SEQ ID NO: 392992 - DNA, 120 bp, Artificial Sequence
  ENSG00000145293_10 (sequence is synthesized)
tagaaattgtttcaaatcatactctaacccttagtgagggcaaagtgtagttggtagaagaaattgctaaatacctatctaatgtgctatgtttatcaaatcgtgtactaaaatggaaag

SEQ ID NO: 392993 - DNA, 120 bp, Artificial Sequence
  ENSG00000145293_11 (sequence is synthesized)
ctagttttgagaaattattcagaagccttgttattttaaaaatgaaatatttcaaagactgaatattttcaaagaaaatgaataattcattgcccttgtgatttagaagattataacagc

SEQ ID NO: 392994 - DNA, 120 bp, Artificial Sequence
  ENSG00000145293_12 (sequence is synthesized)
tgtatttcatatttgcctccttatatatatcaaagaccaaggtatttccttctgcttcaaaagaacaaaattgggaaagaaaactcacttgagtcttgatcaaacaagtgtcttttactt

SEQ ID NO: 392995 - DNA, 120 bp, Artificial Sequence
  ENSG00000145293_13 (sequence is synthesized)
aagaagaaacttggtaatcattgtggcacccacagcaagcagttgccttaccagtgaaaaaggtgcactgaggtaacatctaaaacagagatgtggttcttaatgtttaacagaacagtt

SEQ ID NO: 392996 - DNA, 120 bp, Artificial Sequence
  ENSG00000145293_14 (sequence is synthesized)
ctaatcctgccacgtgttatcattatagattttatagttgcctttctaactacttagcacagtttgagaatacgttaattgctatttactatttaaaaagttttactgaaatcagtccat

SEQ ID NO: 392997 - DNA, 120 bp, Artificial Sequence
  ENSG00000145293_15 (sequence is synthesized)
aacattaagatgagccctaatatgtaagattttcctctggaatggatgtgagaaatgtaaattttataacagcagtatttatcctggtttaattctaatacgatgtcatgttaatttcat

SEQ ID NO: 392998 - DNA, 120 bp, Artificial Sequence
  ENSG00000145293_16 (sequence is synthesized)
gttgtgattaataaaagcattttttcttcactcagttttatataggttcctgaactctatccacatgccgccatagcaaaagagaaactgaaaaacaagaatatttagctcttatcttaa

SEQ ID NO: 392999 - DNA, 120 bp, Artificial Sequence
  ENSG00000145309_0 (sequence is synthesized)
agagataccactgagtccagaagcaagacctgtgagagtgcacagtgccacttcgccccatggctgaagatggtttgcccaaaatttattctcatcctccaacagaaagcagtaaaacac

SEQ ID NO: 393000 - DNA, 120 bp, Artificial Sequence
  ENSG00000145309_1 (sequence is synthesized)
caactgcagcaaccattttctttggggctgacaatgctattcccaaatcagaaacaactattacttcagaaggagaccacgtcacttcagtaaatgaatatatgctagaaagcgattttt

SEQ ID NO: 393001 - DNA, 120 bp, Artificial Sequence
  ENSG00000145309_2 (sequence is synthesized)
caacaactacagacaacaaactgacagctaaaaaggaaaaactcaaatcagaagatgatatggggaccgactttattaagtcaacaactcacctacagaaagaaattacctctctgactg

SEQ ID NO: 393002 - DNA, 120 bp, Artificial Sequence
  ENSG00000145309_3 (sequence is synthesized)
gcactacaaactccataacaagagactctattaccgaacatttcatgccagtgaaaattgggaatatttcatcaccagttactactgtttctttaatagatttttccactgacatagcaa

SEQ ID NO: 393003 - DNA, 120 bp, Artificial Sequence
  ENSG00000145309_4 (sequence is synthesized)
aagaagatatcctcttagctaccattgacacaggagatgcagagatctcaataacctctgaagtctctggcacactaaaggacagcagtgctggtgttgctgacgctcctgcctttccac

SEQ ID NO: 393004 - DNA, 120 bp, Artificial Sequence
  ENSG00000145309_5 (sequence is synthesized)
gtaaaaaggatgaagctgatatgagcaattataattcctccatcaaatccaatgtccctgctgatgaggctgtccaggtcactgattccactattcctgaggctgaaatccctcctgctc

SEQ ID NO: 393005 - DNA, 120 bp, Artificial Sequence
  ENSG00000145309_6 (sequence is synthesized)
ttagaagatgacaccagtgctgtggctacattaactgactctgatgagaagtttatcactgtgtttgaactcactacctctgctgaaaaagacaaagataaacgggaagatactctgcta

SEQ ID NO: 393006 - DNA, 120 bp, Artificial Sequence
  ENSG00000145309_7 (sequence is synthesized)
actgatgaagaaactaccgagggagccagtatttggatggagagagatactgcaaatgaagcagagacccattctgttttgcttactgctgttgaatccagatatgacttcgttgtccct

SEQ ID NO: 393007 - DNA, 120 bp, Artificial Sequence
  ENSG00000145309_8 (sequence is synthesized)
gcatcaatagctacaaacctagtggaagaatcatctacagaagaagatttgtctgaaactgataatacagagactgtacctaagatcactgagccattttctggaactacctctgtatta

SEQ ID NO: 393008 - DNA, 120 bp, Artificial Sequence
  ENSG00000145309_9 (sequence is synthesized)
gataccccagactataaggaagacacctccacaactgaaacggatatctttgaactactgaaagaagaacccgatgagttcatgatttaaaagcaacaaaagggataccatgtagaattg

SEQ ID NO: 393009 - DNA, 120 bp, Artificial Sequence
  ENSG00000145309_10 (sequence is synthesized)
tgcaatagtctagccagctagccttaacatctaagaaatttttccaacaagcaaaaacctttagaaatgaaagaatgtgggcatttaaggtcttaaacactgaatatcacactcttctta

SEQ ID NO: 393010 - DNA, 120 bp, Artificial Sequence
  ENSG00000145309_11 (sequence is synthesized)
tgactcttgttagcgattcaaggacataaatcttcattcttttctggcacagactacttaaatgggtctgttttcactttgctcatttttcttcaataaatctttttggcaagcaactga

SEQ ID NO: 393011 - DNA, 120 bp, Artificial Sequence
  ENSG00000145321_0 (sequence is synthesized)
accacttttacatggtcacctacaggagagaggaggtgctgcaagactctctggtagaaaaatgaagagggtcctggtactactgcttgctgtggcatttggacatgctttagagagagg

SEQ ID NO: 393012 - DNA, 120 bp, Artificial Sequence
  ENSG00000145321_1 (sequence is synthesized)
ccgggattatgaaaagaataaagtctgcaaggaattctcccatctgggaaaggaggacttcacatctctgtcactagtcctgtacagtagaaaatttcccagtggcacgtttgaacaggt

SEQ ID NO: 393013 - DNA, 120 bp, Artificial Sequence
  ENSG00000145321_2 (sequence is synthesized)
cagccaacttgtgaaggaagttgtctccttgaccgaagcctgctgtgcggaaggggctgaccctgactgctatgacaccaggacctcagcactgtctgccaagtcctgtgaaagtaattc

SEQ ID NO: 393014 - DNA, 120 bp, Artificial Sequence
  ENSG00000145321_3 (sequence is synthesized)
tccattccccgttcacccaggcactgctgagtgctgcaccaaagagggcctggaacgaaagctctgcatggctgctctgaaacaccagccacaggaattccctacctacgtggaacccac

SEQ ID NO: 393015 - DNA, 120 bp, Artificial Sequence
  ENSG00000145321_4 (sequence is synthesized)
aaatgatgaaatctgtgaggcgttcaggaaagatccaaaggaatatgctaatcaatttatgtgggaatattccactaattacggacaagctcctctgtcacttttagtcagttacaccaa

SEQ ID NO: 393016 - DNA, 120 bp, Artificial Sequence
  ENSG00000145321_5 (sequence is synthesized)
gagttatctttctatggtagggtcctgctgtacctctgcaagcccaactgtatgctttttgaaagagagactccagcttaaacatttatcacttctcaccactctgtcaaatagagtctg

SEQ ID NO: 393017 - DNA, 120 bp, Artificial Sequence
  ENSG00000145321_6 (sequence is synthesized)
ctcacaatatgctgcttatggggagaagaaatcaaggctcagcaatctcataaagttagcccaaaaagtgcctactgctgatctggaggatgttttgccactagctgaagatattactaa

SEQ ID NO: 393018 - DNA, 120 bp, Artificial Sequence
  ENSG00000145321_7 (sequence is synthesized)
tctccaaatgctgtgagtctgcctctgaagattgcatggccaaagagctgcctgaacacacagtaaaactctgtgacaatttatccacaaagaattctaagtttgaagactgttgtcaag

SEQ ID NO: 393019 - DNA, 120 bp, Artificial Sequence
  ENSG00000145321_8 (sequence is synthesized)
aaaaaacagccatggacgtttttgtgtgcacttacttcatgccagctgcccaactccccgagcttccagatgtagagttgcccacaaacaaagatgtgtgtgatccaggaaacaccaaag

SEQ ID NO: 393020 - DNA, 120 bp, Artificial Sequence
  ENSG00000145321_9 (sequence is synthesized)
tcatggataagtatacatttgaactaagcagaaggactcatcttccggaagtattcctcagtaaggtacttgagccaaccctaaaaagccttggtgaatgctgtgatgttgaagactcaa

SEQ ID NO: 393021 - DNA, 120 bp, Artificial Sequence
  ENSG00000145321_10 (sequence is synthesized)
ctacctgttttaatgctaagggccctctactaaagaaggaactatcttctttcattgacaagggacaagaactatgtgcagattattcagaaaatacatttactgagtacaagaaaaaac

SEQ ID NO: 393022 - DNA, 120 bp, Artificial Sequence
  ENSG00000145321_11 (sequence is synthesized)
tggcagagcgactaaaagcaaaattgcctgatgccacacccacggaactggcaaagctggttaacaagcactcagactttgcctccaactgctgttccataaactcacctcctctttact

SEQ ID NO: 393023 - DNA, 120 bp, Artificial Sequence
  ENSG00000145321_12 (sequence is synthesized)
gtgattcagagattgatgctgaattgaagaatatcctgtagtcctgaagcatgtttattaactttgaccagagttggagccacccaggggaatgatctctgatgacctaacctaagcaaa

SEQ ID NO: 393024 - DNA, 120 bp, Artificial Sequence
  ENSG00000145321_13 (sequence is synthesized)
accactgagcttctgggaagacaactaggatactttctactttttctagctacaatatcttcatacaatgacaagtatgatgatttgctatcaaaataaattgaaatataatgcaaacca

SEQ ID NO: 393025 - DNA, 120 bp, Artificial Sequence
  ENSG00000145321_14 (sequence is synthesized)
actgttttttcaaagagattgcttactccaccaggagaatgatatctacctattctaccactggtgatgatctggactagtccaactggtaggaaatgctgtggtcttggagtgaggaga

SEQ ID NO: 393026 - DNA, 120 bp, Artificial Sequence
  ENSG00000145321_15 (sequence is synthesized)
aaaatataacagaatgtcataaaattgtggcctgttatgagagaagagctagaaaggcccccaaaatatgaaattgcatatagacattgagaaaatacgactttcattgtaggccacgtg

SEQ ID NO: 393027 - DNA, 120 bp, Artificial Sequence
  ENSG00000145331_0 (sequence is synthesized)
gtttgctggctgggagcctagaagggatagtgggcgaggctccgccccgtggtggggcgctttccgtcggcgtgtgttttggggttgccatcggcccgtagtatgtgaaaagtgagtttg

SEQ ID NO: 393028 - DNA, 120 bp, Artificial Sequence
  ENSG00000145331_1 (sequence is synthesized)
caaagaatcagtgggaaatctgtactctaaagggccggaaagcgtgttatggccctgccacttcgtggctagagaccgtgggctttacctctttaaagctgccttacctcatttttcctg

SEQ ID NO: 393029 - DNA, 120 bp, Artificial Sequence
  ENSG00000145331_2 (sequence is synthesized)
caaagggctgacgtcgctgaactctctgaaatgtagagagcccgaggggaagttgctgcagaggcaccaaataatgtcatctgaaatgttgccagcatttattgaaacttctaatgttga

SEQ ID NO: 393030 - DNA, 120 bp, Artificial Sequence
  ENSG00000145331_3 (sequence is synthesized)
caaaaagcaaggcataaatgaagatcaagaggagagccagaagccaagattaggtgaagggtgtgaaccaatatctaaacgacaaatgaaaaaactaataaaacagaaacaatgggaaga

SEQ ID NO: 393031 - DNA, 120 bp, Artificial Sequence
  ENSG00000145331_4 (sequence is synthesized)
gcaacgggaactccgcaaacaaaagcgaaaagaaaaacgcaagaggaaaaaattagagcgacaatgtcaaatggaaccaaactcagatggacatgacagaaaacgtgttcgaagagatgt

SEQ ID NO: 393032 - DNA, 120 bp, Artificial Sequence
  ENSG00000145331_5 (sequence is synthesized)
tgttcatagcacccttcgccttattattgactgtagttttgatcacttgatggtattaaaggacattaagaaacttcataagcagattcaacgatgttacgcagaaaaccgacgggcact

SEQ ID NO: 393033 - DNA, 120 bp, Artificial Sequence
  ENSG00000145331_6 (sequence is synthesized)
gcatcctgtgcagttttacttgacaagccacggaggccagctgaaaaagaacatggatgaaaatgacaaaggatgggtcaactggaaggatatccatatcaaaccagagcactatagtga

SEQ ID NO: 393034 - DNA, 120 bp, Artificial Sequence
  ENSG00000145331_7 (sequence is synthesized)
actcataaagaaagaagacctgatttaccttacgtcagattcacctaatatactgaaggaattagatgaatcaaaggcctatgtgattggaggattagtagatcacaaccatcacaaggg

SEQ ID NO: 393035 - DNA, 120 bp, Artificial Sequence
  ENSG00000145331_8 (sequence is synthesized)
actcacatataaacaagcgtcagattatggaatcaatcatgcacagctcccacttggaaattttgtgaagatgaatagtcgaaaagttttggcagttaatcatgtgtttgaaattattct

SEQ ID NO: 393036 - DNA, 120 bp, Artificial Sequence
  ENSG00000145331_9 (sequence is synthesized)
ggaatacctggaaacaagagactggcaagaagcattttttactatcttgccccaacggaaaggagctgttcccacagacaaagcctgtgaaagtgcttctcatgacaatcagtctgtcag

SEQ ID NO: 393037 - DNA, 120 bp, Artificial Sequence
  ENSG00000145331_10 (sequence is synthesized)
gatggaggaaggtggatcggacagtgattccagtgaggaggaatatagcagaaatgaactagattcaccacatgaagaaaagcaggataaggaaaatcacactgaatctacagtgaactc

SEQ ID NO: 393038 - DNA, 120 bp, Artificial Sequence
  ENSG00000145331_11 (sequence is synthesized)
tctgccacactaatgttacctggtttccttttagtttaaggaaaaattaggagaaagtgaggtgctatatagaatattgaaattggaagaacattttattttctcttatttctgttgtga

SEQ ID NO: 393039 - DNA, 120 bp, Artificial Sequence
  ENSG00000145331_12 (sequence is synthesized)
tttttaaaaacttttttttggacctaaataataataaaaaaaaaagccctttaaactttgtaaggaaatattttttgattttgcgtaagaagatttaaatgtgtatgtgattttttttgt

SEQ ID NO: 393040 - DNA, 120 bp, Artificial Sequence
  ENSG00000145331_13 (sequence is synthesized)
ttttgtttttaaagcctcagtagtttctagataattttactgtattagtatattttcattttctttcattttatattctttagaatgtgccttctgacctttcagttttttaattttata

SEQ ID NO: 393041 - DNA, 120 bp, Artificial Sequence
  ENSG00000145331_14 (sequence is synthesized)
gtcacatcaacatctttatgatctattgcctatatatctgtgagggcacatattcataaatatactgtcaatctatcagcatttgtgtatggtaggttaccctctatttgcagcttttat

SEQ ID NO: 393042 - DNA, 120 bp, Artificial Sequence
  ENSG00000145331_15 (sequence is synthesized)
atatctgttccttctttatgatgcctttttatggttctgaagtaattactgaagagttgagaatctctttaatgcattttcttaattcttacaatggtgataagttacttcaattataaa

SEQ ID NO: 393043 - DNA, 120 bp, Artificial Sequence
  ENSG00000145331_16 (sequence is synthesized)
attgaattttgcagactaaattattttataaggctgttgctattgaaagatcaattttgtctttacctgcatttaaaatggaacagctcttagcagctgtggtttttttttccatatttt

SEQ ID NO: 393044 - DNA, 120 bp, Artificial Sequence
  ENSG00000145331_17 (sequence is synthesized)
ttttaaatttgttggctcttaagatgaataaagtttataggtgcatctgcctcctcttctctaagaatatgcatactaatgtttgtttctataaatcaaatacacatgtgataatatgca

SEQ ID NO: 393045 - DNA, 120 bp, Artificial Sequence
  ENSG00000145331_18 (sequence is synthesized)
tgtaaatacataactatcctcatcatgtatggctctcagttcttaattgatgataacatgattgaattgccatatatctgtattacttgtgtgaatggttgtgttgaacacgctaagaac

SEQ ID NO: 393046 - DNA, 120 bp, Artificial Sequence
  ENSG00000145331_19 (sequence is synthesized)
aatttgaattttattaagtacaaaaatccttaacgtttgtatgggaacattggcaagaaagaatagtgtgaaagggaactgttttagtttcctatcagtaattgtacatgcagttaaatg

SEQ ID NO: 393047 - DNA, 120 bp, Artificial Sequence
  ENSG00000145331_20 (sequence is synthesized)
tttaaggtaaaatgattggtctctgtcacagctaaaagatttcagtagccttcattgagtttgggtaaaataagttgctgttcttttgtcttctttttaatatataaaagttatatttaa

SEQ ID NO: 393048 - DNA, 120 bp, Artificial Sequence
  ENSG00000145331_21 (sequence is synthesized)
atactaacatatatatacacaacagaaagtttattggatttagtactgatatttactgtctatttttgttactttgttcttagtaatctattatagttacctattttaaggtaaggtctg

SEQ ID NO: 393049 - DNA, 120 bp, Artificial Sequence
  ENSG00000145331_22 (sequence is synthesized)
atagttacctattttaaggtaaggtctgtaggcaagatatgtaagtaaagacaagccctacaattttaaaataacaaagcttatgtcttaagttgtattttttcaaaggttcatgttttt

SEQ ID NO: 393050 - DNA, 120 bp, Artificial Sequence
  ENSG00000145331_23 (sequence is synthesized)
ctgagtaaatgtggtttattagcatgaaatattatgccttttacttaaattattttatgtaaaatagggcactgtttaattatgaaagggggaaaatcattccaaataagagtttaattt

SEQ ID NO: 393051 - DNA, 120 bp, Artificial Sequence
  ENSG00000145331_24 (sequence is synthesized)
ttattaattataaaaaactctgtattagtttcctagatgtgctagaacaaattaccacaaactgggtggctttaaacaacagaaatttattctcttaacagttccagagactaaatgtcc

SEQ ID NO: 393052 - DNA, 120 bp, Artificial Sequence
  ENSG00000145331_25 (sequence is synthesized)
agactcacaatgtcccagtgccatgcttcctccttaggccctaggaaagaatacttcctagcctcttcctggcttttggtggttgccagcaatccctgctgttccttagcctatagtggc

SEQ ID NO: 393053 - DNA, 120 bp, Artificial Sequence
  ENSG00000145331_26 (sequence is synthesized)
ttgactccaatctcagttttgttgtcaagtggtcttctaccctgtcttctatgtttgtatccgtgtccaaactctttttctagggagaccagcactggattagagttcaccatgatccaa

SEQ ID NO: 393054 - DNA, 120 bp, Artificial Sequence
  ENSG00000145331_27 (sequence is synthesized)
tatgacctcatcttgactacatccgcaaagaccctgtctccaaataaggtcacatttacagggtaccatgtgttaggatttgacatatcttttgggggacacaattctacccactacagg

SEQ ID NO: 393055 - DNA, 120 bp, Artificial Sequence
  ENSG00000145331_28 (sequence is synthesized)
cccatatcttatctaggatgttggtggcaagaaggtgaagattactacctcttttgatataactagtttctgaggtatttaaaaatttggttttaaaaatattaagctttttgctcattt

SEQ ID NO: 393056 - DNA, 120 bp, Artificial Sequence
  ENSG00000145331_29 (sequence is synthesized)
gcatgtatacttttctctcaacattgttttggtttatttaggttatttgttaaaacttcagtaaatactaaagttacttgtattagaacataataaaagtagagaattaaactacctaaa

SEQ ID NO: 393057 - DNA, 120 bp, Artificial Sequence
  ENSG00000145331_30 (sequence is synthesized)
actgcgtaactaccgcccctgcctctgggaattgaagtttctgtggaaggaagcgtgagccgtaaccaggccaacccagaaaggctttctttctgagatttcacttccctgtcaactctt

SEQ ID NO: 393058 - DNA, 120 bp, Artificial Sequence
  ENSG00000145331_31 (sequence is synthesized)
ctctgggaattgaagtttctgtggaaggaagcgtgagccgtaaccaggccaacccagaaaggctttctttctgagatttcacttccctgtcaactcttcagctcgaggcaccaaataatg

SEQ ID NO: 393059 - DNA, 120 bp, Artificial Sequence
  ENSG00000145331_32 (sequence is synthesized)
ccgcggcctacccagctgctccctggttcgccagagacagcttaatcccgtctctgaaatgcgtttgctggctgggagcctagaagggatagtgggcgaggctccgccccgtggtggggc

SEQ ID NO: 393060 - DNA, 120 bp, Artificial Sequence
  ENSG00000145331_33 (sequence is synthesized)
gtatcatgaatcattgtcagaaaaatcttgtatgtgaattaggtcgaatcatttttgttttaatatgcaatatcccttttatgtaaatttgtgtattgaaatgaatcttcagtttttcaa

SEQ ID NO: 393061 - DNA, 120 bp, Artificial Sequence
  ENSG00000145331_34 (sequence is synthesized)
actttcccctaagttaaattagctagcaaattgcattgatataataaatatgtgtatttatatatgtgtgtatgtgtgtgtgtcagtatgtgtgcagacaggaaagagagacaaacacac

SEQ ID NO: 393062 - DNA, 120 bp, Artificial Sequence
  ENSG00000145331_35 (sequence is synthesized)
actttgtagtctagatgacagaactaaattaactacttattgatcataaagatctgtggggttttaccagtgttgttggtaaaacatgaaaatagtaatagtatggctctaaaagtcttg

SEQ ID NO: 393063 - DNA, 120 bp, Artificial Sequence
  ENSG00000145331_36 (sequence is synthesized)
aagaaaaattgtatgtatatagtcatcccttctgcttattccattcctttaagatcatagaatggccatagacaattttaataactttgctttaaaaattgaactctgtgataggacatt

SEQ ID NO: 393064 - DNA, 80 bp, Artificial Sequence
  ENSG00000145332_0 (sequence is synthesized)
cccgccggggctccgcggggccgcgcaggagagcgcgcgtccgccgggtgctcgcgcggggttggtgaggttccgctgag

SEQ ID NO: 393065 - DNA, 120 bp, Artificial Sequence
  ENSG00000145332_1 (sequence is synthesized)
tgagggcggccggggctctgggagcgtggtaacgtggctgcaaccttagcgacatcaggaagaacagggtcgaggatcgagtcacagcaaactgtacaatggcagttgagtgggttttga

SEQ ID NO: 393066 - DNA, 120 bp, Artificial Sequence
  ENSG00000145332_2 (sequence is synthesized)
aaaacgtctgaattgtagtgtctacatctaccttctgccttctctctaccctttgaaaaaaaataaatggcatgtttgagaagagagctctattaaaagaggaatattgcaaatggcttc

SEQ ID NO: 393067 - DNA, 120 bp, Artificial Sequence
  ENSG00000145332_3 (sequence is synthesized)
agattctatgagtagtaaacaagctaggaatcacattacaaaggggaaaaggcaacaacagcaccagcaaataaagaacagatcctcaattagtgatggtgatggagaagattcctttat

SEQ ID NO: 393068 - DNA, 120 bp, Artificial Sequence
  ENSG00000145332_4 (sequence is synthesized)
ttttgaagcaaatgaagcttggaaagattttcatggttctcttcttcgattttatgaaaatggagaactctgtgatgtcacactcaaggttggctcaaagctaatctcttgtcacaagct

SEQ ID NO: 393069 - DNA, 120 bp, Artificial Sequence
  ENSG00000145332_5 (sequence is synthesized)
ggtattggcttgtgttattccctactttagagccatgtttctttctgaaatggctgaagccaagcaaacgctgattgagattagagattttgatggtgatgcaatagaagacttggtaaa

SEQ ID NO: 393070 - DNA, 120 bp, Artificial Sequence
  ENSG00000145332_6 (sequence is synthesized)
gtttgtctattcttcacggctcactttgactgttgacaatgtccagcctctcttatatgcagcctgtattctgcaggttgaactggtggctagagcttgttgtgaatacatgaagttaca

SEQ ID NO: 393071 - DNA, 120 bp, Artificial Sequence
  ENSG00000145332_7 (sequence is synthesized)
ttttcatccctccaattgcctggcagtaagagcctttgcagaaagtcacaatcgaatagacttaatggacatggcggatcagtatgcctgtgaccattttactgaagtagtggagtgtga

SEQ ID NO: 393072 - DNA, 120 bp, Artificial Sequence
  ENSG00000145332_8 (sequence is synthesized)
agactttgtaagtgtatcaccgcagcacctccataagcttttgtcctccagtgatctaaatattgaaaatgaaaagcaggtctataatgctgccatcaagtggcttcttgccaatcctca

SEQ ID NO: 393073 - DNA, 120 bp, Artificial Sequence
  ENSG00000145332_9 (sequence is synthesized)
gcatcattccaaatggttggatgaaacacttgcacaggttcgcctgccattgttgccggttgattttcttatgggtgttgtggcaaaagaacagattgtcaagcaaaatctaaaatgtag

SEQ ID NO: 393074 - DNA, 120 bp, Artificial Sequence
  ENSG00000145332_10 (sequence is synthesized)
agatttactggatgaagcaagaaattaccaccttcacttgagtagcagagcagtacctgactttgaatactccattcggactaccccaaggaagcatactgctggtgtgctgttttgtgt

SEQ ID NO: 393075 - DNA, 120 bp, Artificial Sequence
  ENSG00000145332_11 (sequence is synthesized)
aggtggtcgaggtggatctggtgacccctttcgcagtattgaatgctattctatcaacaaaaacagttggttctttggaccagaaatgaatagtcgaaggcgacatgtgggtgtaatctc

SEQ ID NO: 393076 - DNA, 120 bp, Artificial Sequence
  ENSG00000145332_12 (sequence is synthesized)
tgtggaaggtaaagtgtatgcagtaggtggacatgatggaaatgaacatttagggagtatggagatgtttgatcctctcactaataaatggatgatgaaggcatcaatgaacacaaagag

SEQ ID NO: 393077 - DNA, 120 bp, Artificial Sequence
  ENSG00000145332_13 (sequence is synthesized)
gcgaggaattgccttggcttccttaggaggcccaatttatgcaattggagggttagatgacaatacttgcttcaatgatgtggagagatatgacatagaatctgatcagtggagtacagt

SEQ ID NO: 393078 - DNA, 120 bp, Artificial Sequence
  ENSG00000145332_14 (sequence is synthesized)
ggcaccaatgaatactccccgtggaggagttggctctgttgctctagtaaaccatgtttatgcagtaggtggcaatgatggaatggcttctttatctagcgtggagagatatgatccaca

SEQ ID NO: 393079 - DNA, 120 bp, Artificial Sequence
  ENSG00000145332_15 (sequence is synthesized)
tctggataagtggatagaagttaaagaaatgggtcagcgaagagcaggcaatggagttagcaagcttcatggttgcttatacgtagttggtggttttgatgataattctcctctgagttc

SEQ ID NO: 393080 - DNA, 120 bp, Artificial Sequence
  ENSG00000145332_16 (sequence is synthesized)
agttgagcggtatgacccccgaagcaacaagtgggattatgtggcagcacttactactcccagaggtggagtgggaatcgcaacagtgatgggcaaaatctttgcagttggtggtcataa

SEQ ID NO: 393081 - DNA, 120 bp, Artificial Sequence
  ENSG00000145332_17 (sequence is synthesized)
tggcaatgcatacttaaatacagtagaagcgtttgatccagtgctgaataggtgggagcttgttggatctgtgtctcactgcagagctggagcaggagtagctgtgtgttcctgtttaac

SEQ ID NO: 393082 - DNA, 120 bp, Artificial Sequence
  ENSG00000145332_18 (sequence is synthesized)
tagccaaattcgagatgtaggtcatggatccaataatgtggttgactgtatgtgatttgagttctggccaccaacaatttagtcatatctgataggtacaaaagaaaaccaagattttga

SEQ ID NO: 393083 - DNA, 120 bp, Artificial Sequence
  ENSG00000145332_19 (sequence is synthesized)
tatgaccacctttcaacactttttactgcaactagagtcttatttaaatgttaactgttgtattgtgactaagtacaacttttggaatgatacctgaagaattattagtaatagagttaa

SEQ ID NO: 393084 - DNA, 120 bp, Artificial Sequence
  ENSG00000145332_20 (sequence is synthesized)
atttgatacttcctgcttttgcaaataatggagtagggaagaagatagtcgaacttaaaatcatacctaccctgaaaaatgcttaaagtagtgccaaaaatcttgaaatctctctctctc

SEQ ID NO: 393085 - DNA, 120 bp, Artificial Sequence
  ENSG00000145332_21 (sequence is synthesized)
tctctatttggatgaatcaaaatgtaatttgttgagttttgccttttcttttgcctaaagatgttaacgtcaggcagtgggtttttcctagaggagagattagtacctattcattaacac

SEQ ID NO: 393086 - DNA, 120 bp, Artificial Sequence
  ENSG00000145332_22 (sequence is synthesized)
aaggatacataagagacttgccccttttgaagatcatttctacttggtgctgatgaatttatgcctagctttttttttctaggtggtgatttttcaatttcttttatatttacggaagta

SEQ ID NO: 393087 - DNA, 120 bp, Artificial Sequence
  ENSG00000145332_23 (sequence is synthesized)
tgggctaactccatccaaatgattttacagttttattttttcatcttttgcaaaaagtatttgttacataatcaaaaggtgaaccagaggaaatattgaacaaggttttagatctgatgt

SEQ ID NO: 393088 - DNA, 120 bp, Artificial Sequence
  ENSG00000145332_24 (sequence is synthesized)
tattctggtgcccaattgagagaccttgagaaagaatgatgcagattacatgactctaatgtgggcagtctgaaaatatctttaactgtcttctttgatcatttgattttggatccaaga

SEQ ID NO: 393089 - DNA, 120 bp, Artificial Sequence
  ENSG00000145332_25 (sequence is synthesized)
tttatcatctctctattttgctatttgccaccatcctggtttttctgactgtacagaatcaatctgcatttatttattatcagaaatgaatgcatttttacaaaaacctttttgtagact

SEQ ID NO: 393090 - DNA, 120 bp, Artificial Sequence
  ENSG00000145332_26 (sequence is synthesized)
gtagtttattgattagttcaagcccatcacgaactaattaaacatattgttggtaaaaacagagattgaaattactgtttttatcatatttaaatccctctggtgtatttattgaaattt

SEQ ID NO: 393091 - DNA, 120 bp, Artificial Sequence
  ENSG00000145332_27 (sequence is synthesized)
aattaaaaatatttctacatattgatttgaagccaggatattgatggacctacagatttaacagctcttcaaagttttaactagcattataaaatggcctattcattatatgtatatttt

SEQ ID NO: 393092 - DNA, 120 bp, Artificial Sequence
  ENSG00000145332_28 (sequence is synthesized)
tttataaatatttatcaagaacatgaaaatattttattttgtatttgcagtgcagtttggcacctctcttccaggccttcctaagtttttgttagttgtgtcttcgaatttattgtagtt

SEQ ID NO: 393093 - DNA, 120 bp, Artificial Sequence
  ENSG00000145332_29 (sequence is synthesized)
caccgctggtcagtaatctggttcataaggaagctggggcagtgaaaaacacttcgttgatccatccagccctaaagttcattgactaatagctcatgcatcttattaaatgggattctg

SEQ ID NO: 393094 - DNA, 120 bp, Artificial Sequence
  ENSG00000145332_30 (sequence is synthesized)
gacttctacaatagtgtggaaagccacatcacaaaaaaagccacatcacaaaaaaaagccagtgcctattgagtatatcaaaccaaaaaagaaaaaaaaaagttttaagaggggtcaggc

SEQ ID NO: 393095 - DNA, 120 bp, Artificial Sequence
  ENSG00000145332_31 (sequence is synthesized)
tggcagataaaagtctcttatgaagcagatataaatccagtaagctatttttttctacctatgggcaagttcataagtcattgctggatctgaaccagtgttcttttgtgtaagtacaac

SEQ ID NO: 393096 - DNA, 120 bp, Artificial Sequence
  ENSG00000145332_32 (sequence is synthesized)
catatttcagtcagtccagaggcagttaaccctgtagcacttactagactggtgacaactggctggatgtggagaataagtgtcaaaacctggcttcaatgtctatttcttatgtctaat

SEQ ID NO: 393097 - DNA, 120 bp, Artificial Sequence
  ENSG00000145332_33 (sequence is synthesized)
ggagttcttatattacagtgtttgtttagctatggttactaatatgtttgttatatttattttcggggagaggatcttgttattgtttcctgagattatttaaaatgttttttctttgat

SEQ ID NO: 393098 - DNA, 120 bp, Artificial Sequence
  ENSG00000145332_34 (sequence is synthesized)
gtatttctgtctttcttatatgtaaggagttataagggttattatattttcatttctggtttttactatacaatggttatctaacatactaagttggtaccctacctacccgtaaaatat

SEQ ID NO: 393099 - DNA, 120 bp, Artificial Sequence
  ENSG00000145332_35 (sequence is synthesized)
cctacctacccgtaaaatatgaaatactcagaagtaaagtgtgtgggcaatcagaagcatagccttgaaggacctgacagcagtatgaaaagataaataggccaggcatggtggctcacg

SEQ ID NO: 393100 - DNA, 120 bp, Artificial Sequence
  ENSG00000145332_36 (sequence is synthesized)
aaaaaaaaaaaaagataaaaaagcagaatcaatatgtgcacagttctctttatcaggcaaaaacacgtttattgagacatgaaatgagaatcaggctgaaggaatcatgcagctgaaaga

SEQ ID NO: 393101 - DNA, 120 bp, Artificial Sequence
  ENSG00000145332_37 (sequence is synthesized)
ctgaaagatgattatattcatagaaatgaagagatgaaatattcaaagaagatggctactttattgtgagacttaccactttaacctcatatgttaacagcacctaccaaaaaatgatat

SEQ ID NO: 393102 - DNA, 120 bp, Artificial Sequence
  ENSG00000145332_38 (sequence is synthesized)
gagatagagctaaaatactgaaattgcaaatggacaaaataaatcatgaaaatttgtttattatttcttcaataaatatttctaggtgctttgtgattctttcatttagtcattaaagcc

SEQ ID NO: 393103 - DNA, 120 bp, Artificial Sequence
  ENSG00000145332_39 (sequence is synthesized)
attgctttactatattgcgttgccactttaaaaacaagttacttgacattgtttttgacagatttcactatatacttatgtaattaattgattatttctaaaatgtttgaataaactttg

SEQ ID NO: 393104 - DNA, 120 bp, Artificial Sequence
  ENSG00000145332_40 (sequence is synthesized)
tactccctctaaggagtattttattcattcttttaattcccaaatgaactttgaacttacagtgctgttgaatgccttggtaaggacttcttgaaattgcataaactattcttgtaaatg

SEQ ID NO: 393105 - DNA, 120 bp, Artificial Sequence
  ENSG00000145332_41 (sequence is synthesized)
gtaaacttgagaattttctttgtttcttttttctctatgtcttaaagaatgcctttagaatctaattcatgttgtatcagttaagaatgtttctgtggtttctcgtatcagatgtgtaaa

SEQ ID NO: 393106 - DNA, 120 bp, Artificial Sequence
  ENSG00000145332_42 (sequence is synthesized)
gaaattattactgggatgccattggctatgtctctttccccttcatgtaaaattccaagtgtcagtaaaacttctctataatattttcttaaaaccatttataaatttgtgttataatac

SEQ ID NO: 393107 - DNA, 120 bp, Artificial Sequence
  ENSG00000145332_43 (sequence is synthesized)
tccagaaaatcaatgtaataagtggtcatatatatcaccaactatggatatcaaaaagttggggtcacatcagtgctatttatttaattaaaatacattgcatatttctattagcacaaa

SEQ ID NO: 393108 - DNA, 120 bp, Artificial Sequence
  ENSG00000145332_44 (sequence is synthesized)
aaattcgagccctcgtgcaccaaccgaaactccacagctgagagggcttggggcccggacagcaggagatccagcccctgagcaaccttccacggcttttgtcgcccccattggcgggag

SEQ ID NO: 393109 - DNA, 120 bp, Artificial Sequence
  ENSG00000145332_45 (sequence is synthesized)
gagcagggttatgctcccggctcccgtaggggagctccagcctctggctctgtcagcctccccggcagctccttgactccttcctcccagtctttcgaagaggggcccaggcagtcacag

SEQ ID NO: 393110 - DNA, 68 bp, Artificial Sequence
  ENSG00000145332_46 (sequence is synthesized)
acttgcactgctttttagcagcgagctctcaggtcaatcaactgcttccttaggtttacaaactgtgg

SEQ ID NO: 393111 - DNA, 120 bp, Artificial Sequence
  ENSG00000145332_47 (sequence is synthesized)
tcaggtcaatcaactgcttccttaggtttacaaactgtgggtgtgtatttataaacacagttgttttgtatatcctttgtagagcacgtggtgaaagtgacacaggaataaatgcaaacc

SEQ ID NO: 393112 - DNA, 120 bp, Artificial Sequence
  ENSG00000145332_48 (sequence is synthesized)
tttttttccccttcttttttcaaagacataaatcccaggaacactcacaaccgcagaaggggatttgatggacatacaaagaaactaaattttgtaccgccgcagaagtgaagcatggat

SEQ ID NO: 393113 - DNA, 120 bp, Artificial Sequence
  ENSG00000145332_49 (sequence is synthesized)
aagctcaaaggtatttaggcagtgttttatttcaagatttgttatggggacctccgccacgccctggtccgccttcaccaggccgggcaacactgcccagtccctgagacccggccgccc

SEQ ID NO: 393114 - DNA, 80 bp, Artificial Sequence
  ENSG00000145332_50 (sequence is synthesized)
cggcctgcgggggcggggcgagtgggccacctccgggccacgccgcgcggggacgaggcgaggaaggcactgcctgtccc

SEQ ID NO: 393115 - DNA, 120 bp, Artificial Sequence
  ENSG00000145332_51 (sequence is synthesized)
aggaaggcactgcctgtccccactcggggggcttgctggccgccctggaggtgccttcccgggagcggcggtgtagaccttgtggagagtgcctcctgatgtggaaccaggaaccgcagc

SEQ ID NO: 393116 - DNA, 120 bp, Artificial Sequence
  ENSG00000145332_52 (sequence is synthesized)
ctctttctagacgctcagccgcccggtggagttgttaccgccacgatgacagctctttacgccttccactccgtgctgggttcagttggcttgctgttttcttcagagagagcgatttgg

SEQ ID NO: 393117 - DNA, 120 bp, Artificial Sequence
  ENSG00000145332_53 (sequence is synthesized)
ctacatagcttgaattttctacgtgtctcgtgctttactggacttgcactgtttttccctcttggcagtgtttaatcgggtgacttttcatagaaaacgttcagtattttcatctgtgtt

SEQ ID NO: 393118 - DNA, 120 bp, Artificial Sequence
  ENSG00000145335_0 (sequence is synthesized)
gggaggagcttgcttctccattctggtgtgatccaggaacagctgtcttccagctctgaaagagtgtggtgtaaaggaattcattagccatggatgtattcatgaaaggactttcaaagg

SEQ ID NO: 393119 - DNA, 120 bp, Artificial Sequence
  ENSG00000145335_1 (sequence is synthesized)
ccaaggagggagttgtggctgctgctgagaaaaccaaacagggtgtggcagaagcagcaggaaagacaaaagagggtgttctctatgtaggctccaaaaccaaggagggagtggtgcatg

SEQ ID NO: 393120 - DNA, 120 bp, Artificial Sequence
  ENSG00000145335_2 (sequence is synthesized)
gtgtggcaacagtggctgagaagaccaaagagcaagtgacaaatgttggaggagcagtggtgacgggtgtgacagcagtagcccagaagacagtggagggagcagggagcattgcagcag

SEQ ID NO: 393121 - DNA, 120 bp, Artificial Sequence
  ENSG00000145335_3 (sequence is synthesized)
ccactggctttgtcaaaaaggaccagttgggcaagaatgaagaaggagccccacaggaaggaattctggaagatatgcctgtggatcctgacaatgaggcttatgaaatgccttctgagg

SEQ ID NO: 393122 - DNA, 120 bp, Artificial Sequence
  ENSG00000145335_4 (sequence is synthesized)
aagggtatcaagactacgaacctgaagcctaagaaatatctttgctcccagtttcttgagatctgctgacagatgttccatcctgtacaagtgctcagttccaatgtgcccagtcatgac

SEQ ID NO: 393123 - DNA, 120 bp, Artificial Sequence
  ENSG00000145335_5 (sequence is synthesized)
atttctcaaagtttttacagtgtatctcgaagtcttccatcagcagtgattgaagtatctgtacctgcccccactcagcatttcggtgcttccctttcactgaagtgaatacatggtagc

SEQ ID NO: 393124 - DNA, 120 bp, Artificial Sequence
  ENSG00000145335_6 (sequence is synthesized)
agggtctttgtgtgctgtggattttgtggcttcaatctacgatgttaaaacaaattaaaaacacctaagtgactaccacttatttctaaatcctcactatttttttgttgctgttgttca

SEQ ID NO: 393125 - DNA, 120 bp, Artificial Sequence
  ENSG00000145335_7 (sequence is synthesized)
gttgttcagaagttgttagtgatttgctatcatatattataagatttttaggtgtcttttaatgatactgtctaagaataatgacgtattgtgaaatttgttaatatatataatacttaa

SEQ ID NO: 393126 - DNA, 120 bp, Artificial Sequence
  ENSG00000145335_8 (sequence is synthesized)
gagcatgaaactatgcacctataaatactaaatatgaaattttaccattttgcgatgtgttttattcacttgtgtttgtatataaatggtgagaattaaaataaaacgttatctcattgc

SEQ ID NO: 393127 - DNA, 120 bp, Artificial Sequence
  ENSG00000145335_9 (sequence is synthesized)
aaaaatattttatttttatcccatctcactttaataataaaaatcatgcttataagcaacatgaattaagaactgacacaaaggacaaaaatataaagttattaatagccatttgaagaa

SEQ ID NO: 393128 - DNA, 120 bp, Artificial Sequence
  ENSG00000145335_10 (sequence is synthesized)
ggaggaattttagaagaggtagagaaaatggaacattaaccctacactcggaattccctgaagcaacactgccagaagtgtgttttggtatgcactggttccttaagtggctgtgattaa

SEQ ID NO: 393129 - DNA, 120 bp, Artificial Sequence
  ENSG00000145335_11 (sequence is synthesized)
ttattgaaagtggggtgttgaagaccccaactactattgtagagtggtctatttctcccttcaatcctgtcaatgtttgctttacgtattttggggaactgttgtttgatgtgtatgtgt

SEQ ID NO: 393130 - DNA, 120 bp, Artificial Sequence
  ENSG00000145335_12 (sequence is synthesized)
tatattgttatttttgtctcgaaataattttttagttaaaatctattttgtctgatattggtgtgaatgctgtacctttctgacaataaataatattcgaccatgaataaaaaaaaaaaa

SEQ ID NO: 393131 - DNA, 120 bp, Artificial Sequence
  ENSG00000145335_13 (sequence is synthesized)
aaagtgggttcccgggaactaagcagtgtagaagatgattttgactacaccctccttagagagccataagacacattagcacatattagcacattcaaggctctgagagaatgtggttaa

SEQ ID NO: 393132 - DNA, 120 bp, Artificial Sequence
  ENSG00000145335_14 (sequence is synthesized)
ctttgtttaactcagcattcctcactttttttttttaatcatcagaaattctctctctctctctctctttttctctcgctctctttttttttttttttttacaggaaatgcctttaaaca

SEQ ID NO: 393133 - DNA, 120 bp, Artificial Sequence
  ENSG00000145335_15 (sequence is synthesized)
tcgttggaactaccagagtcaccttaaaggagatcaattctctagactgataaaaatttcatggcctcctttaaatgttgccaaatatatgaattctaggatttttccttaggaaaggtt

SEQ ID NO: 393134 - DNA, 120 bp, Artificial Sequence
  ENSG00000145335_16 (sequence is synthesized)
tttctctttcagggaagatctattaactccccatgggtgctgaaaataaacttgatggtgaaaaactctgtataaattaatttaaaaattatttggtttctctttttaattattctgggg

SEQ ID NO: 393135 - DNA, 120 bp, Artificial Sequence
  ENSG00000145335_17 (sequence is synthesized)
catagtcatttctaaaagtcactagtagaaagtataatttcaagacagaatattctagacatgctagcagtttatatgtattcatgagtaatgtgatatatattgggcgctggtgaggaa

SEQ ID NO: 393136 - DNA, 120 bp, Artificial Sequence
  ENSG00000145335_18 (sequence is synthesized)
ggaaggaggaatgagtgactataaggatggttaccatagaaacttccttttttacctaattgaagagagactactacagagtgctaagctgcatgtgtcatcttacactagagagaaatg

SEQ ID NO: 393137 - DNA, 120 bp, Artificial Sequence
  ENSG00000145335_19 (sequence is synthesized)
gtaagtttcttgttttatttaagttatgtttaagcaaggaaaggatttgttattgaacagtatatttcaggaaggttagaaagtggcggttaggatatattttaaatctacctaaagcag

SEQ ID NO: 393138 - DNA, 120 bp, Artificial Sequence
  ENSG00000145335_20 (sequence is synthesized)
catattttaaaaatttaaaagtattggtattaaattaagaaatagaggacagaactagactgatagcagtgacctagaacaatttgagattaggaaagttgtgaccatgaatttaaggat

SEQ ID NO: 393139 - DNA, 120 bp, Artificial Sequence
  ENSG00000145335_21 (sequence is synthesized)
ttatgtggatacaaattctcctttaaagtgtttcttcccttaatatttatctgacggtaatttttgagcagtgaattactttatatatcttaatagtttatttgggaccaaacacttaaa

SEQ ID NO: 393140 - DNA, 120 bp, Artificial Sequence
  ENSG00000145335_22 (sequence is synthesized)
caaaaagttctttaagtcatataagccttttcaggaagcttgtctcatattcactcccgagacattcacctgccaagtggcctgaggatcaatccagtcctaggtttattttgcagactt

SEQ ID NO: 393141 - DNA, 120 bp, Artificial Sequence
  ENSG00000145335_23 (sequence is synthesized)
acattctcccaagttattcagcctcatatgactccacggtcggctttaccaaaacagttcagagtgcactttggcacacaattgggaacagaacaatctaatgtgtggtttggtattcca

SEQ ID NO: 393142 - DNA, 120 bp, Artificial Sequence
  ENSG00000145335_24 (sequence is synthesized)
agtggggtctttttcagaatctctgcactagtgtgagatgcaaacatgtttcctcatctttctggcttatccagtatgtagctatttgtgacataataaatatatacatatatgaaaata

SEQ ID NO: 393143 - DNA, 120 bp, Artificial Sequence
  ENSG00000145335_25 (sequence is synthesized)
agagagggggcgagcgaccgagcgccgcgacgcggaagtgaggtgcgtgcgggctgcagcgcagaccccggcccggcccctccgagagcgtcctgggcgctccctcacgccttgccttca

SEQ ID NO: 393144 - DNA, 120 bp, Artificial Sequence
  ENSG00000145335_26 (sequence is synthesized)
agccttctgcctttccaccctcgtgagcggagaactgggagtggccattcgacgacaggttagcgggtttgcctcccactcccccagcctcgcgtcgccggctcacagcggcctcctctg

SEQ ID NO: 393145 - DNA, 120 bp, Artificial Sequence
  ENSG00000145335_27 (sequence is synthesized)
gggacagtcccccccgggtgccgcctccgcccttcctgtgcgctccttttccttcttctttcctattaaatattatttgggaattgtttaaattttttttttaaaaaaagagagaggcgg

SEQ ID NO: 393146 - DNA, 120 bp, Artificial Sequence
  ENSG00000145335_28 (sequence is synthesized)
ggaggacggcgacgaccagaaggggcccaagagagggggcgagcgaccgagcgccgcgacgcggaagtgagtgtggtgtaaaggaattcattagccatggatgtattcatgaaaggactt

SEQ ID NO: 393147 - DNA, 120 bp, Artificial Sequence
  ENSG00000145335_29 (sequence is synthesized)
gatagctgagggcgggggtggatgttggatggattagaaccatcacacttgggcctgctgtttgcctgagtttgaaccacaccccgatgtggtgtaaaggaattcattagccatggatgt

SEQ ID NO: 393148 - DNA, 120 bp, Artificial Sequence
  ENSG00000145335_30 (sequence is synthesized)
gaccccggcccggcccctccgagagcgtcctgggcgctccctcacgccttgccttcaagccttctgcctttccaccctcgtgagcggagaactgggagtggccattcgacgacagagaga

SEQ ID NO: 393149 - DNA, 120 bp, Artificial Sequence
  ENSG00000145335_31 (sequence is synthesized)
ggtgagattacggttcattttcatgtgaggcctggaggcaggagcaagatacttactgtggggaacggctacctgaccctccccttgtgaaaaagtgctacctttatattggtcttgctt

SEQ ID NO: 393150 - DNA, 120 bp, Artificial Sequence
  ENSG00000145335_32 (sequence is synthesized)
gtttcaggcattaacccagataaatgccatgcaaattttataattattatgattgtttcaatttctggaagaaagttaatgaaacaaaaaatgtagtaaaatgccaaaggaacagtgaca

SEQ ID NO: 393151 - DNA, 120 bp, Artificial Sequence
  ENSG00000145335_33 (sequence is synthesized)
tttcagaaagaatgagggctttcatgttaattgtaagtcttggaatttctcttccttggagtaacaaatccctttgtgcctaatttcctaatttccaaaataaagttcttttacttattt

SEQ ID NO: 393152 - DNA, 120 bp, Artificial Sequence
  ENSG00000145337_0 (sequence is synthesized)
ctggacgaacgggaagccgggagctcggccacgggtggcgaggctgcggtgaggcctggtctccggctgccagaccatgctgagtggagcacgctgcaggctcgcctcagcgctgcgggg

SEQ ID NO: 393153 - DNA, 120 bp, Artificial Sequence
  ENSG00000145337_1 (sequence is synthesized)
aacgcgcgcgccgccgtccgcggtcgcccgtaggtgcctgcacgcgtcggggtcgcggcctttggccgaccggggcaagaagactgaggagccgccccgcgacttcgatccggcgctgct

SEQ ID NO: 393154 - DNA, 120 bp, Artificial Sequence
  ENSG00000145337_2 (sequence is synthesized)
ggagttcctggtgtgcccgctctccaagaagccgctcagatatgaagcatcaacaaacgaattgattaatgaagagttgggaatagcttatccaatcattgatgggatccctaatatgat

SEQ ID NO: 393155 - DNA, 120 bp, Artificial Sequence
  ENSG00000145337_3 (sequence is synthesized)
accacaggcagctaggatgacacgtcaaagtaagaagcaagaagaagtggagcagcgctagttcataatttaaaaaaattaaaaaaacgcaacagccaacttttcttaataccatatacc

SEQ ID NO: 393156 - DNA, 120 bp, Artificial Sequence
  ENSG00000145337_4 (sequence is synthesized)
ttttaaaacacagtggcaggtaataagtggaagagaagaatgtttctgtctcttcctacgttgactgttcttattccactggtttctttagcaggactgttctactcagcctctgtggaa

SEQ ID NO: 393157 - DNA, 120 bp, Artificial Sequence
  ENSG00000145337_5 (sequence is synthesized)
attaaactcttcaggcataattgatgcaactagagtcaatatgctgtatatattaatgatagctcttgggcatcgatctctgaaagctcaaatggatggaatttagtttgcgggaaagag

SEQ ID NO: 393158 - DNA, 120 bp, Artificial Sequence
  ENSG00000145337_6 (sequence is synthesized)
gctttgctttgcgcatatcaggcttaggactgtgggaggcttaagttgcagatgcttcttttattgtactcttgttctgcccttgttttttgaaggctctgacttataactgctgtatca

SEQ ID NO: 393159 - DNA, 120 bp, Artificial Sequence
  ENSG00000145337_7 (sequence is synthesized)
gaagaaacattttgacagtgtcttggttggagatgaacatccctaattgacatgtgatgactatttcttattccattcatctaagagtcattgaaattttgttttgcttgtttgtttagc

SEQ ID NO: 393160 - DNA, 120 bp, Artificial Sequence
  ENSG00000145337_8 (sequence is synthesized)
ttcaaggtctttggtaaagtcacatgttaaggatgactgaaataattccaaaggagtgatgttggaatagtccctctaagggagagaaatgcatttgaacgaatgtgatataaaaccaca

SEQ ID NO: 393161 - DNA, 120 bp, Artificial Sequence
  ENSG00000145337_9 (sequence is synthesized)
taatcaaatagaaacttcatgtacttacaaaaactgagtttgtaaaattaccttcatttctttgacattaaatgcttatattagcaataaacatgttgacactttcctataaaaaataaa

SEQ ID NO: 393162 - DNA, 79 bp, Artificial Sequence
  ENSG00000145348_0 (sequence is synthesized)
catcccagaggatgacggccgggaagaggccagggctggtcctgctgcgaacggactacccattagcagcgcaggccag

SEQ ID NO: 393163 - DNA, 120 bp, Artificial Sequence
  ENSG00000145348_1 (sequence is synthesized)
tcctgctgcgaacggactacccattagcagcgcaggccaggtcctctctcctggaggcaagttagagaaggaagacccctacgatcgcaatcggcgatccccgagtgagtgacccgccac

SEQ ID NO: 393164 - DNA, 120 bp, Artificial Sequence
  ENSG00000145348_2 (sequence is synthesized)
gacgtcactcacatgaagcggaggaccacgggttccgagacagccacagcaggaagcatattatcttagaagacctaggactccaaaaatgtttcccctgaaggacgctgaaatgggagc

SEQ ID NO: 393165 - DNA, 120 bp, Artificial Sequence
  ENSG00000145348_3 (sequence is synthesized)
ctttaccttctttgcctcggctctgccacatgatgtttgtggaagcaatggacttcctctcacaccaaattccatcaaaattttagggcgctttcaaatccttaaaaccatcacccatcc

SEQ ID NO: 393166 - DNA, 120 bp, Artificial Sequence
  ENSG00000145348_4 (sequence is synthesized)
cagactctgccagtatgtggatatttctaggggaaagcatgaacgactagtggtcgtggctgaacattgtgaacgtagtctggaagacttgcttcgagaaaggaaacctgtgagctgttc

SEQ ID NO: 393167 - DNA, 120 bp, Artificial Sequence
  ENSG00000145348_5 (sequence is synthesized)
aacggttttgtgtatagcatttgaggttcttcagggcttgcagtatatgaacaaacatggtatagtacacagggcattgtctcctcataatatcctgttggaccgaaagggacatattaa

SEQ ID NO: 393168 - DNA, 120 bp, Artificial Sequence
  ENSG00000145348_6 (sequence is synthesized)
attggctaaatttggactttatcacatgacagctcatggtgatgatgttgatttcccaatagggtatccctcgtacttggcccctgaggtaattgcacagggaattttcaaaaccactga

SEQ ID NO: 393169 - DNA, 120 bp, Artificial Sequence
  ENSG00000145348_7 (sequence is synthesized)
tcacatgccaagtaaaaaaccattgccttctggccccaaatcagatgtatggtctcttggaatcattttatttgagctttgtgtgggaagaaaattatttcagagcttggatatttctga

SEQ ID NO: 393170 - DNA, 120 bp, Artificial Sequence
  ENSG00000145348_8 (sequence is synthesized)
aagactaaaatttttgcttactttggattgtgtagatgacactttaatagttctggctgaagagcatggttgtttggacattataaaggagcttcctgaaactgtgatagatcttttgaa

SEQ ID NO: 393171 - DNA, 120 bp, Artificial Sequence
  ENSG00000145348_9 (sequence is synthesized)
taagtgccttaccttccatccttctaagaggccaaccccagatcaattaatgaaggacaaagtattcagtgaggtatcacctttatataccccctttaccaaacctgccagtctgttttc

SEQ ID NO: 393172 - DNA, 120 bp, Artificial Sequence
  ENSG00000145348_10 (sequence is synthesized)
atcttctctgagatgtgctgatttaactctgcctgaggatatcagtcagttgtgtaaagatataaataatgattacctggcagaaagatctattgaagaagtgtattacctttggtgttt

SEQ ID NO: 393173 - DNA, 120 bp, Artificial Sequence
  ENSG00000145348_11 (sequence is synthesized)
ggctggaggtgacttggagaaagagcttgtcaacaaggaaatcattcgatccaaaccacctatctgcacactccccaattttctctttgaggatggtgaaagctttggacaaggtcgaga

SEQ ID NO: 393174 - DNA, 120 bp, Artificial Sequence
  ENSG00000145348_12 (sequence is synthesized)
tagaagctcgcttttagatgataccactgtgacattgtcgttatgccagctaagaaatagattgaaagatgttggtggagaagcattttacccattacttgaagatgaccagtctaattt

SEQ ID NO: 393175 - DNA, 120 bp, Artificial Sequence
  ENSG00000145348_13 (sequence is synthesized)
acctcattcaaacagcaataatgagttgtctgcagctgccacgctccctttaatcatcagagagaaggatacagagtaccaactaaatagaattattctcttcgacaggctgctaaaggc

SEQ ID NO: 393176 - DNA, 120 bp, Artificial Sequence
  ENSG00000145348_14 (sequence is synthesized)
ttatccatataaaaaaaaccaaatctggaaagaagcaagagttgacattcctcctcttatgagaggtttaacctgggctgctcttctgggagttgagggagctattcatgccaagtacga

SEQ ID NO: 393177 - DNA, 120 bp, Artificial Sequence
  ENSG00000145348_15 (sequence is synthesized)
tgcaattgataaagacactccaattcctacagatagacaaattgaagtggatattcctcgctgtcatcagtacgatgaactgttatcatcaccagaaggtcatgcaaaatttaggcgtgt

SEQ ID NO: 393178 - DNA, 120 bp, Artificial Sequence
  ENSG00000145348_16 (sequence is synthesized)
attaaaagcctgggtagtgtctcatcctgatcttgtgtattggcaaggtcttgactcactttgtgctccattcctatatctaaacttcaataatgaagccttggcttatgcatgtatgtc

SEQ ID NO: 393179 - DNA, 120 bp, Artificial Sequence
  ENSG00000145348_17 (sequence is synthesized)
tgcttttattcccaaatacctgtataacttcttcttaaaagacaactcacatgtaatacaagagtatctgactgtcttctctcagatgattgcatttcatgatccagagctgagtaatca

SEQ ID NO: 393180 - DNA, 120 bp, Artificial Sequence
  ENSG00000145348_18 (sequence is synthesized)
tctcaatgagattggtttcattccagatctctatgccatcccttggtttcttaccatgtttactcatgtatttccactacacaaaattttccacctctgggataccttactacttgggaa

SEQ ID NO: 393181 - DNA, 120 bp, Artificial Sequence
  ENSG00000145348_19 (sequence is synthesized)
ttcctctttcccattctgtattggagtagcaattcttcagcagctgcgggaccggcttttggctaatggctttaatgagtgtattcttctcttctccgatttaccagaaattgacattga

SEQ ID NO: 393182 - DNA, 120 bp, Artificial Sequence
  ENSG00000145348_20 (sequence is synthesized)
acgctgtgtgagagaatctatcaacctgttttgttggactcctaaaagtgctacttacagacagcatgctcaacctccaaagccatcttctgacagcagtggaggcagaagttcggcacc

SEQ ID NO: 393183 - DNA, 120 bp, Artificial Sequence
  ENSG00000145348_21 (sequence is synthesized)
ttatttctctgctgagtgtccagatcctccaaagacagatctgtcaagagaatccatcccattaaatgacctgaagtcagaagtatcaccacggatttcagcagaggacctgattgactt

SEQ ID NO: 393184 - DNA, 120 bp, Artificial Sequence
  ENSG00000145348_22 (sequence is synthesized)
gtgtgagctcacagtgacaggccacttcaaaacacccagcaagaaaacaaagtccagtaaaccaaagctcctggtggttgacatccggaatagtgaagactttattcgtggtcacatttc

SEQ ID NO: 393185 - DNA, 120 bp, Artificial Sequence
  ENSG00000145348_23 (sequence is synthesized)
aggaagcatcaacattccattcagtgctgccttcactgcagaaggggagcttacccagggcccttacactgctatgctccagaacttcaaagggaaggtcattgtcatcgtggggcatgt

SEQ ID NO: 393186 - DNA, 120 bp, Artificial Sequence
  ENSG00000145348_24 (sequence is synthesized)
ggcaaaacacacagctgagtttgcagctcaccttgtgaagatgaaatatccaagaatctgtattctagatggtggcattaataaaataaagccaacaggcctcctcaccatcccatctcc

SEQ ID NO: 393187 - DNA, 120 bp, Artificial Sequence
  ENSG00000145348_25 (sequence is synthesized)
tcaaatatgaagaaccaagagtgtgactgccaaaacttagtgtggcatcagcaccaacagcacagttcttcatatccacgccactctcagacaaaactagatgtccagattgttgcattt

SEQ ID NO: 393188 - DNA, 120 bp, Artificial Sequence
  ENSG00000145348_26 (sequence is synthesized)
ccgtaaagtttgtcacgagacattttttaaaatctcataacccacatgttcagttatccatgcaagaaacttgactctacatgtattgctgaaagaattttcttaacagtgaaatctgat

SEQ ID NO: 393189 - DNA, 120 bp, Artificial Sequence
  ENSG00000145348_27 (sequence is synthesized)
catatatttttaccacactgccacataaagcccaagaaattcagctgacaagacagatttagcattatcaagaaatcccatttgccctgaaaaagctgtcctccattgtactgaacagac

SEQ ID NO: 393190 - DNA, 120 bp, Artificial Sequence
  ENSG00000145348_28 (sequence is synthesized)
agtcctgtcgattgtgttatttagaaacatacactgaatgtgggctgaaatcatcatctttccataatgaaaactgagaaactattcacaatgcattccttataaataaatgctacattt

SEQ ID NO: 393191 - DNA, 120 bp, Artificial Sequence
  ENSG00000145348_29 (sequence is synthesized)
agtaactcatttcacccaaacaagggggatgtgtgtgtgtgtgtgtgtataggaagtggagtttatcccattgcagaaagtggtaatacttactcccagaaaaatgaaatttagaaacca

SEQ ID NO: 393192 - DNA, 120 bp, Artificial Sequence
  ENSG00000145348_30 (sequence is synthesized)
tttatatttgatagaatatttggtcagttcctgtagcaaagacgaatggcttaaacaaattttctagtttctttatcacatgaaagtctgtacagtcagtccagggctagtctactggtt

SEQ ID NO: 393193 - DNA, 120 bp, Artificial Sequence
  ENSG00000145348_31 (sequence is synthesized)
tcctgatcattaagaactcattaccttctctcattgctttacaaacctcaatatgtggcatccatctcatggatgaaaatggctcctcagcttctaccatcacatctgctatctagaagg

SEQ ID NO: 393194 - DNA, 120 bp, Artificial Sequence
  ENSG00000145348_32 (sequence is synthesized)
gaaagaagaaaagaaaggaaaagaagcgaagcacactccttccctttaaggtcataaaccagaagttgcgcacactacctctgcttacatatcattggccagaacttgggtgcatggcca

SEQ ID NO: 393195 - DNA, 120 bp, Artificial Sequence
  ENSG00000145348_33 (sequence is synthesized)
cacctagctttaaggaaaactggaaatagagtctttgggtggttgatcatttccccagctaaaaacattcttattactgtgtgggaagaagagagtacatattgaggtacagctaacaac

SEQ ID NO: 393196 - DNA, 120 bp, Artificial Sequence
  ENSG00000145348_34 (sequence is synthesized)
ctctgcctctgccacattgtttttaaaatgagtattatatttcattaaatctaagacatctcacaattttaggtaccacaaagaaaaaatgaagccaaatgaattgtgacactttgtcaa

SEQ ID NO: 393197 - DNA, 75 bp, Artificial Sequence
  ENSG00000145348_35 (sequence is synthesized)
aagaaaaaatgaagccaaatgaattgtgacactttgtcaattaaaagacacattccctgggaggttgtctctact

SEQ ID NO: 393198 - DNA, 90 bp, Artificial Sequence
  ENSG00000145348_36 (sequence is synthesized)
cacttgaacctgagaggcagaggttgcaatgagccatgatagggccactgtaccccagcctgggcaacagggctcaccctgtacattccc

SEQ ID NO: 393199 - DNA, 120 bp, Artificial Sequence
  ENSG00000145348_37 (sequence is synthesized)
tctcaaaaaaaaaaaaaaaaagaaagatacattcccatttcagaaatctgaaaaaaaaaatgcctcatatatatgaaatatagcatatcctttaattatcttcaattttgttttaactaa

SEQ ID NO: 393200 - DNA, 120 bp, Artificial Sequence
  ENSG00000145348_38 (sequence is synthesized)
aaagtgttcattcatctataacttacattccactccaatgttaagactgcctaggcagaacatttcaataagagcctcaattcagctttctgggccatggttttgttgttgctgctattg

SEQ ID NO: 393201 - DNA, 120 bp, Artificial Sequence
  ENSG00000145348_39 (sequence is synthesized)
tttactttattttattttttctttgcatctactttttaaattgagatatacttaaccataaaattcatccttttaacatgtacagttcagtagtttttagtgtattcacaaagttgtgca

SEQ ID NO: 393202 - DNA, 120 bp, Artificial Sequence
  ENSG00000145348_40 (sequence is synthesized)
atcagtattatccagaatactttcattgtatgcaattgtctacctgatcagcaggtattccacattaacccctcctaaggtctttgataaatttttgtatatggagtgaggggtccaggt

SEQ ID NO: 393203 - DNA, 120 bp, Artificial Sequence
  ENSG00000145348_41 (sequence is synthesized)
tcattcttgcatatgagtatccagttgtcccaggacccctcctgttttgtttgttttattcaatttatttggtcattcaccaaatatgttttgaatacctactatgtatttctaagacac

SEQ ID NO: 393204 - DNA, 120 bp, Artificial Sequence
  ENSG00000145348_42 (sequence is synthesized)
taatataatccatagttatatcatttgtgatccttacctagtttacaaggaaaaaaatgtgagaattaatgagaacaaatatataccaagatttcactaacattgtttttgggccattgt

SEQ ID NO: 393205 - DNA, 120 bp, Artificial Sequence
  ENSG00000145348_43 (sequence is synthesized)
ctaccctcttcagagaaatattaaatcctcctgtcctggcaattactattttcttccttcagtctttgatgacttacctgagttcataatcagaatgcaccattgatgatcattctgagt

SEQ ID NO: 393206 - DNA, 120 bp, Artificial Sequence
  ENSG00000145348_44 (sequence is synthesized)
cttaactctgccttactgagaaagcagagaagagagggatggaggggcagtgatttgagttgaataaggtggtaggtagtaggagaggatgaagaccttgtgaagagagctatgtaagaa

SEQ ID NO: 393207 - DNA, 120 bp, Artificial Sequence
  ENSG00000145348_45 (sequence is synthesized)
gataatagtagcaaccctctgtcatgattttgcatttgatctttcttaaaacgacacatttaggcttattccaagaaattgaagttttttaaacatgaaaattataatatttaatattct

SEQ ID NO: 393208 - DNA, 120 bp, Artificial Sequence
  ENSG00000145348_46 (sequence is synthesized)
caacagtaaagtaagagcacactatcactgccatgtttatacacagggcatgttatttcatggtggatgatacgaacagttgacctcaacaactatttgttagattaaacgtatataacc

SEQ ID NO: 393209 - DNA, 120 bp, Artificial Sequence
  ENSG00000145348_47 (sequence is synthesized)
caggatttatttgagttcctttttaatgtattattgattcctacacgatgactatcagcactgtttctggctttacctggaatgccataagtaccaccaccagcccacacagatatacat

SEQ ID NO: 393210 - DNA, 120 bp, Artificial Sequence
  ENSG00000145348_48 (sequence is synthesized)
acacacacacacacacacacactcacattcataaacacacttattaactcttgataatctagcaacaacagtgtacctcctccagtcttctctggcttccccatgctgcactaagagccc

SEQ ID NO: 393211 - DNA, 120 bp, Artificial Sequence
  ENSG00000145348_49 (sequence is synthesized)
caaatctactaaagcattccattcataatttactaataatagatttattacatcattttgcaatcgtttgtttacatttagtcccctattaaaatatgagctgcttaagatcaggagcta

SEQ ID NO: 393212 - DNA, 120 bp, Artificial Sequence
  ENSG00000145348_50 (sequence is synthesized)
taatttatacctcttgctaccttcagcaacccaccacattggatatgctcaattaatataaaattgaatctatcaattttagaatctatttgaagggagaaaaataaaaataacctgtgg

SEQ ID NO: 393213 - DNA, 120 bp, Artificial Sequence
  ENSG00000145348_51 (sequence is synthesized)
taatttttttcaactgccaaacttatctggtacctgatagtatagaaataaattgaaatctcaattcatggagtgaaaaaaggatctctaaagtcccatccagctctaaaatctgataat

SEQ ID NO: 393214 - DNA, 120 bp, Artificial Sequence
  ENSG00000145348_52 (sequence is synthesized)
tctagaagttggagcagataacttccaaaataaggtaatttaatctagttgcatcctcttttcaaaatacagaaatgttagattcaaaaagcatattaaaaataactaatgcttaaccaa

SEQ ID NO: 393215 - DNA, 120 bp, Artificial Sequence
  ENSG00000145348_53 (sequence is synthesized)
gtttgaaagaaagaagttttttgatgtcagaaatgaaaaggacctgaaaggcacagcttttaggcccgtgggatacccagtatcaatataagccccaagaactcaggttttggaatacat

SEQ ID NO: 393216 - DNA, 120 bp, Artificial Sequence
  ENSG00000145348_54 (sequence is synthesized)
ataggaatagaagacatagctttggatcttatgggtgggagttctaattaagacctctttatgaagtgaccgtctcaaggaactccgctccatgaaatgacaagacataacttcccgcca

SEQ ID NO: 393217 - DNA, 120 bp, Artificial Sequence
  ENSG00000145348_55 (sequence is synthesized)
aattagggaagctacagaggagattgtcattggcctggttattcttgatgaaggaagaaaaatctgttacagacagagttgttcagtggaaagtctggggtaagttcctgatttagaaca

SEQ ID NO: 393218 - DNA, 120 bp, Artificial Sequence
  ENSG00000145348_56 (sequence is synthesized)
ggctttagtgcactttaaaaggaaaacaatgaattatataaaacttttagaggacacagtggtgccagatttttgttggattcctgtgctttcctcctccaaatagttaccaaaaaatat

SEQ ID NO: 393219 - DNA, 120 bp, Artificial Sequence
  ENSG00000145348_57 (sequence is synthesized)
ttcctgtgctttcctcctccaaatagttaccaaaaaatattcctttgggaattagtatcaaaaggattctatagcatctcaaaagaatcttattcactttgggaggccgaggcaggcaga

SEQ ID NO: 393220 - DNA, 81 bp, Artificial Sequence
  ENSG00000145348_58 (sequence is synthesized)
tcttatgcagtagtcttatttaataaaatccactacaaggagagaagactgctgccttgactatatagaaagggttggcag

SEQ ID NO: 393221 - DNA, 120 bp, Artificial Sequence
  ENSG00000145348_59 (sequence is synthesized)
gagaagactgctgccttgactatatagaaagggttggcagatatttcattctatcagttgtaactagtaatcccattgttatacatgctgacccaaaatatagctgttattaaccaaata

SEQ ID NO: 393222 - DNA, 120 bp, Artificial Sequence
  ENSG00000145348_60 (sequence is synthesized)
atgcatttttcttgataaatgttgattaaatcagattggaagcaaaatggtaatatttatgatcaattttagtttggatgttcaatgtcaagaccaaaccctcttcacagctaccaactt

SEQ ID NO: 393223 - DNA, 120 bp, Artificial Sequence
  ENSG00000145348_61 (sequence is synthesized)
caattttatgtggaaaactaatggtgaagagtttcaaactttaactgacacttgacatttaacagggtatgtaattgctcacacacaacctttaggttttgtaatccagttttatctcat

SEQ ID NO: 393224 - DNA, 120 bp, Artificial Sequence
  ENSG00000145348_62 (sequence is synthesized)
acaatattagaaacagtacacattgtaaatacctattttaaaagttagccatattttataaagtcacatgtatttatatcttttctgagtaattttcctgttaatgccttatgataggtg

SEQ ID NO: 393225 - DNA, 120 bp, Artificial Sequence
  ENSG00000145348_63 (sequence is synthesized)
cttgtaacatgaaaactaaacttggatcttggcatattcagtgttctatagatagattgtgatctgtatagcttctacggtgactttcaggcctaatgtctccttttaagttgttattct

SEQ ID NO: 393226 - DNA, 120 bp, Artificial Sequence
  ENSG00000145348_64 (sequence is synthesized)
ttaatatcctttctcattcctttcagaggacctattattagtttgcattgtctgcagcatttcaataatactgttctattctaataatactgatctgttctaataaacagttctaaatac

SEQ ID NO: 393227 - DNA, 120 bp, Artificial Sequence
  ENSG00000145348_65 (sequence is synthesized)
agcgttgggtcgcggtggctgtgagggcggaagaaaaggccaggctgaggggagggtagagggtgaaaagctcggatctgtgtttggggaaggccaggcttgcgctcctcgccgggttcc

SEQ ID NO: 393228 - DNA, 120 bp, Artificial Sequence
  ENSG00000145348_66 (sequence is synthesized)
gcgaaggttaaccttggctgacttggctcgcgagcaaagggcagcgtctgagctcccggcgttccaggagtggcctcttttgtaggagcacctgaaatgcagcgtctggtgcactaagcc

SEQ ID NO: 393229 - DNA, 120 bp, Artificial Sequence
  ENSG00000145348_67 (sequence is synthesized)
gtagcggcagcagcagccacagcgacagcgctggggccctgtgtagaagctccatcccccttgtctttgtgcttgcctgcgtccccagactcagagattatcttagaagacctaggactc

SEQ ID NO: 393230 - DNA, 120 bp, Artificial Sequence
  ENSG00000145348_68 (sequence is synthesized)
tagaaaaacaactttatcaagacatgttagagagaaatagttttgtgtcaatgtaccacattaaaggacaggaagaaaagccaaatggtattattataatagtttgcataaatattattt

SEQ ID NO: 393231 - DNA, 120 bp, Artificial Sequence
  ENSG00000145348_69 (sequence is synthesized)
aattatttaagatattcagtaaagcaggtgaatgctagtcagggtaaaagtaaacaatgcagaagcttttatggaatgatatttttgatacatcatgaggtaaagtacaacataagtaaa

SEQ ID NO: 393232 - DNA, 120 bp, Artificial Sequence
  ENSG00000145348_70 (sequence is synthesized)
aaaaattcagtatttactcacagttatttgattataatataaaagtatgcatctagactctgcaaaagagagctgtattattttctgtgctaatgaggtatttaagacttttatccattc

SEQ ID NO: 393233 - DNA, 120 bp, Artificial Sequence
  ENSG00000145348_71 (sequence is synthesized)
agtgtccatagcaactagtgtagttctcagtttgttcagcttctttagggaagaaccttatctttttctttttttcatggagtgtaaataactgccaatgttgtggggctggtggcagaa

SEQ ID NO: 393234 - DNA, 120 bp, Artificial Sequence
  ENSG00000145348_72 (sequence is synthesized)
ttgacgcttctaattattcaacacttcacccttctgatttcaaaccctctgactgctgtttaacattgttcccgccttctctgagtctgaagcctctgaatctgaagggaccaaacaaac

SEQ ID NO: 393235 - DNA, 120 bp, Artificial Sequence
  ENSG00000145348_73 (sequence is synthesized)
gagacgagttcttgattttcagtttgttcagcatttttcttgttagaggaagaatgatgccttctaagctgtttatattttgtataagaaagtggaagtcctagcctttttatttttaac

SEQ ID NO: 393236 - DNA, 120 bp, Artificial Sequence
  ENSG00000145348_74 (sequence is synthesized)
cattcatagccaaagctgaaataggagcagacattctgccttcaagttggaagttgaacagcagagcagcagagattgaaagatgttggtggagaagcattttacccattacttgaagat

SEQ ID NO: 393237 - DNA, 120 bp, Artificial Sequence
  ENSG00000145348_75 (sequence is synthesized)
atcacatgacagctcatggtgatgatgttgatttcccaataggtatgtgaaagagaagatacttggcaagatagttttaaaatgtatgtagagaagaacaaacacctacaaagagcctgc

SEQ ID NO: 393238 - DNA, 63 bp, Artificial Sequence
  ENSG00000145348_76 (sequence is synthesized)
gtccagagtatctgactgtcttctctcagatgattgcatttcatgatccagagctgagtaatc

SEQ ID NO: 393239 - DNA, 120 bp, Artificial Sequence
  ENSG00000145348_77 (sequence is synthesized)
gtgctagcaatcagggagactccgtggggtaggaccctctgagccagagtatctgactgtcttctctcagatgattgcatttcatgatccagagctgagtaatcatctcaatgagattgg

SEQ ID NO: 393240 - DNA, 120 bp, Artificial Sequence
  ENSG00000145348_78 (sequence is synthesized)
gtccagatcctccaaagacagatctgaaaatacattaacatatactcatgcaatcatctgcatacctactcttaaataagaagaaatctttttacataaagaaggacatgtttgcttccc

SEQ ID NO: 393241 - DNA, 120 bp, Artificial Sequence
  ENSG00000145348_79 (sequence is synthesized)
ggggtatgtctttatgagcagtatgagaacaaactaatatattaaataggtactggtacagttgggtgctgctataaggataccgaaaatgtggaagtgattttggaactggataacagg

SEQ ID NO: 393242 - DNA, 84 bp, Artificial Sequence
  ENSG00000145348_80 (sequence is synthesized)
cttgaaaatgtgggaaaatttggagcttcctagagacttggaatactcagaagacaggcagatgtgggaaaatttggaactccc

SEQ ID NO: 393243 - DNA, 120 bp, Artificial Sequence
  ENSG00000145348_81 (sequence is synthesized)
cattttatttgagctttgtgtgatgagaaaagtgaaacttcaggtggtattaagtagtttgccaaatttatataactatttgatggtggaagagtccaatttggcacacaatcattgctc

SEQ ID NO: 393244 - DNA, 120 bp, Artificial Sequence
  ENSG00000145348_82 (sequence is synthesized)
ttcttgttttaatataatggattaaagataatgtacatatggagtagtatataattgacatcagtatcataactgtgaatgatgtaagctttcattttttgtgaattaatgaaaaagtaa

SEQ ID NO: 393245 - DNA, 120 bp, Artificial Sequence
  ENSG00000145348_83 (sequence is synthesized)
ttaaagttaaactacggtcagaaaactgacatacactaaagaagttactagttcattttcaagcttttaaatagaatattaactaaactatggaatgtaggtattcctagacccaataat

SEQ ID NO: 393246 - DNA, 120 bp, Artificial Sequence
  ENSG00000145348_84 (sequence is synthesized)
aacatcagtgaaatgagaataaaagtttgttgtcaatatgtattatagcaatgaacttggatcagtggtgtgataaactaacaattgttgacaataaaaaaggatttcttagaagtttca

SEQ ID NO: 393247 - DNA, 120 bp, Artificial Sequence
  ENSG00000145349_0 (sequence is synthesized)
atggcttcgaccacaacctgcaccaggttcacggacgagtatcagcttttcgaggagcttggaaagggggcattctcagtggtgagaagatgtatgaaaattcctactggacaagaatat

SEQ ID NO: 393248 - DNA, 120 bp, Artificial Sequence
  ENSG00000145349_1 (sequence is synthesized)
gctgccaaaattatcaacaccaaaaagctttctgctagggatcatcagaaactagaaagagaagctagaatctgccgtcttttgaagcaccctaatattgtgcgacttcatgatagcata

SEQ ID NO: 393249 - DNA, 120 bp, Artificial Sequence
  ENSG00000145349_2 (sequence is synthesized)
tcagaagagggctttcactacttggtgtttgatttagttactggaggtgaactgtttgaagacatagtggcaagagaatactacagtgaagctgatgccagtcattgtatacagcagatt

SEQ ID NO: 393250 - DNA, 120 bp, Artificial Sequence
  ENSG00000145349_3 (sequence is synthesized)
ctagaaagtgttaatcattgtcacctaaatggcatagttcacagggacctgaagcctgagaatttgcttttagctagcaaatccaagggagcagctgtgaaattggcagactttggctta

SEQ ID NO: 393251 - DNA, 120 bp, Artificial Sequence
  ENSG00000145349_4 (sequence is synthesized)
gccatagaagttcaaggggaccagcaggcgtggtttggttttgctggcacacctggatatctttctccagaagttttacgtaaagatccttatggaaagccagtggatatgtgggcatgt

SEQ ID NO: 393252 - DNA, 120 bp, Artificial Sequence
  ENSG00000145349_5 (sequence is synthesized)
ggtgtcattctctatattctacttgtggggtatccacccttctgggatgaagaccaacacagactctatcagcagatcaaggctggagcttatgattttccatcaccagaatgggacacg

SEQ ID NO: 393253 - DNA, 120 bp, Artificial Sequence
  ENSG00000145349_6 (sequence is synthesized)
gtgactcctgaagccaaagacctcatcaataaaatgcttactatcaaccctgccaaacgcatcacagcctcagaggcactgaagcacccatggatctgtcaacgttctactgttgcttcc

SEQ ID NO: 393254 - DNA, 120 bp, Artificial Sequence
  ENSG00000145349_7 (sequence is synthesized)
atgatgcacagacaggagactgtagactgcttgaagaaatttaatgctagaagaaaactaaagggtgccatcttgacaactatgctggctacaaggaatttctcagcagccaagagtttg

SEQ ID NO: 393255 - DNA, 120 bp, Artificial Sequence
  ENSG00000145349_8 (sequence is synthesized)
aaaggagtcaactgagagttcaaatacaacaattgaggatgaagatgtgaaagcacgaaagcaagagattatcaaagtcactgaacaactgatcgaagctatcaacaatggggactttga

SEQ ID NO: 393256 - DNA, 120 bp, Artificial Sequence
  ENSG00000145349_9 (sequence is synthesized)
agcctacacaaaaatctgtgacccaggccttactgcttttgaacctgaagctttgggtaatttagtggaagggatggattttcaccgattctactttgaaaatgctttgtccaaaagcaa

SEQ ID NO: 393257 - DNA, 120 bp, Artificial Sequence
  ENSG00000145349_10 (sequence is synthesized)
taaaccaatccacactattattctaaaccctcatgtacatctggtaggggatgatgccgcctgcatagcatatattaggctcacacagtacatggatggcagtggaatgccaaagacaat

SEQ ID NO: 393258 - DNA, 120 bp, Artificial Sequence
  ENSG00000145349_11 (sequence is synthesized)
gcagtcagaagagactcgtgtgtggcaccgccgggatggaaagtggcagaatgttcattttcatcgctcggggtcaccaacagtacccatcaagccaccctgtattccaaatgggaaaga

SEQ ID NO: 393259 - DNA, 120 bp, Artificial Sequence
  ENSG00000145349_12 (sequence is synthesized)
aaacttctcaggaggcacctctttgtggcaaaacatctaaggcctgaaaaccattcacatatgggtcttctaaatttcaacagtgccacttctgcattctctgttctcaaggcacctgga

SEQ ID NO: 393260 - DNA, 120 bp, Artificial Sequence
  ENSG00000145349_13 (sequence is synthesized)
tggtgaccctgggccgtcctctcctcctcttcatgcatgtttctgagtgcatgaagttgtgaaggtcctacatgtaatgcatatgtgatgcatcatcttatcatatattccttcctatac

SEQ ID NO: 393261 - DNA, 120 bp, Artificial Sequence
  ENSG00000145349_14 (sequence is synthesized)
attgtttacacttcaactacggggatgttccacacaaacttaaattactgttggcaaaacaatagggggagattagacaaaaaaaaaaatccacaatattccaagtacaactcttcatca

SEQ ID NO: 393262 - DNA, 120 bp, Artificial Sequence
  ENSG00000145349_15 (sequence is synthesized)
agtttctctgttaatgccaagatttaacagacttaagaactattgttctctgaatgacagttgtaagagaaatgtaaattttttagaactctttgctgttaatctgttttggtttgtttg

SEQ ID NO: 393263 - DNA, 120 bp, Artificial Sequence
  ENSG00000145349_16 (sequence is synthesized)
ctttctctcgccgcgccgtcttgaagccgcgcgggctcgtgagcagcgcgaggccgccaaggtgcctcgcttcgccggagccgctgccgcccgccggagggaagccggcctcgggcgcgc

SEQ ID NO: 393264 - DNA, 120 bp, Artificial Sequence
  ENSG00000145349_17 (sequence is synthesized)
gcgccccgcgcctgagcctgctgacagcggccgctgggctcaggctgtccgctctgggctccgcggcctcggccccgctgcactccacctccgccccctcggactccctcccctctgctt

SEQ ID NO: 393265 - DNA, 120 bp, Artificial Sequence
  ENSG00000145349_18 (sequence is synthesized)
ggactccctcccctctgcttctactcctcctgctccagtgcggatcgtttcgcaactgcttgccactcgtcccgtgcctggctgtttttccatttcccggccccctcttcttgagtactt

SEQ ID NO: 393266 - DNA, 120 bp, Artificial Sequence
  ENSG00000145349_19 (sequence is synthesized)
taccccctgcatttggggacagggactggaaaaggggcgggtggagcgtccagtggagaagaaggaagcgaggcccgcaggaggaggaggatcggcggactgtggggaggagaccccacg

SEQ ID NO: 393267 - DNA, 120 bp, Artificial Sequence
  ENSG00000145349_20 (sequence is synthesized)
ccaccctttctggtcatctcccctcccgccccgcccctgcgcacactccctcgcgggcgagctactttcggaccaggaaagtaagagcggccctgggtgacagcgccgcggggccagtcc

SEQ ID NO: 393268 - DNA, 120 bp, Artificial Sequence
  ENSG00000145349_21 (sequence is synthesized)
ctggtgtgatcctggttaaaatggatgatttttcattgaaagttttgctgattaacaattaaagtgggatgatatgtgggcaaaatcacttatgaaagtagaagcaagaatcagttggtt

SEQ ID NO: 393269 - DNA, 120 bp, Artificial Sequence
  ENSG00000145349_22 (sequence is synthesized)
tttggtcaaactgtgtaaactggaaaaattcacatcatttctgagtttaatcactttaggatatattcacattgttttggtgaatttgctgaattgaattgtttttctttctcaaatctg

SEQ ID NO: 393270 - DNA, 120 bp, Artificial Sequence
  ENSG00000145349_23 (sequence is synthesized)
tgatctcttttctttatcctgtttctttgttcctttcgtttgctttcttatttttcttttgttccattcttttcttacttttttcccttttccttttttggggaggctggctagtagtgt

SEQ ID NO: 393271 - DNA, 120 bp, Artificial Sequence
  ENSG00000145349_24 (sequence is synthesized)
gtgagaaaagaatagaagtgaaatttgcataatgaatgtaaaagggaaataaaagtcttttgaaggtagctatactagcacttttgatcatcttcagggcccacaaaaatgttgtcaaga

SEQ ID NO: 393272 - DNA, 120 bp, Artificial Sequence
  ENSG00000145349_25 (sequence is synthesized)
ttttaaaggtttataattctgcttaagctctagtttggacttaggtatcctaactatgttggaggtatttgcattgtttaaagttaggataaaagcaagttcctcctgtgactgcaacgt

SEQ ID NO: 393273 - DNA, 120 bp, Artificial Sequence
  ENSG00000145349_26 (sequence is synthesized)
cttactgattgggacagttgccaggaggataccaacttgatagcagagggggttttatgcaaacgcactcacctccgccttggggaatgaaagggtcacttctgcatcatcactagctag

SEQ ID NO: 393274 - DNA, 120 bp, Artificial Sequence
  ENSG00000145349_27 (sequence is synthesized)
ttttctagtgttagagaggcttacaaatgtttgccattctcataagtgttttgaacttgatctttgtgacttgtgcttttttagcttctctcttgaatcagagtatcattgtcttcctcc

SEQ ID NO: 393275 - DNA, 120 bp, Artificial Sequence
  ENSG00000145349_28 (sequence is synthesized)
aaggagttagaatttcccagtttaaaacaaaaagggaaatgtcctaggttttctttgtgcttctcatttttcctttgttgattcaattcctgtgatttttgttctcttccctgaagtgct

SEQ ID NO: 393276 - DNA, 120 bp, Artificial Sequence
  ENSG00000145349_29 (sequence is synthesized)
ttacagtgcatggaatctccatcattgttattttaacgatagtaattcacagtcctcagaagcctatttttaaagcagaagcaaaaaagaaaaacaaaataacaaaaacaacccttcctc

SEQ ID NO: 393277 - DNA, 120 bp, Artificial Sequence
  ENSG00000145349_30 (sequence is synthesized)
ttttctctcatctcacctctctgtgttgattactaatcatcttagatattattgctagtggatgtatggtagatgggttgaagcttttctgataattattacacaatttaaaacaacata

SEQ ID NO: 393278 - DNA, 120 bp, Artificial Sequence
  ENSG00000145349_31 (sequence is synthesized)
tatatttaaaataaatatatacagtaaatatattgagccatgttaacctgccaatgagatctgtgaaaaaataatggcctcatttttctctttttaatttcttttacccttttgtgaagc

SEQ ID NO: 393279 - DNA, 120 bp, Artificial Sequence
  ENSG00000145349_32 (sequence is synthesized)
agctatacgtggcatacatgtatttaaagaaaaaaaaatagatgtagagtgttttttttacacttttaacttagcatgtggtgttgaagtattactgtagatcaagtttgtcttccgcac

SEQ ID NO: 393280 - DNA, 120 bp, Artificial Sequence
  ENSG00000145349_33 (sequence is synthesized)
taagatgtgaggaaattgtgatttgttctctccaccacaaatgaattacacatttattatcttctatcattttgaaacactgcagtttaccatgggacactgtatatatttcttgccata

SEQ ID NO: 393281 - DNA, 120 bp, Artificial Sequence
  ENSG00000145349_34 (sequence is synthesized)
atggtaaaggactgattgatatatttaagagttaataaatttgtgatttctgctgacagtgcgtccatctttatttcttcagaagaggtactgtatgtatgcctgcatagtgctggccag

SEQ ID NO: 393282 - DNA, 120 bp, Artificial Sequence
  ENSG00000145349_35 (sequence is synthesized)
tgtcaagggcagtgtgtcctactctggtctcatttagtacataacaatttgcacttggtgagaatggcaagttaattgttctctgtgagcaaaacaatggtctcttctgggaaaatgttg

SEQ ID NO: 393283 - DNA, 120 bp, Artificial Sequence
  ENSG00000145349_36 (sequence is synthesized)
ctgagaacaatatagttaacaactaagactcctaaaagcttctctaaactgtaccctccaatccagccttcacatggctgctttttttttttttttttaatacgaacctgtccttgtaac

SEQ ID NO: 393284 - DNA, 120 bp, Artificial Sequence
  ENSG00000145349_37 (sequence is synthesized)
actttgatgttatcatttctgggatacaggcaagcaccccagctcctgctactccccagcttgaacttgagcatacatggatgctcagcttcttttgatttgctaaaaacatcacacttg

SEQ ID NO: 393285 - DNA, 120 bp, Artificial Sequence
  ENSG00000145349_38 (sequence is synthesized)
ctcacatgcctgtttatgctgttcatgttgtttatgtttcttacctagaataaatagtctcttcccctacttcttttcccgacttcttactttttcctaagattcagtgtacagcatcat

SEQ ID NO: 393286 - DNA, 120 bp, Artificial Sequence
  ENSG00000145349_39 (sequence is synthesized)
gctccacagcaaaccttcctaggccctattctgggcttgccttccctctcaaaacctacataatagattgtatttacctctcctgtcaaccacattgttttgaaaatatatttctatttg

SEQ ID NO: 393287 - DNA, 120 bp, Artificial Sequence
  ENSG00000145349_40 (sequence is synthesized)
tgtctcctctactgcagtataatgtctccatgggcaagaactgtgtattcatcattgcattcctaaacccaaaccaaggccaggaatggagatatcattgataaatagttgttgaattga

SEQ ID NO: 393288 - DNA, 120 bp, Artificial Sequence
  ENSG00000145349_41 (sequence is synthesized)
ggccaagcccttttgataacagaagcctcaaggggtacccagatagtccttgttttaatgatgggttctctcaccactgtcttgatgctctgagcaagttacctcttccctctgaccctc

SEQ ID NO: 393289 - DNA, 120 bp, Artificial Sequence
  ENSG00000145349_42 (sequence is synthesized)
agtttccatatttgtaaaatgagaataaacataccaacttaataaagatattgtgaggattaatgggtacagagtgactagaatgatatttgatagaaattaaatggtagcagtataact

SEQ ID NO: 393290 - DNA, 120 bp, Artificial Sequence
  ENSG00000145349_43 (sequence is synthesized)
attctgatcactgacattaatattcctattgttattattctttgctcacgagggtatacaactcttgttttgctgttgggctgccctctttatgtaggtttactgttaatgctgaggata

SEQ ID NO: 393291 - DNA, 120 bp, Artificial Sequence
  ENSG00000145349_44 (sequence is synthesized)
tactcggactcaaatgtctcagcagaaggctgagagacaccaaatgaagtggtcatctagctgaatgtaggaaaaatgaaatgtagtagcaaatcagtatattctaaggaaattttcaag

SEQ ID NO: 393292 - DNA, 120 bp, Artificial Sequence
  ENSG00000145349_45 (sequence is synthesized)
gaatattaatcttcacccaaattttgaatttttatgtaaaaaattataatttaagggtaaacatagatgacacagctttcgagtgatttcattgaataaaattctactgacttctatgaa

SEQ ID NO: 393293 - DNA, 120 bp, Artificial Sequence
  ENSG00000145349_46 (sequence is synthesized)
ttgttaatacacccatggtcagctccttctacttattccattgttaatagcatggtatatgttatttaacgctagtagttggttacactgatgaaaataaatgccttcacgggaaaggtt

SEQ ID NO: 393294 - DNA, 120 bp, Artificial Sequence
  ENSG00000145349_47 (sequence is synthesized)
atcaaaatctcacagggttaaatctagaggacttgtataataaggcaaaatatttgtgacttcatcttctcaattgacagaagaaggggatatcagaggaaaacatagggaggagtttct

SEQ ID NO: 393295 - DNA, 120 bp, Artificial Sequence
  ENSG00000145349_48 (sequence is synthesized)
aaaatggccaatatattatcaggagtttcatttcatagatgatcccctaaagctcagttagagagacagcatttaaaaggccattgtcaggtagtgcaatgtcattctcacctcaccact

SEQ ID NO: 393296 - DNA, 120 bp, Artificial Sequence
  ENSG00000145349_49 (sequence is synthesized)
ctacctcagatatcatttgcttttccagtcagcgattaggcacatatttattgtgaatcacctaggtgcttaatctgtgccagattcaacacaaagtacaagatattgctttcaagaaac

SEQ ID NO: 393297 - DNA, 120 bp, Artificial Sequence
  ENSG00000145349_50 (sequence is synthesized)
atgtattctcatttagccaatcattgattctaaagaaaaaaatgatataataaagtttatcatcaacttcagaatacagtagagttaatgaacagtgtagtaaactgtttataacagttt

SEQ ID NO: 393298 - DNA, 120 bp, Artificial Sequence
  ENSG00000145349_51 (sequence is synthesized)
aaaggagggagtgcgagagatccacgaagggacaggcttggagtcgctagagggaggtgtgggaccagcgaggagggggcttcgccagggagggggtgctggcaggcggagggagcggcg

SEQ ID NO: 393299 - DNA, 120 bp, Artificial Sequence
  ENSG00000145349_52 (sequence is synthesized)
tgctaggggcagtcaagaaagtactgtaatttctcaacttcatggttacttgtcttgaattggaagtagaactgagactatgtagatggattaagttctgattatacattattgatttgg

SEQ ID NO: 393300 - DNA, 120 bp, Artificial Sequence
  ENSG00000145349_53 (sequence is synthesized)
caaattggaacaatttggacaaattaaaatttgaaggtttcttggcaagaacaacattttaagaaaaaaattagtaaatcatttttatatttgtacatagaatctccacaactcttcagt

SEQ ID NO: 393301 - DNA, 120 bp, Artificial Sequence
  ENSG00000145349_54 (sequence is synthesized)
tatggacccagaagtggcatgtgtcatccttattattttgtatcctttacttacgtttagttgtatttacattcttctataggtcttgatattaaacattcattttcttctttcattgaa

SEQ ID NO: 393302 - DNA, 120 bp, Artificial Sequence
  ENSG00000145349_55 (sequence is synthesized)
caaaattatcaacaccaaaaagctttctgctaggggtgggtattttcaaccacatatattggttaattttgtatttgtcatgttgattataggttctgttgtatgtaaatatatcatgta

SEQ ID NO: 393303 - DNA, 120 bp, Artificial Sequence
  ENSG00000145349_56 (sequence is synthesized)
gttataactgaactttagacttaggtatcatattatatattaagattattttcttcctgaatgcttcttggtctgtacagcttaaaaatacatggaaagatataattattatttgataca

SEQ ID NO: 393304 - DNA, 120 bp, Artificial Sequence
  ENSG00000145354_0 (sequence is synthesized)
agtgcccgccggccgcttccgctcccggcgcaggcgcggcagcttggccagagcggagggggctcgggagaggagtggacgccgctggccaggatggtgctggagagcgtggcccgtatc

SEQ ID NO: 393305 - DNA, 120 bp, Artificial Sequence
  ENSG00000145354_1 (sequence is synthesized)
gtgaaggtgcagctccctgcatatctgaagcggctcccagtccctgaaagcattaccgggttcgctaggctcacagtttcagaatggcttcggttattgcctttccttggtgtactcgca

SEQ ID NO: 393306 - DNA, 120 bp, Artificial Sequence
  ENSG00000145354_2 (sequence is synthesized)
cttcttggctaccttgcagttcgtccattcctcccgaagaagaaacaacagaaggatagcttgattaatcttaaaatacaaaaggaaaatccgaaagtagtgaatgaaataaacattgaa

SEQ ID NO: 393307 - DNA, 120 bp, Artificial Sequence
  ENSG00000145354_3 (sequence is synthesized)
gatttgtgtcttactaaagcagcttattgtaggtgttggcgttctaaaacgtttcctgcctgcgatggttcacataataaacacaatgaattgacaggagataatgtgggtccactaata

SEQ ID NO: 393308 - DNA, 120 bp, Artificial Sequence
  ENSG00000145354_4 (sequence is synthesized)
ctgaagaagaaagaagtataataataataacaatattttctcattctttgtgtatagaaaattttaaaatggtggtcttaattattactactggttgaacaattatttcttccaatttat

SEQ ID NO: 393309 - DNA, 120 bp, Artificial Sequence
  ENSG00000145354_5 (sequence is synthesized)
tttcttcctgcactactgtttgtatttgatcctttgtctattcagtcacttaattagaaattaaattgtcaagcctcttattctgacttcaaagaattaatgtatcttccaacaataaaa

SEQ ID NO: 393310 - DNA, 120 bp, Artificial Sequence
  ENSG00000145354_6 (sequence is synthesized)
tcacttctgattttaatctaggaaaacctaaattgtggctatggatccaaagctgtttgtttctttgaatatcaatattttcaacaggatcttgtatttaaaattcccacctacattgtt

SEQ ID NO: 393311 - DNA, 120 bp, Artificial Sequence
  ENSG00000145354_7 (sequence is synthesized)
aaatatgttattttttcatatctcttttggttttgataatctgaagtgtttttttctcgttttggccttccaaactgcatttggttaggtgaattaagaaaaatattgccatcaagaatt

SEQ ID NO: 393312 - DNA, 120 bp, Artificial Sequence
  ENSG00000145354_8 (sequence is synthesized)
acttgtgttttcacagagatagactctttgctttatagagattgttgtgtatttaatatgaatatcccagctttagaaaagaagtaaactggatacaaaaagttccattgaggaacagtt

SEQ ID NO: 393313 - DNA, 80 bp, Artificial Sequence
  ENSG00000145354_9 (sequence is synthesized)
aactgactcagtgacagctggggtggaatggcaagaacacttacaaccaaactcatgggctgctgcaatttgaagataat

SEQ ID NO: 393314 - DNA, 120 bp, Artificial Sequence
  ENSG00000145354_10 (sequence is synthesized)
ttacaaccaaactcatgggctgctgcaatttgaagataattggtaataaacataagacattaattcatattaaaatagttcagtgttcaaaattgtgtttatgtggatatttttctcttt

SEQ ID NO: 393315 - DNA, 120 bp, Artificial Sequence
  ENSG00000145354_11 (sequence is synthesized)
ttaacactataaaccattaaaatacagtcatcccttgtatacgctagggactggttccagggccacacatataccaaaatctgcccatactcaagtcccacagaaagtcttgcagaaccc

SEQ ID NO: 393316 - DNA, 120 bp, Artificial Sequence
  ENSG00000145354_12 (sequence is synthesized)
atatgtagaaaagttggccctccagttgaccctccgtacacatgagtttcacatcccatgcacaaatgctgatctgtgtgacctcacctgcatttgattgaaaaaagtatgcgcgtaatt

SEQ ID NO: 393317 - DNA, 120 bp, Artificial Sequence
  ENSG00000145354_13 (sequence is synthesized)
gtacccacccagttcaaacccgtgtgtaagggtcaactgtacaaaaaagtttgtgaaataaacgtactggagaatctttaaaatttttgtgctttttaatcctactattatgaatctttt

SEQ ID NO: 393318 - DNA, 120 bp, Artificial Sequence
  ENSG00000145354_14 (sequence is synthesized)
tagtttcatcttacattactactctcataatagctatccttagccaggtgccatggcacaggcctgtagtcccaactgctgggaagattgaggtgggaggatggctgcagtacaagagcc

SEQ ID NO: 393319 - DNA, 120 bp, Artificial Sequence
  ENSG00000145354_15 (sequence is synthesized)
caggagttcaaggccaggctgggcaacctagtgctccgcctctgctgggctctgtagggaatcctttctgttgtaaaagagttaccatttaactcccttcactgagtgcgtttctgagac

SEQ ID NO: 393320 - DNA, 120 bp, Artificial Sequence
  ENSG00000145354_16 (sequence is synthesized)
cttgctaggcactctggaaactgcttagttgagaaaagacaaatacaaaagcttttctttagtctatttaagatacagtttattcagttcactttgctttctttttataagaatgtacaa

SEQ ID NO: 393321 - DNA, 120 bp, Artificial Sequence
  ENSG00000145354_17 (sequence is synthesized)
gaggcagacagaggtaatccttctagaaataaaactaattgttattgggcacttgtatgtaccagacactacactaagcatggtacttgggtttttaatttattacatgtaatgtcagta

SEQ ID NO: 393322 - DNA, 120 bp, Artificial Sequence
  ENSG00000145354_18 (sequence is synthesized)
ggttcaattatatgatcgtaacatcttcatgaccagcagcatgtattttagagttagaaatgtagtctggtttttgagaagttttacaaggtgtatgtccaaaattgttctttcctcaca

SEQ ID NO: 393323 - DNA, 120 bp, Artificial Sequence
  ENSG00000145354_19 (sequence is synthesized)
tgtcagtgggggataaatacagcattgctctcacttctttgactctgggtgctttttcggatacattttcttcaacactgttaaggggcctcactgtcagattaaccaattatttttcca

SEQ ID NO: 393324 - DNA, 120 bp, Artificial Sequence
  ENSG00000145354_20 (sequence is synthesized)
cagttggtcaccagactttggaaaaaatccacctcaccaaaattttggatatcctgatctgtgttcatgaaatgctcttctttttgtaaaatctatcactgcatctcacagcaacttgtt

SEQ ID NO: 393325 - DNA, 120 bp, Artificial Sequence
  ENSG00000145354_21 (sequence is synthesized)
ttcacacatgttctagtggttcccataacttagattttacaggaggcaaatttactaaaaatgaggagactaaaatgaatgaccaactttgaattttgtcaaataacattgaaaatgaat

SEQ ID NO: 393326 - DNA, 120 bp, Artificial Sequence
  ENSG00000145354_22 (sequence is synthesized)
tatctcataaaaggtaattttaataccccaaaagtaagatggttgtactctcagaataaagactttttccctgccacattttcagttgttaaaatatgctaagagctatgcccatatctt

SEQ ID NO: 393327 - DNA, 120 bp, Artificial Sequence
  ENSG00000145354_23 (sequence is synthesized)
ttcccacctgtgcacatttttcagaagcgtagggttggtagtaagctgttgctttaataactcctttaaataagcattattagcagtttgcattacttcttgtaaatttacacaatttta

SEQ ID NO: 393328 - DNA, 120 bp, Artificial Sequence
  ENSG00000145354_24 (sequence is synthesized)
cttgaaatacatgtcttcggtttctagagccttcaaaatacagccctgttgttactgcgtcacatgattgttttgaggactgcttctgcttacctaggaaactactcatgccttactcag

SEQ ID NO: 393329 - DNA, 120 bp, Artificial Sequence
  ENSG00000145354_25 (sequence is synthesized)
caaatgaacatcactattacataaacatcaggtatccaaaagtgttagcaggcttgaggtatgaatgattcattcatatgggtaattaagcaagttgaattatggaaagcacctcacaat

SEQ ID NO: 393330 - DNA, 120 bp, Artificial Sequence
  ENSG00000145354_26 (sequence is synthesized)
tcacacaattcagctttgagttcaatgccaaatacgatgattcattaagttgactttgtattttgtaacctaatttgttaataagtaagttacaggaagccaattaagccagctgctgat

SEQ ID NO: 393331 - DNA, 120 bp, Artificial Sequence
  ENSG00000145354_27 (sequence is synthesized)
ctatatagtactaccttcctcattgtgattccatagtcttccaatagaaatgtgctgtcagaatctgtatagagagtttgtaaatgccactatttaacaaggttcttaagaatttaggtg

SEQ ID NO: 393332 - DNA, 120 bp, Artificial Sequence
  ENSG00000145354_28 (sequence is synthesized)
gatgttttatttgatacctaccaaagaagcctaagtaattgtataatacttaacccatttagaattcagttgtggcagcataaccaatctggagagaccaggggagatgttactaatgct

SEQ ID NO: 393333 - DNA, 88 bp, Artificial Sequence
  ENSG00000145354_29 (sequence is synthesized)
taaccaatctggagagaccaggggagatgttactaatgcttgtactttattcagaaatgagtgcctcattggcttggtgcagtgacga

SEQ ID NO: 393334 - DNA, 120 bp, Artificial Sequence
  ENSG00000145354_30 (sequence is synthesized)
tgatctcaggagtaccataccagcttgggcaacgtggtgagatctcatctctacagaaaaatgcaaaaattagccgggcacagtggcgcaccagtagtcccagttactcgggaggctgag

SEQ ID NO: 393335 - DNA, 120 bp, Artificial Sequence
  ENSG00000145354_31 (sequence is synthesized)
actgcactccagcctgggcaacagaagtgaaaccctatcttaaaaaaaaaaaaagtcttttttttttttcatctaatcaaatttattgtggcagaaatcagtacgaagttcgtaggacag

SEQ ID NO: 393336 - DNA, 120 bp, Artificial Sequence
  ENSG00000145354_32 (sequence is synthesized)
tggcagaaatcagtacgaagttcgtaggacaggaggaaaccaatataaatatctcagcattgtaggaaatttaacccatggaaagcaggggtgaattaaagaccactttgaaggctggga

SEQ ID NO: 393337 - DNA, 120 bp, Artificial Sequence
  ENSG00000145354_33 (sequence is synthesized)
aaagcagataatttagatatagtcaaagtatgaaatcattgatagatccagaacaaggaaatgatgtatgtgtttacatattacatctactttattaacaattttccctctgttaaacta

SEQ ID NO: 393338 - DNA, 120 bp, Artificial Sequence
  ENSG00000145354_34 (sequence is synthesized)
atatcgactaatagtagtctaggtaagtcaagttcaaattaagtggtaattgaaaaagtcttctttttaaaaaatttttaatggtagaggcagcagctacccagagtctacttattctta

SEQ ID NO: 393339 - DNA, 120 bp, Artificial Sequence
  ENSG00000145354_35 (sequence is synthesized)
cttcacattgaattctaacaagtttggttatctgatttctgcttcttaacaaatcacaagtatcaaaagggtcttgcagaaggggtgaactacaaaatgtgacagctgacagcaagtcag

SEQ ID NO: 393340 - DNA, 120 bp, Artificial Sequence
  ENSG00000145354_36 (sequence is synthesized)
gggaacaaaaataaatttaaggtgaacattaaaggcatagcagcttgagacaatttataggattctgcatacaactgtctctgaggacatcactgtgatcaaattatacaagtgatgttt

SEQ ID NO: 393341 - DNA, 120 bp, Artificial Sequence
  ENSG00000145354_37 (sequence is synthesized)
agtgatgaattggaatcaagataagtagtatgtgttattcaaaaaggcaggatatgtgttgcatttggtggtaacaatttccccttagctatttagttaaaagcttagtgcttaacatgt

SEQ ID NO: 393342 - DNA, 120 bp, Artificial Sequence
  ENSG00000145354_38 (sequence is synthesized)
tggaaaatttatatgtaaaatatattgacttactcgatgattggaggctttatcacaggaagttttcccattcaattgaaacatttttcaagcttaatgactataatttactacataatt

SEQ ID NO: 393343 - DNA, 120 bp, Artificial Sequence
  ENSG00000145354_39 (sequence is synthesized)
atttattttgttaaagtttgaggaaaactaaataaagcagtagcaatttaagtcataataaattttgttagatgacttcttccactttagggggaattaaaaatcatgtttaaaaaccac

SEQ ID NO: 393344 - DNA, 120 bp, Artificial Sequence
  ENSG00000145354_40 (sequence is synthesized)
atgtgcagcagttctgtgactccctcaacatccggttggccatatagtccctttgcaccacagaggttggagtatagaatatgcccaaagctgttttgttttgttttaactatgcttcat

SEQ ID NO: 393345 - DNA, 120 bp, Artificial Sequence
  ENSG00000145354_41 (sequence is synthesized)
catctgaggttgtgttaacatagtttgtcctaatagtcttttactggaaacttgctatatttgatcatgttcagcaagtaaactaattttatctactttcatatattttgagacaaagtc

SEQ ID NO: 393346 - DNA, 120 bp, Artificial Sequence
  ENSG00000145354_42 (sequence is synthesized)
ctactttcatatattttgagacaaagtctggccctgtcacccaggctggagtgcgggggcatgatcgtagctcactgcagcctcagcctcttgtgctcaagcgatcctcccacctcagcc

SEQ ID NO: 393347 - DNA, 120 bp, Artificial Sequence
  ENSG00000145354_43 (sequence is synthesized)
ttcatcatgcccggctaattttttatttttctaagagacagagtctcactgtgttacccaggctggtctcgaagtcctggactcaagtgatcctccctgcctcagcactcccaaagtgct

SEQ ID NO: 393348 - DNA, 120 bp, Artificial Sequence
  ENSG00000145354_44 (sequence is synthesized)
gggattgcaggcatgagcaaccatgcctggtgttttatcttttgcagaaatccaatttagtaaagtcatgttgtagcaagcatcactttaatataaaaagtgtacagcttatattattag

SEQ ID NO: 393349 - DNA, 120 bp, Artificial Sequence
  ENSG00000145354_45 (sequence is synthesized)
caattgtactgtttaattttatattagttatggtcttgaaggacattgaaaatctgttcagaaagactatgtttttcaaccagagatgacatcactctaactttcctttggtttaaatgc

SEQ ID NO: 393350 - DNA, 120 bp, Artificial Sequence
  ENSG00000145354_46 (sequence is synthesized)
ttgattcttcgcttacaaaacttctgttttgaacaactatggtgagaaagtatatttgtgatactgttttcttagaacactgttgtcagatagatcagccataatgttaacacatttctg

SEQ ID NO: 393351 - DNA, 120 bp, Artificial Sequence
  ENSG00000145354_47 (sequence is synthesized)
atctctattataaggctgtaattttccaaaataatacagaaaaggagaaaagggtagtacatttcataattagagataaccctgtactagtgagaaaataaaaatgtcaagtttattaaa

SEQ ID NO: 393352 - DNA, 120 bp, Artificial Sequence
  ENSG00000145354_48 (sequence is synthesized)
gcagctgcctggggaacgcctgtgaggcagtctccgggtgcttgatgccccagggtcttttgtcctcggagttgtctccggtgtcattccgtggcaagataccaggtttttgcagagaag

SEQ ID NO: 393353 - DNA, 120 bp, Artificial Sequence
  ENSG00000145358_0 (sequence is synthesized)
gctactgcgaggagccggcgcagggtggcccgggaggggtgagcagggtgccgctggctgctggggtctgcaggtcaccgagtccccaggagaggggactcctaagaagccacctgcctg

SEQ ID NO: 393354 - DNA, 120 bp, Artificial Sequence
  ENSG00000145358_1 (sequence is synthesized)
tgtttacccggcagcgagcgcgcaggcccccgcgaactcctggcagcgctcaggaaaggccgttgcgcctcgcgaaggaaacagagccgttgaccatggttgcaactggcagtttgagca

SEQ ID NO: 393355 - DNA, 120 bp, Artificial Sequence
  ENSG00000145358_2 (sequence is synthesized)
gcaagaacccggccagcatttcagaattgctggactgtggctatcacccagagagcctgctaagtgattttgactactgggattatgttgttcctgaacccaacctcaacgaggtaatat

SEQ ID NO: 393356 - DNA, 120 bp, Artificial Sequence
  ENSG00000145358_3 (sequence is synthesized)
ttgaggaatcaacttgccagaatttggttaaaatgctggagaactgtctgtccaaatcaaagcaaactaaacttggttgctcaaaggtccttgtccctgagaaactgacccagagaattg

SEQ ID NO: 393357 - DNA, 120 bp, Artificial Sequence
  ENSG00000145358_4 (sequence is synthesized)
ctcaagatgtcctgcggctttcctcaacggagccctgcggcttgcgaggttgtgttatgcacgtgaacttggaaattgaaaatgtatgtaaaaagctggataggattgtgtgtgattcta

SEQ ID NO: 393358 - DNA, 120 bp, Artificial Sequence
  ENSG00000145358_5 (sequence is synthesized)
gcgtcgtacctacttttgagcttacacttgtgtttaagcaggagaactgctcatggactagcttcagggactttttctttagtagaggtcgcttctcctctggtttcaggagaactctga

SEQ ID NO: 393359 - DNA, 120 bp, Artificial Sequence
  ENSG00000145358_6 (sequence is synthesized)
tcctcagctcaggatttcgacttgttaagaaaaaactttactcactgattggaacaacagtgattgaagggtcctaaaaagggaaaatatataaagattatttcatgattgggtagtaaa

SEQ ID NO: 393360 - DNA, 120 bp, Artificial Sequence
  ENSG00000145358_7 (sequence is synthesized)
actattcagctagtcagctaaagtcatttgtagtttgccccacctgccctaaataagaaaccccaaatgtagtctcttttctttctgtgtttcacattcatagcaactgcagctaacagg

SEQ ID NO: 393361 - DNA, 120 bp, Artificial Sequence
  ENSG00000145358_8 (sequence is synthesized)
ctgattttctggcctttggagaagtgattcaaaatagtgtagattttctgcatagatcccatttttgtacagaattgaatgggatggaataggtaagcaaaagtagaagcccatttgagt

SEQ ID NO: 393362 - DNA, 120 bp, Artificial Sequence
  ENSG00000145358_9 (sequence is synthesized)
tttacatttgattccacaatttggtttcaggtaggcttggtaatagactatataaaccagatttgcctattttgattttcatatggcttttttttctgtaagttttcagaggatttttta

SEQ ID NO: 393363 - DNA, 120 bp, Artificial Sequence
  ENSG00000145358_10 (sequence is synthesized)
gtttttagacaggagggtaggattaagtaggtgagtttaattaaagcttaaccctaggtaagagtaaatgagaaatattacggcaataatggaactgcttcactgtttcttggtgacttc

SEQ ID NO: 393364 - DNA, 120 bp, Artificial Sequence
  ENSG00000145358_11 (sequence is synthesized)
ctcactctaatgttttaaagaggcaacaaaagcttgtggtgccatttcagtaaccacggtgttgttttagatgcctttataagctcagtttcccctgttcttaagtgttgaatactgtct

SEQ ID NO: 393365 - DNA, 120 bp, Artificial Sequence
  ENSG00000145358_12 (sequence is synthesized)
ttaaactagaaaaatgcaaaatattgaactgatatttttgtgtgtagttgattactcttccattgagtgaatgatgaatacctgtgaggataggaaattagttctgagatctagtccctc

SEQ ID NO: 393366 - DNA, 120 bp, Artificial Sequence
  ENSG00000145358_13 (sequence is synthesized)
tctgattcacttagtaatctatcctcttttcagtattacatgtgcttaatctcagatgaaccatttcaccatggcagtgttatctcatctctgggcttttctgggaattgaagtatctct

SEQ ID NO: 393367 - DNA, 120 bp, Artificial Sequence
  ENSG00000145358_14 (sequence is synthesized)
ccttaaccccaattgtcaagggtagtagctgtatactaccactttgaattattgaaacgggtcaatttacgaagtctgcattggctatggagatatggtttatagtacagcctagagaat

SEQ ID NO: 393368 - DNA, 120 bp, Artificial Sequence
  ENSG00000145358_15 (sequence is synthesized)
gaaactcaccgtccagataaccatgcatgcacccagattttttccaccttggatacctgtcactagggaataataaaggcctgattttttgtcttattccaactaagtagatcattatct

SEQ ID NO: 393369 - DNA, 120 bp, Artificial Sequence
  ENSG00000145358_16 (sequence is synthesized)
ctttccttttttatgttaatgagagaatttagcctccactcaacaatgttcaattcagcaaggctttcatatccttgctgtgggtcgtggataaggagcttattcaggtttcctgcccta

SEQ ID NO: 393370 - DNA, 120 bp, Artificial Sequence
  ENSG00000145358_17 (sequence is synthesized)
gctattagctccacttcacatgctggagaccggcgtagggacagatgtattcatcctggtgttactgaaaaacaggtgtgatcctgttactgatactataagtgacctaaaatgtcactg

SEQ ID NO: 393371 - DNA, 120 bp, Artificial Sequence
  ENSG00000145358_18 (sequence is synthesized)
ttcaaattagccagtgttctaacaaactaaactcttcaaatgcttggaaagatactacaaagccaatctttatagaattgggccaagataaatctatgttgttttgcatggctattgtta

SEQ ID NO: 393372 - DNA, 120 bp, Artificial Sequence
  ENSG00000145358_19 (sequence is synthesized)
agctccaaaggttcactgtgtttctgccgctgtcctggagttgtcaccactgactgggcaaggcttcttgggcatggatgtagaactgttgtccttttcccactaacagttatctttgac

SEQ ID NO: 393373 - DNA, 120 bp, Artificial Sequence
  ENSG00000145358_20 (sequence is synthesized)
tctcttgcctgttatgcttacaaaatggtgatggcttatggaaggctgttaaattaatattcctgttaaaggaaattaaagtttgtctatttttgacaataaaacattatatatttttaa

SEQ ID NO: 393374 - DNA, 120 bp, Artificial Sequence
  ENSG00000145358_21 (sequence is synthesized)
aggtgagcgaagctgcggccttggtgggggcagcggggccggggggcgctccgcggggcaggtcgcttccaagttttgcgaactgttgagttagtttcaggttgcggctccgctcccagg

SEQ ID NO: 393375 - DNA, 120 bp, Artificial Sequence
  ENSG00000145358_22 (sequence is synthesized)
gctttgtcaaattgagttgcagaggccggttccacccctttggcaaaggagttcctccgctagttcgctcccgggacgccgggcattttaggagcctctgcacgactcgcctgcttttgc

SEQ ID NO: 393376 - DNA, 120 bp, Artificial Sequence
  ENSG00000145358_23 (sequence is synthesized)
gagtgtgaaagcgcggacgctcggggaggggtcgcactgaacaatcaggttcaggctttgacgagtcgtgcacccggaattgcggtcccagtggcccgagatctaccctggaagcaacag

SEQ ID NO: 393377 - DNA, 120 bp, Artificial Sequence
  ENSG00000145362_0 (sequence is synthesized)
aagtgcatacccgctagtggtctgtacaggcggcacggtttgatggcagagatattttctttccaaactgttcaaaatgatgaacgaagatgcagctcagaaaagcgacagtggagagaa

SEQ ID NO: 393378 - DNA, 120 bp, Artificial Sequence
  ENSG00000145362_1 (sequence is synthesized)
gttcaacggcagtagtcagaggagaaaaagacccaagaagtctgacagcaatgcaagcttcctccgtgctgccagagcaggcaacctggacaaagttgtggaatatctgaaggggggcat

SEQ ID NO: 393379 - DNA, 120 bp, Artificial Sequence
  ENSG00000145362_2 (sequence is synthesized)
agacatcaatacctgcaatcagaatggactcaacgctctccatctggctgccaaggaaggccacgtggggctggtgcaggagctgctgggaagagggtcctctgtggattctgccactaa

SEQ ID NO: 393380 - DNA, 120 bp, Artificial Sequence
  ENSG00000145362_3 (sequence is synthesized)
gaagggaaataccgctcttcacattgcatctttggctggacaagcagaagttgtcaaagttcttgttaaggaaggagccaatattaatgcacagtctcagaatggctttactcctttata

SEQ ID NO: 393381 - DNA, 120 bp, Artificial Sequence
  ENSG00000145362_4 (sequence is synthesized)
catggctgcccaagagaatcacattgatgttgtaaaatatttgctggaaaatggagctaatcagagcactgctacagaggatggctttactcctctagctgtggcactccagcaaggaca

SEQ ID NO: 393382 - DNA, 120 bp, Artificial Sequence
  ENSG00000145362_5 (sequence is synthesized)
caaccaggcggtggccatcctcttggagaatgacaccaaagggaaagtgaggctgccagctctgcatattgccgctaggaaagacgacaccaaatctgccgcacttctgcttcagaatga

SEQ ID NO: 393383 - DNA, 120 bp, Artificial Sequence
  ENSG00000145362_6 (sequence is synthesized)
ccacaatgctgacgtacaatccaagatgatggtgaataggacaactgagagtggttttacccctttgcacatagctgcacattacggaaatgtcaacgtggcaactcttcttctaaaccg

SEQ ID NO: 393384 - DNA, 120 bp, Artificial Sequence
  ENSG00000145362_7 (sequence is synthesized)
gggagctgctgtggacttcacagccaggaatggaatcactcctctgcatgtggcttccaaaagaggaaatacaaacatggtgaagctcttactggatcgaggcggtcagatcgatgccaa

SEQ ID NO: 393385 - DNA, 120 bp, Artificial Sequence
  ENSG00000145362_8 (sequence is synthesized)
aactagggatgggttgacaccacttcactgtgctgcacgaagtgggcatgaccaagtggtggaacttctgttggaacggggtgcccccttgctggcaaggactaagaatgggctgtctcc
